United States Patent Application Publication US 2005/0255487 A1 - sequence listing, part 35

SEQ ID NO: 952372 - RNA, 19 nt, Homo sapiens
  misc_RNA (1)...(19): siRNA sense strand
caucaaagaaauccuuauc

SEQ ID NO: 952373 - RNA, 19 nt, Homo sapiens
  misc_RNA (1)...(19): siRNA sense strand
gaauaacuacaggcuucua

SEQ ID NO: 952374 - RNA, 19 nt, Homo sapiens
  misc_RNA (1)...(19): siRNA sense strand
cuacaaggccauccagcaa

SEQ ID NO: 952375 - RNA, 19 nt, Homo sapiens
  misc_RNA (1)...(19): siRNA sense strand
cauguuaguaggagauaaa

SEQ ID NO: 952376 - RNA, 19 nt, Homo sapiens
  misc_RNA (1)...(19): siRNA sense strand
ccacaucaaagaaauccuu

SEQ ID NO: 952377 - RNA, 19 nt, Homo sapiens
  misc_RNA (1)...(19): siRNA sense strand
gguguaagaauaugcuguu

SEQ ID NO: 952378 - RNA, 19 nt, Homo sapiens
  misc_RNA (1)...(19): siRNA sense strand
gaucuugaaguagacauga

SEQ ID NO: 952379 - RNA, 19 nt, Homo sapiens
  misc_RNA (1)...(19): siRNA sense strand
gacugccaaugaagaagaa

SEQ ID NO: 952380 - RNA, 19 nt, Homo sapiens
  misc_RNA (1)...(19): siRNA sense strand
gcacagaagauucaaaagu

SEQ ID NO: 952381 - RNA, 19 nt, Homo sapiens
  misc_RNA (1)...(19): siRNA sense strand
caacuucugucgggaucug

SEQ ID NO: 952382 - RNA, 19 nt, Homo sapiens
  misc_RNA (1)...(19): siRNA sense strand
gcauucgugugggcaagaa

SEQ ID NO: 952383 - RNA, 19 nt, Homo sapiens
  misc_RNA (1)...(19): siRNA sense strand
uuucuaagcuuggacauac

SEQ ID NO: 952384 - RNA, 19 nt, Homo sapiens
  misc_RNA (1)...(19): siRNA sense strand
agugugagaugaaucagau

SEQ ID NO: 952385 - RNA, 19 nt, Homo sapiens
  misc_RNA (1)...(19): siRNA sense strand
ugaagugugagaugaauca

SEQ ID NO: 952386 - RNA, 19 nt, Homo sapiens
  misc_RNA (1)...(19): siRNA sense strand
guuaguaggagauaaacug

SEQ ID NO: 952387 - RNA, 19 nt, Homo sapiens
  misc_RNA (1)...(19): siRNA sense strand
ucuaagcuguggcaagauc

SEQ ID NO: 952388 - RNA, 19 nt, Homo sapiens
  misc_RNA (1)...(19): siRNA sense strand
uuguauggguugagugaaa

SEQ ID NO: 952389 - RNA, 19 nt, Homo sapiens
  misc_RNA (1)...(19): siRNA sense strand
gagaggagcuugacaaaga

SEQ ID NO: 952390 - RNA, 19 nt, Homo sapiens
  misc_RNA (1)...(19): siRNA sense strand
gaagagacccauacugcua

SEQ ID NO: 952391 - RNA, 19 nt, Homo sapiens
  misc_RNA (1)...(19): siRNA sense strand
ggaaacaggcgaacaagga

SEQ ID NO: 952392 - RNA, 19 nt, Homo sapiens
  misc_RNA (1)...(19): siRNA sense strand
caacuaacguuaaggaaaa

SEQ ID NO: 952393 - RNA, 19 nt, Homo sapiens
  misc_RNA (1)...(19): siRNA sense strand
gaaacaggcgaacaaggaa

SEQ ID NO: 952394 - RNA, 19 nt, Homo sapiens
  misc_RNA (1)...(19): siRNA sense strand
caaauuugagggugacuuu

SEQ ID NO: 952395 - RNA, 19 nt, Homo sapiens
  misc_RNA (1)...(19): siRNA sense strand
gagcuugacaaagaauuua

SEQ ID NO: 952396 - RNA, 19 nt, Homo sapiens
  misc_RNA (1)...(19): siRNA sense strand
gagaacagaagaccucaga

SEQ ID NO: 952397 - RNA, 19 nt, Homo sapiens
  misc_RNA (1)...(19): siRNA sense strand
gcugacaaccugaaugcua

SEQ ID NO: 952398 - RNA, 19 nt, Homo sapiens
  misc_RNA (1)...(19): siRNA sense strand
caagacggccagcgaugua

SEQ ID NO: 952399 - RNA, 19 nt, Homo sapiens
  misc_RNA (1)...(19): siRNA sense strand
cugacaaccugaaugcuaa

SEQ ID NO: 952400 - RNA, 19 nt, Homo sapiens
  misc_RNA (1)...(19): siRNA sense strand
uuucagagcuugacuuguc

SEQ ID NO: 952401 - RNA, 19 nt, Homo sapiens
  misc_RNA (1)...(19): siRNA sense strand
ccaacuaacguuaaggaaa

SEQ ID NO: 952402 - RNA, 19 nt, Homo sapiens
  misc_RNA (1)...(19): siRNA sense strand
ggagcuugacaaagaauuu

SEQ ID NO: 952403 - RNA, 19 nt, Homo sapiens
  misc_RNA (1)...(19): siRNA sense strand
gcaggugaaugacgagaac

SEQ ID NO: 952404 - RNA, 19 nt, Homo sapiens
  misc_RNA (1)...(19): siRNA sense strand
ugacuuugauuucgagagu

SEQ ID NO: 952405 - RNA, 19 nt, Homo sapiens
  misc_RNA (1)...(19): siRNA sense strand
cagaggaggcgaucaggaa

SEQ ID NO: 952406 - RNA, 19 nt, Homo sapiens
  misc_RNA (1)...(19): siRNA sense strand
gggcaaaaccguccaacua

SEQ ID NO: 952407 - RNA, 19 nt, Homo sapiens
  misc_RNA (1)...(19): siRNA sense strand
gagugcaaaugcccaguuc

SEQ ID NO: 952408 - RNA, 19 nt, Homo sapiens
  misc_RNA (1)...(19): siRNA sense strand
gaaugacgagaacagaaga

SEQ ID NO: 952409 - RNA, 19 nt, Homo sapiens
  misc_RNA (1)...(19): siRNA sense strand
gagaggagcugguuuucca

SEQ ID NO: 952410 - RNA, 19 nt, Homo sapiens
  misc_RNA (1)...(19): siRNA sense strand
agaggagcuugacaaagaa

SEQ ID NO: 952411 - RNA, 19 nt, Homo sapiens
  misc_RNA (1)...(19): siRNA sense strand
ggagagaggagcugguuuu

SEQ ID NO: 952412 - RNA, 19 nt, Homo sapiens
  misc_RNA (1)...(19): siRNA sense strand
gcaagacggccagcgaugu

SEQ ID NO: 952413 - RNA, 19 nt, Homo sapiens
  misc_RNA (1)...(19): siRNA sense strand
ucaggaaacaggcgaacaa

SEQ ID NO: 952414 - RNA, 19 nt, Homo sapiens
  misc_RNA (1)...(19): siRNA sense strand
gugcaaaugcccaguucaa

SEQ ID NO: 952415 - RNA, 19 nt, Homo sapiens
  misc_RNA (1)...(19): siRNA sense strand
ccacagggacgcagcucaa

SEQ ID NO: 952416 - RNA, 19 nt, Homo sapiens
  misc_RNA (1)...(19): siRNA sense strand
ggagcaggcugugcagacu

SEQ ID NO: 952417 - RNA, 19 nt, Homo sapiens
  misc_RNA (1)...(19): siRNA sense strand
gagggugacuuugauuucg

SEQ ID NO: 952418 - RNA, 19 nt, Homo sapiens
  misc_RNA (1)...(19): siRNA sense strand
gacccauacugcuacuugu

SEQ ID NO: 952419 - RNA, 19 nt, Homo sapiens
  misc_RNA (1)...(19): siRNA sense strand
ccauacugcuacuuguguu

SEQ ID NO: 952420 - RNA, 19 nt, Homo sapiens
  misc_RNA (1)...(19): siRNA sense strand
ggcaaaaccguccaacuaa

SEQ ID NO: 952421 - RNA, 19 nt, Homo sapiens
  misc_RNA (1)...(19): siRNA sense strand
gugaaugacgagaacagaa

SEQ ID NO: 952422 - RNA, 19 nt, Homo sapiens
  misc_RNA (1)...(19): siRNA sense strand
gucccacauuguccuguuu

SEQ ID NO: 952423 - RNA, 19 nt, Homo sapiens
  misc_RNA (1)...(19): siRNA sense strand
ggucuagagaaguugguaa

SEQ ID NO: 952424 - RNA, 19 nt, Homo sapiens
  misc_RNA (1)...(19): siRNA sense strand
gcaaaaccguccaacuaac

SEQ ID NO: 952425 - RNA, 19 nt, Homo sapiens
  misc_RNA (1)...(19): siRNA sense strand
uaagaagagacccauacug

SEQ ID NO: 952426 - RNA, 19 nt, Homo sapiens
  misc_RNA (1)...(19): siRNA sense strand
ugaaugacgagaacagaag

SEQ ID NO: 952427 - RNA, 19 nt, Homo sapiens
  misc_RNA (1)...(19): siRNA sense strand
ccgagaggagcuugacaaa

SEQ ID NO: 952428 - RNA, 19 nt, Homo sapiens
  misc_RNA (1)...(19): siRNA sense strand
ccacauuguccuguuuaga

SEQ ID NO: 952429 - RNA, 19 nt, Homo sapiens
  misc_RNA (1)...(19): siRNA sense strand
gguccuggaaccuuggaaa

SEQ ID NO: 952430 - RNA, 19 nt, Homo sapiens
  misc_RNA (1)...(19): siRNA sense strand
cacauuguccuguuuagag

SEQ ID NO: 952431 - RNA, 19 nt, Homo sapiens
  misc_RNA (1)...(19): siRNA sense strand
agacccauacugcuacuug

SEQ ID NO: 952432 - RNA, 19 nt, Homo sapiens
  misc_RNA (1)...(19): siRNA sense strand
ugagggugacuuugauuuc

SEQ ID NO: 952433 - RNA, 19 nt, Homo sapiens
  misc_RNA (1)...(19): siRNA sense strand
cuccacagcccguuucaga

SEQ ID NO: 952434 - RNA, 19 nt, Homo sapiens
  misc_RNA (1)...(19): siRNA sense strand
acauuguccuguuuagagu

SEQ ID NO: 952435 - RNA, 19 nt, Homo sapiens
  misc_RNA (1)...(19): siRNA sense strand
aauuugagggugacuuuga

SEQ ID NO: 952436 - RNA, 19 nt, Homo sapiens
  misc_RNA (1)...(19): siRNA sense strand
ggaccuacgucuucaacau

SEQ ID NO: 952437 - RNA, 19 nt, Homo sapiens
  misc_RNA (1)...(19): siRNA sense strand
gaagagaagaagaaagaga

SEQ ID NO: 952438 - RNA, 19 nt, Homo sapiens
  misc_RNA (1)...(19): siRNA sense strand
ucaacaugcuggagaucua

SEQ ID NO: 952439 - RNA, 19 nt, Homo sapiens
  misc_RNA (1)...(19): siRNA sense strand
gcauggaagagaagaagaa

SEQ ID NO: 952440 - RNA, 19 nt, Homo sapiens
  misc_RNA (1)...(19): siRNA sense strand
uggaagagaagaagaaaga

SEQ ID NO: 952441 - RNA, 19 nt, Homo sapiens
  misc_RNA (1)...(19): siRNA sense strand
aggagcagcugaagagaga

SEQ ID NO: 952442 - RNA, 19 nt, Homo sapiens
  misc_RNA (1)...(19): siRNA sense strand
ccaacacgguggacugcuu

SEQ ID NO: 952443 - RNA, 19 nt, Homo sapiens
  misc_RNA (1)...(19): siRNA sense strand
ugaccgugcuguucaucuu

SEQ ID NO: 952444 - RNA, 19 nt, Homo sapiens
  misc_RNA (1)...(19): siRNA sense strand
gcgagaacgucugcuacga

SEQ ID NO: 952445 - RNA, 19 nt, Homo sapiens
  misc_RNA (1)...(19): siRNA sense strand
cggaggacuuggccaucua

SEQ ID NO: 952446 - RNA, 19 nt, Homo sapiens
  misc_RNA (1)...(19): siRNA sense strand
gcugaugacugagcagaac

SEQ ID NO: 952447 - RNA, 19 nt, Homo sapiens
  misc_RNA (1)...(19): siRNA sense strand
guucaucuuccgcaucuug

SEQ ID NO: 952448 - RNA, 19 nt, Homo sapiens
  misc_RNA (1)...(19): siRNA sense strand
gagcagcugaagagagaga

SEQ ID NO: 952449 - RNA, 19 nt, Homo sapiens
  misc_RNA (1)...(19): siRNA sense strand
caccaccaccugcugauga

SEQ ID NO: 952450 - RNA, 19 nt, Homo sapiens
  misc_RNA (1)...(19): siRNA sense strand
gaggaggagcagcugaaga

SEQ ID NO: 952451 - RNA, 19 nt, Homo sapiens
  misc_RNA (1)...(19): siRNA sense strand
gaccuacgucuucaacauc

SEQ ID NO: 952452 - RNA, 19 nt, Homo sapiens
  misc_RNA (1)...(19): siRNA sense strand
gcuggaagaagcucaagca

SEQ ID NO: 952453 - RNA, 19 nt, Homo sapiens
  misc_RNA (1)...(19): siRNA sense strand
gcugcgagaacgucugcua

SEQ ID NO: 952454 - RNA, 19 nt, Homo sapiens
  misc_RNA (1)...(19): siRNA sense strand
gaccaucuucaucaucuuc

SEQ ID NO: 952455 - RNA, 19 nt, Homo sapiens
  misc_RNA (1)...(19): siRNA sense strand
ccacgcccacccucaucua

SEQ ID NO: 952456 - RNA, 19 nt, Homo sapiens
  misc_RNA (1)...(19): siRNA sense strand
ggaugaaacuggcgaagaa

SEQ ID NO: 952457 - RNA, 19 nt, Homo sapiens
  misc_RNA (1)...(19): siRNA sense strand
ggaagcagcuacucaacuu

SEQ ID NO: 952458 - RNA, 19 nt, Homo sapiens
  misc_RNA (1)...(19): siRNA sense strand
gaagcaaacuaugggauuu

SEQ ID NO: 952459 - RNA, 19 nt, Homo sapiens
  misc_RNA (1)...(19): siRNA sense strand
gucaacagcugcucaguuu

SEQ ID NO: 952460 - RNA, 19 nt, Homo sapiens
  misc_RNA (1)...(19): siRNA sense strand
gaaaccacaaccaaaguua

SEQ ID NO: 952461 - RNA, 19 nt, Homo sapiens
  misc_RNA (1)...(19): siRNA sense strand
ggagguucaugcuacguua

SEQ ID NO: 952462 - RNA, 19 nt, Homo sapiens
  misc_RNA (1)...(19): siRNA sense strand
ggacuucauuccaaauaug

SEQ ID NO: 952463 - RNA, 19 nt, Homo sapiens
  misc_RNA (1)...(19): siRNA sense strand
gagaugcugugccagauga

SEQ ID NO: 952464 - RNA, 19 nt, Homo sapiens
  misc_RNA (1)...(19): siRNA sense strand
gcaacaguaucuacaggaa

SEQ ID NO: 952465 - RNA, 19 nt, Homo sapiens
  misc_RNA (1)...(19): siRNA sense strand
ggauguagcuguuuuaguu

SEQ ID NO: 952466 - RNA, 19 nt, Homo sapiens
  misc_RNA (1)...(19): siRNA sense strand
cauaaggacuucauuccaa

SEQ ID NO: 952467 - RNA, 19 nt, Homo sapiens
  misc_RNA (1)...(19): siRNA sense strand
aauagaagcugguuauauc

SEQ ID NO: 952468 - RNA, 19 nt, Homo sapiens
  misc_RNA (1)...(19): siRNA sense strand
uacaauagcugcugguguu

SEQ ID NO: 952469 - RNA, 19 nt, Homo sapiens
  misc_RNA (1)...(19): siRNA sense strand
gcccgaauccucaucuuua

SEQ ID NO: 952470 - RNA, 19 nt, Homo sapiens
  misc_RNA (1)...(19): siRNA sense strand
ugacaaaccuuccguugag

SEQ ID NO: 952471 - RNA, 19 nt, Homo sapiens
  misc_RNA (1)...(19): siRNA sense strand
cgaauccucaucuuuaaua

SEQ ID NO: 952472 - RNA, 19 nt, Homo sapiens
  misc_RNA (1)...(19): siRNA sense strand
aaacuugggcacuuucuua

SEQ ID NO: 952473 - RNA, 19 nt, Homo sapiens
  misc_RNA (1)...(19): siRNA sense strand
cgaagugaaucugaaauug

SEQ ID NO: 952474 - RNA, 19 nt, Homo sapiens
  misc_RNA (1)...(19): siRNA sense strand
ugugccagaugaaauauua

SEQ ID NO: 952475 - RNA, 19 nt, Homo sapiens
  misc_RNA (1)...(19): siRNA sense strand
ggaaagaagcaaacuaugg

SEQ ID NO: 952476 - RNA, 19 nt, Homo sapiens
  misc_RNA (1)...(19): siRNA sense strand
ugaucaagcucgucuuuau

SEQ ID NO: 952477 - RNA, 19 nt, Homo sapiens
  misc_RNA (1)...(19): siRNA sense strand
ccagcgaucuauugacaaa

SEQ ID NO: 952478 - RNA, 19 nt, Homo sapiens
  misc_RNA (1)...(19): siRNA sense strand
caagauagagugcagaguu

SEQ ID NO: 952479 - RNA, 19 nt, Homo sapiens
  misc_RNA (1)...(19): siRNA sense strand
caacagcugcucaguuuau

SEQ ID NO: 952480 - RNA, 19 nt, Homo sapiens
  misc_RNA (1)...(19): siRNA sense strand
uuacggugguucuacaaua

SEQ ID NO: 952481 - RNA, 19 nt, Homo sapiens
  misc_RNA (1)...(19): siRNA sense strand
gaagcugguuauauccaaa

SEQ ID NO: 952482 - RNA, 19 nt, Homo sapiens
  misc_RNA (1)...(19): siRNA sense strand
caagaucucagucaaguga

SEQ ID NO: 952483 - RNA, 19 nt, Homo sapiens
  misc_RNA (1)...(19): siRNA sense strand
gaagugaaucugaaauugu

SEQ ID NO: 952484 - RNA, 19 nt, Homo sapiens
  misc_RNA (1)...(19): siRNA sense strand
cagcugcucaguuuauuua

SEQ ID NO: 952485 - RNA, 19 nt, Homo sapiens
  misc_RNA (1)...(19): siRNA sense strand
ggacaagaaugaggcaaca

SEQ ID NO: 952486 - RNA, 19 nt, Homo sapiens
  misc_RNA (1)...(19): siRNA sense strand
gcagcaggcgaucauguua

SEQ ID NO: 952487 - RNA, 19 nt, Homo sapiens
  misc_RNA (1)...(19): siRNA sense strand
gcaugggucuuggaugaaa

SEQ ID NO: 952488 - RNA, 19 nt, Homo sapiens
  misc_RNA (1)...(19): siRNA sense strand
ugaagugccuggaguaucu

SEQ ID NO: 952489 - RNA, 19 nt, Homo sapiens
  misc_RNA (1)...(19): siRNA sense strand
aaucugaaauugugccaaa

SEQ ID NO: 952490 - RNA, 19 nt, Homo sapiens
  misc_RNA (1)...(19): siRNA sense strand
gcaaugccuccuaaugaaa

SEQ ID NO: 952491 - RNA, 19 nt, Homo sapiens
  misc_RNA (1)...(19): siRNA sense strand
gaucaagcucgucuuuauu

SEQ ID NO: 952492 - RNA, 19 nt, Homo sapiens
  misc_RNA (1)...(19): siRNA sense strand
ccaaacuggugaccgacua

SEQ ID NO: 952493 - RNA, 19 nt, Homo sapiens
  misc_RNA (1)...(19): siRNA sense strand
aagauagagugcagaguuu

SEQ ID NO: 952494 - RNA, 19 nt, Homo sapiens
  misc_RNA (1)...(19): siRNA sense strand
gaagaacaaguuugaugug

SEQ ID NO: 952495 - RNA, 19 nt, Homo sapiens
  misc_RNA (1)...(19): siRNA sense strand
gauuauguguguccgaugu

SEQ ID NO: 952496 - RNA, 19 nt, Homo sapiens
  misc_RNA (1)...(19): siRNA sense strand
ggacuauguuuauuagaac

SEQ ID NO: 952497 - RNA, 19 nt, Homo sapiens
  misc_RNA (1)...(19): siRNA sense strand
gaagcagcuacucaacuua

SEQ ID NO: 952498 - RNA, 19 nt, Homo sapiens
  misc_RNA (1)...(19): siRNA sense strand
ggucauuggucauguugau

SEQ ID NO: 952499 - RNA, 19 nt, Homo sapiens
  misc_RNA (1)...(19): siRNA sense strand
gcugcucaguuuauuuauu

SEQ ID NO: 952500 - RNA, 19 nt, Homo sapiens
  misc_RNA (1)...(19): siRNA sense strand
caauguuggcugcauauuu

SEQ ID NO: 952501 - RNA, 19 nt, Homo sapiens
  misc_RNA (1)...(19): siRNA sense strand
ggaguaaccauggauguug

SEQ ID NO: 952502 - RNA, 19 nt, Homo sapiens
  misc_RNA (1)...(19): siRNA sense strand
caagaaugaggcaacagua

SEQ ID NO: 952503 - RNA, 19 nt, Homo sapiens
  misc_RNA (1)...(19): siRNA sense strand
gguauaaaggacuauguuu

SEQ ID NO: 952504 - RNA, 19 nt, Homo sapiens
  misc_RNA (1)...(19): siRNA sense strand
aaauggaucagguuaauug

SEQ ID NO: 952505 - RNA, 19 nt, Homo sapiens
  misc_RNA (1)...(19): siRNA sense strand
gcgaagugaaucugaaauu

SEQ ID NO: 952506 - RNA, 19 nt, Homo sapiens
  misc_RNA (1)...(19): siRNA sense strand
gacuguaucuggaaagaag

SEQ ID NO: 952507 - RNA, 19 nt, Homo sapiens
  misc_RNA (1)...(19): siRNA sense strand
gaaauuccuaucacuaaag

SEQ ID NO: 952508 - RNA, 19 nt, Homo sapiens
  misc_RNA (1)...(19): siRNA sense strand
caaauugauuccuuuaagc

SEQ ID NO: 952509 - RNA, 19 nt, Homo sapiens
  misc_RNA (1)...(19): siRNA sense strand
ggagagugauguagguuuu

SEQ ID NO: 952510 - RNA, 19 nt, Homo sapiens
  misc_RNA (1)...(19): siRNA sense strand
uucaagagauuacuggaaa

SEQ ID NO: 952511 - RNA, 19 nt, Homo sapiens
  misc_RNA (1)...(19): siRNA sense strand
ugagacugcuucuaaaucu

SEQ ID NO: 952512 - RNA, 19 nt, Homo sapiens
  misc_RNA (1)...(19): siRNA sense strand
aaucaauguuggcugcaua

SEQ ID NO: 952513 - RNA, 19 nt, Homo sapiens
  misc_RNA (1)...(19): siRNA sense strand
augaagaucugaaagaauc

SEQ ID NO: 952514 - RNA, 19 nt, Homo sapiens
  misc_RNA (1)...(19): siRNA sense strand
uguagaggaugauuauugu

SEQ ID NO: 952515 - RNA, 19 nt, Homo sapiens
  misc_RNA (1)...(19): siRNA sense strand
ggccauaugcuuuaucuuc

SEQ ID NO: 952516 - RNA, 19 nt, Homo sapiens
  misc_RNA (1)...(19): siRNA sense strand
ccacacgauucaagcauca

SEQ ID NO: 952517 - RNA, 19 nt, Homo sapiens
  misc_RNA (1)...(19): siRNA sense strand
cacaagaucucagucaagu

SEQ ID NO: 952518 - RNA, 19 nt, Homo sapiens
  misc_RNA (1)...(19): siRNA sense strand
gaaauugugccaaaaguug

SEQ ID NO: 952519 - RNA, 19 nt, Homo sapiens
  misc_RNA (1)...(19): siRNA sense strand
cccgaauccucaucuuuaa

SEQ ID NO: 952520 - RNA, 19 nt, Homo sapiens
  misc_RNA (1)...(19): siRNA sense strand
caaaguacccauuaaagcu

SEQ ID NO: 952521 - RNA, 19 nt, Homo sapiens
  misc_RNA (1)...(19): siRNA sense strand
auaaggacuucauuccaaa

SEQ ID NO: 952522 - RNA, 19 nt, Homo sapiens
  misc_RNA (1)...(19): siRNA sense strand
gccaaaaguugcuaaaaug

SEQ ID NO: 952523 - RNA, 19 nt, Homo sapiens
  misc_RNA (1)...(19): siRNA sense strand
gauagagugcagaguuuga

SEQ ID NO: 952524 - RNA, 19 nt, Homo sapiens
  misc_RNA (1)...(19): siRNA sense strand
ggaucuggauuuugcauaa

SEQ ID NO: 952525 - RNA, 19 nt, Homo sapiens
  misc_RNA (1)...(19): siRNA sense strand
cugcucaguuuauuuauuc

SEQ ID NO: 952526 - RNA, 19 nt, Homo sapiens
  misc_RNA (1)...(19): siRNA sense strand
uaaggagagugauguaggu

SEQ ID NO: 952527 - RNA, 19 nt, Homo sapiens
  misc_RNA (1)...(19): siRNA sense strand
ggaauguucgaggcuauaa

SEQ ID NO: 952528 - RNA, 19 nt, Homo sapiens
  misc_RNA (1)...(19): siRNA sense strand
aagcucgucuuuauucaug

SEQ ID NO: 952529 - RNA, 19 nt, Homo sapiens
  misc_RNA (1)...(19): siRNA sense strand
gaucauguuagucuuacuu

SEQ ID NO: 952530 - RNA, 19 nt, Homo sapiens
  misc_RNA (1)...(19): siRNA sense strand
guuugaagcuggauuugag

SEQ ID NO: 952531 - RNA, 19 nt, Homo sapiens
  misc_RNA (1)...(19): siRNA sense strand
gaaugaggcaacaguaucu

SEQ ID NO: 952532 - RNA, 19 nt, Homo sapiens
  misc_RNA (1)...(19): siRNA sense strand
caacaguaucuacaggaaa

SEQ ID NO: 952533 - RNA, 19 nt, Homo sapiens
  misc_RNA (1)...(19): siRNA sense strand
cuaaaggccagaaugcauu

SEQ ID NO: 952534 - RNA, 19 nt, Homo sapiens
  misc_RNA (1)...(19): siRNA sense strand
acgauugauuagugucuua

SEQ ID NO: 952535 - RNA, 19 nt, Homo sapiens
  misc_RNA (1)...(19): siRNA sense strand
augcaugggucuuggauga

SEQ ID NO: 952536 - RNA, 19 nt, Homo sapiens
  misc_RNA (1)...(19): siRNA sense strand
gagggaagcagcuacucaa

SEQ ID NO: 952537 - RNA, 19 nt, Homo sapiens
  misc_RNA (1)...(19): siRNA sense strand
ggaaagauagcaaaaggaa

SEQ ID NO: 952538 - RNA, 19 nt, Homo sapiens
  misc_RNA (1)...(19): siRNA sense strand
aagugaaucugaaauugug

SEQ ID NO: 952539 - RNA, 19 nt, Homo sapiens
  misc_RNA (1)...(19): siRNA sense strand
ugaaacuuguaccgugaaa

SEQ ID NO: 952540 - RNA, 19 nt, Homo sapiens
  misc_RNA (1)...(19): siRNA sense strand
gccagucuguagaggauga

SEQ ID NO: 952541 - RNA, 19 nt, Homo sapiens
  misc_RNA (1)...(19): siRNA sense strand
aguaugaacaggagucuaa

SEQ ID NO: 952542 - RNA, 19 nt, Homo sapiens
  misc_RNA (1)...(19): siRNA sense strand
ugcuuuaucuucuggguaa

SEQ ID NO: 952543 - RNA, 19 nt, Homo sapiens
  misc_RNA (1)...(19): siRNA sense strand
gccauaugcuuuaucuucu

SEQ ID NO: 952544 - RNA, 19 nt, Homo sapiens
  misc_RNA (1)...(19): siRNA sense strand
gaagaaaauggucauaguu

SEQ ID NO: 952545 - RNA, 19 nt, Homo sapiens
  misc_RNA (1)...(19): siRNA sense strand
ugaagaacaaguuugaugu

SEQ ID NO: 952546 - RNA, 19 nt, Homo sapiens
  misc_RNA (1)...(19): siRNA sense strand
ucacugagauaaaagaaug

SEQ ID NO: 952547 - RNA, 19 nt, Homo sapiens
  misc_RNA (1)...(19): siRNA sense strand
gaaaggaaucacucugcau

SEQ ID NO: 952548 - RNA, 19 nt, Homo sapiens
  misc_RNA (1)...(19): siRNA sense strand
gaucuauugacaaaccuuu

SEQ ID NO: 952549 - RNA, 19 nt, Homo sapiens
  misc_RNA (1)...(19): siRNA sense strand
caaaagaacuaugcauaag

SEQ ID NO: 952550 - RNA, 19 nt, Homo sapiens
  misc_RNA (1)...(19): siRNA sense strand
ggagggaagcagcuacuca

SEQ ID NO: 952551 - RNA, 19 nt, Homo sapiens
  misc_RNA (1)...(19): siRNA sense strand
gcaaggagggaagcagcua

SEQ ID NO: 952552 - RNA, 19 nt, Homo sapiens
  misc_RNA (1)...(19): siRNA sense strand
gaggcuauaacuacgauga

SEQ ID NO: 952553 - RNA, 19 nt, Homo sapiens
  misc_RNA (1)...(19): siRNA sense strand
aauguuggcugcauauuuu

SEQ ID NO: 952554 - RNA, 19 nt, Homo sapiens
  misc_RNA (1)...(19): siRNA sense strand
caucagaagagcagaguuc

SEQ ID NO: 952555 - RNA, 19 nt, Homo sapiens
  misc_RNA (1)...(19): siRNA sense strand
gugacaaaccuuccguuga

SEQ ID NO: 952556 - RNA, 19 nt, Homo sapiens
  misc_RNA (1)...(19): siRNA sense strand
ggaaugaggagaagaauua

SEQ ID NO: 952557 - RNA, 19 nt, Homo sapiens
  misc_RNA (1)...(19): siRNA sense strand
ggagaagaauuauuggaua

SEQ ID NO: 952558 - RNA, 19 nt, Homo sapiens
  misc_RNA (1)...(19): siRNA sense strand
gaagagauauauagugguu

SEQ ID NO: 952559 - RNA, 19 nt, Homo sapiens
  misc_RNA (1)...(19): siRNA sense strand
gaacuuagaguaucacuug

SEQ ID NO: 952560 - RNA, 19 nt, Homo sapiens
  misc_RNA (1)...(19): siRNA sense strand
cgcagaagcuuaugaagua

SEQ ID NO: 952561 - RNA, 19 nt, Homo sapiens
  misc_RNA (1)...(19): siRNA sense strand
gaugaaacaccaaauagua

SEQ ID NO: 952562 - RNA, 19 nt, Homo sapiens
  misc_RNA (1)...(19): siRNA sense strand
ggagaugaaacaccaaaua

SEQ ID NO: 952563 - RNA, 19 nt, Homo sapiens
  misc_RNA (1)...(19): siRNA sense strand
ccaaagaaguacuuaggaa

SEQ ID NO: 952564 - RNA, 19 nt, Homo sapiens
  misc_RNA (1)...(19): siRNA sense strand
ggaaauagauggugauccu

SEQ ID NO: 952565 - RNA, 19 nt, Homo sapiens
  misc_RNA (1)...(19): siRNA sense strand
uuacagaucugaggacaaa

SEQ ID NO: 952566 - RNA, 19 nt, Homo sapiens
  misc_RNA (1)...(19): siRNA sense strand
gagguguccuucccagaua

SEQ ID NO: 952567 - RNA, 19 nt, Homo sapiens
  misc_RNA (1)...(19): siRNA sense strand
ccaaacggaugaagauuuc

SEQ ID NO: 952568 - RNA, 19 nt, Homo sapiens
  misc_RNA (1)...(19): siRNA sense strand
agggauggaucaaauauaa

SEQ ID NO: 952569 - RNA, 19 nt, Homo sapiens
  misc_RNA (1)...(19): siRNA sense strand
gaagaaauggaaauagaug

SEQ ID NO: 952570 - RNA, 19 nt, Homo sapiens
  misc_RNA (1)...(19): siRNA sense strand
ggacaaaauucuuaccauu

SEQ ID NO: 952571 - RNA, 19 nt, Homo sapiens
  misc_RNA (1)...(19): siRNA sense strand
gaagaauuauuggauaugg

SEQ ID NO: 952572 - RNA, 19 nt, Homo sapiens
  misc_RNA (1)...(19): siRNA sense strand
gaguaucacuugaagagau

SEQ ID NO: 952573 - RNA, 19 nt, Homo sapiens
  misc_RNA (1)...(19): siRNA sense strand
ggaaggaguuacagaucug

SEQ ID NO: 952574 - RNA, 19 nt, Homo sapiens
  misc_RNA (1)...(19): siRNA sense strand
gaaagaaggcaccaaaauu

SEQ ID NO: 952575 - RNA, 19 nt, Homo sapiens
  misc_RNA (1)...(19): siRNA sense strand
gaaaacaagcccucaaauu

SEQ ID NO: 952576 - RNA, 19 nt, Homo sapiens
  misc_RNA (1)...(19): siRNA sense strand
caaagaaguacuuaggaaa

SEQ ID NO: 952577 - RNA, 19 nt, Homo sapiens
  misc_RNA (1)...(19): siRNA sense strand
agacaaagaucauccaaaa

SEQ ID NO: 952578 - RNA, 19 nt, Homo sapiens
  misc_RNA (1)...(19): siRNA sense strand
aaacaagcccucaaauuuc

SEQ ID NO: 952579 - RNA, 19 nt, Homo sapiens
  misc_RNA (1)...(19): siRNA sense strand
uuguguggcugcucaauua

SEQ ID NO: 952580 - RNA, 19 nt, Homo sapiens
  misc_RNA (1)...(19): siRNA sense strand
cugaagaaauggaaauaga

SEQ ID NO: 952581 - RNA, 19 nt, Homo sapiens
  misc_RNA (1)...(19): siRNA sense strand
gggaaagacuauuauugca

SEQ ID NO: 952582 - RNA, 19 nt, Homo sapiens
  misc_RNA (1)...(19): siRNA sense strand
aaagaaggcaccaaaauua

SEQ ID NO: 952583 - RNA, 19 nt, Homo sapiens
  misc_RNA (1)...(19): siRNA sense strand
gagaaaggagcuucagaug

SEQ ID NO: 952584 - RNA, 19 nt, Homo sapiens
  misc_RNA (1)...(19): siRNA sense strand
gagaugaaacaccaaauag

SEQ ID NO: 952585 - RNA, 19 nt, Homo sapiens
  misc_RNA (1)...(19): siRNA sense strand
aaaacaagcccucaaauuu

SEQ ID NO: 952586 - RNA, 19 nt, Homo sapiens
  misc_RNA (1)...(19): siRNA sense strand
uaaaagggauggaucaaau

SEQ ID NO: 952587 - RNA, 19 nt, Homo sapiens
  misc_RNA (1)...(19): siRNA sense strand
gcagaagcuuaugaaguau

SEQ ID NO: 952588 - RNA, 19 nt, Homo sapiens
  misc_RNA (1)...(19): siRNA sense strand
guacuuaggaaacaucuuc

SEQ ID NO: 952589 - RNA, 19 nt, Homo sapiens
  misc_RNA (1)...(19): siRNA sense strand
aacaagcccucaaauuuca

SEQ ID NO: 952590 - RNA, 19 nt, Homo sapiens
  misc_RNA (1)...(19): siRNA sense strand
cuuaugaaguauugaguga

SEQ ID NO: 952591 - RNA, 19 nt, Homo sapiens
  misc_RNA (1)...(19): siRNA sense strand
gucaguaaaugauauugug

SEQ ID NO: 952592 - RNA, 19 nt, Homo sapiens
  misc_RNA (1)...(19): siRNA sense strand
gauggaagaaacauaccua

SEQ ID NO: 952593 - RNA, 19 nt, Homo sapiens
  misc_RNA (1)...(19): siRNA sense strand
ggaaagacuauuauugcau

SEQ ID NO: 952594 - RNA, 19 nt, Homo sapiens
  misc_RNA (1)...(19): siRNA sense strand
agaagcuuaugaaguauug

SEQ ID NO: 952595 - RNA, 19 nt, Homo sapiens
  misc_RNA (1)...(19): siRNA sense strand
agaaaggagcuucagauga

SEQ ID NO: 952596 - RNA, 19 nt, Homo sapiens
  misc_RNA (1)...(19): siRNA sense strand
ccaacguggugaccuucua

SEQ ID NO: 952597 - RNA, 19 nt, Homo sapiens
  misc_RNA (1)...(19): siRNA sense strand
guaccaaacggaugaagau

SEQ ID NO: 952598 - RNA, 19 nt, Homo sapiens
  misc_RNA (1)...(19): siRNA sense strand
agagauauauagugguugu

SEQ ID NO: 952599 - RNA, 19 nt, Homo sapiens
  misc_RNA (1)...(19): siRNA sense strand
uaugaaguauugagugauc

SEQ ID NO: 952600 - RNA, 19 nt, Homo sapiens
  misc_RNA (1)...(19): siRNA sense strand
caacguggugaccuucuaa

SEQ ID NO: 952601 - RNA, 19 nt, Homo sapiens
  misc_RNA (1)...(19): siRNA sense strand
aaauagauggugauccuuu

SEQ ID NO: 952602 - RNA, 19 nt, Homo sapiens
  misc_RNA (1)...(19): siRNA sense strand
ggaggaaggguugaaagga

SEQ ID NO: 952603 - RNA, 19 nt, Homo sapiens
  misc_RNA (1)...(19): siRNA sense strand
gauggaaggaguuacagau

SEQ ID NO: 952604 - RNA, 19 nt, Homo sapiens
  misc_RNA (1)...(19): siRNA sense strand
ggaaagaaggcaccaaaau

SEQ ID NO: 952605 - RNA, 19 nt, Homo sapiens
  misc_RNA (1)...(19): siRNA sense strand
ucaugaacuuagaguauca

SEQ ID NO: 952606 - RNA, 19 nt, Homo sapiens
  misc_RNA (1)...(19): siRNA sense strand
caauuaauguaccaacacu

SEQ ID NO: 952607 - RNA, 19 nt, Homo sapiens
  misc_RNA (1)...(19): siRNA sense strand
caucccgccucaaacaaga

SEQ ID NO: 952608 - RNA, 19 nt, Homo sapiens
  misc_RNA (1)...(19): siRNA sense strand
aguauugagugauccuaaa

SEQ ID NO: 952609 - RNA, 19 nt, Homo sapiens
  misc_RNA (1)...(19): siRNA sense strand
aaagggauggaucaaauau

SEQ ID NO: 952610 - RNA, 19 nt, Homo sapiens
  misc_RNA (1)...(19): siRNA sense strand
ggucgcagaagcuuaugaa

SEQ ID NO: 952611 - RNA, 19 nt, Homo sapiens
  misc_RNA (1)...(19): siRNA sense strand
guggaaagaaggcaccaaa

SEQ ID NO: 952612 - RNA, 19 nt, Homo sapiens
  misc_RNA (1)...(19): siRNA sense strand
acgaauggguggugguaga

SEQ ID NO: 952613 - RNA, 19 nt, Homo sapiens
  misc_RNA (1)...(19): siRNA sense strand
gaaguacuuaggaaacauc

SEQ ID NO: 952614 - RNA, 19 nt, Homo sapiens
  misc_RNA (1)...(19): siRNA sense strand
aagaaguacuuaggaaaca

SEQ ID NO: 952615 - RNA, 19 nt, Homo sapiens
  misc_RNA (1)...(19): siRNA sense strand
gaggagaagaauuauugga

SEQ ID NO: 952616 - RNA, 19 nt, Homo sapiens
  misc_RNA (1)...(19): siRNA sense strand
auaccuaugucaguaaaug

SEQ ID NO: 952617 - RNA, 19 nt, Homo sapiens
  misc_RNA (1)...(19): siRNA sense strand
ugagaaaggagcuucagau

SEQ ID NO: 952618 - RNA, 19 nt, Homo sapiens
  misc_RNA (1)...(19): siRNA sense strand
gccuuugguuucagcauga

SEQ ID NO: 952619 - RNA, 19 nt, Homo sapiens
  misc_RNA (1)...(19): siRNA sense strand
gcgauccucaugcuacauu

SEQ ID NO: 952620 - RNA, 19 nt, Homo sapiens
  misc_RNA (1)...(19): siRNA sense strand
gaaggaguuacagaucuga

SEQ ID NO: 952621 - RNA, 19 nt, Homo sapiens
  misc_RNA (1)...(19): siRNA sense strand
caaauuucauccggacaag

SEQ ID NO: 952622 - RNA, 19 nt, Homo sapiens
  misc_RNA (1)...(19): siRNA sense strand
uggaaggaguuacagaucu

SEQ ID NO: 952623 - RNA, 19 nt, Homo sapiens
  misc_RNA (1)...(19): siRNA sense strand
gaaugaggagaagaauuau

SEQ ID NO: 952624 - RNA, 19 nt, Homo sapiens
  misc_RNA (1)...(19): siRNA sense strand
uguggcugcucaauuaaug

SEQ ID NO: 952625 - RNA, 19 nt, Homo sapiens
  misc_RNA (1)...(19): siRNA sense strand
ggagcaggagguacugaug

SEQ ID NO: 952626 - RNA, 19 nt, Homo sapiens
  misc_RNA (1)...(19): siRNA sense strand
gaaauagauggugauccuu

SEQ ID NO: 952627 - RNA, 19 nt, Homo sapiens
  misc_RNA (1)...(19): siRNA sense strand
ucaaauuucauccggacaa

SEQ ID NO: 952628 - RNA, 19 nt, Homo sapiens
  misc_RNA (1)...(19): siRNA sense strand
guccuucccagauacuaua

SEQ ID NO: 952629 - RNA, 19 nt, Homo sapiens
  misc_RNA (1)...(19): siRNA sense strand
guaccaacacuggauggaa

SEQ ID NO: 952630 - RNA, 19 nt, Homo sapiens
  misc_RNA (1)...(19): siRNA sense strand
aagagaaggagaugaaaca

SEQ ID NO: 952631 - RNA, 19 nt, Homo sapiens
  misc_RNA (1)...(19): siRNA sense strand
uagaguaucacuugaagag

SEQ ID NO: 952632 - RNA, 19 nt, Homo sapiens
  misc_RNA (1)...(19): siRNA sense strand
gaaguauugagugauccua

SEQ ID NO: 952633 - RNA, 19 nt, Homo sapiens
  misc_RNA (1)...(19): siRNA sense strand
augaggagaagaauuauug

SEQ ID NO: 952634 - RNA, 19 nt, Homo sapiens
  misc_RNA (1)...(19): siRNA sense strand
caacacuggauggaagaaa

SEQ ID NO: 952635 - RNA, 19 nt, Homo sapiens
  misc_RNA (1)...(19): siRNA sense strand
gacaaaauucuuaccauug

SEQ ID NO: 952636 - RNA, 19 nt, Homo sapiens
  misc_RNA (1)...(19): siRNA sense strand
gguuguaccaaacggauga

SEQ ID NO: 952637 - RNA, 19 nt, Homo sapiens
  misc_RNA (1)...(19): siRNA sense strand
ccaagagacaggaauucug

SEQ ID NO: 952638 - RNA, 19 nt, Homo sapiens
  misc_RNA (1)...(19): siRNA sense strand
cagaagcuuaugaaguauu

SEQ ID NO: 952639 - RNA, 19 nt, Homo sapiens
  misc_RNA (1)...(19): siRNA sense strand
cguggugaccuucuaauag

SEQ ID NO: 952640 - RNA, 19 nt, Homo sapiens
  misc_RNA (1)...(19): siRNA sense strand
ccuaugucaguaaaugaua

SEQ ID NO: 952641 - RNA, 19 nt, Homo sapiens
  misc_RNA (1)...(19): siRNA sense strand
ccaagagaaggagaugaaa

SEQ ID NO: 952642 - RNA, 19 nt, Homo sapiens
  misc_RNA (1)...(19): siRNA sense strand
gcugauggaaggaguuaca

SEQ ID NO: 952643 - RNA, 19 nt, Homo sapiens
  misc_RNA (1)...(19): siRNA sense strand
gauccucaugcuacauuug

SEQ ID NO: 952644 - RNA, 19 nt, Homo sapiens
  misc_RNA (1)...(19): siRNA sense strand
aaagaaguacuuaggaaac

SEQ ID NO: 952645 - RNA, 19 nt, Homo sapiens
  misc_RNA (1)...(19): siRNA sense strand
cggaugaagauuucucgaa

SEQ ID NO: 952646 - RNA, 19 nt, Homo sapiens
  misc_RNA (1)...(19): siRNA sense strand
ggccaucccgccucaaaca

SEQ ID NO: 952647 - RNA, 19 nt, Homo sapiens
  misc_RNA (1)...(19): siRNA sense strand
uauccaagagacaggaauu

SEQ ID NO: 952648 - RNA, 19 nt, Homo sapiens
  misc_RNA (1)...(19): siRNA sense strand
agaggucgcagaagcuuau

SEQ ID NO: 952649 - RNA, 19 nt, Homo sapiens
  misc_RNA (1)...(19): siRNA sense strand
caagagaaggagaugaaac

SEQ ID NO: 952650 - RNA, 19 nt, Homo sapiens
  misc_RNA (1)...(19): siRNA sense strand
uccaagagaaggagaugaa

SEQ ID NO: 952651 - RNA, 19 nt, Homo sapiens
  misc_RNA (1)...(19): siRNA sense strand
ucgcagaagcuuaugaagu

SEQ ID NO: 952652 - RNA, 19 nt, Homo sapiens
  misc_RNA (1)...(19): siRNA sense strand
accaaacggaugaagauuu

SEQ ID NO: 952653 - RNA, 19 nt, Homo sapiens
  misc_RNA (1)...(19): siRNA sense strand
cuuagaguaucacuugaag

SEQ ID NO: 952654 - RNA, 19 nt, Homo sapiens
  misc_RNA (1)...(19): siRNA sense strand
cgauccucaugcuacauuu

SEQ ID NO: 952655 - RNA, 19 nt, Homo sapiens
  misc_RNA (1)...(19): siRNA sense strand
gaaggagaugaaacaccaa

SEQ ID NO: 952656 - RNA, 19 nt, Homo sapiens
  misc_RNA (1)...(19): siRNA sense strand
ggacaggacuucaaucaga

SEQ ID NO: 952657 - RNA, 19 nt, Homo sapiens
  misc_RNA (1)...(19): siRNA sense strand
ggacguggccuuucugaua

SEQ ID NO: 952658 - RNA, 19 nt, Homo sapiens
  misc_RNA (1)...(19): siRNA sense strand
ccacaaggcugacgucuuc

SEQ ID NO: 952659 - RNA, 19 nt, Homo sapiens
  misc_RNA (1)...(19): siRNA sense strand
gaaagaaggccaccuggaa

SEQ ID NO: 952660 - RNA, 19 nt, Homo sapiens
  misc_RNA (1)...(19): siRNA sense strand
gaaggaaccucacaguagu

SEQ ID NO: 952661 - RNA, 19 nt, Homo sapiens
  misc_RNA (1)...(19): siRNA sense strand
gagacaagcuguggaaaug

SEQ ID NO: 952662 - RNA, 19 nt, Homo sapiens
  misc_RNA (1)...(19): siRNA sense strand
uaaaggugauuccagauga

SEQ ID NO: 952663 - RNA, 19 nt, Homo sapiens
  misc_RNA (1)...(19): siRNA sense strand
gacguggccuuucugauaa

SEQ ID NO: 952664 - RNA, 19 nt, Homo sapiens
  misc_RNA (1)...(19): siRNA sense strand
gagauugcuucaguacuua

SEQ ID NO: 952665 - RNA, 19 nt, Homo sapiens
  misc_RNA (1)...(19): siRNA sense strand
gcguagagcuggcagauuc

SEQ ID NO: 952666 - RNA, 19 nt, Homo sapiens
  misc_RNA (1)...(19): siRNA sense strand
ggaaggaaccucacaguag

SEQ ID NO: 952667 - RNA, 19 nt, Homo sapiens
  misc_RNA (1)...(19): siRNA sense strand
ccaagucagugcuuuagaa

SEQ ID NO: 952668 - RNA, 19 nt, Homo sapiens
  misc_RNA (1)...(19): siRNA sense strand
cacaauauaugaugccaaa

SEQ ID NO: 952669 - RNA, 19 nt, Homo sapiens
  misc_RNA (1)...(19): siRNA sense strand
cagcagaauuugaucuaaa

SEQ ID NO: 952670 - RNA, 19 nt, Homo sapiens
  misc_RNA (1)...(19): siRNA sense strand
ucacggaaacucuuugaua

SEQ ID NO: 952671 - RNA, 19 nt, Homo sapiens
  misc_RNA (1)...(19): siRNA sense strand
gcagaggcauaucuuggaa

SEQ ID NO: 952672 - RNA, 19 nt, Homo sapiens
  misc_RNA (1)...(19): siRNA sense strand
agucagugcuuuagaaauu

SEQ ID NO: 952673 - RNA, 19 nt, Homo sapiens
  misc_RNA (1)...(19): siRNA sense strand
gaaauucccaauaagcauu

SEQ ID NO: 952674 - RNA, 19 nt, Homo sapiens
  misc_RNA (1)...(19): siRNA sense strand
cgacuauuguugaaguuaa

SEQ ID NO: 952675 - RNA, 19 nt, Homo sapiens
  misc_RNA (1)...(19): siRNA sense strand
ggaaauggcagaggcauau

SEQ ID NO: 952676 - RNA, 19 nt, Homo sapiens
  misc_RNA (1)...(19): siRNA sense strand
cuagaugugucuuuacuga

SEQ ID NO: 952677 - RNA, 19 nt, Homo sapiens
  misc_RNA (1)...(19): siRNA sense strand
gcacaacaguauuuaccau

SEQ ID NO: 952678 - RNA, 19 nt, Homo sapiens
  misc_RNA (1)...(19): siRNA sense strand
gaugugucuuuacugaaua

SEQ ID NO: 952679 - RNA, 19 nt, Homo sapiens
  misc_RNA (1)...(19): siRNA sense strand
uauguuggcucucgacuau

SEQ ID NO: 952680 - RNA, 19 nt, Homo sapiens
  misc_RNA (1)...(19): siRNA sense strand
ugacaaugauguauaugug

SEQ ID NO: 952681 - RNA, 19 nt, Homo sapiens
  misc_RNA (1)...(19): siRNA sense strand
agagauugcuucaguacuu

SEQ ID NO: 952682 - RNA, 19 nt, Homo sapiens
  misc_RNA (1)...(19): siRNA sense strand
gcagauacccauuuaaggu

SEQ ID NO: 952683 - RNA, 19 nt, Homo sapiens
  misc_RNA (1)...(19): siRNA sense strand
gaaaagaucccaacacauc

SEQ ID NO: 952684 - RNA, 19 nt, Homo sapiens
  misc_RNA (1)...(19): siRNA sense strand
caaggagggauguuucuaa

SEQ ID NO: 952685 - RNA, 19 nt, Homo sapiens
  misc_RNA (1)...(19): siRNA sense strand
gaaagaggaaauccacaga

SEQ ID NO: 952686 - RNA, 19 nt, Homo sapiens
  misc_RNA (1)...(19): siRNA sense strand
guaaugagaccaucacagu

SEQ ID NO: 952687 - RNA, 19 nt, Homo sapiens
  misc_RNA (1)...(19): siRNA sense strand
cuaaagugauugguauuga

SEQ ID NO: 952688 - RNA, 19 nt, Homo sapiens
  misc_RNA (1)...(19): siRNA sense strand
ucaucaaucugcucaguug

SEQ ID NO: 952689 - RNA, 19 nt, Homo sapiens
  misc_RNA (1)...(19): siRNA sense strand
gaucuuggcaccaccuauu

SEQ ID NO: 952690 - RNA, 19 nt, Homo sapiens
  misc_RNA (1)...(19): siRNA sense strand
cagcaaguauugaaagaag

SEQ ID NO: 952691 - RNA, 19 nt, Homo sapiens
  misc_RNA (1)...(19): siRNA sense strand
acaacaguauuuaccauug

SEQ ID NO: 952692 - RNA, 19 nt, Homo sapiens
  misc_RNA (1)...(19): siRNA sense strand
gggaguggcuauccaagca

SEQ ID NO: 952693 - RNA, 19 nt, Homo sapiens
  misc_RNA (1)...(19): siRNA sense strand
cggaggaacucuagaugug

SEQ ID NO: 952694 - RNA, 19 nt, Homo sapiens
  misc_RNA (1)...(19): siRNA sense strand
gaacucuagaugugucuuu

SEQ ID NO: 952695 - RNA, 19 nt, Homo sapiens
  misc_RNA (1)...(19): siRNA sense strand
gcucucgacuauuguugaa

SEQ ID NO: 952696 - RNA, 19 nt, Homo sapiens
  misc_RNA (1)...(19): siRNA sense strand
guggaaauggucaaauuaa

SEQ ID NO: 952697 - RNA, 19 nt, Homo sapiens
  misc_RNA (1)...(19): siRNA sense strand
gaggacaggacuucaauca

SEQ ID NO: 952698 - RNA, 19 nt, Homo sapiens
  misc_RNA (1)...(19): siRNA sense strand
gcaaugucuggaaacaaua

SEQ ID NO: 952699 - RNA, 19 nt, Homo sapiens
  misc_RNA (1)...(19): siRNA sense strand
ucaagucauucaagaguuc

SEQ ID NO: 952700 - RNA, 19 nt, Homo sapiens
  misc_RNA (1)...(19): siRNA sense strand
cagcagcuauggccuaugg

SEQ ID NO: 952701 - RNA, 19 nt, Homo sapiens
  misc_RNA (1)...(19): siRNA sense strand
ccagcagaauuugaucuaa

SEQ ID NO: 952702 - RNA, 19 nt, Homo sapiens
  misc_RNA (1)...(19): siRNA sense strand
acacugaacugccaaaaga

SEQ ID NO: 952703 - RNA, 19 nt, Homo sapiens
  misc_RNA (1)...(19): siRNA sense strand
aauugaagcugcuaaccuu

SEQ ID NO: 952704 - RNA, 19 nt, Homo sapiens
  misc_RNA (1)...(19): siRNA sense strand
guaaaggugauuccagaug

SEQ ID NO: 952705 - RNA, 19 nt, Homo sapiens
  misc_RNA (1)...(19): siRNA sense strand
aaagaaggccaccuggaaa

SEQ ID NO: 952706 - RNA, 19 nt, Homo sapiens
  misc_RNA (1)...(19): siRNA sense strand
gacaagcuguggaaauggu

SEQ ID NO: 952707 - RNA, 19 nt, Homo sapiens
  misc_RNA (1)...(19): siRNA sense strand
caagucagugcuuuagaaa

SEQ ID NO: 952708 - RNA, 19 nt, Homo sapiens
  misc_RNA (1)...(19): siRNA sense strand
cacggaaacucuuugauac

SEQ ID NO: 952709 - RNA, 19 nt, Homo sapiens
  misc_RNA (1)...(19): siRNA sense strand
gaaauaucacggaaacucu

SEQ ID NO: 952710 - RNA, 19 nt, Homo sapiens
  misc_RNA (1)...(19): siRNA sense strand
acagaaauaucacggaaac

SEQ ID NO: 952711 - RNA, 19 nt, Homo sapiens
  misc_RNA (1)...(19): siRNA sense strand
uaagaaaaguggagaaagu

SEQ ID NO: 952712 - RNA, 19 nt, Homo sapiens
  misc_RNA (1)...(19): siRNA sense strand
aggcugaaauuggcagaua

SEQ ID NO: 952713 - RNA, 19 nt, Homo sapiens
  misc_RNA (1)...(19): siRNA sense strand
ggaaaagacugagauugau

SEQ ID NO: 952714 - RNA, 19 nt, Homo sapiens
  misc_RNA (1)...(19): siRNA sense strand
uugauacccuuaaugaaga

SEQ ID NO: 952715 - RNA, 19 nt, Homo sapiens
  misc_RNA (1)...(19): siRNA sense strand
agaugugucuuuacugaau

SEQ ID NO: 952716 - RNA, 19 nt, Homo sapiens
  misc_RNA (1)...(19): siRNA sense strand
aaaggugauuccagaugaa

SEQ ID NO: 952717 - RNA, 19 nt, Homo sapiens
  misc_RNA (1)...(19): siRNA sense strand
caacaguauuuaccauugc

SEQ ID NO: 952718 - RNA, 19 nt, Homo sapiens
  misc_RNA (1)...(19): siRNA sense strand
aaaugggcauaucagcaua

SEQ ID NO: 952719 - RNA, 19 nt, Homo sapiens
  misc_RNA (1)...(19): siRNA sense strand
agauacccauuuaagguuu

SEQ ID NO: 952720 - RNA, 19 nt, Homo sapiens
  misc_RNA (1)...(19): siRNA sense strand
aaacuuuccucagcagaug

SEQ ID NO: 952721 - RNA, 19 nt, Homo sapiens
  misc_RNA (1)...(19): siRNA sense strand
agaggcauaucuuggaaug

SEQ ID NO: 952722 - RNA, 19 nt, Homo sapiens
  misc_RNA (1)...(19): siRNA sense strand
caaugucuggaaacaauaa

SEQ ID NO: 952723 - RNA, 19 nt, Homo sapiens
  misc_RNA (1)...(19): siRNA sense strand
gaaugccaguugccaaugc

SEQ ID NO: 952724 - RNA, 19 nt, Homo sapiens
  misc_RNA (1)...(19): siRNA sense strand
uguuggcucucgacuauug

SEQ ID NO: 952725 - RNA, 19 nt, Homo sapiens
  misc_RNA (1)...(19): siRNA sense strand
ucggauccgucaagucauu

SEQ ID NO: 952726 - RNA, 19 nt, Homo sapiens
  misc_RNA (1)...(19): siRNA sense strand
gaaaauacugguacccauu

SEQ ID NO: 952727 - RNA, 19 nt, Homo sapiens
  misc_RNA (1)...(19): siRNA sense strand
gaaagucagguuuuauuug

SEQ ID NO: 952728 - RNA, 19 nt, Homo sapiens
  misc_RNA (1)...(19): siRNA sense strand
cuguggaaauggucaaauu

SEQ ID NO: 952729 - RNA, 19 nt, Homo sapiens
  misc_RNA (1)...(19): siRNA sense strand
uaccauugccuacuccuaa

SEQ ID NO: 952730 - RNA, 19 nt, Homo sapiens
  misc_RNA (1)...(19): siRNA sense strand
caacaauugaagcugcuaa

SEQ ID NO: 952731 - RNA, 19 nt, Homo sapiens
  misc_RNA (1)...(19): siRNA sense strand
gagaaagucagguuuuauu

SEQ ID NO: 952732 - RNA, 19 nt, Homo sapiens
  misc_RNA (1)...(19): siRNA sense strand
aaaucugacucuucaucaa

SEQ ID NO: 952733 - RNA, 19 nt, Homo sapiens
  misc_RNA (1)...(19): siRNA sense strand
uguggaaauggucaaauua

SEQ ID NO: 952734 - RNA, 19 nt, Homo sapiens
  misc_RNA (1)...(19): siRNA sense strand
agcaaugucuggaaacaau

SEQ ID NO: 952735 - RNA, 19 nt, Homo sapiens
  misc_RNA (1)...(19): siRNA sense strand
gcuauuuggcacaacagua

SEQ ID NO: 952736 - RNA, 19 nt, Homo sapiens
  misc_RNA (1)...(19): siRNA sense strand
ugagauugaugaggugguu

SEQ ID NO: 952737 - RNA, 19 nt, Homo sapiens
  misc_RNA (1)...(19): siRNA sense strand
ucaaucugcucaguuguca

SEQ ID NO: 952738 - RNA, 19 nt, Homo sapiens
  misc_RNA (1)...(19): siRNA sense strand
cagauacccauuuaagguu

SEQ ID NO: 952739 - RNA, 19 nt, Homo sapiens
  misc_RNA (1)...(19): siRNA sense strand
auuggcagauacccauuua

SEQ ID NO: 952740 - RNA, 19 nt, Homo sapiens
  misc_RNA (1)...(19): siRNA sense strand
gucaagucauucaagaguu

SEQ ID NO: 952741 - RNA, 19 nt, Homo sapiens
  misc_RNA (1)...(19): siRNA sense strand
uaaaucugacucuucauca

SEQ ID NO: 952742 - RNA, 19 nt, Homo sapiens
  misc_RNA (1)...(19): siRNA sense strand
cccaauaagcauuuacaaa

SEQ ID NO: 952743 - RNA, 19 nt, Homo sapiens
  misc_RNA (1)...(19): siRNA sense strand
gcuuuagaaauucccaaua

SEQ ID NO: 952744 - RNA, 19 nt, Homo sapiens
  misc_RNA (1)...(19): siRNA sense strand
ccucggauccgucaaguca

SEQ ID NO: 952745 - RNA, 19 nt, Homo sapiens
  misc_RNA (1)...(19): siRNA sense strand
uacccagcauggugucuuu

SEQ ID NO: 952746 - RNA, 19 nt, Homo sapiens
  misc_RNA (1)...(19): siRNA sense strand
uaacgggaguggcuaucca

SEQ ID NO: 952747 - RNA, 19 nt, Homo sapiens
  misc_RNA (1)...(19): siRNA sense strand
uggaaacaauaaacuugga

SEQ ID NO: 952748 - RNA, 19 nt, Homo sapiens
  misc_RNA (1)...(19): siRNA sense strand
cgagcaaugucuggaaaca

SEQ ID NO: 952749 - RNA, 19 nt, Homo sapiens
  misc_RNA (1)...(19): siRNA sense strand
agaguuggaggcugaaauu

SEQ ID NO: 952750 - RNA, 19 nt, Homo sapiens
  misc_RNA (1)...(19): siRNA sense strand
gaucccaacacaucuguag

SEQ ID NO: 952751 - RNA, 19 nt, Homo sapiens
  misc_RNA (1)...(19): siRNA sense strand
uguagacccugaccuagca

SEQ ID NO: 952752 - RNA, 19 nt, Homo sapiens
  misc_RNA (1)...(19): siRNA sense strand
aaaauggaaugguugaguu

SEQ ID NO: 952753 - RNA, 19 nt, Homo sapiens
  misc_RNA (1)...(19): siRNA sense strand
cuccuaaagugauugguau

SEQ ID NO: 952754 - RNA, 19 nt, Homo sapiens
  misc_RNA (1)...(19): siRNA sense strand
caccaccuauuguucuguu

SEQ ID NO: 952755 - RNA, 19 nt, Homo sapiens
  misc_RNA (1)...(19): siRNA sense strand
uaucuuggaaugccaguug

SEQ ID NO: 952756 - RNA, 19 nt, Homo sapiens
  misc_RNA (1)...(19): siRNA sense strand
acaagaagcuagugaagaa

SEQ ID NO: 952757 - RNA, 19 nt, Homo sapiens
  misc_RNA (1)...(19): siRNA sense strand
ccucagagcucaaucaucu

SEQ ID NO: 952758 - RNA, 19 nt, Homo sapiens
  misc_RNA (1)...(19): siRNA sense strand
cagcagaaaugacaugugu

SEQ ID NO: 952759 - RNA, 19 nt, Homo sapiens
  misc_RNA (1)...(19): siRNA sense strand
gaacuuugggagagaaauu

SEQ ID NO: 952760 - RNA, 19 nt, Homo sapiens
  misc_RNA (1)...(19): siRNA sense strand
gaagaaauuccgccagaag

SEQ ID NO: 952761 - RNA, 19 nt, Homo sapiens
  misc_RNA (1)...(19): siRNA sense strand
ccacguggauaacgaauac

SEQ ID NO: 952762 - RNA, 19 nt, Homo sapiens
  misc_RNA (1)...(19): siRNA sense strand
ggacggauggcacaugguu

SEQ ID NO: 952763 - RNA, 19 nt, Homo sapiens
  misc_RNA (1)...(19): siRNA sense strand
agaaauuccuacugcaaga

SEQ ID NO: 952764 - RNA, 19 nt, Homo sapiens
  misc_RNA (1)...(19): siRNA sense strand
caguguggcuccuucuuga

SEQ ID NO: 952765 - RNA, 19 nt, Homo sapiens
  misc_RNA (1)...(19): siRNA sense strand
caacgggaaugaaccaaaa

SEQ ID NO: 952766 - RNA, 19 nt, Homo sapiens
  misc_RNA (1)...(19): siRNA sense strand
agaagcuagugaagaaauu

SEQ ID NO: 952767 - RNA, 19 nt, Homo sapiens
  misc_RNA (1)...(19): siRNA sense strand
ggccugaccugcuuagaac

SEQ ID NO: 952768 - RNA, 19 nt, Homo sapiens
  misc_RNA (1)...(19): siRNA sense strand
ucacaugccaggauccaaa

SEQ ID NO: 952769 - RNA, 19 nt, Homo sapiens
  misc_RNA (1)...(19): siRNA sense strand
gaaauuccuacugcaagaa

SEQ ID NO: 952770 - RNA, 19 nt, Homo sapiens
  misc_RNA (1)...(19): siRNA sense strand
ccacgaacuuugggagaga

SEQ ID NO: 952771 - RNA, 19 nt, Homo sapiens
  misc_RNA (1)...(19): siRNA sense strand
ggacgcuggugacccaaca

SEQ ID NO: 952772 - RNA, 19 nt, Homo sapiens
  misc_RNA (1)...(19): siRNA sense strand
gcuaugaggcccaggacaa

SEQ ID NO: 952773 - RNA, 19 nt, Homo sapiens
  misc_RNA (1)...(19): siRNA sense strand
auccagaacucaagcugua

SEQ ID NO: 952774 - RNA, 19 nt, Homo sapiens
  misc_RNA (1)...(19): siRNA sense strand
ugaagaaauuccgccagaa

SEQ ID NO: 952775 - RNA, 19 nt, Homo sapiens
  misc_RNA (1)...(19): siRNA sense strand
gaaaaucaagccccagaaa

SEQ ID NO: 952776 - RNA, 19 nt, Homo sapiens
  misc_RNA (1)...(19): siRNA sense strand
ggacggcucagcugguaug

SEQ ID NO: 952777 - RNA, 19 nt, Homo sapiens
  misc_RNA (1)...(19): siRNA sense strand
gggccugaccugcuuagaa

SEQ ID NO: 952778 - RNA, 19 nt, Homo sapiens
  misc_RNA (1)...(19): siRNA sense strand
ugacaacuccuccgacagu

SEQ ID NO: 952779 - RNA, 19 nt, Homo sapiens
  misc_RNA (1)...(19): siRNA sense strand
ggaaugaaccaaaacaugu

SEQ ID NO: 952780 - RNA, 19 nt, Homo sapiens
  misc_RNA (1)...(19): siRNA sense strand
gaaauuccgccagaagaag

SEQ ID NO: 952781 - RNA, 19 nt, Homo sapiens
  misc_RNA (1)...(19): siRNA sense strand
gaacuuccucugcaacaac

SEQ ID NO: 952782 - RNA, 19 nt, Homo sapiens
  misc_RNA (1)...(19): siRNA sense strand
agaagguguuugucacaug

SEQ ID NO: 952783 - RNA, 19 nt, Homo sapiens
  misc_RNA (1)...(19): siRNA sense strand
ccagaaaaguggccgaguu

SEQ ID NO: 952784 - RNA, 19 nt, Homo sapiens
  misc_RNA (1)...(19): siRNA sense strand
aagcagcgccaguggauug

SEQ ID NO: 952785 - RNA, 19 nt, Homo sapiens
  misc_RNA (1)...(19): siRNA sense strand
agaaauuccgccagaagaa

SEQ ID NO: 952786 - RNA, 19 nt, Homo sapiens
  misc_RNA (1)...(19): siRNA sense strand
agagcucaaucaucugcua

SEQ ID NO: 952787 - RNA, 19 nt, Homo sapiens
  misc_RNA (1)...(19): siRNA sense strand
gaagcuagugaagaaauuc

SEQ ID NO: 952788 - RNA, 19 nt, Homo sapiens
  misc_RNA (1)...(19): siRNA sense strand
caagaagguguuugucaca

SEQ ID NO: 952789 - RNA, 19 nt, Homo sapiens
  misc_RNA (1)...(19): siRNA sense strand
ggaagauccagaacucaag

SEQ ID NO: 952790 - RNA, 19 nt, Homo sapiens
  misc_RNA (1)...(19): siRNA sense strand
caacaccuccaacgacaag

SEQ ID NO: 952791 - RNA, 19 nt, Homo sapiens
  misc_RNA (1)...(19): siRNA sense strand
gagaacuuccucugcaaca

SEQ ID NO: 952792 - RNA, 19 nt, Homo sapiens
  misc_RNA (1)...(19): siRNA sense strand
cagaagacaacaccuccaa

SEQ ID NO: 952793 - RNA, 19 nt, Homo sapiens
  misc_RNA (1)...(19): siRNA sense strand
ucggacggcucagcuggua

SEQ ID NO: 952794 - RNA, 19 nt, Homo sapiens
  misc_RNA (1)...(19): siRNA sense strand
ccaacgggaaugaaccaaa

SEQ ID NO: 952795 - RNA, 19 nt, Homo sapiens
  misc_RNA (1)...(19): siRNA sense strand
cgacagugacuaugaucug

SEQ ID NO: 952796 - RNA, 19 nt, Homo sapiens
  misc_RNA (1)...(19): siRNA sense strand
ggacaacugggcuccuucu

SEQ ID NO: 952797 - RNA, 19 nt, Homo sapiens
  misc_RNA (1)...(19): siRNA sense strand
cagccucccacguggauaa

SEQ ID NO: 952798 - RNA, 19 nt, Homo sapiens
  misc_RNA (1)...(19): siRNA sense strand
gaaaaguggccgaguucuu

SEQ ID NO: 952799 - RNA, 19 nt, Homo sapiens
  misc_RNA (1)...(19): siRNA sense strand
caccagcccuugccaaucc

SEQ ID NO: 952800 - RNA, 19 nt, Homo sapiens
  misc_RNA (1)...(19): siRNA sense strand
ccaguguggcuccuucuug

SEQ ID NO: 952801 - RNA, 19 nt, Homo sapiens
  misc_RNA (1)...(19): siRNA sense strand
ccacagcagaaaugacaug

SEQ ID NO: 952802 - RNA, 19 nt, Homo sapiens
  misc_RNA (1)...(19): siRNA sense strand
caagaagcuagugaagaaa

SEQ ID NO: 952803 - RNA, 19 nt, Homo sapiens
  misc_RNA (1)...(19): siRNA sense strand
uggagaacuuccucugcaa

SEQ ID NO: 952804 - RNA, 19 nt, Homo sapiens
  misc_RNA (1)...(19): siRNA sense strand
agagaaauuccuacugcaa

SEQ ID NO: 952805 - RNA, 19 nt, Homo sapiens
  misc_RNA (1)...(19): siRNA sense strand
aagaaauuccgccagaaga

SEQ ID NO: 952806 - RNA, 19 nt, Homo sapiens
  misc_RNA (1)...(19): siRNA sense strand
gcagccacagcagaaauga

SEQ ID NO: 952807 - RNA, 19 nt, Homo sapiens
  misc_RNA (1)...(19): siRNA sense strand
gguaugacccagauuucca

SEQ ID NO: 952808 - RNA, 19 nt, Homo sapiens
  misc_RNA (1)...(19): siRNA sense strand
gcaaggcucacccguucca

SEQ ID NO: 952809 - RNA, 19 nt, Homo sapiens
  misc_RNA (1)...(19): siRNA sense strand
ugcaaccgcuggccaccuu

SEQ ID NO: 952810 - RNA, 19 nt, Homo sapiens
  misc_RNA (1)...(19): siRNA sense strand
guggcagcgucaacuccua

SEQ ID NO: 952811 - RNA, 19 nt, Homo sapiens
  misc_RNA (1)...(19): siRNA sense strand
ccuccgacagugacuauga

SEQ ID NO: 952812 - RNA, 19 nt, Homo sapiens
  misc_RNA (1)...(19): siRNA sense strand
gaagcagcgccaguggauu

SEQ ID NO: 952813 - RNA, 19 nt, Homo sapiens
  misc_RNA (1)...(19): siRNA sense strand
agaacuuccucugcaacaa

SEQ ID NO: 952814 - RNA, 19 nt, Homo sapiens
  misc_RNA (1)...(19): siRNA sense strand
uacaagaagcuagugaaga

SEQ ID NO: 952815 - RNA, 19 nt, Homo sapiens
  misc_RNA (1)...(19): siRNA sense strand
gggcagcagcaucugugaa

SEQ ID NO: 952816 - RNA, 19 nt, Homo sapiens
  misc_RNA (1)...(19): siRNA sense strand
agaagcagcgccaguggau

SEQ ID NO: 952817 - RNA, 19 nt, Homo sapiens
  misc_RNA (1)...(19): siRNA sense strand
caacaaggcagaaauuaua

SEQ ID NO: 952818 - RNA, 19 nt, Homo sapiens
  misc_RNA (1)...(19): siRNA sense strand
acaaagagauugaaguguu

SEQ ID NO: 952819 - RNA, 19 nt, Homo sapiens
  misc_RNA (1)...(19): siRNA sense strand
gaaagauucacacagauuu

SEQ ID NO: 952820 - RNA, 19 nt, Homo sapiens
  misc_RNA (1)...(19): siRNA sense strand
aaagggaggugauggaauu

SEQ ID NO: 952821 - RNA, 19 nt, Homo sapiens
  misc_RNA (1)...(19): siRNA sense strand
caggaaagauucacacaga

SEQ ID NO: 952822 - RNA, 19 nt, Homo sapiens
  misc_RNA (1)...(19): siRNA sense strand
gaaaagggauucauuaugg

SEQ ID NO: 952823 - RNA, 19 nt, Homo sapiens
  misc_RNA (1)...(19): siRNA sense strand
caaagagauugaaguguug

SEQ ID NO: 952824 - RNA, 19 nt, Homo sapiens
  misc_RNA (1)...(19): siRNA sense strand
gaagcgaacaugacacaaa

SEQ ID NO: 952825 - RNA, 19 nt, Homo sapiens
  misc_RNA (1)...(19): siRNA sense strand
ggaaagauucacacagauu

SEQ ID NO: 952826 - RNA, 19 nt, Homo sapiens
  misc_RNA (1)...(19): siRNA sense strand
uggcugaaguaaugaaaua

SEQ ID NO: 952827 - RNA, 19 nt, Homo sapiens
  misc_RNA (1)...(19): siRNA sense strand
gcuuaaagaugaggaaaug

SEQ ID NO: 952828 - RNA, 19 nt, Homo sapiens
  misc_RNA (1)...(19): siRNA sense strand
gagauugaaguguugaaua

SEQ ID NO: 952829 - RNA, 19 nt, Homo sapiens
  misc_RNA (1)...(19): siRNA sense strand
ggauauugcuggccuugug

SEQ ID NO: 952830 - RNA, 19 nt, Homo sapiens
  misc_RNA (1)...(19): siRNA sense strand
gggaggugauggaauuaaa

SEQ ID NO: 952831 - RNA, 19 nt, Homo sapiens
  misc_RNA (1)...(19): siRNA sense strand
ccacaaaccagcaagcaaa

SEQ ID NO: 952832 - RNA, 19 nt, Homo sapiens
  misc_RNA (1)...(19): siRNA sense strand
ggaaugacaaagagauuga

SEQ ID NO: 952833 - RNA, 19 nt, Homo sapiens
  misc_RNA (1)...(19): siRNA sense strand
gacaacaaggcagaaauua

SEQ ID NO: 952834 - RNA, 19 nt, Homo sapiens
  misc_RNA (1)...(19): siRNA sense strand
gaaaccuguucgcuucuau

SEQ ID NO: 952835 - RNA, 19 nt, Homo sapiens
  misc_RNA (1)...(19): siRNA sense strand
gcacuauugauccuaauga

SEQ ID NO: 952836 - RNA, 19 nt, Homo sapiens
  misc_RNA (1)...(19): siRNA sense strand
caaaauuccugccuuucua

SEQ ID NO: 952837 - RNA, 19 nt, Homo sapiens
  misc_RNA (1)...(19): siRNA sense strand
ggcagaaauuauauuguug

SEQ ID NO: 952838 - RNA, 19 nt, Homo sapiens
  misc_RNA (1)...(19): siRNA sense strand
ccuguucgcuucuaucaug

SEQ ID NO: 952839 - RNA, 19 nt, Homo sapiens
  misc_RNA (1)...(19): siRNA sense strand
aaaguaaaauccuggguua

SEQ ID NO: 952840 - RNA, 19 nt, Homo sapiens
  misc_RNA (1)...(19): siRNA sense strand
gugcuuuggucauuccuuu

SEQ ID NO: 952841 - RNA, 19 nt, Homo sapiens
  misc_RNA (1)...(19): siRNA sense strand
caaggcagaaauuauauug

SEQ ID NO: 952842 - RNA, 19 nt, Homo sapiens
  misc_RNA (1)...(19): siRNA sense strand
gaaaauugguauuguugga

SEQ ID NO: 952843 - RNA, 19 nt, Homo sapiens
  misc_RNA (1)...(19): siRNA sense strand
gaguaccugugccagauga

SEQ ID NO: 952844 - RNA, 19 nt, Homo sapiens
  misc_RNA (1)...(19): siRNA sense strand
uguugaagauggagauauu

SEQ ID NO: 952845 - RNA, 19 nt, Homo sapiens
  misc_RNA (1)...(19): siRNA sense strand
guagauccuauucgagaua

SEQ ID NO: 952846 - RNA, 19 nt, Homo sapiens
  misc_RNA (1)...(19): siRNA sense strand
ugacaaagagauugaagug

SEQ ID NO: 952847 - RNA, 19 nt, Homo sapiens
  misc_RNA (1)...(19): siRNA sense strand
gcacguugaaggaagugua

SEQ ID NO: 952848 - RNA, 19 nt, Homo sapiens
  misc_RNA (1)...(19): siRNA sense strand
gaaccucacugaaaauugg

SEQ ID NO: 952849 - RNA, 19 nt, Homo sapiens
  misc_RNA (1)...(19): siRNA sense strand
ggaaaguacagacaacaag

SEQ ID NO: 952850 - RNA, 19 nt, Homo sapiens
  misc_RNA (1)...(19): siRNA sense strand
ggaaguguagauccuauuc

SEQ ID NO: 952851 - RNA, 19 nt, Homo sapiens
  misc_RNA (1)...(19): siRNA sense strand
uaaaugugguggauauugc

SEQ ID NO: 952852 - RNA, 19 nt, Homo sapiens
  misc_RNA (1)...(19): siRNA sense strand
agacaacaaggcagaaauu

SEQ ID NO: 952853 - RNA, 19 nt, Homo sapiens
  misc_RNA (1)...(19): siRNA sense strand
caaggcugcuggaaaguac

SEQ ID NO: 952854 - RNA, 19 nt, Homo sapiens
  misc_RNA (1)...(19): siRNA sense strand
cagaguaccugugccagau

SEQ ID NO: 952855 - RNA, 19 nt, Homo sapiens
  misc_RNA (1)...(19): siRNA sense strand
agucaaggcugcuggaaag

SEQ ID NO: 952856 - RNA, 19 nt, Homo sapiens
  misc_RNA (1)...(19): siRNA sense strand
gaucauuaaggcuggguuu

SEQ ID NO: 952857 - RNA, 19 nt, Homo sapiens
  misc_RNA (1)...(19): siRNA sense strand
ucaauguguuaaccaauag

SEQ ID NO: 952858 - RNA, 19 nt, Homo sapiens
  misc_RNA (1)...(19): siRNA sense strand
aagaguggguggacaagug

SEQ ID NO: 952859 - RNA, 19 nt, Homo sapiens
  misc_RNA (1)...(19): siRNA sense strand
uaaagaggaagguucugaa

SEQ ID NO: 952860 - RNA, 19 nt, Homo sapiens
  misc_RNA (1)...(19): siRNA sense strand
gcugugagaggaggagaua

SEQ ID NO: 952861 - RNA, 19 nt, Homo sapiens
  misc_RNA (1)...(19): siRNA sense strand
aaagaggaagguucugaaa

SEQ ID NO: 952862 - RNA, 19 nt, Homo sapiens
  misc_RNA (1)...(19): siRNA sense strand
gaggagagacagaaguauc

SEQ ID NO: 952863 - RNA, 19 nt, Homo sapiens
  misc_RNA (1)...(19): siRNA sense strand
aauccuggguuauagauca

SEQ ID NO: 952864 - RNA, 19 nt, Homo sapiens
  misc_RNA (1)...(19): siRNA sense strand
aagcgaacaugacacaaag

SEQ ID NO: 952865 - RNA, 19 nt, Homo sapiens
  misc_RNA (1)...(19): siRNA sense strand
caacaaccgaagaagaaau

SEQ ID NO: 952866 - RNA, 19 nt, Homo sapiens
  misc_RNA (1)...(19): siRNA sense strand
ugaaaggagcucacaaugg

SEQ ID NO: 952867 - RNA, 19 nt, Homo sapiens
  misc_RNA (1)...(19): siRNA sense strand
ugauugggcccauuauaga

SEQ ID NO: 952868 - RNA, 19 nt, Homo sapiens
  misc_RNA (1)...(19): siRNA sense strand
uggcaucuuucaucuaaca

SEQ ID NO: 952869 - RNA, 19 nt, Homo sapiens
  misc_RNA (1)...(19): siRNA sense strand
aacaaccgaagaagaaaua

SEQ ID NO: 952870 - RNA, 19 nt, Homo sapiens
  misc_RNA (1)...(19): siRNA sense strand
acaacaaggcagaaauuau

SEQ ID NO: 952871 - RNA, 19 nt, Homo sapiens
  misc_RNA (1)...(19): siRNA sense strand
gauauugcuggccuuguga

SEQ ID NO: 952872 - RNA, 19 nt, Homo sapiens
  misc_RNA (1)...(19): siRNA sense strand
ucaaggcugcuggaaagua

SEQ ID NO: 952873 - RNA, 19 nt, Homo sapiens
  misc_RNA (1)...(19): siRNA sense strand
uugcagcacuccaacuaga

SEQ ID NO: 952874 - RNA, 19 nt, Homo sapiens
  misc_RNA (1)...(19): siRNA sense strand
gcgaacaugacacaaagug

SEQ ID NO: 952875 - RNA, 19 nt, Homo sapiens
  misc_RNA (1)...(19): siRNA sense strand
guucgcuucuaucaugauu

SEQ ID NO: 952876 - RNA, 19 nt, Homo sapiens
  misc_RNA (1)...(19): siRNA sense strand
ugugccagaugaaagguuu

SEQ ID NO: 952877 - RNA, 19 nt, Homo sapiens
  misc_RNA (1)...(19): siRNA sense strand
uagucaggcuucagcagaa

SEQ ID NO: 952878 - RNA, 19 nt, Homo sapiens
  misc_RNA (1)...(19): siRNA sense strand
agaggaagguucugaaaau

SEQ ID NO: 952879 - RNA, 19 nt, Homo sapiens
  misc_RNA (1)...(19): siRNA sense strand
guaaaauccuggguuauag

SEQ ID NO: 952880 - RNA, 19 nt, Homo sapiens
  misc_RNA (1)...(19): siRNA sense strand
cauauuagugccugugaug

SEQ ID NO: 952881 - RNA, 19 nt, Homo sapiens
  misc_RNA (1)...(19): siRNA sense strand
cuaaaugugguggauauug

SEQ ID NO: 952882 - RNA, 19 nt, Homo sapiens
  misc_RNA (1)...(19): siRNA sense strand
guugaagauggagauauua

SEQ ID NO: 952883 - RNA, 19 nt, Homo sapiens
  misc_RNA (1)...(19): siRNA sense strand
gcagcacuccaacuagaau

SEQ ID NO: 952884 - RNA, 19 nt, Homo sapiens
  misc_RNA (1)...(19): siRNA sense strand
cuacuugguuaaucuuucu

SEQ ID NO: 952885 - RNA, 19 nt, Homo sapiens
  misc_RNA (1)...(19): siRNA sense strand
ugugagaggaggagauaaa

SEQ ID NO: 952886 - RNA, 19 nt, Homo sapiens
  misc_RNA (1)...(19): siRNA sense strand
aaagaugaggaaaugauug

SEQ ID NO: 952887 - RNA, 19 nt, Homo sapiens
  misc_RNA (1)...(19): siRNA sense strand
cagaugaaagguuugacuu

SEQ ID NO: 952888 - RNA, 19 nt, Homo sapiens
  misc_RNA (1)...(19): siRNA sense strand
ccucaacaaccgaagaaga

SEQ ID NO: 952889 - RNA, 19 nt, Homo sapiens
  misc_RNA (1)...(19): siRNA sense strand
gcuggaaaguacagacaac

SEQ ID NO: 952890 - RNA, 19 nt, Homo sapiens
  misc_RNA (1)...(19): siRNA sense strand
ggaagguucugaaaaugca

SEQ ID NO: 952891 - RNA, 19 nt, Homo sapiens
  misc_RNA (1)...(19): siRNA sense strand
gaaugacaaagagauugaa

SEQ ID NO: 952892 - RNA, 19 nt, Homo sapiens
  misc_RNA (1)...(19): siRNA sense strand
ucugcacuauugauccuaa

SEQ ID NO: 952893 - RNA, 19 nt, Homo sapiens
  misc_RNA (1)...(19): siRNA sense strand
cucaacaaccgaagaagaa

SEQ ID NO: 952894 - RNA, 19 nt, Homo sapiens
  misc_RNA (1)...(19): siRNA sense strand
uuaaagaggaagguucuga

SEQ ID NO: 952895 - RNA, 19 nt, Homo sapiens
  misc_RNA (1)...(19): siRNA sense strand
cauuaaggcuggguuugca

SEQ ID NO: 952896 - RNA, 19 nt, Homo sapiens
  misc_RNA (1)...(19): siRNA sense strand
ugauuggaaugacaaagag

SEQ ID NO: 952897 - RNA, 19 nt, Homo sapiens
  misc_RNA (1)...(19): siRNA sense strand
uagauccuauucgagauau

SEQ ID NO: 952898 - RNA, 19 nt, Homo sapiens
  misc_RNA (1)...(19): siRNA sense strand
aaguguagauccuauucga

SEQ ID NO: 952899 - RNA, 19 nt, Homo sapiens
  misc_RNA (1)...(19): siRNA sense strand
auuccugccuuucuaaaug

SEQ ID NO: 952900 - RNA, 19 nt, Homo sapiens
  misc_RNA (1)...(19): siRNA sense strand
ugauaucacgcacguugaa

SEQ ID NO: 952901 - RNA, 19 nt, Homo sapiens
  misc_RNA (1)...(19): siRNA sense strand
cuacuuucuucaauguguu

SEQ ID NO: 952902 - RNA, 19 nt, Homo sapiens
  misc_RNA (1)...(19): siRNA sense strand
gaggaagguucugaaaaug

SEQ ID NO: 952903 - RNA, 19 nt, Homo sapiens
  misc_RNA (1)...(19): siRNA sense strand
cugaaguaaugaaauacga

SEQ ID NO: 952904 - RNA, 19 nt, Homo sapiens
  misc_RNA (1)...(19): siRNA sense strand
guuugcagcacuccaacua

SEQ ID NO: 952905 - RNA, 19 nt, Homo sapiens
  misc_RNA (1)...(19): siRNA sense strand
cugaggagagacagaagua

SEQ ID NO: 952906 - RNA, 19 nt, Homo sapiens
  misc_RNA (1)...(19): siRNA sense strand
uuaaagaguggguggacaa

SEQ ID NO: 952907 - RNA, 19 nt, Homo sapiens
  misc_RNA (1)...(19): siRNA sense strand
ucuacuuucuucaaugugu

SEQ ID NO: 952908 - RNA, 19 nt, Homo sapiens
  misc_RNA (1)...(19): siRNA sense strand
aagcaaaauuccugccuuu

SEQ ID NO: 952909 - RNA, 19 nt, Homo sapiens
  misc_RNA (1)...(19): siRNA sense strand
cagcacuccaacuagaaua

SEQ ID NO: 952910 - RNA, 19 nt, Homo sapiens
  misc_RNA (1)...(19): siRNA sense strand
cccaggugcuuuggucauu

SEQ ID NO: 952911 - RNA, 19 nt, Homo sapiens
  misc_RNA (1)...(19): siRNA sense strand
gcuucuaucaugauuggaa

SEQ ID NO: 952912 - RNA, 19 nt, Homo sapiens
  misc_RNA (1)...(19): siRNA sense strand
caaaccagcaagcaaaauu

SEQ ID NO: 952913 - RNA, 19 nt, Homo sapiens
  misc_RNA (1)...(19): siRNA sense strand
ucacugcaggcccagauga

SEQ ID NO: 952914 - RNA, 19 nt, Homo sapiens
  misc_RNA (1)...(19): siRNA sense strand
guaccugugccagaugaaa

SEQ ID NO: 952915 - RNA, 19 nt, Homo sapiens
  misc_RNA (1)...(19): siRNA sense strand
caaguugcaagaauugagu

SEQ ID NO: 952916 - RNA, 19 nt, Homo sapiens
  misc_RNA (1)...(19): siRNA sense strand
ucgcuucuaucaugauugg

SEQ ID NO: 952917 - RNA, 19 nt, Homo sapiens
  misc_RNA (1)...(19): siRNA sense strand
gaaagaaacucuacagaau

SEQ ID NO: 952918 - RNA, 19 nt, Homo sapiens
  misc_RNA (1)...(19): siRNA sense strand
gaacagagcagaagaagaa

SEQ ID NO: 952919 - RNA, 19 nt, Homo sapiens
  misc_RNA (1)...(19): siRNA sense strand
guaacugccuacaauauua

SEQ ID NO: 952920 - RNA, 19 nt, Homo sapiens
  misc_RNA (1)...(19): siRNA sense strand
ggaaacaccucaacuccaa

SEQ ID NO: 952921 - RNA, 19 nt, Homo sapiens
  misc_RNA (1)...(19): siRNA sense strand
gcagcuaaaugcaucguua

SEQ ID NO: 952922 - RNA, 19 nt, Homo sapiens
  misc_RNA (1)...(19): siRNA sense strand
gcaaagaacuacuauaagc

SEQ ID NO: 952923 - RNA, 19 nt, Homo sapiens
  misc_RNA (1)...(19): siRNA sense strand
gaauacagaugaauuaggu

SEQ ID NO: 952924 - RNA, 19 nt, Homo sapiens
  misc_RNA (1)...(19): siRNA sense strand
gaacuagacccuccucuga

SEQ ID NO: 952925 - RNA, 19 nt, Homo sapiens
  misc_RNA (1)...(19): siRNA sense strand
gaaaggugcuucuaaacuc

SEQ ID NO: 952926 - RNA, 19 nt, Homo sapiens
  misc_RNA (1)...(19): siRNA sense strand
ggaugcagaugaauugauu

SEQ ID NO: 952927 - RNA, 19 nt, Homo sapiens
  misc_RNA (1)...(19): siRNA sense strand
uaacaaaggucugaauaca

SEQ ID NO: 952928 - RNA, 19 nt, Homo sapiens
  misc_RNA (1)...(19): siRNA sense strand
gaagaaaacugcaacacaa

SEQ ID NO: 952929 - RNA, 19 nt, Homo sapiens
  misc_RNA (1)...(19): siRNA sense strand
ucaaagcaauggugaagaa

SEQ ID NO: 952930 - RNA, 19 nt, Homo sapiens
  misc_RNA (1)...(19): siRNA sense strand
gaaguuaaccugagucaca

SEQ ID NO: 952931 - RNA, 19 nt, Homo sapiens
  misc_RNA (1)...(19): siRNA sense strand
caagaagcauggaagcaaa

SEQ ID NO: 952932 - RNA, 19 nt, Homo sapiens
  misc_RNA (1)...(19): siRNA sense strand
ggauguacgucauaaagga

SEQ ID NO: 952933 - RNA, 19 nt, Homo sapiens
  misc_RNA (1)...(19): siRNA sense strand
uggagaaccugcugaaauu

SEQ ID NO: 952934 - RNA, 19 nt, Homo sapiens
  misc_RNA (1)...(19): siRNA sense strand
gaucuccgguucugaaaug

SEQ ID NO: 952935 - RNA, 19 nt, Homo sapiens
  misc_RNA (1)...(19): siRNA sense strand
gaggaucuguuaaggcaaa

SEQ ID NO: 952936 - RNA, 19 nt, Homo sapiens
  misc_RNA (1)...(19): siRNA sense strand
uaaccugagucacauugua

SEQ ID NO: 952937 - RNA, 19 nt, Homo sapiens
  misc_RNA (1)...(19): siRNA sense strand
gaacuacuauaagcaagga

SEQ ID NO: 952938 - RNA, 19 nt, Homo sapiens
  misc_RNA (1)...(19): siRNA sense strand
cuaaaugcaucguuaacaa

SEQ ID NO: 952939 - RNA, 19 nt, Homo sapiens
  misc_RNA (1)...(19): siRNA sense strand
caaguaguguucaaggauu

SEQ ID NO: 952940 - RNA, 19 nt, Homo sapiens
  misc_RNA (1)...(19): siRNA sense strand
ugaauuaggucagaaggaa

SEQ ID NO: 952941 - RNA, 19 nt, Homo sapiens
  misc_RNA (1)...(19): siRNA sense strand
agucaaaggugcugagauu

SEQ ID NO: 952942 - RNA, 19 nt, Homo sapiens
  misc_RNA (1)...(19): siRNA sense strand
uaccagagccucagucuuu

SEQ ID NO: 952943 - RNA, 19 nt, Homo sapiens
  misc_RNA (1)...(19): siRNA sense strand
uaaaggaggcaaagaagaa

SEQ ID NO: 952944 - RNA, 19 nt, Homo sapiens
  misc_RNA (1)...(19): siRNA sense strand
gagaaccugcugaaauuaa

SEQ ID NO: 952945 - RNA, 19 nt, Homo sapiens
  misc_RNA (1)...(19): siRNA sense strand
cuagacagaugcaacagaa

SEQ ID NO: 952946 - RNA, 19 nt, Homo sapiens
  misc_RNA (1)...(19): siRNA sense strand
ugaaagaaacucuacagaa

SEQ ID NO: 952947 - RNA, 19 nt, Homo sapiens
  misc_RNA (1)...(19): siRNA sense strand
gcagaugaauugauuuuga

SEQ ID NO: 952948 - RNA, 19 nt, Homo sapiens
  misc_RNA (1)...(19): siRNA sense strand
caacauugguaucaaagca

SEQ ID NO: 952949 - RNA, 19 nt, Homo sapiens
  misc_RNA (1)...(19): siRNA sense strand
ggaucagcauuucaucaaa

SEQ ID NO: 952950 - RNA, 19 nt, Homo sapiens
  misc_RNA (1)...(19): siRNA sense strand
ccaaaucccuggaagaacu

SEQ ID NO: 952951 - RNA, 19 nt, Homo sapiens
  misc_RNA (1)...(19): siRNA sense strand
aagaaacucuacagaaugu

SEQ ID NO: 952952 - RNA, 19 nt, Homo sapiens
  misc_RNA (1)...(19): siRNA sense strand
ggagaaccugcugaaauua

SEQ ID NO: 952953 - RNA, 19 nt, Homo sapiens
  misc_RNA (1)...(19): siRNA sense strand
gccuacauguuuccugaua

SEQ ID NO: 952954 - RNA, 19 nt, Homo sapiens
  misc_RNA (1)...(19): siRNA sense strand
gcaaacuuguuccagaauc

SEQ ID NO: 952955 - RNA, 19 nt, Homo sapiens
  misc_RNA (1)...(19): siRNA sense strand
aaaaguggcucacaacauu

SEQ ID NO: 952956 - RNA, 19 nt, Homo sapiens
  misc_RNA (1)...(19): siRNA sense strand
gaagcaaagaacuacuaua

SEQ ID NO: 952957 - RNA, 19 nt, Homo sapiens
  misc_RNA (1)...(19): siRNA sense strand
gaucaucagagaagcauau

SEQ ID NO: 952958 - RNA, 19 nt, Homo sapiens
  misc_RNA (1)...(19): siRNA sense strand
gaacuagcuccacauguca

SEQ ID NO: 952959 - RNA, 19 nt, Homo sapiens
  misc_RNA (1)...(19): siRNA sense strand
guaaggcaauccagaaagg

SEQ ID NO: 952960 - RNA, 19 nt, Homo sapiens
  misc_RNA (1)...(19): siRNA sense strand
gcucuuugaggaucuguua

SEQ ID NO: 952961 - RNA, 19 nt, Homo sapiens
  misc_RNA (1)...(19): siRNA sense strand
ucagguuugugacugguua

SEQ ID NO: 952962 - RNA, 19 nt, Homo sapiens
  misc_RNA (1)...(19): siRNA sense strand
guuaacaaaggucugaaua

SEQ ID NO: 952963 - RNA, 19 nt, Homo sapiens
  misc_RNA (1)...(19): siRNA sense strand
aagcaaacuuguuccagaa

SEQ ID NO: 952964 - RNA, 19 nt, Homo sapiens
  misc_RNA (1)...(19): siRNA sense strand
agaacuagcuccacauguc

SEQ ID NO: 952965 - RNA, 19 nt, Homo sapiens
  misc_RNA (1)...(19): siRNA sense strand
gaaggaagaagcaaagaac

SEQ ID NO: 952966 - RNA, 19 nt, Homo sapiens
  misc_RNA (1)...(19): siRNA sense strand
uggcguaacugccuacaau

SEQ ID NO: 952967 - RNA, 19 nt, Homo sapiens
  misc_RNA (1)...(19): siRNA sense strand
ugauggaguuugcacugua

SEQ ID NO: 952968 - RNA, 19 nt, Homo sapiens
  misc_RNA (1)...(19): siRNA sense strand
gagaggaguuuuauaggaa

SEQ ID NO: 952969 - RNA, 19 nt, Homo sapiens
  misc_RNA (1)...(19): siRNA sense strand
gaaaaugaauuccaaaucc

SEQ ID NO: 952970 - RNA, 19 nt, Homo sapiens
  misc_RNA (1)...(19): siRNA sense strand
aggcaaagaagaaagauaa

SEQ ID NO: 952971 - RNA, 19 nt, Homo sapiens
  misc_RNA (1)...(19): siRNA sense strand
cagaaacuguacaaacugu

SEQ ID NO: 952972 - RNA, 19 nt, Homo sapiens
  misc_RNA (1)...(19): siRNA sense strand
gcaaguaguguucaaggau

SEQ ID NO: 952973 - RNA, 19 nt, Homo sapiens
  misc_RNA (1)...(19): siRNA sense strand
ggauggugcuaugguugua

SEQ ID NO: 952974 - RNA, 19 nt, Homo sapiens
  misc_RNA (1)...(19): siRNA sense strand
caccaagggacuuuauaua

SEQ ID NO: 952975 - RNA, 19 nt, Homo sapiens
  misc_RNA (1)...(19): siRNA sense strand
gaaguuaguccagcuguca

SEQ ID NO: 952976 - RNA, 19 nt, Homo sapiens
  misc_RNA (1)...(19): siRNA sense strand
gaucagcauuucaucaaaa

SEQ ID NO: 952977 - RNA, 19 nt, Homo sapiens
  misc_RNA (1)...(19): siRNA sense strand
ucagagaagcauauaagaa

SEQ ID NO: 952978 - RNA, 19 nt, Homo sapiens
  misc_RNA (1)...(19): siRNA sense strand
ccaagggacuuuauauagc

SEQ ID NO: 952979 - RNA, 19 nt, Homo sapiens
  misc_RNA (1)...(19): siRNA sense strand
ggagaggaguuuuauagga

SEQ ID NO: 952980 - RNA, 19 nt, Homo sapiens
  misc_RNA (1)...(19): siRNA sense strand
guaaaggaggcaaagaaga

SEQ ID NO: 952981 - RNA, 19 nt, Homo sapiens
  misc_RNA (1)...(19): siRNA sense strand
gaaacuguacaaacuguca

SEQ ID NO: 952982 - RNA, 19 nt, Homo sapiens
  misc_RNA (1)...(19): siRNA sense strand
gaagaaaagccaaaagaau

SEQ ID NO: 952983 - RNA, 19 nt, Homo sapiens
  misc_RNA (1)...(19): siRNA sense strand
ugaagaaguuaaccugagu

SEQ ID NO: 952984 - RNA, 19 nt, Homo sapiens
  misc_RNA (1)...(19): siRNA sense strand
caauaaggauguacgucau

SEQ ID NO: 952985 - RNA, 19 nt, Homo sapiens
  misc_RNA (1)...(19): siRNA sense strand
ccaaggcaauaaggaugua

SEQ ID NO: 952986 - RNA, 19 nt, Homo sapiens
  misc_RNA (1)...(19): siRNA sense strand
cagagaagcauauaagaag

SEQ ID NO: 952987 - RNA, 19 nt, Homo sapiens
  misc_RNA (1)...(19): siRNA sense strand
ucagagggaucagcauuuc

SEQ ID NO: 952988 - RNA, 19 nt, Homo sapiens
  misc_RNA (1)...(19): siRNA sense strand
gaaggagcagcaaauguca

SEQ ID NO: 952989 - RNA, 19 nt, Homo sapiens
  misc_RNA (1)...(19): siRNA sense strand
ggauuggaaugugcagcua

SEQ ID NO: 952990 - RNA, 19 nt, Homo sapiens
  misc_RNA (1)...(19): siRNA sense strand
cauguuuccugauacaaug

SEQ ID NO: 952991 - RNA, 19 nt, Homo sapiens
  misc_RNA (1)...(19): siRNA sense strand
aaagaaacucuacagaaug

SEQ ID NO: 952992 - RNA, 19 nt, Homo sapiens
  misc_RNA (1)...(19): siRNA sense strand
ggaagaagcaaagaacuac

SEQ ID NO: 952993 - RNA, 19 nt, Homo sapiens
  misc_RNA (1)...(19): siRNA sense strand
caaacugucagauacaaau

SEQ ID NO: 952994 - RNA, 19 nt, Homo sapiens
  misc_RNA (1)...(19): siRNA sense strand
ugggaaaucuccucuggau

SEQ ID NO: 952995 - RNA, 19 nt, Homo sapiens
  misc_RNA (1)...(19): siRNA sense strand
caaacuuguuccagaaucu

SEQ ID NO: 952996 - RNA, 19 nt, Homo sapiens
  misc_RNA (1)...(19): siRNA sense strand
ucagucaguuccugguuga

SEQ ID NO: 952997 - RNA, 19 nt, Homo sapiens
  misc_RNA (1)...(19): siRNA sense strand
caaaagaauuaccugaaug

SEQ ID NO: 952998 - RNA, 19 nt, Homo sapiens
  misc_RNA (1)...(19): siRNA sense strand
ccuaaagacaugugugaaa

SEQ ID NO: 952999 - RNA, 19 nt, Homo sapiens
  misc_RNA (1)...(19): siRNA sense strand
gggaucagcauuucaucaa

SEQ ID NO: 953000 - RNA, 19 nt, Homo sapiens
  misc_RNA (1)...(19): siRNA sense strand
gagcagacgaaggaaguaa

SEQ ID NO: 953001 - RNA, 19 nt, Homo sapiens
  misc_RNA (1)...(19): siRNA sense strand
ucagauacaaauacggaua

SEQ ID NO: 953002 - RNA, 19 nt, Homo sapiens
  misc_RNA (1)...(19): siRNA sense strand
gcagaaacuguacaaacug

SEQ ID NO: 953003 - RNA, 19 nt, Homo sapiens
  misc_RNA (1)...(19): siRNA sense strand
ggaaugugcagcuaaaugc

SEQ ID NO: 953004 - RNA, 19 nt, Homo sapiens
  misc_RNA (1)...(19): siRNA sense strand
gauggaguuugcacuguag

SEQ ID NO: 953005 - RNA, 19 nt, Homo sapiens
  misc_RNA (1)...(19): siRNA sense strand
caaaggugcugagauuacu

SEQ ID NO: 953006 - RNA, 19 nt, Homo sapiens
  misc_RNA (1)...(19): siRNA sense strand
uuaccugaauggagugaaa

SEQ ID NO: 953007 - RNA, 19 nt, Homo sapiens
  misc_RNA (1)...(19): siRNA sense strand
auaaggauguacgucauaa

SEQ ID NO: 953008 - RNA, 19 nt, Homo sapiens
  misc_RNA (1)...(19): siRNA sense strand
ggaccaaggcaauaaggau

SEQ ID NO: 953009 - RNA, 19 nt, Homo sapiens
  misc_RNA (1)...(19): siRNA sense strand
cguccuguccucugaguua

SEQ ID NO: 953010 - RNA, 19 nt, Homo sapiens
  misc_RNA (1)...(19): siRNA sense strand
cuacauguuuccugauaca

SEQ ID NO: 953011 - RNA, 19 nt, Homo sapiens
  misc_RNA (1)...(19): siRNA sense strand
cugguuauauccucuaguu

SEQ ID NO: 953012 - RNA, 19 nt, Homo sapiens
  misc_RNA (1)...(19): siRNA sense strand
uuggauaauucucucgaua

SEQ ID NO: 953013 - RNA, 19 nt, Homo sapiens
  misc_RNA (1)...(19): siRNA sense strand
gaauuuccaccuaaagaca

SEQ ID NO: 953014 - RNA, 19 nt, Homo sapiens
  misc_RNA (1)...(19): siRNA sense strand
gaaguaaaggaggcaaaga

SEQ ID NO: 953015 - RNA, 19 nt, Homo sapiens
  misc_RNA (1)...(19): siRNA sense strand
gcucagagggaucagcauu

SEQ ID NO: 953016 - RNA, 19 nt, Homo sapiens
  misc_RNA (1)...(19): siRNA sense strand
ucaacugucuggcaaggau

SEQ ID NO: 953017 - RNA, 19 nt, Homo sapiens
  misc_RNA (1)...(19): siRNA sense strand
gcauggaggugcaggauga

SEQ ID NO: 953018 - RNA, 19 nt, Homo sapiens
  misc_RNA (1)...(19): siRNA sense strand
aggaggagaucauccagua

SEQ ID NO: 953019 - RNA, 19 nt, Homo sapiens
  misc_RNA (1)...(19): siRNA sense strand
ucgcagcgcuggaagaagu

SEQ ID NO: 953020 - RNA, 19 nt, Homo sapiens
  misc_RNA (1)...(19): siRNA sense strand
ggguggaguucaagaagga

SEQ ID NO: 953021 - RNA, 19 nt, Homo sapiens
  misc_RNA (1)...(19): siRNA sense strand
aagcagggcuccgugaaga

SEQ ID NO: 953022 - RNA, 19 nt, Homo sapiens
  misc_RNA (1)...(19): siRNA sense strand
ucgggaagcuggagagcaa

SEQ ID NO: 953023 - RNA, 19 nt, Homo sapiens
  misc_RNA (1)...(19): siRNA sense strand
ugagccaccuagaggagua

SEQ ID NO: 953024 - RNA, 19 nt, Homo sapiens
  misc_RNA (1)...(19): siRNA sense strand
agcccaagcucaagcguuu

SEQ ID NO: 953025 - RNA, 19 nt, Homo sapiens
  misc_RNA (1)...(19): siRNA sense strand
gauccagaaucacaugaac

SEQ ID NO: 953026 - RNA, 19 nt, Homo sapiens
  misc_RNA (1)...(19): siRNA sense strand
ugucccagauccagaauca

SEQ ID NO: 953027 - RNA, 19 nt, Homo sapiens
  misc_RNA (1)...(19): siRNA sense strand
ccaacgugauccugcagau

SEQ ID NO: 953028 - RNA, 19 nt, Homo sapiens
  misc_RNA (1)...(19): siRNA sense strand
ccaccuagaggaguacuug

SEQ ID NO: 953029 - RNA, 19 nt, Homo sapiens
  misc_RNA (1)...(19): siRNA sense strand
ggacgaggaggagaucauc

SEQ ID NO: 953030 - RNA, 19 nt, Homo sapiens
  misc_RNA (1)...(19): siRNA sense strand
uggccgagguguccaagca

SEQ ID NO: 953031 - RNA, 19 nt, Homo sapiens
  misc_RNA (1)...(19): siRNA sense strand
ccaagaaguggugggaguu

SEQ ID NO: 953032 - RNA, 19 nt, Homo sapiens
  misc_RNA (1)...(19): siRNA sense strand
caagaaguggugggaguuc

SEQ ID NO: 953033 - RNA, 19 nt, Homo sapiens
  misc_RNA (1)...(19): siRNA sense strand
gaacagcucugggagauaa

SEQ ID NO: 953034 - RNA, 19 nt, Homo sapiens
  misc_RNA (1)...(19): siRNA sense strand
gaucaacaaugccuucuuu

SEQ ID NO: 953035 - RNA, 19 nt, Homo sapiens
  misc_RNA (1)...(19): siRNA sense strand
caacagaaauuucccaugu

SEQ ID NO: 953036 - RNA, 19 nt, Homo sapiens
  misc_RNA (1)...(19): siRNA sense strand
gaacaaagaaccaucugaa

SEQ ID NO: 953037 - RNA, 19 nt, Homo sapiens
  misc_RNA (1)...(19): siRNA sense strand
gugcccaucuggauuauua

SEQ ID NO: 953038 - RNA, 19 nt, Homo sapiens
  misc_RNA (1)...(19): siRNA sense strand
ugaccaaacucuggaauuu

SEQ ID NO: 953039 - RNA, 19 nt, Homo sapiens
  misc_RNA (1)...(19): siRNA sense strand
gcaauugcacuacugauuu

SEQ ID NO: 953040 - RNA, 19 nt, Homo sapiens
  misc_RNA (1)...(19): siRNA sense strand
caacaaugccuucuuucua

SEQ ID NO: 953041 - RNA, 19 nt, Homo sapiens
  misc_RNA (1)...(19): siRNA sense strand
ucagggaucuggcaacgua

SEQ ID NO: 953042 - RNA, 19 nt, Homo sapiens
  misc_RNA (1)...(19): siRNA sense strand
caacagagaagcaacagaa

SEQ ID NO: 953043 - RNA, 19 nt, Homo sapiens
  misc_RNA (1)...(19): siRNA sense strand
gcaaucagccauaagaaug

SEQ ID NO: 953044 - RNA, 19 nt, Homo sapiens
  misc_RNA (1)...(19): siRNA sense strand
aacaaugccuucuuucuaa

SEQ ID NO: 953045 - RNA, 19 nt, Homo sapiens
  misc_RNA (1)...(19): siRNA sense strand
ccauaagaaugaacaagaa

SEQ ID NO: 953046 - RNA, 19 nt, Homo sapiens
  misc_RNA (1)...(19): siRNA sense strand
ggaugacgcugaagauaag

SEQ ID NO: 953047 - RNA, 19 nt, Homo sapiens
  misc_RNA (1)...(19): siRNA sense strand
gaagggagggcauauuaau

SEQ ID NO: 953048 - RNA, 19 nt, Homo sapiens
  misc_RNA (1)...(19): siRNA sense strand
caaagaaccaucugaagug

SEQ ID NO: 953049 - RNA, 19 nt, Homo sapiens
  misc_RNA (1)...(19): siRNA sense strand
cagagaagcaacagaaauu

SEQ ID NO: 953050 - RNA, 19 nt, Homo sapiens
  misc_RNA (1)...(19): siRNA sense strand
gaggguaucauucugguuu

SEQ ID NO: 953051 - RNA, 19 nt, Homo sapiens
  misc_RNA (1)...(19): siRNA sense strand
ggauaccaaugaagaauac

SEQ ID NO: 953052 - RNA, 19 nt, Homo sapiens
  misc_RNA (1)...(19): siRNA sense strand
caacguagaagaaagaaca

SEQ ID NO: 953053 - RNA, 19 nt, Homo sapiens
  misc_RNA (1)...(19): siRNA sense strand
gaggugcaaucagccauaa

SEQ ID NO: 953054 - RNA, 19 nt, Homo sapiens
  misc_RNA (1)...(19): siRNA sense strand
gagaaaaguucccaacaga

SEQ ID NO: 953055 - RNA, 19 nt, Homo sapiens
  misc_RNA (1)...(19): siRNA sense strand
ugaaguggaugacgcugaa

SEQ ID NO: 953056 - RNA, 19 nt, Homo sapiens
  misc_RNA (1)...(19): siRNA sense strand
gaagauaagugugaaaaca

SEQ ID NO: 953057 - RNA, 19 nt, Homo sapiens
  misc_RNA (1)...(19): siRNA sense strand
gaaaacaugaucacaauug

SEQ ID NO: 953058 - RNA, 19 nt, Homo sapiens
  misc_RNA (1)...(19): siRNA sense strand
gggauaccaaugaagaaua

SEQ ID NO: 953059 - RNA, 19 nt, Homo sapiens
  misc_RNA (1)...(19): siRNA sense strand
guagaagaaagaacaaaga

SEQ ID NO: 953060 - RNA, 19 nt, Homo sapiens
  misc_RNA (1)...(19): siRNA sense strand
gagaagcaacagaaauuuc

SEQ ID NO: 953061 - RNA, 19 nt, Homo sapiens
  misc_RNA (1)...(19): siRNA sense strand
guccuacuuugcaauguaa

SEQ ID NO: 953062 - RNA, 19 nt, Homo sapiens
  misc_RNA (1)...(19): siRNA sense strand
acaaugccuucuuucuaaa

SEQ ID NO: 953063 - RNA, 19 nt, Homo sapiens
  misc_RNA (1)...(19): siRNA sense strand
gaaaaguucccaacagaga

SEQ ID NO: 953064 - RNA, 19 nt, Homo sapiens
  misc_RNA (1)...(19): siRNA sense strand
gccauaagaaugaacaaga

SEQ ID NO: 953065 - RNA, 19 nt, Homo sapiens
  misc_RNA (1)...(19): siRNA sense strand
agaaauuucccauguccua

SEQ ID NO: 953066 - RNA, 19 nt, Homo sapiens
  misc_RNA (1)...(19): siRNA sense strand
ucugggagauaaagcauau

SEQ ID NO: 953067 - RNA, 19 nt, Homo sapiens
  misc_RNA (1)...(19): siRNA sense strand
gcauaugccugggauacca

SEQ ID NO: 953068 - RNA, 19 nt, Homo sapiens
  misc_RNA (1)...(19): siRNA sense strand
acaagaaccggaucaacaa

SEQ ID NO: 953069 - RNA, 19 nt, Homo sapiens
  misc_RNA (1)...(19): siRNA sense strand
caaucagccauaagaauga

SEQ ID NO: 953070 - RNA, 19 nt, Homo sapiens
  misc_RNA (1)...(19): siRNA sense strand
uggaugacgcugaagauaa

SEQ ID NO: 953071 - RNA, 19 nt, Homo sapiens
  misc_RNA (1)...(19): siRNA sense strand
acaaagaaccaucugaagu

SEQ ID NO: 953072 - RNA, 19 nt, Homo sapiens
  misc_RNA (1)...(19): siRNA sense strand
uguccuacuuugcaaugua

SEQ ID NO: 953073 - RNA, 19 nt, Homo sapiens
  misc_RNA (1)...(19): siRNA sense strand
ugaagggagggcauauuaa

SEQ ID NO: 953074 - RNA, 19 nt, Homo sapiens
  misc_RNA (1)...(19): siRNA sense strand
caauugcacuacugauuuu

SEQ ID NO: 953075 - RNA, 19 nt, Homo sapiens
  misc_RNA (1)...(19): siRNA sense strand
gaacaagaaccggaucaac

SEQ ID NO: 953076 - RNA, 19 nt, Homo sapiens
  misc_RNA (1)...(19): siRNA sense strand
augaagggagggcauauua

SEQ ID NO: 953077 - RNA, 19 nt, Homo sapiens
  misc_RNA (1)...(19): siRNA sense strand
agaaccaucugaaguggau

SEQ ID NO: 953078 - RNA, 19 nt, Homo sapiens
  misc_RNA (1)...(19): siRNA sense strand
gcccaucuggauuauuaua

SEQ ID NO: 953079 - RNA, 19 nt, Homo sapiens
  misc_RNA (1)...(19): siRNA sense strand
ggugcaaucagccauaaga

SEQ ID NO: 953080 - RNA, 19 nt, Homo sapiens
  misc_RNA (1)...(19): siRNA sense strand
gggagggcauauuaaugau

SEQ ID NO: 953081 - RNA, 19 nt, Homo sapiens
  misc_RNA (1)...(19): siRNA sense strand
gaucuggcaacguagaaga

SEQ ID NO: 953082 - RNA, 19 nt, Homo sapiens
  misc_RNA (1)...(19): siRNA sense strand
agggagggcauauuaauga

SEQ ID NO: 953083 - RNA, 19 nt, Homo sapiens
  misc_RNA (1)...(19): siRNA sense strand
caucaucauaguugcaauu

SEQ ID NO: 953084 - RNA, 19 nt, Homo sapiens
  misc_RNA (1)...(19): siRNA sense strand
ucugugcccaucuggauua

SEQ ID NO: 953085 - RNA, 19 nt, Homo sapiens
  misc_RNA (1)...(19): siRNA sense strand
agagaagcaacagaaauuu

SEQ ID NO: 953086 - RNA, 19 nt, Homo sapiens
  misc_RNA (1)...(19): siRNA sense strand
ggagggcauauuaaugaug

SEQ ID NO: 953087 - RNA, 19 nt, Homo sapiens
  misc_RNA (1)...(19): siRNA sense strand
aaaauggcauccccucuga

SEQ ID NO: 953088 - RNA, 19 nt, Homo sapiens
  misc_RNA (1)...(19): siRNA sense strand
guggaugacgcugaagaua

SEQ ID NO: 953089 - RNA, 19 nt, Homo sapiens
  misc_RNA (1)...(19): siRNA sense strand
ucauucugguuugugguua

SEQ ID NO: 953090 - RNA, 19 nt, Homo sapiens
  misc_RNA (1)...(19): siRNA sense strand
gacaugaagggagggcaua

SEQ ID NO: 953091 - RNA, 19 nt, Homo sapiens
  misc_RNA (1)...(19): siRNA sense strand
aacaagaaccggaucaaca

SEQ ID NO: 953092 - RNA, 19 nt, Homo sapiens
  misc_RNA (1)...(19): siRNA sense strand
ucacacccuuccugcuguu

SEQ ID NO: 953093 - RNA, 19 nt, Homo sapiens
  misc_RNA (1)...(19): siRNA sense strand
gagacuuaguaucagaaca

SEQ ID NO: 953094 - RNA, 19 nt, Homo sapiens
  misc_RNA (1)...(19): siRNA sense strand
acagagaagcaacagaaau

SEQ ID NO: 953095 - RNA, 19 nt, Homo sapiens
  misc_RNA (1)...(19): siRNA sense strand
caagaaccggaucaacaau

SEQ ID NO: 953096 - RNA, 19 nt, Homo sapiens
  misc_RNA (1)...(19): siRNA sense strand
aaucagccauaagaaugaa

SEQ ID NO: 953097 - RNA, 19 nt, Homo sapiens
  misc_RNA (1)...(19): siRNA sense strand
ugaggugcaaucagccaua

SEQ ID NO: 953098 - RNA, 19 nt, Homo sapiens
  misc_RNA (1)...(19): siRNA sense strand
ucaacaaugccuucuuucu

SEQ ID NO: 953099 - RNA, 19 nt, Homo sapiens
  misc_RNA (1)...(19): siRNA sense strand
ucaaccaggugcagaaaau

SEQ ID NO: 953100 - RNA, 19 nt, Homo sapiens
  misc_RNA (1)...(19): siRNA sense strand
agugagacuuaguaucaga

SEQ ID NO: 953101 - RNA, 19 nt, Homo sapiens
  misc_RNA (1)...(19): siRNA sense strand
ccugggauaccaaugaaga

SEQ ID NO: 953102 - RNA, 19 nt, Homo sapiens
  misc_RNA (1)...(19): siRNA sense strand
caucugugcccaucuggau

SEQ ID NO: 953103 - RNA, 19 nt, Homo sapiens
  misc_RNA (1)...(19): siRNA sense strand
agaaccggaucaacaaugc

SEQ ID NO: 953104 - RNA, 19 nt, Homo sapiens
  misc_RNA (1)...(19): siRNA sense strand
gugcaaucagccauaagaa

SEQ ID NO: 953105 - RNA, 19 nt, Homo sapiens
  misc_RNA (1)...(19): siRNA sense strand
uggcaacguagaagaaaga

SEQ ID NO: 953106 - RNA, 19 nt, Homo sapiens
  misc_RNA (1)...(19): siRNA sense strand
ggaucaacaaugccuucuu

SEQ ID NO: 953107 - RNA, 19 nt, Homo sapiens
  misc_RNA (1)...(19): siRNA sense strand
ugccugggauaccaaugaa

SEQ ID NO: 953108 - RNA, 19 nt, Homo sapiens
  misc_RNA (1)...(19): siRNA sense strand
aaagaacaaagaaccaucu

SEQ ID NO: 953109 - RNA, 19 nt, Homo sapiens
  misc_RNA (1)...(19): siRNA sense strand
gaaaguaugugauggugau

SEQ ID NO: 953110 - RNA, 19 nt, Homo sapiens
  misc_RNA (1)...(19): siRNA sense strand
gauaaucccauccaugaaa

SEQ ID NO: 953111 - RNA, 19 nt, Homo sapiens
  misc_RNA (1)...(19): siRNA sense strand
gaagauuuacacaggaaua

SEQ ID NO: 953112 - RNA, 19 nt, Homo sapiens
  misc_RNA (1)...(19): siRNA sense strand
gaagaugacagaccuuucu

SEQ ID NO: 953113 - RNA, 19 nt, Homo sapiens
  misc_RNA (1)...(19): siRNA sense strand
uagaagauuuacacaggaa

SEQ ID NO: 953114 - RNA, 19 nt, Homo sapiens
  misc_RNA (1)...(19): siRNA sense strand
gaacuggagguagaagauu

SEQ ID NO: 953115 - RNA, 19 nt, Homo sapiens
  misc_RNA (1)...(19): siRNA sense strand
gauuuacacaggaauauuc

SEQ ID NO: 953116 - RNA, 19 nt, Homo sapiens
  misc_RNA (1)...(19): siRNA sense strand
cugauaaucccauccauga

SEQ ID NO: 953117 - RNA, 19 nt, Homo sapiens
  misc_RNA (1)...(19): siRNA sense strand
ggaacuggagguagaagau

SEQ ID NO: 953118 - RNA, 19 nt, Homo sapiens
  misc_RNA (1)...(19): siRNA sense strand
ugugggaacuggagguaga

SEQ ID NO: 953119 - RNA, 19 nt, Homo sapiens
  misc_RNA (1)...(19): siRNA sense strand
aacuggagguagaagauuu

SEQ ID NO: 953120 - RNA, 19 nt, Homo sapiens
  misc_RNA (1)...(19): siRNA sense strand
ggagguagaagauuuacac

SEQ ID NO: 953121 - RNA, 19 nt, Homo sapiens
  misc_RNA (1)...(19): siRNA sense strand
gugaagaugacagaccuuu

SEQ ID NO: 953122 - RNA, 19 nt, Homo sapiens
  misc_RNA (1)...(19): siRNA sense strand
gcagggcaggguagugaug

SEQ ID NO: 953123 - RNA, 19 nt, Homo sapiens
  misc_RNA (1)...(19): siRNA sense strand
ucccauccaugaaaguaug

SEQ ID NO: 953124 - RNA, 19 nt, Homo sapiens
  misc_RNA (1)...(19): siRNA sense strand
ccugcaggcugugaagaug

SEQ ID NO: 953125 - RNA, 19 nt, Homo sapiens
  misc_RNA (1)...(19): siRNA sense strand
ucuagucccaggaaaguau

SEQ ID NO: 953126 - RNA, 19 nt, Homo sapiens
  misc_RNA (1)...(19): siRNA sense strand
gcacauugcugaauuaaua

SEQ ID NO: 953127 - RNA, 19 nt, Homo sapiens
  misc_RNA (1)...(19): siRNA sense strand
gcagaagacuuauuuguaa

SEQ ID NO: 953128 - RNA, 19 nt, Homo sapiens
  misc_RNA (1)...(19): siRNA sense strand
gaaacuagcucuucaaagu

SEQ ID NO: 953129 - RNA, 19 nt, Homo sapiens
  misc_RNA (1)...(19): siRNA sense strand
gcagacgacuuuauagaua

SEQ ID NO: 953130 - RNA, 19 nt, Homo sapiens
  misc_RNA (1)...(19): siRNA sense strand
gaaauacgcuuuaccaagu

SEQ ID NO: 953131 - RNA, 19 nt, Homo sapiens
  misc_RNA (1)...(19): siRNA sense strand
gaaaucaucuggcuacuuc

SEQ ID NO: 953132 - RNA, 19 nt, Homo sapiens
  misc_RNA (1)...(19): siRNA sense strand
ggagaauguugauguguua

SEQ ID NO: 953133 - RNA, 19 nt, Homo sapiens
  misc_RNA (1)...(19): siRNA sense strand
gcacuaauuucucuucaaa

SEQ ID NO: 953134 - RNA, 19 nt, Homo sapiens
  misc_RNA (1)...(19): siRNA sense strand
uaaagaagaugauggaaga

SEQ ID NO: 953135 - RNA, 19 nt, Homo sapiens
  misc_RNA (1)...(19): siRNA sense strand
guacagcccugcuauagaa

SEQ ID NO: 953136 - RNA, 19 nt, Homo sapiens
  misc_RNA (1)...(19): siRNA sense strand
ccagauggcugcacuguuu

SEQ ID NO: 953137 - RNA, 19 nt, Homo sapiens
  misc_RNA (1)...(19): siRNA sense strand
caucagaucucuccauauu

SEQ ID NO: 953138 - RNA, 19 nt, Homo sapiens
  misc_RNA (1)...(19): siRNA sense strand
gaacuuagagcacauguga

SEQ ID NO: 953139 - RNA, 19 nt, Homo sapiens
  misc_RNA (1)...(19): siRNA sense strand
ggaaguauuugauuucaga

SEQ ID NO: 953140 - RNA, 19 nt, Homo sapiens
  misc_RNA (1)...(19): siRNA sense strand
gaucugcacugaaggaauu

SEQ ID NO: 953141 - RNA, 19 nt, Homo sapiens
  misc_RNA (1)...(19): siRNA sense strand
ugaccaaccuugauaaauu

SEQ ID NO: 953142 - RNA, 19 nt, Homo sapiens
  misc_RNA (1)...(19): siRNA sense strand
gagcacaugugaggaaaua

SEQ ID NO: 953143 - RNA, 19 nt, Homo sapiens
  misc_RNA (1)...(19): siRNA sense strand
gcaaaaccauccuaucuua

SEQ ID NO: 953144 - RNA, 19 nt, Homo sapiens
  misc_RNA (1)...(19): siRNA sense strand
guggagaaaugcccaguua

SEQ ID NO: 953145 - RNA, 19 nt, Homo sapiens
  misc_RNA (1)...(19): siRNA sense strand
gaaagcguuugugaacuua

SEQ ID NO: 953146 - RNA, 19 nt, Homo sapiens
  misc_RNA (1)...(19): siRNA sense strand
gaagagcgacaucauauug

SEQ ID NO: 953147 - RNA, 19 nt, Homo sapiens
  misc_RNA (1)...(19): siRNA sense strand
ggucguagcucuuucuuca

SEQ ID NO: 953148 - RNA, 19 nt, Homo sapiens
  misc_RNA (1)...(19): siRNA sense strand
gcagauaacaugccaaaga

SEQ ID NO: 953149 - RNA, 19 nt, Homo sapiens
  misc_RNA (1)...(19): siRNA sense strand
guaaugugaugucucagua

SEQ ID NO: 953150 - RNA, 19 nt, Homo sapiens
  misc_RNA (1)...(19): siRNA sense strand
ucaaugaacucgugcagaa

SEQ ID NO: 953151 - RNA, 19 nt, Homo sapiens
  misc_RNA (1)...(19): siRNA sense strand
gaagagugcagacgacuuu

SEQ ID NO: 953152 - RNA, 19 nt, Homo sapiens
  misc_RNA (1)...(19): siRNA sense strand
caacaacaaucaacagcuu

SEQ ID NO: 953153 - RNA, 19 nt, Homo sapiens
  misc_RNA (1)...(19): siRNA sense strand
agaggaauauucugacaua

SEQ ID NO: 953154 - RNA, 19 nt, Homo sapiens
  misc_RNA (1)...(19): siRNA sense strand
gaacuuaccuacagaaaau

SEQ ID NO: 953155 - RNA, 19 nt, Homo sapiens
  misc_RNA (1)...(19): siRNA sense strand
gaagaugauggaagaauuu

SEQ ID NO: 953156 - RNA, 19 nt, Homo sapiens
  misc_RNA (1)...(19): siRNA sense strand
gugaauugcugaauacuau

SEQ ID NO: 953157 - RNA, 19 nt, Homo sapiens
  misc_RNA (1)...(19): siRNA sense strand
ggaguuacccucucaauca

SEQ ID NO: 953158 - RNA, 19 nt, Homo sapiens
  misc_RNA (1)...(19): siRNA sense strand
ggaaagaugaugaauacaa

SEQ ID NO: 953159 - RNA, 19 nt, Homo sapiens
  misc_RNA (1)...(19): siRNA sense strand
ucacaaagcugcagaagac

SEQ ID NO: 953160 - RNA, 19 nt, Homo sapiens
  misc_RNA (1)...(19): siRNA sense strand
ggagaaaugcccaguuauu

SEQ ID NO: 953161 - RNA, 19 nt, Homo sapiens
  misc_RNA (1)...(19): siRNA sense strand
cagauaacaugccaaagaa

SEQ ID NO: 953162 - RNA, 19 nt, Homo sapiens
  misc_RNA (1)...(19): siRNA sense strand
guaugaaguuucuaaguga

SEQ ID NO: 953163 - RNA, 19 nt, Homo sapiens
  misc_RNA (1)...(19): siRNA sense strand
gguaugaaguuucuaagug

SEQ ID NO: 953164 - RNA, 19 nt, Homo sapiens
  misc_RNA (1)...(19): siRNA sense strand
gaccaaccuugauaaauug

SEQ ID NO: 953165 - RNA, 19 nt, Homo sapiens
  misc_RNA (1)...(19): siRNA sense strand
gaaauacggaccuguaaug

SEQ ID NO: 953166 - RNA, 19 nt, Homo sapiens
  misc_RNA (1)...(19): siRNA sense strand
gugaauaccucucuuugga

SEQ ID NO: 953167 - RNA, 19 nt, Homo sapiens
  misc_RNA (1)...(19): siRNA sense strand
cggauuaccuugugagauu

SEQ ID NO: 953168 - RNA, 19 nt, Homo sapiens
  misc_RNA (1)...(19): siRNA sense strand
gcaauggccauauagcaua

SEQ ID NO: 953169 - RNA, 19 nt, Homo sapiens
  misc_RNA (1)...(19): siRNA sense strand
gcagauugauauuacaaga

SEQ ID NO: 953170 - RNA, 19 nt, Homo sapiens
  misc_RNA (1)...(19): siRNA sense strand
gccagaugauuguggauua

SEQ ID NO: 953171 - RNA, 19 nt, Homo sapiens
  misc_RNA (1)...(19): siRNA sense strand
ggaugacuauguauaauca

SEQ ID NO: 953172 - RNA, 19 nt, Homo sapiens
  misc_RNA (1)...(19): siRNA sense strand
caaacaagcucgaaaucuc

SEQ ID NO: 953173 - RNA, 19 nt, Homo sapiens
  misc_RNA (1)...(19): siRNA sense strand
ggaccauguuugugaauug

SEQ ID NO: 953174 - RNA, 19 nt, Homo sapiens
  misc_RNA (1)...(19): siRNA sense strand
caaugaauguguaugaguu

SEQ ID NO: 953175 - RNA, 19 nt, Homo sapiens
  misc_RNA (1)...(19): siRNA sense strand
gcaaugaaagcguuuguga

SEQ ID NO: 953176 - RNA, 19 nt, Homo sapiens
  misc_RNA (1)...(19): siRNA sense strand
guaauauguuccuagauga

SEQ ID NO: 953177 - RNA, 19 nt, Homo sapiens
  misc_RNA (1)...(19): siRNA sense strand
ggaaugagauuagauuggu

SEQ ID NO: 953178 - RNA, 19 nt, Homo sapiens
  misc_RNA (1)...(19): siRNA sense strand
gcaccuaguacaaugcuua

SEQ ID NO: 953179 - RNA, 19 nt, Homo sapiens
  misc_RNA (1)...(19): siRNA sense strand
acagaacaguguacccuua

SEQ ID NO: 953180 - RNA, 19 nt, Homo sapiens
  misc_RNA (1)...(19): siRNA sense strand
gaacuuggaaagaugauga

SEQ ID NO: 953181 - RNA, 19 nt, Homo sapiens
  misc_RNA (1)...(19): siRNA sense strand
cuacagcacugaaccuuug

SEQ ID NO: 953182 - RNA, 19 nt, Homo sapiens
  misc_RNA (1)...(19): siRNA sense strand
uggauuaucuuuggcuuua

SEQ ID NO: 953183 - RNA, 19 nt, Homo sapiens
  misc_RNA (1)...(19): siRNA sense strand
gcacaacuacagaaagaaa

SEQ ID NO: 953184 - RNA, 19 nt, Homo sapiens
  misc_RNA (1)...(19): siRNA sense strand
aaacauuaguccagaagaa

SEQ ID NO: 953185 - RNA, 19 nt, Homo sapiens
  misc_RNA (1)...(19): siRNA sense strand
guacuccagucaauagaaa

SEQ ID NO: 953186 - RNA, 19 nt, Homo sapiens
  misc_RNA (1)...(19): siRNA sense strand
ugccaagucuucuuugaua

SEQ ID NO: 953187 - RNA, 19 nt, Homo sapiens
  misc_RNA (1)...(19): siRNA sense strand
caacuaugcccaugaaaug

SEQ ID NO: 953188 - RNA, 19 nt, Homo sapiens
  misc_RNA (1)...(19): siRNA sense strand
ugaagaggaugacaauaau

SEQ ID NO: 953189 - RNA, 19 nt, Homo sapiens
  misc_RNA (1)...(19): siRNA sense strand
ugaaagcguuugugaacuu

SEQ ID NO: 953190 - RNA, 19 nt, Homo sapiens
  misc_RNA (1)...(19): siRNA sense strand
gaugauggaagaauuugua

SEQ ID NO: 953191 - RNA, 19 nt, Homo sapiens
  misc_RNA (1)...(19): siRNA sense strand
ccagauugcugcagcuuug

SEQ ID NO: 953192 - RNA, 19 nt, Homo sapiens
  misc_RNA (1)...(19): siRNA sense strand
gaauguguaugaguuauca

SEQ ID NO: 953193 - RNA, 19 nt, Homo sapiens
  misc_RNA (1)...(19): siRNA sense strand
uuagagaugucuuauccua

SEQ ID NO: 953194 - RNA, 19 nt, Homo sapiens
  misc_RNA (1)...(19): siRNA sense strand
uaacaaguguaagagcaua

SEQ ID NO: 953195 - RNA, 19 nt, Homo sapiens
  misc_RNA (1)...(19): siRNA sense strand
gcaguaccuuucuggcuuu

SEQ ID NO: 953196 - RNA, 19 nt, Homo sapiens
  misc_RNA (1)...(19): siRNA sense strand
caaagcugcagaagacuua

SEQ ID NO: 953197 - RNA, 19 nt, Homo sapiens
  misc_RNA (1)...(19): siRNA sense strand
caaaugguauauccucgaa

SEQ ID NO: 953198 - RNA, 19 nt, Homo sapiens
  misc_RNA (1)...(19): siRNA sense strand
gagaaaugcccaguuauug

SEQ ID NO: 953199 - RNA, 19 nt, Homo sapiens
  misc_RNA (1)...(19): siRNA sense strand
ccaguaaugugaugucuca

SEQ ID NO: 953200 - RNA, 19 nt, Homo sapiens
  misc_RNA (1)...(19): siRNA sense strand
uguaauauguuccuagaug

SEQ ID NO: 953201 - RNA, 19 nt, Homo sapiens
  misc_RNA (1)...(19): siRNA sense strand
ccuggaaucugcugugaaa

SEQ ID NO: 953202 - RNA, 19 nt, Homo sapiens
  misc_RNA (1)...(19): siRNA sense strand
caacaaacacaacauuuag

SEQ ID NO: 953203 - RNA, 19 nt, Homo sapiens
  misc_RNA (1)...(19): siRNA sense strand
gauaacaugccaaagaaga

SEQ ID NO: 953204 - RNA, 19 nt, Homo sapiens
  misc_RNA (1)...(19): siRNA sense strand
cuacuaggcccauauggua

SEQ ID NO: 953205 - RNA, 19 nt, Homo sapiens
  misc_RNA (1)...(19): siRNA sense strand
cauccuaucuuaucgacaa

SEQ ID NO: 953206 - RNA, 19 nt, Homo sapiens
  misc_RNA (1)...(19): siRNA sense strand
acacugcacuuucugaguu

SEQ ID NO: 953207 - RNA, 19 nt, Homo sapiens
  misc_RNA (1)...(19): siRNA sense strand
aaagcagacugguaagaaa

SEQ ID NO: 953208 - RNA, 19 nt, Homo sapiens
  misc_RNA (1)...(19): siRNA sense strand
gaauuuaaggaccauguuu

SEQ ID NO: 953209 - RNA, 19 nt, Homo sapiens
  misc_RNA (1)...(19): siRNA sense strand
ugagauugauccugcauug

SEQ ID NO: 953210 - RNA, 19 nt, Homo sapiens
  misc_RNA (1)...(19): siRNA sense strand
ccacuacuuugcacucauu

SEQ ID NO: 953211 - RNA, 19 nt, Homo sapiens
  misc_RNA (1)...(19): siRNA sense strand
gaacucgugcagaaucuuu

SEQ ID NO: 953212 - RNA, 19 nt, Homo sapiens
  misc_RNA (1)...(19): siRNA sense strand
gaggaaauacggaccugua

SEQ ID NO: 953213 - RNA, 19 nt, Homo sapiens
  misc_RNA (1)...(19): siRNA sense strand
gcacugaaccuuuggaaac

SEQ ID NO: 953214 - RNA, 19 nt, Homo sapiens
  misc_RNA (1)...(19): siRNA sense strand
agaagaugauggaagaauu

SEQ ID NO: 953215 - RNA, 19 nt, Homo sapiens
  misc_RNA (1)...(19): siRNA sense strand
uguuacaucuucugcauaa

SEQ ID NO: 953216 - RNA, 19 nt, Homo sapiens
  misc_RNA (1)...(19): siRNA sense strand
gagauuagauugguuuagg

SEQ ID NO: 953217 - RNA, 19 nt, Homo sapiens
  misc_RNA (1)...(19): siRNA sense strand
gaagaaaggaaggcaauca

SEQ ID NO: 953218 - RNA, 19 nt, Homo sapiens
  misc_RNA (1)...(19): siRNA sense strand
ccaaagccaucaaccagau

SEQ ID NO: 953219 - RNA, 19 nt, Homo sapiens
  misc_RNA (1)...(19): siRNA sense strand
gaagggcauugcaacaaca

SEQ ID NO: 953220 - RNA, 19 nt, Homo sapiens
  misc_RNA (1)...(19): siRNA sense strand
gaagaggaugacaauaauu

SEQ ID NO: 953221 - RNA, 19 nt, Homo sapiens
  misc_RNA (1)...(19): siRNA sense strand
guagaaacccgcaacaaca

SEQ ID NO: 953222 - RNA, 19 nt, Homo sapiens
  misc_RNA (1)...(19): siRNA sense strand
ccagaagagcgacaucaua

SEQ ID NO: 953223 - RNA, 19 nt, Homo sapiens
  misc_RNA (1)...(19): siRNA sense strand
uagcaagucucuuucagau

SEQ ID NO: 953224 - RNA, 19 nt, Homo sapiens
  misc_RNA (1)...(19): siRNA sense strand
ggcauuauauuacuucaca

SEQ ID NO: 953225 - RNA, 19 nt, Homo sapiens
  misc_RNA (1)...(19): siRNA sense strand
caagggaaacugauaugaa

SEQ ID NO: 953226 - RNA, 19 nt, Homo sapiens
  misc_RNA (1)...(19): siRNA sense strand
gaaugugccuuuaagaaga

SEQ ID NO: 953227 - RNA, 19 nt, Homo sapiens
  misc_RNA (1)...(19): siRNA sense strand
acaaagaguugaacaaaga

SEQ ID NO: 953228 - RNA, 19 nt, Homo sapiens
  misc_RNA (1)...(19): siRNA sense strand
gcacagccaucuugucaug

SEQ ID NO: 953229 - RNA, 19 nt, Homo sapiens
  misc_RNA (1)...(19): siRNA sense strand
ggagacagccagcgaguuu

SEQ ID NO: 953230 - RNA, 19 nt, Homo sapiens
  misc_RNA (1)...(19): siRNA sense strand
gggaugcucuauucuggua

SEQ ID NO: 953231 - RNA, 19 nt, Homo sapiens
  misc_RNA (1)...(19): siRNA sense strand
agaagggccuccaggauuu

SEQ ID NO: 953232 - RNA, 19 nt, Homo sapiens
  misc_RNA (1)...(19): siRNA sense strand
gcuagagucugcaagaaug

SEQ ID NO: 953233 - RNA, 19 nt, Homo sapiens
  misc_RNA (1)...(19): siRNA sense strand
gcaaaucauuaaagaaguc

SEQ ID NO: 953234 - RNA, 19 nt, Homo sapiens
  misc_RNA (1)...(19): siRNA sense strand
gaguuugacuucuuugaga

SEQ ID NO: 953235 - RNA, 19 nt, Homo sapiens
  misc_RNA (1)...(19): siRNA sense strand
ggaaauacaaagaguugaa

SEQ ID NO: 953236 - RNA, 19 nt, Homo sapiens
  misc_RNA (1)...(19): siRNA sense strand
uggaagagauucagcuguu

SEQ ID NO: 953237 - RNA, 19 nt, Homo sapiens
  misc_RNA (1)...(19): siRNA sense strand
cagcgaguuugacuucuuu

SEQ ID NO: 953238 - RNA, 19 nt, Homo sapiens
  misc_RNA (1)...(19): siRNA sense strand
gcccgcaaaucauuaaaga

SEQ ID NO: 953239 - RNA, 19 nt, Homo sapiens
  misc_RNA (1)...(19): siRNA sense strand
gcagugagcccauccugau

SEQ ID NO: 953240 - RNA, 19 nt, Homo sapiens
  misc_RNA (1)...(19): siRNA sense strand
ugucagccuuggccucuua

SEQ ID NO: 953241 - RNA, 19 nt, Homo sapiens
  misc_RNA (1)...(19): siRNA sense strand
gugcucaucugguggaaga

SEQ ID NO: 953242 - RNA, 19 nt, Homo sapiens
  misc_RNA (1)...(19): siRNA sense strand
gaacguagggcacuuagcu

SEQ ID NO: 953243 - RNA, 19 nt, Homo sapiens
  misc_RNA (1)...(19): siRNA sense strand
acagccaucuugucaugua

SEQ ID NO: 953244 - RNA, 19 nt, Homo sapiens
  misc_RNA (1)...(19): siRNA sense strand
cagaagggccuccaggauu

SEQ ID NO: 953245 - RNA, 19 nt, Homo sapiens
  misc_RNA (1)...(19): siRNA sense strand
gcucuauucugguacuaug

SEQ ID NO: 953246 - RNA, 19 nt, Homo sapiens
  misc_RNA (1)...(19): siRNA sense strand
ggaagagauucagcuguuc

SEQ ID NO: 953247 - RNA, 19 nt, Homo sapiens
  misc_RNA (1)...(19): siRNA sense strand
uggaugggaugcucuauuc

SEQ ID NO: 953248 - RNA, 19 nt, Homo sapiens
  misc_RNA (1)...(19): siRNA sense strand
gagugaaugugccuuuaag

SEQ ID NO: 953249 - RNA, 19 nt, Homo sapiens
  misc_RNA (1)...(19): siRNA sense strand
gggcacagccaucuuguca

SEQ ID NO: 953250 - RNA, 19 nt, Homo sapiens
  misc_RNA (1)...(19): siRNA sense strand
gaagaagagcaaugagaca

SEQ ID NO: 953251 - RNA, 19 nt, Homo sapiens
  misc_RNA (1)...(19): siRNA sense strand
gugaaugugccuuuaagaa

SEQ ID NO: 953252 - RNA, 19 nt, Homo sapiens
  misc_RNA (1)...(19): siRNA sense strand
gccuuggccucuuauuauu

SEQ ID NO: 953253 - RNA, 19 nt, Homo sapiens
  misc_RNA (1)...(19): siRNA sense strand
cagccuuggccucuuauua

SEQ ID NO: 953254 - RNA, 19 nt, Homo sapiens
  misc_RNA (1)...(19): siRNA sense strand
gcuguucccugacccugaa

SEQ ID NO: 953255 - RNA, 19 nt, Homo sapiens
  misc_RNA (1)...(19): siRNA sense strand
gaugaacguagggcacuua

SEQ ID NO: 953256 - RNA, 19 nt, Homo sapiens
  misc_RNA (1)...(19): siRNA sense strand
aagagugaaugugccuuua

SEQ ID NO: 953257 - RNA, 19 nt, Homo sapiens
  misc_RNA (1)...(19): siRNA sense strand
cacugucacuguccucuuu

SEQ ID NO: 953258 - RNA, 19 nt, Homo sapiens
  misc_RNA (1)...(19): siRNA sense strand
gaaacuucacgcuggacua

SEQ ID NO: 953259 - RNA, 19 nt, Homo sapiens
  misc_RNA (1)...(19): siRNA sense strand
ccacaucuacgcagucuuc

SEQ ID NO: 953260 - RNA, 19 nt, Homo sapiens
  misc_RNA (1)...(19): siRNA sense strand
guagggcacuuagcuucuu

SEQ ID NO: 953261 - RNA, 19 nt, Homo sapiens
  misc_RNA (1)...(19): siRNA sense strand
ugaaaucuggcguggagua

SEQ ID NO: 953262 - RNA, 19 nt, Homo sapiens
  misc_RNA (1)...(19): siRNA sense strand
acauugaacgugucuuuaa

SEQ ID NO: 953263 - RNA, 19 nt, Homo sapiens
  misc_RNA (1)...(19): siRNA sense strand
ccagcgaguuugacuucuu

SEQ ID NO: 953264 - RNA, 19 nt, Homo sapiens
  misc_RNA (1)...(19): siRNA sense strand
ucaagauuccuaccuguug

SEQ ID NO: 953265 - RNA, 19 nt, Homo sapiens
  misc_RNA (1)...(19): siRNA sense strand
uuaagaagaagagcaauga

SEQ ID NO: 953266 - RNA, 19 nt, Homo sapiens
  misc_RNA (1)...(19): siRNA sense strand
caacuguagugucuaugag

SEQ ID NO: 953267 - RNA, 19 nt, Homo sapiens
  misc_RNA (1)...(19): siRNA sense strand
uccguguccugguuucuua

SEQ ID NO: 953268 - RNA, 19 nt, Homo sapiens
  misc_RNA (1)...(19): siRNA sense strand
ccaacuguagugucuauga

SEQ ID NO: 953269 - RNA, 19 nt, Homo sapiens
  misc_RNA (1)...(19): siRNA sense strand
gaaaucuggcguggaguau

SEQ ID NO: 953270 - RNA, 19 nt, Homo sapiens
  misc_RNA (1)...(19): siRNA sense strand
uacaaagaguugaacaaag

SEQ ID NO: 953271 - RNA, 19 nt, Homo sapiens
  misc_RNA (1)...(19): siRNA sense strand
ccucaagaccgacaacuuc

SEQ ID NO: 953272 - RNA, 19 nt, Homo sapiens
  misc_RNA (1)...(19): siRNA sense strand
cuacaauggcucccucuug

SEQ ID NO: 953273 - RNA, 19 nt, Homo sapiens
  misc_RNA (1)...(19): siRNA sense strand
ccgcaaaucauuaaagaag

SEQ ID NO: 953274 - RNA, 19 nt, Homo sapiens
  misc_RNA (1)...(19): siRNA sense strand
caucaugacgccuccuuug

SEQ ID NO: 953275 - RNA, 19 nt, Homo sapiens
  misc_RNA (1)...(19): siRNA sense strand
ugaaugugccuuuaagaag

SEQ ID NO: 953276 - RNA, 19 nt, Homo sapiens
  misc_RNA (1)...(19): siRNA sense strand
ccuccagucucccaaggaa

SEQ ID NO: 953277 - RNA, 19 nt, Homo sapiens
  misc_RNA (1)...(19): siRNA sense strand
gauagugcaggauggaguu

SEQ ID NO: 953278 - RNA, 19 nt, Homo sapiens
  misc_RNA (1)...(19): siRNA sense strand
cgagccaacuguagugucu

SEQ ID NO: 953279 - RNA, 19 nt, Homo sapiens
  misc_RNA (1)...(19): siRNA sense strand
caaagaguugaacaaagaa

SEQ ID NO: 953280 - RNA, 19 nt, Homo sapiens
  misc_RNA (1)...(19): siRNA sense strand
ggucgucuacuucuucuuc

SEQ ID NO: 953281 - RNA, 19 nt, Homo sapiens
  misc_RNA (1)...(19): siRNA sense strand
gaucccagccuguccucaa

SEQ ID NO: 953282 - RNA, 19 nt, Homo sapiens
  misc_RNA (1)...(19): siRNA sense strand
cauugaacgugucuuuaag

SEQ ID NO: 953283 - RNA, 19 nt, Homo sapiens
  misc_RNA (1)...(19): siRNA sense strand
caggagcucugcgguuugu

SEQ ID NO: 953284 - RNA, 19 nt, Homo sapiens
  misc_RNA (1)...(19): siRNA sense strand
aaugugccuuuaagaagaa

SEQ ID NO: 953285 - RNA, 19 nt, Homo sapiens
  misc_RNA (1)...(19): siRNA sense strand
accaggagcucugcgguuu

SEQ ID NO: 953286 - RNA, 19 nt, Homo sapiens
  misc_RNA (1)...(19): siRNA sense strand
acaaggucauggagggaaa

SEQ ID NO: 953287 - RNA, 19 nt, Homo sapiens
  misc_RNA (1)...(19): siRNA sense strand
cuucauccguguccugguu

SEQ ID NO: 953288 - RNA, 19 nt, Homo sapiens
  misc_RNA (1)...(19): siRNA sense strand
gcuccugaguggugaugga

SEQ ID NO: 953289 - RNA, 19 nt, Homo sapiens
  misc_RNA (1)...(19): siRNA sense strand
ccugaguggugauggaaau

SEQ ID NO: 953290 - RNA, 19 nt, Homo sapiens
  misc_RNA (1)...(19): siRNA sense strand
aagaagaagagcaaugaga

SEQ ID NO: 953291 - RNA, 19 nt, Homo sapiens
  misc_RNA (1)...(19): siRNA sense strand
gcaagguucagggcuguga

SEQ ID NO: 953292 - RNA, 19 nt, Homo sapiens
  misc_RNA (1)...(19): siRNA sense strand
cauacccugugaucuccua

SEQ ID NO: 953293 - RNA, 19 nt, Homo sapiens
  misc_RNA (1)...(19): siRNA sense strand
ccacagggucgcuccacaa

SEQ ID NO: 953294 - RNA, 19 nt, Homo sapiens
  misc_RNA (1)...(19): siRNA sense strand
ccugauggaugagcaagug

SEQ ID NO: 953295 - RNA, 19 nt, Homo sapiens
  misc_RNA (1)...(19): siRNA sense strand
uugagaggcuccacacauc

SEQ ID NO: 953296 - RNA, 19 nt, Homo sapiens
  misc_RNA (1)...(19): siRNA sense strand
gaugggaugcucuauucug

SEQ ID NO: 953297 - RNA, 19 nt, Homo sapiens
  misc_RNA (1)...(19): siRNA sense strand
gaaauacaaagaguugaac

SEQ ID NO: 953298 - RNA, 19 nt, Homo sapiens
  misc_RNA (1)...(19): siRNA sense strand
gagaauggcuuuucauacc

SEQ ID NO: 953299 - RNA, 19 nt, Homo sapiens
  misc_RNA (1)...(19): siRNA sense strand
ggaugaacguagggcacuu

SEQ ID NO: 953300 - RNA, 19 nt, Homo sapiens
  misc_RNA (1)...(19): siRNA sense strand
ugagagcuguguggacugu

SEQ ID NO: 953301 - RNA, 19 nt, Homo sapiens
  misc_RNA (1)...(19): siRNA sense strand
aaucuggcguggaguauac

SEQ ID NO: 953302 - RNA, 19 nt, Homo sapiens
  misc_RNA (1)...(19): siRNA sense strand
agagugaaugugccuuuaa

SEQ ID NO: 953303 - RNA, 19 nt, Homo sapiens
  misc_RNA (1)...(19): siRNA sense strand
agacagccagcgaguuuga

SEQ ID NO: 953304 - RNA, 19 nt, Homo sapiens
  misc_RNA (1)...(19): siRNA sense strand
caaugucacccaucucuac

SEQ ID NO: 953305 - RNA, 19 nt, Homo sapiens
  misc_RNA (1)...(19): siRNA sense strand
ugauggaaauacucucuac

SEQ ID NO: 953306 - RNA, 19 nt, Homo sapiens
  misc_RNA (1)...(19): siRNA sense strand
ucacgcuggacuacuuaua

SEQ ID NO: 953307 - RNA, 19 nt, Homo sapiens
  misc_RNA (1)...(19): siRNA sense strand
ccagaagggccuccaggau

SEQ ID NO: 953308 - RNA, 19 nt, Homo sapiens
  misc_RNA (1)...(19): siRNA sense strand
guccugguuucuuacaaug

SEQ ID NO: 953309 - RNA, 19 nt, Homo sapiens
  misc_RNA (1)...(19): siRNA sense strand
ggcccuggauccugaacug

SEQ ID NO: 953310 - RNA, 19 nt, Homo sapiens
  misc_RNA (1)...(19): siRNA sense strand
caucgcggguggcuagagu

SEQ ID NO: 953311 - RNA, 19 nt, Homo sapiens
  misc_RNA (1)...(19): siRNA sense strand
ccaggucgucuacuucuuc

SEQ ID NO: 953312 - RNA, 19 nt, Homo sapiens
  misc_RNA (1)...(19): siRNA sense strand
uccgcuggcugcaucauga

SEQ ID NO: 953313 - RNA, 19 nt, Homo sapiens
  misc_RNA (1)...(19): siRNA sense strand
ggccagccagugacagaaa

SEQ ID NO: 953314 - RNA, 19 nt, Homo sapiens
  misc_RNA (1)...(19): siRNA sense strand
gcaucaugacgccuccuuu

SEQ ID NO: 953315 - RNA, 19 nt, Homo sapiens
  misc_RNA (1)...(19): siRNA sense strand
cugguacuaugaacaacuu

SEQ ID NO: 953316 - RNA, 19 nt, Homo sapiens
  misc_RNA (1)...(19): siRNA sense strand
caggaccucugccagugau

SEQ ID NO: 953317 - RNA, 19 nt, Homo sapiens
  misc_RNA (1)...(19): siRNA sense strand
caggcuaaagaacaugaua

SEQ ID NO: 953318 - RNA, 19 nt, Homo sapiens
  misc_RNA (1)...(19): siRNA sense strand
uggcuagagucugcaagaa

SEQ ID NO: 953319 - RNA, 19 nt, Homo sapiens
  misc_RNA (1)...(19): siRNA sense strand
gaguggugauggaaauacu

SEQ ID NO: 953320 - RNA, 19 nt, Homo sapiens
  misc_RNA (1)...(19): siRNA sense strand
uguggacgcugacaacaac

SEQ ID NO: 953321 - RNA, 19 nt, Homo sapiens
  misc_RNA (1)...(19): siRNA sense strand
cgcaaaucauuaaagaagu

SEQ ID NO: 953322 - RNA, 19 nt, Homo sapiens
  misc_RNA (1)...(19): siRNA sense strand
guuugugccuucucucucu

SEQ ID NO: 953323 - RNA, 19 nt, Homo sapiens
  misc_RNA (1)...(19): siRNA sense strand
ccacagcuccccacaucua

SEQ ID NO: 953324 - RNA, 19 nt, Homo sapiens
  misc_RNA (1)...(19): siRNA sense strand
gcgaguuugacuucuuuga

SEQ ID NO: 953325 - RNA, 19 nt, Homo sapiens
  misc_RNA (1)...(19): siRNA sense strand
acaacuuccugggcaguga

SEQ ID NO: 953326 - RNA, 19 nt, Homo sapiens
  misc_RNA (1)...(19): siRNA sense strand
gcaagaagcugccuaacaa

SEQ ID NO: 953327 - RNA, 19 nt, Homo sapiens
  misc_RNA (1)...(19): siRNA sense strand
gcucuucgcucgugucugu

SEQ ID NO: 953328 - RNA, 19 nt, Homo sapiens
  misc_RNA (1)...(19): siRNA sense strand
aaagagggcaagaucauua

SEQ ID NO: 953329 - RNA, 19 nt, Homo sapiens
  misc_RNA (1)...(19): siRNA sense strand
ggaucuguccuuucucuua

SEQ ID NO: 953330 - RNA, 19 nt, Homo sapiens
  misc_RNA (1)...(19): siRNA sense strand
ugaaggagaucaccaacug

SEQ ID NO: 953331 - RNA, 19 nt, Homo sapiens
  misc_RNA (1)...(19): siRNA sense strand
caagaaggcagccaaguug

SEQ ID NO: 953332 - RNA, 19 nt, Homo sapiens
  misc_RNA (1)...(19): siRNA sense strand
gaaccaaaucuguuucuuc

SEQ ID NO: 953333 - RNA, 19 nt, Homo sapiens
  misc_RNA (1)...(19): siRNA sense strand
gcacggagucugucuggaa

SEQ ID NO: 953334 - RNA, 19 nt, Homo sapiens
  misc_RNA (1)...(19): siRNA sense strand
gagugugcccucaguguua

SEQ ID NO: 953335 - RNA, 19 nt, Homo sapiens
  misc_RNA (1)...(19): siRNA sense strand
gagaggagggcaccaagaa

SEQ ID NO: 953336 - RNA, 19 nt, Homo sapiens
  misc_RNA (1)...(19): siRNA sense strand
ccaaaucuguuucuuccau

SEQ ID NO: 953337 - RNA, 19 nt, Homo sapiens
  misc_RNA (1)...(19): siRNA sense strand
gaucuguccuuucucuuag

SEQ ID NO: 953338 - RNA, 19 nt, Homo sapiens
  misc_RNA (1)...(19): siRNA sense strand
caacaacaucucuacaaga

SEQ ID NO: 953339 - RNA, 19 nt, Homo sapiens
  misc_RNA (1)...(19): siRNA sense strand
ggugggaucuguccuuucu

SEQ ID NO: 953340 - RNA, 19 nt, Homo sapiens
  misc_RNA (1)...(19): siRNA sense strand
ccaacaacaucucuacaag

SEQ ID NO: 953341 - RNA, 19 nt, Homo sapiens
  misc_RNA (1)...(19): siRNA sense strand
guagguggaguuaguauau

SEQ ID NO: 953342 - RNA, 19 nt, Homo sapiens
  misc_RNA (1)...(19): siRNA sense strand
ggacugggcaccaacaaca

SEQ ID NO: 953343 - RNA, 19 nt, Homo sapiens
  misc_RNA (1)...(19): siRNA sense strand
cuacacggcuccugacaag

SEQ ID NO: 953344 - RNA, 19 nt, Homo sapiens
  misc_RNA (1)...(19): siRNA sense strand
aaacuaggcaugucugaga

SEQ ID NO: 953345 - RNA, 19 nt, Homo sapiens
  misc_RNA (1)...(19): siRNA sense strand
agaaagacaccaaggagaa

SEQ ID NO: 953346 - RNA, 19 nt, Homo sapiens
  misc_RNA (1)...(19): siRNA sense strand
gugaugacaugaaggagau

SEQ ID NO: 953347 - RNA, 19 nt, Homo sapiens
  misc_RNA (1)...(19): siRNA sense strand
ugacaaagagggcaagauc

SEQ ID NO: 953348 - RNA, 19 nt, Homo sapiens
  misc_RNA (1)...(19): siRNA sense strand
uagguggaguuaguauaua

SEQ ID NO: 953349 - RNA, 19 nt, Homo sapiens
  misc_RNA (1)...(19): siRNA sense strand
uacaagaggugaacaagac

SEQ ID NO: 953350 - RNA, 19 nt, Homo sapiens
  misc_RNA (1)...(19): siRNA sense strand
gagucugucuggaaacuag

SEQ ID NO: 953351 - RNA, 19 nt, Homo sapiens
  misc_RNA (1)...(19): siRNA sense strand
ccaaguauggcucaccaaa

SEQ ID NO: 953352 - RNA, 19 nt, Homo sapiens
  misc_RNA (1)...(19): siRNA sense strand
caaagagggcaagaucauu

SEQ ID NO: 953353 - RNA, 19 nt, Homo sapiens
  misc_RNA (1)...(19): siRNA sense strand
acaagaaggcagccaaguu

SEQ ID NO: 953354 - RNA, 19 nt, Homo sapiens
  misc_RNA (1)...(19): siRNA sense strand
ggaaacuaggcaugucuga

SEQ ID NO: 953355 - RNA, 19 nt, Homo sapiens
  misc_RNA (1)...(19): siRNA sense strand
cuuaguagguggaguuagu

SEQ ID NO: 953356 - RNA, 19 nt, Homo sapiens
  misc_RNA (1)...(19): siRNA sense strand
guaggugggugggaucugu

SEQ ID NO: 953357 - RNA, 19 nt, Homo sapiens
  misc_RNA (1)...(19): siRNA sense strand
caacccugccuuuggcuuu

SEQ ID NO: 953358 - RNA, 19 nt, Homo sapiens
  misc_RNA (1)...(19): siRNA sense strand
cacggagucugucuggaaa

SEQ ID NO: 953359 - RNA, 19 nt, Homo sapiens
  misc_RNA (1)...(19): siRNA sense strand
ccacagccaagcccaaaga

SEQ ID NO: 953360 - RNA, 19 nt, Homo sapiens
  misc_RNA (1)...(19): siRNA sense strand
gaaagacaccaaggagaag

SEQ ID NO: 953361 - RNA, 19 nt, Homo sapiens
  misc_RNA (1)...(19): siRNA sense strand
gcauccgagucuacuauag

SEQ ID NO: 953362 - RNA, 19 nt, Homo sapiens
  misc_RNA (1)...(19): siRNA sense strand
agguggaguuaguauauaa

SEQ ID NO: 953363 - RNA, 19 nt, Homo sapiens
  misc_RNA (1)...(19): siRNA sense strand
ggagaggagggcaccaaga

SEQ ID NO: 953364 - RNA, 19 nt, Homo sapiens
  misc_RNA (1)...(19): siRNA sense strand
guacggcauugugcaggaa

SEQ ID NO: 953365 - RNA, 19 nt, Homo sapiens
  misc_RNA (1)...(19): siRNA sense strand
gaauucuuccguaaugugu

SEQ ID NO: 953366 - RNA, 19 nt, Homo sapiens
  misc_RNA (1)...(19): siRNA sense strand
gggcauccgagucuacuau

SEQ ID NO: 953367 - RNA, 19 nt, Homo sapiens
  misc_RNA (1)...(19): siRNA sense strand
gcaccaacaacaucucuac

SEQ ID NO: 953368 - RNA, 19 nt, Homo sapiens
  misc_RNA (1)...(19): siRNA sense strand
cugcaugacuuugagaugu

SEQ ID NO: 953369 - RNA, 19 nt, Homo sapiens
  misc_RNA (1)...(19): siRNA sense strand
caggcaacaugagugauga

SEQ ID NO: 953370 - RNA, 19 nt, Homo sapiens
  misc_RNA (1)...(19): siRNA sense strand
gacaaagagggcaagauca

SEQ ID NO: 953371 - RNA, 19 nt, Homo sapiens
  misc_RNA (1)...(19): siRNA sense strand
gaaggagaucaccaacugu

SEQ ID NO: 953372 - RNA, 19 nt, Homo sapiens
  misc_RNA (1)...(19): siRNA sense strand
cuacaagaggugaacaaga

SEQ ID NO: 953373 - RNA, 19 nt, Homo sapiens
  misc_RNA (1)...(19): siRNA sense strand
cagagaaagacaccaagga

SEQ ID NO: 953374 - RNA, 19 nt, Homo sapiens
  misc_RNA (1)...(19): siRNA sense strand
gcagugaggaggucagacu

SEQ ID NO: 953375 - RNA, 19 nt, Homo sapiens
  misc_RNA (1)...(19): siRNA sense strand
gagucccugugguucauga

SEQ ID NO: 953376 - RNA, 19 nt, Homo sapiens
  misc_RNA (1)...(19): siRNA sense strand
gcauugugcaggaauucuu

SEQ ID NO: 953377 - RNA, 19 nt, Homo sapiens
  misc_RNA (1)...(19): siRNA sense strand
acaaagagggcaagaucau

SEQ ID NO: 953378 - RNA, 19 nt, Homo sapiens
  misc_RNA (1)...(19): siRNA sense strand
ugagugaugacaugaagga

SEQ ID NO: 953379 - RNA, 19 nt, Homo sapiens
  misc_RNA (1)...(19): siRNA sense strand
ucuguccuuucucuuagua

SEQ ID NO: 953380 - RNA, 19 nt, Homo sapiens
  misc_RNA (1)...(19): siRNA sense strand
ccgugguccuucccaauga

SEQ ID NO: 953381 - RNA, 19 nt, Homo sapiens
  misc_RNA (1)...(19): siRNA sense strand
cagaggguguggccaggau

SEQ ID NO: 953382 - RNA, 19 nt, Homo sapiens
  misc_RNA (1)...(19): siRNA sense strand
ggaaagugaagagcacauc

SEQ ID NO: 953383 - RNA, 19 nt, Homo sapiens
  misc_RNA (1)...(19): siRNA sense strand
uuucuuccaugucugaguu

SEQ ID NO: 953384 - RNA, 19 nt, Homo sapiens
  misc_RNA (1)...(19): siRNA sense strand
ucuccagccucuucagugu

SEQ ID NO: 953385 - RNA, 19 nt, Homo sapiens
  misc_RNA (1)...(19): siRNA sense strand
aaguauggcucaccaaagc

SEQ ID NO: 953386 - RNA, 19 nt, Homo sapiens
  misc_RNA (1)...(19): siRNA sense strand
ggcauccgagucuacuaua

SEQ ID NO: 953387 - RNA, 19 nt, Homo sapiens
  misc_RNA (1)...(19): siRNA sense strand
ucaggcaacaugagugaug

SEQ ID NO: 953388 - RNA, 19 nt, Homo sapiens
  misc_RNA (1)...(19): siRNA sense strand
agcccgagccucccaagua

SEQ ID NO: 953389 - RNA, 19 nt, Homo sapiens
  misc_RNA (1)...(19): siRNA sense strand
caaguauggcucaccaaag

SEQ ID NO: 953390 - RNA, 19 nt, Homo sapiens
  misc_RNA (1)...(19): siRNA sense strand
cuaacaacccugccuuugg

SEQ ID NO: 953391 - RNA, 19 nt, Homo sapiens
  misc_RNA (1)...(19): siRNA sense strand
gccaggggauccagagaaa

SEQ ID NO: 953392 - RNA, 19 nt, Homo sapiens
  misc_RNA (1)...(19): siRNA sense strand
ccggcucacuggagaggaa

SEQ ID NO: 953393 - RNA, 19 nt, Homo sapiens
  misc_RNA (1)...(19): siRNA sense strand
uuaccuugcuggcggagau

SEQ ID NO: 953394 - RNA, 19 nt, Homo sapiens
  misc_RNA (1)...(19): siRNA sense strand
gucgguggcucugcaacuu

SEQ ID NO: 953395 - RNA, 19 nt, Homo sapiens
  misc_RNA (1)...(19): siRNA sense strand
ugggugggaucuguccuuu

SEQ ID NO: 953396 - RNA, 19 nt, Homo sapiens
  misc_RNA (1)...(19): siRNA sense strand
gcuacacggcuccugacaa

SEQ ID NO: 953397 - RNA, 19 nt, Homo sapiens
  misc_RNA (1)...(19): siRNA sense strand
gguccuucccaaugaggua

SEQ ID NO: 953398 - RNA, 19 nt, Homo sapiens
  misc_RNA (1)...(19): siRNA sense strand
uuccaugucugaguuugaa

SEQ ID NO: 953399 - RNA, 19 nt, Homo sapiens
  misc_RNA (1)...(19): siRNA sense strand
ccuaacaacccugccuuug

SEQ ID NO: 953400 - RNA, 19 nt, Homo sapiens
  misc_RNA (1)...(19): siRNA sense strand
gcugaugggcuggcugaga

SEQ ID NO: 953401 - RNA, 19 nt, Homo sapiens
  misc_RNA (1)...(19): siRNA sense strand
ccucggagucccugugguu

SEQ ID NO: 953402 - RNA, 19 nt, Homo sapiens
  misc_RNA (1)...(19): siRNA sense strand
aaaucuguuucuuccaugu

SEQ ID NO: 953403 - RNA, 19 nt, Homo sapiens
  misc_RNA (1)...(19): siRNA sense strand
ccuccucccuggacaaggu

SEQ ID NO: 953404 - RNA, 19 nt, Homo sapiens
  misc_RNA (1)...(19): siRNA sense strand
guccuucgcagaaccaaau

SEQ ID NO: 953405 - RNA, 19 nt, Homo sapiens
  misc_RNA (1)...(19): siRNA sense strand
gcaagaagcugccuaacaa

SEQ ID NO: 953406 - RNA, 19 nt, Homo sapiens
  misc_RNA (1)...(19): siRNA sense strand
gcucuucgcucgugucugu

SEQ ID NO: 953407 - RNA, 19 nt, Homo sapiens
  misc_RNA (1)...(19): siRNA sense strand
aaagagggcaagaucauua

SEQ ID NO: 953408 - RNA, 19 nt, Homo sapiens
  misc_RNA (1)...(19): siRNA sense strand
ggaucuguccuuucucuua

SEQ ID NO: 953409 - RNA, 19 nt, Homo sapiens
  misc_RNA (1)...(19): siRNA sense strand
ugaaggagaucaccaacug

SEQ ID NO: 953410 - RNA, 19 nt, Homo sapiens
  misc_RNA (1)...(19): siRNA sense strand
caagaaggcagccaaguug

SEQ ID NO: 953411 - RNA, 19 nt, Homo sapiens
  misc_RNA (1)...(19): siRNA sense strand
gaaccaaaucuguuucuuc

SEQ ID NO: 953412 - RNA, 19 nt, Homo sapiens
  misc_RNA (1)...(19): siRNA sense strand
gcacggagucugucuggaa

SEQ ID NO: 953413 - RNA, 19 nt, Homo sapiens
  misc_RNA (1)...(19): siRNA sense strand
gagugugcccucaguguua

SEQ ID NO: 953414 - RNA, 19 nt, Homo sapiens
  misc_RNA (1)...(19): siRNA sense strand
gagaggagggcaccaagaa

SEQ ID NO: 953415 - RNA, 19 nt, Homo sapiens
  misc_RNA (1)...(19): siRNA sense strand
ccaaaucuguuucuuccau

SEQ ID NO: 953416 - RNA, 19 nt, Homo sapiens
  misc_RNA (1)...(19): siRNA sense strand
gaucuguccuuucucuuag

SEQ ID NO: 953417 - RNA, 19 nt, Homo sapiens
  misc_RNA (1)...(19): siRNA sense strand
caacaacaucucuacaaga

SEQ ID NO: 953418 - RNA, 19 nt, Homo sapiens
  misc_RNA (1)...(19): siRNA sense strand
ggugggaucuguccuuucu

SEQ ID NO: 953419 - RNA, 19 nt, Homo sapiens
  misc_RNA (1)...(19): siRNA sense strand
ccaacaacaucucuacaag

SEQ ID NO: 953420 - RNA, 19 nt, Homo sapiens
  misc_RNA (1)...(19): siRNA sense strand
guagguggaguuaguauau

SEQ ID NO: 953421 - RNA, 19 nt, Homo sapiens
  misc_RNA (1)...(19): siRNA sense strand
ggacugggcaccaacaaca

SEQ ID NO: 953422 - RNA, 19 nt, Homo sapiens
  misc_RNA (1)...(19): siRNA sense strand
cuacacggcuccugacaag

SEQ ID NO: 953423 - RNA, 19 nt, Homo sapiens
  misc_RNA (1)...(19): siRNA sense strand
aaacuaggcaugucugaga

SEQ ID NO: 953424 - RNA, 19 nt, Homo sapiens
  misc_RNA (1)...(19): siRNA sense strand
agaaagacaccaaggagaa

SEQ ID NO: 953425 - RNA, 19 nt, Homo sapiens
  misc_RNA (1)...(19): siRNA sense strand
gugaugacaugaaggagau

SEQ ID NO: 953426 - RNA, 19 nt, Homo sapiens
  misc_RNA (1)...(19): siRNA sense strand
ugacaaagagggcaagauc

SEQ ID NO: 953427 - RNA, 19 nt, Homo sapiens
  misc_RNA (1)...(19): siRNA sense strand
uagguggaguuaguauaua

SEQ ID NO: 953428 - RNA, 19 nt, Homo sapiens
  misc_RNA (1)...(19): siRNA sense strand
uacaagaggugaacaagac

SEQ ID NO: 953429 - RNA, 19 nt, Homo sapiens
  misc_RNA (1)...(19): siRNA sense strand
gagucugucuggaaacuag

SEQ ID NO: 953430 - RNA, 19 nt, Homo sapiens
  misc_RNA (1)...(19): siRNA sense strand
ccaaguauggcucaccaaa

SEQ ID NO: 953431 - RNA, 19 nt, Homo sapiens
  misc_RNA (1)...(19): siRNA sense strand
caaagagggcaagaucauu

SEQ ID NO: 953432 - RNA, 19 nt, Homo sapiens
  misc_RNA (1)...(19): siRNA sense strand
acaagaaggcagccaaguu

SEQ ID NO: 953433 - RNA, 19 nt, Homo sapiens
  misc_RNA (1)...(19): siRNA sense strand
ggaaacuaggcaugucuga

SEQ ID NO: 953434 - RNA, 19 nt, Homo sapiens
  misc_RNA (1)...(19): siRNA sense strand
cuuaguagguggaguuagu

SEQ ID NO: 953435 - RNA, 19 nt, Homo sapiens
  misc_RNA (1)...(19): siRNA sense strand
guaggugggugggaucugu

SEQ ID NO: 953436 - RNA, 19 nt, Homo sapiens
  misc_RNA (1)...(19): siRNA sense strand
caacccugccuuuggcuuu

SEQ ID NO: 953437 - RNA, 19 nt, Homo sapiens
  misc_RNA (1)...(19): siRNA sense strand
cacggagucugucuggaaa

SEQ ID NO: 953438 - RNA, 19 nt, Homo sapiens
  misc_RNA (1)...(19): siRNA sense strand
ccacagccaagcccaaaga

SEQ ID NO: 953439 - RNA, 19 nt, Homo sapiens
  misc_RNA (1)...(19): siRNA sense strand
gaaagacaccaaggagaag

SEQ ID NO: 953440 - RNA, 19 nt, Homo sapiens
  misc_RNA (1)...(19): siRNA sense strand
gcauccgagucuacuauag

SEQ ID NO: 953441 - RNA, 19 nt, Homo sapiens
  misc_RNA (1)...(19): siRNA sense strand
agguggaguuaguauauaa

SEQ ID NO: 953442 - RNA, 19 nt, Homo sapiens
  misc_RNA (1)...(19): siRNA sense strand
ggagaggagggcaccaaga

SEQ ID NO: 953443 - RNA, 19 nt, Homo sapiens
  misc_RNA (1)...(19): siRNA sense strand
guacggcauugugcaggaa

SEQ ID NO: 953444 - RNA, 19 nt, Homo sapiens
  misc_RNA (1)...(19): siRNA sense strand
gaauucuuccguaaugugu

SEQ ID NO: 953445 - RNA, 19 nt, Homo sapiens
  misc_RNA (1)...(19): siRNA sense strand
gggcauccgagucuacuau

SEQ ID NO: 953446 - RNA, 19 nt, Homo sapiens
  misc_RNA (1)...(19): siRNA sense strand
gcaccaacaacaucucuac

SEQ ID NO: 953447 - RNA, 19 nt, Homo sapiens
  misc_RNA (1)...(19): siRNA sense strand
cugcaugacuuugagaugu

SEQ ID NO: 953448 - RNA, 19 nt, Homo sapiens
  misc_RNA (1)...(19): siRNA sense strand
caggcaacaugagugauga

SEQ ID NO: 953449 - RNA, 19 nt, Homo sapiens
  misc_RNA (1)...(19): siRNA sense strand
gacaaagagggcaagauca

SEQ ID NO: 953450 - RNA, 19 nt, Homo sapiens
  misc_RNA (1)...(19): siRNA sense strand
gaaggagaucaccaacugu

SEQ ID NO: 953451 - RNA, 19 nt, Homo sapiens
  misc_RNA (1)...(19): siRNA sense strand
cuacaagaggugaacaaga

SEQ ID NO: 953452 - RNA, 19 nt, Homo sapiens
  misc_RNA (1)...(19): siRNA sense strand
cagagaaagacaccaagga

SEQ ID NO: 953453 - RNA, 19 nt, Homo sapiens
  misc_RNA (1)...(19): siRNA sense strand
gcagugaggaggucagacu

SEQ ID NO: 953454 - RNA, 19 nt, Homo sapiens
  misc_RNA (1)...(19): siRNA sense strand
gagucccugugguucauga

SEQ ID NO: 953455 - RNA, 19 nt, Homo sapiens
  misc_RNA (1)...(19): siRNA sense strand
gcauugugcaggaauucuu

SEQ ID NO: 953456 - RNA, 19 nt, Homo sapiens
  misc_RNA (1)...(19): siRNA sense strand
acaaagagggcaagaucau

SEQ ID NO: 953457 - RNA, 19 nt, Homo sapiens
  misc_RNA (1)...(19): siRNA sense strand
ugagugaugacaugaagga

SEQ ID NO: 953458 - RNA, 19 nt, Homo sapiens
  misc_RNA (1)...(19): siRNA sense strand
ucuguccuuucucuuagua

SEQ ID NO: 953459 - RNA, 19 nt, Homo sapiens
  misc_RNA (1)...(19): siRNA sense strand
ccgugguccuucccaauga

SEQ ID NO: 953460 - RNA, 19 nt, Homo sapiens
  misc_RNA (1)...(19): siRNA sense strand
cagaggguguggccaggau

SEQ ID NO: 953461 - RNA, 19 nt, Homo sapiens
  misc_RNA (1)...(19): siRNA sense strand
ggaaagugaagagcacauc

SEQ ID NO: 953462 - RNA, 19 nt, Homo sapiens
  misc_RNA (1)...(19): siRNA sense strand
uuucuuccaugucugaguu

SEQ ID NO: 953463 - RNA, 19 nt, Homo sapiens
  misc_RNA (1)...(19): siRNA sense strand
ucuccagccucuucagugu

SEQ ID NO: 953464 - RNA, 19 nt, Homo sapiens
  misc_RNA (1)...(19): siRNA sense strand
aaguauggcucaccaaagc

SEQ ID NO: 953465 - RNA, 19 nt, Homo sapiens
  misc_RNA (1)...(19): siRNA sense strand
ggcauccgagucuacuaua

SEQ ID NO: 953466 - RNA, 19 nt, Homo sapiens
  misc_RNA (1)...(19): siRNA sense strand
ucaggcaacaugagugaug

SEQ ID NO: 953467 - RNA, 19 nt, Homo sapiens
  misc_RNA (1)...(19): siRNA sense strand
agcccgagccucccaagua

SEQ ID NO: 953468 - RNA, 19 nt, Homo sapiens
  misc_RNA (1)...(19): siRNA sense strand
caaguauggcucaccaaag

SEQ ID NO: 953469 - RNA, 19 nt, Homo sapiens
  misc_RNA (1)...(19): siRNA sense strand
cuaacaacccugccuuugg

SEQ ID NO: 953470 - RNA, 19 nt, Homo sapiens
  misc_RNA (1)...(19): siRNA sense strand
gccaggggauccagagaaa

SEQ ID NO: 953471 - RNA, 19 nt, Homo sapiens
  misc_RNA (1)...(19): siRNA sense strand
ccggcucacuggagaggaa

SEQ ID NO: 953472 - RNA, 19 nt, Homo sapiens
  misc_RNA (1)...(19): siRNA sense strand
uuaccuugcuggcggagau

SEQ ID NO: 953473 - RNA, 19 nt, Homo sapiens
  misc_RNA (1)...(19): siRNA sense strand
gucgguggcucugcaacuu

SEQ ID NO: 953474 - RNA, 19 nt, Homo sapiens
  misc_RNA (1)...(19): siRNA sense strand
ugggugggaucuguccuuu

SEQ ID NO: 953475 - RNA, 19 nt, Homo sapiens
  misc_RNA (1)...(19): siRNA sense strand
gcuacacggcuccugacaa

SEQ ID NO: 953476 - RNA, 19 nt, Homo sapiens
  misc_RNA (1)...(19): siRNA sense strand
gguccuucccaaugaggua

SEQ ID NO: 953477 - RNA, 19 nt, Homo sapiens
  misc_RNA (1)...(19): siRNA sense strand
uuccaugucugaguuugaa

SEQ ID NO: 953478 - RNA, 19 nt, Homo sapiens
  misc_RNA (1)...(19): siRNA sense strand
ccuaacaacccugccuuug

SEQ ID NO: 953479 - RNA, 19 nt, Homo sapiens
  misc_RNA (1)...(19): siRNA sense strand
gcugaugggcuggcugaga

SEQ ID NO: 953480 - RNA, 19 nt, Homo sapiens
  misc_RNA (1)...(19): siRNA sense strand
ccucggagucccugugguu

SEQ ID NO: 953481 - RNA, 19 nt, Homo sapiens
  misc_RNA (1)...(19): siRNA sense strand
aaaucuguuucuuccaugu

SEQ ID NO: 953482 - RNA, 19 nt, Homo sapiens
  misc_RNA (1)...(19): siRNA sense strand
ccuccucccuggacaaggu

SEQ ID NO: 953483 - RNA, 19 nt, Homo sapiens
  misc_RNA (1)...(19): siRNA sense strand
guccuucgcagaaccaaau

SEQ ID NO: 953484 - RNA, 19 nt, Homo sapiens
  misc_RNA (1)...(19): siRNA sense strand
gcacggagguccuguccaa

SEQ ID NO: 953485 - RNA, 19 nt, Homo sapiens
  misc_RNA (1)...(19): siRNA sense strand
gagaggagcuggccaaggu

SEQ ID NO: 953486 - RNA, 19 nt, Homo sapiens
  misc_RNA (1)...(19): siRNA sense strand
gaagcgagccuccaaagag

SEQ ID NO: 953487 - RNA, 19 nt, Homo sapiens
  misc_RNA (1)...(19): siRNA sense strand
gcaagaagcgagccuccaa

SEQ ID NO: 953488 - RNA, 19 nt, Homo sapiens
  misc_RNA (1)...(19): siRNA sense strand
agaagucucuggccuggaa

SEQ ID NO: 953489 - RNA, 19 nt, Homo sapiens
  misc_RNA (1)...(19): siRNA sense strand
gaccugcuccaaagaauga

SEQ ID NO: 953490 - RNA, 19 nt, Homo sapiens
  misc_RNA (1)...(19): siRNA sense strand
aagcgagccuccaaagaga

SEQ ID NO: 953491 - RNA, 19 nt, Homo sapiens
  misc_RNA (1)...(19): siRNA sense strand
gcagcguccugggagcaua

SEQ ID NO: 953492 - RNA, 19 nt, Homo sapiens
  misc_RNA (1)...(19): siRNA sense strand
caaaauaugcaaaguguga

SEQ ID NO: 953493 - RNA, 19 nt, Homo sapiens
  misc_RNA (1)...(19): siRNA sense strand
cggagguccuguccaagaa

SEQ ID NO: 953494 - RNA, 19 nt, Homo sapiens
  misc_RNA (1)...(19): siRNA sense strand
ccaaagggcaacagaugug

SEQ ID NO: 953495 - RNA, 19 nt, Homo sapiens
  misc_RNA (1)...(19): siRNA sense strand
ccaggucacggauugcuuu

SEQ ID NO: 953496 - RNA, 19 nt, Homo sapiens
  misc_RNA (1)...(19): siRNA sense strand
gggaccugcuccaaagaau

SEQ ID NO: 953497 - RNA, 19 nt, Homo sapiens
  misc_RNA (1)...(19): siRNA sense strand
caagaagcgagccuccaaa

SEQ ID NO: 953498 - RNA, 19 nt, Homo sapiens
  misc_RNA (1)...(19): siRNA sense strand
gccaaaauaugcaaagugu

SEQ ID NO: 953499 - RNA, 19 nt, Homo sapiens
  misc_RNA (1)...(19): siRNA sense strand
ggagcuggccgaggaguau

SEQ ID NO: 953500 - RNA, 19 nt, Homo sapiens
  misc_RNA (1)...(19): siRNA sense strand
gccaagagaggucacuaug

SEQ ID NO: 953501 - RNA, 19 nt, Homo sapiens
  misc_RNA (1)...(19): siRNA sense strand
gagguccuguccaagaaca

SEQ ID NO: 953502 - RNA, 19 nt, Homo sapiens
  misc_RNA (1)...(19): siRNA sense strand
ggaccugcuccaaagaaug

SEQ ID NO: 953503 - RNA, 19 nt, Homo sapiens
  misc_RNA (1)...(19): siRNA sense strand
gagugggaccugcuccaaa

SEQ ID NO: 953504 - RNA, 19 nt, Homo sapiens
  misc_RNA (1)...(19): siRNA sense strand
aaaagaagcagcugaggaa

SEQ ID NO: 953505 - RNA, 19 nt, Homo sapiens
  misc_RNA (1)...(19): siRNA sense strand
ccaucccuguguuugcuaa

SEQ ID NO: 953506 - RNA, 19 nt, Homo sapiens
  misc_RNA (1)...(19): siRNA sense strand
ugcaaagugugaccagugu

SEQ ID NO: 953507 - RNA, 19 nt, Homo sapiens
  misc_RNA (1)...(19): siRNA sense strand
gggcccaccucuucaagcu

SEQ ID NO: 953508 - RNA, 19 nt, Homo sapiens
  misc_RNA (1)...(19): siRNA sense strand
cgaggaguaucuggacauc

SEQ ID NO: 953509 - RNA, 19 nt, Homo sapiens
  misc_RNA (1)...(19): siRNA sense strand
cugcccaggucacggauug

SEQ ID NO: 953510 - RNA, 19 nt, Homo sapiens
  misc_RNA (1)...(19): siRNA sense strand
ccaagagaggucacuaugg

SEQ ID NO: 953511 - RNA, 19 nt, Homo sapiens
  misc_RNA (1)...(19): siRNA sense strand
aggaguaucuggacaucgu

SEQ ID NO: 953512 - RNA, 19 nt, Homo sapiens
  misc_RNA (1)...(19): siRNA sense strand
agugggaccugcuccaaag

SEQ ID NO: 953513 - RNA, 19 nt, Homo sapiens
  misc_RNA (1)...(19): siRNA sense strand
gagggcaucgcugcuguga

SEQ ID NO: 953514 - RNA, 19 nt, Homo sapiens
  misc_RNA (1)...(19): siRNA sense strand
uugacaagaccgugaggua

SEQ ID NO: 953515 - RNA, 19 nt, Homo sapiens
  misc_RNA (1)...(19): siRNA sense strand
ccaagaacaagcaaaagaa

SEQ ID NO: 953516 - RNA, 19 nt, Homo sapiens
  misc_RNA (1)...(19): siRNA sense strand
gaucugccagcccuacauc

SEQ ID NO: 953517 - RNA, 19 nt, Homo sapiens
  misc_RNA (1)...(19): siRNA sense strand
ucccggagauugacaagac

SEQ ID NO: 953518 - RNA, 19 nt, Homo sapiens
  misc_RNA (1)...(19): siRNA sense strand
gaaagcauguucucccaaa

SEQ ID NO: 953519 - RNA, 19 nt, Homo sapiens
  misc_RNA (1)...(19): siRNA sense strand
gaaauucaguucacagaag

SEQ ID NO: 953520 - RNA, 19 nt, Homo sapiens
  misc_RNA (1)...(19): siRNA sense strand
gagccaagaucuccuguga

SEQ ID NO: 953521 - RNA, 19 nt, Homo sapiens
  misc_RNA (1)...(19): siRNA sense strand
gccaaagaguuuauuauug

SEQ ID NO: 953522 - RNA, 19 nt, Homo sapiens
  misc_RNA (1)...(19): siRNA sense strand
gaaccaaccuauacuuguc

SEQ ID NO: 953523 - RNA, 19 nt, Homo sapiens
  misc_RNA (1)...(19): siRNA sense strand
gaaacagaaccaaccuaua

SEQ ID NO: 953524 - RNA, 19 nt, Homo sapiens
  misc_RNA (1)...(19): siRNA sense strand
aaaugagacugacuuagaa

SEQ ID NO: 953525 - RNA, 19 nt, Homo sapiens
  misc_RNA (1)...(19): siRNA sense strand
gcaaagcuacaaauccaaa

SEQ ID NO: 953526 - RNA, 19 nt, Homo sapiens
  misc_RNA (1)...(19): siRNA sense strand
ucagugacauuacgcuuga

SEQ ID NO: 953527 - RNA, 19 nt, Homo sapiens
  misc_RNA (1)...(19): siRNA sense strand
aaacagaaccaaccuauac

SEQ ID NO: 953528 - RNA, 19 nt, Homo sapiens
  misc_RNA (1)...(19): siRNA sense strand
gaaaacagcagaugggaaa

SEQ ID NO: 953529 - RNA, 19 nt, Homo sapiens
  misc_RNA (1)...(19): siRNA sense strand
gcaaaucaaggaguuuauu

SEQ ID NO: 953530 - RNA, 19 nt, Homo sapiens
  misc_RNA (1)...(19): siRNA sense strand
gugcaaagcuacaaaucca

SEQ ID NO: 953531 - RNA, 19 nt, Homo sapiens
  misc_RNA (1)...(19): siRNA sense strand
guguguggcuuaugcauau

SEQ ID NO: 953532 - RNA, 19 nt, Homo sapiens
  misc_RNA (1)...(19): siRNA sense strand
agaccaagccuccuacuga

SEQ ID NO: 953533 - RNA, 19 nt, Homo sapiens
  misc_RNA (1)...(19): siRNA sense strand
aagagaaggugcuggaugu

SEQ ID NO: 953534 - RNA, 19 nt, Homo sapiens
  misc_RNA (1)...(19): siRNA sense strand
cagcaacguucgcuaccuu

SEQ ID NO: 953535 - RNA, 19 nt, Homo sapiens
  misc_RNA (1)...(19): siRNA sense strand
aaauucaguucacagaaga

SEQ ID NO: 953536 - RNA, 19 nt, Homo sapiens
  misc_RNA (1)...(19): siRNA sense strand
gaccaaaguuuucccaaga

SEQ ID NO: 953537 - RNA, 19 nt, Homo sapiens
  misc_RNA (1)...(19): siRNA sense strand
ccaaacacccuauggucaa

SEQ ID NO: 953538 - RNA, 19 nt, Homo sapiens
  misc_RNA (1)...(19): siRNA sense strand
gggcaaggccucugggaau

SEQ ID NO: 953539 - RNA, 19 nt, Homo sapiens
  misc_RNA (1)...(19): siRNA sense strand
gaguuuauuuggugcaaca

SEQ ID NO: 953540 - RNA, 19 nt, Homo sapiens
  misc_RNA (1)...(19): siRNA sense strand
gagcagaguuaucauuccu

SEQ ID NO: 953541 - RNA, 19 nt, Homo sapiens
  misc_RNA (1)...(19): siRNA sense strand
guucacagaagaaacagaa

SEQ ID NO: 953542 - RNA, 19 nt, Homo sapiens
  misc_RNA (1)...(19): siRNA sense strand
uuuauugucuucucgaugu

SEQ ID NO: 953543 - RNA, 19 nt, Homo sapiens
  misc_RNA (1)...(19): siRNA sense strand
gcauauggcuugaaaacag

SEQ ID NO: 953544 - RNA, 19 nt, Homo sapiens
  misc_RNA (1)...(19): siRNA sense strand
uuaugcauauggcuugaaa

SEQ ID NO: 953545 - RNA, 19 nt, Homo sapiens
  misc_RNA (1)...(19): siRNA sense strand
ugacauuacgcuugaacaa

SEQ ID NO: 953546 - RNA, 19 nt, Homo sapiens
  misc_RNA (1)...(19): siRNA sense strand
cccaaaugcuggagaccaa

SEQ ID NO: 953547 - RNA, 19 nt, Homo sapiens
  misc_RNA (1)...(19): siRNA sense strand
ccaaaggccaagcaggaaa

SEQ ID NO: 953548 - RNA, 19 nt, Homo sapiens
  misc_RNA (1)...(19): siRNA sense strand
gcagaugggaaaggugaaa

SEQ ID NO: 953549 - RNA, 19 nt, Homo sapiens
  misc_RNA (1)...(19): siRNA sense strand
cagaaccaaccuauacuug

SEQ ID NO: 953550 - RNA, 19 nt, Homo sapiens
  misc_RNA (1)...(19): siRNA sense strand
agaaacagaaccaaccuau

SEQ ID NO: 953551 - RNA, 19 nt, Homo sapiens
  misc_RNA (1)...(19): siRNA sense strand
gguguguggcuuaugcaua

SEQ ID NO: 953552 - RNA, 19 nt, Homo sapiens
  misc_RNA (1)...(19): siRNA sense strand
gaaaacaggccccaaaugc

SEQ ID NO: 953553 - RNA, 19 nt, Homo sapiens
  misc_RNA (1)...(19): siRNA sense strand
ggagugcaaagcuacaaau

SEQ ID NO: 953554 - RNA, 19 nt, Homo sapiens
  misc_RNA (1)...(19): siRNA sense strand
gaaggugcuggauguggaa

SEQ ID NO: 953555 - RNA, 19 nt, Homo sapiens
  misc_RNA (1)...(19): siRNA sense strand
ggcaaggccucugggaauc

SEQ ID NO: 953556 - RNA, 19 nt, Homo sapiens
  misc_RNA (1)...(19): siRNA sense strand
ggauggguguguggcuuau

SEQ ID NO: 953557 - RNA, 19 nt, Homo sapiens
  misc_RNA (1)...(19): siRNA sense strand
ccagggcccuccuaguucu

SEQ ID NO: 953558 - RNA, 19 nt, Homo sapiens
  misc_RNA (1)...(19): siRNA sense strand
acagugagcagaguuauca

SEQ ID NO: 953559 - RNA, 19 nt, Homo sapiens
  misc_RNA (1)...(19): siRNA sense strand
cuuuggauguucuggguaa

SEQ ID NO: 953560 - RNA, 19 nt, Homo sapiens
  misc_RNA (1)...(19): siRNA sense strand
aaaaugagacugacuuaga

SEQ ID NO: 953561 - RNA, 19 nt, Homo sapiens
  misc_RNA (1)...(19): siRNA sense strand
gagacugacuuagaaaaug

SEQ ID NO: 953562 - RNA, 19 nt, Homo sapiens
  misc_RNA (1)...(19): siRNA sense strand
gguaagaagaguaagaacu

SEQ ID NO: 953563 - RNA, 19 nt, Homo sapiens
  misc_RNA (1)...(19): siRNA sense strand
gaagaaacagaaccaaccu

SEQ ID NO: 953564 - RNA, 19 nt, Homo sapiens
  misc_RNA (1)...(19): siRNA sense strand
ucaguucacagaagaaaca

SEQ ID NO: 953565 - RNA, 19 nt, Homo sapiens
  misc_RNA (1)...(19): siRNA sense strand
gcuuuacuuucaaaugcuu

SEQ ID NO: 953566 - RNA, 19 nt, Homo sapiens
  misc_RNA (1)...(19): siRNA sense strand
cugcaaaucaaggaguuua

SEQ ID NO: 953567 - RNA, 19 nt, Homo sapiens
  misc_RNA (1)...(19): siRNA sense strand
gugagcagaguuaucauuc

SEQ ID NO: 953568 - RNA, 19 nt, Homo sapiens
  misc_RNA (1)...(19): siRNA sense strand
gcuacaaauccaaauucaa

SEQ ID NO: 953569 - RNA, 19 nt, Homo sapiens
  misc_RNA (1)...(19): siRNA sense strand
ggucccuccugucugagaa

SEQ ID NO: 953570 - RNA, 19 nt, Homo sapiens
  misc_RNA (1)...(19): siRNA sense strand
gcauuggucccuccugucu

SEQ ID NO: 953571 - RNA, 19 nt, Homo sapiens
  misc_RNA (1)...(19): siRNA sense strand
gcgacugcuuggugugugu

SEQ ID NO: 953572 - RNA, 19 nt, Homo sapiens
  misc_RNA (1)...(19): siRNA sense strand
ggaaaacaggccccaaaug

SEQ ID NO: 953573 - RNA, 19 nt, Homo sapiens
  misc_RNA (1)...(19): siRNA sense strand
caaacacccuauggucaac

SEQ ID NO: 953574 - RNA, 19 nt, Homo sapiens
  misc_RNA (1)...(19): siRNA sense strand
gcuuaugcauauggcuuga

SEQ ID NO: 953575 - RNA, 19 nt, Homo sapiens
  misc_RNA (1)...(19): siRNA sense strand
ggccgaggaagauaccaaa

SEQ ID NO: 953576 - RNA, 19 nt, Homo sapiens
  misc_RNA (1)...(19): siRNA sense strand
agaguuaucauuccugucu

SEQ ID NO: 953577 - RNA, 19 nt, Homo sapiens
  misc_RNA (1)...(19): siRNA sense strand
gggagugcaaagcuacaaa

SEQ ID NO: 953578 - RNA, 19 nt, Homo sapiens
  misc_RNA (1)...(19): siRNA sense strand
auuggucccuccugucuga

SEQ ID NO: 953579 - RNA, 19 nt, Homo sapiens
  misc_RNA (1)...(19): siRNA sense strand
aaucaaggaguuuauuugg

SEQ ID NO: 953580 - RNA, 19 nt, Homo sapiens
  misc_RNA (1)...(19): siRNA sense strand
agaaccaaccuauacuugu

SEQ ID NO: 953581 - RNA, 19 nt, Homo sapiens
  misc_RNA (1)...(19): siRNA sense strand
aggcuuuacuuucaaaugc

SEQ ID NO: 953582 - RNA, 19 nt, Homo sapiens
  misc_RNA (1)...(19): siRNA sense strand
acagaaccaaccuauacuu

SEQ ID NO: 953583 - RNA, 19 nt, Homo sapiens
  misc_RNA (1)...(19): siRNA sense strand
aagcuacaaauccaaauuc

SEQ ID NO: 953584 - RNA, 19 nt, Homo sapiens
  misc_RNA (1)...(19): siRNA sense strand
caaagcuacaaauccaaau

SEQ ID NO: 953585 - RNA, 19 nt, Homo sapiens
  misc_RNA (1)...(19): siRNA sense strand
ggacagagcucaucaagug

SEQ ID NO: 953586 - RNA, 19 nt, Homo sapiens
  misc_RNA (1)...(19): siRNA sense strand
gaauacaccucaacacuuu

SEQ ID NO: 953587 - RNA, 19 nt, Homo sapiens
  misc_RNA (1)...(19): siRNA sense strand
ucagacaucuccuuaaaua

SEQ ID NO: 953588 - RNA, 19 nt, Homo sapiens
  misc_RNA (1)...(19): siRNA sense strand
gcucagacaucuccuuaaa

SEQ ID NO: 953589 - RNA, 19 nt, Homo sapiens
  misc_RNA (1)...(19): siRNA sense strand
caagaaaggagacaucaua

SEQ ID NO: 953590 - RNA, 19 nt, Homo sapiens
  misc_RNA (1)...(19): siRNA sense strand
ggacaugucuugauuucca

SEQ ID NO: 953591 - RNA, 19 nt, Homo sapiens
  misc_RNA (1)...(19): siRNA sense strand
ggagacaucauagacauua

SEQ ID NO: 953592 - RNA, 19 nt, Homo sapiens
  misc_RNA (1)...(19): siRNA sense strand
gaagauaaauuagcuuggu

SEQ ID NO: 953593 - RNA, 19 nt, Homo sapiens
  misc_RNA (1)...(19): siRNA sense strand
gagaaugcccacccauaua

SEQ ID NO: 953594 - RNA, 19 nt, Homo sapiens
  misc_RNA (1)...(19): siRNA sense strand
ugaaggagaucccacaaau

SEQ ID NO: 953595 - RNA, 19 nt, Homo sapiens
  misc_RNA (1)...(19): siRNA sense strand
ggaaguggagaacaaagua

SEQ ID NO: 953596 - RNA, 19 nt, Homo sapiens
  misc_RNA (1)...(19): siRNA sense strand
gccagugacuccauggaua

SEQ ID NO: 953597 - RNA, 19 nt, Homo sapiens
  misc_RNA (1)...(19): siRNA sense strand
aagaggaucuggagucuga

SEQ ID NO: 953598 - RNA, 19 nt, Homo sapiens
  misc_RNA (1)...(19): siRNA sense strand
gagagaaugcccacccaua

SEQ ID NO: 953599 - RNA, 19 nt, Homo sapiens
  misc_RNA (1)...(19): siRNA sense strand
ugaggaagauggagagaau

SEQ ID NO: 953600 - RNA, 19 nt, Homo sapiens
  misc_RNA (1)...(19): siRNA sense strand
gagcucagacaucuccuua

SEQ ID NO: 953601 - RNA, 19 nt, Homo sapiens
  misc_RNA (1)...(19): siRNA sense strand
ggaauacaccucaacacuu

SEQ ID NO: 953602 - RNA, 19 nt, Homo sapiens
  misc_RNA (1)...(19): siRNA sense strand
gugggaaacuucaaauuca

SEQ ID NO: 953603 - RNA, 19 nt, Homo sapiens
  misc_RNA (1)...(19): siRNA sense strand
gagauuagauuggauacuc

SEQ ID NO: 953604 - RNA, 19 nt, Homo sapiens
  misc_RNA (1)...(19): siRNA sense strand
agagucaccucauugaauu

SEQ ID NO: 953605 - RNA, 19 nt, Homo sapiens
  misc_RNA (1)...(19): siRNA sense strand
gguaugaaggugaagcuua

SEQ ID NO: 953606 - RNA, 19 nt, Homo sapiens
  misc_RNA (1)...(19): siRNA sense strand
ggacagcuuucgacuggau

SEQ ID NO: 953607 - RNA, 19 nt, Homo sapiens
  misc_RNA (1)...(19): siRNA sense strand
gagaaggugucccucaaag

SEQ ID NO: 953608 - RNA, 19 nt, Homo sapiens
  misc_RNA (1)...(19): siRNA sense strand
ggagaucccacaaauggaa

SEQ ID NO: 953609 - RNA, 19 nt, Homo sapiens
  misc_RNA (1)...(19): siRNA sense strand
gacaugguacauaagauua

SEQ ID NO: 953610 - RNA, 19 nt, Homo sapiens
  misc_RNA (1)...(19): siRNA sense strand
gaaaggagacaucauagac

SEQ ID NO: 953611 - RNA, 19 nt, Homo sapiens
  misc_RNA (1)...(19): siRNA sense strand
aaacccagaugacagaaga

SEQ ID NO: 953612 - RNA, 19 nt, Homo sapiens
  misc_RNA (1)...(19): siRNA sense strand
gaaguggagaacaaaguaa

SEQ ID NO: 953613 - RNA, 19 nt, Homo sapiens
  misc_RNA (1)...(19): siRNA sense strand
guucagaugguacaaguaa

SEQ ID NO: 953614 - RNA, 19 nt, Homo sapiens
  misc_RNA (1)...(19): siRNA sense strand
gauccagcacuuuaaauga

SEQ ID NO: 953615 - RNA, 19 nt, Homo sapiens
  misc_RNA (1)...(19): siRNA sense strand
gagagucaccucauugaau

SEQ ID NO: 953616 - RNA, 19 nt, Homo sapiens
  misc_RNA (1)...(19): siRNA sense strand
ggguagauccagcacuuua

SEQ ID NO: 953617 - RNA, 19 nt, Homo sapiens
  misc_RNA (1)...(19): siRNA sense strand
acacacgucucaagucuuc

SEQ ID NO: 953618 - RNA, 19 nt, Homo sapiens
  misc_RNA (1)...(19): siRNA sense strand
gacagaagaagguuacuau

SEQ ID NO: 953619 - RNA, 19 nt, Homo sapiens
  misc_RNA (1)...(19): siRNA sense strand
gacugcaacuuggaagaua

SEQ ID NO: 953620 - RNA, 19 nt, Homo sapiens
  misc_RNA (1)...(19): siRNA sense strand
ggacucugguugcuauauc

SEQ ID NO: 953621 - RNA, 19 nt, Homo sapiens
  misc_RNA (1)...(19): siRNA sense strand
gacuacugcuccucuugua

SEQ ID NO: 953622 - RNA, 19 nt, Homo sapiens
  misc_RNA (1)...(19): siRNA sense strand
caucaggaaauucagauaa

SEQ ID NO: 953623 - RNA, 19 nt, Homo sapiens
  misc_RNA (1)...(19): siRNA sense strand
guuaugagacucuagaaga

SEQ ID NO: 953624 - RNA, 19 nt, Homo sapiens
  misc_RNA (1)...(19): siRNA sense strand
ccagagugcauacggauuu

SEQ ID NO: 953625 - RNA, 19 nt, Homo sapiens
  misc_RNA (1)...(19): siRNA sense strand
cagagaaggugucccucaa

SEQ ID NO: 953626 - RNA, 19 nt, Homo sapiens
  misc_RNA (1)...(19): siRNA sense strand
aaauggaaguggagaacaa

SEQ ID NO: 953627 - RNA, 19 nt, Homo sapiens
  misc_RNA (1)...(19): siRNA sense strand
gaaggagaucccacaaaug

SEQ ID NO: 953628 - RNA, 19 nt, Homo sapiens
  misc_RNA (1)...(19): siRNA sense strand
ccacacacgucucaagucu

SEQ ID NO: 953629 - RNA, 19 nt, Homo sapiens
  misc_RNA (1)...(19): siRNA sense strand
gcaaaccgaaggaguaaca

SEQ ID NO: 953630 - RNA, 19 nt, Homo sapiens
  misc_RNA (1)...(19): siRNA sense strand
cagaagaagguuacuauca

SEQ ID NO: 953631 - RNA, 19 nt, Homo sapiens
  misc_RNA (1)...(19): siRNA sense strand
guaugaaggugaagcuuac

SEQ ID NO: 953632 - RNA, 19 nt, Homo sapiens
  misc_RNA (1)...(19): siRNA sense strand
caaagaggaucuggagucu

SEQ ID NO: 953633 - RNA, 19 nt, Homo sapiens
  misc_RNA (1)...(19): siRNA sense strand
gauauggaucuccuacauu

SEQ ID NO: 953634 - RNA, 19 nt, Homo sapiens
  misc_RNA (1)...(19): siRNA sense strand
guagauccagcacuuuaaa

SEQ ID NO: 953635 - RNA, 19 nt, Homo sapiens
  misc_RNA (1)...(19): siRNA sense strand
gagcucaucaaguggcaua

SEQ ID NO: 953636 - RNA, 19 nt, Homo sapiens
  misc_RNA (1)...(19): siRNA sense strand
gaaggugaagcuuacaugu

SEQ ID NO: 953637 - RNA, 19 nt, Homo sapiens
  misc_RNA (1)...(19): siRNA sense strand
ugacaugguacauaagauu

SEQ ID NO: 953638 - RNA, 19 nt, Homo sapiens
  misc_RNA (1)...(19): siRNA sense strand
agaagaagguuacuaucag

SEQ ID NO: 953639 - RNA, 19 nt, Homo sapiens
  misc_RNA (1)...(19): siRNA sense strand
ggaaaaggaugaggaagau

SEQ ID NO: 953640 - RNA, 19 nt, Homo sapiens
  misc_RNA (1)...(19): siRNA sense strand
ucaggaaauucagauaaug

SEQ ID NO: 953641 - RNA, 19 nt, Homo sapiens
  misc_RNA (1)...(19): siRNA sense strand
gauguggacaggaauguug

SEQ ID NO: 953642 - RNA, 19 nt, Homo sapiens
  misc_RNA (1)...(19): siRNA sense strand
aaagagagucaccucauug

SEQ ID NO: 953643 - RNA, 19 nt, Homo sapiens
  misc_RNA (1)...(19): siRNA sense strand
auauggaucuccuacauuc

SEQ ID NO: 953644 - RNA, 19 nt, Homo sapiens
  misc_RNA (1)...(19): siRNA sense strand
gcaacuuggaagauaaauu

SEQ ID NO: 953645 - RNA, 19 nt, Homo sapiens
  misc_RNA (1)...(19): siRNA sense strand
gguagauccagcacuuuaa

SEQ ID NO: 953646 - RNA, 19 nt, Homo sapiens
  misc_RNA (1)...(19): siRNA sense strand
gagacaucauagacauuau

SEQ ID NO: 953647 - RNA, 19 nt, Homo sapiens
  misc_RNA (1)...(19): siRNA sense strand
caaguaaccgggacagcuu

SEQ ID NO: 953648 - RNA, 19 nt, Homo sapiens
  misc_RNA (1)...(19): siRNA sense strand
ggacuacugcuccucuugu

SEQ ID NO: 953649 - RNA, 19 nt, Homo sapiens
  misc_RNA (1)...(19): siRNA sense strand
ugcuauaucucaucaggaa

SEQ ID NO: 953650 - RNA, 19 nt, Homo sapiens
  misc_RNA (1)...(19): siRNA sense strand
cuacugcuccucuuguauu

SEQ ID NO: 953651 - RNA, 19 nt, Homo sapiens
  misc_RNA (1)...(19): siRNA sense strand
gggaaacuucaaauucauu

SEQ ID NO: 953652 - RNA, 19 nt, Homo sapiens
  misc_RNA (1)...(19): siRNA sense strand
ccgaaggaguaacagcaaa

SEQ ID NO: 953653 - RNA, 19 nt, Homo sapiens
  misc_RNA (1)...(19): siRNA sense strand
augagacucuagaagauuu

SEQ ID NO: 953654 - RNA, 19 nt, Homo sapiens
  misc_RNA (1)...(19): siRNA sense strand
caucauagacauuauuugc

SEQ ID NO: 953655 - RNA, 19 nt, Homo sapiens
  misc_RNA (1)...(19): siRNA sense strand
uuaugagacucuagaagau

SEQ ID NO: 953656 - RNA, 19 nt, Homo sapiens
  misc_RNA (1)...(19): siRNA sense strand
gcaggaauacaccucaaca

SEQ ID NO: 953657 - RNA, 19 nt, Homo sapiens
  misc_RNA (1)...(19): siRNA sense strand
gaggauucaucugcaggaa

SEQ ID NO: 953658 - RNA, 19 nt, Homo sapiens
  misc_RNA (1)...(19): siRNA sense strand
ccaagaaaauaaaggcaaa

SEQ ID NO: 953659 - RNA, 19 nt, Homo sapiens
  misc_RNA (1)...(19): siRNA sense strand
agagaaugcccacccauau

SEQ ID NO: 953660 - RNA, 19 nt, Homo sapiens
  misc_RNA (1)...(19): siRNA sense strand
uagauuggauacucuuucu

SEQ ID NO: 953661 - RNA, 19 nt, Homo sapiens
  misc_RNA (1)...(19): siRNA sense strand
cuacauucauggcgaagca

SEQ ID NO: 953662 - RNA, 19 nt, Homo sapiens
  misc_RNA (1)...(19): siRNA sense strand
aagggacucugguugcuau

SEQ ID NO: 953663 - RNA, 19 nt, Homo sapiens
  misc_RNA (1)...(19): siRNA sense strand
aaaagagagucaccucauu

SEQ ID NO: 953664 - RNA, 19 nt, Homo sapiens
  misc_RNA (1)...(19): siRNA sense strand
caaauaauggaggcgguuu

SEQ ID NO: 953665 - RNA, 19 nt, Homo sapiens
  misc_RNA (1)...(19): siRNA sense strand
ggauacucuuucugcauca

SEQ ID NO: 953666 - RNA, 19 nt, Homo sapiens
  misc_RNA (1)...(19): siRNA sense strand
auaagucacaguuagauga

SEQ ID NO: 953667 - RNA, 19 nt, Homo sapiens
  misc_RNA (1)...(19): siRNA sense strand
aaggagacaucauagacau

SEQ ID NO: 953668 - RNA, 19 nt, Homo sapiens
  misc_RNA (1)...(19): siRNA sense strand
ugacacugacucccucaaa

SEQ ID NO: 953669 - RNA, 19 nt, Homo sapiens
  misc_RNA (1)...(19): siRNA sense strand
gaaugcccacccauauaga

SEQ ID NO: 953670 - RNA, 19 nt, Homo sapiens
  misc_RNA (1)...(19): siRNA sense strand
gauaaauuagcuugguaug

SEQ ID NO: 953671 - RNA, 19 nt, Homo sapiens
  misc_RNA (1)...(19): siRNA sense strand
aaggagaucccacaaaugg

SEQ ID NO: 953672 - RNA, 19 nt, Homo sapiens
  misc_RNA (1)...(19): siRNA sense strand
ugaggcacaugaaggagau

SEQ ID NO: 953673 - RNA, 19 nt, Homo sapiens
  misc_RNA (1)...(19): siRNA sense strand
gaggaucuggagucugaaa

SEQ ID NO: 953674 - RNA, 19 nt, Homo sapiens
  misc_RNA (1)...(19): siRNA sense strand
aagcuuacauguggcauca

SEQ ID NO: 953675 - RNA, 19 nt, Homo sapiens
  misc_RNA (1)...(19): siRNA sense strand
ugacagaagaagguuacua

SEQ ID NO: 953676 - RNA, 19 nt, Homo sapiens
  misc_RNA (1)...(19): siRNA sense strand
gagucaccucauugaauua

SEQ ID NO: 953677 - RNA, 19 nt, Homo sapiens
  misc_RNA (1)...(19): siRNA sense strand
gcacuuuaaaugacugcaa

SEQ ID NO: 953678 - RNA, 19 nt, Homo sapiens
  misc_RNA (1)...(19): siRNA sense strand
uaaaugacugcaacuugga

SEQ ID NO: 953679 - RNA, 19 nt, Homo sapiens
  misc_RNA (1)...(19): siRNA sense strand
gacaugucuugauuuccaa

SEQ ID NO: 953680 - RNA, 19 nt, Homo sapiens
  misc_RNA (1)...(19): siRNA sense strand
gacacugacucccucaaaa

SEQ ID NO: 953681 - RNA, 19 nt, Homo sapiens
  misc_RNA (1)...(19): siRNA sense strand
uaucucaucaggaaauuca

SEQ ID NO: 953682 - RNA, 19 nt, Homo sapiens
  misc_RNA (1)...(19): siRNA sense strand
ccagaugacagaagaaggu

SEQ ID NO: 953683 - RNA, 19 nt, Homo sapiens
  misc_RNA (1)...(19): siRNA sense strand
cuggacaugucuugauuuc

SEQ ID NO: 953684 - RNA, 19 nt, Homo sapiens
  misc_RNA (1)...(19): siRNA sense strand
agaaaggagacaucauaga

SEQ ID NO: 953685 - RNA, 19 nt, Homo sapiens
  misc_RNA (1)...(19): siRNA sense strand
ggucaugacuacaguguga

SEQ ID NO: 953686 - RNA, 19 nt, Homo sapiens
  misc_RNA (1)...(19): siRNA sense strand
gagaaucgccugccuucag

SEQ ID NO: 953687 - RNA, 19 nt, Homo sapiens
  misc_RNA (1)...(19): siRNA sense strand
cgccaaagucuucgugaaa

SEQ ID NO: 953688 - RNA, 19 nt, Homo sapiens
  misc_RNA (1)...(19): siRNA sense strand
ucaaggucaugacuacagu

SEQ ID NO: 953689 - RNA, 19 nt, Homo sapiens
  misc_RNA (1)...(19): siRNA sense strand
ccgccaaagucuucgugaa

SEQ ID NO: 953690 - RNA, 19 nt, Homo sapiens
  misc_RNA (1)...(19): siRNA sense strand
gccaaagucuucgugaaaa

SEQ ID NO: 953691 - RNA, 19 nt, Homo sapiens
  misc_RNA (1)...(19): siRNA sense strand
ccaaagucuucgugaaaau

SEQ ID NO: 953692 - RNA, 19 nt, Homo sapiens
  misc_RNA (1)...(19): siRNA sense strand
gaacacuucucaaccauaa

SEQ ID NO: 953693 - RNA, 19 nt, Homo sapiens
  misc_RNA (1)...(19): siRNA sense strand
gagaagaacuguaaaugug

SEQ ID NO: 953694 - RNA, 19 nt, Homo sapiens
  misc_RNA (1)...(19): siRNA sense strand
ggaacgaccuuacaaaugu

SEQ ID NO: 953695 - RNA, 19 nt, Homo sapiens
  misc_RNA (1)...(19): siRNA sense strand
agaaacaacucaagccuua

SEQ ID NO: 953696 - RNA, 19 nt, Homo sapiens
  misc_RNA (1)...(19): siRNA sense strand
ggaagcagcccuauaauug

SEQ ID NO: 953697 - RNA, 19 nt, Homo sapiens
  misc_RNA (1)...(19): siRNA sense strand
gaucaaaucucaccaagca

SEQ ID NO: 953698 - RNA, 19 nt, Homo sapiens
  misc_RNA (1)...(19): siRNA sense strand
gggaaauccuucaauuaua

SEQ ID NO: 953699 - RNA, 19 nt, Homo sapiens
  misc_RNA (1)...(19): siRNA sense strand
ggagaggaaucuuuaaaug

SEQ ID NO: 953700 - RNA, 19 nt, Homo sapiens
  misc_RNA (1)...(19): siRNA sense strand
ggaaauccuucaauuauag

SEQ ID NO: 953701 - RNA, 19 nt, Homo sapiens
  misc_RNA (1)...(19): siRNA sense strand
ugagaaaccuuacgaaugu

SEQ ID NO: 953702 - RNA, 19 nt, Homo sapiens
  misc_RNA (1)...(19): siRNA sense strand
acacaucgcuccuuucuca

SEQ ID NO: 953703 - RNA, 19 nt, Homo sapiens
  misc_RNA (1)...(19): siRNA sense strand
ggagaaacccuaugugugu

SEQ ID NO: 953704 - RNA, 19 nt, Homo sapiens
  misc_RNA (1)...(19): siRNA sense strand
ggagaaacccuucaagugu

SEQ ID NO: 953705 - RNA, 19 nt, Homo sapiens
  misc_RNA (1)...(19): siRNA sense strand
gagauaaacccuauaagug

SEQ ID NO: 953706 - RNA, 19 nt, Homo sapiens
  misc_RNA (1)...(19): siRNA sense strand
ugauauaugugggaaguua

SEQ ID NO: 953707 - RNA, 19 nt, Homo sapiens
  misc_RNA (1)...(19): siRNA sense strand
gggagaagcccuacaaaug

SEQ ID NO: 953708 - RNA, 19 nt, Homo sapiens
  misc_RNA (1)...(19): siRNA sense strand
ggagaagcccuaugaaugu

SEQ ID NO: 953709 - RNA, 19 nt, Homo sapiens
  misc_RNA (1)...(19): siRNA sense strand
gagagaaacccuaugaaug

SEQ ID NO: 953710 - RNA, 19 nt, Homo sapiens
  misc_RNA (1)...(19): siRNA sense strand
cuacaaaugugaugugugu

SEQ ID NO: 953711 - RNA, 19 nt, Homo sapiens
  misc_RNA (1)...(19): siRNA sense strand
ggagaagcccuacaaaugu

SEQ ID NO: 953712 - RNA, 19 nt, Homo sapiens
  misc_RNA (1)...(19): siRNA sense strand
ggagauaaacccuauaagu

SEQ ID NO: 953713 - RNA, 19 nt, Homo sapiens
  misc_RNA (1)...(19): siRNA sense strand
gaaauaauucuggccuuaa

SEQ ID NO: 953714 - RNA, 19 nt, Homo sapiens
  misc_RNA (1)...(19): siRNA sense strand
ggagaggcccuaugaaugu

SEQ ID NO: 953715 - RNA, 19 nt, Homo sapiens
  misc_RNA (1)...(19): siRNA sense strand
gagaagcccuacaaaugug

SEQ ID NO: 953716 - RNA, 19 nt, Homo sapiens
  misc_RNA (1)...(19): siRNA sense strand
gcauacaucucacacucaa

SEQ ID NO: 953717 - RNA, 19 nt, Homo sapiens
  misc_RNA (1)...(19): siRNA sense strand
gggagaagcccuaugaaug

SEQ ID NO: 953718 - RNA, 19 nt, Homo sapiens
  misc_RNA (1)...(19): siRNA sense strand
gaagaacuguaaaugugau

SEQ ID NO: 953719 - RNA, 19 nt, Homo sapiens
  misc_RNA (1)...(19): siRNA sense strand
ggagaagaacuguaaaugu

SEQ ID NO: 953720 - RNA, 19 nt, Homo sapiens
  misc_RNA (1)...(19): siRNA sense strand
gggagaagcccuuuaagug

SEQ ID NO: 953721 - RNA, 19 nt, Homo sapiens
  misc_RNA (1)...(19): siRNA sense strand
gggagaagcccuaugaaug

SEQ ID NO: 953722 - RNA, 19 nt, Homo sapiens
  misc_RNA (1)...(19): siRNA sense strand
ggagaagcccuuuaagugu

SEQ ID NO: 953723 - RNA, 19 nt, Homo sapiens
  misc_RNA (1)...(19): siRNA sense strand
ugagaaacccuaugaaugu

SEQ ID NO: 953724 - RNA, 19 nt, Homo sapiens
  misc_RNA (1)...(19): siRNA sense strand
ucaagcagaacucuuauaa

SEQ ID NO: 953725 - RNA, 19 nt, Homo sapiens
  misc_RNA (1)...(19): siRNA sense strand
acucaagucuuaucaauca

SEQ ID NO: 953726 - RNA, 19 nt, Homo sapiens
  misc_RNA (1)...(19): siRNA sense strand
agaggaaucuuuaaaugug

SEQ ID NO: 953727 - RNA, 19 nt, Homo sapiens
  misc_RNA (1)...(19): siRNA sense strand
aguaacagcucuggccuua

SEQ ID NO: 953728 - RNA, 19 nt, Homo sapiens
  misc_RNA (1)...(19): siRNA sense strand
gaggaaucuuuaaauguga

SEQ ID NO: 953729 - RNA, 19 nt, Homo sapiens
  misc_RNA (1)...(19): siRNA sense strand
ucaaaucucaccaagcaua

SEQ ID NO: 953730 - RNA, 19 nt, Homo sapiens
  misc_RNA (1)...(19): siRNA sense strand
uaacagcucuggccuuagg

SEQ ID NO: 953731 - RNA, 19 nt, Homo sapiens
  misc_RNA (1)...(19): siRNA sense strand
gaacagcucaggccucaca

SEQ ID NO: 953732 - RNA, 19 nt, Homo sapiens
  misc_RNA (1)...(19): siRNA sense strand
gaacgaccuuacaaaugug

SEQ ID NO: 953733 - RNA, 19 nt, Homo sapiens
  misc_RNA (1)...(19): siRNA sense strand
gagaggaaucuuuaaaugu

SEQ ID NO: 953734 - RNA, 19 nt, Homo sapiens
  misc_RNA (1)...(19): siRNA sense strand
agagaaacccuaugaaugu

SEQ ID NO: 953735 - RNA, 19 nt, Homo sapiens
  misc_RNA (1)...(19): siRNA sense strand
gggaagcagcccuauaauu

SEQ ID NO: 953736 - RNA, 19 nt, Homo sapiens
  misc_RNA (1)...(19): siRNA sense strand
gggaaaaccuucaguaaca

SEQ ID NO: 953737 - RNA, 19 nt, Homo sapiens
  misc_RNA (1)...(19): siRNA sense strand
ucucgagccuuauaaauca

SEQ ID NO: 953738 - RNA, 19 nt, Homo sapiens
  misc_RNA (1)...(19): siRNA sense strand
gagaaacccuaugaaugug

SEQ ID NO: 953739 - RNA, 19 nt, Homo sapiens
  misc_RNA (1)...(19): siRNA sense strand
gugggaaauccuucaauua

SEQ ID NO: 953740 - RNA, 19 nt, Homo sapiens
  misc_RNA (1)...(19): siRNA sense strand
gaagcagcccuauaauugu

SEQ ID NO: 953741 - RNA, 19 nt, Homo sapiens
  misc_RNA (1)...(19): siRNA sense strand
gagaaacccuaugaaugug

SEQ ID NO: 953742 - RNA, 19 nt, Homo sapiens
  misc_RNA (1)...(19): siRNA sense strand
gggagaaacccuucaagug

SEQ ID NO: 953743 - RNA, 19 nt, Homo sapiens
  misc_RNA (1)...(19): siRNA sense strand
uuacgaaugugaugagugu

SEQ ID NO: 953744 - RNA, 19 nt, Homo sapiens
  misc_RNA (1)...(19): siRNA sense strand
aagcagaacucuuauaagc

SEQ ID NO: 953745 - RNA, 19 nt, Homo sapiens
  misc_RNA (1)...(19): siRNA sense strand
gguccacacuagagagaaa

SEQ ID NO: 953746 - RNA, 19 nt, Homo sapiens
  misc_RNA (1)...(19): siRNA sense strand
ggagaagcccuaugaaugc

SEQ ID NO: 953747 - RNA, 19 nt, Homo sapiens
  misc_RNA (1)...(19): siRNA sense strand
gagaagcccuaugaaugug

SEQ ID NO: 953748 - RNA, 19 nt, Homo sapiens
  misc_RNA (1)...(19): siRNA sense strand
gggaacgaccuuacaaaug

SEQ ID NO: 953749 - RNA, 19 nt, Homo sapiens
  misc_RNA (1)...(19): siRNA sense strand
gaacuguaaaugugaugaa

SEQ ID NO: 953750 - RNA, 19 nt, Homo sapiens
  misc_RNA (1)...(19): siRNA sense strand
acacucaagucuuaucaau

SEQ ID NO: 953751 - RNA, 19 nt, Homo sapiens
  misc_RNA (1)...(19): siRNA sense strand
gaaacccuaugaaugugau

SEQ ID NO: 953752 - RNA, 19 nt, Homo sapiens
  misc_RNA (1)...(19): siRNA sense strand
gggagaggcccuaugaaug

SEQ ID NO: 953753 - RNA, 19 nt, Homo sapiens
  misc_RNA (1)...(19): siRNA sense strand
gugagaaaccuuacgaaug

SEQ ID NO: 953754 - RNA, 19 nt, Homo sapiens
  misc_RNA (1)...(19): siRNA sense strand
gugagaaacccuaugaaug

SEQ ID NO: 953755 - RNA, 19 nt, Homo sapiens
  misc_RNA (1)...(19): siRNA sense strand
uuacagcucucuccuuucu

SEQ ID NO: 953756 - RNA, 19 nt, Homo sapiens
  misc_RNA (1)...(19): siRNA sense strand
aaacaacucaagccuuaaa

SEQ ID NO: 953757 - RNA, 19 nt, Homo sapiens
  misc_RNA (1)...(19): siRNA sense strand
acagaaggguccacacuag

SEQ ID NO: 953758 - RNA, 19 nt, Homo sapiens
  misc_RNA (1)...(19): siRNA sense strand
gaaugugacaggugugaga

SEQ ID NO: 953759 - RNA, 19 nt, Homo sapiens
  misc_RNA (1)...(19): siRNA sense strand
ugugggaaauccuucaauu

SEQ ID NO: 953760 - RNA, 19 nt, Homo sapiens
  misc_RNA (1)...(19): siRNA sense strand
aguuacagcucucuccuuu

SEQ ID NO: 953761 - RNA, 19 nt, Homo sapiens
  misc_RNA (1)...(19): siRNA sense strand
ugggaaauccuucaauuau

SEQ ID NO: 953762 - RNA, 19 nt, Homo sapiens
  misc_RNA (1)...(19): siRNA sense strand
aagaagccauaccgaugua

SEQ ID NO: 953763 - RNA, 19 nt, Homo sapiens
  misc_RNA (1)...(19): siRNA sense strand
cuagagagaaacccuauga

SEQ ID NO: 953764 - RNA, 19 nt, Homo sapiens
  misc_RNA (1)...(19): siRNA sense strand
caaaucucaccaagcauaa

SEQ ID NO: 953765 - RNA, 19 nt, Homo sapiens
  misc_RNA (1)...(19): siRNA sense strand
ggugagaaacccuaugaau

SEQ ID NO: 953766 - RNA, 19 nt, Homo sapiens
  misc_RNA (1)...(19): siRNA sense strand
ucacacucaagccuuauua

SEQ ID NO: 953767 - RNA, 19 nt, Homo sapiens
  misc_RNA (1)...(19): siRNA sense strand
acucaagccuuaaaguuca

SEQ ID NO: 953768 - RNA, 19 nt, Homo sapiens
  misc_RNA (1)...(19): siRNA sense strand
gcacaucccagaagagaac

SEQ ID NO: 953769 - RNA, 19 nt, Homo sapiens
  misc_RNA (1)...(19): siRNA sense strand
gauccacacaggugagaaa

SEQ ID NO: 953770 - RNA, 19 nt, Homo sapiens
  misc_RNA (1)...(19): siRNA sense strand
gauccacacaggugagaaa

SEQ ID NO: 953771 - RNA, 19 nt, Homo sapiens
  misc_RNA (1)...(19): siRNA sense strand
agauaaacccuauaagugu

SEQ ID NO: 953772 - RNA, 19 nt, Homo sapiens
  misc_RNA (1)...(19): siRNA sense strand
ugaagaaugugggaaagca

SEQ ID NO: 953773 - RNA, 19 nt, Homo sapiens
  misc_RNA (1)...(19): siRNA sense strand
cuaugaaugugaugagugu

SEQ ID NO: 953774 - RNA, 19 nt, Homo sapiens
  misc_RNA (1)...(19): siRNA sense strand
cuaugaaugugaugugugu

SEQ ID NO: 953775 - RNA, 19 nt, Homo sapiens
  misc_RNA (1)...(19): siRNA sense strand
gaaacaacucaagccuuaa

SEQ ID NO: 953776 - RNA, 19 nt, Homo sapiens
  misc_RNA (1)...(19): siRNA sense strand
gaaggguccacacuagaga

SEQ ID NO: 953777 - RNA, 19 nt, Homo sapiens
  misc_RNA (1)...(19): siRNA sense strand
gggagaagaacuguaaaug

SEQ ID NO: 953778 - RNA, 19 nt, Homo sapiens
  misc_RNA (1)...(19): siRNA sense strand
cuguaaaugugaugaaugu

SEQ ID NO: 953779 - RNA, 19 nt, Homo sapiens
  misc_RNA (1)...(19): siRNA sense strand
cuauaagugugaugagugu

SEQ ID NO: 953780 - RNA, 19 nt, Homo sapiens
  misc_RNA (1)...(19): siRNA sense strand
ccauaccgauguaaugagu

SEQ ID NO: 953781 - RNA, 19 nt, Homo sapiens
  misc_RNA (1)...(19): siRNA sense strand
aagcagcccuauaauugug

SEQ ID NO: 953782 - RNA, 19 nt, Homo sapiens
  misc_RNA (1)...(19): siRNA sense strand
gagaggcccuaugaaugug

SEQ ID NO: 953783 - RNA, 19 nt, Homo sapiens
  misc_RNA (1)...(19): siRNA sense strand
ggugagaaaccuuacgaau

SEQ ID NO: 953784 - RNA, 19 nt, Homo sapiens
  misc_RNA (1)...(19): siRNA sense strand
cuaugaauguggugagugu

SEQ ID NO: 953785 - RNA, 19 nt, Homo sapiens
  misc_RNA (1)...(19): siRNA sense strand
gcacagaaggguccacacu

SEQ ID NO: 953786 - RNA, 19 nt, Homo sapiens
  misc_RNA (1)...(19): siRNA sense strand
acaaaugugauguguguga

SEQ ID NO: 953787 - RNA, 19 nt, Homo sapiens
  misc_RNA (1)...(19): siRNA sense strand
aauuacacaucgcuccuuu

SEQ ID NO: 953788 - RNA, 19 nt, Homo sapiens
  misc_RNA (1)...(19): siRNA sense strand
gaaguuauaguggcacauc

SEQ ID NO: 953789 - RNA, 19 nt, Homo sapiens
  misc_RNA (1)...(19): siRNA sense strand
gguaaggcuuuuaauauca

SEQ ID NO: 953790 - RNA, 19 nt, Homo sapiens
  misc_RNA (1)...(19): siRNA sense strand
agagagaaacccuaugaau

SEQ ID NO: 953791 - RNA, 19 nt, Homo sapiens
  misc_RNA (1)...(19): siRNA sense strand
gauguaaugagugugguaa

SEQ ID NO: 953792 - RNA, 19 nt, Homo sapiens
  misc_RNA (1)...(19): siRNA sense strand
ccaguucaguccaguauga

SEQ ID NO: 953793 - RNA, 19 nt, Homo sapiens
  misc_RNA (1)...(19): siRNA sense strand
gcuccagcauccaaacuaa

SEQ ID NO: 953794 - RNA, 19 nt, Homo sapiens
  misc_RNA (1)...(19): siRNA sense strand
uacaggagcucguugugaa

SEQ ID NO: 953795 - RNA, 19 nt, Homo sapiens
  misc_RNA (1)...(19): siRNA sense strand
ggcauuggcgguccuagua

SEQ ID NO: 953796 - RNA, 19 nt, Homo sapiens
  misc_RNA (1)...(19): siRNA sense strand
gccaacagaucacgaagag

SEQ ID NO: 953797 - RNA, 19 nt, Homo sapiens
  misc_RNA (1)...(19): siRNA sense strand
ccuaguaacacuuaucauu

SEQ ID NO: 953798 - RNA, 19 nt, Homo sapiens
  misc_RNA (1)...(19): siRNA sense strand
ccaccacagucaugaacaa

SEQ ID NO: 953799 - RNA, 19 nt, Homo sapiens
  misc_RNA (1)...(19): siRNA sense strand
cuaguaacacuuaucauug

SEQ ID NO: 953800 - RNA, 19 nt, Homo sapiens
  misc_RNA (1)...(19): siRNA sense strand
gauaucaaccugguagaga

SEQ ID NO: 953801 - RNA, 19 nt, Homo sapiens
  misc_RNA (1)...(19): siRNA sense strand
guuaugugauaccuacuau

SEQ ID NO: 953802 - RNA, 19 nt, Homo sapiens
  misc_RNA (1)...(19): siRNA sense strand
guaaccuguuugaagcuuu

SEQ ID NO: 953803 - RNA, 19 nt, Homo sapiens
  misc_RNA (1)...(19): siRNA sense strand
uaguaacacuuaucauugg

SEQ ID NO: 953804 - RNA, 19 nt, Homo sapiens
  misc_RNA (1)...(19): siRNA sense strand
ggagccuucuacuuccuuu

SEQ ID NO: 953805 - RNA, 19 nt, Homo sapiens
  misc_RNA (1)...(19): siRNA sense strand
cauuggagccuucuacuuc

SEQ ID NO: 953806 - RNA, 19 nt, Homo sapiens
  misc_RNA (1)...(19): siRNA sense strand
uaugugauaccuacuauuc

SEQ ID NO: 953807 - RNA, 19 nt, Homo sapiens
  misc_RNA (1)...(19): siRNA sense strand
gcauuggcgguccuaguaa

SEQ ID NO: 953808 - RNA, 19 nt, Homo sapiens
  misc_RNA (1)...(19): siRNA sense strand
guaggugcguugaaaacua

SEQ ID NO: 953809 - RNA, 19 nt, Homo sapiens
  misc_RNA (1)...(19): siRNA sense strand
gcgguccuaguaacacuua

SEQ ID NO: 953810 - RNA, 19 nt, Homo sapiens
  misc_RNA (1)...(19): siRNA sense strand
guucaguccaguaugauau

SEQ ID NO: 953811 - RNA, 19 nt, Homo sapiens
  misc_RNA (1)...(19): siRNA sense strand
ccacagucaugaacaacac

SEQ ID NO: 953812 - RNA, 19 nt, Homo sapiens
  misc_RNA (1)...(19): siRNA sense strand
guagagacgagcaguacca

SEQ ID NO: 953813 - RNA, 19 nt, Homo sapiens
  misc_RNA (1)...(19): siRNA sense strand
uaaccuguuugaagcuuuu

SEQ ID NO: 953814 - RNA, 19 nt, Homo sapiens
  misc_RNA (1)...(19): siRNA sense strand
aaaaguaaccuguuugaag

SEQ ID NO: 953815 - RNA, 19 nt, Homo sapiens
  misc_RNA (1)...(19): siRNA sense strand
gagccaguucaguccagua

SEQ ID NO: 953816 - RNA, 19 nt, Homo sapiens
  misc_RNA (1)...(19): siRNA sense strand
ccagugcccaccacaguca

SEQ ID NO: 953817 - RNA, 19 nt, Homo sapiens
  misc_RNA (1)...(19): siRNA sense strand
ccugguguuugccaaguua

SEQ ID NO: 953818 - RNA, 19 nt, Homo sapiens
  misc_RNA (1)...(19): siRNA sense strand
ugugggaaaucgagaacaa

SEQ ID NO: 953819 - RNA, 19 nt, Homo sapiens
  misc_RNA (1)...(19): siRNA sense strand
ggccuccuacugcccauua

SEQ ID NO: 953820 - RNA, 19 nt, Homo sapiens
  misc_RNA (1)...(19): siRNA sense strand
caaccgcuaccagguguuu

SEQ ID NO: 953821 - RNA, 19 nt, Homo sapiens
  misc_RNA (1)...(19): siRNA sense strand
cgagacggccuuccugagu

SEQ ID NO: 953822 - RNA, 19 nt, Homo sapiens
  misc_RNA (1)...(19): siRNA sense strand
acaaggagugcaaggagaa

SEQ ID NO: 953823 - RNA, 19 nt, Homo sapiens
  misc_RNA (1)...(19): siRNA sense strand
ggaagccggacgacgacaa

SEQ ID NO: 953824 - RNA, 19 nt, Homo sapiens
  misc_RNA (1)...(19): siRNA sense strand
cccauuagccucagagaag

SEQ ID NO: 953825 - RNA, 19 nt, Homo sapiens
  misc_RNA (1)...(19): siRNA sense strand
gaccugguguuugccaagu

SEQ ID NO: 953826 - RNA, 19 nt, Homo sapiens
  misc_RNA (1)...(19): siRNA sense strand
aaacgccuguucccguaca

SEQ ID NO: 953827 - RNA, 19 nt, Homo sapiens
  misc_RNA (1)...(19): siRNA sense strand
gaagccggacgacgacaag

SEQ ID NO: 953828 - RNA, 19 nt, Homo sapiens
  misc_RNA (1)...(19): siRNA sense strand
ggagagagaaggaagauua

SEQ ID NO: 953829 - RNA, 19 nt, Homo sapiens
  misc_RNA (1)...(19): siRNA sense strand
gaauggaacuggagacaag

SEQ ID NO: 953830 - RNA, 19 nt, Homo sapiens
  misc_RNA (1)...(19): siRNA sense strand
gaagauggcaagaaguuug

SEQ ID NO: 953831 - RNA, 19 nt, Homo sapiens
  misc_RNA (1)...(19): siRNA sense strand
gugcugugcugcuguuuga

SEQ ID NO: 953832 - RNA, 19 nt, Homo sapiens
  misc_RNA (1)...(19): siRNA sense strand
gagagaaggaagauuauca

SEQ ID NO: 953833 - RNA, 19 nt, Homo sapiens
  misc_RNA (1)...(19): siRNA sense strand
uaggagacauguuccagaa

SEQ ID NO: 953834 - RNA, 19 nt, Homo sapiens
  misc_RNA (1)...(19): siRNA sense strand
ucugagaccugcaaugaga

SEQ ID NO: 953835 - RNA, 19 nt, Homo sapiens
  misc_RNA (1)...(19): siRNA sense strand
gcaaugagaccaccaagcu

SEQ ID NO: 953836 - RNA, 19 nt, Homo sapiens
  misc_RNA (1)...(19): siRNA sense strand
ggggaacgccggagaauua

SEQ ID NO: 953837 - RNA, 19 nt, Homo sapiens
  misc_RNA (1)...(19): siRNA sense strand
caaccuguuugaagacaug

SEQ ID NO: 953838 - RNA, 19 nt, Homo sapiens
  misc_RNA (1)...(19): siRNA sense strand
acauggaccucaacaagga

SEQ ID NO: 953839 - RNA, 19 nt, Homo sapiens
  misc_RNA (1)...(19): siRNA sense strand
caucugagaccugcaauga

SEQ ID NO: 953840 - RNA, 19 nt, Homo sapiens
  misc_RNA (1)...(19): siRNA sense strand
ggacuuuguucgauaccau

SEQ ID NO: 953841 - RNA, 19 nt, Homo sapiens
  misc_RNA (1)...(19): siRNA sense strand
caacggcacuuuugaagau

SEQ ID NO: 953842 - RNA, 19 nt, Homo sapiens
  misc_RNA (1)...(19): siRNA sense strand
ggacggcacccucuucgau

SEQ ID NO: 953843 - RNA, 19 nt, Homo sapiens
  misc_RNA (1)...(19): siRNA sense strand
gggcaaaggacgccucaug

SEQ ID NO: 953844 - RNA, 19 nt, Homo sapiens
  misc_RNA (1)...(19): siRNA sense strand
gagagagaaggaagauuau

SEQ ID NO: 953845 - RNA, 19 nt, Homo sapiens
  misc_RNA (1)...(19): siRNA sense strand
gcucugccgugcuaaucuu

SEQ ID NO: 953846 - RNA, 19 nt, Homo sapiens
  misc_RNA (1)...(19): siRNA sense strand
gcuaugaucgcaacaccuu

SEQ ID NO: 953847 - RNA, 19 nt, Homo sapiens
  misc_RNA (1)...(19): siRNA sense strand
cugccaaccuguuugaaga

SEQ ID NO: 953848 - RNA, 19 nt, Homo sapiens
  misc_RNA (1)...(19): siRNA sense strand
gacaccagcuacaguaagg

SEQ ID NO: 953849 - RNA, 19 nt, Homo sapiens
  misc_RNA (1)...(19): siRNA sense strand
gcaaccacaccuacaauac

SEQ ID NO: 953850 - RNA, 19 nt, Homo sapiens
  misc_RNA (1)...(19): siRNA sense strand
gcacuuaugacaccuacgu

SEQ ID NO: 953851 - RNA, 19 nt, Homo sapiens
  misc_RNA (1)...(19): siRNA sense strand
ucaagugagugagggcaaa

SEQ ID NO: 953852 - RNA, 19 nt, Homo sapiens
  misc_RNA (1)...(19): siRNA sense strand
cauuacaacuguucuuugc

SEQ ID NO: 953853 - RNA, 19 nt, Homo sapiens
  misc_RNA (1)...(19): siRNA sense strand
cauguguccuggagagaga

SEQ ID NO: 953854 - RNA, 19 nt, Homo sapiens
  misc_RNA (1)...(19): siRNA sense strand
ucgauaccauuacaacugu

SEQ ID NO: 953855 - RNA, 19 nt, Homo sapiens
  misc_RNA (1)...(19): siRNA sense strand
gaagacauggaccucaaca

SEQ ID NO: 953856 - RNA, 19 nt, Homo sapiens
  misc_RNA (1)...(19): siRNA sense strand
acaccuacaauaccuauau

SEQ ID NO: 953857 - RNA, 19 nt, Homo sapiens
  misc_RNA (1)...(19): siRNA sense strand
gaacgccggagaauuacca

SEQ ID NO: 953858 - RNA, 19 nt, Homo sapiens
  misc_RNA (1)...(19): siRNA sense strand
guggaaaucaggacacugu

SEQ ID NO: 953859 - RNA, 19 nt, Homo sapiens
  misc_RNA (1)...(19): siRNA sense strand
gagaaggaagauuaucauc

SEQ ID NO: 953860 - RNA, 19 nt, Homo sapiens
  misc_RNA (1)...(19): siRNA sense strand
caaccaggacggcaagauc

SEQ ID NO: 953861 - RNA, 19 nt, Homo sapiens
  misc_RNA (1)...(19): siRNA sense strand
agacauggaccucaacaag

SEQ ID NO: 953862 - RNA, 19 nt, Homo sapiens
  misc_RNA (1)...(19): siRNA sense strand
cuacaauggcuccuugaug

SEQ ID NO: 953863 - RNA, 19 nt, Homo sapiens
  misc_RNA (1)...(19): siRNA sense strand
cugcggaugugguggaaau

SEQ ID NO: 953864 - RNA, 19 nt, Homo sapiens
  misc_RNA (1)...(19): siRNA sense strand
ggaugccacccucuacuuc

SEQ ID NO: 953865 - RNA, 19 nt, Homo sapiens
  misc_RNA (1)...(19): siRNA sense strand
gacggcacccucuucgauu

SEQ ID NO: 953866 - RNA, 19 nt, Homo sapiens
  misc_RNA (1)...(19): siRNA sense strand
gagaauggaacuggagaca

SEQ ID NO: 953867 - RNA, 19 nt, Homo sapiens
  misc_RNA (1)...(19): siRNA sense strand
aggccucgcuggucuuuca

SEQ ID NO: 953868 - RNA, 19 nt, Homo sapiens
  misc_RNA (1)...(19): siRNA sense strand
gauggcaagaaguuugauu

SEQ ID NO: 953869 - RNA, 19 nt, Homo sapiens
  misc_RNA (1)...(19): siRNA sense strand
cuacuucgaugugguucug

SEQ ID NO: 953870 - RNA, 19 nt, Homo sapiens
  misc_RNA (1)...(19): siRNA sense strand
cgcaaccacaccuacaaua

SEQ ID NO: 953871 - RNA, 19 nt, Homo sapiens
  misc_RNA (1)...(19): siRNA sense strand
gauuaucaucccuccauuc

SEQ ID NO: 953872 - RNA, 19 nt, Homo sapiens
  misc_RNA (1)...(19): siRNA sense strand
ccacaccuacaauaccuau

SEQ ID NO: 953873 - RNA, 19 nt, Homo sapiens
  misc_RNA (1)...(19): siRNA sense strand
aaccauaggagacauguuc

SEQ ID NO: 953874 - RNA, 19 nt, Homo sapiens
  misc_RNA (1)...(19): siRNA sense strand
ccauuacaacuguucuuug

SEQ ID NO: 953875 - RNA, 19 nt, Homo sapiens
  misc_RNA (1)...(19): siRNA sense strand
cuucaacguccaugucauu

SEQ ID NO: 953876 - RNA, 19 nt, Homo sapiens
  misc_RNA (1)...(19): siRNA sense strand
gauggacggcacccucuuc

SEQ ID NO: 953877 - RNA, 19 nt, Homo sapiens
  misc_RNA (1)...(19): siRNA sense strand
caccuacaauaccuauauc

SEQ ID NO: 953878 - RNA, 19 nt, Homo sapiens
  misc_RNA (1)...(19): siRNA sense strand
uugaagauggcaagaaguu

SEQ ID NO: 953879 - RNA, 19 nt, Homo sapiens
  misc_RNA (1)...(19): siRNA sense strand
ugaagauggcaagaaguuu

SEQ ID NO: 953880 - RNA, 19 nt, Homo sapiens
  misc_RNA (1)...(19): siRNA sense strand
ccuggccuauggcgagaaa

SEQ ID NO: 953881 - RNA, 19 nt, Homo sapiens
  misc_RNA (1)...(19): siRNA sense strand
gagagaggcggcagcucau

SEQ ID NO: 953882 - RNA, 19 nt, Homo sapiens
  misc_RNA (1)...(19): siRNA sense strand
caaugagaccaccaagcuu

SEQ ID NO: 953883 - RNA, 19 nt, Homo sapiens
  misc_RNA (1)...(19): siRNA sense strand
gauaccauuacaacuguuc

SEQ ID NO: 953884 - RNA, 19 nt, Homo sapiens
  misc_RNA (1)...(19): siRNA sense strand
ggaaagcgauucucucauu

SEQ ID NO: 953885 - RNA, 19 nt, Homo sapiens
  misc_RNA (1)...(19): siRNA sense strand
caacacauacuacaucgua

SEQ ID NO: 953886 - RNA, 19 nt, Homo sapiens
  misc_RNA (1)...(19): siRNA sense strand
gaaagacaguggcacaagu

SEQ ID NO: 953887 - RNA, 19 nt, Homo sapiens
  misc_RNA (1)...(19): siRNA sense strand
gaaagcgauucucucauuc

SEQ ID NO: 953888 - RNA, 19 nt, Homo sapiens
  misc_RNA (1)...(19): siRNA sense strand
ggccaggucuuccuccuau

SEQ ID NO: 953889 - RNA, 19 nt, Homo sapiens
  misc_RNA (1)...(19): siRNA sense strand
ggccugcacugggauguuu

SEQ ID NO: 953890 - RNA, 19 nt, Homo sapiens
  misc_RNA (1)...(19): siRNA sense strand
gacaguggcacaaguuuca

SEQ ID NO: 953891 - RNA, 19 nt, Homo sapiens
  misc_RNA (1)...(19): siRNA sense strand
ggaaagacaguggcacaag

SEQ ID NO: 953892 - RNA, 19 nt, Homo sapiens
  misc_RNA (1)...(19): siRNA sense strand
guggaaagcgauucucuca

SEQ ID NO: 953893 - RNA, 19 nt, Homo sapiens
  misc_RNA (1)...(19): siRNA sense strand
aaagacaguggcacaaguu

SEQ ID NO: 953894 - RNA, 19 nt, Homo sapiens
  misc_RNA (1)...(19): siRNA sense strand
acggagaccuggaggagau

SEQ ID NO: 953895 - RNA, 19 nt, Homo sapiens
  misc_RNA (1)...(19): siRNA sense strand
gccaggucuuccuccuaua

SEQ ID NO: 953896 - RNA, 19 nt, Homo sapiens
  misc_RNA (1)...(19): siRNA sense strand
ggguccgagucaacacaua

SEQ ID NO: 953897 - RNA, 19 nt, Homo sapiens
  misc_RNA (1)...(19): siRNA sense strand
uacaagugguaccugaaga

SEQ ID NO: 953898 - RNA, 19 nt, Homo sapiens
  misc_RNA (1)...(19): siRNA sense strand
ucuccuagcccuucucugu

SEQ ID NO: 953899 - RNA, 19 nt, Homo sapiens
  misc_RNA (1)...(19): siRNA sense strand
acaagugguaccugaagaa

SEQ ID NO: 953900 - RNA, 19 nt, Homo sapiens
  misc_RNA (1)...(19): siRNA sense strand
guugacagucgcucuccua

SEQ ID NO: 953901 - RNA, 19 nt, Homo sapiens
  misc_RNA (1)...(19): siRNA sense strand
aagcgauucucucauucug

SEQ ID NO: 953902 - RNA, 19 nt, Homo sapiens
  misc_RNA (1)...(19): siRNA sense strand
gggaaagacaguggcacaa

SEQ ID NO: 953903 - RNA, 19 nt, Homo sapiens
  misc_RNA (1)...(19): siRNA sense strand
ccaggucuuccuccuauag

SEQ ID NO: 953904 - RNA, 19 nt, Homo sapiens
  misc_RNA (1)...(19): siRNA sense strand
gagggacgaugucaacgua

SEQ ID NO: 953905 - RNA, 19 nt, Homo sapiens
  misc_RNA (1)...(19): siRNA sense strand
gaaacugaaugccaaaggu

SEQ ID NO: 953906 - RNA, 19 nt, Homo sapiens
  misc_RNA (1)...(19): siRNA sense strand
ccacugcgcuggacaccuu

SEQ ID NO: 953907 - RNA, 19 nt, Homo sapiens
  misc_RNA (1)...(19): siRNA sense strand
cagcccagcuccuuucaaa

SEQ ID NO: 953908 - RNA, 19 nt, Homo sapiens
  misc_RNA (1)...(19): siRNA sense strand
agaaauggcugcccgagau

SEQ ID NO: 953909 - RNA, 19 nt, Homo sapiens
  misc_RNA (1)...(19): siRNA sense strand
gaagaaacugaaugccaaa

SEQ ID NO: 953910 - RNA, 19 nt, Homo sapiens
  misc_RNA (1)...(19): siRNA sense strand
gaugucaacguacuaauuc

SEQ ID NO: 953911 - RNA, 19 nt, Homo sapiens
  misc_RNA (1)...(19): siRNA sense strand
guauuugacucggcuauuc

SEQ ID NO: 953912 - RNA, 19 nt, Homo sapiens
  misc_RNA (1)...(19): siRNA sense strand
gcucagccuugacgcagaa

SEQ ID NO: 953913 - RNA, 19 nt, Homo sapiens
  misc_RNA (1)...(19): siRNA sense strand
gagcuccggugcgcauuga

SEQ ID NO: 953914 - RNA, 19 nt, Homo sapiens
  misc_RNA (1)...(19): siRNA sense strand
gcagaagaacuugaaggaa

SEQ ID NO: 953915 - RNA, 19 nt, Homo sapiens
  misc_RNA (1)...(19): siRNA sense strand
ggacgaugucaacguacua

SEQ ID NO: 953916 - RNA, 19 nt, Homo sapiens
  misc_RNA (1)...(19): siRNA sense strand
ugacucggcuauucucagu

SEQ ID NO: 953917 - RNA, 19 nt, Homo sapiens
  misc_RNA (1)...(19): siRNA sense strand
cgaugucaacguacuaauu

SEQ ID NO: 953918 - RNA, 19 nt, Homo sapiens
  misc_RNA (1)...(19): siRNA sense strand
cagcgggacaggaggauuu

SEQ ID NO: 953919 - RNA, 19 nt, Homo sapiens
  misc_RNA (1)...(19): siRNA sense strand
ugacgcagaagaacuugaa

SEQ ID NO: 953920 - RNA, 19 nt, Homo sapiens
  misc_RNA (1)...(19): siRNA sense strand
guucuucugcuucguuuga

SEQ ID NO: 953921 - RNA, 19 nt, Homo sapiens
  misc_RNA (1)...(19): siRNA sense strand
ggacaccuucucugugcaa

SEQ ID NO: 953922 - RNA, 19 nt, Homo sapiens
  misc_RNA (1)...(19): siRNA sense strand
aaacaucacagagaaaugg

SEQ ID NO: 953923 - RNA, 19 nt, Homo sapiens
  misc_RNA (1)...(19): siRNA sense strand
gaaauggcugcccgagauc

SEQ ID NO: 953924 - RNA, 19 nt, Homo sapiens
  misc_RNA (1)...(19): siRNA sense strand
gcagccucaucgucagcua

SEQ ID NO: 953925 - RNA, 19 nt, Homo sapiens
  misc_RNA (1)...(19): siRNA sense strand
gcuauucucagugccauug

SEQ ID NO: 953926 - RNA, 19 nt, Homo sapiens
  misc_RNA (1)...(19): siRNA sense strand
gaccgacuucguucccuuu

SEQ ID NO: 953927 - RNA, 19 nt, Homo sapiens
  misc_RNA (1)...(19): siRNA sense strand
gacgaugucaacguacuaa

SEQ ID NO: 953928 - RNA, 19 nt, Homo sapiens
  misc_RNA (1)...(19): siRNA sense strand
ucccuuugcuacccggaua

SEQ ID NO: 953929 - RNA, 19 nt, Homo sapiens
  misc_RNA (1)...(19): siRNA sense strand
cgacuucguucccuuugcu

SEQ ID NO: 953930 - RNA, 19 nt, Homo sapiens
  misc_RNA (1)...(19): siRNA sense strand
gggacgaugucaacguacu

SEQ ID NO: 953931 - RNA, 19 nt, Homo sapiens
  misc_RNA (1)...(19): siRNA sense strand
caccuucucugugcaaguc

SEQ ID NO: 953932 - RNA, 19 nt, Homo sapiens
  misc_RNA (1)...(19): siRNA sense strand
cgcagaagaacuugaagga

SEQ ID NO: 953933 - RNA, 19 nt, Homo sapiens
  misc_RNA (1)...(19): siRNA sense strand
uaaaggagguuacaaauuc

SEQ ID NO: 953934 - RNA, 19 nt, Homo sapiens
  misc_RNA (1)...(19): siRNA sense strand
ccaaggauauuaugaaaga

SEQ ID NO: 953935 - RNA, 19 nt, Homo sapiens
  misc_RNA (1)...(19): siRNA sense strand
gcacuauuauggagacuug

SEQ ID NO: 953936 - RNA, 19 nt, Homo sapiens
  misc_RNA (1)...(19): siRNA sense strand
gaacaucagccgaaauuca

SEQ ID NO: 953937 - RNA, 19 nt, Homo sapiens
  misc_RNA (1)...(19): siRNA sense strand
ggguaugacuugaauuuau

SEQ ID NO: 953938 - RNA, 19 nt, Homo sapiens
  misc_RNA (1)...(19): siRNA sense strand
gaagagaacauccagaagu

SEQ ID NO: 953939 - RNA, 19 nt, Homo sapiens
  misc_RNA (1)...(19): siRNA sense strand
ggccaaggauauuaugaaa

SEQ ID NO: 953940 - RNA, 19 nt, Homo sapiens
  misc_RNA (1)...(19): siRNA sense strand
gcacuacucagcaauauag

SEQ ID NO: 953941 - RNA, 19 nt, Homo sapiens
  misc_RNA (1)...(19): siRNA sense strand
uaagguagccaguuuguug

SEQ ID NO: 953942 - RNA, 19 nt, Homo sapiens
  misc_RNA (1)...(19): siRNA sense strand
ugauuaagguagccaguuu

SEQ ID NO: 953943 - RNA, 19 nt, Homo sapiens
  misc_RNA (1)...(19): siRNA sense strand
gaacugggaggaccaugaa

SEQ ID NO: 953944 - RNA, 19 nt, Homo sapiens
  misc_RNA (1)...(19): siRNA sense strand
uagaacaccuuaagaacau

SEQ ID NO: 953945 - RNA, 19 nt, Homo sapiens
  misc_RNA (1)...(19): siRNA sense strand
ugaaagacauaggauauag

SEQ ID NO: 953946 - RNA, 19 nt, Homo sapiens
  misc_RNA (1)...(19): siRNA sense strand
ggauaugccuuagauuaca

SEQ ID NO: 953947 - RNA, 19 nt, Homo sapiens
  misc_RNA (1)...(19): siRNA sense strand
gaaauacaagcccaacaug

SEQ ID NO: 953948 - RNA, 19 nt, Homo sapiens
  misc_RNA (1)...(19): siRNA sense strand
ugaaagcacuacucagcaa

SEQ ID NO: 953949 - RNA, 19 nt, Homo sapiens
  misc_RNA (1)...(19): siRNA sense strand
gugcugaucucguagaaca

SEQ ID NO: 953950 - RNA, 19 nt, Homo sapiens
  misc_RNA (1)...(19): siRNA sense strand
ugggauaugccuuagauua

SEQ ID NO: 953951 - RNA, 19 nt, Homo sapiens
  misc_RNA (1)...(19): siRNA sense strand
ggugggauaugccuuagau

SEQ ID NO: 953952 - RNA, 19 nt, Homo sapiens
  misc_RNA (1)...(19): siRNA sense strand
gauaugccuuagauuacaa

SEQ ID NO: 953953 - RNA, 19 nt, Homo sapiens
  misc_RNA (1)...(19): siRNA sense strand
guagaacaccuuaagaaca

SEQ ID NO: 953954 - RNA, 19 nt, Homo sapiens
  misc_RNA (1)...(19): siRNA sense strand
ucacauaugcgucaucaau

SEQ ID NO: 953955 - RNA, 19 nt, Homo sapiens
  misc_RNA (1)...(19): siRNA sense strand
ugccuuagauuacaaugaa

SEQ ID NO: 953956 - RNA, 19 nt, Homo sapiens
  misc_RNA (1)...(19): siRNA sense strand
gacauaggauauagugaca

SEQ ID NO: 953957 - RNA, 19 nt, Homo sapiens
  misc_RNA (1)...(19): siRNA sense strand
gcuuaaaggagguuacaaa

SEQ ID NO: 953958 - RNA, 19 nt, Homo sapiens
  misc_RNA (1)...(19): siRNA sense strand
ucaaugagcacgguaaaga

SEQ ID NO: 953959 - RNA, 19 nt, Homo sapiens
  misc_RNA (1)...(19): siRNA sense strand
gggcgaggcgucgugauua

SEQ ID NO: 953960 - RNA, 19 nt, Homo sapiens
  misc_RNA (1)...(19): siRNA sense strand
caaauucugugcugaucuc

SEQ ID NO: 953961 - RNA, 19 nt, Homo sapiens
  misc_RNA (1)...(19): siRNA sense strand
aagagaacauccagaagug

SEQ ID NO: 953962 - RNA, 19 nt, Homo sapiens
  misc_RNA (1)...(19): siRNA sense strand
cauaggauauagugacauc

SEQ ID NO: 953963 - RNA, 19 nt, Homo sapiens
  misc_RNA (1)...(19): siRNA sense strand
caggguaugacuugaauuu

SEQ ID NO: 953964 - RNA, 19 nt, Homo sapiens
  misc_RNA (1)...(19): siRNA sense strand
gugaagagaacauccagaa

SEQ ID NO: 953965 - RNA, 19 nt, Homo sapiens
  misc_RNA (1)...(19): siRNA sense strand
ggaacugggaggaccauga

SEQ ID NO: 953966 - RNA, 19 nt, Homo sapiens
  misc_RNA (1)...(19): siRNA sense strand
ugacuaugcuggauuugag

SEQ ID NO: 953967 - RNA, 19 nt, Homo sapiens
  misc_RNA (1)...(19): siRNA sense strand
ucacguacccacagcacua

SEQ ID NO: 953968 - RNA, 19 nt, Homo sapiens
  misc_RNA (1)...(19): siRNA sense strand
cggaggcgaugaucuuuca

SEQ ID NO: 953969 - RNA, 19 nt, Homo sapiens
  misc_RNA (1)...(19): siRNA sense strand
aagaacaucagccgaaauu

SEQ ID NO: 953970 - RNA, 19 nt, Homo sapiens
  misc_RNA (1)...(19): siRNA sense strand
uuaagaacaucagccgaaa

SEQ ID NO: 953971 - RNA, 19 nt, Homo sapiens
  misc_RNA (1)...(19): siRNA sense strand
ccucaucccucaugguauc

SEQ ID NO: 953972 - RNA, 19 nt, Homo sapiens
  misc_RNA (1)...(19): siRNA sense strand
uacaagcccaacaugauua

SEQ ID NO: 953973 - RNA, 19 nt, Homo sapiens
  misc_RNA (1)...(19): siRNA sense strand
ugggugagaugcagauaau

SEQ ID NO: 953974 - RNA, 19 nt, Homo sapiens
  misc_RNA (1)...(19): siRNA sense strand
gaaagacauaggauauagu

SEQ ID NO: 953975 - RNA, 19 nt, Homo sapiens
  misc_RNA (1)...(19): siRNA sense strand
ggcgaggcgucgugauuau

SEQ ID NO: 953976 - RNA, 19 nt, Homo sapiens
  misc_RNA (1)...(19): siRNA sense strand
gccaggguaugacuugaau

SEQ ID NO: 953977 - RNA, 19 nt, Homo sapiens
  misc_RNA (1)...(19): siRNA sense strand
acucagcaauauagagaaa

SEQ ID NO: 953978 - RNA, 19 nt, Homo sapiens
  misc_RNA (1)...(19): siRNA sense strand
ucagaucgauuugucucaa

SEQ ID NO: 953979 - RNA, 19 nt, Homo sapiens
  misc_RNA (1)...(19): siRNA sense strand
caaugagcacgguaaagaa

SEQ ID NO: 953980 - RNA, 19 nt, Homo sapiens
  misc_RNA (1)...(19): siRNA sense strand
aaagcacuacucagcaaua

SEQ ID NO: 953981 - RNA, 19 nt, Homo sapiens
  misc_RNA (1)...(19): siRNA sense strand
gagcggcuggccaaggaua

SEQ ID NO: 953982 - RNA, 19 nt, Homo sapiens
  misc_RNA (1)...(19): siRNA sense strand
aaauacaagcccaacauga

SEQ ID NO: 953983 - RNA, 19 nt, Homo sapiens
  misc_RNA (1)...(19): siRNA sense strand
auucugugcugaucucgua

SEQ ID NO: 953984 - RNA, 19 nt, Homo sapiens
  misc_RNA (1)...(19): siRNA sense strand
gguccugugugugcuuaaa

SEQ ID NO: 953985 - RNA, 19 nt, Homo sapiens
  misc_RNA (1)...(19): siRNA sense strand
gaaagcacuacucagcaau

SEQ ID NO: 953986 - RNA, 19 nt, Homo sapiens
  misc_RNA (1)...(19): siRNA sense strand
gaacaccuuaagaacauca

SEQ ID NO: 953987 - RNA, 19 nt, Homo sapiens
  misc_RNA (1)...(19): siRNA sense strand
gaucucguagaacaccuua

SEQ ID NO: 953988 - RNA, 19 nt, Homo sapiens
  misc_RNA (1)...(19): siRNA sense strand
cuacucagcaauauagaga

SEQ ID NO: 953989 - RNA, 19 nt, Homo sapiens
  misc_RNA (1)...(19): siRNA sense strand
gggauaugccuuagauuac

SEQ ID NO: 953990 - RNA, 19 nt, Homo sapiens
  misc_RNA (1)...(19): siRNA sense strand
auacaagcccaacaugauu

SEQ ID NO: 953991 - RNA, 19 nt, Homo sapiens
  misc_RNA (1)...(19): siRNA sense strand
aaagacauaggauauagug

SEQ ID NO: 953992 - RNA, 19 nt, Homo sapiens
  misc_RNA (1)...(19): siRNA sense strand
gaucgauuugucucaauga

SEQ ID NO: 953993 - RNA, 19 nt, Homo sapiens
  misc_RNA (1)...(19): siRNA sense strand
cagccgaaauucagaucga

SEQ ID NO: 953994 - RNA, 19 nt, Homo sapiens
  misc_RNA (1)...(19): siRNA sense strand
guccucaucccucauggua

SEQ ID NO: 953995 - RNA, 19 nt, Homo sapiens
  misc_RNA (1)...(19): siRNA sense strand
aaucacauaugcgucauca

SEQ ID NO: 953996 - RNA, 19 nt, Homo sapiens
  misc_RNA (1)...(19): siRNA sense strand
cagaagugacggcuuuaga

SEQ ID NO: 953997 - RNA, 19 nt, Homo sapiens
  misc_RNA (1)...(19): siRNA sense strand
cguacccacagcacuauua

SEQ ID NO: 953998 - RNA, 19 nt, Homo sapiens
  misc_RNA (1)...(19): siRNA sense strand
aagcacuacucagcaauau

SEQ ID NO: 953999 - RNA, 19 nt, Homo sapiens
  misc_RNA (1)...(19): siRNA sense strand
gcgucgugauuauggauga

SEQ ID NO: 954000 - RNA, 19 nt, Homo sapiens
  misc_RNA (1)...(19): siRNA sense strand
aaugagcacgguaaagaaa

SEQ ID NO: 954001 - RNA, 19 nt, Homo sapiens
  misc_RNA (1)...(19): siRNA sense strand
aaaggagguuacaaauucu

SEQ ID NO: 954002 - RNA, 19 nt, Homo sapiens
  misc_RNA (1)...(19): siRNA sense strand
auccagaagugacggcuuu

SEQ ID NO: 954003 - RNA, 19 nt, Homo sapiens
  misc_RNA (1)...(19): siRNA sense strand
aauacaagcccaacaugau

SEQ ID NO: 954004 - RNA, 19 nt, Homo sapiens
  misc_RNA (1)...(19): siRNA sense strand
cagaucgauuugucucaau

SEQ ID NO: 954005 - RNA, 19 nt, Homo sapiens
  misc_RNA (1)...(19): siRNA sense strand
agaaauacaagcccaacau

SEQ ID NO: 954006 - RNA, 19 nt, Homo sapiens
  misc_RNA (1)...(19): siRNA sense strand
guacccacagcacuauuau

SEQ ID NO: 954007 - RNA, 19 nt, Homo sapiens
  misc_RNA (1)...(19): siRNA sense strand
ucguagaacaccuuaagaa

SEQ ID NO: 954008 - RNA, 19 nt, Homo sapiens
  misc_RNA (1)...(19): siRNA sense strand
caucaaugagcacgguaaa

SEQ ID NO: 954009 - RNA, 19 nt, Homo sapiens
  misc_RNA (1)...(19): siRNA sense strand
gauuaagguagccaguuug

SEQ ID NO: 954010 - RNA, 19 nt, Homo sapiens
  misc_RNA (1)...(19): siRNA sense strand
ccaguuuguuggugaagag

SEQ ID NO: 954011 - RNA, 19 nt, Homo sapiens
  misc_RNA (1)...(19): siRNA sense strand
gagaaauacaagcccaaca

SEQ ID NO: 954012 - RNA, 19 nt, Homo sapiens
  misc_RNA (1)...(19): siRNA sense strand
gagaucugaaucacauaug

SEQ ID NO: 954013 - RNA, 19 nt, Homo sapiens
  misc_RNA (1)...(19): siRNA sense strand
uauggagacuuggaguaug

SEQ ID NO: 954014 - RNA, 19 nt, Homo sapiens
  misc_RNA (1)...(19): siRNA sense strand
gaccugacuaugcuggauu

SEQ ID NO: 954015 - RNA, 19 nt, Homo sapiens
  misc_RNA (1)...(19): siRNA sense strand
cggcuggccaaggauauua

SEQ ID NO: 954016 - RNA, 19 nt, Homo sapiens
  misc_RNA (1)...(19): siRNA sense strand
acaagcccaacaugauuaa

SEQ ID NO: 954017 - RNA, 19 nt, Homo sapiens
  misc_RNA (1)...(19): siRNA sense strand
caucccucaugguaucauu

SEQ ID NO: 954018 - RNA, 19 nt, Homo sapiens
  misc_RNA (1)...(19): siRNA sense strand
uaucauuguggacagaauu

SEQ ID NO: 954019 - RNA, 19 nt, Homo sapiens
  misc_RNA (1)...(19): siRNA sense strand
cuuaaaggagguuacaaau

SEQ ID NO: 954020 - RNA, 19 nt, Homo sapiens
  misc_RNA (1)...(19): siRNA sense strand
uguggugggauaugccuua

SEQ ID NO: 954021 - RNA, 19 nt, Homo sapiens
  misc_RNA (1)...(19): siRNA sense strand
uaugcuggauuugagauuc

SEQ ID NO: 954022 - RNA, 19 nt, Homo sapiens
  misc_RNA (1)...(19): siRNA sense strand
gauauagugacaucauggu

SEQ ID NO: 954023 - RNA, 19 nt, Homo sapiens
  misc_RNA (1)...(19): siRNA sense strand
gaggcgucgugauuaugga

SEQ ID NO: 954024 - RNA, 19 nt, Homo sapiens
  misc_RNA (1)...(19): siRNA sense strand
caacgcuggcuggaaagaa

SEQ ID NO: 954025 - RNA, 19 nt, Homo sapiens
  misc_RNA (1)...(19): siRNA sense strand
ggugagaugcagauaaucg

SEQ ID NO: 954026 - RNA, 19 nt, Homo sapiens
  misc_RNA (1)...(19): siRNA sense strand
guaucauuguggacagaau

SEQ ID NO: 954027 - RNA, 19 nt, Homo sapiens
  misc_RNA (1)...(19): siRNA sense strand
agaucgauuugucucaaug

SEQ ID NO: 954028 - RNA, 19 nt, Homo sapiens
  misc_RNA (1)...(19): siRNA sense strand
uugagcggcuggccaagga

SEQ ID NO: 954029 - RNA, 19 nt, Homo sapiens
  misc_RNA (1)...(19): siRNA sense strand
uacaaauucugugcugauc

SEQ ID NO: 954030 - RNA, 19 nt, Homo sapiens
  misc_RNA (1)...(19): siRNA sense strand
auggagacuuggaguaugu

SEQ ID NO: 954031 - RNA, 19 nt, Homo sapiens
  misc_RNA (1)...(19): siRNA sense strand
aacgcuggcuggaaagaau

SEQ ID NO: 954032 - RNA, 19 nt, Homo sapiens
  misc_RNA (1)...(19): siRNA sense strand
uaagaacaucagccgaaau

SEQ ID NO: 954033 - RNA, 19 nt, Homo sapiens
  misc_RNA (1)...(19): siRNA sense strand
gaaaucagcugaacaaaug

SEQ ID NO: 954034 - RNA, 19 nt, Homo sapiens
  misc_RNA (1)...(19): siRNA sense strand
gaaccuggcuauuucaaga

SEQ ID NO: 954035 - RNA, 19 nt, Homo sapiens
  misc_RNA (1)...(19): siRNA sense strand
gaagguggcuaugauugaa

SEQ ID NO: 954036 - RNA, 19 nt, Homo sapiens
  misc_RNA (1)...(19): siRNA sense strand
gaaguuuguugcagacuau

SEQ ID NO: 954037 - RNA, 19 nt, Homo sapiens
  misc_RNA (1)...(19): siRNA sense strand
gauugaaccuggcuauuuc

SEQ ID NO: 954038 - RNA, 19 nt, Homo sapiens
  misc_RNA (1)...(19): siRNA sense strand
ggaaacugcuggccagaca

SEQ ID NO: 954039 - RNA, 19 nt, Homo sapiens
  misc_RNA (1)...(19): siRNA sense strand
uaagaaaucagcugaacaa

SEQ ID NO: 954040 - RNA, 19 nt, Homo sapiens
  misc_RNA (1)...(19): siRNA sense strand
gaacaaauggagcagaagu

SEQ ID NO: 954041 - RNA, 19 nt, Homo sapiens
  misc_RNA (1)...(19): siRNA sense strand
gagggaacucuccuacuuu

SEQ ID NO: 954042 - RNA, 19 nt, Homo sapiens
  misc_RNA (1)...(19): siRNA sense strand
cugcaugucugacggagaa

SEQ ID NO: 954043 - RNA, 19 nt, Homo sapiens
  misc_RNA (1)...(19): siRNA sense strand
ugauugaaccuggcuauuu

SEQ ID NO: 954044 - RNA, 19 nt, Homo sapiens
  misc_RNA (1)...(19): siRNA sense strand
ugagccaccugagagauaa

SEQ ID NO: 954045 - RNA, 19 nt, Homo sapiens
  misc_RNA (1)...(19): siRNA sense strand
ccacggcucccaaugaguu

SEQ ID NO: 954046 - RNA, 19 nt, Homo sapiens
  misc_RNA (1)...(19): siRNA sense strand
ugauugaugugacucugaa

SEQ ID NO: 954047 - RNA, 19 nt, Homo sapiens
  misc_RNA (1)...(19): siRNA sense strand
agaaguuuguugcagacua

SEQ ID NO: 954048 - RNA, 19 nt, Homo sapiens
  misc_RNA (1)...(19): siRNA sense strand
uaaagagcuuccuggagau

SEQ ID NO: 954049 - RNA, 19 nt, Homo sapiens
  misc_RNA (1)...(19): siRNA sense strand
gauguuaccaagacagaga

SEQ ID NO: 954050 - RNA, 19 nt, Homo sapiens
  misc_RNA (1)...(19): siRNA sense strand
gggugaagguggcuaugau

SEQ ID NO: 954051 - RNA, 19 nt, Homo sapiens
  misc_RNA (1)...(19): siRNA sense strand
gucaacgucuucaguguca

SEQ ID NO: 954052 - RNA, 19 nt, Homo sapiens
  misc_RNA (1)...(19): siRNA sense strand
cugaacaaauggagcagaa

SEQ ID NO: 954053 - RNA, 19 nt, Homo sapiens
  misc_RNA (1)...(19): siRNA sense strand
gguggaggcuacugcaucu

SEQ ID NO: 954054 - RNA, 19 nt, Homo sapiens
  misc_RNA (1)...(19): siRNA sense strand
agaaaucagcugaacaaau

SEQ ID NO: 954055 - RNA, 19 nt, Homo sapiens
  misc_RNA (1)...(19): siRNA sense strand
ugaagguggcuaugauuga

SEQ ID NO: 954056 - RNA, 19 nt, Homo sapiens
  misc_RNA (1)...(19): siRNA sense strand
agggaacucuccuacuuug

SEQ ID NO: 954057 - RNA, 19 nt, Homo sapiens
  misc_RNA (1)...(19): siRNA sense strand
uauaagaaaucagcugaac

SEQ ID NO: 954058 - RNA, 19 nt, Homo sapiens
  misc_RNA (1)...(19): siRNA sense strand
ccugguggaugccauuaug

SEQ ID NO: 954059 - RNA, 19 nt, Homo sapiens
  misc_RNA (1)...(19): siRNA sense strand
gagauaaguauguguucau

SEQ ID NO: 954060 - RNA, 19 nt, Homo sapiens
  misc_RNA (1)...(19): siRNA sense strand
ggaggccuauggcgagaag

SEQ ID NO: 954061 - RNA, 19 nt, Homo sapiens
  misc_RNA (1)...(19): siRNA sense strand
ugagagauaaguauguguu

SEQ ID NO: 954062 - RNA, 19 nt, Homo sapiens
  misc_RNA (1)...(19): siRNA sense strand
ugaccauacuggacgugaa

SEQ ID NO: 954063 - RNA, 19 nt, Homo sapiens
  misc_RNA (1)...(19): siRNA sense strand
ggugaagguggcuaugauu

SEQ ID NO: 954064 - RNA, 19 nt, Homo sapiens
  misc_RNA (1)...(19): siRNA sense strand
ugagcuacaugcccaccuu

SEQ ID NO: 954065 - RNA, 19 nt, Homo sapiens
  misc_RNA (1)...(19): siRNA sense strand
ggugaaggagugcgugaga

SEQ ID NO: 954066 - RNA, 19 nt, Homo sapiens
  misc_RNA (1)...(19): siRNA sense strand
guugcagacuauaagaaau

SEQ ID NO: 954067 - RNA, 19 nt, Homo sapiens
  misc_RNA (1)...(19): siRNA sense strand
agagauaaguauguguuca

SEQ ID NO: 954068 - RNA, 19 nt, Homo sapiens
  misc_RNA (1)...(19): siRNA sense strand
agagcuuccuggagauuug

SEQ ID NO: 954069 - RNA, 19 nt, Homo sapiens
  misc_RNA (1)...(19): siRNA sense strand
gugaagguggcuaugauug

SEQ ID NO: 954070 - RNA, 19 nt, Homo sapiens
  misc_RNA (1)...(19): siRNA sense strand
ggagugcgugagagacaaa

SEQ ID NO: 954071 - RNA, 19 nt, Homo sapiens
  misc_RNA (1)...(19): siRNA sense strand
ugaaggagugcgugagaga

SEQ ID NO: 954072 - RNA, 19 nt, Homo sapiens
  misc_RNA (1)...(19): siRNA sense strand
gcagaagugcacacaggau

SEQ ID NO: 954073 - RNA, 19 nt, Homo sapiens
  misc_RNA (1)...(19): siRNA sense strand
ccugagagauaaguaugug

SEQ ID NO: 954074 - RNA, 19 nt, Homo sapiens
  misc_RNA (1)...(19): siRNA sense strand
gauaaguauguguucauca

SEQ ID NO: 954075 - RNA, 19 nt, Homo sapiens
  misc_RNA (1)...(19): siRNA sense strand
gagagauaaguauguguuc

SEQ ID NO: 954076 - RNA, 19 nt, Homo sapiens
  misc_RNA (1)...(19): siRNA sense strand
gaaccugcugcccuuagug

SEQ ID NO: 954077 - RNA, 19 nt, Homo sapiens
  misc_RNA (1)...(19): siRNA sense strand
uggaugccauuauguacug

SEQ ID NO: 954078 - RNA, 19 nt, Homo sapiens
  misc_RNA (1)...(19): siRNA sense strand
acggugacccuggauguua

SEQ ID NO: 954079 - RNA, 19 nt, Homo sapiens
  misc_RNA (1)...(19): siRNA sense strand
caacgucuucagugucaug

SEQ ID NO: 954080 - RNA, 19 nt, Homo sapiens
  misc_RNA (1)...(19): siRNA sense strand
ccaccugagagauaaguau

SEQ ID NO: 954081 - RNA, 19 nt, Homo sapiens
  misc_RNA (1)...(19): siRNA sense strand
uacuggacgugaacuuguu

SEQ ID NO: 954082 - RNA, 19 nt, Homo sapiens
  misc_RNA (1)...(19): siRNA sense strand
gaagugcacacaggaucug

SEQ ID NO: 954083 - RNA, 19 nt, Homo sapiens
  misc_RNA (1)...(19): siRNA sense strand
cugagccaccugagagaua

SEQ ID NO: 954084 - RNA, 19 nt, Homo sapiens
  misc_RNA (1)...(19): siRNA sense strand
ugaaccugcugcccuuagu

SEQ ID NO: 954085 - RNA, 19 nt, Homo sapiens
  misc_RNA (1)...(19): siRNA sense strand
ucuggggccuggugaauaa

SEQ ID NO: 954086 - RNA, 19 nt, Homo sapiens
  misc_RNA (1)...(19): siRNA sense strand
agauaaguauguguucauc

SEQ ID NO: 954087 - RNA, 19 nt, Homo sapiens
  misc_RNA (1)...(19): siRNA sense strand
gcaggacuugcugaccaua

SEQ ID NO: 954088 - RNA, 19 nt, Homo sapiens
  misc_RNA (1)...(19): siRNA sense strand
ugaccaguaaggagagauu

SEQ ID NO: 954089 - RNA, 19 nt, Homo sapiens
  misc_RNA (1)...(19): siRNA sense strand
auaaguauguguucaucac

SEQ ID NO: 954090 - RNA, 19 nt, Homo sapiens
  misc_RNA (1)...(19): siRNA sense strand
ccaguaaggagagauucuu

SEQ ID NO: 954091 - RNA, 19 nt, Homo sapiens
  misc_RNA (1)...(19): siRNA sense strand
ccaaagagcuugauccaaa

SEQ ID NO: 954092 - RNA, 19 nt, Homo sapiens
  misc_RNA (1)...(19): siRNA sense strand
gaaagacccugaaaugcua

SEQ ID NO: 954093 - RNA, 19 nt, Homo sapiens
  misc_RNA (1)...(19): siRNA sense strand
gaagaaggcuuggauaguu

SEQ ID NO: 954094 - RNA, 19 nt, Homo sapiens
  misc_RNA (1)...(19): siRNA sense strand
aaacaaggcugguugcaua

SEQ ID NO: 954095 - RNA, 19 nt, Homo sapiens
  misc_RNA (1)...(19): siRNA sense strand
gcccagaguuuauuuguua

SEQ ID NO: 954096 - RNA, 19 nt, Homo sapiens
  misc_RNA (1)...(19): siRNA sense strand
gaaauuuccuugagacuug

SEQ ID NO: 954097 - RNA, 19 nt, Homo sapiens
  misc_RNA (1)...(19): siRNA sense strand
ggacucaucuucuuuaugu

SEQ ID NO: 954098 - RNA, 19 nt, Homo sapiens
  misc_RNA (1)...(19): siRNA sense strand
gaaaggaguacaucuauaa

SEQ ID NO: 954099 - RNA, 19 nt, Homo sapiens
  misc_RNA (1)...(19): siRNA sense strand
ggaaaggaguacaucuaua

SEQ ID NO: 954100 - RNA, 19 nt, Homo sapiens
  misc_RNA (1)...(19): siRNA sense strand
caaagucaauggccacaua

SEQ ID NO: 954101 - RNA, 19 nt, Homo sapiens
  misc_RNA (1)...(19): siRNA sense strand
guagcaagcuuucaaguga

SEQ ID NO: 954102 - RNA, 19 nt, Homo sapiens
  misc_RNA (1)...(19): siRNA sense strand
caauauagaugaagaagga

SEQ ID NO: 954103 - RNA, 19 nt, Homo sapiens
  misc_RNA (1)...(19): siRNA sense strand
ggcagaacguuaugaaaua

SEQ ID NO: 954104 - RNA, 19 nt, Homo sapiens
  misc_RNA (1)...(19): siRNA sense strand
uaaaugagcggcuaauuaa

SEQ ID NO: 954105 - RNA, 19 nt, Homo sapiens
  misc_RNA (1)...(19): siRNA sense strand
gaucaacaccgacaguuua

SEQ ID NO: 954106 - RNA, 19 nt, Homo sapiens
  misc_RNA (1)...(19): siRNA sense strand
ucacaaauaugacccauga

SEQ ID NO: 954107 - RNA, 19 nt, Homo sapiens
  misc_RNA (1)...(19): siRNA sense strand
ucaaguugcucucagaaua

SEQ ID NO: 954108 - RNA, 19 nt, Homo sapiens
  misc_RNA (1)...(19): siRNA sense strand
gaauacaguuuaucagaug

SEQ ID NO: 954109 - RNA, 19 nt, Homo sapiens
  misc_RNA (1)...(19): siRNA sense strand
gaaagugagugaguugaaa

SEQ ID NO: 954110 - RNA, 19 nt, Homo sapiens
  misc_RNA (1)...(19): siRNA sense strand
aaacaugugugcugcauuu

SEQ ID NO: 954111 - RNA, 19 nt, Homo sapiens
  misc_RNA (1)...(19): siRNA sense strand
gaacucaagauguuagaua

SEQ ID NO: 954112 - RNA, 19 nt, Homo sapiens
  misc_RNA (1)...(19): siRNA sense strand
ugaaagacauguuuaggaa

SEQ ID NO: 954113 - RNA, 19 nt, Homo sapiens
  misc_RNA (1)...(19): siRNA sense strand
cgaaacagaucaggaguaa

SEQ ID NO: 954114 - RNA, 19 nt, Homo sapiens
  misc_RNA (1)...(19): siRNA sense strand
caauacagcuacugaaguu

SEQ ID NO: 954115 - RNA, 19 nt, Homo sapiens
  misc_RNA (1)...(19): siRNA sense strand
ucagaaggguggugugaua

SEQ ID NO: 954116 - RNA, 19 nt, Homo sapiens
  misc_RNA (1)...(19): siRNA sense strand
gagcagauauuacaagaag

SEQ ID NO: 954117 - RNA, 19 nt, Homo sapiens
  misc_RNA (1)...(19): siRNA sense strand
uuacuuaugugaagccuua

SEQ ID NO: 954118 - RNA, 19 nt, Homo sapiens
  misc_RNA (1)...(19): siRNA sense strand
gaaacaacuuugaguauac

SEQ ID NO: 954119 - RNA, 19 nt, Homo sapiens
  misc_RNA (1)...(19): siRNA sense strand
cgacagaguucuacaagga

SEQ ID NO: 954120 - RNA, 19 nt, Homo sapiens
  misc_RNA (1)...(19): siRNA sense strand
ccagaaaugugaacuauag

SEQ ID NO: 954121 - RNA, 19 nt, Homo sapiens
  misc_RNA (1)...(19): siRNA sense strand
aagagaaacugaacaacua

SEQ ID NO: 954122 - RNA, 19 nt, Homo sapiens
  misc_RNA (1)...(19): siRNA sense strand
gcaaguauccaccuaagaa

SEQ ID NO: 954123 - RNA, 19 nt, Homo sapiens
  misc_RNA (1)...(19): siRNA sense strand
gaaacuagcagccaaggaa

SEQ ID NO: 954124 - RNA, 19 nt, Homo sapiens
  misc_RNA (1)...(19): siRNA sense strand
uaauugaucuccaguauag

SEQ ID NO: 954125 - RNA, 19 nt, Homo sapiens
  misc_RNA (1)...(19): siRNA sense strand
gaacauuacauuccucuga

SEQ ID NO: 954126 - RNA, 19 nt, Homo sapiens
  misc_RNA (1)...(19): siRNA sense strand
gugaagacauucucaaguu

SEQ ID NO: 954127 - RNA, 19 nt, Homo sapiens
  misc_RNA (1)...(19): siRNA sense strand
ugagauagaugaagacugu

SEQ ID NO: 954128 - RNA, 19 nt, Homo sapiens
  misc_RNA (1)...(19): siRNA sense strand
gaagaugacguuccuauca

SEQ ID NO: 954129 - RNA, 19 nt, Homo sapiens
  misc_RNA (1)...(19): siRNA sense strand
gagaucagauauacagcua

SEQ ID NO: 954130 - RNA, 19 nt, Homo sapiens
  misc_RNA (1)...(19): siRNA sense strand
cuaaaugagcggcuaauua

SEQ ID NO: 954131 - RNA, 19 nt, Homo sapiens
  misc_RNA (1)...(19): siRNA sense strand
gcauugcacuugaacuaaa

SEQ ID NO: 954132 - RNA, 19 nt, Homo sapiens
  misc_RNA (1)...(19): siRNA sense strand
gugaacagcagauuaauuu

SEQ ID NO: 954133 - RNA, 19 nt, Homo sapiens
  misc_RNA (1)...(19): siRNA sense strand
uaaguuuccuucagcauuu

SEQ ID NO: 954134 - RNA, 19 nt, Homo sapiens
  misc_RNA (1)...(19): siRNA sense strand
ggccauaacccauuaauga

SEQ ID NO: 954135 - RNA, 19 nt, Homo sapiens
  misc_RNA (1)...(19): siRNA sense strand
gcucuucacccgaaucuua

SEQ ID NO: 954136 - RNA, 19 nt, Homo sapiens
  misc_RNA (1)...(19): siRNA sense strand
ccacauacuuguuggaaga

SEQ ID NO: 954137 - RNA, 19 nt, Homo sapiens
  misc_RNA (1)...(19): siRNA sense strand
gaauccacauccugaaauu

SEQ ID NO: 954138 - RNA, 19 nt, Homo sapiens
  misc_RNA (1)...(19): siRNA sense strand
gaugaaguauggaagagaa

SEQ ID NO: 954139 - RNA, 19 nt, Homo sapiens
  misc_RNA (1)...(19): siRNA sense strand
acaaagaacucacagaaag

SEQ ID NO: 954140 - RNA, 19 nt, Homo sapiens
  misc_RNA (1)...(19): siRNA sense strand
gaaacagucugcagauuuu

SEQ ID NO: 954141 - RNA, 19 nt, Homo sapiens
  misc_RNA (1)...(19): siRNA sense strand
gcugaaagaugguagaauc

SEQ ID NO: 954142 - RNA, 19 nt, Homo sapiens
  misc_RNA (1)...(19): siRNA sense strand
caacuaaacaaacucagua

SEQ ID NO: 954143 - RNA, 19 nt, Homo sapiens
  misc_RNA (1)...(19): siRNA sense strand
gggcuaaagucaaauuuca

SEQ ID NO: 954144 - RNA, 19 nt, Homo sapiens
  misc_RNA (1)...(19): siRNA sense strand
caauugauguugccacuga

SEQ ID NO: 954145 - RNA, 19 nt, Homo sapiens
  misc_RNA (1)...(19): siRNA sense strand
gcuaauugaucuccaguau

SEQ ID NO: 954146 - RNA, 19 nt, Homo sapiens
  misc_RNA (1)...(19): siRNA sense strand
ucaggagucuuuauucauu

SEQ ID NO: 954147 - RNA, 19 nt, Homo sapiens
  misc_RNA (1)...(19): siRNA sense strand
caagauaccagcacaagaa

SEQ ID NO: 954148 - RNA, 19 nt, Homo sapiens
  misc_RNA (1)...(19): siRNA sense strand
aaauugagcuucccauuca

SEQ ID NO: 954149 - RNA, 19 nt, Homo sapiens
  misc_RNA (1)...(19): siRNA sense strand
ggaauugaaccugauauaa

SEQ ID NO: 954150 - RNA, 19 nt, Homo sapiens
  misc_RNA (1)...(19): siRNA sense strand
gauauuaaauggguagaug

SEQ ID NO: 954151 - RNA, 19 nt, Homo sapiens
  misc_RNA (1)...(19): siRNA sense strand
uaucugacauuauccauga

SEQ ID NO: 954152 - RNA, 19 nt, Homo sapiens
  misc_RNA (1)...(19): siRNA sense strand
gaaguaugcuuguuucacu

SEQ ID NO: 954153 - RNA, 19 nt, Homo sapiens
  misc_RNA (1)...(19): siRNA sense strand
caauguaacguggauauua

SEQ ID NO: 954154 - RNA, 19 nt, Homo sapiens
  misc_RNA (1)...(19): siRNA sense strand
caacaggauuuccagauca

SEQ ID NO: 954155 - RNA, 19 nt, Homo sapiens
  misc_RNA (1)...(19): siRNA sense strand
guagaaucaucacauuuga

SEQ ID NO: 954156 - RNA, 19 nt, Homo sapiens
  misc_RNA (1)...(19): siRNA sense strand
aagauacgcugaaguguga

SEQ ID NO: 954157 - RNA, 19 nt, Homo sapiens
  misc_RNA (1)...(19): siRNA sense strand
ugauucagcuccaacuuaa

SEQ ID NO: 954158 - RNA, 19 nt, Homo sapiens
  misc_RNA (1)...(19): siRNA sense strand
aaacagaucaggaguaaug

SEQ ID NO: 954159 - RNA, 19 nt, Homo sapiens
  misc_RNA (1)...(19): siRNA sense strand
ggaguaguguaucccagua

SEQ ID NO: 954160 - RNA, 19 nt, Homo sapiens
  misc_RNA (1)...(19): siRNA sense strand
gcagaacggugcagucuac

SEQ ID NO: 954161 - RNA, 19 nt, Homo sapiens
  misc_RNA (1)...(19): siRNA sense strand
cuaagguucuggcugaaua

SEQ ID NO: 954162 - RNA, 19 nt, Homo sapiens
  misc_RNA (1)...(19): siRNA sense strand
caggggagcucauuaaaua

SEQ ID NO: 954163 - RNA, 19 nt, Homo sapiens
  misc_RNA (1)...(19): siRNA sense strand
gaggaaugguugauaacuu

SEQ ID NO: 954164 - RNA, 19 nt, Homo sapiens
  misc_RNA (1)...(19): siRNA sense strand
gcaacaggauuuccagauc

SEQ ID NO: 954165 - RNA, 19 nt, Homo sapiens
  misc_RNA (1)...(19): siRNA sense strand
ggagauccaagucaugaua

SEQ ID NO: 954166 - RNA, 19 nt, Homo sapiens
  misc_RNA (1)...(19): siRNA sense strand
guacuacagggaaacauua

SEQ ID NO: 954167 - RNA, 19 nt, Homo sapiens
  misc_RNA (1)...(19): siRNA sense strand
gcacaggacagcuaaacaa

SEQ ID NO: 954168 - RNA, 19 nt, Homo sapiens
  misc_RNA (1)...(19): siRNA sense strand
cauaauaucagcagauuug

SEQ ID NO: 954169 - RNA, 19 nt, Homo sapiens
  misc_RNA (1)...(19): siRNA sense strand
gauaauaauugcuguaagc

SEQ ID NO: 954170 - RNA, 19 nt, Homo sapiens
  misc_RNA (1)...(19): siRNA sense strand
gagaaacaacuuugaguau

SEQ ID NO: 954171 - RNA, 19 nt, Homo sapiens
  misc_RNA (1)...(19): siRNA sense strand
gaaaauacccgacagaguu

SEQ ID NO: 954172 - RNA, 19 nt, Homo sapiens
  misc_RNA (1)...(19): siRNA sense strand
aagaaggcuuggauaguua

SEQ ID NO: 954173 - RNA, 19 nt, Homo sapiens
  misc_RNA (1)...(19): siRNA sense strand
uaacguggauauuaaaugg

SEQ ID NO: 954174 - RNA, 19 nt, Homo sapiens
  misc_RNA (1)...(19): siRNA sense strand
agaccaaacugcagauuau

SEQ ID NO: 954175 - RNA, 19 nt, Homo sapiens
  misc_RNA (1)...(19): siRNA sense strand
ugaaggagcaugagaaaga

SEQ ID NO: 954176 - RNA, 19 nt, Homo sapiens
  misc_RNA (1)...(19): siRNA sense strand
gaagaccgaguuugaaaga

SEQ ID NO: 954177 - RNA, 19 nt, Homo sapiens
  misc_RNA (1)...(19): siRNA sense strand
ggacaauuaugagaucaga

SEQ ID NO: 954178 - RNA, 19 nt, Homo sapiens
  misc_RNA (1)...(19): siRNA sense strand
ugagagcuuucaucaguaa

SEQ ID NO: 954179 - RNA, 19 nt, Homo sapiens
  misc_RNA (1)...(19): siRNA sense strand
gggagcucauuaaauauuu

SEQ ID NO: 954180 - RNA, 19 nt, Homo sapiens
  misc_RNA (1)...(19): siRNA sense strand
cagccaagcuagcaaguau

SEQ ID NO: 954181 - RNA, 19 nt, Homo sapiens
  misc_RNA (1)...(19): siRNA sense strand
caagguaaaugccaaagag

SEQ ID NO: 954182 - RNA, 19 nt, Homo sapiens
  misc_RNA (1)...(19): siRNA sense strand
gcaaauagugacagaccua

SEQ ID NO: 954183 - RNA, 19 nt, Homo sapiens
  misc_RNA (1)...(19): siRNA sense strand
gaaugaagcaucugcacuu

SEQ ID NO: 954184 - RNA, 19 nt, Homo sapiens
  misc_RNA (1)...(19): siRNA sense strand
gguagaaucaucacauuug

SEQ ID NO: 954185 - RNA, 19 nt, Homo sapiens
  misc_RNA (1)...(19): siRNA sense strand
ugagaaagacccugaaaug

SEQ ID NO: 954186 - RNA, 19 nt, Homo sapiens
  misc_RNA (1)...(19): siRNA sense strand
caggagucuuuauucauua

SEQ ID NO: 954187 - RNA, 19 nt, Homo sapiens
  misc_RNA (1)...(19): siRNA sense strand
uaagagagaagauucaaga

SEQ ID NO: 954188 - RNA, 19 nt, Homo sapiens
  misc_RNA (1)...(19): siRNA sense strand
gacauggaauuaagagaga

SEQ ID NO: 954189 - RNA, 19 nt, Homo sapiens
  misc_RNA (1)...(19): siRNA sense strand
cacaaauucuuccaucauu

SEQ ID NO: 954190 - RNA, 19 nt, Homo sapiens
  misc_RNA (1)...(19): siRNA sense strand
gaaucaagaaggcaaugua

SEQ ID NO: 954191 - RNA, 19 nt, Homo sapiens
  misc_RNA (1)...(19): siRNA sense strand
uaacagaagugaagaagaa

SEQ ID NO: 954192 - RNA, 19 nt, Homo sapiens
  misc_RNA (1)...(19): siRNA sense strand
ggugaaacgucuuaaagua

SEQ ID NO: 954193 - RNA, 19 nt, Homo sapiens
  misc_RNA (1)...(19): siRNA sense strand
gaagagaacaagaaacuaa

SEQ ID NO: 954194 - RNA, 19 nt, Homo sapiens
  misc_RNA (1)...(19): siRNA sense strand
agaaauaucuggcuuacuu

SEQ ID NO: 954195 - RNA, 19 nt, Homo sapiens
  misc_RNA (1)...(19): siRNA sense strand
guagccagcucuugcuuua

SEQ ID NO: 954196 - RNA, 19 nt, Homo sapiens
  misc_RNA (1)...(19): siRNA sense strand
gagcaagaaugaauuacaa

SEQ ID NO: 954197 - RNA, 19 nt, Homo sapiens
  misc_RNA (1)...(19): siRNA sense strand
gugagaagcuuccuaaaca

SEQ ID NO: 954198 - RNA, 19 nt, Homo sapiens
  misc_RNA (1)...(19): siRNA sense strand
agaaugaucugucucaguu

SEQ ID NO: 954199 - RNA, 19 nt, Homo sapiens
  misc_RNA (1)...(19): siRNA sense strand
gaagaaauaucuggcuuac

SEQ ID NO: 954200 - RNA, 19 nt, Homo sapiens
  misc_RNA (1)...(19): siRNA sense strand
gaucagaccuuuucagaga

SEQ ID NO: 954201 - RNA, 19 nt, Homo sapiens
  misc_RNA (1)...(19): siRNA sense strand
gaagcuuccuaaacaaaga

SEQ ID NO: 954202 - RNA, 19 nt, Homo sapiens
  misc_RNA (1)...(19): siRNA sense strand
aaaccaagauuucacuuuc

SEQ ID NO: 954203 - RNA, 19 nt, Homo sapiens
  misc_RNA (1)...(19): siRNA sense strand
ugaaacgucuuaaaguaga

SEQ ID NO: 954204 - RNA, 19 nt, Homo sapiens
  misc_RNA (1)...(19): siRNA sense strand
caucaucucccuauacaaa

SEQ ID NO: 954205 - RNA, 19 nt, Homo sapiens
  misc_RNA (1)...(19): siRNA sense strand
gcagugcucuccaaaauga

SEQ ID NO: 954206 - RNA, 19 nt, Homo sapiens
  misc_RNA (1)...(19): siRNA sense strand
uaaaguagagagugaagaa

SEQ ID NO: 954207 - RNA, 19 nt, Homo sapiens
  misc_RNA (1)...(19): siRNA sense strand
ucaucucccuauacaaaua

SEQ ID NO: 954208 - RNA, 19 nt, Homo sapiens
  misc_RNA (1)...(19): siRNA sense strand
gcucuugcuuuaugaguug

SEQ ID NO: 954209 - RNA, 19 nt, Homo sapiens
  misc_RNA (1)...(19): siRNA sense strand
gaagcagguucaggagaaa

SEQ ID NO: 954210 - RNA, 19 nt, Homo sapiens
  misc_RNA (1)...(19): siRNA sense strand
gagaagcuuccuaaacaaa

SEQ ID NO: 954211 - RNA, 19 nt, Homo sapiens
  misc_RNA (1)...(19): siRNA sense strand
gacagugaauuugaagaaa

SEQ ID NO: 954212 - RNA, 19 nt, Homo sapiens
  misc_RNA (1)...(19): siRNA sense strand
agagaggugugguuaauuc

SEQ ID NO: 954213 - RNA, 19 nt, Homo sapiens
  misc_RNA (1)...(19): siRNA sense strand
gaaucucaaugucugugaa

SEQ ID NO: 954214 - RNA, 19 nt, Homo sapiens
  misc_RNA (1)...(19): siRNA sense strand
cagaagugaagaagaauuu

SEQ ID NO: 954215 - RNA, 19 nt, Homo sapiens
  misc_RNA (1)...(19): siRNA sense strand
caaagaaugaucugucuca

SEQ ID NO: 954216 - RNA, 19 nt, Homo sapiens
  misc_RNA (1)...(19): siRNA sense strand
gaagguaaauggaaaacug

SEQ ID NO: 954217 - RNA, 19 nt, Homo sapiens
  misc_RNA (1)...(19): siRNA sense strand
aaaaugaguuugugaguga

SEQ ID NO: 954218 - RNA, 19 nt, Homo sapiens
  misc_RNA (1)...(19): siRNA sense strand
aagccuuacucaauugaua

SEQ ID NO: 954219 - RNA, 19 nt, Homo sapiens
  misc_RNA (1)...(19): siRNA sense strand
gugggaagguaaauggaaa

SEQ ID NO: 954220 - RNA, 19 nt, Homo sapiens
  misc_RNA (1)...(19): siRNA sense strand
ugagaagcuuccuaaacaa

SEQ ID NO: 954221 - RNA, 19 nt, Homo sapiens
  misc_RNA (1)...(19): siRNA sense strand
caagauuucacuuucaaga

SEQ ID NO: 954222 - RNA, 19 nt, Homo sapiens
  misc_RNA (1)...(19): siRNA sense strand
agacucagcugugguuuua

SEQ ID NO: 954223 - RNA, 19 nt, Homo sapiens
  misc_RNA (1)...(19): siRNA sense strand
agauuucacuuucaagaug

SEQ ID NO: 954224 - RNA, 19 nt, Homo sapiens
  misc_RNA (1)...(19): siRNA sense strand
gaugcuuuguacaccaaua

SEQ ID NO: 954225 - RNA, 19 nt, Homo sapiens
  misc_RNA (1)...(19): siRNA sense strand
cacuauggguuagaugaua

SEQ ID NO: 954226 - RNA, 19 nt, Homo sapiens
  misc_RNA (1)...(19): siRNA sense strand
gaaauaucuggcuuacuug

SEQ ID NO: 954227 - RNA, 19 nt, Homo sapiens
  misc_RNA (1)...(19): siRNA sense strand
agaagaaauaucuggcuua

SEQ ID NO: 954228 - RNA, 19 nt, Homo sapiens
  misc_RNA (1)...(19): siRNA sense strand
gaaugaucugucucaguua

SEQ ID NO: 954229 - RNA, 19 nt, Homo sapiens
  misc_RNA (1)...(19): siRNA sense strand
ugagugagaagcuuccuaa

SEQ ID NO: 954230 - RNA, 19 nt, Homo sapiens
  misc_RNA (1)...(19): siRNA sense strand
gaggugugguuaauucgau

SEQ ID NO: 954231 - RNA, 19 nt, Homo sapiens
  misc_RNA (1)...(19): siRNA sense strand
uaauuccucuuacaaugug

SEQ ID NO: 954232 - RNA, 19 nt, Homo sapiens
  misc_RNA (1)...(19): siRNA sense strand
gcaagaaugaauuacaaag

SEQ ID NO: 954233 - RNA, 19 nt, Homo sapiens
  misc_RNA (1)...(19): siRNA sense strand
gugcaacacuuagagaaag

SEQ ID NO: 954234 - RNA, 19 nt, Homo sapiens
  misc_RNA (1)...(19): siRNA sense strand
gauaaaagucgacuauaga

SEQ ID NO: 954235 - RNA, 19 nt, Homo sapiens
  misc_RNA (1)...(19): siRNA sense strand
auagagaggugugguuaau

SEQ ID NO: 954236 - RNA, 19 nt, Homo sapiens
  misc_RNA (1)...(19): siRNA sense strand
acuauggguuagaugauaa

SEQ ID NO: 954237 - RNA, 19 nt, Homo sapiens
  misc_RNA (1)...(19): siRNA sense strand
cagagaaaccagcaucuuc

SEQ ID NO: 954238 - RNA, 19 nt, Homo sapiens
  misc_RNA (1)...(19): siRNA sense strand
auaaagaaguggagaagcu

SEQ ID NO: 954239 - RNA, 19 nt, Homo sapiens
  misc_RNA (1)...(19): siRNA sense strand
agacagugaauuugaagaa

SEQ ID NO: 954240 - RNA, 19 nt, Homo sapiens
  misc_RNA (1)...(19): siRNA sense strand
gaauccaucaucucccuau

SEQ ID NO: 954241 - RNA, 19 nt, Homo sapiens
  misc_RNA (1)...(19): siRNA sense strand
cuauagagaggugugguua

SEQ ID NO: 954242 - RNA, 19 nt, Homo sapiens
  misc_RNA (1)...(19): siRNA sense strand
gaaacgucuuaaaguagag

SEQ ID NO: 954243 - RNA, 19 nt, Homo sapiens
  misc_RNA (1)...(19): siRNA sense strand
gugaaacgucuuaaaguag

SEQ ID NO: 954244 - RNA, 19 nt, Homo sapiens
  misc_RNA (1)...(19): siRNA sense strand
auacaaauaguucccgaaa

SEQ ID NO: 954245 - RNA, 19 nt, Homo sapiens
  misc_RNA (1)...(19): siRNA sense strand
agccagcucuugcuuuaug

SEQ ID NO: 954246 - RNA, 19 nt, Homo sapiens
  misc_RNA (1)...(19): siRNA sense strand
gaagaaucucaaugucugu

SEQ ID NO: 954247 - RNA, 19 nt, Homo sapiens
  misc_RNA (1)...(19): siRNA sense strand
gcuuacuuguggaugcuuu

SEQ ID NO: 954248 - RNA, 19 nt, Homo sapiens
  misc_RNA (1)...(19): siRNA sense strand
ugauaaaagucgacuauag

SEQ ID NO: 954249 - RNA, 19 nt, Homo sapiens
  misc_RNA (1)...(19): siRNA sense strand
aaacuuaguggucccuaug

SEQ ID NO: 954250 - RNA, 19 nt, Homo sapiens
  misc_RNA (1)...(19): siRNA sense strand
cauauagacagugaauuug

SEQ ID NO: 954251 - RNA, 19 nt, Homo sapiens
  misc_RNA (1)...(19): siRNA sense strand
aaccaagauuucacuuuca

SEQ ID NO: 954252 - RNA, 19 nt, Homo sapiens
  misc_RNA (1)...(19): siRNA sense strand
caacacuuagagaaagauu

SEQ ID NO: 954253 - RNA, 19 nt, Homo sapiens
  misc_RNA (1)...(19): siRNA sense strand
gaccuucuucggaggcuaa

SEQ ID NO: 954254 - RNA, 19 nt, Homo sapiens
  misc_RNA (1)...(19): siRNA sense strand
gucuuaaaguagagaguga

SEQ ID NO: 954255 - RNA, 19 nt, Homo sapiens
  misc_RNA (1)...(19): siRNA sense strand
ccucaggccucugcgaauc

SEQ ID NO: 954256 - RNA, 19 nt, Homo sapiens
  misc_RNA (1)...(19): siRNA sense strand
aauccaucaucucccuaua

SEQ ID NO: 954257 - RNA, 19 nt, Homo sapiens
  misc_RNA (1)...(19): siRNA sense strand
uccaucaucucccuauaca

SEQ ID NO: 954258 - RNA, 19 nt, Homo sapiens
  misc_RNA (1)...(19): siRNA sense strand
ugucugaagagaacaagaa

SEQ ID NO: 954259 - RNA, 19 nt, Homo sapiens
  misc_RNA (1)...(19): siRNA sense strand
gccagcucuugcuuuauga

SEQ ID NO: 954260 - RNA, 19 nt, Homo sapiens
  misc_RNA (1)...(19): siRNA sense strand
ugucucaguuacaguuguu

SEQ ID NO: 954261 - RNA, 19 nt, Homo sapiens
  misc_RNA (1)...(19): siRNA sense strand
accaagauuucacuuucaa

SEQ ID NO: 954262 - RNA, 19 nt, Homo sapiens
  misc_RNA (1)...(19): siRNA sense strand
acaaauaguucccgaaaac

SEQ ID NO: 954263 - RNA, 19 nt, Homo sapiens
  misc_RNA (1)...(19): siRNA sense strand
uauagagaggugugguuaa

SEQ ID NO: 954264 - RNA, 19 nt, Homo sapiens
  misc_RNA (1)...(19): siRNA sense strand
ugaagagaacaagaaacua

SEQ ID NO: 954265 - RNA, 19 nt, Homo sapiens
  misc_RNA (1)...(19): siRNA sense strand
ggcuaaaacuagucaaaau

SEQ ID NO: 954266 - RNA, 19 nt, Homo sapiens
  misc_RNA (1)...(19): siRNA sense strand
guggugaaacgucuuaaag

SEQ ID NO: 954267 - RNA, 19 nt, Homo sapiens
  misc_RNA (1)...(19): siRNA sense strand
ugcaacacuuagagaaaga

SEQ ID NO: 954268 - RNA, 19 nt, Homo sapiens
  misc_RNA (1)...(19): siRNA sense strand
gaguugcagucagcugugu

SEQ ID NO: 954269 - RNA, 19 nt, Homo sapiens
  misc_RNA (1)...(19): siRNA sense strand
uaauaaagaaguggagaag

SEQ ID NO: 954270 - RNA, 19 nt, Homo sapiens
  misc_RNA (1)...(19): siRNA sense strand
aaacaaccuaugagugcaa

SEQ ID NO: 954271 - RNA, 19 nt, Homo sapiens
  misc_RNA (1)...(19): siRNA sense strand
cucaauugauagaccacua

SEQ ID NO: 954272 - RNA, 19 nt, Homo sapiens
  misc_RNA (1)...(19): siRNA sense strand
aaugaucugucucaguuac

SEQ ID NO: 954273 - RNA, 19 nt, Homo sapiens
  misc_RNA (1)...(19): siRNA sense strand
ucagagaaaccagcaucuu

SEQ ID NO: 954274 - RNA, 19 nt, Homo sapiens
  misc_RNA (1)...(19): siRNA sense strand
agaaaaugaucagaccuuu

SEQ ID NO: 954275 - RNA, 19 nt, Homo sapiens
  misc_RNA (1)...(19): siRNA sense strand
acagaagugaagaagaauu

SEQ ID NO: 954276 - RNA, 19 nt, Homo sapiens
  misc_RNA (1)...(19): siRNA sense strand
gagaaaccagcaucuucca

SEQ ID NO: 954277 - RNA, 19 nt, Homo sapiens
  misc_RNA (1)...(19): siRNA sense strand
gaaagaaaaucgugaauca

SEQ ID NO: 954278 - RNA, 19 nt, Homo sapiens
  misc_RNA (1)...(19): siRNA sense strand
ccacguggcucacagaugu

SEQ ID NO: 954279 - RNA, 19 nt, Homo sapiens
  misc_RNA (1)...(19): siRNA sense strand
aagagaacaugcacagaua

SEQ ID NO: 954280 - RNA, 19 nt, Homo sapiens
  misc_RNA (1)...(19): siRNA sense strand
gaagagaacaugcacagau

SEQ ID NO: 954281 - RNA, 19 nt, Homo sapiens
  misc_RNA (1)...(19): siRNA sense strand
gaacaccaucugccucuuu

SEQ ID NO: 954282 - RNA, 19 nt, Homo sapiens
  misc_RNA (1)...(19): siRNA sense strand
ggacagugguaugaaagaa

SEQ ID NO: 954283 - RNA, 19 nt, Homo sapiens
  misc_RNA (1)...(19): siRNA sense strand
agaaguugcugcagaaguu

SEQ ID NO: 954284 - RNA, 19 nt, Homo sapiens
  misc_RNA (1)...(19): siRNA sense strand
cagcagaaguuuccguaga

SEQ ID NO: 954285 - RNA, 19 nt, Homo sapiens
  misc_RNA (1)...(19): siRNA sense strand
caaauugagccguuucauu

SEQ ID NO: 954286 - RNA, 19 nt, Homo sapiens
  misc_RNA (1)...(19): siRNA sense strand
aaauugagccguuucauug

SEQ ID NO: 954287 - RNA, 19 nt, Homo sapiens
  misc_RNA (1)...(19): siRNA sense strand
ugagcuggcugcagaaguu

SEQ ID NO: 954288 - RNA, 19 nt, Homo sapiens
  misc_RNA (1)...(19): siRNA sense strand
gcagugcccauacuccaua

SEQ ID NO: 954289 - RNA, 19 nt, Homo sapiens
  misc_RNA (1)...(19): siRNA sense strand
cgaagacauugaaagcauu

SEQ ID NO: 954290 - RNA, 19 nt, Homo sapiens
  misc_RNA (1)...(19): siRNA sense strand
gguggacagugguaugaaa

SEQ ID NO: 954291 - RNA, 19 nt, Homo sapiens
  misc_RNA (1)...(19): siRNA sense strand
guucauguuccucuuauuu

SEQ ID NO: 954292 - RNA, 19 nt, Homo sapiens
  misc_RNA (1)...(19): siRNA sense strand
gguagacaaugaacaacug

SEQ ID NO: 954293 - RNA, 19 nt, Homo sapiens
  misc_RNA (1)...(19): siRNA sense strand
gugauuggguuauucaaca

SEQ ID NO: 954294 - RNA, 19 nt, Homo sapiens
  misc_RNA (1)...(19): siRNA sense strand
cugcagaaguugagaaauc

SEQ ID NO: 954295 - RNA, 19 nt, Homo sapiens
  misc_RNA (1)...(19): siRNA sense strand
gaucaacagccuccacaug

SEQ ID NO: 954296 - RNA, 19 nt, Homo sapiens
  misc_RNA (1)...(19): siRNA sense strand
gaagacauugaaagcauug

SEQ ID NO: 954297 - RNA, 19 nt, Homo sapiens
  misc_RNA (1)...(19): siRNA sense strand
caacagcguaauucagauu

SEQ ID NO: 954298 - RNA, 19 nt, Homo sapiens
  misc_RNA (1)...(19): siRNA sense strand
gacaaugaacaacugaauu

SEQ ID NO: 954299 - RNA, 19 nt, Homo sapiens
  misc_RNA (1)...(19): siRNA sense strand
caucuccuccugauaauga

SEQ ID NO: 954300 - RNA, 19 nt, Homo sapiens
  misc_RNA (1)...(19): siRNA sense strand
ggacgaagacauugaaagc

SEQ ID NO: 954301 - RNA, 19 nt, Homo sapiens
  misc_RNA (1)...(19): siRNA sense strand
ugacugugauuggguuauu

SEQ ID NO: 954302 - RNA, 19 nt, Homo sapiens
  misc_RNA (1)...(19): siRNA sense strand
gaaggaaagacuccaaagg

SEQ ID NO: 954303 - RNA, 19 nt, Homo sapiens
  misc_RNA (1)...(19): siRNA sense strand
ugugauggauuccuaagug

SEQ ID NO: 954304 - RNA, 19 nt, Homo sapiens
  misc_RNA (1)...(19): siRNA sense strand
agucucaacugccagcuuu

SEQ ID NO: 954305 - RNA, 19 nt, Homo sapiens
  misc_RNA (1)...(19): siRNA sense strand
cagcacugauucugagguu

SEQ ID NO: 954306 - RNA, 19 nt, Homo sapiens
  misc_RNA (1)...(19): siRNA sense strand
gcaauuuaccagacucuag

SEQ ID NO: 954307 - RNA, 19 nt, Homo sapiens
  misc_RNA (1)...(19): siRNA sense strand
ccaccaaauugagccguuu

SEQ ID NO: 954308 - RNA, 19 nt, Homo sapiens
  misc_RNA (1)...(19): siRNA sense strand
gaauuuagaggacgaagac

SEQ ID NO: 954309 - RNA, 19 nt, Homo sapiens
  misc_RNA (1)...(19): siRNA sense strand
caauuuaccagacucuaga

SEQ ID NO: 954310 - RNA, 19 nt, Homo sapiens
  misc_RNA (1)...(19): siRNA sense strand
augggaaggugauaucauu

SEQ ID NO: 954311 - RNA, 19 nt, Homo sapiens
  misc_RNA (1)...(19): siRNA sense strand
ugucccagcugccauggaa

SEQ ID NO: 954312 - RNA, 19 nt, Homo sapiens
  misc_RNA (1)...(19): siRNA sense strand
gacagugguaugaaagaaa

SEQ ID NO: 954313 - RNA, 19 nt, Homo sapiens
  misc_RNA (1)...(19): siRNA sense strand
gcacugauucugagguucu

SEQ ID NO: 954314 - RNA, 19 nt, Homo sapiens
  misc_RNA (1)...(19): siRNA sense strand
auucaucuccuccugauaa

SEQ ID NO: 954315 - RNA, 19 nt, Homo sapiens
  misc_RNA (1)...(19): siRNA sense strand
guuauucaacagcguaauu

SEQ ID NO: 954316 - RNA, 19 nt, Homo sapiens
  misc_RNA (1)...(19): siRNA sense strand
acgaagacauugaaagcau

SEQ ID NO: 954317 - RNA, 19 nt, Homo sapiens
  misc_RNA (1)...(19): siRNA sense strand
cugagguucugacacacua

SEQ ID NO: 954318 - RNA, 19 nt, Homo sapiens
  misc_RNA (1)...(19): siRNA sense strand
cagaaggaaagacuccaaa

SEQ ID NO: 954319 - RNA, 19 nt, Homo sapiens
  misc_RNA (1)...(19): siRNA sense strand
cuagaugacgagugggaua

SEQ ID NO: 954320 - RNA, 19 nt, Homo sapiens
  misc_RNA (1)...(19): siRNA sense strand
ucaacagccuccacauggu

SEQ ID NO: 954321 - RNA, 19 nt, Homo sapiens
  misc_RNA (1)...(19): siRNA sense strand
ggaacaccaucugccucuu

SEQ ID NO: 954322 - RNA, 19 nt, Homo sapiens
  misc_RNA (1)...(19): siRNA sense strand
gacauugaaagcauugaug

SEQ ID NO: 954323 - RNA, 19 nt, Homo sapiens
  misc_RNA (1)...(19): siRNA sense strand
guggaaaauuguugaaaga

SEQ ID NO: 954324 - RNA, 19 nt, Homo sapiens
  misc_RNA (1)...(19): siRNA sense strand
cagguucauguuccucuua

SEQ ID NO: 954325 - RNA, 19 nt, Homo sapiens
  misc_RNA (1)...(19): siRNA sense strand
auucugagguucugacaca

SEQ ID NO: 954326 - RNA, 19 nt, Homo sapiens
  misc_RNA (1)...(19): siRNA sense strand
cagcugccauggaauucau

SEQ ID NO: 954327 - RNA, 19 nt, Homo sapiens
  misc_RNA (1)...(19): siRNA sense strand
gaaguugcugcagaaguug

SEQ ID NO: 954328 - RNA, 19 nt, Homo sapiens
  misc_RNA (1)...(19): siRNA sense strand
guagacaaugaacaacuga

SEQ ID NO: 954329 - RNA, 19 nt, Homo sapiens
  misc_RNA (1)...(19): siRNA sense strand
ucauguuccucuuauuucu

SEQ ID NO: 954330 - RNA, 19 nt, Homo sapiens
  misc_RNA (1)...(19): siRNA sense strand
aaggaaagacuccaaaggu

SEQ ID NO: 954331 - RNA, 19 nt, Homo sapiens
  misc_RNA (1)...(19): siRNA sense strand
aaucgugaaucagaaggaa

SEQ ID NO: 954332 - RNA, 19 nt, Homo sapiens
  misc_RNA (1)...(19): siRNA sense strand
agacaaugaacaacugaau

SEQ ID NO: 954333 - RNA, 19 nt, Homo sapiens
  misc_RNA (1)...(19): siRNA sense strand
ucaacagcguaauucagau

SEQ ID NO: 954334 - RNA, 19 nt, Homo sapiens
  misc_RNA (1)...(19): siRNA sense strand
gguucauguuccucuuauu

SEQ ID NO: 954335 - RNA, 19 nt, Homo sapiens
  misc_RNA (1)...(19): siRNA sense strand
gaggacgaagacauugaaa

SEQ ID NO: 954336 - RNA, 19 nt, Homo sapiens
  misc_RNA (1)...(19): siRNA sense strand
ccugguagacaaugaacaa

SEQ ID NO: 954337 - RNA, 19 nt, Homo sapiens
  misc_RNA (1)...(19): siRNA sense strand
gaaaaugggaaggugauau

SEQ ID NO: 954338 - RNA, 19 nt, Homo sapiens
  misc_RNA (1)...(19): siRNA sense strand
cauugaugccaccaaauug

SEQ ID NO: 954339 - RNA, 19 nt, Homo sapiens
  misc_RNA (1)...(19): siRNA sense strand
uuuagaggacgaagacauu

SEQ ID NO: 954340 - RNA, 19 nt, Homo sapiens
  misc_RNA (1)...(19): siRNA sense strand
ccagguucauguuccucuu

SEQ ID NO: 954341 - RNA, 19 nt, Homo sapiens
  misc_RNA (1)...(19): siRNA sense strand
uagaggacgaagacauuga

SEQ ID NO: 954342 - RNA, 19 nt, Homo sapiens
  misc_RNA (1)...(19): siRNA sense strand
gggaaggugauaucauuuu

SEQ ID NO: 954343 - RNA, 19 nt, Homo sapiens
  misc_RNA (1)...(19): siRNA sense strand
acagugguaugaaagaaaa

SEQ ID NO: 954344 - RNA, 19 nt, Homo sapiens
  misc_RNA (1)...(19): siRNA sense strand
cagcguaauucagauucau

SEQ ID NO: 954345 - RNA, 19 nt, Homo sapiens
  misc_RNA (1)...(19): siRNA sense strand
cugacacacuacaacauca

SEQ ID NO: 954346 - RNA, 19 nt, Homo sapiens
  misc_RNA (1)...(19): siRNA sense strand
ggaauccggucaauaauga

SEQ ID NO: 954347 - RNA, 19 nt, Homo sapiens
  misc_RNA (1)...(19): siRNA sense strand
gaacaugaaccacuagaaa

SEQ ID NO: 954348 - RNA, 19 nt, Homo sapiens
  misc_RNA (1)...(19): siRNA sense strand
guacugaaguggaauccua

SEQ ID NO: 954349 - RNA, 19 nt, Homo sapiens
  misc_RNA (1)...(19): siRNA sense strand
caaggcagcauaacauuua

SEQ ID NO: 954350 - RNA, 19 nt, Homo sapiens
  misc_RNA (1)...(19): siRNA sense strand
caaauuugguugcugcuuu

SEQ ID NO: 954351 - RNA, 19 nt, Homo sapiens
  misc_RNA (1)...(19): siRNA sense strand
ccaggaauccggucaauaa

SEQ ID NO: 954352 - RNA, 19 nt, Homo sapiens
  misc_RNA (1)...(19): siRNA sense strand
gcugacaccuguucucauu

SEQ ID NO: 954353 - RNA, 19 nt, Homo sapiens
  misc_RNA (1)...(19): siRNA sense strand
ggacaucuccauacacuug

SEQ ID NO: 954354 - RNA, 19 nt, Homo sapiens
  misc_RNA (1)...(19): siRNA sense strand
uaagaguguucaccacaua

SEQ ID NO: 954355 - RNA, 19 nt, Homo sapiens
  misc_RNA (1)...(19): siRNA sense strand
ggcuauagcuuauuugugu

SEQ ID NO: 954356 - RNA, 19 nt, Homo sapiens
  misc_RNA (1)...(19): siRNA sense strand
gaggauacccagagcuuaa

SEQ ID NO: 954357 - RNA, 19 nt, Homo sapiens
  misc_RNA (1)...(19): siRNA sense strand
aauaggagguaccggauuu

SEQ ID NO: 954358 - RNA, 19 nt, Homo sapiens
  misc_RNA (1)...(19): siRNA sense strand
guucggcuauagcuuauuu

SEQ ID NO: 954359 - RNA, 19 nt, Homo sapiens
  misc_RNA (1)...(19): siRNA sense strand
gaaguggaauccuagaaac

SEQ ID NO: 954360 - RNA, 19 nt, Homo sapiens
  misc_RNA (1)...(19): siRNA sense strand
gaaguggccugugguucuu

SEQ ID NO: 954361 - RNA, 19 nt, Homo sapiens
  misc_RNA (1)...(19): siRNA sense strand
cagcucaccauucucauua

SEQ ID NO: 954362 - RNA, 19 nt, Homo sapiens
  misc_RNA (1)...(19): siRNA sense strand
caccuguucucauucguua

SEQ ID NO: 954363 - RNA, 19 nt, Homo sapiens
  misc_RNA (1)...(19): siRNA sense strand
ggagcaaccauacaauuug

SEQ ID NO: 954364 - RNA, 19 nt, Homo sapiens
  misc_RNA (1)...(19): siRNA sense strand
ggucucaucuccaucaaag

SEQ ID NO: 954365 - RNA, 19 nt, Homo sapiens
  misc_RNA (1)...(19): siRNA sense strand
acacugaacuccaccaagu

SEQ ID NO: 954366 - RNA, 19 nt, Homo sapiens
  misc_RNA (1)...(19): siRNA sense strand
gugggagacuggaaggaua

SEQ ID NO: 954367 - RNA, 19 nt, Homo sapiens
  misc_RNA (1)...(19): siRNA sense strand
gcucaccauucucauuauu

SEQ ID NO: 954368 - RNA, 19 nt, Homo sapiens
  misc_RNA (1)...(19): siRNA sense strand
ggaaggauaauaggaggua

SEQ ID NO: 954369 - RNA, 19 nt, Homo sapiens
  misc_RNA (1)...(19): siRNA sense strand
caacauccacuauucuuuc

SEQ ID NO: 954370 - RNA, 19 nt, Homo sapiens
  misc_RNA (1)...(19): siRNA sense strand
gagcaaccauacaauuugg

SEQ ID NO: 954371 - RNA, 19 nt, Homo sapiens
  misc_RNA (1)...(19): siRNA sense strand
ugaguucggcuauagcuua

SEQ ID NO: 954372 - RNA, 19 nt, Homo sapiens
  misc_RNA (1)...(19): siRNA sense strand
uaucaccaauccuaaauca

SEQ ID NO: 954373 - RNA, 19 nt, Homo sapiens
  misc_RNA (1)...(19): siRNA sense strand
aauccuaaaucacuccuuu

SEQ ID NO: 954374 - RNA, 19 nt, Homo sapiens
  misc_RNA (1)...(19): siRNA sense strand
ggaaguggccugugguucu

SEQ ID NO: 954375 - RNA, 19 nt, Homo sapiens
  misc_RNA (1)...(19): siRNA sense strand
cuugauggcuuacaugugu

SEQ ID NO: 954376 - RNA, 19 nt, Homo sapiens
  misc_RNA (1)...(19): siRNA sense strand
ggacacauaacauagaagu

SEQ ID NO: 954377 - RNA, 19 nt, Homo sapiens
  misc_RNA (1)...(19): siRNA sense strand
caacacacaucagagucuu

SEQ ID NO: 954378 - RNA, 19 nt, Homo sapiens
  misc_RNA (1)...(19): siRNA sense strand
aauaaugaguucggcuaua

SEQ ID NO: 954379 - RNA, 19 nt, Homo sapiens
  misc_RNA (1)...(19): siRNA sense strand
guaagaguguucaccacau

SEQ ID NO: 954380 - RNA, 19 nt, Homo sapiens
  misc_RNA (1)...(19): siRNA sense strand
ggaagaaguaagaguguuc

SEQ ID NO: 954381 - RNA, 19 nt, Homo sapiens
  misc_RNA (1)...(19): siRNA sense strand
aaucacuccuuuauaguug

SEQ ID NO: 954382 - RNA, 19 nt, Homo sapiens
  misc_RNA (1)...(19): siRNA sense strand
gauuugaucuuugggaagu

SEQ ID NO: 954383 - RNA, 19 nt, Homo sapiens
  misc_RNA (1)...(19): siRNA sense strand
guucuuaucaccaauccua

SEQ ID NO: 954384 - RNA, 19 nt, Homo sapiens
  misc_RNA (1)...(19): siRNA sense strand
uaagauugauggaguucau

SEQ ID NO: 954385 - RNA, 19 nt, Homo sapiens
  misc_RNA (1)...(19): siRNA sense strand
gauugauggaguucauuua

SEQ ID NO: 954386 - RNA, 19 nt, Homo sapiens
  misc_RNA (1)...(19): siRNA sense strand
aauuaugccuguucaccua

SEQ ID NO: 954387 - RNA, 19 nt, Homo sapiens
  misc_RNA (1)...(19): siRNA sense strand
ugaaguggaauccuagaaa

SEQ ID NO: 954388 - RNA, 19 nt, Homo sapiens
  misc_RNA (1)...(19): siRNA sense strand
cuacuauucuguguuguug

SEQ ID NO: 954389 - RNA, 19 nt, Homo sapiens
  misc_RNA (1)...(19): siRNA sense strand
gaguucggcuauagcuuau

SEQ ID NO: 954390 - RNA, 19 nt, Homo sapiens
  misc_RNA (1)...(19): siRNA sense strand
gaaucuucauggugcaguu

SEQ ID NO: 954391 - RNA, 19 nt, Homo sapiens
  misc_RNA (1)...(19): siRNA sense strand
cggagcaaccauacaauuu

SEQ ID NO: 954392 - RNA, 19 nt, Homo sapiens
  misc_RNA (1)...(19): siRNA sense strand
ucaugugucuggucccauu

SEQ ID NO: 954393 - RNA, 19 nt, Homo sapiens
  misc_RNA (1)...(19): siRNA sense strand
ccagggcacuuuggaacuu

SEQ ID NO: 954394 - RNA, 19 nt, Homo sapiens
  misc_RNA (1)...(19): siRNA sense strand
cuucuacuauucuguguug

SEQ ID NO: 954395 - RNA, 19 nt, Homo sapiens
  misc_RNA (1)...(19): siRNA sense strand
gugcuuuggucacaacuuc

SEQ ID NO: 954396 - RNA, 19 nt, Homo sapiens
  misc_RNA (1)...(19): siRNA sense strand
gagacuggaaggauaauag

SEQ ID NO: 954397 - RNA, 19 nt, Homo sapiens
  misc_RNA (1)...(19): siRNA sense strand
cuucaggguuuauaaaucu

SEQ ID NO: 954398 - RNA, 19 nt, Homo sapiens
  misc_RNA (1)...(19): siRNA sense strand
caucagagucuuggccuuu

SEQ ID NO: 954399 - RNA, 19 nt, Homo sapiens
  misc_RNA (1)...(19): siRNA sense strand
auaaugaguucggcuauag

SEQ ID NO: 954400 - RNA, 19 nt, Homo sapiens
  misc_RNA (1)...(19): siRNA sense strand
cuacaaggcagcauaacau

SEQ ID NO: 954401 - RNA, 19 nt, Homo sapiens
  misc_RNA (1)...(19): siRNA sense strand
ccacauauuuucuguucaa

SEQ ID NO: 954402 - RNA, 19 nt, Homo sapiens
  misc_RNA (1)...(19): siRNA sense strand
gaguguucaccacauauuu

SEQ ID NO: 954403 - RNA, 19 nt, Homo sapiens
  misc_RNA (1)...(19): siRNA sense strand
cacgaccucuuuagcuuug

SEQ ID NO: 954404 - RNA, 19 nt, Homo sapiens
  misc_RNA (1)...(19): siRNA sense strand
ucacucaacacacaucaga

SEQ ID NO: 954405 - RNA, 19 nt, Homo sapiens
  misc_RNA (1)...(19): siRNA sense strand
uuuacaacauccacuauuc

SEQ ID NO: 954406 - RNA, 19 nt, Homo sapiens
  misc_RNA (1)...(19): siRNA sense strand
cuguacaucuggcagguuu

SEQ ID NO: 954407 - RNA, 19 nt, Homo sapiens
  misc_RNA (1)...(19): siRNA sense strand
ugggauauuuguuaaugga

SEQ ID NO: 954408 - RNA, 19 nt, Homo sapiens
  misc_RNA (1)...(19): siRNA sense strand
ccuuugggauauuuguuaa

SEQ ID NO: 954409 - RNA, 19 nt, Homo sapiens
  misc_RNA (1)...(19): siRNA sense strand
gaagaaguaagaguguuca

SEQ ID NO: 954410 - RNA, 19 nt, Homo sapiens
  misc_RNA (1)...(19): siRNA sense strand
gaaccacuagaaagacuuc

SEQ ID NO: 954411 - RNA, 19 nt, Homo sapiens
  misc_RNA (1)...(19): siRNA sense strand
ugggacacauaacauagaa

SEQ ID NO: 954412 - RNA, 19 nt, Homo sapiens
  misc_RNA (1)...(19): siRNA sense strand
gguuuauuccugcuacuuu

SEQ ID NO: 954413 - RNA, 19 nt, Homo sapiens
  misc_RNA (1)...(19): siRNA sense strand
ucucaucuccaucaaagaa

SEQ ID NO: 954414 - RNA, 19 nt, Homo sapiens
  misc_RNA (1)...(19): siRNA sense strand
cuucuucacucaacacaca

SEQ ID NO: 954415 - RNA, 19 nt, Homo sapiens
  misc_RNA (1)...(19): siRNA sense strand
acaaggcagcauaacauuu

SEQ ID NO: 954416 - RNA, 19 nt, Homo sapiens
  misc_RNA (1)...(19): siRNA sense strand
acuauucuguguuguuguu

SEQ ID NO: 954417 - RNA, 19 nt, Homo sapiens
  misc_RNA (1)...(19): siRNA sense strand
ggagacuggaaggauaaua

SEQ ID NO: 954418 - RNA, 19 nt, Homo sapiens
  misc_RNA (1)...(19): siRNA sense strand
guacaucuggcagguuuau

SEQ ID NO: 954419 - RNA, 19 nt, Homo sapiens
  misc_RNA (1)...(19): siRNA sense strand
uacaguagugggacacaua

SEQ ID NO: 954420 - RNA, 19 nt, Homo sapiens
  misc_RNA (1)...(19): siRNA sense strand
uauccuccauuacuucugu

SEQ ID NO: 954421 - RNA, 19 nt, Homo sapiens
  misc_RNA (1)...(19): siRNA sense strand
gaucacgaccucuuuagcu

SEQ ID NO: 954422 - RNA, 19 nt, Homo sapiens
  misc_RNA (1)...(19): siRNA sense strand
caauuugguuuggacacuu

SEQ ID NO: 954423 - RNA, 19 nt, Homo sapiens
  misc_RNA (1)...(19): siRNA sense strand
acaugaaccacuagaaaga

SEQ ID NO: 954424 - RNA, 19 nt, Homo sapiens
  misc_RNA (1)...(19): siRNA sense strand
ucacgaccucuuuagcuuu

SEQ ID NO: 954425 - RNA, 19 nt, Homo sapiens
  misc_RNA (1)...(19): siRNA sense strand
guuuauuccugcuacuuuc

SEQ ID NO: 954426 - RNA, 19 nt, Homo sapiens
  misc_RNA (1)...(19): siRNA sense strand
cgaggauacccagagcuua

SEQ ID NO: 954427 - RNA, 19 nt, Homo sapiens
  misc_RNA (1)...(19): siRNA sense strand
ggacacugaacuccaccaa

SEQ ID NO: 954428 - RNA, 19 nt, Homo sapiens
  misc_RNA (1)...(19): siRNA sense strand
cuucaggucucaucuccau

SEQ ID NO: 954429 - RNA, 19 nt, Homo sapiens
  misc_RNA (1)...(19): siRNA sense strand
cuucaugucuugagcaaaa

SEQ ID NO: 954430 - RNA, 19 nt, Homo sapiens
  misc_RNA (1)...(19): siRNA sense strand
aauuugguuuggacacuuu

SEQ ID NO: 954431 - RNA, 19 nt, Homo sapiens
  misc_RNA (1)...(19): siRNA sense strand
ugacaccuguucucauucg

SEQ ID NO: 954432 - RNA, 19 nt, Homo sapiens
  misc_RNA (1)...(19): siRNA sense strand
ggaggagcucuuauuacug

SEQ ID NO: 954433 - RNA, 19 nt, Homo sapiens
  misc_RNA (1)...(19): siRNA sense strand
ucaccaauccuaaaucacu

SEQ ID NO: 954434 - RNA, 19 nt, Homo sapiens
  misc_RNA (1)...(19): siRNA sense strand
cucuuuagcuuugcagauu

SEQ ID NO: 954435 - RNA, 19 nt, Homo sapiens
  misc_RNA (1)...(19): siRNA sense strand
gguggacugaugccuguuu

SEQ ID NO: 954436 - RNA, 19 nt, Homo sapiens
  misc_RNA (1)...(19): siRNA sense strand
caauaaugaguucggcuau

SEQ ID NO: 954437 - RNA, 19 nt, Homo sapiens
  misc_RNA (1)...(19): siRNA sense strand
cauuuauucuccguacuga

SEQ ID NO: 954438 - RNA, 19 nt, Homo sapiens
  misc_RNA (1)...(19): siRNA sense strand
uagugggacacauaacaua

SEQ ID NO: 954439 - RNA, 19 nt, Homo sapiens
  misc_RNA (1)...(19): siRNA sense strand
ucuuuagcuuugcagauuu

SEQ ID NO: 954440 - RNA, 19 nt, Homo sapiens
  misc_RNA (1)...(19): siRNA sense strand
cagcggugcuuuggucaca

SEQ ID NO: 954441 - RNA, 19 nt, Homo sapiens
  misc_RNA (1)...(19): siRNA sense strand
ccagcucaccauucucauu

SEQ ID NO: 954442 - RNA, 19 nt, Homo sapiens
  misc_RNA (1)...(19): siRNA sense strand
gacacauaacauagaagua

SEQ ID NO: 954443 - RNA, 19 nt, Homo sapiens
  misc_RNA (1)...(19): siRNA sense strand
acaacauccacuauucuuu

SEQ ID NO: 954444 - RNA, 19 nt, Homo sapiens
  misc_RNA (1)...(19): siRNA sense strand
acaguagugggacacauaa

SEQ ID NO: 954445 - RNA, 19 nt, Homo sapiens
  misc_RNA (1)...(19): siRNA sense strand
cuacuuucuuuaugcaaca

SEQ ID NO: 954446 - RNA, 19 nt, Homo sapiens
  misc_RNA (1)...(19): siRNA sense strand
caagagaucuccaaggaau

SEQ ID NO: 954447 - RNA, 19 nt, Homo sapiens
  misc_RNA (1)...(19): siRNA sense strand
ggcaagaccuuccaagaga

SEQ ID NO: 954448 - RNA, 19 nt, Homo sapiens
  misc_RNA (1)...(19): siRNA sense strand
ggaggagccuggagguuau

SEQ ID NO: 954449 - RNA, 19 nt, Homo sapiens
  misc_RNA (1)...(19): siRNA sense strand
gcuauaaccucucuaucau

SEQ ID NO: 954450 - RNA, 19 nt, Homo sapiens
  misc_RNA (1)...(19): siRNA sense strand
ucacggcgguuguuaguug

SEQ ID NO: 954451 - RNA, 19 nt, Homo sapiens
  misc_RNA (1)...(19): siRNA sense strand
caucugcgcugccggcauu

SEQ ID NO: 954452 - RNA, 19 nt, Homo sapiens
  misc_RNA (1)...(19): siRNA sense strand
uauaaccucucuaucauca

SEQ ID NO: 954453 - RNA, 19 nt, Homo sapiens
  misc_RNA (1)...(19): siRNA sense strand
caucuacacuggccuguuc

SEQ ID NO: 954454 - RNA, 19 nt, Homo sapiens
  misc_RNA (1)...(19): siRNA sense strand
uaaccucucuaucaucaau

SEQ ID NO: 954455 - RNA, 19 nt, Homo sapiens
  misc_RNA (1)...(19): siRNA sense strand
gagagccacugcccgauca

SEQ ID NO: 954456 - RNA, 19 nt, Homo sapiens
  misc_RNA (1)...(19): siRNA sense strand
gcaagaccuuccaagagau

SEQ ID NO: 954457 - RNA, 19 nt, Homo sapiens
  misc_RNA (1)...(19): siRNA sense strand
gaucaccuaguccugcuua

SEQ ID NO: 954458 - RNA, 19 nt, Homo sapiens
  misc_RNA (1)...(19): siRNA sense strand
gcaggucccuuggccauca

SEQ ID NO: 954459 - RNA, 19 nt, Homo sapiens
  misc_RNA (1)...(19): siRNA sense strand
uccaagagaucuccaagga

SEQ ID NO: 954460 - RNA, 19 nt, Homo sapiens
  misc_RNA (1)...(19): siRNA sense strand
ggaauucaccaaugagaca

SEQ ID NO: 954461 - RNA, 19 nt, Homo sapiens
  misc_RNA (1)...(19): siRNA sense strand
gccauggccugcaucuuug

SEQ ID NO: 954462 - RNA, 19 nt, Homo sapiens
  misc_RNA (1)...(19): siRNA sense strand
uaacaucuuugugguguca

SEQ ID NO: 954463 - RNA, 19 nt, Homo sapiens
  misc_RNA (1)...(19): siRNA sense strand
agagaucuccaaggaauua

SEQ ID NO: 954464 - RNA, 19 nt, Homo sapiens
  misc_RNA (1)...(19): siRNA sense strand
ugacaagccucgugguucu

SEQ ID NO: 954465 - RNA, 19 nt, Homo sapiens
  misc_RNA (1)...(19): siRNA sense strand
agaagucccuccuggugaa

SEQ ID NO: 954466 - RNA, 19 nt, Homo sapiens
  misc_RNA (1)...(19): siRNA sense strand
guuguuaguugugugguaa

SEQ ID NO: 954467 - RNA, 19 nt, Homo sapiens
  misc_RNA (1)...(19): siRNA sense strand
ggcuauaaccucucuauca

SEQ ID NO: 954468 - RNA, 19 nt, Homo sapiens
  misc_RNA (1)...(19): siRNA sense strand
gcaggcuccuuugagauga

SEQ ID NO: 954469 - RNA, 19 nt, Homo sapiens
  misc_RNA (1)...(19): siRNA sense strand
caugagcucagccaucuuu

SEQ ID NO: 954470 - RNA, 19 nt, Homo sapiens
  misc_RNA (1)...(19): siRNA sense strand
cagcagcaauccuguuugg

SEQ ID NO: 954471 - RNA, 19 nt, Homo sapiens
  misc_RNA (1)...(19): siRNA sense strand
gccaugagcucagccaucu

SEQ ID NO: 954472 - RNA, 19 nt, Homo sapiens
  misc_RNA (1)...(19): siRNA sense strand
uggaggagccuggagguua

SEQ ID NO: 954473 - RNA, 19 nt, Homo sapiens
  misc_RNA (1)...(19): siRNA sense strand
ccuggugaauaacaucuuu

SEQ ID NO: 954474 - RNA, 19 nt, Homo sapiens
  misc_RNA (1)...(19): siRNA sense strand
ggaauuacacagacucaac

SEQ ID NO: 954475 - RNA, 19 nt, Homo sapiens
  misc_RNA (1)...(19): siRNA sense strand
gguuguuaguuguguggua

SEQ ID NO: 954476 - RNA, 19 nt, Homo sapiens
  misc_RNA (1)...(19): siRNA sense strand
gaacuggagccguccuuac

SEQ ID NO: 954477 - RNA, 19 nt, Homo sapiens
  misc_RNA (1)...(19): siRNA sense strand
gaggagcuguggccaugag

SEQ ID NO: 954478 - RNA, 19 nt, Homo sapiens
  misc_RNA (1)...(19): siRNA sense strand
cggaagcgaagauccagua

SEQ ID NO: 954479 - RNA, 19 nt, Homo sapiens
  misc_RNA (1)...(19): siRNA sense strand
cgcgcuaccuccucauuga

SEQ ID NO: 954480 - RNA, 19 nt, Homo sapiens
  misc_RNA (1)...(19): siRNA sense strand
uucaggaauucaccaauga

SEQ ID NO: 954481 - RNA, 19 nt, Homo sapiens
  misc_RNA (1)...(19): siRNA sense strand
gaauuacacagacucaacu

SEQ ID NO: 954482 - RNA, 19 nt, Homo sapiens
  misc_RNA (1)...(19): siRNA sense strand
ccaaggaauuacacagacu

SEQ ID NO: 954483 - RNA, 19 nt, Homo sapiens
  misc_RNA (1)...(19): siRNA sense strand
caccuaguccugcuuaugu

SEQ ID NO: 954484 - RNA, 19 nt, Homo sapiens
  misc_RNA (1)...(19): siRNA sense strand
ccaucacgcugggaaggaa

SEQ ID NO: 954485 - RNA, 19 nt, Homo sapiens
  misc_RNA (1)...(19): siRNA sense strand
ccaagagaucuccaaggaa

SEQ ID NO: 954486 - RNA, 19 nt, Homo sapiens
  misc_RNA (1)...(19): siRNA sense strand
ggacagguggucggacuca

SEQ ID NO: 954487 - RNA, 19 nt, Homo sapiens
  misc_RNA (1)...(19): siRNA sense strand
ccagucaacagaacucuag

SEQ ID NO: 954488 - RNA, 19 nt, Homo sapiens
  misc_RNA (1)...(19): siRNA sense strand
gagguuauccagucaacag

SEQ ID NO: 954489 - RNA, 19 nt, Homo sapiens
  misc_RNA (1)...(19): siRNA sense strand
ggugacaagccucgugguu

SEQ ID NO: 954490 - RNA, 19 nt, Homo sapiens
  misc_RNA (1)...(19): siRNA sense strand
gucagcagcaauccuguuu

SEQ ID NO: 954491 - RNA, 19 nt, Homo sapiens
  misc_RNA (1)...(19): siRNA sense strand
gcucacggcgguuguuagu

SEQ ID NO: 954492 - RNA, 19 nt, Homo sapiens
  misc_RNA (1)...(19): siRNA sense strand
gcgggaaugacucggugua

SEQ ID NO: 954493 - RNA, 19 nt, Homo sapiens
  misc_RNA (1)...(19): siRNA sense strand
agucccuccuggugaauaa

SEQ ID NO: 954494 - RNA, 19 nt, Homo sapiens
  misc_RNA (1)...(19): siRNA sense strand
gauuucccuuuaucaugga

SEQ ID NO: 954495 - RNA, 19 nt, Homo sapiens
  misc_RNA (1)...(19): siRNA sense strand
gcaggugugagcaugaaca

SEQ ID NO: 954496 - RNA, 19 nt, Homo sapiens
  misc_RNA (1)...(19): siRNA sense strand
gaccuugcacauucaggaa

SEQ ID NO: 954497 - RNA, 19 nt, Homo sapiens
  misc_RNA (1)...(19): siRNA sense strand
uuaguugugugguaaucga

SEQ ID NO: 954498 - RNA, 19 nt, Homo sapiens
  misc_RNA (1)...(19): siRNA sense strand
gagcucagccaucuuuacg

SEQ ID NO: 954499 - RNA, 19 nt, Homo sapiens
  misc_RNA (1)...(19): siRNA sense strand
ccucaucgugucucuguau

SEQ ID NO: 954500 - RNA, 19 nt, Homo sapiens
  misc_RNA (1)...(19): siRNA sense strand
ugaacuggagccguccuua

SEQ ID NO: 954501 - RNA, 19 nt, Homo sapiens
  misc_RNA (1)...(19): siRNA sense strand
caggaauucaccaaugaga

SEQ ID NO: 954502 - RNA, 19 nt, Homo sapiens
  misc_RNA (1)...(19): siRNA sense strand
cuaugucccuuuccuuggu

SEQ ID NO: 954503 - RNA, 19 nt, Homo sapiens
  misc_RNA (1)...(19): siRNA sense strand
gccacugcccgaucaccua

SEQ ID NO: 954504 - RNA, 19 nt, Homo sapiens
  misc_RNA (1)...(19): siRNA sense strand
gguuauccagucaacagaa

SEQ ID NO: 954505 - RNA, 19 nt, Homo sapiens
  misc_RNA (1)...(19): siRNA sense strand
ggaaagaccaccugaagga

SEQ ID NO: 954506 - RNA, 19 nt, Homo sapiens
  misc_RNA (1)...(19): siRNA sense strand
uaucugcucugucauauau

SEQ ID NO: 954507 - RNA, 19 nt, Homo sapiens
  misc_RNA (1)...(19): siRNA sense strand
cagauuggauacaugauuu

SEQ ID NO: 954508 - RNA, 19 nt, Homo sapiens
  misc_RNA (1)...(19): siRNA sense strand
caaggaagcugcggaagga

SEQ ID NO: 954509 - RNA, 19 nt, Homo sapiens
  misc_RNA (1)...(19): siRNA sense strand
gcaggagaaucagauauga

SEQ ID NO: 954510 - RNA, 19 nt, Homo sapiens
  misc_RNA (1)...(19): siRNA sense strand
ucacaaacuucuacauuca

SEQ ID NO: 954511 - RNA, 19 nt, Homo sapiens
  misc_RNA (1)...(19): siRNA sense strand
gguuucuucuggacaauua

SEQ ID NO: 954512 - RNA, 19 nt, Homo sapiens
  misc_RNA (1)...(19): siRNA sense strand
ucacacugcugucucugua

SEQ ID NO: 954513 - RNA, 19 nt, Homo sapiens
  misc_RNA (1)...(19): siRNA sense strand
guaccuauuucaaggcauu

SEQ ID NO: 954514 - RNA, 19 nt, Homo sapiens
  misc_RNA (1)...(19): siRNA sense strand
ucuccaaacucauagaauu

SEQ ID NO: 954515 - RNA, 19 nt, Homo sapiens
  misc_RNA (1)...(19): siRNA sense strand
acacugcugucucuguaua

SEQ ID NO: 954516 - RNA, 19 nt, Homo sapiens
  misc_RNA (1)...(19): siRNA sense strand
guauauguucugugaguua

SEQ ID NO: 954517 - RNA, 19 nt, Homo sapiens
  misc_RNA (1)...(19): siRNA sense strand
ugauugcucucuucacaaa

SEQ ID NO: 954518 - RNA, 19 nt, Homo sapiens
  misc_RNA (1)...(19): siRNA sense strand
ggaagaaguacaucacuca

SEQ ID NO: 954519 - RNA, 19 nt, Homo sapiens
  misc_RNA (1)...(19): siRNA sense strand
guaaaaggaugguuucuuc

SEQ ID NO: 954520 - RNA, 19 nt, Homo sapiens
  misc_RNA (1)...(19): siRNA sense strand
guccauggcugcugugaau

SEQ ID NO: 954521 - RNA, 19 nt, Homo sapiens
  misc_RNA (1)...(19): siRNA sense strand
gcaaauacaacuucuucug

SEQ ID NO: 954522 - RNA, 19 nt, Homo sapiens
  misc_RNA (1)...(19): siRNA sense strand
acauuuaucugcucuguca

SEQ ID NO: 954523 - RNA, 19 nt, Homo sapiens
  misc_RNA (1)...(19): siRNA sense strand
caaauacaacuucuucugu

SEQ ID NO: 954524 - RNA, 19 nt, Homo sapiens
  misc_RNA (1)...(19): siRNA sense strand
cuacuucuccaaacucaua

SEQ ID NO: 954525 - RNA, 19 nt, Homo sapiens
  misc_RNA (1)...(19): siRNA sense strand
gaugguuucuucuggacaa

SEQ ID NO: 954526 - RNA, 19 nt, Homo sapiens
  misc_RNA (1)...(19): siRNA sense strand
uauggacacuuucuucuuc

SEQ ID NO: 954527 - RNA, 19 nt, Homo sapiens
  misc_RNA (1)...(19): siRNA sense strand
gaaggaaagaccaccugaa

SEQ ID NO: 954528 - RNA, 19 nt, Homo sapiens
  misc_RNA (1)...(19): siRNA sense strand
gagaaucagauaugaagau

SEQ ID NO: 954529 - RNA, 19 nt, Homo sapiens
  misc_RNA (1)...(19): siRNA sense strand
auacaugauuucccugauu

SEQ ID NO: 954530 - RNA, 19 nt, Homo sapiens
  misc_RNA (1)...(19): siRNA sense strand
cugaacaucuggugguuug

SEQ ID NO: 954531 - RNA, 19 nt, Homo sapiens
  misc_RNA (1)...(19): siRNA sense strand
ccauaccucugguggaaga

SEQ ID NO: 954532 - RNA, 19 nt, Homo sapiens
  misc_RNA (1)...(19): siRNA sense strand
auaaacagccauucucuug

SEQ ID NO: 954533 - RNA, 19 nt, Homo sapiens
  misc_RNA (1)...(19): siRNA sense strand
uauguucugugaguuagua

SEQ ID NO: 954534 - RNA, 19 nt, Homo sapiens
  misc_RNA (1)...(19): siRNA sense strand
ggaagcugcggaaggauug

SEQ ID NO: 954535 - RNA, 19 nt, Homo sapiens
  misc_RNA (1)...(19): siRNA sense strand
uacaugauuucccugauug

SEQ ID NO: 954536 - RNA, 19 nt, Homo sapiens
  misc_RNA (1)...(19): siRNA sense strand
gcaagaacaaccaccagau

SEQ ID NO: 954537 - RNA, 19 nt, Homo sapiens
  misc_RNA (1)...(19): siRNA sense strand
ucugcucugucauauauuu

SEQ ID NO: 954538 - RNA, 19 nt, Homo sapiens
  misc_RNA (1)...(19): siRNA sense strand
ggauuuuagugguguauaa

SEQ ID NO: 954539 - RNA, 19 nt, Homo sapiens
  misc_RNA (1)...(19): siRNA sense strand
auucagaccuacaacaaga

SEQ ID NO: 954540 - RNA, 19 nt, Homo sapiens
  misc_RNA (1)...(19): siRNA sense strand
acaaacuucuacauucaga

SEQ ID NO: 954541 - RNA, 19 nt, Homo sapiens
  misc_RNA (1)...(19): siRNA sense strand
ccucuugguugguuguauu

SEQ ID NO: 954542 - RNA, 19 nt, Homo sapiens
  misc_RNA (1)...(19): siRNA sense strand
ucacgguccugcacgucua

SEQ ID NO: 954543 - RNA, 19 nt, Homo sapiens
  misc_RNA (1)...(19): siRNA sense strand
gugccacacuuaauagcuu

SEQ ID NO: 954544 - RNA, 19 nt, Homo sapiens
  misc_RNA (1)...(19): siRNA sense strand
gaacaucuggugguuugug

SEQ ID NO: 954545 - RNA, 19 nt, Homo sapiens
  misc_RNA (1)...(19): siRNA sense strand
gcuaggcccucgagauacu

SEQ ID NO: 954546 - RNA, 19 nt, Homo sapiens
  misc_RNA (1)...(19): siRNA sense strand
ccugauugcucucuucaca

SEQ ID NO: 954547 - RNA, 19 nt, Homo sapiens
  misc_RNA (1)...(19): siRNA sense strand
ucacuuaguaccuauuuca

SEQ ID NO: 954548 - RNA, 19 nt, Homo sapiens
  misc_RNA (1)...(19): siRNA sense strand
ccacauuuaucugcucugu

SEQ ID NO: 954549 - RNA, 19 nt, Homo sapiens
  misc_RNA (1)...(19): siRNA sense strand
cauguacucuuacuauggu

SEQ ID NO: 954550 - RNA, 19 nt, Homo sapiens
  misc_RNA (1)...(19): siRNA sense strand
caagaacaaccaccagauc

SEQ ID NO: 954551 - RNA, 19 nt, Homo sapiens
  misc_RNA (1)...(19): siRNA sense strand
ccagauuggauacaugauu

SEQ ID NO: 954552 - RNA, 19 nt, Homo sapiens
  misc_RNA (1)...(19): siRNA sense strand
gauacaugauuucccugau

SEQ ID NO: 954553 - RNA, 19 nt, Homo sapiens
  misc_RNA (1)...(19): siRNA sense strand
guauaaccuuggacucaca

SEQ ID NO: 954554 - RNA, 19 nt, Homo sapiens
  misc_RNA (1)...(19): siRNA sense strand
ugaaggaccaccagaaugg

SEQ ID NO: 954555 - RNA, 19 nt, Homo sapiens
  misc_RNA (1)...(19): siRNA sense strand
gggcagcugcuucaguuug

SEQ ID NO: 954556 - RNA, 19 nt, Homo sapiens
  misc_RNA (1)...(19): siRNA sense strand
ccucauguacucuuacuau

SEQ ID NO: 954557 - RNA, 19 nt, Homo sapiens
  misc_RNA (1)...(19): siRNA sense strand
uugcuaggcccucgagaua

SEQ ID NO: 954558 - RNA, 19 nt, Homo sapiens
  misc_RNA (1)...(19): siRNA sense strand
gaguaugggaaggcaaaua

SEQ ID NO: 954559 - RNA, 19 nt, Homo sapiens
  misc_RNA (1)...(19): siRNA sense strand
ggcagcugcuucaguuugu

SEQ ID NO: 954560 - RNA, 19 nt, Homo sapiens
  misc_RNA (1)...(19): siRNA sense strand
gguacuacuucuccaaacu

SEQ ID NO: 954561 - RNA, 19 nt, Homo sapiens
  misc_RNA (1)...(19): siRNA sense strand
caucacuuaguaccuauuu

SEQ ID NO: 954562 - RNA, 19 nt, Homo sapiens
  misc_RNA (1)...(19): siRNA sense strand
aauacaacuucuucuguca

SEQ ID NO: 954563 - RNA, 19 nt, Homo sapiens
  misc_RNA (1)...(19): siRNA sense strand
ccaaaauacaugaggaaua

SEQ ID NO: 954564 - RNA, 19 nt, Homo sapiens
  misc_RNA (1)...(19): siRNA sense strand
cuucacaaacuucuacauu

SEQ ID NO: 954565 - RNA, 19 nt, Homo sapiens
  misc_RNA (1)...(19): siRNA sense strand
ucauccacguccucaugua

SEQ ID NO: 954566 - RNA, 19 nt, Homo sapiens
  misc_RNA (1)...(19): siRNA sense strand
gaauuuauggacacuuucu

SEQ ID NO: 954567 - RNA, 19 nt, Homo sapiens
  misc_RNA (1)...(19): siRNA sense strand
uucacaaacuucuacauuc

SEQ ID NO: 954568 - RNA, 19 nt, Homo sapiens
  misc_RNA (1)...(19): siRNA sense strand
ggagaaucagauaugaaga

SEQ ID NO: 954569 - RNA, 19 nt, Homo sapiens
  misc_RNA (1)...(19): siRNA sense strand
augcaucacuuaguaccua

SEQ ID NO: 954570 - RNA, 19 nt, Homo sapiens
  misc_RNA (1)...(19): siRNA sense strand
gguuguauuuccagauugg

SEQ ID NO: 954571 - RNA, 19 nt, Homo sapiens
  misc_RNA (1)...(19): siRNA sense strand
ggacacaccaacagcuuuu

SEQ ID NO: 954572 - RNA, 19 nt, Homo sapiens
  misc_RNA (1)...(19): siRNA sense strand
uugguuguauuuccagauu

SEQ ID NO: 954573 - RNA, 19 nt, Homo sapiens
  misc_RNA (1)...(19): siRNA sense strand
ucuggugguuugugaugaa

SEQ ID NO: 954574 - RNA, 19 nt, Homo sapiens
  misc_RNA (1)...(19): siRNA sense strand
ggugguuugugaugaacug

SEQ ID NO: 954575 - RNA, 19 nt, Homo sapiens
  misc_RNA (1)...(19): siRNA sense strand
gggaaggcaaauacaacuu

SEQ ID NO: 954576 - RNA, 19 nt, Homo sapiens
  misc_RNA (1)...(19): siRNA sense strand
guacucuuacuaugguuug

SEQ ID NO: 954577 - RNA, 19 nt, Homo sapiens
  misc_RNA (1)...(19): siRNA sense strand
aagaacaaccaccagauca

SEQ ID NO: 954578 - RNA, 19 nt, Homo sapiens
  misc_RNA (1)...(19): siRNA sense strand
ggacacuuucuucuucauc

SEQ ID NO: 954579 - RNA, 19 nt, Homo sapiens
  misc_RNA (1)...(19): siRNA sense strand
cuccaaacucauagaauuu

SEQ ID NO: 954580 - RNA, 19 nt, Homo sapiens
  misc_RNA (1)...(19): siRNA sense strand
caggagaaucagauaugaa

SEQ ID NO: 954581 - RNA, 19 nt, Homo sapiens
  misc_RNA (1)...(19): siRNA sense strand
caucuggccgugcacauuc

SEQ ID NO: 954582 - RNA, 19 nt, Homo sapiens
  misc_RNA (1)...(19): siRNA sense strand
uuuggugccacacuuaaua

SEQ ID NO: 954583 - RNA, 19 nt, Homo sapiens
  misc_RNA (1)...(19): siRNA sense strand
cucuguauauguucuguga

SEQ ID NO: 954584 - RNA, 19 nt, Homo sapiens
  misc_RNA (1)...(19): siRNA sense strand
aaggaaagaccaccugaag

SEQ ID NO: 954585 - RNA, 19 nt, Homo sapiens
  misc_RNA (1)...(19): siRNA sense strand
ucagaccuacaacaagaaa

SEQ ID NO: 954586 - RNA, 19 nt, Homo sapiens
  misc_RNA (1)...(19): siRNA sense strand
uauauguucugugaguuag

SEQ ID NO: 954587 - RNA, 19 nt, Homo sapiens
  misc_RNA (1)...(19): siRNA sense strand
cuguauauguucugugagu

SEQ ID NO: 954588 - RNA, 19 nt, Homo sapiens
  misc_RNA (1)...(19): siRNA sense strand
guguauaaccuuggacuca

SEQ ID NO: 954589 - RNA, 19 nt, Homo sapiens
  misc_RNA (1)...(19): siRNA sense strand
gugaauggacacaccaaca

SEQ ID NO: 954590 - RNA, 19 nt, Homo sapiens
  misc_RNA (1)...(19): siRNA sense strand
guacuacuucuccaaacuc

SEQ ID NO: 954591 - RNA, 19 nt, Homo sapiens
  misc_RNA (1)...(19): siRNA sense strand
ccugaaggaccaccagaau

SEQ ID NO: 954592 - RNA, 19 nt, Homo sapiens
  misc_RNA (1)...(19): siRNA sense strand
acauucagaccuacaacaa

SEQ ID NO: 954593 - RNA, 19 nt, Homo sapiens
  misc_RNA (1)...(19): siRNA sense strand
ccgugcacauucccucuug

SEQ ID NO: 954594 - RNA, 19 nt, Homo sapiens
  misc_RNA (1)...(19): siRNA sense strand
aacaucuggugguuuguga

SEQ ID NO: 954595 - RNA, 19 nt, Homo sapiens
  misc_RNA (1)...(19): siRNA sense strand
uaugggaaggcaaauacaa

SEQ ID NO: 954596 - RNA, 19 nt, Homo sapiens
  misc_RNA (1)...(19): siRNA sense strand
gcagcugcuucaguuugug

SEQ ID NO: 954597 - RNA, 19 nt, Homo sapiens
  misc_RNA (1)...(19): siRNA sense strand
gcucugucauauauuuacu

SEQ ID NO: 954598 - RNA, 19 nt, Homo sapiens
  misc_RNA (1)...(19): siRNA sense strand
aggcaaauacaacuucuuc

SEQ ID NO: 954599 - RNA, 19 nt, Homo sapiens
  misc_RNA (1)...(19): siRNA sense strand
gagaguauuuccagaagua

SEQ ID NO: 954600 - RNA, 19 nt, Homo sapiens
  misc_RNA (1)...(19): siRNA sense strand
guguguaacuccuaaauua

SEQ ID NO: 954601 - RNA, 19 nt, Homo sapiens
  misc_RNA (1)...(19): siRNA sense strand
aaaccuagcuacuccaaua

SEQ ID NO: 954602 - RNA, 19 nt, Homo sapiens
  misc_RNA (1)...(19): siRNA sense strand
gaagagcccguaauuguaa

SEQ ID NO: 954603 - RNA, 19 nt, Homo sapiens
  misc_RNA (1)...(19): siRNA sense strand
caccuacgauuucuucuua

SEQ ID NO: 954604 - RNA, 19 nt, Homo sapiens
  misc_RNA (1)...(19): siRNA sense strand
gaagauauucuccagcuuu

SEQ ID NO: 954605 - RNA, 19 nt, Homo sapiens
  misc_RNA (1)...(19): siRNA sense strand
ggaagagcccguaauugua

SEQ ID NO: 954606 - RNA, 19 nt, Homo sapiens
  misc_RNA (1)...(19): siRNA sense strand
gaucguacuucguugguuu

SEQ ID NO: 954607 - RNA, 19 nt, Homo sapiens
  misc_RNA (1)...(19): siRNA sense strand
guccacaacuuucagauuu

SEQ ID NO: 954608 - RNA, 19 nt, Homo sapiens
  misc_RNA (1)...(19): siRNA sense strand
acacaugcuuugagaauuu

SEQ ID NO: 954609 - RNA, 19 nt, Homo sapiens
  misc_RNA (1)...(19): siRNA sense strand
agacugaugugaaagauga

SEQ ID NO: 954610 - RNA, 19 nt, Homo sapiens
  misc_RNA (1)...(19): siRNA sense strand
gaacagcauagcuuuggua

SEQ ID NO: 954611 - RNA, 19 nt, Homo sapiens
  misc_RNA (1)...(19): siRNA sense strand
gcaagaagccauuaacucu

SEQ ID NO: 954612 - RNA, 19 nt, Homo sapiens
  misc_RNA (1)...(19): siRNA sense strand
aauccaggcucaaugauaa

SEQ ID NO: 954613 - RNA, 19 nt, Homo sapiens
  misc_RNA (1)...(19): siRNA sense strand
gaauccaggcucaaugaua

SEQ ID NO: 954614 - RNA, 19 nt, Homo sapiens
  misc_RNA (1)...(19): siRNA sense strand
gcaagcaguuguauuucug

SEQ ID NO: 954615 - RNA, 19 nt, Homo sapiens
  misc_RNA (1)...(19): siRNA sense strand
ccacguaguccacaacuuu

SEQ ID NO: 954616 - RNA, 19 nt, Homo sapiens
  misc_RNA (1)...(19): siRNA sense strand
gaacaacuauaaggaagag

SEQ ID NO: 954617 - RNA, 19 nt, Homo sapiens
  misc_RNA (1)...(19): siRNA sense strand
acagaucccucuucaccua

SEQ ID NO: 954618 - RNA, 19 nt, Homo sapiens
  misc_RNA (1)...(19): siRNA sense strand
gacccagaguugucuaauu

SEQ ID NO: 954619 - RNA, 19 nt, Homo sapiens
  misc_RNA (1)...(19): siRNA sense strand
uaaggaagagcccguaauu

SEQ ID NO: 954620 - RNA, 19 nt, Homo sapiens
  misc_RNA (1)...(19): siRNA sense strand
aagaagccauuaacucuga

SEQ ID NO: 954621 - RNA, 19 nt, Homo sapiens
  misc_RNA (1)...(19): siRNA sense strand
gaagacugaugugaaagau

SEQ ID NO: 954622 - RNA, 19 nt, Homo sapiens
  misc_RNA (1)...(19): siRNA sense strand
caucguaucccaaguucua

SEQ ID NO: 954623 - RNA, 19 nt, Homo sapiens
  misc_RNA (1)...(19): siRNA sense strand
ucagacacaugcuuugaga

SEQ ID NO: 954624 - RNA, 19 nt, Homo sapiens
  misc_RNA (1)...(19): siRNA sense strand
guugcaagcaguuguauuu

SEQ ID NO: 954625 - RNA, 19 nt, Homo sapiens
  misc_RNA (1)...(19): siRNA sense strand
ccagaaguauggauauagu

SEQ ID NO: 954626 - RNA, 19 nt, Homo sapiens
  misc_RNA (1)...(19): siRNA sense strand
cagcauagcuuugguaucc

SEQ ID NO: 954627 - RNA, 19 nt, Homo sapiens
  misc_RNA (1)...(19): siRNA sense strand
gaauauaccaacucuccuu

SEQ ID NO: 954628 - RNA, 19 nt, Homo sapiens
  misc_RNA (1)...(19): siRNA sense strand
ggauauaguccacguguca

SEQ ID NO: 954629 - RNA, 19 nt, Homo sapiens
  misc_RNA (1)...(19): siRNA sense strand
acccagaguugucuaauug

SEQ ID NO: 954630 - RNA, 19 nt, Homo sapiens
  misc_RNA (1)...(19): siRNA sense strand
uaagagaguauuuccagaa

SEQ ID NO: 954631 - RNA, 19 nt, Homo sapiens
  misc_RNA (1)...(19): siRNA sense strand
guacaucguaucccaaguu

SEQ ID NO: 954632 - RNA, 19 nt, Homo sapiens
  misc_RNA (1)...(19): siRNA sense strand
ggccauagaugcagaaucc

SEQ ID NO: 954633 - RNA, 19 nt, Homo sapiens
  misc_RNA (1)...(19): siRNA sense strand
gaugucagcaacaaagaaa

SEQ ID NO: 954634 - RNA, 19 nt, Homo sapiens
  misc_RNA (1)...(19): siRNA sense strand
gacacaugcuuugagaauu

SEQ ID NO: 954635 - RNA, 19 nt, Homo sapiens
  misc_RNA (1)...(19): siRNA sense strand
cuacuccaauagcaauuaa

SEQ ID NO: 954636 - RNA, 19 nt, Homo sapiens
  misc_RNA (1)...(19): siRNA sense strand
cacaggcagugaacaacua

SEQ ID NO: 954637 - RNA, 19 nt, Homo sapiens
  misc_RNA (1)...(19): siRNA sense strand
accaaacaaucacuaguaa

SEQ ID NO: 954638 - RNA, 19 nt, Homo sapiens
  misc_RNA (1)...(19): siRNA sense strand
uaccaaacaaucacuagua

SEQ ID NO: 954639 - RNA, 19 nt, Homo sapiens
  misc_RNA (1)...(19): siRNA sense strand
cacaugcuuugagaauuua

SEQ ID NO: 954640 - RNA, 19 nt, Homo sapiens
  misc_RNA (1)...(19): siRNA sense strand
guacuucguugguuuuaaa

SEQ ID NO: 954641 - RNA, 19 nt, Homo sapiens
  misc_RNA (1)...(19): siRNA sense strand
auccacaaauuacccauua

SEQ ID NO: 954642 - RNA, 19 nt, Homo sapiens
  misc_RNA (1)...(19): siRNA sense strand
acaaagaacagcauagcuu

SEQ ID NO: 954643 - RNA, 19 nt, Homo sapiens
  misc_RNA (1)...(19): siRNA sense strand
cagaauccaggcucaauga

SEQ ID NO: 954644 - RNA, 19 nt, Homo sapiens
  misc_RNA (1)...(19): siRNA sense strand
aggaagagcccguaauugu

SEQ ID NO: 954645 - RNA, 19 nt, Homo sapiens
  misc_RNA (1)...(19): siRNA sense strand
ccagaguugucuaauugug

SEQ ID NO: 954646 - RNA, 19 nt, Homo sapiens
  misc_RNA (1)...(19): siRNA sense strand
gcagugaacaacuauaagg

SEQ ID NO: 954647 - RNA, 19 nt, Homo sapiens
  misc_RNA (1)...(19): siRNA sense strand
agaguugucuaauugugaa

SEQ ID NO: 954648 - RNA, 19 nt, Homo sapiens
  misc_RNA (1)...(19): siRNA sense strand
gcagaauccaggcucaaug

SEQ ID NO: 954649 - RNA, 19 nt, Homo sapiens
  misc_RNA (1)...(19): siRNA sense strand
gauuacacaaugggacuua

SEQ ID NO: 954650 - RNA, 19 nt, Homo sapiens
  misc_RNA (1)...(19): siRNA sense strand
uuagaacacuuugguaucu

SEQ ID NO: 954651 - RNA, 19 nt, Homo sapiens
  misc_RNA (1)...(19): siRNA sense strand
uaucccaaguucuaccaaa

SEQ ID NO: 954652 - RNA, 19 nt, Homo sapiens
  misc_RNA (1)...(19): siRNA sense strand
gcuuugagaauuuaacaga

SEQ ID NO: 954653 - RNA, 19 nt, Homo sapiens
  misc_RNA (1)...(19): siRNA sense strand
aaagugaugccgaauauac

SEQ ID NO: 954654 - RNA, 19 nt, Homo sapiens
  misc_RNA (1)...(19): siRNA sense strand
ccaaacaaucacuaguaaa

SEQ ID NO: 954655 - RNA, 19 nt, Homo sapiens
  misc_RNA (1)...(19): siRNA sense strand
uuuaacagaucccucuuca

SEQ ID NO: 954656 - RNA, 19 nt, Homo sapiens
  misc_RNA (1)...(19): siRNA sense strand
ccacaaauuacccauuauc

SEQ ID NO: 954657 - RNA, 19 nt, Homo sapiens
  misc_RNA (1)...(19): siRNA sense strand
aaagugaggaggccauaga

SEQ ID NO: 954658 - RNA, 19 nt, Homo sapiens
  misc_RNA (1)...(19): siRNA sense strand
ccuacgauuucuucuuaug

SEQ ID NO: 954659 - RNA, 19 nt, Homo sapiens
  misc_RNA (1)...(19): siRNA sense strand
agacacaugcuuugagaau

SEQ ID NO: 954660 - RNA, 19 nt, Homo sapiens
  misc_RNA (1)...(19): siRNA sense strand
acuuugguaucucugaaua

SEQ ID NO: 954661 - RNA, 19 nt, Homo sapiens
  misc_RNA (1)...(19): siRNA sense strand
accuacaccuccagaagua

SEQ ID NO: 954662 - RNA, 19 nt, Homo sapiens
  misc_RNA (1)...(19): siRNA sense strand
caggcucaaugauaauguu

SEQ ID NO: 954663 - RNA, 19 nt, Homo sapiens
  misc_RNA (1)...(19): siRNA sense strand
gagcaagaagccauuaacu

SEQ ID NO: 954664 - RNA, 19 nt, Homo sapiens
  misc_RNA (1)...(19): siRNA sense strand
gagaugucagcaacaaaga

SEQ ID NO: 954665 - RNA, 19 nt, Homo sapiens
  misc_RNA (1)...(19): siRNA sense strand
uccaaaaugugcacuaaaa

SEQ ID NO: 954666 - RNA, 19 nt, Homo sapiens
  misc_RNA (1)...(19): siRNA sense strand
aagcagugccacccaguaa

SEQ ID NO: 954667 - RNA, 19 nt, Homo sapiens
  misc_RNA (1)...(19): siRNA sense strand
uaaauucagacacaugcuu

SEQ ID NO: 954668 - RNA, 19 nt, Homo sapiens
  misc_RNA (1)...(19): siRNA sense strand
acacuuugguaucucugaa

SEQ ID NO: 954669 - RNA, 19 nt, Homo sapiens
  misc_RNA (1)...(19): siRNA sense strand
cagaguugucuaauuguga

SEQ ID NO: 954670 - RNA, 19 nt, Homo sapiens
  misc_RNA (1)...(19): siRNA sense strand
cgagaugucagcaacaaag

SEQ ID NO: 954671 - RNA, 19 nt, Homo sapiens
  misc_RNA (1)...(19): siRNA sense strand
aagagaguauuuccagaag

SEQ ID NO: 954672 - RNA, 19 nt, Homo sapiens
  misc_RNA (1)...(19): siRNA sense strand
ccucuucaccuacgauuuc

SEQ ID NO: 954673 - RNA, 19 nt, Homo sapiens
  misc_RNA (1)...(19): siRNA sense strand
aaauucagacacaugcuuu

SEQ ID NO: 954674 - RNA, 19 nt, Homo sapiens
  misc_RNA (1)...(19): siRNA sense strand
agaagacugaugugaaaga

SEQ ID NO: 954675 - RNA, 19 nt, Homo sapiens
  misc_RNA (1)...(19): siRNA sense strand
cuacgauuucuucuuauga

SEQ ID NO: 954676 - RNA, 19 nt, Homo sapiens
  misc_RNA (1)...(19): siRNA sense strand
aggcagugaacaacuauaa

SEQ ID NO: 954677 - RNA, 19 nt, Homo sapiens
  misc_RNA (1)...(19): siRNA sense strand
gaaaauuccaucuacaaag

SEQ ID NO: 954678 - RNA, 19 nt, Homo sapiens
  misc_RNA (1)...(19): siRNA sense strand
cacaaauuacccauuauca

SEQ ID NO: 954679 - RNA, 19 nt, Homo sapiens
  misc_RNA (1)...(19): siRNA sense strand
uuugguaccuacauucugu

SEQ ID NO: 954680 - RNA, 19 nt, Homo sapiens
  misc_RNA (1)...(19): siRNA sense strand
uuacacaaugggacuuaaa

SEQ ID NO: 954681 - RNA, 19 nt, Homo sapiens
  misc_RNA (1)...(19): siRNA sense strand
caagcaguuguauuucuga

SEQ ID NO: 954682 - RNA, 19 nt, Homo sapiens
  misc_RNA (1)...(19): siRNA sense strand
ccuuaaacauggacagaac

SEQ ID NO: 954683 - RNA, 19 nt, Homo sapiens
  misc_RNA (1)...(19): siRNA sense strand
gcagugccacccaguaaaa

SEQ ID NO: 954684 - RNA, 19 nt, Homo sapiens
  misc_RNA (1)...(19): siRNA sense strand
gauauucuccagcuuuuau

SEQ ID NO: 954685 - RNA, 19 nt, Homo sapiens
  misc_RNA (1)...(19): siRNA sense strand
cuugagcgguacaucguau

SEQ ID NO: 954686 - RNA, 19 nt, Homo sapiens
  misc_RNA (1)...(19): siRNA sense strand
ccacaacuuucagauuuug

SEQ ID NO: 954687 - RNA, 19 nt, Homo sapiens
  misc_RNA (1)...(19): siRNA sense strand
ugaacaacuauaaggaaga

SEQ ID NO: 954688 - RNA, 19 nt, Homo sapiens
  misc_RNA (1)...(19): siRNA sense strand
aaagcagugccacccagua

SEQ ID NO: 954689 - RNA, 19 nt, Homo sapiens
  misc_RNA (1)...(19): siRNA sense strand
uccaauagcaauuaaagca

SEQ ID NO: 954690 - RNA, 19 nt, Homo sapiens
  misc_RNA (1)...(19): siRNA sense strand
caacucaaaccuagcuacu

SEQ ID NO: 954691 - RNA, 19 nt, Homo sapiens
  misc_RNA (1)...(19): siRNA sense strand
ugcaagcaguuguauuucu

SEQ ID NO: 954692 - RNA, 19 nt, Homo sapiens
  misc_RNA (1)...(19): siRNA sense strand
uacaucguaucccaaguuc

SEQ ID NO: 954693 - RNA, 19 nt, Homo sapiens
  misc_RNA (1)...(19): siRNA sense strand
uauaaggaagagcccguaa

SEQ ID NO: 954694 - RNA, 19 nt, Homo sapiens
  misc_RNA (1)...(19): siRNA sense strand
aauauaccaacucuccuuu

SEQ ID NO: 954695 - RNA, 19 nt, Homo sapiens
  misc_RNA (1)...(19): siRNA sense strand
uaguccacgugucaagaaa

SEQ ID NO: 954696 - RNA, 19 nt, Homo sapiens
  misc_RNA (1)...(19): siRNA sense strand
aaugaagauuacacaaugg

SEQ ID NO: 954697 - RNA, 19 nt, Homo sapiens
  misc_RNA (1)...(19): siRNA sense strand
gaguauuuccagaaguaug

SEQ ID NO: 954698 - RNA, 19 nt, Homo sapiens
  misc_RNA (1)...(19): siRNA sense strand
uacgauuucuucuuaugag

SEQ ID NO: 954699 - RNA, 19 nt, Homo sapiens
  misc_RNA (1)...(19): siRNA sense strand
gagagucacagccuuauua

SEQ ID NO: 954700 - RNA, 19 nt, Homo sapiens
  misc_RNA (1)...(19): siRNA sense strand
gagcaaaacuugaaucauu

SEQ ID NO: 954701 - RNA, 19 nt, Homo sapiens
  misc_RNA (1)...(19): siRNA sense strand
ccagagaguuggaauaaug

SEQ ID NO: 954702 - RNA, 19 nt, Homo sapiens
  misc_RNA (1)...(19): siRNA sense strand
ccaagaauguugccaguug

SEQ ID NO: 954703 - RNA, 19 nt, Homo sapiens
  misc_RNA (1)...(19): siRNA sense strand
gcagaggaaccuuauauug

SEQ ID NO: 954704 - RNA, 19 nt, Homo sapiens
  misc_RNA (1)...(19): siRNA sense strand
agaggaaccuuauauugaa

SEQ ID NO: 954705 - RNA, 19 nt, Homo sapiens
  misc_RNA (1)...(19): siRNA sense strand
gaaagcacccagagaguug

SEQ ID NO: 954706 - RNA, 19 nt, Homo sapiens
  misc_RNA (1)...(19): siRNA sense strand
gauaagagcacuggcauug

SEQ ID NO: 954707 - RNA, 19 nt, Homo sapiens
  misc_RNA (1)...(19): siRNA sense strand
ggagccaggucgugagaaa

SEQ ID NO: 954708 - RNA, 19 nt, Homo sapiens
  misc_RNA (1)...(19): siRNA sense strand
gugaagaaacuacaacuuu

SEQ ID NO: 954709 - RNA, 19 nt, Homo sapiens
  misc_RNA (1)...(19): siRNA sense strand
uaaccaauccuaucaguga

SEQ ID NO: 954710 - RNA, 19 nt, Homo sapiens
  misc_RNA (1)...(19): siRNA sense strand
guaggacgaacaaguaaua

SEQ ID NO: 954711 - RNA, 19 nt, Homo sapiens
  misc_RNA (1)...(19): siRNA sense strand
cagaggaaccuuauauuga

SEQ ID NO: 954712 - RNA, 19 nt, Homo sapiens
  misc_RNA (1)...(19): siRNA sense strand
gaggaaccuuauauugaaa

SEQ ID NO: 954713 - RNA, 19 nt, Homo sapiens
  misc_RNA (1)...(19): siRNA sense strand
uuaaggagcuaguuacaca

SEQ ID NO: 954714 - RNA, 19 nt, Homo sapiens
  misc_RNA (1)...(19): siRNA sense strand
ccaguaggacgaacaagua

SEQ ID NO: 954715 - RNA, 19 nt, Homo sapiens
  misc_RNA (1)...(19): siRNA sense strand
ggaaagcacccagagaguu

SEQ ID NO: 954716 - RNA, 19 nt, Homo sapiens
  misc_RNA (1)...(19): siRNA sense strand
ggagacgcuucaacugaga

SEQ ID NO: 954717 - RNA, 19 nt, Homo sapiens
  misc_RNA (1)...(19): siRNA sense strand
caacccagcauauagagaa

SEQ ID NO: 954718 - RNA, 19 nt, Homo sapiens
  misc_RNA (1)...(19): siRNA sense strand
gaaccuaguacgaaguguu

SEQ ID NO: 954719 - RNA, 19 nt, Homo sapiens
  misc_RNA (1)...(19): siRNA sense strand
ccucagcucucaggugaaa

SEQ ID NO: 954720 - RNA, 19 nt, Homo sapiens
  misc_RNA (1)...(19): siRNA sense strand
ggagcuaguuacacaugga

SEQ ID NO: 954721 - RNA, 19 nt, Homo sapiens
  misc_RNA (1)...(19): siRNA sense strand
gcagcagaacauaaauuaa

SEQ ID NO: 954722 - RNA, 19 nt, Homo sapiens
  misc_RNA (1)...(19): siRNA sense strand
caagaauguugccaguugu

SEQ ID NO: 954723 - RNA, 19 nt, Homo sapiens
  misc_RNA (1)...(19): siRNA sense strand
ggacgaacaaguaauaaaa

SEQ ID NO: 954724 - RNA, 19 nt, Homo sapiens
  misc_RNA (1)...(19): siRNA sense strand
aaacgaagccuugcucuag

SEQ ID NO: 954725 - RNA, 19 nt, Homo sapiens
  misc_RNA (1)...(19): siRNA sense strand
uauccgagcauaacuguga

SEQ ID NO: 954726 - RNA, 19 nt, Homo sapiens
  misc_RNA (1)...(19): siRNA sense strand
ugacaucgaaacuguuauu

SEQ ID NO: 954727 - RNA, 19 nt, Homo sapiens
  misc_RNA (1)...(19): siRNA sense strand
gcaacaggcacuucuuagu

SEQ ID NO: 954728 - RNA, 19 nt, Homo sapiens
  misc_RNA (1)...(19): siRNA sense strand
guuacugaaucaucuacaa

SEQ ID NO: 954729 - RNA, 19 nt, Homo sapiens
  misc_RNA (1)...(19): siRNA sense strand
ucauacaagucaccuguca

SEQ ID NO: 954730 - RNA, 19 nt, Homo sapiens
  misc_RNA (1)...(19): siRNA sense strand
gcccuuaguccuucuaguu

SEQ ID NO: 954731 - RNA, 19 nt, Homo sapiens
  misc_RNA (1)...(19): siRNA sense strand
aaacugaggcaccaagaau

SEQ ID NO: 954732 - RNA, 19 nt, Homo sapiens
  misc_RNA (1)...(19): siRNA sense strand
ggagccagcugcaaaacaa

SEQ ID NO: 954733 - RNA, 19 nt, Homo sapiens
  misc_RNA (1)...(19): siRNA sense strand
caacugagaaugauguuuu

SEQ ID NO: 954734 - RNA, 19 nt, Homo sapiens
  misc_RNA (1)...(19): siRNA sense strand
cagcagcagcagaacauaa

SEQ ID NO: 954735 - RNA, 19 nt, Homo sapiens
  misc_RNA (1)...(19): siRNA sense strand
cuucgucugugccggcuua

SEQ ID NO: 954736 - RNA, 19 nt, Homo sapiens
  misc_RNA (1)...(19): siRNA sense strand
gacaucgaaacuguuauua

SEQ ID NO: 954737 - RNA, 19 nt, Homo sapiens
  misc_RNA (1)...(19): siRNA sense strand
ggugaaacugcgauagaaa

SEQ ID NO: 954738 - RNA, 19 nt, Homo sapiens
  misc_RNA (1)...(19): siRNA sense strand
uuaacaugcuguguaauuc

SEQ ID NO: 954739 - RNA, 19 nt, Homo sapiens
  misc_RNA (1)...(19): siRNA sense strand
uauugaagccucuaaagau

SEQ ID NO: 954740 - RNA, 19 nt, Homo sapiens
  misc_RNA (1)...(19): siRNA sense strand
cagcaacccagcauauaga

SEQ ID NO: 954741 - RNA, 19 nt, Homo sapiens
  misc_RNA (1)...(19): siRNA sense strand
ccaauccuaucagugaaga

SEQ ID NO: 954742 - RNA, 19 nt, Homo sapiens
  misc_RNA (1)...(19): siRNA sense strand
gauauugaagccucuaaag

SEQ ID NO: 954743 - RNA, 19 nt, Homo sapiens
  misc_RNA (1)...(19): siRNA sense strand
agucaccugucaccacuuu

SEQ ID NO: 954744 - RNA, 19 nt, Homo sapiens
  misc_RNA (1)...(19): siRNA sense strand
uaacugugacaccugauga

SEQ ID NO: 954745 - RNA, 19 nt, Homo sapiens
  misc_RNA (1)...(19): siRNA sense strand
ugucaccacuuuagauaag

SEQ ID NO: 954746 - RNA, 19 nt, Homo sapiens
  misc_RNA (1)...(19): siRNA sense strand
ggagagucacagccuuauu

SEQ ID NO: 954747 - RNA, 19 nt, Homo sapiens
  misc_RNA (1)...(19): siRNA sense strand
aacaugcuguguaauucua

SEQ ID NO: 954748 - RNA, 19 nt, Homo sapiens
  misc_RNA (1)...(19): siRNA sense strand
agcagcagaacauaaauua

SEQ ID NO: 954749 - RNA, 19 nt, Homo sapiens
  misc_RNA (1)...(19): siRNA sense strand
caaacugaggcaccaagaa

SEQ ID NO: 954750 - RNA, 19 nt, Homo sapiens
  misc_RNA (1)...(19): siRNA sense strand
caauguauaagucccaguu

SEQ ID NO: 954751 - RNA, 19 nt, Homo sapiens
  misc_RNA (1)...(19): siRNA sense strand
cagcagcagaacauaaauu

SEQ ID NO: 954752 - RNA, 19 nt, Homo sapiens
  misc_RNA (1)...(19): siRNA sense strand
ccgaagaguuuggaaagca

SEQ ID NO: 954753 - RNA, 19 nt, Homo sapiens
  misc_RNA (1)...(19): siRNA sense strand
ccugucaccacuuuagaua

SEQ ID NO: 954754 - RNA, 19 nt, Homo sapiens
  misc_RNA (1)...(19): siRNA sense strand
uuagagaaccuaguacgaa

SEQ ID NO: 954755 - RNA, 19 nt, Homo sapiens
  misc_RNA (1)...(19): siRNA sense strand
agaguuggaauaaugauga

SEQ ID NO: 954756 - RNA, 19 nt, Homo sapiens
  misc_RNA (1)...(19): siRNA sense strand
caccggaaauaggaaagaa

SEQ ID NO: 954757 - RNA, 19 nt, Homo sapiens
  misc_RNA (1)...(19): siRNA sense strand
gaagauauugaagccucua

SEQ ID NO: 954758 - RNA, 19 nt, Homo sapiens
  misc_RNA (1)...(19): siRNA sense strand
gagaaccuaguacgaagug

SEQ ID NO: 954759 - RNA, 19 nt, Homo sapiens
  misc_RNA (1)...(19): siRNA sense strand
ugugacaccugaugaagag

SEQ ID NO: 954760 - RNA, 19 nt, Homo sapiens
  misc_RNA (1)...(19): siRNA sense strand
uacagaaucagaagauguu

SEQ ID NO: 954761 - RNA, 19 nt, Homo sapiens
  misc_RNA (1)...(19): siRNA sense strand
ccagcaacccagcauauag

SEQ ID NO: 954762 - RNA, 19 nt, Homo sapiens
  misc_RNA (1)...(19): siRNA sense strand
cagagaguuggaauaauga

SEQ ID NO: 954763 - RNA, 19 nt, Homo sapiens
  misc_RNA (1)...(19): siRNA sense strand
cgaucaaaccaaacaaugu

SEQ ID NO: 954764 - RNA, 19 nt, Homo sapiens
  misc_RNA (1)...(19): siRNA sense strand
caccagagaugagagaaaa

SEQ ID NO: 954765 - RNA, 19 nt, Homo sapiens
  misc_RNA (1)...(19): siRNA sense strand
caggugaaacugcgauaga

SEQ ID NO: 954766 - RNA, 19 nt, Homo sapiens
  misc_RNA (1)...(19): siRNA sense strand
gaucucuacagaaucagaa

SEQ ID NO: 954767 - RNA, 19 nt, Homo sapiens
  misc_RNA (1)...(19): siRNA sense strand
agaauguugccaguuguua

SEQ ID NO: 954768 - RNA, 19 nt, Homo sapiens
  misc_RNA (1)...(19): siRNA sense strand
cuacagaaucagaagaugu

SEQ ID NO: 954769 - RNA, 19 nt, Homo sapiens
  misc_RNA (1)...(19): siRNA sense strand
caguaggacgaacaaguaa

SEQ ID NO: 954770 - RNA, 19 nt, Homo sapiens
  misc_RNA (1)...(19): siRNA sense strand
agagucacagccuuauuaa

SEQ ID NO: 954771 - RNA, 19 nt, Homo sapiens
  misc_RNA (1)...(19): siRNA sense strand
gcuguguaauucuagaucu

SEQ ID NO: 954772 - RNA, 19 nt, Homo sapiens
  misc_RNA (1)...(19): siRNA sense strand
caucaaagggaucaaaauu

SEQ ID NO: 954773 - RNA, 19 nt, Homo sapiens
  misc_RNA (1)...(19): siRNA sense strand
gaauguugccaguuguuac

SEQ ID NO: 954774 - RNA, 19 nt, Homo sapiens
  misc_RNA (1)...(19): siRNA sense strand
agucacagccuuauuaaaa

SEQ ID NO: 954775 - RNA, 19 nt, Homo sapiens
  misc_RNA (1)...(19): siRNA sense strand
gagucacagccuuauuaaa

SEQ ID NO: 954776 - RNA, 19 nt, Homo sapiens
  misc_RNA (1)...(19): siRNA sense strand
gcagcagcagcagaacaua

SEQ ID NO: 954777 - RNA, 19 nt, Homo sapiens
  misc_RNA (1)...(19): siRNA sense strand
ccucuaaagaucaccuaaa

SEQ ID NO: 954778 - RNA, 19 nt, Homo sapiens
  misc_RNA (1)...(19): siRNA sense strand
gagaguuggaauaaugaug

SEQ ID NO: 954779 - RNA, 19 nt, Homo sapiens
  misc_RNA (1)...(19): siRNA sense strand
caccagcaacccagcauau

SEQ ID NO: 954780 - RNA, 19 nt, Homo sapiens
  misc_RNA (1)...(19): siRNA sense strand
ccaccagagaugagagaaa

SEQ ID NO: 954781 - RNA, 19 nt, Homo sapiens
  misc_RNA (1)...(19): siRNA sense strand
uaacaugcuguguaauucu

SEQ ID NO: 954782 - RNA, 19 nt, Homo sapiens
  misc_RNA (1)...(19): siRNA sense strand
aggugaaacugcgauagaa

SEQ ID NO: 954783 - RNA, 19 nt, Homo sapiens
  misc_RNA (1)...(19): siRNA sense strand
auugaagccucuaaagauc

SEQ ID NO: 954784 - RNA, 19 nt, Homo sapiens
  misc_RNA (1)...(19): siRNA sense strand
acccagagaguuggaauaa

SEQ ID NO: 954785 - RNA, 19 nt, Homo sapiens
  misc_RNA (1)...(19): siRNA sense strand
acgcuucaacugagaauga

SEQ ID NO: 954786 - RNA, 19 nt, Homo sapiens
  misc_RNA (1)...(19): siRNA sense strand
ccaguuauugccaguagga

SEQ ID NO: 954787 - RNA, 19 nt, Homo sapiens
  misc_RNA (1)...(19): siRNA sense strand
aaagaucaccuaaaacgaa

SEQ ID NO: 954788 - RNA, 19 nt, Homo sapiens
  misc_RNA (1)...(19): siRNA sense strand
gcaacccagcauauagaga

SEQ ID NO: 954789 - RNA, 19 nt, Homo sapiens
  misc_RNA (1)...(19): siRNA sense strand
ucacaccggaaauaggaaa

SEQ ID NO: 954790 - RNA, 19 nt, Homo sapiens
  misc_RNA (1)...(19): siRNA sense strand
cuguguaauucuagaucua

SEQ ID NO: 954791 - RNA, 19 nt, Homo sapiens
  misc_RNA (1)...(19): siRNA sense strand
gacaccugaugaagagcaa

SEQ ID NO: 954792 - RNA, 19 nt, Homo sapiens
  misc_RNA (1)...(19): siRNA sense strand
ugaggcaccaagaauguug

SEQ ID NO: 954793 - RNA, 19 nt, Homo sapiens
  misc_RNA (1)...(19): siRNA sense strand
aaaagcugcuacaguauuc

SEQ ID NO: 954794 - RNA, 19 nt, Homo sapiens
  misc_RNA (1)...(19): siRNA sense strand
gccaguaggacgaacaagu

SEQ ID NO: 954795 - RNA, 19 nt, Homo sapiens
  misc_RNA (1)...(19): siRNA sense strand
gcagcagcagaacauaaau

SEQ ID NO: 954796 - RNA, 19 nt, Homo sapiens
  misc_RNA (1)...(19): siRNA sense strand
ucuagcagcagcagcagaa

SEQ ID NO: 954797 - RNA, 19 nt, Homo sapiens
  misc_RNA (1)...(19): siRNA sense strand
auauugaagccucuaaaga

SEQ ID NO: 954798 - RNA, 19 nt, Homo sapiens
  misc_RNA (1)...(19): siRNA sense strand
gcacccagagaguuggaau

SEQ ID NO: 954799 - RNA, 19 nt, Homo sapiens
  misc_RNA (1)...(19): siRNA sense strand
gaaagucucugguaagaag

SEQ ID NO: 954800 - RNA, 19 nt, Homo sapiens
  misc_RNA (1)...(19): siRNA sense strand
gaaaggaaagucucuggua

SEQ ID NO: 954801 - RNA, 19 nt, Homo sapiens
  misc_RNA (1)...(19): siRNA sense strand
aaaggaaagucucugguaa

SEQ ID NO: 954802 - RNA, 19 nt, Homo sapiens
  misc_RNA (1)...(19): siRNA sense strand
uaagaagagugaaagcaaa

SEQ ID NO: 954803 - RNA, 19 nt, Homo sapiens
  misc_RNA (1)...(19): siRNA sense strand
gaaccaagaauucggaaga

SEQ ID NO: 954804 - RNA, 19 nt, Homo sapiens
  misc_RNA (1)...(19): siRNA sense strand
gcaaagaagccaagaaguc

SEQ ID NO: 954805 - RNA, 19 nt, Homo sapiens
  misc_RNA (1)...(19): siRNA sense strand
acacagaggugcggaacua

SEQ ID NO: 954806 - RNA, 19 nt, Homo sapiens
  misc_RNA (1)...(19): siRNA sense strand
caagaagucugaagaacca

SEQ ID NO: 954807 - RNA, 19 nt, Homo sapiens
  misc_RNA (1)...(19): siRNA sense strand
ggagacgucuugagugaag

SEQ ID NO: 954808 - RNA, 19 nt, Homo sapiens
  misc_RNA (1)...(19): siRNA sense strand
ugaagaagcacaucaagga

SEQ ID NO: 954809 - RNA, 19 nt, Homo sapiens
  misc_RNA (1)...(19): siRNA sense strand
agacugagcuggacuuugc

SEQ ID NO: 954810 - RNA, 19 nt, Homo sapiens
  misc_RNA (1)...(19): siRNA sense strand
guaagaagagugaaagcaa

SEQ ID NO: 954811 - RNA, 19 nt, Homo sapiens
  misc_RNA (1)...(19): siRNA sense strand
gaagagugaaagcaaagaa

SEQ ID NO: 954812 - RNA, 19 nt, Homo sapiens
  misc_RNA (1)...(19): siRNA sense strand
gggcaucccucaaguacca

SEQ ID NO: 954813 - RNA, 19 nt, Homo sapiens
  misc_RNA (1)...(19): siRNA sense strand
gaacuauaucugugacgaa

SEQ ID NO: 954814 - RNA, 19 nt, Homo sapiens
  misc_RNA (1)...(19): siRNA sense strand
gcaacaagguuuucaugau

SEQ ID NO: 954815 - RNA, 19 nt, Homo sapiens
  misc_RNA (1)...(19): siRNA sense strand
cuauaucugugacgaaugu

SEQ ID NO: 954816 - RNA, 19 nt, Homo sapiens
  misc_RNA (1)...(19): siRNA sense strand
caaagaagccaagaagucu

SEQ ID NO: 954817 - RNA, 19 nt, Homo sapiens
  misc_RNA (1)...(19): siRNA sense strand
ccaagccuuugcaguguga

SEQ ID NO: 954818 - RNA, 19 nt, Homo sapiens
  misc_RNA (1)...(19): siRNA sense strand
caacaagguuuucaugauc

SEQ ID NO: 954819 - RNA, 19 nt, Homo sapiens
  misc_RNA (1)...(19): siRNA sense strand
agggagacgucuugaguga

SEQ ID NO: 954820 - RNA, 19 nt, Homo sapiens
  misc_RNA (1)...(19): siRNA sense strand
gcaugaagaagcacaucaa

SEQ ID NO: 954821 - RNA, 19 nt, Homo sapiens
  misc_RNA (1)...(19): siRNA sense strand
aggaaagucucugguaaga

SEQ ID NO: 954822 - RNA, 19 nt, Homo sapiens
  misc_RNA (1)...(19): siRNA sense strand
gaaaaugacaagaagcaaa

SEQ ID NO: 954823 - RNA, 19 nt, Homo sapiens
  misc_RNA (1)...(19): siRNA sense strand
ucaaguaccacaugaccaa

SEQ ID NO: 954824 - RNA, 19 nt, Homo sapiens
  misc_RNA (1)...(19): siRNA sense strand
ugacacagacccaggacaa

SEQ ID NO: 954825 - RNA, 19 nt, Homo sapiens
  misc_RNA (1)...(19): siRNA sense strand
gcgcugacggcaugaagaa

SEQ ID NO: 954826 - RNA, 19 nt, Homo sapiens
  misc_RNA (1)...(19): siRNA sense strand
acagugcgcuggcagucaa

SEQ ID NO: 954827 - RNA, 19 nt, Homo sapiens
  misc_RNA (1)...(19): siRNA sense strand
ccacaugaccaaacacaag

SEQ ID NO: 954828 - RNA, 19 nt, Homo sapiens
  misc_RNA (1)...(19): siRNA sense strand
gaauguggacaaaccuuca

SEQ ID NO: 954829 - RNA, 19 nt, Homo sapiens
  misc_RNA (1)...(19): siRNA sense strand
cagaggugcggaacuauau

SEQ ID NO: 954830 - RNA, 19 nt, Homo sapiens
  misc_RNA (1)...(19): siRNA sense strand
cgaguucagugaccuuucu

SEQ ID NO: 954831 - RNA, 19 nt, Homo sapiens
  misc_RNA (1)...(19): siRNA sense strand
ggaaagucucugguaagaa

SEQ ID NO: 954832 - RNA, 19 nt, Homo sapiens
  misc_RNA (1)...(19): siRNA sense strand
acgaguccuuugagccuua

SEQ ID NO: 954833 - RNA, 19 nt, Homo sapiens
  misc_RNA (1)...(19): siRNA sense strand
acagaggugcggaacuaua

SEQ ID NO: 954834 - RNA, 19 nt, Homo sapiens
  misc_RNA (1)...(19): siRNA sense strand
gaagucugaagaaccaaga

SEQ ID NO: 954835 - RNA, 19 nt, Homo sapiens
  misc_RNA (1)...(19): siRNA sense strand
ugacgaauguggacaaacc

SEQ ID NO: 954836 - RNA, 19 nt, Homo sapiens
  misc_RNA (1)...(19): siRNA sense strand
gaaagcaaagaagccaaga

SEQ ID NO: 954837 - RNA, 19 nt, Homo sapiens
  misc_RNA (1)...(19): siRNA sense strand
uaaaagacgaguucaguga

SEQ ID NO: 954838 - RNA, 19 nt, Homo sapiens
  misc_RNA (1)...(19): siRNA sense strand
gccaagaagucugaagaac

SEQ ID NO: 954839 - RNA, 19 nt, Homo sapiens
  misc_RNA (1)...(19): siRNA sense strand
gcccacaaccucaauguac

SEQ ID NO: 954840 - RNA, 19 nt, Homo sapiens
  misc_RNA (1)...(19): siRNA sense strand
gacccaagcccggauggaa

SEQ ID NO: 954841 - RNA, 19 nt, Homo sapiens
  misc_RNA (1)...(19): siRNA sense strand
aaccaagaauucggaagaa

SEQ ID NO: 954842 - RNA, 19 nt, Homo sapiens
  misc_RNA (1)...(19): siRNA sense strand
gaagcaaaaugcccagucu

SEQ ID NO: 954843 - RNA, 19 nt, Homo sapiens
  misc_RNA (1)...(19): siRNA sense strand
ugagggagacgucuugagu

SEQ ID NO: 954844 - RNA, 19 nt, Homo sapiens
  misc_RNA (1)...(19): siRNA sense strand
ugaagcucauccacacaga

SEQ ID NO: 954845 - RNA, 19 nt, Homo sapiens
  misc_RNA (1)...(19): siRNA sense strand
cagcgggcaucccucaagu

SEQ ID NO: 954846 - RNA, 19 nt, Homo sapiens
  misc_RNA (1)...(19): siRNA sense strand
gagcuucccaccaucuaca

SEQ ID NO: 954847 - RNA, 19 nt, Homo sapiens
  misc_RNA (1)...(19): siRNA sense strand
ccagggcaguugggugaga

SEQ ID NO: 954848 - RNA, 19 nt, Homo sapiens
  misc_RNA (1)...(19): siRNA sense strand
aagcaaagaagccaagaag

SEQ ID NO: 954849 - RNA, 19 nt, Homo sapiens
  misc_RNA (1)...(19): siRNA sense strand
gaaggcccacaaccucaau

SEQ ID NO: 954850 - RNA, 19 nt, Homo sapiens
  misc_RNA (1)...(19): siRNA sense strand
gguaagaagagugaaagca

SEQ ID NO: 954851 - RNA, 19 nt, Homo sapiens
  misc_RNA (1)...(19): siRNA sense strand
cccacaaccucaauguaca

SEQ ID NO: 954852 - RNA, 19 nt, Homo sapiens
  misc_RNA (1)...(19): siRNA sense strand
ucugaagaaccaagaauuc

SEQ ID NO: 954853 - RNA, 19 nt, Homo sapiens
  misc_RNA (1)...(19): siRNA sense strand
aagaagccaagaagucuga

SEQ ID NO: 954854 - RNA, 19 nt, Homo sapiens
  misc_RNA (1)...(19): siRNA sense strand
cuuugagccuuacccagaa

SEQ ID NO: 954855 - RNA, 19 nt, Homo sapiens
  misc_RNA (1)...(19): siRNA sense strand
ggcccacaaccucaaugua

SEQ ID NO: 954856 - RNA, 19 nt, Homo sapiens
  misc_RNA (1)...(19): siRNA sense strand
aacacaaggcugagacuga

SEQ ID NO: 954857 - RNA, 19 nt, Homo sapiens
  misc_RNA (1)...(19): siRNA sense strand
aagcccggauggaagaaga

SEQ ID NO: 954858 - RNA, 19 nt, Homo sapiens
  misc_RNA (1)...(19): siRNA sense strand
cagcuuccaucuucaaccu

SEQ ID NO: 954859 - RNA, 19 nt, Homo sapiens
  misc_RNA (1)...(19): siRNA sense strand
gaacucaccuacucuagaa

SEQ ID NO: 954860 - RNA, 19 nt, Homo sapiens
  misc_RNA (1)...(19): siRNA sense strand
gaaaugaugcucagaaguu

SEQ ID NO: 954861 - RNA, 19 nt, Homo sapiens
  misc_RNA (1)...(19): siRNA sense strand
gaaguggacugaaacacaa

SEQ ID NO: 954862 - RNA, 19 nt, Homo sapiens
  misc_RNA (1)...(19): siRNA sense strand
gcucagaaguuuaucuaug

SEQ ID NO: 954863 - RNA, 19 nt, Homo sapiens
  misc_RNA (1)...(19): siRNA sense strand
cgagaagacugaagugguu

SEQ ID NO: 954864 - RNA, 19 nt, Homo sapiens
  misc_RNA (1)...(19): siRNA sense strand
cuaaauggguggaaguuga

SEQ ID NO: 954865 - RNA, 19 nt, Homo sapiens
  misc_RNA (1)...(19): siRNA sense strand
gagaaacacugcagaagcu

SEQ ID NO: 954866 - RNA, 19 nt, Homo sapiens
  misc_RNA (1)...(19): siRNA sense strand
ggcaucaucucuccuguug

SEQ ID NO: 954867 - RNA, 19 nt, Homo sapiens
  misc_RNA (1)...(19): siRNA sense strand
acacaagauucuagucaaa

SEQ ID NO: 954868 - RNA, 19 nt, Homo sapiens
  misc_RNA (1)...(19): siRNA sense strand
cagcagaacucaccuacuc

SEQ ID NO: 954869 - RNA, 19 nt, Homo sapiens
  misc_RNA (1)...(19): siRNA sense strand
agaaaucccuagagccaaa

SEQ ID NO: 954870 - RNA, 19 nt, Homo sapiens
  misc_RNA (1)...(19): siRNA sense strand
ggugaugccuacaagaaga

SEQ ID NO: 954871 - RNA, 19 nt, Homo sapiens
  misc_RNA (1)...(19): siRNA sense strand
ggacugaaacacaagauuc

SEQ ID NO: 954872 - RNA, 19 nt, Homo sapiens
  misc_RNA (1)...(19): siRNA sense strand
cagaaggaguggaaagaga

SEQ ID NO: 954873 - RNA, 19 nt, Homo sapiens
  misc_RNA (1)...(19): siRNA sense strand
uggcagaacuugcuaccaa

SEQ ID NO: 954874 - RNA, 19 nt, Homo sapiens
  misc_RNA (1)...(19): siRNA sense strand
aagaggaaguggacugaaa

SEQ ID NO: 954875 - RNA, 19 nt, Homo sapiens
  misc_RNA (1)...(19): siRNA sense strand
ggaaguggacugaaacaca

SEQ ID NO: 954876 - RNA, 19 nt, Homo sapiens
  misc_RNA (1)...(19): siRNA sense strand
gccaaggacuacaugaaug

SEQ ID NO: 954877 - RNA, 19 nt, Homo sapiens
  misc_RNA (1)...(19): siRNA sense strand
acaggaagguacacaguug

SEQ ID NO: 954878 - RNA, 19 nt, Homo sapiens
  misc_RNA (1)...(19): siRNA sense strand
gaaacacugcagaagcuaa

SEQ ID NO: 954879 - RNA, 19 nt, Homo sapiens
  misc_RNA (1)...(19): siRNA sense strand
ccagagcauucgcuacuug

SEQ ID NO: 954880 - RNA, 19 nt, Homo sapiens
  misc_RNA (1)...(19): siRNA sense strand
augaauggaucgcuaauga

SEQ ID NO: 954881 - RNA, 19 nt, Homo sapiens
  misc_RNA (1)...(19): siRNA sense strand
gcagaacucaccuacucua

SEQ ID NO: 954882 - RNA, 19 nt, Homo sapiens
  misc_RNA (1)...(19): siRNA sense strand
gaacaggaagguacacagu

SEQ ID NO: 954883 - RNA, 19 nt, Homo sapiens
  misc_RNA (1)...(19): siRNA sense strand
gaauggaucgcuaaugaca

SEQ ID NO: 954884 - RNA, 19 nt, Homo sapiens
  misc_RNA (1)...(19): siRNA sense strand
cucagaaguuuaucuauga

SEQ ID NO: 954885 - RNA, 19 nt, Homo sapiens
  misc_RNA (1)...(19): siRNA sense strand
gaagacaucacccaaaucg

SEQ ID NO: 954886 - RNA, 19 nt, Homo sapiens
  misc_RNA (1)...(19): siRNA sense strand
aaaugaugcucagaaguuu

SEQ ID NO: 954887 - RNA, 19 nt, Homo sapiens
  misc_RNA (1)...(19): siRNA sense strand
gagcauucgcuacuuggua

SEQ ID NO: 954888 - RNA, 19 nt, Homo sapiens
  misc_RNA (1)...(19): siRNA sense strand
caucaucucuccuguuggu

SEQ ID NO: 954889 - RNA, 19 nt, Homo sapiens
  misc_RNA (1)...(19): siRNA sense strand
caagaagaaaggacucauu

SEQ ID NO: 954890 - RNA, 19 nt, Homo sapiens
  misc_RNA (1)...(19): siRNA sense strand
uaagacaccaucaagagaa

SEQ ID NO: 954891 - RNA, 19 nt, Homo sapiens
  misc_RNA (1)...(19): siRNA sense strand
gguaccagaucuuguccaa

SEQ ID NO: 954892 - RNA, 19 nt, Homo sapiens
  misc_RNA (1)...(19): siRNA sense strand
cugcagaagcuaagacaua

SEQ ID NO: 954893 - RNA, 19 nt, Homo sapiens
  misc_RNA (1)...(19): siRNA sense strand
guccaagaauacauugaaa

SEQ ID NO: 954894 - RNA, 19 nt, Homo sapiens
  misc_RNA (1)...(19): siRNA sense strand
ggguggaaguugauacaug

SEQ ID NO: 954895 - RNA, 19 nt, Homo sapiens
  misc_RNA (1)...(19): siRNA sense strand
aaucggaugugcuguggaa

SEQ ID NO: 954896 - RNA, 19 nt, Homo sapiens
  misc_RNA (1)...(19): siRNA sense strand
uaccaagaauucuaaaugg

SEQ ID NO: 954897 - RNA, 19 nt, Homo sapiens
  misc_RNA (1)...(19): siRNA sense strand
ggaagaggaaguggacuga

SEQ ID NO: 954898 - RNA, 19 nt, Homo sapiens
  misc_RNA (1)...(19): siRNA sense strand
gaagguacacaguugucaa

SEQ ID NO: 954899 - RNA, 19 nt, Homo sapiens
  misc_RNA (1)...(19): siRNA sense strand
ccuuugcuguucccaauuu

SEQ ID NO: 954900 - RNA, 19 nt, Homo sapiens
  misc_RNA (1)...(19): siRNA sense strand
gcuaagacaccaucaagag

SEQ ID NO: 954901 - RNA, 19 nt, Homo sapiens
  misc_RNA (1)...(19): siRNA sense strand
uguuugagcuggccaagga

SEQ ID NO: 954902 - RNA, 19 nt, Homo sapiens
  misc_RNA (1)...(19): siRNA sense strand
gaucgcuaaugacaucuca

SEQ ID NO: 954903 - RNA, 19 nt, Homo sapiens
  misc_RNA (1)...(19): siRNA sense strand
gaaaggccuggaaggaaga

SEQ ID NO: 954904 - RNA, 19 nt, Homo sapiens
  misc_RNA (1)...(19): siRNA sense strand
gaaguugauacaugggaaa

SEQ ID NO: 954905 - RNA, 19 nt, Homo sapiens
  misc_RNA (1)...(19): siRNA sense strand
cuaccaagaauucuaaaug

SEQ ID NO: 954906 - RNA, 19 nt, Homo sapiens
  misc_RNA (1)...(19): siRNA sense strand
ccaaaucguggccaacuau

SEQ ID NO: 954907 - RNA, 19 nt, Homo sapiens
  misc_RNA (1)...(19): siRNA sense strand
aaacacaagauucuaguca

SEQ ID NO: 954908 - RNA, 19 nt, Homo sapiens
  misc_RNA (1)...(19): siRNA sense strand
gaaacaccggagcaacauu

SEQ ID NO: 954909 - RNA, 19 nt, Homo sapiens
  misc_RNA (1)...(19): siRNA sense strand
ggccaaggacuacaugaau

SEQ ID NO: 954910 - RNA, 19 nt, Homo sapiens
  misc_RNA (1)...(19): siRNA sense strand
ugaaugaauggaucgcuaa

SEQ ID NO: 954911 - RNA, 19 nt, Homo sapiens
  misc_RNA (1)...(19): siRNA sense strand
gaagugguucuccuugcuu

SEQ ID NO: 954912 - RNA, 19 nt, Homo sapiens
  misc_RNA (1)...(19): siRNA sense strand
ggaaaugaugcucagaagu

SEQ ID NO: 954913 - RNA, 19 nt, Homo sapiens
  misc_RNA (1)...(19): siRNA sense strand
aagacaccaucaagagaaa

SEQ ID NO: 954914 - RNA, 19 nt, Homo sapiens
  misc_RNA (1)...(19): siRNA sense strand
uagaaaggccuggaaggaa

SEQ ID NO: 954915 - RNA, 19 nt, Homo sapiens
  misc_RNA (1)...(19): siRNA sense strand
ggaaacaccggagcaacau

SEQ ID NO: 954916 - RNA, 19 nt, Homo sapiens
  misc_RNA (1)...(19): siRNA sense strand
guggaagagugaagacauc

SEQ ID NO: 954917 - RNA, 19 nt, Homo sapiens
  misc_RNA (1)...(19): siRNA sense strand
guugauacaugggaaaguc

SEQ ID NO: 954918 - RNA, 19 nt, Homo sapiens
  misc_RNA (1)...(19): siRNA sense strand
gguacacaguugucaaagg

SEQ ID NO: 954919 - RNA, 19 nt, Homo sapiens
  misc_RNA (1)...(19): siRNA sense strand
gacaccaucaagagaaauu

SEQ ID NO: 954920 - RNA, 19 nt, Homo sapiens
  misc_RNA (1)...(19): siRNA sense strand
caaaagcugugccaaaggu

SEQ ID NO: 954921 - RNA, 19 nt, Homo sapiens
  misc_RNA (1)...(19): siRNA sense strand
gaagaggaaguggacugaa

SEQ ID NO: 954922 - RNA, 19 nt, Homo sapiens
  misc_RNA (1)...(19): siRNA sense strand
cuaagacaccaucaagaga

SEQ ID NO: 954923 - RNA, 19 nt, Homo sapiens
  misc_RNA (1)...(19): siRNA sense strand
gcuugugguucauucaauc

SEQ ID NO: 954924 - RNA, 19 nt, Homo sapiens
  misc_RNA (1)...(19): siRNA sense strand
ucaaucccaucaccaacau

SEQ ID NO: 954925 - RNA, 19 nt, Homo sapiens
  misc_RNA (1)...(19): siRNA sense strand
cccaaaucguggccaacua

SEQ ID NO: 954926 - RNA, 19 nt, Homo sapiens
  misc_RNA (1)...(19): siRNA sense strand
gaaacacaagauucuaguc

SEQ ID NO: 954927 - RNA, 19 nt, Homo sapiens
  misc_RNA (1)...(19): siRNA sense strand
agaaauuggaggcuaguga

SEQ ID NO: 954928 - RNA, 19 nt, Homo sapiens
  misc_RNA (1)...(19): siRNA sense strand
aagaagaaaggacucauuc

SEQ ID NO: 954929 - RNA, 19 nt, Homo sapiens
  misc_RNA (1)...(19): siRNA sense strand
aaacaccggagcaacauuc

SEQ ID NO: 954930 - RNA, 19 nt, Homo sapiens
  misc_RNA (1)...(19): siRNA sense strand
guccuuugcuguucccaau

SEQ ID NO: 954931 - RNA, 19 nt, Homo sapiens
  misc_RNA (1)...(19): siRNA sense strand
cuagaaaggccuggaagga

SEQ ID NO: 954932 - RNA, 19 nt, Homo sapiens
  misc_RNA (1)...(19): siRNA sense strand
gaaugaauggaucgcuaau

SEQ ID NO: 954933 - RNA, 19 nt, Homo sapiens
  misc_RNA (1)...(19): siRNA sense strand
uggaaaugaugcucagaag

SEQ ID NO: 954934 - RNA, 19 nt, Homo sapiens
  misc_RNA (1)...(19): siRNA sense strand
aacacaagauucuagucaa

SEQ ID NO: 954935 - RNA, 19 nt, Homo sapiens
  misc_RNA (1)...(19): siRNA sense strand
gaaguuuaucuaugaaucg

SEQ ID NO: 954936 - RNA, 19 nt, Homo sapiens
  misc_RNA (1)...(19): siRNA sense strand
ccaauuuguggaagaguga

SEQ ID NO: 954937 - RNA, 19 nt, Homo sapiens
  misc_RNA (1)...(19): siRNA sense strand
aaacaaaagcugugccaaa

SEQ ID NO: 954938 - RNA, 19 nt, Homo sapiens
  misc_RNA (1)...(19): siRNA sense strand
ugcagaagcuaagacauag

SEQ ID NO: 954939 - RNA, 19 nt, Homo sapiens
  misc_RNA (1)...(19): siRNA sense strand
ggaagguacacaguuguca

SEQ ID NO: 954940 - RNA, 19 nt, Homo sapiens
  misc_RNA (1)...(19): siRNA sense strand
cggaugugcuguggaaaca

SEQ ID NO: 954941 - RNA, 19 nt, Homo sapiens
  misc_RNA (1)...(19): siRNA sense strand
ccaaggacuacaugaaugg

SEQ ID NO: 954942 - RNA, 19 nt, Homo sapiens
  misc_RNA (1)...(19): siRNA sense strand
uaaauggguggaaguugau

SEQ ID NO: 954943 - RNA, 19 nt, Homo sapiens
  misc_RNA (1)...(19): siRNA sense strand
gccagagcauucgcuacuu

SEQ ID NO: 954944 - RNA, 19 nt, Homo sapiens
  misc_RNA (1)...(19): siRNA sense strand
gggcucauauguguuacuc

SEQ ID NO: 954945 - RNA, 19 nt, Homo sapiens
  misc_RNA (1)...(19): siRNA sense strand
caugggaaagucuucagaa

SEQ ID NO: 954946 - RNA, 19 nt, Homo sapiens
  misc_RNA (1)...(19): siRNA sense strand
ggucaucauggcagaacuu

SEQ ID NO: 954947 - RNA, 19 nt, Homo sapiens
  misc_RNA (1)...(19): siRNA sense strand
gagagugaagacaggaaug

SEQ ID NO: 954948 - RNA, 19 nt, Homo sapiens
  misc_RNA (1)...(19): siRNA sense strand
cagauuuauuggaguccuu

SEQ ID NO: 954949 - RNA, 19 nt, Homo sapiens
  misc_RNA (1)...(19): siRNA sense strand
ugaagugguucuccuugcu

SEQ ID NO: 954950 - RNA, 19 nt, Homo sapiens
  misc_RNA (1)...(19): siRNA sense strand
ugacaucucauccacaaaa

SEQ ID NO: 954951 - RNA, 19 nt, Homo sapiens
  misc_RNA (1)...(19): siRNA sense strand
gugcuaagacaccaucaag

SEQ ID NO: 954952 - RNA, 19 nt, Homo sapiens
  misc_RNA (1)...(19): siRNA sense strand
gaggaaguggacugaaaca

SEQ ID NO: 954953 - RNA, 19 nt, Homo sapiens
  misc_RNA (1)...(19): siRNA sense strand
agaacucaccuacucuaga

SEQ ID NO: 954954 - RNA, 19 nt, Homo sapiens
  misc_RNA (1)...(19): siRNA sense strand
ugaaacacaagauucuagu

SEQ ID NO: 954955 - RNA, 19 nt, Homo sapiens
  misc_RNA (1)...(19): siRNA sense strand
uguccaagaauacauugaa

SEQ ID NO: 954956 - RNA, 19 nt, Homo sapiens
  misc_RNA (1)...(19): siRNA sense strand
ggccagagcauucgcuacu

SEQ ID NO: 954957 - RNA, 19 nt, Homo sapiens
  misc_RNA (1)...(19): siRNA sense strand
aaugaugcucagaaguuua

SEQ ID NO: 954958 - RNA, 19 nt, Homo sapiens
  misc_RNA (1)...(19): siRNA sense strand
ucuccuugcuugugguuca

SEQ ID NO: 954959 - RNA, 19 nt, Homo sapiens
  misc_RNA (1)...(19): siRNA sense strand
gagaaacccuaucaaugua

SEQ ID NO: 954960 - RNA, 19 nt, Homo sapiens
  misc_RNA (1)...(19): siRNA sense strand
gcaaagccuucauucagaa

SEQ ID NO: 954961 - RNA, 19 nt, Homo sapiens
  misc_RNA (1)...(19): siRNA sense strand
gggaaaagcuucacuaaga

SEQ ID NO: 954962 - RNA, 19 nt, Homo sapiens
  misc_RNA (1)...(19): siRNA sense strand
cagagaaacuuguaaacga

SEQ ID NO: 954963 - RNA, 19 nt, Homo sapiens
  misc_RNA (1)...(19): siRNA sense strand
gagccacacuggagagaaa

SEQ ID NO: 954964 - RNA, 19 nt, Homo sapiens
  misc_RNA (1)...(19): siRNA sense strand
gagagaaacccuaucaaug

SEQ ID NO: 954965 - RNA, 19 nt, Homo sapiens
  misc_RNA (1)...(19): siRNA sense strand
ggucaagccugaaugaaca

SEQ ID NO: 954966 - RNA, 19 nt, Homo sapiens
  misc_RNA (1)...(19): siRNA sense strand
ggcaaagccuucauucaga

SEQ ID NO: 954967 - RNA, 19 nt, Homo sapiens
  misc_RNA (1)...(19): siRNA sense strand
gaagccauaugaaugugaa

SEQ ID NO: 954968 - RNA, 19 nt, Homo sapiens
  misc_RNA (1)...(19): siRNA sense strand
ggagagaaacccuaucaau

SEQ ID NO: 954969 - RNA, 19 nt, Homo sapiens
  misc_RNA (1)...(19): siRNA sense strand
ggagaagccauaugaaugu

SEQ ID NO: 954970 - RNA, 19 nt, Homo sapiens
  misc_RNA (1)...(19): siRNA sense strand
gggagaagccauaugaaug

SEQ ID NO: 954971 - RNA, 19 nt, Homo sapiens
  misc_RNA (1)...(19): siRNA sense strand
agagaaacccuaucaaugu

SEQ ID NO: 954972 - RNA, 19 nt, Homo sapiens
  misc_RNA (1)...(19): siRNA sense strand
gauacacacuggagagaag

SEQ ID NO: 954973 - RNA, 19 nt, Homo sapiens
  misc_RNA (1)...(19): siRNA sense strand
ucagugcaguaaacucuuu

SEQ ID NO: 954974 - RNA, 19 nt, Homo sapiens
  misc_RNA (1)...(19): siRNA sense strand
ccauaugaaugcaaagugu

SEQ ID NO: 954975 - RNA, 19 nt, Homo sapiens
  misc_RNA (1)...(19): siRNA sense strand
ggagagaagcgcuaucagu

SEQ ID NO: 954976 - RNA, 19 nt, Homo sapiens
  misc_RNA (1)...(19): siRNA sense strand
gaaacccuaucaauguaag

SEQ ID NO: 954977 - RNA, 19 nt, Homo sapiens
  misc_RNA (1)...(19): siRNA sense strand
ggaggucaagccugaauga

SEQ ID NO: 954978 - RNA, 19 nt, Homo sapiens
  misc_RNA (1)...(19): siRNA sense strand
ggauagcaaacuccaaaga

SEQ ID NO: 954979 - RNA, 19 nt, Homo sapiens
  misc_RNA (1)...(19): siRNA sense strand
auagcaaacuccaaagaga

SEQ ID NO: 954980 - RNA, 19 nt, Homo sapiens
  misc_RNA (1)...(19): siRNA sense strand
gagaagccauaugaaugug

SEQ ID NO: 954981 - RNA, 19 nt, Homo sapiens
  misc_RNA (1)...(19): siRNA sense strand
cgccacaggugcaaugaau

SEQ ID NO: 954982 - RNA, 19 nt, Homo sapiens
  misc_RNA (1)...(19): siRNA sense strand
ccacaggugcaaugaaugu

SEQ ID NO: 954983 - RNA, 19 nt, Homo sapiens
  misc_RNA (1)...(19): siRNA sense strand
ccauaugaaugugaagaau

SEQ ID NO: 954984 - RNA, 19 nt, Homo sapiens
  misc_RNA (1)...(19): siRNA sense strand
gauagcaaacuccaaagag

SEQ ID NO: 954985 - RNA, 19 nt, Homo sapiens
  misc_RNA (1)...(19): siRNA sense strand
ggugagaaacccuaucagu

SEQ ID NO: 954986 - RNA, 19 nt, Homo sapiens
  misc_RNA (1)...(19): siRNA sense strand
aagcggacacuucuuaaga

SEQ ID NO: 954987 - RNA, 19 nt, Homo sapiens
  misc_RNA (1)...(19): siRNA sense strand
ggaaaagcuucacuaagag

SEQ ID NO: 954988 - RNA, 19 nt, Homo sapiens
  misc_RNA (1)...(19): siRNA sense strand
aguccacacuggugagaaa

SEQ ID NO: 954989 - RNA, 19 nt, Homo sapiens
  misc_RNA (1)...(19): siRNA sense strand
ucauugagcaccagagaau

SEQ ID NO: 954990 - RNA, 19 nt, Homo sapiens
  misc_RNA (1)...(19): siRNA sense strand
caaacuccaaagagaugua

SEQ ID NO: 954991 - RNA, 19 nt, Homo sapiens
  misc_RNA (1)...(19): siRNA sense strand
gauguaucuuuggauucua

SEQ ID NO: 954992 - RNA, 19 nt, Homo sapiens
  misc_RNA (1)...(19): siRNA sense strand
cauaugaaugugaagaaug

SEQ ID NO: 954993 - RNA, 19 nt, Homo sapiens
  misc_RNA (1)...(19): siRNA sense strand
ggauacacacuggagagaa

SEQ ID NO: 954994 - RNA, 19 nt, Homo sapiens
  misc_RNA (1)...(19): siRNA sense strand
cgagacagcaaggcagaaa

SEQ ID NO: 954995 - RNA, 19 nt, Homo sapiens
  misc_RNA (1)...(19): siRNA sense strand
agaaacccuaucaauguaa

SEQ ID NO: 954996 - RNA, 19 nt, Homo sapiens
  misc_RNA (1)...(19): siRNA sense strand
uggccucacucgacacaga

SEQ ID NO: 954997 - RNA, 19 nt, Homo sapiens
  misc_RNA (1)...(19): siRNA sense strand
uggcaaagccuucauucag

SEQ ID NO: 954998 - RNA, 19 nt, Homo sapiens
  misc_RNA (1)...(19): siRNA sense strand
gccauaugaaugugaagaa

SEQ ID NO: 954999 - RNA, 19 nt, Homo sapiens
  misc_RNA (1)...(19): siRNA sense strand
ccucagcucaugccuuguu

SEQ ID NO: 955000 - RNA, 19 nt, Homo sapiens
  misc_RNA (1)...(19): siRNA sense strand
uagcaaacuccaaagagau

SEQ ID NO: 955001 - RNA, 19 nt, Homo sapiens
  misc_RNA (1)...(19): siRNA sense strand
gugcaaugaaugugggaaa

SEQ ID NO: 955002 - RNA, 19 nt, Homo sapiens
  misc_RNA (1)...(19): siRNA sense strand
ucacuaagaguucaguacu

SEQ ID NO: 955003 - RNA, 19 nt, Homo sapiens
  misc_RNA (1)...(19): siRNA sense strand
agagaagcgcuaucagugu

SEQ ID NO: 955004 - RNA, 19 nt, Homo sapiens
  misc_RNA (1)...(19): siRNA sense strand
gaggucaagccugaaugaa

SEQ ID NO: 955005 - RNA, 19 nt, Homo sapiens
  misc_RNA (1)...(19): siRNA sense strand
gaaaagcagcaggcacauu

SEQ ID NO: 955006 - RNA, 19 nt, Homo sapiens
  misc_RNA (1)...(19): siRNA sense strand
gaggugagcugcaugaaga

SEQ ID NO: 955007 - RNA, 19 nt, Homo sapiens
  misc_RNA (1)...(19): siRNA sense strand
gcaaugugguucugaauca

SEQ ID NO: 955008 - RNA, 19 nt, Homo sapiens
  misc_RNA (1)...(19): siRNA sense strand
gauaugagaaugagaauca

SEQ ID NO: 955009 - RNA, 19 nt, Homo sapiens
  misc_RNA (1)...(19): siRNA sense strand
gcucgaaaccguucuaaga

SEQ ID NO: 955010 - RNA, 19 nt, Homo sapiens
  misc_RNA (1)...(19): siRNA sense strand
gcaagucugccauuaguga

SEQ ID NO: 955011 - RNA, 19 nt, Homo sapiens
  misc_RNA (1)...(19): siRNA sense strand
caagaggaaggcagaauuu

SEQ ID NO: 955012 - RNA, 19 nt, Homo sapiens
  misc_RNA (1)...(19): siRNA sense strand
ggaaaacucuucugcacuu

SEQ ID NO: 955013 - RNA, 19 nt, Homo sapiens
  misc_RNA (1)...(19): siRNA sense strand
acagagaaagucaguguua

SEQ ID NO: 955014 - RNA, 19 nt, Homo sapiens
  misc_RNA (1)...(19): siRNA sense strand
gaggaaggcagaauuugaa

SEQ ID NO: 955015 - RNA, 19 nt, Homo sapiens
  misc_RNA (1)...(19): siRNA sense strand
guucuaagacugccuugua

SEQ ID NO: 955016 - RNA, 19 nt, Homo sapiens
  misc_RNA (1)...(19): siRNA sense strand
caacaguacugcgcaaaca

SEQ ID NO: 955017 - RNA, 19 nt, Homo sapiens
  misc_RNA (1)...(19): siRNA sense strand
ggagcgauuuguaguaaca

SEQ ID NO: 955018 - RNA, 19 nt, Homo sapiens
  misc_RNA (1)...(19): siRNA sense strand
gagcagaaugugagaaaga

SEQ ID NO: 955019 - RNA, 19 nt, Homo sapiens
  misc_RNA (1)...(19): siRNA sense strand
gcaugaagauggaggaaaa

SEQ ID NO: 955020 - RNA, 19 nt, Homo sapiens
  misc_RNA (1)...(19): siRNA sense strand
guucgcaagucugccauua

SEQ ID NO: 955021 - RNA, 19 nt, Homo sapiens
  misc_RNA (1)...(19): siRNA sense strand
gaagccaacaucccacuug

SEQ ID NO: 955022 - RNA, 19 nt, Homo sapiens
  misc_RNA (1)...(19): siRNA sense strand
ggaggcauaucuuccugau

SEQ ID NO: 955023 - RNA, 19 nt, Homo sapiens
  misc_RNA (1)...(19): siRNA sense strand
gaaggcagaauuugaagag

SEQ ID NO: 955024 - RNA, 19 nt, Homo sapiens
  misc_RNA (1)...(19): siRNA sense strand
aagacugccuuguauguga

SEQ ID NO: 955025 - RNA, 19 nt, Homo sapiens
  misc_RNA (1)...(19): siRNA sense strand
gaccagcuacggaggcaua

SEQ ID NO: 955026 - RNA, 19 nt, Homo sapiens
  misc_RNA (1)...(19): siRNA sense strand
caacaucccacuugagaag

SEQ ID NO: 955027 - RNA, 19 nt, Homo sapiens
  misc_RNA (1)...(19): siRNA sense strand
ucucuucagugcaacagua

SEQ ID NO: 955028 - RNA, 19 nt, Homo sapiens
  misc_RNA (1)...(19): siRNA sense strand
gcaaacagagaaagucagu

SEQ ID NO: 955029 - RNA, 19 nt, Homo sapiens
  misc_RNA (1)...(19): siRNA sense strand
cagagaaagucaguguuau

SEQ ID NO: 955030 - RNA, 19 nt, Homo sapiens
  misc_RNA (1)...(19): siRNA sense strand
ccaagaggaaggcagaauu

SEQ ID NO: 955031 - RNA, 19 nt, Homo sapiens
  misc_RNA (1)...(19): siRNA sense strand
agaaucaacuccucaacuc

SEQ ID NO: 955032 - RNA, 19 nt, Homo sapiens
  misc_RNA (1)...(19): siRNA sense strand
aaacagagaaagucagugu

SEQ ID NO: 955033 - RNA, 19 nt, Homo sapiens
  misc_RNA (1)...(19): siRNA sense strand
guacugcgcaaacagagaa

SEQ ID NO: 955034 - RNA, 19 nt, Homo sapiens
  misc_RNA (1)...(19): siRNA sense strand
gccaacaucccacuugaga

SEQ ID NO: 955035 - RNA, 19 nt, Homo sapiens
  misc_RNA (1)...(19): siRNA sense strand
caaagacucauaccaagag

SEQ ID NO: 955036 - RNA, 19 nt, Homo sapiens
  misc_RNA (1)...(19): siRNA sense strand
ucacgagauuguugacuag

SEQ ID NO: 955037 - RNA, 19 nt, Homo sapiens
  misc_RNA (1)...(19): siRNA sense strand
ucgcaagucugccauuagu

SEQ ID NO: 955038 - RNA, 19 nt, Homo sapiens
  misc_RNA (1)...(19): siRNA sense strand
aaacucuucugcacuucuu

SEQ ID NO: 955039 - RNA, 19 nt, Homo sapiens
  misc_RNA (1)...(19): siRNA sense strand
ggaaggcagaauuugaaga

SEQ ID NO: 955040 - RNA, 19 nt, Homo sapiens
  misc_RNA (1)...(19): siRNA sense strand
ggaucgagucacugaguuu

SEQ ID NO: 955041 - RNA, 19 nt, Homo sapiens
  misc_RNA (1)...(19): siRNA sense strand
ucaaagacucauaccaaga

SEQ ID NO: 955042 - RNA, 19 nt, Homo sapiens
  misc_RNA (1)...(19): siRNA sense strand
agaggaaggcagaauuuga

SEQ ID NO: 955043 - RNA, 19 nt, Homo sapiens
  misc_RNA (1)...(19): siRNA sense strand
gaaucaacuccucaacuca

SEQ ID NO: 955044 - RNA, 19 nt, Homo sapiens
  misc_RNA (1)...(19): siRNA sense strand
aagccaacaucccacuuga

SEQ ID NO: 955045 - RNA, 19 nt, Homo sapiens
  misc_RNA (1)...(19): siRNA sense strand
cuccucaacucacgagauu

SEQ ID NO: 955046 - RNA, 19 nt, Homo sapiens
  misc_RNA (1)...(19): siRNA sense strand
gagaaucaacuccucaacu

SEQ ID NO: 955047 - RNA, 19 nt, Homo sapiens
  misc_RNA (1)...(19): siRNA sense strand
gcgcaaacagagaaaguca

SEQ ID NO: 955048 - RNA, 19 nt, Homo sapiens
  misc_RNA (1)...(19): siRNA sense strand
cucacgagauuguugacua

SEQ ID NO: 955049 - RNA, 19 nt, Homo sapiens
  misc_RNA (1)...(19): siRNA sense strand
uauccaggacuuugugaaa

SEQ ID NO: 955050 - RNA, 19 nt, Homo sapiens
  misc_RNA (1)...(19): siRNA sense strand
cuaagacugccuuguaugu

SEQ ID NO: 955051 - RNA, 19 nt, Homo sapiens
  misc_RNA (1)...(19): siRNA sense strand
ugaaucauguucgcaaguc

SEQ ID NO: 955052 - RNA, 19 nt, Homo sapiens
  misc_RNA (1)...(19): siRNA sense strand
gaagagcagaaugugagaa

SEQ ID NO: 955053 - RNA, 19 nt, Homo sapiens
  misc_RNA (1)...(19): siRNA sense strand
gaaucauguucgcaagucu

SEQ ID NO: 955054 - RNA, 19 nt, Homo sapiens
  misc_RNA (1)...(19): siRNA sense strand
gaucgagucacugaguuug

SEQ ID NO: 955055 - RNA, 19 nt, Homo sapiens
  misc_RNA (1)...(19): siRNA sense strand
gaauuugaagagcagaaug

SEQ ID NO: 955056 - RNA, 19 nt, Homo sapiens
  misc_RNA (1)...(19): siRNA sense strand
gaccaccucaagucaaaga

SEQ ID NO: 955057 - RNA, 19 nt, Homo sapiens
  misc_RNA (1)...(19): siRNA sense strand
ggaggugagcugcaugaag

SEQ ID NO: 955058 - RNA, 19 nt, Homo sapiens
  misc_RNA (1)...(19): siRNA sense strand
agacucauaccaagaggaa

SEQ ID NO: 955059 - RNA, 19 nt, Homo sapiens
  misc_RNA (1)...(19): siRNA sense strand
aagagcagaaugugagaaa

SEQ ID NO: 955060 - RNA, 19 nt, Homo sapiens
  misc_RNA (1)...(19): siRNA sense strand
ccugauggauaugagaaug

SEQ ID NO: 955061 - RNA, 19 nt, Homo sapiens
  misc_RNA (1)...(19): siRNA sense strand
ugagcugcaugaagaugga

SEQ ID NO: 955062 - RNA, 19 nt, Homo sapiens
  misc_RNA (1)...(19): siRNA sense strand
ccucaacucacgagauugu

SEQ ID NO: 955063 - RNA, 19 nt, Homo sapiens
  misc_RNA (1)...(19): siRNA sense strand
ucaguguuauccaggacuu

SEQ ID NO: 955064 - RNA, 19 nt, Homo sapiens
  misc_RNA (1)...(19): siRNA sense strand
agcagaaugugagaaagaa

SEQ ID NO: 955065 - RNA, 19 nt, Homo sapiens
  misc_RNA (1)...(19): siRNA sense strand
gcuccauaccuaagucaga

SEQ ID NO: 955066 - RNA, 19 nt, Homo sapiens
  misc_RNA (1)...(19): siRNA sense strand
uuuccuaucucgccaugug

SEQ ID NO: 955067 - RNA, 19 nt, Homo sapiens
  misc_RNA (1)...(19): siRNA sense strand
ucgaaaccguucuaagacu

SEQ ID NO: 955068 - RNA, 19 nt, Homo sapiens
  misc_RNA (1)...(19): siRNA sense strand
gaggcuccauaccuaaguc

SEQ ID NO: 955069 - RNA, 19 nt, Homo sapiens
  misc_RNA (1)...(19): siRNA sense strand
ucgagucacugaguuugga

SEQ ID NO: 955070 - RNA, 19 nt, Homo sapiens
  misc_RNA (1)...(19): siRNA sense strand
uaucucgccaugugaagaa

SEQ ID NO: 955071 - RNA, 19 nt, Homo sapiens
  misc_RNA (1)...(19): siRNA sense strand
ggaagccaacaucccacuu

SEQ ID NO: 955072 - RNA, 19 nt, Homo sapiens
  misc_RNA (1)...(19): siRNA sense strand
gagaaagucaguguuaucc

SEQ ID NO: 955073 - RNA, 19 nt, Homo sapiens
  misc_RNA (1)...(19): siRNA sense strand
agagaaagucaguguuauc

SEQ ID NO: 955074 - RNA, 19 nt, Homo sapiens
  misc_RNA (1)...(19): siRNA sense strand
gaagauggaggaaaacucu

SEQ ID NO: 955075 - RNA, 19 nt, Homo sapiens
  misc_RNA (1)...(19): siRNA sense strand
gcaacaguacugcgcaaac

SEQ ID NO: 955076 - RNA, 19 nt, Homo sapiens
  misc_RNA (1)...(19): siRNA sense strand
uggaucgagucacugaguu

SEQ ID NO: 955077 - RNA, 19 nt, Homo sapiens
  misc_RNA (1)...(19): siRNA sense strand
uucuaagacugccuuguau

SEQ ID NO: 955078 - RNA, 19 nt, Homo sapiens
  misc_RNA (1)...(19): siRNA sense strand
caaugugguucugaaucau

SEQ ID NO: 955079 - RNA, 19 nt, Homo sapiens
  misc_RNA (1)...(19): siRNA sense strand
gcaguccgugcuuuccuau

SEQ ID NO: 955080 - RNA, 19 nt, Homo sapiens
  misc_RNA (1)...(19): siRNA sense strand
gaaaccauaugaagaguga

SEQ ID NO: 955081 - RNA, 19 nt, Homo sapiens
  misc_RNA (1)...(19): siRNA sense strand
gagccaaggucacugaauu

SEQ ID NO: 955082 - RNA, 19 nt, Homo sapiens
  misc_RNA (1)...(19): siRNA sense strand
caagaaggcacaucugaaa

SEQ ID NO: 955083 - RNA, 19 nt, Homo sapiens
  misc_RNA (1)...(19): siRNA sense strand
aaacacagcgcuauaaaga

SEQ ID NO: 955084 - RNA, 19 nt, Homo sapiens
  misc_RNA (1)...(19): siRNA sense strand
gcaaauauguaaagaaacc

SEQ ID NO: 955085 - RNA, 19 nt, Homo sapiens
  misc_RNA (1)...(19): siRNA sense strand
aggcacaucugaaaccaua

SEQ ID NO: 955086 - RNA, 19 nt, Homo sapiens
  misc_RNA (1)...(19): siRNA sense strand
ccaagaccuucaugagaaa

SEQ ID NO: 955087 - RNA, 19 nt, Homo sapiens
  misc_RNA (1)...(19): siRNA sense strand
uccaagaccuucaugagaa

SEQ ID NO: 955088 - RNA, 19 nt, Homo sapiens
  misc_RNA (1)...(19): siRNA sense strand
aagaacagcugcgggaauu

SEQ ID NO: 955089 - RNA, 19 nt, Homo sapiens
  misc_RNA (1)...(19): siRNA sense strand
gacaugaaccacuguguga

SEQ ID NO: 955090 - RNA, 19 nt, Homo sapiens
  misc_RNA (1)...(19): siRNA sense strand
gccaaggaauguccaagga

SEQ ID NO: 955091 - RNA, 19 nt, Homo sapiens
  misc_RNA (1)...(19): siRNA sense strand
caaggaggaugacaugaac

SEQ ID NO: 955092 - RNA, 19 nt, Homo sapiens
  misc_RNA (1)...(19): siRNA sense strand
ggaaugcaaauauguaaag

SEQ ID NO: 955093 - RNA, 19 nt, Homo sapiens
  misc_RNA (1)...(19): siRNA sense strand
ccaaggaggaugacaugaa

SEQ ID NO: 955094 - RNA, 19 nt, Homo sapiens
  misc_RNA (1)...(19): siRNA sense strand
gauccuggaaugcaaauau

SEQ ID NO: 955095 - RNA, 19 nt, Homo sapiens
  misc_RNA (1)...(19): siRNA sense strand
gaacagcugcgggaauugu

SEQ ID NO: 955096 - RNA, 19 nt, Homo sapiens
  misc_RNA (1)...(19): siRNA sense strand
acacagcgcuauaaagaac

SEQ ID NO: 955097 - RNA, 19 nt, Homo sapiens
  misc_RNA (1)...(19): siRNA sense strand
gcacaucugaaaccauaug

SEQ ID NO: 955098 - RNA, 19 nt, Homo sapiens
  misc_RNA (1)...(19): siRNA sense strand
gaaaacacagcgcuauaaa

SEQ ID NO: 955099 - RNA, 19 nt, Homo sapiens
  misc_RNA (1)...(19): siRNA sense strand
gaaggcacaucugaaacca

SEQ ID NO: 955100 - RNA, 19 nt, Homo sapiens
  misc_RNA (1)...(19): siRNA sense strand
ucacggagagggccaagaa

SEQ ID NO: 955101 - RNA, 19 nt, Homo sapiens
  misc_RNA (1)...(19): siRNA sense strand
gaauguccaaggaggauga

SEQ ID NO: 955102 - RNA, 19 nt, Homo sapiens
  misc_RNA (1)...(19): siRNA sense strand
ccaagaaggcacaucugaa

SEQ ID NO: 955103 - RNA, 19 nt, Homo sapiens
  misc_RNA (1)...(19): siRNA sense strand
ugagaaaccugccaaucac

SEQ ID NO: 955104 - RNA, 19 nt, Homo sapiens
  misc_RNA (1)...(19): siRNA sense strand
gccaagaaggcacaucuga

SEQ ID NO: 955105 - RNA, 19 nt, Homo sapiens
  misc_RNA (1)...(19): siRNA sense strand
ggcacgagauacacuguca

SEQ ID NO: 955106 - RNA, 19 nt, Homo sapiens
  misc_RNA (1)...(19): siRNA sense strand
caugaaccacugugugaaa

SEQ ID NO: 955107 - RNA, 19 nt, Homo sapiens
  misc_RNA (1)...(19): siRNA sense strand
gagaaaacacagcgcuaua

SEQ ID NO: 955108 - RNA, 19 nt, Homo sapiens
  misc_RNA (1)...(19): siRNA sense strand
caucugaaaccauaugaag

SEQ ID NO: 955109 - RNA, 19 nt, Homo sapiens
  misc_RNA (1)...(19): siRNA sense strand
ccaaucacaccaggcuaua

SEQ ID NO: 955110 - RNA, 19 nt, Homo sapiens
  misc_RNA (1)...(19): siRNA sense strand
cgagagccaaggucacuga

SEQ ID NO: 955111 - RNA, 19 nt, Homo sapiens
  misc_RNA (1)...(19): siRNA sense strand
gccaaucacaccaggcuau

SEQ ID NO: 955112 - RNA, 19 nt, Homo sapiens
  misc_RNA (1)...(19): siRNA sense strand
gaaacugaaaccugucaac

SEQ ID NO: 955113 - RNA, 19 nt, Homo sapiens
  misc_RNA (1)...(19): siRNA sense strand
ccuggaaugcaaauaugua

SEQ ID NO: 955114 - RNA, 19 nt, Homo sapiens
  misc_RNA (1)...(19): siRNA sense strand
gccaaggucacugaauuug

SEQ ID NO: 955115 - RNA, 19 nt, Homo sapiens
  misc_RNA (1)...(19): siRNA sense strand
gagaaaccugccaaucaca

SEQ ID NO: 955116 - RNA, 19 nt, Homo sapiens
  misc_RNA (1)...(19): siRNA sense strand
augagaaaccugccaauca

SEQ ID NO: 955117 - RNA, 19 nt, Homo sapiens
  misc_RNA (1)...(19): siRNA sense strand
ugaaaaccuuccaggagaa

SEQ ID NO: 955118 - RNA, 19 nt, Homo sapiens
  misc_RNA (1)...(19): siRNA sense strand
aaagaacagcugcgggaau

SEQ ID NO: 955119 - RNA, 19 nt, Homo sapiens
  misc_RNA (1)...(19): siRNA sense strand
ccucagcugccaaggaaug

SEQ ID NO: 955120 - RNA, 19 nt, Homo sapiens
  misc_RNA (1)...(19): siRNA sense strand
cuggaaugcaaauauguaa

SEQ ID NO: 955121 - RNA, 19 nt, Homo sapiens
  misc_RNA (1)...(19): siRNA sense strand
ucugaaaccauaugaagag

SEQ ID NO: 955122 - RNA, 19 nt, Homo sapiens
  misc_RNA (1)...(19): siRNA sense strand
ggaaagugauguuagagaa

SEQ ID NO: 955123 - RNA, 19 nt, Homo sapiens
  misc_RNA (1)...(19): siRNA sense strand
aaagaucccuggaauauga

SEQ ID NO: 955124 - RNA, 19 nt, Homo sapiens
  misc_RNA (1)...(19): siRNA sense strand
gaaaagaucccuggaauau

SEQ ID NO: 955125 - RNA, 19 nt, Homo sapiens
  misc_RNA (1)...(19): siRNA sense strand
ggauguggccauagaauuc

SEQ ID NO: 955126 - RNA, 19 nt, Homo sapiens
  misc_RNA (1)...(19): siRNA sense strand
cagcaggauuuguauagga

SEQ ID NO: 955127 - RNA, 19 nt, Homo sapiens
  misc_RNA (1)...(19): siRNA sense strand
auaggaaagugauguuaga

SEQ ID NO: 955128 - RNA, 19 nt, Homo sapiens
  misc_RNA (1)...(19): siRNA sense strand
gauguuagagaacuacaga

SEQ ID NO: 955129 - RNA, 19 nt, Homo sapiens
  misc_RNA (1)...(19): siRNA sense strand
guauaggaaagugauguua

SEQ ID NO: 955130 - RNA, 19 nt, Homo sapiens
  misc_RNA (1)...(19): siRNA sense strand
ggaaaagaucccuggaaua

SEQ ID NO: 955131 - RNA, 19 nt, Homo sapiens
  misc_RNA (1)...(19): siRNA sense strand
uuagggauguggccauaga

SEQ ID NO: 955132 - RNA, 19 nt, Homo sapiens
  misc_RNA (1)...(19): siRNA sense strand
gcucagcaggauuuguaua

SEQ ID NO: 955133 - RNA, 19 nt, Homo sapiens
  misc_RNA (1)...(19): siRNA sense strand
gggauguggccauagaauu

SEQ ID NO: 955134 - RNA, 19 nt, Homo sapiens
  misc_RNA (1)...(19): siRNA sense strand
ggauuuguauaggaaagug

SEQ ID NO: 955135 - RNA, 19 nt, Homo sapiens
  misc_RNA (1)...(19): siRNA sense strand
gaauaugaagggacacagu

SEQ ID NO: 955136 - RNA, 19 nt, Homo sapiens
  misc_RNA (1)...(19): siRNA sense strand
aauaugaagggacacagua

SEQ ID NO: 955137 - RNA, 19 nt, Homo sapiens
  misc_RNA (1)...(19): siRNA sense strand
acacaguacgguagucaaa

SEQ ID NO: 955138 - RNA, 19 nt, Homo sapiens
  misc_RNA (1)...(19): siRNA sense strand
ggacacaguacgguaguca

SEQ ID NO: 955139 - RNA, 19 nt, Homo sapiens
  misc_RNA (1)...(19): siRNA sense strand
gaaagugauguuagagaac

SEQ ID NO: 955140 - RNA, 19 nt, Homo sapiens
  misc_RNA (1)...(19): siRNA sense strand
cuacagaaaccuggucuuc

SEQ ID NO: 955141 - RNA, 19 nt, Homo sapiens
  misc_RNA (1)...(19): siRNA sense strand
uggccaggauggucucuau

SEQ ID NO: 955142 - RNA, 19 nt, Homo sapiens
  misc_RNA (1)...(19): siRNA sense strand
aaagugauguuagagaacu

SEQ ID NO: 955143 - RNA, 19 nt, Homo sapiens
  misc_RNA (1)...(19): siRNA sense strand
uuagagaacuacagaaacc

SEQ ID NO: 955144 - RNA, 19 nt, Homo sapiens
  misc_RNA (1)...(19): siRNA sense strand
uguuagagaacuacagaaa

SEQ ID NO: 955145 - RNA, 19 nt, Homo sapiens
  misc_RNA (1)...(19): siRNA sense strand
ggucaccugucuggagcaa

SEQ ID NO: 955146 - RNA, 19 nt, Homo sapiens
  misc_RNA (1)...(19): siRNA sense strand
cagguauugcugucucuaa

SEQ ID NO: 955147 - RNA, 19 nt, Homo sapiens
  misc_RNA (1)...(19): siRNA sense strand
agcaggauuuguauaggaa

SEQ ID NO: 955148 - RNA, 19 nt, Homo sapiens
  misc_RNA (1)...(19): siRNA sense strand
gcaggauuuguauaggaaa

SEQ ID NO: 955149 - RNA, 19 nt, Homo sapiens
  misc_RNA (1)...(19): siRNA sense strand
uauaggaaagugauguuag

SEQ ID NO: 955150 - RNA, 19 nt, Homo sapiens
  misc_RNA (1)...(19): siRNA sense strand
ccaggauggucucuaucuc

SEQ ID NO: 955151 - RNA, 19 nt, Homo sapiens
  misc_RNA (1)...(19): siRNA sense strand
caggauuuguauaggaaag

SEQ ID NO: 955152 - RNA, 19 nt, Homo sapiens
  misc_RNA (1)...(19): siRNA sense strand
gcagguauugcugucucua

SEQ ID NO: 955153 - RNA, 19 nt, Homo sapiens
  misc_RNA (1)...(19): siRNA sense strand
ggaagacgaugaucagaaa

SEQ ID NO: 955154 - RNA, 19 nt, Homo sapiens
  misc_RNA (1)...(19): siRNA sense strand
ugugaaagaugaacuguaa

SEQ ID NO: 955155 - RNA, 19 nt, Homo sapiens
  misc_RNA (1)...(19): siRNA sense strand
ucagaaagcugugaaagau

SEQ ID NO: 955156 - RNA, 19 nt, Homo sapiens
  misc_RNA (1)...(19): siRNA sense strand
gaggugaaaucaagacuca

SEQ ID NO: 955157 - RNA, 19 nt, Homo sapiens
  misc_RNA (1)...(19): siRNA sense strand
agaaagcugugaaagauga

SEQ ID NO: 955158 - RNA, 19 nt, Homo sapiens
  misc_RNA (1)...(19): siRNA sense strand
aggaggagaugaccaagua

SEQ ID NO: 955159 - RNA, 19 nt, Homo sapiens
  misc_RNA (1)...(19): siRNA sense strand
ccaagagugugucugacua

SEQ ID NO: 955160 - RNA, 19 nt, Homo sapiens
  misc_RNA (1)...(19): siRNA sense strand
cagcagaggccaucgauga

SEQ ID NO: 955161 - RNA, 19 nt, Homo sapiens
  misc_RNA (1)...(19): siRNA sense strand
cagagaggaucacagaguu

SEQ ID NO: 955162 - RNA, 19 nt, Homo sapiens
  misc_RNA (1)...(19): siRNA sense strand
gcagaagguuccgagauca

SEQ ID NO: 955163 - RNA, 19 nt, Homo sapiens
  misc_RNA (1)...(19): siRNA sense strand
aauaccagcucgacaaaga

SEQ ID NO: 955164 - RNA, 19 nt, Homo sapiens
  misc_RNA (1)...(19): siRNA sense strand
gcagagaggcugaugacau

SEQ ID NO: 955165 - RNA, 19 nt, Homo sapiens
  misc_RNA (1)...(19): siRNA sense strand
ccaaauaccagcucgacaa

SEQ ID NO: 955166 - RNA, 19 nt, Homo sapiens
  misc_RNA (1)...(19): siRNA sense strand
ggcagaagguuccgagauc

SEQ ID NO: 955167 - RNA, 19 nt, Homo sapiens
  misc_RNA (1)...(19): siRNA sense strand
gcagagaggaucacagagu

SEQ ID NO: 955168 - RNA, 19 nt, Homo sapiens
  misc_RNA (1)...(19): siRNA sense strand
caaauaccagcucgacaaa

SEQ ID NO: 955169 - RNA, 19 nt, Homo sapiens
  misc_RNA (1)...(19): siRNA sense strand
gugacguguucuccaaaua

SEQ ID NO: 955170 - RNA, 19 nt, Homo sapiens
  misc_RNA (1)...(19): siRNA sense strand
gagaaccugcuggacuuua

SEQ ID NO: 955171 - RNA, 19 nt, Homo sapiens
  misc_RNA (1)...(19): siRNA sense strand
ccaucaaguucuucaggaa

SEQ ID NO: 955172 - RNA, 19 nt, Homo sapiens
  misc_RNA (1)...(19): siRNA sense strand
acaguuggcucccauuugg

SEQ ID NO: 955173 - RNA, 19 nt, Homo sapiens
  misc_RNA (1)...(19): siRNA sense strand
ggccaucgaugacauacca

SEQ ID NO: 955174 - RNA, 19 nt, Homo sapiens
  misc_RNA (1)...(19): siRNA sense strand
guacaaggaccaugagaac

SEQ ID NO: 955175 - RNA, 19 nt, Homo sapiens
  misc_RNA (1)...(19): siRNA sense strand
gaugaaggccggaacaacu

SEQ ID NO: 955176 - RNA, 19 nt, Homo sapiens
  misc_RNA (1)...(19): siRNA sense strand
gaacgcacgcuggaugguu

SEQ ID NO: 955177 - RNA, 19 nt, Homo sapiens
  misc_RNA (1)...(19): siRNA sense strand
gacauaccauuugggauca

SEQ ID NO: 955178 - RNA, 19 nt, Homo sapiens
  misc_RNA (1)...(19): siRNA sense strand
acagugacguguucuccaa

SEQ ID NO: 955179 - RNA, 19 nt, Homo sapiens
  misc_RNA (1)...(19): siRNA sense strand
caaacugagcaacuucaaa

SEQ ID NO: 955180 - RNA, 19 nt, Homo sapiens
  misc_RNA (1)...(19): siRNA sense strand
gguggaggccgucaaagug

SEQ ID NO: 955181 - RNA, 19 nt, Homo sapiens
  misc_RNA (1)...(19): siRNA sense strand
aggagaaccugcuggacuu

SEQ ID NO: 955182 - RNA, 19 nt, Homo sapiens
  misc_RNA (1)...(19): siRNA sense strand
ggaggaagacgaugaucag

SEQ ID NO: 955183 - RNA, 19 nt, Homo sapiens
  misc_RNA (1)...(19): siRNA sense strand
aaacaguuggcucccauuu

SEQ ID NO: 955184 - RNA, 19 nt, Homo sapiens
  misc_RNA (1)...(19): siRNA sense strand
agacucacauccugcuguu

SEQ ID NO: 955185 - RNA, 19 nt, Homo sapiens
  misc_RNA (1)...(19): siRNA sense strand
agaaccugcuggacuuuau

SEQ ID NO: 955186 - RNA, 19 nt, Homo sapiens
  misc_RNA (1)...(19): siRNA sense strand
gcaaacugagcaacuucaa

SEQ ID NO: 955187 - RNA, 19 nt, Homo sapiens
  misc_RNA (1)...(19): siRNA sense strand
cagaggagccagacaugga

SEQ ID NO: 955188 - RNA, 19 nt, Homo sapiens
  misc_RNA (1)...(19): siRNA sense strand
caaggaccaugagaacauc

SEQ ID NO: 955189 - RNA, 19 nt, Homo sapiens
  misc_RNA (1)...(19): siRNA sense strand
caucgaugacauaccauuu

SEQ ID NO: 955190 - RNA, 19 nt, Homo sapiens
  misc_RNA (1)...(19): siRNA sense strand
agacguacaaggaccauga

SEQ ID NO: 955191 - RNA, 19 nt, Homo sapiens
  misc_RNA (1)...(19): siRNA sense strand
cggcagagaggaucacaga

SEQ ID NO: 955192 - RNA, 19 nt, Homo sapiens
  misc_RNA (1)...(19): siRNA sense strand
gacuaugacggcaaacuga

SEQ ID NO: 955193 - RNA, 19 nt, Homo sapiens
  misc_RNA (1)...(19): siRNA sense strand
ugggaucacuuccaacagu

SEQ ID NO: 955194 - RNA, 19 nt, Homo sapiens
  misc_RNA (1)...(19): siRNA sense strand
ggagaaccugcuggacuuu

SEQ ID NO: 955195 - RNA, 19 nt, Homo sapiens
  misc_RNA (1)...(19): siRNA sense strand
gaucagaaagcugugaaag

SEQ ID NO: 955196 - RNA, 19 nt, Homo sapiens
  misc_RNA (1)...(19): siRNA sense strand
agccagacauggaggaaga

SEQ ID NO: 955197 - RNA, 19 nt, Homo sapiens
  misc_RNA (1)...(19): siRNA sense strand
aaacgucuuuguggaguuc

SEQ ID NO: 955198 - RNA, 19 nt, Homo sapiens
  misc_RNA (1)...(19): siRNA sense strand
acaagcagccugucaaggu

SEQ ID NO: 955199 - RNA, 19 nt, Homo sapiens
  misc_RNA (1)...(19): siRNA sense strand
caagagugugucugacuau

SEQ ID NO: 955200 - RNA, 19 nt, Homo sapiens
  misc_RNA (1)...(19): siRNA sense strand
gcuaucccaccaucaaguu

SEQ ID NO: 955201 - RNA, 19 nt, Homo sapiens
  misc_RNA (1)...(19): siRNA sense strand
aaacagcagccgagagcuu

SEQ ID NO: 955202 - RNA, 19 nt, Homo sapiens
  misc_RNA (1)...(19): siRNA sense strand
gagugugucugacuaugac

SEQ ID NO: 955203 - RNA, 19 nt, Homo sapiens
  misc_RNA (1)...(19): siRNA sense strand
gaaggccggaacaacuuug

SEQ ID NO: 955204 - RNA, 19 nt, Homo sapiens
  misc_RNA (1)...(19): siRNA sense strand
aacgcacgcuggaugguuu

SEQ ID NO: 955205 - RNA, 19 nt, Homo sapiens
  misc_RNA (1)...(19): siRNA sense strand
ugggagagacguacaagga

SEQ ID NO: 955206 - RNA, 19 nt, Homo sapiens
  misc_RNA (1)...(19): siRNA sense strand
ggagaugaccaaguacaag

SEQ ID NO: 955207 - RNA, 19 nt, Homo sapiens
  misc_RNA (1)...(19): siRNA sense strand
gcgcauccucgaguucuuu

SEQ ID NO: 955208 - RNA, 19 nt, Homo sapiens
  misc_RNA (1)...(19): siRNA sense strand
aaacugagcaacuucaaaa

SEQ ID NO: 955209 - RNA, 19 nt, Homo sapiens
  misc_RNA (1)...(19): siRNA sense strand
gcagacagccccgaagauu

SEQ ID NO: 955210 - RNA, 19 nt, Homo sapiens
  misc_RNA (1)...(19): siRNA sense strand
cgagguggaggccgucaaa

SEQ ID NO: 955211 - RNA, 19 nt, Homo sapiens
  misc_RNA (1)...(19): siRNA sense strand
acaaggaccaugagaacau

SEQ ID NO: 955212 - RNA, 19 nt, Homo sapiens
  misc_RNA (1)...(19): siRNA sense strand
ccaaguacaagcccgaauc

SEQ ID NO: 955213 - RNA, 19 nt, Homo sapiens
  misc_RNA (1)...(19): siRNA sense strand
gaggagaugaccaaguaca

SEQ ID NO: 955214 - RNA, 19 nt, Homo sapiens
  misc_RNA (1)...(19): siRNA sense strand
gcagaggccaucgaugaca

SEQ ID NO: 955215 - RNA, 19 nt, Homo sapiens
  misc_RNA (1)...(19): siRNA sense strand
gaaagcugugaaagaugaa

SEQ ID NO: 955216 - RNA, 19 nt, Homo sapiens
  misc_RNA (1)...(19): siRNA sense strand
cgaguucuuuggccugaag

SEQ ID NO: 955217 - RNA, 19 nt, Homo sapiens
  misc_RNA (1)...(19): siRNA sense strand
cagaggccaucgaugacau

SEQ ID NO: 955218 - RNA, 19 nt, Homo sapiens
  misc_RNA (1)...(19): siRNA sense strand
ugaaggccggaacaacuuu

SEQ ID NO: 955219 - RNA, 19 nt, Homo sapiens
  misc_RNA (1)...(19): siRNA sense strand
gcuggaugguuuuaagaaa

SEQ ID NO: 955220 - RNA, 19 nt, Homo sapiens
  misc_RNA (1)...(19): siRNA sense strand
agacagccccgaagauuuu

SEQ ID NO: 955221 - RNA, 19 nt, Homo sapiens
  misc_RNA (1)...(19): siRNA sense strand
gaaccugcuggacuuuauc

SEQ ID NO: 955222 - RNA, 19 nt, Homo sapiens
  misc_RNA (1)...(19): siRNA sense strand
ucgaugacauaccauuugg

SEQ ID NO: 955223 - RNA, 19 nt, Homo sapiens
  misc_RNA (1)...(19): siRNA sense strand
gcggcuaucccaccaucaa

SEQ ID NO: 955224 - RNA, 19 nt, Homo sapiens
  misc_RNA (1)...(19): siRNA sense strand
gagcuucaagggcaagauc

SEQ ID NO: 955225 - RNA, 19 nt, Homo sapiens
  misc_RNA (1)...(19): siRNA sense strand
cugcuggacuuuaucaaac

SEQ ID NO: 955226 - RNA, 19 nt, Homo sapiens
  misc_RNA (1)...(19): siRNA sense strand
agacauggaggaagacgau

SEQ ID NO: 955227 - RNA, 19 nt, Homo sapiens
  misc_RNA (1)...(19): siRNA sense strand
caucaaguucuucaggaau

SEQ ID NO: 955228 - RNA, 19 nt, Homo sapiens
  misc_RNA (1)...(19): siRNA sense strand
gaggaagacgaugaucaga

SEQ ID NO: 955229 - RNA, 19 nt, Homo sapiens
  misc_RNA (1)...(19): siRNA sense strand
agagugugucugacuauga

SEQ ID NO: 955230 - RNA, 19 nt, Homo sapiens
  misc_RNA (1)...(19): siRNA sense strand
cagaaagcugugaaagaug

SEQ ID NO: 955231 - RNA, 19 nt, Homo sapiens
  misc_RNA (1)...(19): siRNA sense strand
gaagcugaaggcagaaggu

SEQ ID NO: 955232 - RNA, 19 nt, Homo sapiens
  misc_RNA (1)...(19): siRNA sense strand
gagaggaucacagaguucu

SEQ ID NO: 955233 - RNA, 19 nt, Homo sapiens
  misc_RNA (1)...(19): siRNA sense strand
ugacguguucuccaaauac

SEQ ID NO: 955234 - RNA, 19 nt, Homo sapiens
  misc_RNA (1)...(19): siRNA sense strand
gaugaucagaaagcuguga

SEQ ID NO: 955235 - RNA, 19 nt, Homo sapiens
  misc_RNA (1)...(19): siRNA sense strand
cguacaaggaccaugagaa

SEQ ID NO: 955236 - RNA, 19 nt, Homo sapiens
  misc_RNA (1)...(19): siRNA sense strand
gaggaggagaugaccaagu

SEQ ID NO: 955237 - RNA, 19 nt, Homo sapiens
  misc_RNA (1)...(19): siRNA sense strand
ugacuaugacggcaaacug

SEQ ID NO: 955238 - RNA, 19 nt, Homo sapiens
  misc_RNA (1)...(19): siRNA sense strand
ccugcuggacuuuaucaaa

SEQ ID NO: 955239 - RNA, 19 nt, Homo sapiens
  misc_RNA (1)...(19): siRNA sense strand
gcguggagcuggaugauga

SEQ ID NO: 955240 - RNA, 19 nt, Homo sapiens
  misc_RNA (1)...(19): siRNA sense strand
ccaaggagaucccacacaa

SEQ ID NO: 955241 - RNA, 19 nt, Homo sapiens
  misc_RNA (1)...(19): siRNA sense strand
ggagcuggaugaugaacuu

SEQ ID NO: 955242 - RNA, 19 nt, Homo sapiens
  misc_RNA (1)...(19): siRNA sense strand
gcucugugauuguggcuuu

SEQ ID NO: 955243 - RNA, 19 nt, Homo sapiens
  misc_RNA (1)...(19): siRNA sense strand
gcucaucguucuccuaaag

SEQ ID NO: 955244 - RNA, 19 nt, Homo sapiens
  misc_RNA (1)...(19): siRNA sense strand
gauuguggcuuucauagag

SEQ ID NO: 955245 - RNA, 19 nt, Homo sapiens
  misc_RNA (1)...(19): siRNA sense strand
gcccaggccucaucaacuu

SEQ ID NO: 955246 - RNA, 19 nt, Homo sapiens
  misc_RNA (1)...(19): siRNA sense strand
ggaaaggaagggccgauga

SEQ ID NO: 955247 - RNA, 19 nt, Homo sapiens
  misc_RNA (1)...(19): siRNA sense strand
ccauggaccucuccgaguu

SEQ ID NO: 955248 - RNA, 19 nt, Homo sapiens
  misc_RNA (1)...(19): siRNA sense strand
uaugagagcuuggacuaug

SEQ ID NO: 955249 - RNA, 19 nt, Homo sapiens
  misc_RNA (1)...(19): siRNA sense strand
gugaugagcacaccaguga

SEQ ID NO: 955250 - RNA, 19 nt, Homo sapiens
  misc_RNA (1)...(19): siRNA sense strand
gaaaggaagggccgaugau

SEQ ID NO: 955251 - RNA, 19 nt, Homo sapiens
  misc_RNA (1)...(19): siRNA sense strand
gaaggucggcgucauugug

SEQ ID NO: 955252 - RNA, 19 nt, Homo sapiens
  misc_RNA (1)...(19): siRNA sense strand
uggaggaucuucuuugcuu

SEQ ID NO: 955253 - RNA, 19 nt, Homo sapiens
  misc_RNA (1)...(19): siRNA sense strand
caaaguguccggugugauc

SEQ ID NO: 955254 - RNA, 19 nt, Homo sapiens
  misc_RNA (1)...(19): siRNA sense strand
gaaggucaacgucacugaa

SEQ ID NO: 955255 - RNA, 19 nt, Homo sapiens
  misc_RNA (1)...(19): siRNA sense strand
aaaccuggcuggccucaag

SEQ ID NO: 955256 - RNA, 19 nt, Homo sapiens
  misc_RNA (1)...(19): siRNA sense strand
ucaagacguuggugaucaa

SEQ ID NO: 955257 - RNA, 19 nt, Homo sapiens
  misc_RNA (1)...(19): siRNA sense strand
gcucgugggcucugugauu

SEQ ID NO: 955258 - RNA, 19 nt, Homo sapiens
  misc_RNA (1)...(19): siRNA sense strand
ggucaucugcgcccucauu

SEQ ID NO: 955259 - RNA, 19 nt, Homo sapiens
  misc_RNA (1)...(19): siRNA sense strand
acauucagcugcagagugu

SEQ ID NO: 955260 - RNA, 19 nt, Homo sapiens
  misc_RNA (1)...(19): siRNA sense strand
gaucgugggcgacgucuuc

SEQ ID NO: 955261 - RNA, 19 nt, Homo sapiens
  misc_RNA (1)...(19): siRNA sense strand
gcucaugaccgccaagauc

SEQ ID NO: 955262 - RNA, 19 nt, Homo sapiens
  misc_RNA (1)...(19): siRNA sense strand
gagaaggucggcgucauug

SEQ ID NO: 955263 - RNA, 19 nt, Homo sapiens
  misc_RNA (1)...(19): siRNA sense strand
ccucguggccugcuucauu

SEQ ID NO: 955264 - RNA, 19 nt, Homo sapiens
  misc_RNA (1)...(19): siRNA sense strand
agacguuggugaucaaagu

SEQ ID NO: 955265 - RNA, 19 nt, Homo sapiens
  misc_RNA (1)...(19): siRNA sense strand
gcucccagcucaucguucu

SEQ ID NO: 955266 - RNA, 19 nt, Homo sapiens
  misc_RNA (1)...(19): siRNA sense strand
cagcucaucguucuccuaa

SEQ ID NO: 955267 - RNA, 19 nt, Homo sapiens
  misc_RNA (1)...(19): siRNA sense strand
caagggcaauaucgacaag

SEQ ID NO: 955268 - RNA, 19 nt, Homo sapiens
  misc_RNA (1)...(19): siRNA sense strand
ggaaggucaacgucacuga

SEQ ID NO: 955269 - RNA, 19 nt, Homo sapiens
  misc_RNA (1)...(19): siRNA sense strand
gcuccugucccucaaguau

SEQ ID NO: 955270 - RNA, 19 nt, Homo sapiens
  misc_RNA (1)...(19): siRNA sense strand
ucgacaaguucacagagaa

SEQ ID NO: 955271 - RNA, 19 nt, Homo sapiens
  misc_RNA (1)...(19): siRNA sense strand
gagcuuggacuaugacaac

SEQ ID NO: 955272 - RNA, 19 nt, Homo sapiens
  misc_RNA (1)...(19): siRNA sense strand
acuacuggcugaccauguu

SEQ ID NO: 955273 - RNA, 19 nt, Homo sapiens
  misc_RNA (1)...(19): siRNA sense strand
uccaugaucuccacguuca

SEQ ID NO: 955274 - RNA, 19 nt, Homo sapiens
  misc_RNA (1)...(19): siRNA sense strand
gaugauccacucagguuca

SEQ ID NO: 955275 - RNA, 19 nt, Homo sapiens
  misc_RNA (1)...(19): siRNA sense strand
gaucaagugcuuccucaac

SEQ ID NO: 955276 - RNA, 19 nt, Homo sapiens
  misc_RNA (1)...(19): siRNA sense strand
ggaccucuccgaguucaug

SEQ ID NO: 955277 - RNA, 19 nt, Homo sapiens
  misc_RNA (1)...(19): siRNA sense strand
ugagaaggucggcgucauu

SEQ ID NO: 955278 - RNA, 19 nt, Homo sapiens
  misc_RNA (1)...(19): siRNA sense strand
ucaagaucuucgaguacuu

SEQ ID NO: 955279 - RNA, 19 nt, Homo sapiens
  misc_RNA (1)...(19): siRNA sense strand
gaagguuugacucggagaa

SEQ ID NO: 955280 - RNA, 19 nt, Homo sapiens
  misc_RNA (1)...(19): siRNA sense strand
uguacgacaugcacauuca

SEQ ID NO: 955281 - RNA, 19 nt, Homo sapiens
  misc_RNA (1)...(19): siRNA sense strand
gcugcggccuucuucaaca

SEQ ID NO: 955282 - RNA, 19 nt, Homo sapiens
  misc_RNA (1)...(19): siRNA sense strand
gcagauggcgaguacaacu

SEQ ID NO: 955283 - RNA, 19 nt, Homo sapiens
  misc_RNA (1)...(19): siRNA sense strand
cuucuuugcuuccaugauc

SEQ ID NO: 955284 - RNA, 19 nt, Homo sapiens
  misc_RNA (1)...(19): siRNA sense strand
cggcaaauacgcccugaug

SEQ ID NO: 955285 - RNA, 19 nt, Homo sapiens
  misc_RNA (1)...(19): siRNA sense strand
ggcaauaucgacaaguuca

SEQ ID NO: 955286 - RNA, 19 nt, Homo sapiens
  misc_RNA (1)...(19): siRNA sense strand
gugcagauggcgaguacaa

SEQ ID NO: 955287 - RNA, 19 nt, Homo sapiens
  misc_RNA (1)...(19): siRNA sense strand
ucaccacguucugcgcuuu

SEQ ID NO: 955288 - RNA, 19 nt, Homo sapiens
  misc_RNA (1)...(19): siRNA sense strand
gcgacacggcguccaauca

SEQ ID NO: 955289 - RNA, 19 nt, Homo sapiens
  misc_RNA (1)...(19): siRNA sense strand
ucaaguacagggucaucaa

SEQ ID NO: 955290 - RNA, 19 nt, Homo sapiens
  misc_RNA (1)...(19): siRNA sense strand
uccugucccucaaguauga

SEQ ID NO: 955291 - RNA, 19 nt, Homo sapiens
  misc_RNA (1)...(19): siRNA sense strand
ucacgcuggucuacuucuu

SEQ ID NO: 955292 - RNA, 19 nt, Homo sapiens
  misc_RNA (1)...(19): siRNA sense strand
ccgaugauccacucagguu

SEQ ID NO: 955293 - RNA, 19 nt, Homo sapiens
  misc_RNA (1)...(19): siRNA sense strand
gacacggcguccaaucaca

SEQ ID NO: 955294 - RNA, 19 nt, Homo sapiens
  misc_RNA (1)...(19): siRNA sense strand
ugggcgacgucuucauuga

SEQ ID NO: 955295 - RNA, 19 nt, Homo sapiens
  misc_RNA (1)...(19): siRNA sense strand
cgagaucccggucuucauc

SEQ ID NO: 955296 - RNA, 19 nt, Homo sapiens
  misc_RNA (1)...(19): siRNA sense strand
gaccuggaggaucuucuuu

SEQ ID NO: 955297 - RNA, 19 nt, Homo sapiens
  misc_RNA (1)...(19): siRNA sense strand
ggucaucaagggcaauauc

SEQ ID NO: 955298 - RNA, 19 nt, Homo sapiens
  misc_RNA (1)...(19): siRNA sense strand
agggcaauaucgacaaguu

SEQ ID NO: 955299 - RNA, 19 nt, Homo sapiens
  misc_RNA (1)...(19): siRNA sense strand
auuucaagaucuucgagua

SEQ ID NO: 955300 - RNA, 19 nt, Homo sapiens
  misc_RNA (1)...(19): siRNA sense strand
cugaccauguuucgaauca

SEQ ID NO: 955301 - RNA, 19 nt, Homo sapiens
  misc_RNA (1)...(19): siRNA sense strand
uggcugaccauguuucgaa

SEQ ID NO: 955302 - RNA, 19 nt, Homo sapiens
  misc_RNA (1)...(19): siRNA sense strand
caagaucuucgaguacuuc

SEQ ID NO: 955303 - RNA, 19 nt, Homo sapiens
  misc_RNA (1)...(19): siRNA sense strand
aguaugagagcuuggacua

SEQ ID NO: 955304 - RNA, 19 nt, Homo sapiens
  misc_RNA (1)...(19): siRNA sense strand
ccuacacgauccacgagau

SEQ ID NO: 955305 - RNA, 19 nt, Homo sapiens
  misc_RNA (1)...(19): siRNA sense strand
gaucaagcgcugggucauc

SEQ ID NO: 955306 - RNA, 19 nt, Homo sapiens
  misc_RNA (1)...(19): siRNA sense strand
augagagcuuggacuauga

SEQ ID NO: 955307 - RNA, 19 nt, Homo sapiens
  misc_RNA (1)...(19): siRNA sense strand
ggaucucccuguccuaccu

SEQ ID NO: 955308 - RNA, 19 nt, Homo sapiens
  misc_RNA (1)...(19): siRNA sense strand
uguucacgcuggucuacuu

SEQ ID NO: 955309 - RNA, 19 nt, Homo sapiens
  misc_RNA (1)...(19): siRNA sense strand
gggcaauaucgacaaguuc

SEQ ID NO: 955310 - RNA, 19 nt, Homo sapiens
  misc_RNA (1)...(19): siRNA sense strand
gcauuuaccacgggaacau

SEQ ID NO: 955311 - RNA, 19 nt, Homo sapiens
  misc_RNA (1)...(19): siRNA sense strand
cucguggccugcuucauug

SEQ ID NO: 955312 - RNA, 19 nt, Homo sapiens
  misc_RNA (1)...(19): siRNA sense strand
gcuggaugaugaacuuuug

SEQ ID NO: 955313 - RNA, 19 nt, Homo sapiens
  misc_RNA (1)...(19): siRNA sense strand
gcucaagacguuggugauc

SEQ ID NO: 955314 - RNA, 19 nt, Homo sapiens
  misc_RNA (1)...(19): siRNA sense strand
cucaagacguuggugauca

SEQ ID NO: 955315 - RNA, 19 nt, Homo sapiens
  misc_RNA (1)...(19): siRNA sense strand
cgugggcgacgucuucauu

SEQ ID NO: 955316 - RNA, 19 nt, Homo sapiens
  misc_RNA (1)...(19): siRNA sense strand
ccgcagagacacagagaag

SEQ ID NO: 955317 - RNA, 19 nt, Homo sapiens
  misc_RNA (1)...(19): siRNA sense strand
guacuuccgcagagacaca

SEQ ID NO: 955318 - RNA, 19 nt, Homo sapiens
  misc_RNA (1)...(19): siRNA sense strand
ggacaagacuggaaucguu

SEQ ID NO: 955319 - RNA, 19 nt, Homo sapiens
  misc_RNA (1)...(19): siRNA sense strand
aaacaaagcuacaaucuuc

SEQ ID NO: 955320 - RNA, 19 nt, Homo sapiens
  misc_RNA (1)...(19): siRNA sense strand
ggagauggauuucauucuu

SEQ ID NO: 955321 - RNA, 19 nt, Homo sapiens
  misc_RNA (1)...(19): siRNA sense strand
gagauggauuucauucuuu

SEQ ID NO: 955322 - RNA, 19 nt, Homo sapiens
  misc_RNA (1)...(19): siRNA sense strand
caagauguauauugccuuu

SEQ ID NO: 955323 - RNA, 19 nt, Homo sapiens
  misc_RNA (1)...(19): siRNA sense strand
gcuacaaucuucaaguuau

SEQ ID NO: 955324 - RNA, 19 nt, Homo sapiens
  misc_RNA (1)...(19): siRNA sense strand
ugaagugucugagguuaua

SEQ ID NO: 955325 - RNA, 19 nt, Homo sapiens
  misc_RNA (1)...(19): siRNA sense strand
gaucaccuccguccuuaua

SEQ ID NO: 955326 - RNA, 19 nt, Homo sapiens
  misc_RNA (1)...(19): siRNA sense strand
caacaauccuaaccaguca

SEQ ID NO: 955327 - RNA, 19 nt, Homo sapiens
  misc_RNA (1)...(19): siRNA sense strand
gugcucagcuuagaaagaa

SEQ ID NO: 955328 - RNA, 19 nt, Homo sapiens
  misc_RNA (1)...(19): siRNA sense strand
guacucaggagauggauuu

SEQ ID NO: 955329 - RNA, 19 nt, Homo sapiens
  misc_RNA (1)...(19): siRNA sense strand
gacccaaacucccggaaga

SEQ ID NO: 955330 - RNA, 19 nt, Homo sapiens
  misc_RNA (1)...(19): siRNA sense strand
guccuuauaugccagagua

SEQ ID NO: 955331 - RNA, 19 nt, Homo sapiens
  misc_RNA (1)...(19): siRNA sense strand
guauauugccuuuguauuc

SEQ ID NO: 955332 - RNA, 19 nt, Homo sapiens
  misc_RNA (1)...(19): siRNA sense strand
uaccagucaugacaaauaa

SEQ ID NO: 955333 - RNA, 19 nt, Homo sapiens
  misc_RNA (1)...(19): siRNA sense strand
cgauaucagucuaugagaa

SEQ ID NO: 955334 - RNA, 19 nt, Homo sapiens
  misc_RNA (1)...(19): siRNA sense strand
ggaagaaacaagcucugaa

SEQ ID NO: 955335 - RNA, 19 nt, Homo sapiens
  misc_RNA (1)...(19): siRNA sense strand
gcuccaugcuccucgauau

SEQ ID NO: 955336 - RNA, 19 nt, Homo sapiens
  misc_RNA (1)...(19): siRNA sense strand
gauguauauugccuuugua

SEQ ID NO: 955337 - RNA, 19 nt, Homo sapiens
  misc_RNA (1)...(19): siRNA sense strand
aaucgucugucuccuguuu

SEQ ID NO: 955338 - RNA, 19 nt, Homo sapiens
  misc_RNA (1)...(19): siRNA sense strand
aagcuacaaucuucaaguu

SEQ ID NO: 955339 - RNA, 19 nt, Homo sapiens
  misc_RNA (1)...(19): siRNA sense strand
gaagaaacaagcucugaac

SEQ ID NO: 955340 - RNA, 19 nt, Homo sapiens
  misc_RNA (1)...(19): siRNA sense strand
ugaaaggugugcgagauuc

SEQ ID NO: 955341 - RNA, 19 nt, Homo sapiens
  misc_RNA (1)...(19): siRNA sense strand
gcaaggacaagacuggaau

SEQ ID NO: 955342 - RNA, 19 nt, Homo sapiens
  misc_RNA (1)...(19): siRNA sense strand
uaugagaagggauguaauu

SEQ ID NO: 955343 - RNA, 19 nt, Homo sapiens
  misc_RNA (1)...(19): siRNA sense strand
gagguuauaccagucauga

SEQ ID NO: 955344 - RNA, 19 nt, Homo sapiens
  misc_RNA (1)...(19): siRNA sense strand
ccagucaugacaaauaauu

SEQ ID NO: 955345 - RNA, 19 nt, Homo sapiens
  misc_RNA (1)...(19): siRNA sense strand
agauguauauugccuuugu

SEQ ID NO: 955346 - RNA, 19 nt, Homo sapiens
  misc_RNA (1)...(19): siRNA sense strand
cuacaaucuucaaguuaug

SEQ ID NO: 955347 - RNA, 19 nt, Homo sapiens
  misc_RNA (1)...(19): siRNA sense strand
caguguuucucuucauuga

SEQ ID NO: 955348 - RNA, 19 nt, Homo sapiens
  misc_RNA (1)...(19): siRNA sense strand
gcuccucgauaucagucua

SEQ ID NO: 955349 - RNA, 19 nt, Homo sapiens
  misc_RNA (1)...(19): siRNA sense strand
gauaucagucuaugagaag

SEQ ID NO: 955350 - RNA, 19 nt, Homo sapiens
  misc_RNA (1)...(19): siRNA sense strand
ucaccuccguccuuauaug

SEQ ID NO: 955351 - RNA, 19 nt, Homo sapiens
  misc_RNA (1)...(19): siRNA sense strand
auaccagucaugacaaaua

SEQ ID NO: 955352 - RNA, 19 nt, Homo sapiens
  misc_RNA (1)...(19): siRNA sense strand
caaacucccggaagaaaca

SEQ ID NO: 955353 - RNA, 19 nt, Homo sapiens
  misc_RNA (1)...(19): siRNA sense strand
cagacuacgugcucagcuu

SEQ ID NO: 955354 - RNA, 19 nt, Homo sapiens
  misc_RNA (1)...(19): siRNA sense strand
agauggauuucauucuuug

SEQ ID NO: 955355 - RNA, 19 nt, Homo sapiens
  misc_RNA (1)...(19): siRNA sense strand
gucaguguuucucuucauu

SEQ ID NO: 955356 - RNA, 19 nt, Homo sapiens
  misc_RNA (1)...(19): siRNA sense strand
agacuacgugcucagcuua

SEQ ID NO: 955357 - RNA, 19 nt, Homo sapiens
  misc_RNA (1)...(19): siRNA sense strand
uuauaccagucaugacaaa

SEQ ID NO: 955358 - RNA, 19 nt, Homo sapiens
  misc_RNA (1)...(19): siRNA sense strand
agacuggaaucguugucaa

SEQ ID NO: 955359 - RNA, 19 nt, Homo sapiens
  misc_RNA (1)...(19): siRNA sense strand
guguuucucuucauugaca

SEQ ID NO: 955360 - RNA, 19 nt, Homo sapiens
  misc_RNA (1)...(19): siRNA sense strand
gugcgagauuccagcuauu

SEQ ID NO: 955361 - RNA, 19 nt, Homo sapiens
  misc_RNA (1)...(19): siRNA sense strand
ccaaauuugaguuucauca

SEQ ID NO: 955362 - RNA, 19 nt, Homo sapiens
  misc_RNA (1)...(19): siRNA sense strand
gguuauaccagucaugaca

SEQ ID NO: 955363 - RNA, 19 nt, Homo sapiens
  misc_RNA (1)...(19): siRNA sense strand
ggauguaauuggcuguacu

SEQ ID NO: 955364 - RNA, 19 nt, Homo sapiens
  misc_RNA (1)...(19): siRNA sense strand
uuugaagugucugagguua

SEQ ID NO: 955365 - RNA, 19 nt, Homo sapiens
  misc_RNA (1)...(19): siRNA sense strand
gagauuccagcuauuccuu

SEQ ID NO: 955366 - RNA, 19 nt, Homo sapiens
  misc_RNA (1)...(19): siRNA sense strand
ccugaaaggugugcgagau

SEQ ID NO: 955367 - RNA, 19 nt, Homo sapiens
  misc_RNA (1)...(19): siRNA sense strand
ugugcgagauuccagcuau

SEQ ID NO: 955368 - RNA, 19 nt, Homo sapiens
  misc_RNA (1)...(19): siRNA sense strand
uagcugaccaguuugacuu

SEQ ID NO: 955369 - RNA, 19 nt, Homo sapiens
  misc_RNA (1)...(19): siRNA sense strand
gguggaaagaaucugauga

SEQ ID NO: 955370 - RNA, 19 nt, Homo sapiens
  misc_RNA (1)...(19): siRNA sense strand
ucuaugagaagggauguaa

SEQ ID NO: 955371 - RNA, 19 nt, Homo sapiens
  misc_RNA (1)...(19): siRNA sense strand
gacuucaagauguauauug

SEQ ID NO: 955372 - RNA, 19 nt, Homo sapiens
  misc_RNA (1)...(19): siRNA sense strand
aagaaucugaugagccuuu

SEQ ID NO: 955373 - RNA, 19 nt, Homo sapiens
  misc_RNA (1)...(19): siRNA sense strand
ggccaaauuugaguuucau

SEQ ID NO: 955374 - RNA, 19 nt, Homo sapiens
  misc_RNA (1)...(19): siRNA sense strand
acaaagcuacaaucuucaa

SEQ ID NO: 955375 - RNA, 19 nt, Homo sapiens
  misc_RNA (1)...(19): siRNA sense strand
cugggcaguuggcaccaua

SEQ ID NO: 955376 - RNA, 19 nt, Homo sapiens
  misc_RNA (1)...(19): siRNA sense strand
ugagaagggauguaauugg

SEQ ID NO: 955377 - RNA, 19 nt, Homo sapiens
  misc_RNA (1)...(19): siRNA sense strand
aucucuagcugaccaguuu

SEQ ID NO: 955378 - RNA, 19 nt, Homo sapiens
  misc_RNA (1)...(19): siRNA sense strand
ucaggccaaauuugaguuu

SEQ ID NO: 955379 - RNA, 19 nt, Homo sapiens
  misc_RNA (1)...(19): siRNA sense strand
caggagauggauuucauuc

SEQ ID NO: 955380 - RNA, 19 nt, Homo sapiens
  misc_RNA (1)...(19): siRNA sense strand
cccuagagcuuuuacagaa

SEQ ID NO: 955381 - RNA, 19 nt, Homo sapiens
  misc_RNA (1)...(19): siRNA sense strand
gaagaaaauauccugaaag

SEQ ID NO: 955382 - RNA, 19 nt, Homo sapiens
  misc_RNA (1)...(19): siRNA sense strand
ccagucaguguuucucuuc

SEQ ID NO: 955383 - RNA, 19 nt, Homo sapiens
  misc_RNA (1)...(19): siRNA sense strand
cggaagaaacaagcucuga

SEQ ID NO: 955384 - RNA, 19 nt, Homo sapiens
  misc_RNA (1)...(19): siRNA sense strand
ggccucggaaugauauuga

SEQ ID NO: 955385 - RNA, 19 nt, Homo sapiens
  misc_RNA (1)...(19): siRNA sense strand
cucaggagauggauuucau

SEQ ID NO: 955386 - RNA, 19 nt, Homo sapiens
  misc_RNA (1)...(19): siRNA sense strand
gcugaccaguuugacuuca

SEQ ID NO: 955387 - RNA, 19 nt, Homo sapiens
  misc_RNA (1)...(19): siRNA sense strand
acagaaggaugugguacag

SEQ ID NO: 955388 - RNA, 19 nt, Homo sapiens
  misc_RNA (1)...(19): siRNA sense strand
aagaaaauauccugaaagg

SEQ ID NO: 955389 - RNA, 19 nt, Homo sapiens
  misc_RNA (1)...(19): siRNA sense strand
aggccaaauuugaguuuca

SEQ ID NO: 955390 - RNA, 19 nt, Homo sapiens
  misc_RNA (1)...(19): siRNA sense strand
gaaggaagaugccacaaag

SEQ ID NO: 955391 - RNA, 19 nt, Homo sapiens
  misc_RNA (1)...(19): siRNA sense strand
ccuaucagcugucauacua

SEQ ID NO: 955392 - RNA, 19 nt, Homo sapiens
  misc_RNA (1)...(19): siRNA sense strand
gcaccgagaugggaaaguu

SEQ ID NO: 955393 - RNA, 19 nt, Homo sapiens
  misc_RNA (1)...(19): siRNA sense strand
ggagaaaucaugggaauug

SEQ ID NO: 955394 - RNA, 19 nt, Homo sapiens
  misc_RNA (1)...(19): siRNA sense strand
gaagguaaccaucccugaa

SEQ ID NO: 955395 - RNA, 19 nt, Homo sapiens
  misc_RNA (1)...(19): siRNA sense strand
gacaagacgcagacaauga

SEQ ID NO: 955396 - RNA, 19 nt, Homo sapiens
  misc_RNA (1)...(19): siRNA sense strand
ccgagcagcugguuguuga

SEQ ID NO: 955397 - RNA, 19 nt, Homo sapiens
  misc_RNA (1)...(19): siRNA sense strand
caagaaagaggagaaguug

SEQ ID NO: 955398 - RNA, 19 nt, Homo sapiens
  misc_RNA (1)...(19): siRNA sense strand
ugagaagagucagauggua

SEQ ID NO: 955399 - RNA, 19 nt, Homo sapiens
  misc_RNA (1)...(19): siRNA sense strand
ccaagaaagaggagaaguu

SEQ ID NO: 955400 - RNA, 19 nt, Homo sapiens
  misc_RNA (1)...(19): siRNA sense strand
uaucagcugucauacuaga

SEQ ID NO: 955401 - RNA, 19 nt, Homo sapiens
  misc_RNA (1)...(19): siRNA sense strand
caugggaauuggccaagaa

SEQ ID NO: 955402 - RNA, 19 nt, Homo sapiens
  misc_RNA (1)...(19): siRNA sense strand
gggaauuggccaagaaaga

SEQ ID NO: 955403 - RNA, 19 nt, Homo sapiens
  misc_RNA (1)...(19): siRNA sense strand
guagggaucagcaauagug

SEQ ID NO: 955404 - RNA, 19 nt, Homo sapiens
  misc_RNA (1)...(19): siRNA sense strand
cuaagggccugggcaagaa

SEQ ID NO: 955405 - RNA, 19 nt, Homo sapiens
  misc_RNA (1)...(19): siRNA sense strand
gcagucacccacacaagga

SEQ ID NO: 955406 - RNA, 19 nt, Homo sapiens
  misc_RNA (1)...(19): siRNA sense strand
aaggagaaaucaugggaau

SEQ ID NO: 955407 - RNA, 19 nt, Homo sapiens
  misc_RNA (1)...(19): siRNA sense strand
acaagacgcagacaaugaa

SEQ ID NO: 955408 - RNA, 19 nt, Homo sapiens
  misc_RNA (1)...(19): siRNA sense strand
ggaauuggccaagaaagag

SEQ ID NO: 955409 - RNA, 19 nt, Homo sapiens
  misc_RNA (1)...(19): siRNA sense strand
gagaaaucaugggaauugg

SEQ ID NO: 955410 - RNA, 19 nt, Homo sapiens
  misc_RNA (1)...(19): siRNA sense strand
agaaggaagaugccacaaa

SEQ ID NO: 955411 - RNA, 19 nt, Homo sapiens
  misc_RNA (1)...(19): siRNA sense strand
cagacaagacgcagacaau

SEQ ID NO: 955412 - RNA, 19 nt, Homo sapiens
  misc_RNA (1)...(19): siRNA sense strand
aaccaucccugaacagaag

SEQ ID NO: 955413 - RNA, 19 nt, Homo sapiens
  misc_RNA (1)...(19): siRNA sense strand
uaaccaucccugaacagaa

SEQ ID NO: 955414 - RNA, 19 nt, Homo sapiens
  misc_RNA (1)...(19): siRNA sense strand
cgacgccuccugcuggaaa

SEQ ID NO: 955415 - RNA, 19 nt, Homo sapiens
  misc_RNA (1)...(19): siRNA sense strand
guaaccaucccugaacaga

SEQ ID NO: 955416 - RNA, 19 nt, Homo sapiens
  misc_RNA (1)...(19): siRNA sense strand
ucgccacggugcaguauca

SEQ ID NO: 955417 - RNA, 19 nt, Homo sapiens
  misc_RNA (1)...(19): siRNA sense strand
gugcauugguggacaagac

SEQ ID NO: 955418 - RNA, 19 nt, Homo sapiens
  misc_RNA (1)...(19): siRNA sense strand
caagacgcagacaaugaaa

SEQ ID NO: 955419 - RNA, 19 nt, Homo sapiens
  misc_RNA (1)...(19): siRNA sense strand
gaugguagggaucagcaau

SEQ ID NO: 955420 - RNA, 19 nt, Homo sapiens
  misc_RNA (1)...(19): siRNA sense strand
gcagagagaagcgcagcau

SEQ ID NO: 955421 - RNA, 19 nt, Homo sapiens
  misc_RNA (1)...(19): siRNA sense strand
ugucucugcggaacaauaa

SEQ ID NO: 955422 - RNA, 19 nt, Homo sapiens
  misc_RNA (1)...(19): siRNA sense strand
ccuaagggccugggcaaga

SEQ ID NO: 955423 - RNA, 19 nt, Homo sapiens
  misc_RNA (1)...(19): siRNA sense strand
acagcacgauugcgcacuu

SEQ ID NO: 955424 - RNA, 19 nt, Homo sapiens
  misc_RNA (1)...(19): siRNA sense strand
ccacggugcaguaucagau

SEQ ID NO: 955425 - RNA, 19 nt, Homo sapiens
  misc_RNA (1)...(19): siRNA sense strand
cagcacgauugcgcacuug

SEQ ID NO: 955426 - RNA, 19 nt, Homo sapiens
  misc_RNA (1)...(19): siRNA sense strand
agacaagacgcagacaaug

SEQ ID NO: 955427 - RNA, 19 nt, Homo sapiens
  misc_RNA (1)...(19): siRNA sense strand
gcacgauugcgcacuuguc

SEQ ID NO: 955428 - RNA, 19 nt, Homo sapiens
  misc_RNA (1)...(19): siRNA sense strand
ggagcaccgagaugggaaa

SEQ ID NO: 955429 - RNA, 19 nt, Homo sapiens
  misc_RNA (1)...(19): siRNA sense strand
ggaagaaagucauugaaga

SEQ ID NO: 955430 - RNA, 19 nt, Homo sapiens
  misc_RNA (1)...(19): siRNA sense strand
gaagauaucccgguguuua

SEQ ID NO: 955431 - RNA, 19 nt, Homo sapiens
  misc_RNA (1)...(19): siRNA sense strand
gcagugacauuguacagaa

SEQ ID NO: 955432 - RNA, 19 nt, Homo sapiens
  misc_RNA (1)...(19): siRNA sense strand
gagauuggauauagggaua

SEQ ID NO: 955433 - RNA, 19 nt, Homo sapiens
  misc_RNA (1)...(19): siRNA sense strand
ccacugaccugaagaaaca

SEQ ID NO: 955434 - RNA, 19 nt, Homo sapiens
  misc_RNA (1)...(19): siRNA sense strand
ggaagaagaagaagagaaa

SEQ ID NO: 955435 - RNA, 19 nt, Homo sapiens
  misc_RNA (1)...(19): siRNA sense strand
caagguaaaugaugauguu

SEQ ID NO: 955436 - RNA, 19 nt, Homo sapiens
  misc_RNA (1)...(19): siRNA sense strand
caaauuuaauggcaaggua

SEQ ID NO: 955437 - RNA, 19 nt, Homo sapiens
  misc_RNA (1)...(19): siRNA sense strand
guauaaaguuggcugauau

SEQ ID NO: 955438 - RNA, 19 nt, Homo sapiens
  misc_RNA (1)...(19): siRNA sense strand
gcacacagcucaccuucca

SEQ ID NO: 955439 - RNA, 19 nt, Homo sapiens
  misc_RNA (1)...(19): siRNA sense strand
ugacacaacugccaaacaa

SEQ ID NO: 955440 - RNA, 19 nt, Homo sapiens
  misc_RNA (1)...(19): siRNA sense strand
ugacagcagugacauugua

SEQ ID NO: 955441 - RNA, 19 nt, Homo sapiens
  misc_RNA (1)...(19): siRNA sense strand
gaacagauccaggcuauca

SEQ ID NO: 955442 - RNA, 19 nt, Homo sapiens
  misc_RNA (1)...(19): siRNA sense strand
caaguuaccucugauuaug

SEQ ID NO: 955443 - RNA, 19 nt, Homo sapiens
  misc_RNA (1)...(19): siRNA sense strand
aaaguuggcugauaucaau

SEQ ID NO: 955444 - RNA, 19 nt, Homo sapiens
  misc_RNA (1)...(19): siRNA sense strand
gaggaaaccugugaaaaua

SEQ ID NO: 955445 - RNA, 19 nt, Homo sapiens
  misc_RNA (1)...(19): siRNA sense strand
ggaccucccugcccuguau

SEQ ID NO: 955446 - RNA, 19 nt, Homo sapiens
  misc_RNA (1)...(19): siRNA sense strand
uaauuaaccuugaccaugu

SEQ ID NO: 955447 - RNA, 19 nt, Homo sapiens
  misc_RNA (1)...(19): siRNA sense strand
aaauguggccguauucuua

SEQ ID NO: 955448 - RNA, 19 nt, Homo sapiens
  misc_RNA (1)...(19): siRNA sense strand
gacaguggauuuacacaug

SEQ ID NO: 955449 - RNA, 19 nt, Homo sapiens
  misc_RNA (1)...(19): siRNA sense strand
gaacaagcccguccacagu

SEQ ID NO: 955450 - RNA, 19 nt, Homo sapiens
  misc_RNA (1)...(19): siRNA sense strand
gccagaguauaacuucuua

SEQ ID NO: 955451 - RNA, 19 nt, Homo sapiens
  misc_RNA (1)...(19): siRNA sense strand
gggaagcgcucguccagau

SEQ ID NO: 955452 - RNA, 19 nt, Homo sapiens
  misc_RNA (1)...(19): siRNA sense strand
gauccaggcuaucaaggaa

SEQ ID NO: 955453 - RNA, 19 nt, Homo sapiens
  misc_RNA (1)...(19): siRNA sense strand
cguauaaugugacagauga

SEQ ID NO: 955454 - RNA, 19 nt, Homo sapiens
  misc_RNA (1)...(19): siRNA sense strand
ucucaacugugauuaauga

SEQ ID NO: 955455 - RNA, 19 nt, Homo sapiens
  misc_RNA (1)...(19): siRNA sense strand
ucagguaucuuacagacuu

SEQ ID NO: 955456 - RNA, 19 nt, Homo sapiens
  misc_RNA (1)...(19): siRNA sense strand
gaagaggaaaccugugaaa

SEQ ID NO: 955457 - RNA, 19 nt, Homo sapiens
  misc_RNA (1)...(19): siRNA sense strand
ccaaagcgccugagaagga

SEQ ID NO: 955458 - RNA, 19 nt, Homo sapiens
  misc_RNA (1)...(19): siRNA sense strand
cagaacagauccaggcuau

SEQ ID NO: 955459 - RNA, 19 nt, Homo sapiens
  misc_RNA (1)...(19): siRNA sense strand
gcagugcaguuuccagaau

SEQ ID NO: 955460 - RNA, 19 nt, Homo sapiens
  misc_RNA (1)...(19): siRNA sense strand
gaagagaaagggaaaccaa

SEQ ID NO: 955461 - RNA, 19 nt, Homo sapiens
  misc_RNA (1)...(19): siRNA sense strand
ggaauaauccagugaugau

SEQ ID NO: 955462 - RNA, 19 nt, Homo sapiens
  misc_RNA (1)...(19): siRNA sense strand
gguaaaugaugauguugga

SEQ ID NO: 955463 - RNA, 19 nt, Homo sapiens
  misc_RNA (1)...(19): siRNA sense strand
gauaaccuggacucaauua

SEQ ID NO: 955464 - RNA, 19 nt, Homo sapiens
  misc_RNA (1)...(19): siRNA sense strand
gcagauccuuuacuucauc

SEQ ID NO: 955465 - RNA, 19 nt, Homo sapiens
  misc_RNA (1)...(19): siRNA sense strand
ggaugucugucugggaaua

SEQ ID NO: 955466 - RNA, 19 nt, Homo sapiens
  misc_RNA (1)...(19): siRNA sense strand
gaagaaagucauugaagag

SEQ ID NO: 955467 - RNA, 19 nt, Homo sapiens
  misc_RNA (1)...(19): siRNA sense strand
ccagguacguggaacaaau

SEQ ID NO: 955468 - RNA, 19 nt, Homo sapiens
  misc_RNA (1)...(19): siRNA sense strand
gcuaaaauuucaccucuuu

SEQ ID NO: 955469 - RNA, 19 nt, Homo sapiens
  misc_RNA (1)...(19): siRNA sense strand
gaugaugacccucaccaaa

SEQ ID NO: 955470 - RNA, 19 nt, Homo sapiens
  misc_RNA (1)...(19): siRNA sense strand
uguauaaaguuggcugaua

SEQ ID NO: 955471 - RNA, 19 nt, Homo sapiens
  misc_RNA (1)...(19): siRNA sense strand
gaggagauaccaacccaaa

SEQ ID NO: 955472 - RNA, 19 nt, Homo sapiens
  misc_RNA (1)...(19): siRNA sense strand
gaugacacugcucaaguua

SEQ ID NO: 955473 - RNA, 19 nt, Homo sapiens
  misc_RNA (1)...(19): siRNA sense strand
gacuaaugcuuuccugguu

SEQ ID NO: 955474 - RNA, 19 nt, Homo sapiens
  misc_RNA (1)...(19): siRNA sense strand
guacguggaacaaaucuug

SEQ ID NO: 955475 - RNA, 19 nt, Homo sapiens
  misc_RNA (1)...(19): siRNA sense strand
ccaggccucucaacuguga

SEQ ID NO: 955476 - RNA, 19 nt, Homo sapiens
  misc_RNA (1)...(19): siRNA sense strand
uggagcagcuaaauacuug

SEQ ID NO: 955477 - RNA, 19 nt, Homo sapiens
  misc_RNA (1)...(19): siRNA sense strand
uggauaaccuggacucaau

SEQ ID NO: 955478 - RNA, 19 nt, Homo sapiens
  misc_RNA (1)...(19): siRNA sense strand
uaucaaugguccagcuaaa

SEQ ID NO: 955479 - RNA, 19 nt, Homo sapiens
  misc_RNA (1)...(19): siRNA sense strand
gcagcuaaauacuuggaau

SEQ ID NO: 955480 - RNA, 19 nt, Homo sapiens
  misc_RNA (1)...(19): siRNA sense strand
uaugggauauguauucuca

SEQ ID NO: 955481 - RNA, 19 nt, Homo sapiens
  misc_RNA (1)...(19): siRNA sense strand
gauuaaugaucaugguuca

SEQ ID NO: 955482 - RNA, 19 nt, Homo sapiens
  misc_RNA (1)...(19): siRNA sense strand
caugcuguuugguaucuua

SEQ ID NO: 955483 - RNA, 19 nt, Homo sapiens
  misc_RNA (1)...(19): siRNA sense strand
cgaagccacggccucauua

SEQ ID NO: 955484 - RNA, 19 nt, Homo sapiens
  misc_RNA (1)...(19): siRNA sense strand
ggaagacagcgaugaguca

SEQ ID NO: 955485 - RNA, 19 nt, Homo sapiens
  misc_RNA (1)...(19): siRNA sense strand
gcugcugcauggaaucuuu

SEQ ID NO: 955486 - RNA, 19 nt, Homo sapiens
  misc_RNA (1)...(19): siRNA sense strand
gcuguuugguaucuuacua

SEQ ID NO: 955487 - RNA, 19 nt, Homo sapiens
  misc_RNA (1)...(19): siRNA sense strand
gaaccucuugucauggaua

SEQ ID NO: 955488 - RNA, 19 nt, Homo sapiens
  misc_RNA (1)...(19): siRNA sense strand
gcucuucagucuccugugu

SEQ ID NO: 955489 - RNA, 19 nt, Homo sapiens
  misc_RNA (1)...(19): siRNA sense strand
cauguggaauuuaagcauu

SEQ ID NO: 955490 - RNA, 19 nt, Homo sapiens
  misc_RNA (1)...(19): siRNA sense strand
ugggauauguauucucaaa

SEQ ID NO: 955491 - RNA, 19 nt, Homo sapiens
  misc_RNA (1)...(19): siRNA sense strand
gaucauccaggaaggacua

SEQ ID NO: 955492 - RNA, 19 nt, Homo sapiens
  misc_RNA (1)...(19): siRNA sense strand
gaagcgcucguccagauug

SEQ ID NO: 955493 - RNA, 19 nt, Homo sapiens
  misc_RNA (1)...(19): siRNA sense strand
cucaggcggugcuauauaa

SEQ ID NO: 955494 - RNA, 19 nt, Homo sapiens
  misc_RNA (1)...(19): siRNA sense strand
caggaaggacuaaugcuuu

SEQ ID NO: 955495 - RNA, 19 nt, Homo sapiens
  misc_RNA (1)...(19): siRNA sense strand
gagugaaucccguuacuuc

SEQ ID NO: 955496 - RNA, 19 nt, Homo sapiens
  misc_RNA (1)...(19): siRNA sense strand
ugugacagaugauaaauac

SEQ ID NO: 955497 - RNA, 19 nt, Homo sapiens
  misc_RNA (1)...(19): siRNA sense strand
agaugacacugcucaaguu

SEQ ID NO: 955498 - RNA, 19 nt, Homo sapiens
  misc_RNA (1)...(19): siRNA sense strand
ggaucacagucuucaggaa

SEQ ID NO: 955499 - RNA, 19 nt, Homo sapiens
  misc_RNA (1)...(19): siRNA sense strand
uaucaaggaagaagaagaa

SEQ ID NO: 955500 - RNA, 19 nt, Homo sapiens
  misc_RNA (1)...(19): siRNA sense strand
gauaaauacggaugucugu

SEQ ID NO: 955501 - RNA, 19 nt, Homo sapiens
  misc_RNA (1)...(19): siRNA sense strand
aaacagagugccugagaga

SEQ ID NO: 955502 - RNA, 19 nt, Homo sapiens
  misc_RNA (1)...(19): siRNA sense strand
uaacucagcaccucuuaca

SEQ ID NO: 955503 - RNA, 19 nt, Homo sapiens
  misc_RNA (1)...(19): siRNA sense strand
ggaaaccugugaaaauaau

SEQ ID NO: 955504 - RNA, 19 nt, Homo sapiens
  misc_RNA (1)...(19): siRNA sense strand
gugcaacuccuaugauuca

SEQ ID NO: 955505 - RNA, 19 nt, Homo sapiens
  misc_RNA (1)...(19): siRNA sense strand
aaacguauaaugugacaga

SEQ ID NO: 955506 - RNA, 19 nt, Homo sapiens
  misc_RNA (1)...(19): siRNA sense strand
ggauuuacacauggacaua

SEQ ID NO: 955507 - RNA, 19 nt, Homo sapiens
  misc_RNA (1)...(19): siRNA sense strand
uaaccuggacucaauuaug

SEQ ID NO: 955508 - RNA, 19 nt, Homo sapiens
  misc_RNA (1)...(19): siRNA sense strand
ggaauaucccugccuugga

SEQ ID NO: 955509 - RNA, 19 nt, Homo sapiens
  misc_RNA (1)...(19): siRNA sense strand
aagcagauccuuuacuuca

SEQ ID NO: 955510 - RNA, 19 nt, Homo sapiens
  misc_RNA (1)...(19): siRNA sense strand
uuacagaaccacaagaugu

SEQ ID NO: 955511 - RNA, 19 nt, Homo sapiens
  misc_RNA (1)...(19): siRNA sense strand
agccuuggauuacccauaa

SEQ ID NO: 955512 - RNA, 19 nt, Homo sapiens
  misc_RNA (1)...(19): siRNA sense strand
agacaugggccucuuugaa

SEQ ID NO: 955513 - RNA, 19 nt, Homo sapiens
  misc_RNA (1)...(19): siRNA sense strand
ucacagggccuuaacuuac

SEQ ID NO: 955514 - RNA, 19 nt, Homo sapiens
  misc_RNA (1)...(19): siRNA sense strand
gacuccaccuguuauaugu

SEQ ID NO: 955515 - RNA, 19 nt, Homo sapiens
  misc_RNA (1)...(19): siRNA sense strand
caaggaagaagaagaagag

SEQ ID NO: 955516 - RNA, 19 nt, Homo sapiens
  misc_RNA (1)...(19): siRNA sense strand
ucaaugguccagcuaaaug

SEQ ID NO: 955517 - RNA, 19 nt, Homo sapiens
  misc_RNA (1)...(19): siRNA sense strand
gaugauguuggaauagauu

SEQ ID NO: 955518 - RNA, 19 nt, Homo sapiens
  misc_RNA (1)...(19): siRNA sense strand
gaccuuaccuggcguaccu

SEQ ID NO: 955519 - RNA, 19 nt, Homo sapiens
  misc_RNA (1)...(19): siRNA sense strand
gcacgauuaugaucaucca

SEQ ID NO: 955520 - RNA, 19 nt, Homo sapiens
  misc_RNA (1)...(19): siRNA sense strand
ugaaacagagugccugaga

SEQ ID NO: 955521 - RNA, 19 nt, Homo sapiens
  misc_RNA (1)...(19): siRNA sense strand
aaaccaauaacaacaguga

SEQ ID NO: 955522 - RNA, 19 nt, Homo sapiens
  misc_RNA (1)...(19): siRNA sense strand
ucaaguuaccucugauuau

SEQ ID NO: 955523 - RNA, 19 nt, Homo sapiens
  misc_RNA (1)...(19): siRNA sense strand
gaccaggugcccucgcuaa

SEQ ID NO: 955524 - RNA, 19 nt, Homo sapiens
  misc_RNA (1)...(19): siRNA sense strand
gcauuuccguuuccuuguc

SEQ ID NO: 955525 - RNA, 19 nt, Homo sapiens
  misc_RNA (1)...(19): siRNA sense strand
gaugauaaauacggauguc

SEQ ID NO: 955526 - RNA, 19 nt, Homo sapiens
  misc_RNA (1)...(19): siRNA sense strand
gacaugggccucuuugaag

SEQ ID NO: 955527 - RNA, 19 nt, Homo sapiens
  misc_RNA (1)...(19): siRNA sense strand
ucccgaaccucuugucaug

SEQ ID NO: 955528 - RNA, 19 nt, Homo sapiens
  misc_RNA (1)...(19): siRNA sense strand
ggacaaaccaauucuugcu

SEQ ID NO: 955529 - RNA, 19 nt, Homo sapiens
  misc_RNA (1)...(19): siRNA sense strand
caacgucacucgcugcuuu

SEQ ID NO: 955530 - RNA, 19 nt, Homo sapiens
  misc_RNA (1)...(19): siRNA sense strand
gcaagaaauucaaugagau

SEQ ID NO: 955531 - RNA, 19 nt, Homo sapiens
  misc_RNA (1)...(19): siRNA sense strand
gacaugcucuucuugauca

SEQ ID NO: 955532 - RNA, 19 nt, Homo sapiens
  misc_RNA (1)...(19): siRNA sense strand
gcaagcaccucaccgaaaa

SEQ ID NO: 955533 - RNA, 19 nt, Homo sapiens
  misc_RNA (1)...(19): siRNA sense strand
ugcaagaaauucaaugaga

SEQ ID NO: 955534 - RNA, 19 nt, Homo sapiens
  misc_RNA (1)...(19): siRNA sense strand
ccacggauacggucacuga

SEQ ID NO: 955535 - RNA, 19 nt, Homo sapiens
  misc_RNA (1)...(19): siRNA sense strand
ccuguacccuugcaagaaa

SEQ ID NO: 955536 - RNA, 19 nt, Homo sapiens
  misc_RNA (1)...(19): siRNA sense strand
uagcaccaacugugucuua

SEQ ID NO: 955537 - RNA, 19 nt, Homo sapiens
  misc_RNA (1)...(19): siRNA sense strand
ggacaugcucuucuugauc

SEQ ID NO: 955538 - RNA, 19 nt, Homo sapiens
  misc_RNA (1)...(19): siRNA sense strand
gcaagcguggcaucucuuu

SEQ ID NO: 955539 - RNA, 19 nt, Homo sapiens
  misc_RNA (1)...(19): siRNA sense strand
cacuuuggauugucuacua

SEQ ID NO: 955540 - RNA, 19 nt, Homo sapiens
  misc_RNA (1)...(19): siRNA sense strand
gcuuugagcauuacgagaa

SEQ ID NO: 955541 - RNA, 19 nt, Homo sapiens
  misc_RNA (1)...(19): siRNA sense strand
ccaagaaguuccgcaagca

SEQ ID NO: 955542 - RNA, 19 nt, Homo sapiens
  misc_RNA (1)...(19): siRNA sense strand
uggauugucuacuaccaaa

SEQ ID NO: 955543 - RNA, 19 nt, Homo sapiens
  misc_RNA (1)...(19): siRNA sense strand
gcaguaacucggcccauca

SEQ ID NO: 955544 - RNA, 19 nt, Homo sapiens
  misc_RNA (1)...(19): siRNA sense strand
guaacucggcccaucaaga

SEQ ID NO: 955545 - RNA, 19 nt, Homo sapiens
  misc_RNA (1)...(19): siRNA sense strand
uacacucucuucccgauug

SEQ ID NO: 955546 - RNA, 19 nt, Homo sapiens
  misc_RNA (1)...(19): siRNA sense strand
gucacccucugccuccuua

SEQ ID NO: 955547 - RNA, 19 nt, Homo sapiens
  misc_RNA (1)...(19): siRNA sense strand
ugaagugguugugccauuc

SEQ ID NO: 955548 - RNA, 19 nt, Homo sapiens
  misc_RNA (1)...(19): siRNA sense strand
gcaccaacugugucuuaga

SEQ ID NO: 955549 - RNA, 19 nt, Homo sapiens
  misc_RNA (1)...(19): siRNA sense strand
gcacggucuuggcgguguu

SEQ ID NO: 955550 - RNA, 19 nt, Homo sapiens
  misc_RNA (1)...(19): siRNA sense strand
cggauacggucacugaagu

SEQ ID NO: 955551 - RNA, 19 nt, Homo sapiens
  misc_RNA (1)...(19): siRNA sense strand
gaagugguugugccauuca

SEQ ID NO: 955552 - RNA, 19 nt, Homo sapiens
  misc_RNA (1)...(19): siRNA sense strand
gcggacaugcucuucuuga

SEQ ID NO: 955553 - RNA, 19 nt, Homo sapiens
  misc_RNA (1)...(19): siRNA sense strand
cugaagugguugugccauu

SEQ ID NO: 955554 - RNA, 19 nt, Homo sapiens
  misc_RNA (1)...(19): siRNA sense strand
ccaaauuccugugcaacgu

SEQ ID NO: 955555 - RNA, 19 nt, Homo sapiens
  misc_RNA (1)...(19): siRNA sense strand
caaauuccaccaggccauu

SEQ ID NO: 955556 - RNA, 19 nt, Homo sapiens
  misc_RNA (1)...(19): siRNA sense strand
uggcggacaugcucuucuu

SEQ ID NO: 955557 - RNA, 19 nt, Homo sapiens
  misc_RNA (1)...(19): siRNA sense strand
guuuacagcaucaucuuug

SEQ ID NO: 955558 - RNA, 19 nt, Homo sapiens
  misc_RNA (1)...(19): siRNA sense strand
ccucccacauggacucuga

SEQ ID NO: 955559 - RNA, 19 nt, Homo sapiens
  misc_RNA (1)...(19): siRNA sense strand
ugaucacccugccacuuug

SEQ ID NO: 955560 - RNA, 19 nt, Homo sapiens
  misc_RNA (1)...(19): siRNA sense strand
caacacagugcccgacagu

SEQ ID NO: 955561 - RNA, 19 nt, Homo sapiens
  misc_RNA (1)...(19): siRNA sense strand
uaacucggcccaucaagac

SEQ ID NO: 955562 - RNA, 19 nt, Homo sapiens
  misc_RNA (1)...(19): siRNA sense strand
caccaggccauuaaugaug

SEQ ID NO: 955563 - RNA, 19 nt, Homo sapiens
  misc_RNA (1)...(19): siRNA sense strand
ccacaucuucaucguguuc

SEQ ID NO: 955564 - RNA, 19 nt, Homo sapiens
  misc_RNA (1)...(19): siRNA sense strand
acuguuuccucaccaagaa

SEQ ID NO: 955565 - RNA, 19 nt, Homo sapiens
  misc_RNA (1)...(19): siRNA sense strand
ccaccaggccauuaaugau

SEQ ID NO: 955566 - RNA, 19 nt, Homo sapiens
  misc_RNA (1)...(19): siRNA sense strand
cggacaugcucuucuugau

SEQ ID NO: 955567 - RNA, 19 nt, Homo sapiens
  misc_RNA (1)...(19): siRNA sense strand
ggccauuaaugaugcacau

SEQ ID NO: 955568 - RNA, 19 nt, Homo sapiens
  misc_RNA (1)...(19): siRNA sense strand
ccgcaagcguggcaucucu

SEQ ID NO: 955569 - RNA, 19 nt, Homo sapiens
  misc_RNA (1)...(19): siRNA sense strand
uugaucacccugccacuuu

SEQ ID NO: 955570 - RNA, 19 nt, Homo sapiens
  misc_RNA (1)...(19): siRNA sense strand
uccugggcgucaucacuua

SEQ ID NO: 955571 - RNA, 19 nt, Homo sapiens
  misc_RNA (1)...(19): siRNA sense strand
ugggcgucaucacuuauaa

SEQ ID NO: 955572 - RNA, 19 nt, Homo sapiens
  misc_RNA (1)...(19): siRNA sense strand
ucaucuggguggccauugu

SEQ ID NO: 955573 - RNA, 19 nt, Homo sapiens
  misc_RNA (1)...(19): siRNA sense strand
cgcaagcaccucaccgaaa

SEQ ID NO: 955574 - RNA, 19 nt, Homo sapiens
  misc_RNA (1)...(19): siRNA sense strand
acccuguuaucuacuguuu

SEQ ID NO: 955575 - RNA, 19 nt, Homo sapiens
  misc_RNA (1)...(19): siRNA sense strand
aagcguggcaucucuuugu

SEQ ID NO: 955576 - RNA, 19 nt, Homo sapiens
  misc_RNA (1)...(19): siRNA sense strand
ccgauuguuuacagcauca

SEQ ID NO: 955577 - RNA, 19 nt, Homo sapiens
  misc_RNA (1)...(19): siRNA sense strand
gggcuuccaggacagcaaa

SEQ ID NO: 955578 - RNA, 19 nt, Homo sapiens
  misc_RNA (1)...(19): siRNA sense strand
caucauccacaucuucauc

SEQ ID NO: 955579 - RNA, 19 nt, Homo sapiens
  misc_RNA (1)...(19): siRNA sense strand
uuccuggucuuccucauca

SEQ ID NO: 955580 - RNA, 19 nt, Homo sapiens
  misc_RNA (1)...(19): siRNA sense strand
gcaccucaccgaaaaguuc

SEQ ID NO: 955581 - RNA, 19 nt, Homo sapiens
  misc_RNA (1)...(19): siRNA sense strand
gaagaucaguggauuaaua

SEQ ID NO: 955582 - RNA, 19 nt, Homo sapiens
  misc_RNA (1)...(19): siRNA sense strand
gaacugugcuucucuuaaa

SEQ ID NO: 955583 - RNA, 19 nt, Homo sapiens
  misc_RNA (1)...(19): siRNA sense strand
ggaaagaccucugggugua

SEQ ID NO: 955584 - RNA, 19 nt, Homo sapiens
  misc_RNA (1)...(19): siRNA sense strand
cuacauagcucacaacuuc

SEQ ID NO: 955585 - RNA, 19 nt, Homo sapiens
  misc_RNA (1)...(19): siRNA sense strand
ggacuuagauggauucagu

SEQ ID NO: 955586 - RNA, 19 nt, Homo sapiens
  misc_RNA (1)...(19): siRNA sense strand
gaauggaggcggauuagua

SEQ ID NO: 955587 - RNA, 19 nt, Homo sapiens
  misc_RNA (1)...(19): siRNA sense strand
gcaugugucuucaaugaug

SEQ ID NO: 955588 - RNA, 19 nt, Homo sapiens
  misc_RNA (1)...(19): siRNA sense strand
ugaaggaaguggaaugcua

SEQ ID NO: 955589 - RNA, 19 nt, Homo sapiens
  misc_RNA (1)...(19): siRNA sense strand
gaucaggacuacuuagaag

SEQ ID NO: 955590 - RNA, 19 nt, Homo sapiens
  misc_RNA (1)...(19): siRNA sense strand
cagcaacucucuuguaucu

SEQ ID NO: 955591 - RNA, 19 nt, Homo sapiens
  misc_RNA (1)...(19): siRNA sense strand
gcaccgccauccucaaguu

SEQ ID NO: 955592 - RNA, 19 nt, Homo sapiens
  misc_RNA (1)...(19): siRNA sense strand
ggagaauggaggcggauua

SEQ ID NO: 955593 - RNA, 19 nt, Homo sapiens
  misc_RNA (1)...(19): siRNA sense strand
aagcaugugucuucaauga

SEQ ID NO: 955594 - RNA, 19 nt, Homo sapiens
  misc_RNA (1)...(19): siRNA sense strand
ggaggagacucuagcagau

SEQ ID NO: 955595 - RNA, 19 nt, Homo sapiens
  misc_RNA (1)...(19): siRNA sense strand
uagaagggcugcugaccaa

SEQ ID NO: 955596 - RNA, 19 nt, Homo sapiens
  misc_RNA (1)...(19): siRNA sense strand
gcacggagugagucuagua

SEQ ID NO: 955597 - RNA, 19 nt, Homo sapiens
  misc_RNA (1)...(19): siRNA sense strand
gauccuagccacaauaugu

SEQ ID NO: 955598 - RNA, 19 nt, Homo sapiens
  misc_RNA (1)...(19): siRNA sense strand
gcuggaggcugcugccaaa

SEQ ID NO: 955599 - RNA, 19 nt, Homo sapiens
  misc_RNA (1)...(19): siRNA sense strand
ucagcaggguucuuuguaa

SEQ ID NO: 955600 - RNA, 19 nt, Homo sapiens
  misc_RNA (1)...(19): siRNA sense strand
gagugacaguguaugagua

SEQ ID NO: 955601 - RNA, 19 nt, Homo sapiens
  misc_RNA (1)...(19): siRNA sense strand
gcauggauguggcauaucu

SEQ ID NO: 955602 - RNA, 19 nt, Homo sapiens
  misc_RNA (1)...(19): siRNA sense strand
gggcauggauguggcauau

SEQ ID NO: 955603 - RNA, 19 nt, Homo sapiens
  misc_RNA (1)...(19): siRNA sense strand
gggaagaucaguggauuaa

SEQ ID NO: 955604 - RNA, 19 nt, Homo sapiens
  misc_RNA (1)...(19): siRNA sense strand
ggacgagacccuauuacug

SEQ ID NO: 955605 - RNA, 19 nt, Homo sapiens
  misc_RNA (1)...(19): siRNA sense strand
gcuacaguguucagagaaa

SEQ ID NO: 955606 - RNA, 19 nt, Homo sapiens
  misc_RNA (1)...(19): siRNA sense strand
gcgcuauggugaccuguug

SEQ ID NO: 955607 - RNA, 19 nt, Homo sapiens
  misc_RNA (1)...(19): siRNA sense strand
gaaugggacuuagauggau

SEQ ID NO: 955608 - RNA, 19 nt, Homo sapiens
  misc_RNA (1)...(19): siRNA sense strand
aaagaccucuggguguaua

SEQ ID NO: 955609 - RNA, 19 nt, Homo sapiens
  misc_RNA (1)...(19): siRNA sense strand
ccaagcccaucgugaagaa

SEQ ID NO: 955610 - RNA, 19 nt, Homo sapiens
  misc_RNA (1)...(19): siRNA sense strand
gaucaguggauuaauauag

SEQ ID NO: 955611 - RNA, 19 nt, Homo sapiens
  misc_RNA (1)...(19): siRNA sense strand
gaucucaggcccaguccua

SEQ ID NO: 955612 - RNA, 19 nt, Homo sapiens
  misc_RNA (1)...(19): siRNA sense strand
ucaggaaguucaaguucuu

SEQ ID NO: 955613 - RNA, 19 nt, Homo sapiens
  misc_RNA (1)...(19): siRNA sense strand
uggcacagcucaaguccuu

SEQ ID NO: 955614 - RNA, 19 nt, Homo sapiens
  misc_RNA (1)...(19): siRNA sense strand
guaauauuccuuuggauuc

SEQ ID NO: 955615 - RNA, 19 nt, Homo sapiens
  misc_RNA (1)...(19): siRNA sense strand
gaguuaaguugaaggaagu

SEQ ID NO: 955616 - RNA, 19 nt, Homo sapiens
  misc_RNA (1)...(19): siRNA sense strand
uaaaccagcucagaauagu

SEQ ID NO: 955617 - RNA, 19 nt, Homo sapiens
  misc_RNA (1)...(19): siRNA sense strand
ggagugagucuaguacuga

SEQ ID NO: 955618 - RNA, 19 nt, Homo sapiens
  misc_RNA (1)...(19): siRNA sense strand
gcaguuugacucuggcuuu

SEQ ID NO: 955619 - RNA, 19 nt, Homo sapiens
  misc_RNA (1)...(19): siRNA sense strand
ugaagaagaucaggacuac

SEQ ID NO: 955620 - RNA, 19 nt, Homo sapiens
  misc_RNA (1)...(19): siRNA sense strand
uuacuggaguuaaguugaa

SEQ ID NO: 955621 - RNA, 19 nt, Homo sapiens
  misc_RNA (1)...(19): siRNA sense strand
guucacagguggcauguac

SEQ ID NO: 955622 - RNA, 19 nt, Homo sapiens
  misc_RNA (1)...(19): siRNA sense strand
guuugacucuggcuuuauu

SEQ ID NO: 955623 - RNA, 19 nt, Homo sapiens
  misc_RNA (1)...(19): siRNA sense strand
gauguggcauaucucaaug

SEQ ID NO: 955624 - RNA, 19 nt, Homo sapiens
  misc_RNA (1)...(19): siRNA sense strand
uauaaaccagcucagaaua

SEQ ID NO: 955625 - RNA, 19 nt, Homo sapiens
  misc_RNA (1)...(19): siRNA sense strand
uggauagucuggacauaga

SEQ ID NO: 955626 - RNA, 19 nt, Homo sapiens
  misc_RNA (1)...(19): siRNA sense strand
caguuugacucuggcuuua

SEQ ID NO: 955627 - RNA, 19 nt, Homo sapiens
  misc_RNA (1)...(19): siRNA sense strand
gaaccgagugacaguguau

SEQ ID NO: 955628 - RNA, 19 nt, Homo sapiens
  misc_RNA (1)...(19): siRNA sense strand
uaaaggacacggcccauuc

SEQ ID NO: 955629 - RNA, 19 nt, Homo sapiens
  misc_RNA (1)...(19): siRNA sense strand
guauaaaccagcucagaau

SEQ ID NO: 955630 - RNA, 19 nt, Homo sapiens
  misc_RNA (1)...(19): siRNA sense strand
cagcagcaacucucuugua

SEQ ID NO: 955631 - RNA, 19 nt, Homo sapiens
  misc_RNA (1)...(19): siRNA sense strand
ggauguggcauaucucaau

SEQ ID NO: 955632 - RNA, 19 nt, Homo sapiens
  misc_RNA (1)...(19): siRNA sense strand
ucuuaaacguagugacuuu

SEQ ID NO: 955633 - RNA, 19 nt, Homo sapiens
  misc_RNA (1)...(19): siRNA sense strand
ucaagcagcucagccgaau

SEQ ID NO: 955634 - RNA, 19 nt, Homo sapiens
  misc_RNA (1)...(19): siRNA sense strand
ggaaguggaaugcuacagu

SEQ ID NO: 955635 - RNA, 19 nt, Homo sapiens
  misc_RNA (1)...(19): siRNA sense strand
gaccaugacaucuaucuag

SEQ ID NO: 955636 - RNA, 19 nt, Homo sapiens
  misc_RNA (1)...(19): siRNA sense strand
uggcacgggucgccucuuu

SEQ ID NO: 955637 - RNA, 19 nt, Homo sapiens
  misc_RNA (1)...(19): siRNA sense strand
ggaggcugcugccaaagag

SEQ ID NO: 955638 - RNA, 19 nt, Homo sapiens
  misc_RNA (1)...(19): siRNA sense strand
gagagugagcggacuguau

SEQ ID NO: 955639 - RNA, 19 nt, Homo sapiens
  misc_RNA (1)...(19): siRNA sense strand
ugaccaagcccaucgugaa

SEQ ID NO: 955640 - RNA, 19 nt, Homo sapiens
  misc_RNA (1)...(19): siRNA sense strand
gagugagucuaguacugaa

SEQ ID NO: 955641 - RNA, 19 nt, Homo sapiens
  misc_RNA (1)...(19): siRNA sense strand
gaccaaaaguugcuucuca

SEQ ID NO: 955642 - RNA, 19 nt, Homo sapiens
  misc_RNA (1)...(19): siRNA sense strand
gcgcaugcuuugcuaugau

SEQ ID NO: 955643 - RNA, 19 nt, Homo sapiens
  misc_RNA (1)...(19): siRNA sense strand
gaaagaccucuggguguau

SEQ ID NO: 955644 - RNA, 19 nt, Homo sapiens
  misc_RNA (1)...(19): siRNA sense strand
ggucagaguuuuauuacug

SEQ ID NO: 955645 - RNA, 19 nt, Homo sapiens
  misc_RNA (1)...(19): siRNA sense strand
guggaaugcuacaguguuc

SEQ ID NO: 955646 - RNA, 19 nt, Homo sapiens
  misc_RNA (1)...(19): siRNA sense strand
aagaagaucaggacuacuu

SEQ ID NO: 955647 - RNA, 19 nt, Homo sapiens
  misc_RNA (1)...(19): siRNA sense strand
uagggaagaucaguggauu

SEQ ID NO: 955648 - RNA, 19 nt, Homo sapiens
  misc_RNA (1)...(19): siRNA sense strand
gcugaacugugcuucucuu

SEQ ID NO: 955649 - RNA, 19 nt, Homo sapiens
  misc_RNA (1)...(19): siRNA sense strand
gaucagcaggguucuuugu

SEQ ID NO: 955650 - RNA, 19 nt, Homo sapiens
  misc_RNA (1)...(19): siRNA sense strand
ugcuacagcuggaauaugu

SEQ ID NO: 955651 - RNA, 19 nt, Homo sapiens
  misc_RNA (1)...(19): siRNA sense strand
guacugaaugggacuuaga

SEQ ID NO: 955652 - RNA, 19 nt, Homo sapiens
  misc_RNA (1)...(19): siRNA sense strand
ugacaguguaugaguauga

SEQ ID NO: 955653 - RNA, 19 nt, Homo sapiens
  misc_RNA (1)...(19): siRNA sense strand
cagcuuugcucacacuaag

SEQ ID NO: 955654 - RNA, 19 nt, Homo sapiens
  misc_RNA (1)...(19): siRNA sense strand
gguaccauguuaggccuuu

SEQ ID NO: 955655 - RNA, 19 nt, Homo sapiens
  misc_RNA (1)...(19): siRNA sense strand
ugaaugggacuuagaugga

SEQ ID NO: 955656 - RNA, 19 nt, Homo sapiens
  misc_RNA (1)...(19): siRNA sense strand
gaaccuggucagaguuuua

SEQ ID NO: 955657 - RNA, 19 nt, Homo sapiens
  misc_RNA (1)...(19): siRNA sense strand
gaagaucaggacuacuuag

SEQ ID NO: 955658 - RNA, 19 nt, Homo sapiens
  misc_RNA (1)...(19): siRNA sense strand
auucagagacccacaacua

SEQ ID NO: 955659 - RNA, 19 nt, Homo sapiens
  misc_RNA (1)...(19): siRNA sense strand
aauggaggcggauuaguaa

SEQ ID NO: 955660 - RNA, 19 nt, Homo sapiens
  misc_RNA (1)...(19): siRNA sense strand
gcuauggugaccuguugua

SEQ ID NO: 955661 - RNA, 19 nt, Homo sapiens
  misc_RNA (1)...(19): siRNA sense strand
gaaguacugccuggacguu

SEQ ID NO: 955662 - RNA, 19 nt, Homo sapiens
  misc_RNA (1)...(19): siRNA sense strand
agaagaucaggacuacuua

SEQ ID NO: 955663 - RNA, 19 nt, Homo sapiens
  misc_RNA (1)...(19): siRNA sense strand
gcgugucccuacuucaaga

SEQ ID NO: 955664 - RNA, 19 nt, Homo sapiens
  misc_RNA (1)...(19): siRNA sense strand
cuauuccuuugaacucaua

SEQ ID NO: 955665 - RNA, 19 nt, Homo sapiens
  misc_RNA (1)...(19): siRNA sense strand
ggugaccuguuguacaagu

SEQ ID NO: 955666 - RNA, 19 nt, Homo sapiens
  misc_RNA (1)...(19): siRNA sense strand
ccuuugugcucguguuuau

SEQ ID NO: 955667 - RNA, 19 nt, Homo sapiens
  misc_RNA (1)...(19): siRNA sense strand
ugaacugugcuucucuuaa

SEQ ID NO: 955668 - RNA, 19 nt, Homo sapiens
  misc_RNA (1)...(19): siRNA sense strand
guccagaggaguuaaagga

SEQ ID NO: 955669 - RNA, 19 nt, Homo sapiens
  misc_RNA (1)...(19): siRNA sense strand
gacaguguaugaguaugau

SEQ ID NO: 955670 - RNA, 19 nt, Homo sapiens
  misc_RNA (1)...(19): siRNA sense strand
ucagaacuaucuuuaugcu

SEQ ID NO: 955671 - RNA, 19 nt, Homo sapiens
  misc_RNA (1)...(19): siRNA sense strand
gagaaaccagugggcauug

SEQ ID NO: 955672 - RNA, 19 nt, Homo sapiens
  misc_RNA (1)...(19): siRNA sense strand
agcagcaacucucuuguau

SEQ ID NO: 955673 - RNA, 19 nt, Homo sapiens
  misc_RNA (1)...(19): siRNA sense strand
cccagaccaugacaucuau

SEQ ID NO: 955674 - RNA, 19 nt, Homo sapiens
  misc_RNA (1)...(19): siRNA sense strand
ucagcgaaaugcacaggau

SEQ ID NO: 955675 - RNA, 19 nt, Homo sapiens
  misc_RNA (1)...(19): siRNA sense strand
ggauuaauauagguaccau

SEQ ID NO: 955676 - RNA, 19 nt, Homo sapiens
  misc_RNA (1)...(19): siRNA sense strand
acccacaacuaccagauug

SEQ ID NO: 955677 - RNA, 19 nt, Homo sapiens
  misc_RNA (1)...(19): siRNA sense strand
caugugucuucaaugauga

SEQ ID NO: 955678 - RNA, 19 nt, Homo sapiens
  misc_RNA (1)...(19): siRNA sense strand
uguauaaaccagcucagaa

SEQ ID NO: 955679 - RNA, 19 nt, Homo sapiens
  misc_RNA (1)...(19): siRNA sense strand
gagaauggaggcggauuag

SEQ ID NO: 955680 - RNA, 19 nt, Homo sapiens
  misc_RNA (1)...(19): siRNA sense strand
gcacagcucaaguccuucu

SEQ ID NO: 955681 - RNA, 19 nt, Homo sapiens
  misc_RNA (1)...(19): siRNA sense strand
gaaagcaaguuacgauaua

SEQ ID NO: 955682 - RNA, 19 nt, Homo sapiens
  misc_RNA (1)...(19): siRNA sense strand
gaaagaaccagacaucaaa

SEQ ID NO: 955683 - RNA, 19 nt, Homo sapiens
  misc_RNA (1)...(19): siRNA sense strand
ggacaucuguucuuuagga

SEQ ID NO: 955684 - RNA, 19 nt, Homo sapiens
  misc_RNA (1)...(19): siRNA sense strand
gaucauacuuuauccaguu

SEQ ID NO: 955685 - RNA, 19 nt, Homo sapiens
  misc_RNA (1)...(19): siRNA sense strand
gccuauaccuuucgaauuu

SEQ ID NO: 955686 - RNA, 19 nt, Homo sapiens
  misc_RNA (1)...(19): siRNA sense strand
caaguggacugauacauug

SEQ ID NO: 955687 - RNA, 19 nt, Homo sapiens
  misc_RNA (1)...(19): siRNA sense strand
ggaugaaucuacccaagaa

SEQ ID NO: 955688 - RNA, 19 nt, Homo sapiens
  misc_RNA (1)...(19): siRNA sense strand
caaaggaccuggaccaaca

SEQ ID NO: 955689 - RNA, 19 nt, Homo sapiens
  misc_RNA (1)...(19): siRNA sense strand
ggcugaagcucaagaagua

SEQ ID NO: 955690 - RNA, 19 nt, Homo sapiens
  misc_RNA (1)...(19): siRNA sense strand
gggauuuaauguagcuuua

SEQ ID NO: 955691 - RNA, 19 nt, Homo sapiens
  misc_RNA (1)...(19): siRNA sense strand
cagcuuaugcuuacuguua

SEQ ID NO: 955692 - RNA, 19 nt, Homo sapiens
  misc_RNA (1)...(19): siRNA sense strand
caucgaagccuaaagauug

SEQ ID NO: 955693 - RNA, 19 nt, Homo sapiens
  misc_RNA (1)...(19): siRNA sense strand
gagaaaauaucuucacuug

SEQ ID NO: 955694 - RNA, 19 nt, Homo sapiens
  misc_RNA (1)...(19): siRNA sense strand
gaagcacuguguaaagaau

SEQ ID NO: 955695 - RNA, 19 nt, Homo sapiens
  misc_RNA (1)...(19): siRNA sense strand
cauagaagcauacguuauu

SEQ ID NO: 955696 - RNA, 19 nt, Homo sapiens
  misc_RNA (1)...(19): siRNA sense strand
aaucaggucucuccaagaa

SEQ ID NO: 955697 - RNA, 19 nt, Homo sapiens
  misc_RNA (1)...(19): siRNA sense strand
uaaaugcggugaagcaauc

SEQ ID NO: 955698 - RNA, 19 nt, Homo sapiens
  misc_RNA (1)...(19): siRNA sense strand
cagaagcacuguguaaaga

SEQ ID NO: 955699 - RNA, 19 nt, Homo sapiens
  misc_RNA (1)...(19): siRNA sense strand
aagcauacguuauucaaug

SEQ ID NO: 955700 - RNA, 19 nt, Homo sapiens
  misc_RNA (1)...(19): siRNA sense strand
gaacucaaagcaaauuaug

SEQ ID NO: 955701 - RNA, 19 nt, Homo sapiens
  misc_RNA (1)...(19): siRNA sense strand
cuacacagcuuaugcuuac

SEQ ID NO: 955702 - RNA, 19 nt, Homo sapiens
  misc_RNA (1)...(19): siRNA sense strand
gagcuguaauccagaaaug

SEQ ID NO: 955703 - RNA, 19 nt, Homo sapiens
  misc_RNA (1)...(19): siRNA sense strand
uaccaaauaugcuucaaga

SEQ ID NO: 955704 - RNA, 19 nt, Homo sapiens
  misc_RNA (1)...(19): siRNA sense strand
aggaagagauuuagaguca

SEQ ID NO: 955705 - RNA, 19 nt, Homo sapiens
  misc_RNA (1)...(19): siRNA sense strand
uaacagaagaugaagcaaa

SEQ ID NO: 955706 - RNA, 19 nt, Homo sapiens
  misc_RNA (1)...(19): siRNA sense strand
ucacugauuugagcuguaa

SEQ ID NO: 955707 - RNA, 19 nt, Homo sapiens
  misc_RNA (1)...(19): siRNA sense strand
caggacaucuguucuuuag

SEQ ID NO: 955708 - RNA, 19 nt, Homo sapiens
  misc_RNA (1)...(19): siRNA sense strand
gaugaagaaugcagcagau

SEQ ID NO: 955709 - RNA, 19 nt, Homo sapiens
  misc_RNA (1)...(19): siRNA sense strand
uuggaaaccuugugaagaa

SEQ ID NO: 955710 - RNA, 19 nt, Homo sapiens
  misc_RNA (1)...(19): siRNA sense strand
gaaguucaucgaagccuaa

SEQ ID NO: 955711 - RNA, 19 nt, Homo sapiens
  misc_RNA (1)...(19): siRNA sense strand
gcucaagaaguaacaauug

SEQ ID NO: 955712 - RNA, 19 nt, Homo sapiens
  misc_RNA (1)...(19): siRNA sense strand
ugacaguacuaaacccaaa

SEQ ID NO: 955713 - RNA, 19 nt, Homo sapiens
  misc_RNA (1)...(19): siRNA sense strand
gugaagaacacccuagaaa

SEQ ID NO: 955714 - RNA, 19 nt, Homo sapiens
  misc_RNA (1)...(19): siRNA sense strand
caagaaagcaaguuacgau

SEQ ID NO: 955715 - RNA, 19 nt, Homo sapiens
  misc_RNA (1)...(19): siRNA sense strand
gaagaagugaaaccuguga

SEQ ID NO: 955716 - RNA, 19 nt, Homo sapiens
  misc_RNA (1)...(19): siRNA sense strand
ucaaguggacugauacauu

SEQ ID NO: 955717 - RNA, 19 nt, Homo sapiens
  misc_RNA (1)...(19): siRNA sense strand
uaaagaauauggagaaacc

SEQ ID NO: 955718 - RNA, 19 nt, Homo sapiens
  misc_RNA (1)...(19): siRNA sense strand
aaacauuggcugcauuuga

SEQ ID NO: 955719 - RNA, 19 nt, Homo sapiens
  misc_RNA (1)...(19): siRNA sense strand
gcagaagcacuguguaaag

SEQ ID NO: 955720 - RNA, 19 nt, Homo sapiens
  misc_RNA (1)...(19): siRNA sense strand
ugaaagaaccagacaucaa

SEQ ID NO: 955721 - RNA, 19 nt, Homo sapiens
  misc_RNA (1)...(19): siRNA sense strand
cagaaacauuggcugcauu

SEQ ID NO: 955722 - RNA, 19 nt, Homo sapiens
  misc_RNA (1)...(19): siRNA sense strand
cgaauuuccuccuacaagu

SEQ ID NO: 955723 - RNA, 19 nt, Homo sapiens
  misc_RNA (1)...(19): siRNA sense strand
cagaaaugaugaagaaugc

SEQ ID NO: 955724 - RNA, 19 nt, Homo sapiens
  misc_RNA (1)...(19): siRNA sense strand
caaauuauggucucguaga

SEQ ID NO: 955725 - RNA, 19 nt, Homo sapiens
  misc_RNA (1)...(19): siRNA sense strand
ggaaagucaucucccaaaa

SEQ ID NO: 955726 - RNA, 19 nt, Homo sapiens
  misc_RNA (1)...(19): siRNA sense strand
cuucaagacuggcuggaaa

SEQ ID NO: 955727 - RNA, 19 nt, Homo sapiens
  misc_RNA (1)...(19): siRNA sense strand
aaacagccaauuucuauca

SEQ ID NO: 955728 - RNA, 19 nt, Homo sapiens
  misc_RNA (1)...(19): siRNA sense strand
agugaaaccugugaaagaa

SEQ ID NO: 955729 - RNA, 19 nt, Homo sapiens
  misc_RNA (1)...(19): siRNA sense strand
cguaugaaacagccaauuu

SEQ ID NO: 955730 - RNA, 19 nt, Homo sapiens
  misc_RNA (1)...(19): siRNA sense strand
ggaacucaaagcaaauuau

SEQ ID NO: 955731 - RNA, 19 nt, Homo sapiens
  misc_RNA (1)...(19): siRNA sense strand
ccagaaaugaugaagaaug

SEQ ID NO: 955732 - RNA, 19 nt, Homo sapiens
  misc_RNA (1)...(19): siRNA sense strand
ggaccuggaccaacaguca

SEQ ID NO: 955733 - RNA, 19 nt, Homo sapiens
  misc_RNA (1)...(19): siRNA sense strand
gcacgacuccuugaacugu

SEQ ID NO: 955734 - RNA, 19 nt, Homo sapiens
  misc_RNA (1)...(19): siRNA sense strand
ccaaauaugcuucaagacu

SEQ ID NO: 955735 - RNA, 19 nt, Homo sapiens
  misc_RNA (1)...(19): siRNA sense strand
ucguagagccuauaccuuu

SEQ ID NO: 955736 - RNA, 19 nt, Homo sapiens
  misc_RNA (1)...(19): siRNA sense strand
uugcugcacuggcguauga

SEQ ID NO: 955737 - RNA, 19 nt, Homo sapiens
  misc_RNA (1)...(19): siRNA sense strand
aauuucaaguggacugaua

SEQ ID NO: 955738 - RNA, 19 nt, Homo sapiens
  misc_RNA (1)...(19): siRNA sense strand
gaagugaaaccugugaaag

SEQ ID NO: 955739 - RNA, 19 nt, Homo sapiens
  misc_RNA (1)...(19): siRNA sense strand
ccaaggaugacaguacuaa

SEQ ID NO: 955740 - RNA, 19 nt, Homo sapiens
  misc_RNA (1)...(19): siRNA sense strand
guuuggagccugcauauuc

SEQ ID NO: 955741 - RNA, 19 nt, Homo sapiens
  misc_RNA (1)...(19): siRNA sense strand
guucaucgaagccuaaaga

SEQ ID NO: 955742 - RNA, 19 nt, Homo sapiens
  misc_RNA (1)...(19): siRNA sense strand
gcaaggacagguuccaagu

SEQ ID NO: 955743 - RNA, 19 nt, Homo sapiens
  misc_RNA (1)...(19): siRNA sense strand
gcaaguuacgauauauuca

SEQ ID NO: 955744 - RNA, 19 nt, Homo sapiens
  misc_RNA (1)...(19): siRNA sense strand
agucaaaccuucaggacau

SEQ ID NO: 955745 - RNA, 19 nt, Homo sapiens
  misc_RNA (1)...(19): siRNA sense strand
uaggaaacuuggaaaccuu

SEQ ID NO: 955746 - RNA, 19 nt, Homo sapiens
  misc_RNA (1)...(19): siRNA sense strand
ccagacaucaaaccucaaa

SEQ ID NO: 955747 - RNA, 19 nt, Homo sapiens
  misc_RNA (1)...(19): siRNA sense strand
gaagcauacguuauucaau

SEQ ID NO: 955748 - RNA, 19 nt, Homo sapiens
  misc_RNA (1)...(19): siRNA sense strand
auccagaaaugaugaagaa

SEQ ID NO: 955749 - RNA, 19 nt, Homo sapiens
  misc_RNA (1)...(19): siRNA sense strand
caaaccagaagaagaagug

SEQ ID NO: 955750 - RNA, 19 nt, Homo sapiens
  misc_RNA (1)...(19): siRNA sense strand
aacauuggcugcauuugau

SEQ ID NO: 955751 - RNA, 19 nt, Homo sapiens
  misc_RNA (1)...(19): siRNA sense strand
gaauauggagaaaccaaag

SEQ ID NO: 955752 - RNA, 19 nt, Homo sapiens
  misc_RNA (1)...(19): siRNA sense strand
gcagcagauucauauuucu

SEQ ID NO: 955753 - RNA, 19 nt, Homo sapiens
  misc_RNA (1)...(19): siRNA sense strand
gggcacgacuccuugaacu

SEQ ID NO: 955754 - RNA, 19 nt, Homo sapiens
  misc_RNA (1)...(19): siRNA sense strand
ggaccaacagucaaaccuu

SEQ ID NO: 955755 - RNA, 19 nt, Homo sapiens
  misc_RNA (1)...(19): siRNA sense strand
agaaagcaaguuacgauau

SEQ ID NO: 955756 - RNA, 19 nt, Homo sapiens
  misc_RNA (1)...(19): siRNA sense strand
gaauuuccuccuacaagug

SEQ ID NO: 955757 - RNA, 19 nt, Homo sapiens
  misc_RNA (1)...(19): siRNA sense strand
aaacuuggaaaccuuguga

SEQ ID NO: 955758 - RNA, 19 nt, Homo sapiens
  misc_RNA (1)...(19): siRNA sense strand
gacaucuguucuuuaggaa

SEQ ID NO: 955759 - RNA, 19 nt, Homo sapiens
  misc_RNA (1)...(19): siRNA sense strand
ucaggacaucuguucuuua

SEQ ID NO: 955760 - RNA, 19 nt, Homo sapiens
  misc_RNA (1)...(19): siRNA sense strand
agacuuuauuggcuaguga

SEQ ID NO: 955761 - RNA, 19 nt, Homo sapiens
  misc_RNA (1)...(19): siRNA sense strand
ugcagcagauucauauuuc

SEQ ID NO: 955762 - RNA, 19 nt, Homo sapiens
  misc_RNA (1)...(19): siRNA sense strand
gacacugggugcuacaucu

SEQ ID NO: 955763 - RNA, 19 nt, Homo sapiens
  misc_RNA (1)...(19): siRNA sense strand
ccagaaacauuggcugcau

SEQ ID NO: 955764 - RNA, 19 nt, Homo sapiens
  misc_RNA (1)...(19): siRNA sense strand
gagccuauaccuuucgaau

SEQ ID NO: 955765 - RNA, 19 nt, Homo sapiens
  misc_RNA (1)...(19): siRNA sense strand
aaagauugcagcugggauu

SEQ ID NO: 955766 - RNA, 19 nt, Homo sapiens
  misc_RNA (1)...(19): siRNA sense strand
ccaaaagacccaaggauga

SEQ ID NO: 955767 - RNA, 19 nt, Homo sapiens
  misc_RNA (1)...(19): siRNA sense strand
agaaacauuggcugcauuu

SEQ ID NO: 955768 - RNA, 19 nt, Homo sapiens
  misc_RNA (1)...(19): siRNA sense strand
caucuguucuuuaggaaac

SEQ ID NO: 955769 - RNA, 19 nt, Homo sapiens
  misc_RNA (1)...(19): siRNA sense strand
uuaccauggugagacuuua

SEQ ID NO: 955770 - RNA, 19 nt, Homo sapiens
  misc_RNA (1)...(19): siRNA sense strand
aaacaugcuccuggacuaa

SEQ ID NO: 955771 - RNA, 19 nt, Homo sapiens
  misc_RNA (1)...(19): siRNA sense strand
uccaugggauuuaauguag

SEQ ID NO: 955772 - RNA, 19 nt, Homo sapiens
  misc_RNA (1)...(19): siRNA sense strand
aagaaagcaaguuacgaua

SEQ ID NO: 955773 - RNA, 19 nt, Homo sapiens
  misc_RNA (1)...(19): siRNA sense strand
guguaaagaauauggagaa

SEQ ID NO: 955774 - RNA, 19 nt, Homo sapiens
  misc_RNA (1)...(19): siRNA sense strand
gauaaaugcggugaagcaa

SEQ ID NO: 955775 - RNA, 19 nt, Homo sapiens
  misc_RNA (1)...(19): siRNA sense strand
acagccaauuucuaucaaa

SEQ ID NO: 955776 - RNA, 19 nt, Homo sapiens
  misc_RNA (1)...(19): siRNA sense strand
guggacaccagaaacauug

SEQ ID NO: 955777 - RNA, 19 nt, Homo sapiens
  misc_RNA (1)...(19): siRNA sense strand
gcuguaauccagaaaugau

SEQ ID NO: 955778 - RNA, 19 nt, Homo sapiens
  misc_RNA (1)...(19): siRNA sense strand
cguagagccuauaccuuuc

SEQ ID NO: 955779 - RNA, 19 nt, Homo sapiens
  misc_RNA (1)...(19): siRNA sense strand
cccauugguuucauaggaa

SEQ ID NO: 955780 - RNA, 19 nt, Homo sapiens
  misc_RNA (1)...(19): siRNA sense strand
uugaagauguguuucuaca

SEQ ID NO: 955781 - RNA, 19 nt, Homo sapiens
  misc_RNA (1)...(19): siRNA sense strand
gaagugaccuguaaggaua

SEQ ID NO: 955782 - RNA, 19 nt, Homo sapiens
  misc_RNA (1)...(19): siRNA sense strand
caacaaggcugucaaaugu

SEQ ID NO: 955783 - RNA, 19 nt, Homo sapiens
  misc_RNA (1)...(19): siRNA sense strand
gaaauugacuguguggaua

SEQ ID NO: 955784 - RNA, 19 nt, Homo sapiens
  misc_RNA (1)...(19): siRNA sense strand
gaaagacaauguaaccaaa

SEQ ID NO: 955785 - RNA, 19 nt, Homo sapiens
  misc_RNA (1)...(19): siRNA sense strand
gcacucagcugaugucaau

SEQ ID NO: 955786 - RNA, 19 nt, Homo sapiens
  misc_RNA (1)...(19): siRNA sense strand
gcgcagaagugaccuguaa

SEQ ID NO: 955787 - RNA, 19 nt, Homo sapiens
  misc_RNA (1)...(19): siRNA sense strand
ggacuugaauacacccuua

SEQ ID NO: 955788 - RNA, 19 nt, Homo sapiens
  misc_RNA (1)...(19): siRNA sense strand
ccacuuagcugccuacaau

SEQ ID NO: 955789 - RNA, 19 nt, Homo sapiens
  misc_RNA (1)...(19): siRNA sense strand
gcagaaaguuguuaucauc

SEQ ID NO: 955790 - RNA, 19 nt, Homo sapiens
  misc_RNA (1)...(19): siRNA sense strand
gggcaaauaucaaugcauu

SEQ ID NO: 955791 - RNA, 19 nt, Homo sapiens
  misc_RNA (1)...(19): siRNA sense strand
gaugauggcugcugagaau

SEQ ID NO: 955792 - RNA, 19 nt, Homo sapiens
  misc_RNA (1)...(19): siRNA sense strand
caucagacauggauagaaa

SEQ ID NO: 955793 - RNA, 19 nt, Homo sapiens
  misc_RNA (1)...(19): siRNA sense strand
gaaaugcccaugauaauuc

SEQ ID NO: 955794 - RNA, 19 nt, Homo sapiens
  misc_RNA (1)...(19): siRNA sense strand
ggaggacuguuguuucaaa

SEQ ID NO: 955795 - RNA, 19 nt, Homo sapiens
  misc_RNA (1)...(19): siRNA sense strand
gaauacacccuuacauuug

SEQ ID NO: 955796 - RNA, 19 nt, Homo sapiens
  misc_RNA (1)...(19): siRNA sense strand
gagguaauguggaauguau

SEQ ID NO: 955797 - RNA, 19 nt, Homo sapiens
  misc_RNA (1)...(19): siRNA sense strand
gaacaagaagugucaauuc

SEQ ID NO: 955798 - RNA, 19 nt, Homo sapiens
  misc_RNA (1)...(19): siRNA sense strand
gacgagagccuuauuaaug

SEQ ID NO: 955799 - RNA, 19 nt, Homo sapiens
  misc_RNA (1)...(19): siRNA sense strand
gaggaggacuguuguuuca

SEQ ID NO: 955800 - RNA, 19 nt, Homo sapiens
  misc_RNA (1)...(19): siRNA sense strand
ggaucuggcugccuuuaaa

SEQ ID NO: 955801 - RNA, 19 nt, Homo sapiens
  misc_RNA (1)...(19): siRNA sense strand
ccagauaaauuuggaagaa

SEQ ID NO: 955802 - RNA, 19 nt, Homo sapiens
  misc_RNA (1)...(19): siRNA sense strand
cuucaugccucaguaauua

SEQ ID NO: 955803 - RNA, 19 nt, Homo sapiens
  misc_RNA (1)...(19): siRNA sense strand
gauggucaauuuacucuug

SEQ ID NO: 955804 - RNA, 19 nt, Homo sapiens
  misc_RNA (1)...(19): siRNA sense strand
guaaggauaagaaggguua

SEQ ID NO: 955805 - RNA, 19 nt, Homo sapiens
  misc_RNA (1)...(19): siRNA sense strand
ggaaaugcccaugauaauu

SEQ ID NO: 955806 - RNA, 19 nt, Homo sapiens
  misc_RNA (1)...(19): siRNA sense strand
gucaggagcucguguaaau

SEQ ID NO: 955807 - RNA, 19 nt, Homo sapiens
  misc_RNA (1)...(19): siRNA sense strand
gaggugaaauugacugugu

SEQ ID NO: 955808 - RNA, 19 nt, Homo sapiens
  misc_RNA (1)...(19): siRNA sense strand
ugaauacacccuuacauuu

SEQ ID NO: 955809 - RNA, 19 nt, Homo sapiens
  misc_RNA (1)...(19): siRNA sense strand
gaagaagcaguacagguuu

SEQ ID NO: 955810 - RNA, 19 nt, Homo sapiens
  misc_RNA (1)...(19): siRNA sense strand
gauaaggacuugaauacac

SEQ ID NO: 955811 - RNA, 19 nt, Homo sapiens
  misc_RNA (1)...(19): siRNA sense strand
ggacuguuguuucaaagau

SEQ ID NO: 955812 - RNA, 19 nt, Homo sapiens
  misc_RNA (1)...(19): siRNA sense strand
ugaaaucaaugucuaugga

SEQ ID NO: 955813 - RNA, 19 nt, Homo sapiens
  misc_RNA (1)...(19): siRNA sense strand
ucacagacccucauucaga

SEQ ID NO: 955814 - RNA, 19 nt, Homo sapiens
  misc_RNA (1)...(19): siRNA sense strand
gaauggaggugaaauugac

SEQ ID NO: 955815 - RNA, 19 nt, Homo sapiens
  misc_RNA (1)...(19): siRNA sense strand
caagacgagagccuuauua

SEQ ID NO: 955816 - RNA, 19 nt, Homo sapiens
  misc_RNA (1)...(19): siRNA sense strand
ggaggacgcccuugcacua

SEQ ID NO: 955817 - RNA, 19 nt, Homo sapiens
  misc_RNA (1)...(19): siRNA sense strand
ggacaaggaagguuacaau

SEQ ID NO: 955818 - RNA, 19 nt, Homo sapiens
  misc_RNA (1)...(19): siRNA sense strand
gcacugggcagcauacaug

SEQ ID NO: 955819 - RNA, 19 nt, Homo sapiens
  misc_RNA (1)...(19): siRNA sense strand
ugacgcuguuucauuguua

SEQ ID NO: 955820 - RNA, 19 nt, Homo sapiens
  misc_RNA (1)...(19): siRNA sense strand
ccacuuggauguuguagca

SEQ ID NO: 955821 - RNA, 19 nt, Homo sapiens
  misc_RNA (1)...(19): siRNA sense strand
ugaaccagccaaacaauaa

SEQ ID NO: 955822 - RNA, 19 nt, Homo sapiens
  misc_RNA (1)...(19): siRNA sense strand
acgagagccuuauuaauga

SEQ ID NO: 955823 - RNA, 19 nt, Homo sapiens
  misc_RNA (1)...(19): siRNA sense strand
ggccauagauuccaguauc

SEQ ID NO: 955824 - RNA, 19 nt, Homo sapiens
  misc_RNA (1)...(19): siRNA sense strand
cggagcagauuuccauaaa

SEQ ID NO: 955825 - RNA, 19 nt, Homo sapiens
  misc_RNA (1)...(19): siRNA sense strand
cacacuaugucuagaguuu

SEQ ID NO: 955826 - RNA, 19 nt, Homo sapiens
  misc_RNA (1)...(19): siRNA sense strand
gaacgcaguagauaauuca

SEQ ID NO: 955827 - RNA, 19 nt, Homo sapiens
  misc_RNA (1)...(19): siRNA sense strand
gaaagaugccaaaggacaa

SEQ ID NO: 955828 - RNA, 19 nt, Homo sapiens
  misc_RNA (1)...(19): siRNA sense strand
gcgcauccaucuuugugaa

SEQ ID NO: 955829 - RNA, 19 nt, Homo sapiens
  misc_RNA (1)...(19): siRNA sense strand
gacaaggaagguuacaaua

SEQ ID NO: 955830 - RNA, 19 nt, Homo sapiens
  misc_RNA (1)...(19): siRNA sense strand
ugaagaagcaguacagguu

SEQ ID NO: 955831 - RNA, 19 nt, Homo sapiens
  misc_RNA (1)...(19): siRNA sense strand
acauuuggcuuguaguaaa

SEQ ID NO: 955832 - RNA, 19 nt, Homo sapiens
  misc_RNA (1)...(19): siRNA sense strand
uauugacgcuguuucauug

SEQ ID NO: 955833 - RNA, 19 nt, Homo sapiens
  misc_RNA (1)...(19): siRNA sense strand
ugugaaagaugccaaagga

SEQ ID NO: 955834 - RNA, 19 nt, Homo sapiens
  misc_RNA (1)...(19): siRNA sense strand
caaggaagguuacaauagc

SEQ ID NO: 955835 - RNA, 19 nt, Homo sapiens
  misc_RNA (1)...(19): siRNA sense strand
gucaugagcuuuugauuaa

SEQ ID NO: 955836 - RNA, 19 nt, Homo sapiens
  misc_RNA (1)...(19): siRNA sense strand
ucacaucgccugcuacaau

SEQ ID NO: 955837 - RNA, 19 nt, Homo sapiens
  misc_RNA (1)...(19): siRNA sense strand
ggaaauacagcgcuucaca

SEQ ID NO: 955838 - RNA, 19 nt, Homo sapiens
  misc_RNA (1)...(19): siRNA sense strand
ggguggagauugaugaaau

SEQ ID NO: 955839 - RNA, 19 nt, Homo sapiens
  misc_RNA (1)...(19): siRNA sense strand
gguaauguggaauguauaa

SEQ ID NO: 955840 - RNA, 19 nt, Homo sapiens
  misc_RNA (1)...(19): siRNA sense strand
gaaaucaaugucuauggaa

SEQ ID NO: 955841 - RNA, 19 nt, Homo sapiens
  misc_RNA (1)...(19): siRNA sense strand
ccaacaaggcugucaaaug

SEQ ID NO: 955842 - RNA, 19 nt, Homo sapiens
  misc_RNA (1)...(19): siRNA sense strand
gaucugacuguaaaggaua

SEQ ID NO: 955843 - RNA, 19 nt, Homo sapiens
  misc_RNA (1)...(19): siRNA sense strand
ccagggagcugaaggaaaa

SEQ ID NO: 955844 - RNA, 19 nt, Homo sapiens
  misc_RNA (1)...(19): siRNA sense strand
gaauugucauuuccacugu

SEQ ID NO: 955845 - RNA, 19 nt, Homo sapiens
  misc_RNA (1)...(19): siRNA sense strand
gaaauagacaccccagaua

SEQ ID NO: 955846 - RNA, 19 nt, Homo sapiens
  misc_RNA (1)...(19): siRNA sense strand
ugucaaaugugcagaagug

SEQ ID NO: 955847 - RNA, 19 nt, Homo sapiens
  misc_RNA (1)...(19): siRNA sense strand
uuaacgaguugauugacua

SEQ ID NO: 955848 - RNA, 19 nt, Homo sapiens
  misc_RNA (1)...(19): siRNA sense strand
caacguuaaugaaacagau

SEQ ID NO: 955849 - RNA, 19 nt, Homo sapiens
  misc_RNA (1)...(19): siRNA sense strand
ccacuguauugagacauua

SEQ ID NO: 955850 - RNA, 19 nt, Homo sapiens
  misc_RNA (1)...(19): siRNA sense strand
caacacuccucuccaugug

SEQ ID NO: 955851 - RNA, 19 nt, Homo sapiens
  misc_RNA (1)...(19): siRNA sense strand
uaggaaaugcccaugauaa

SEQ ID NO: 955852 - RNA, 19 nt, Homo sapiens
  misc_RNA (1)...(19): siRNA sense strand
ggaacaagaagugucaauu

SEQ ID NO: 955853 - RNA, 19 nt, Homo sapiens
  misc_RNA (1)...(19): siRNA sense strand
cgaggaaugugugcaaaug

SEQ ID NO: 955854 - RNA, 19 nt, Homo sapiens
  misc_RNA (1)...(19): siRNA sense strand
aaaggaagccacacuaugu

SEQ ID NO: 955855 - RNA, 19 nt, Homo sapiens
  misc_RNA (1)...(19): siRNA sense strand
aggcugaucugacuguaaa

SEQ ID NO: 955856 - RNA, 19 nt, Homo sapiens
  misc_RNA (1)...(19): siRNA sense strand
aaaugugccuuguuaauac

SEQ ID NO: 955857 - RNA, 19 nt, Homo sapiens
  misc_RNA (1)...(19): siRNA sense strand
acguggagauggucaauuu

SEQ ID NO: 955858 - RNA, 19 nt, Homo sapiens
  misc_RNA (1)...(19): siRNA sense strand
uaaaggauaaggacuugaa

SEQ ID NO: 955859 - RNA, 19 nt, Homo sapiens
  misc_RNA (1)...(19): siRNA sense strand
ggcaggcgcuguggauauu

SEQ ID NO: 955860 - RNA, 19 nt, Homo sapiens
  misc_RNA (1)...(19): siRNA sense strand
uuacacagagggauuauga

SEQ ID NO: 955861 - RNA, 19 nt, Homo sapiens
  misc_RNA (1)...(19): siRNA sense strand
uuacggcuguugcuagaaa

SEQ ID NO: 955862 - RNA, 19 nt, Homo sapiens
  misc_RNA (1)...(19): siRNA sense strand
agacauggauagaaauaag

SEQ ID NO: 955863 - RNA, 19 nt, Homo sapiens
  misc_RNA (1)...(19): siRNA sense strand
cacagacccucauucagaa

SEQ ID NO: 955864 - RNA, 19 nt, Homo sapiens
  misc_RNA (1)...(19): siRNA sense strand
ccaauggacagauuaaugu

SEQ ID NO: 955865 - RNA, 19 nt, Homo sapiens
  misc_RNA (1)...(19): siRNA sense strand
gcaacacuccucuccaugu

SEQ ID NO: 955866 - RNA, 19 nt, Homo sapiens
  misc_RNA (1)...(19): siRNA sense strand
gacuguuguuucaaagaua

SEQ ID NO: 955867 - RNA, 19 nt, Homo sapiens
  misc_RNA (1)...(19): siRNA sense strand
uaaaggacacacagaaugu

SEQ ID NO: 955868 - RNA, 19 nt, Homo sapiens
  misc_RNA (1)...(19): siRNA sense strand
gaaagaacaaacaguggau

SEQ ID NO: 955869 - RNA, 19 nt, Homo sapiens
  misc_RNA (1)...(19): siRNA sense strand
gcacaggcagugucuggaa

SEQ ID NO: 955870 - RNA, 19 nt, Homo sapiens
  misc_RNA (1)...(19): siRNA sense strand
ggaagguuacaauagcaua

SEQ ID NO: 955871 - RNA, 19 nt, Homo sapiens
  misc_RNA (1)...(19): siRNA sense strand
gcauuacgccgcugcauca

SEQ ID NO: 955872 - RNA, 19 nt, Homo sapiens
  misc_RNA (1)...(19): siRNA sense strand
caaugucuauggaaauaca

SEQ ID NO: 955873 - RNA, 19 nt, Homo sapiens
  misc_RNA (1)...(19): siRNA sense strand
augcacagcuuuacacaga

SEQ ID NO: 955874 - RNA, 19 nt, Homo sapiens
  misc_RNA (1)...(19): siRNA sense strand
gcuguuucauuguuacuug

SEQ ID NO: 955875 - RNA, 19 nt, Homo sapiens
  misc_RNA (1)...(19): siRNA sense strand
gaaauacagcgcuucacau

SEQ ID NO: 955876 - RNA, 19 nt, Homo sapiens
  misc_RNA (1)...(19): siRNA sense strand
ccauguggcugcaagauac

SEQ ID NO: 955877 - RNA, 19 nt, Homo sapiens
  misc_RNA (1)...(19): siRNA sense strand
ccagugaacgcaguagaua

SEQ ID NO: 955878 - RNA, 19 nt, Homo sapiens
  misc_RNA (1)...(19): siRNA sense strand
ggacauauugacgcuguuu

SEQ ID NO: 955879 - RNA, 19 nt, Homo sapiens
  misc_RNA (1)...(19): siRNA sense strand
ucagacauggauagaaaua

SEQ ID NO: 955880 - RNA, 19 nt, Homo sapiens
  misc_RNA (1)...(19): siRNA sense strand
aaacaguggauuugaagaa

SEQ ID NO: 955881 - RNA, 19 nt, Homo sapiens
  misc_RNA (1)...(19): siRNA sense strand
gaacuugcauagugauuaa

SEQ ID NO: 955882 - RNA, 19 nt, Homo sapiens
  misc_RNA (1)...(19): siRNA sense strand
gaauggaacuugcauagug

SEQ ID NO: 955883 - RNA, 19 nt, Homo sapiens
  misc_RNA (1)...(19): siRNA sense strand
gagaagaauugguguuaaa

SEQ ID NO: 955884 - RNA, 19 nt, Homo sapiens
  misc_RNA (1)...(19): siRNA sense strand
ggacaaauaucacccuaau

SEQ ID NO: 955885 - RNA, 19 nt, Homo sapiens
  misc_RNA (1)...(19): siRNA sense strand
caucauaucucccuuacaa

SEQ ID NO: 955886 - RNA, 19 nt, Homo sapiens
  misc_RNA (1)...(19): siRNA sense strand
caucaccacuggacaaaua

SEQ ID NO: 955887 - RNA, 19 nt, Homo sapiens
  misc_RNA (1)...(19): siRNA sense strand
caacgaagauuucaacaag

SEQ ID NO: 955888 - RNA, 19 nt, Homo sapiens
  misc_RNA (1)...(19): siRNA sense strand
gcucaaccuuuauggauuu

SEQ ID NO: 955889 - RNA, 19 nt, Homo sapiens
  misc_RNA (1)...(19): siRNA sense strand
uaaaucaguugaccacuau

SEQ ID NO: 955890 - RNA, 19 nt, Homo sapiens
  misc_RNA (1)...(19): siRNA sense strand
gcauagugauuaaugaaga

SEQ ID NO: 955891 - RNA, 19 nt, Homo sapiens
  misc_RNA (1)...(19): siRNA sense strand
gggcuaacauggagaauca

SEQ ID NO: 955892 - RNA, 19 nt, Homo sapiens
  misc_RNA (1)...(19): siRNA sense strand
gaacaugcuuuucagguuu

SEQ ID NO: 955893 - RNA, 19 nt, Homo sapiens
  misc_RNA (1)...(19): siRNA sense strand
cagaacaaauugcaacaga

SEQ ID NO: 955894 - RNA, 19 nt, Homo sapiens
  misc_RNA (1)...(19): siRNA sense strand
gagaaagaaucgucugucu

SEQ ID NO: 955895 - RNA, 19 nt, Homo sapiens
  misc_RNA (1)...(19): siRNA sense strand
gaacaaauugcaacagauc

SEQ ID NO: 955896 - RNA, 19 nt, Homo sapiens
  misc_RNA (1)...(19): siRNA sense strand
uuaaaucaguugaccacua

SEQ ID NO: 955897 - RNA, 19 nt, Homo sapiens
  misc_RNA (1)...(19): siRNA sense strand
ucagacagauaauugcaaa

SEQ ID NO: 955898 - RNA, 19 nt, Homo sapiens
  misc_RNA (1)...(19): siRNA sense strand
caaccacaacuucucaaua

SEQ ID NO: 955899 - RNA, 19 nt, Homo sapiens
  misc_RNA (1)...(19): siRNA sense strand
caacagaucaacaugcuau

SEQ ID NO: 955900 - RNA, 19 nt, Homo sapiens
  misc_RNA (1)...(19): siRNA sense strand
gaaagugaccaauucaagu

SEQ ID NO: 955901 - RNA, 19 nt, Homo sapiens
  misc_RNA (1)...(19): siRNA sense strand
ggaacuugcauagugauua

SEQ ID NO: 955902 - RNA, 19 nt, Homo sapiens
  misc_RNA (1)...(19): siRNA sense strand
ggaaaauaguggaaaguga

SEQ ID NO: 955903 - RNA, 19 nt, Homo sapiens
  misc_RNA (1)...(19): siRNA sense strand
ggaaagugaccaauucaag

SEQ ID NO: 955904 - RNA, 19 nt, Homo sapiens
  misc_RNA (1)...(19): siRNA sense strand
acgaagauuucaacaagaa

SEQ ID NO: 955905 - RNA, 19 nt, Homo sapiens
  misc_RNA (1)...(19): siRNA sense strand
gaagagaagaauugguguu

SEQ ID NO: 955906 - RNA, 19 nt, Homo sapiens
  misc_RNA (1)...(19): siRNA sense strand
uucgacagcucaaccuuua

SEQ ID NO: 955907 - RNA, 19 nt, Homo sapiens
  misc_RNA (1)...(19): siRNA sense strand
gagaauggaacuugcauag

SEQ ID NO: 955908 - RNA, 19 nt, Homo sapiens
  misc_RNA (1)...(19): siRNA sense strand
gaccaauucaagucuauuu

SEQ ID NO: 955909 - RNA, 19 nt, Homo sapiens
  misc_RNA (1)...(19): siRNA sense strand
ccacaucauaucucccuua

SEQ ID NO: 955910 - RNA, 19 nt, Homo sapiens
  misc_RNA (1)...(19): siRNA sense strand
gcuaacauggagaaucaua

SEQ ID NO: 955911 - RNA, 19 nt, Homo sapiens
  misc_RNA (1)...(19): siRNA sense strand
ucagaagccuccacuaggu

SEQ ID NO: 955912 - RNA, 19 nt, Homo sapiens
  misc_RNA (1)...(19): siRNA sense strand
cacacgauauccucuggua

SEQ ID NO: 955913 - RNA, 19 nt, Homo sapiens
  misc_RNA (1)...(19): siRNA sense strand
agagaagaauugguguuaa

SEQ ID NO: 955914 - RNA, 19 nt, Homo sapiens
  misc_RNA (1)...(19): siRNA sense strand
acaagggaaucuucuguca

SEQ ID NO: 955915 - RNA, 19 nt, Homo sapiens
  misc_RNA (1)...(19): siRNA sense strand
uaaauaugccucuaacaag

SEQ ID NO: 955916 - RNA, 19 nt, Homo sapiens
  misc_RNA (1)...(19): siRNA sense strand
caguugaccacuauucaua

SEQ ID NO: 955917 - RNA, 19 nt, Homo sapiens
  misc_RNA (1)...(19): siRNA sense strand
aaccacaacuucucaauac

SEQ ID NO: 955918 - RNA, 19 nt, Homo sapiens
  misc_RNA (1)...(19): siRNA sense strand
aagagaagaauugguguua

SEQ ID NO: 955919 - RNA, 19 nt, Homo sapiens
  misc_RNA (1)...(19): siRNA sense strand
caaugaggcuccauaucgu

SEQ ID NO: 955920 - RNA, 19 nt, Homo sapiens
  misc_RNA (1)...(19): siRNA sense strand
guuagaaaguccaaguuac

SEQ ID NO: 955921 - RNA, 19 nt, Homo sapiens
  misc_RNA (1)...(19): siRNA sense strand
aauggaacuugcauaguga

SEQ ID NO: 955922 - RNA, 19 nt, Homo sapiens
  misc_RNA (1)...(19): siRNA sense strand
caggcuagcucuucaacca

SEQ ID NO: 955923 - RNA, 19 nt, Homo sapiens
  misc_RNA (1)...(19): siRNA sense strand
caaccuuuauggauuuagu

SEQ ID NO: 955924 - RNA, 19 nt, Homo sapiens
  misc_RNA (1)...(19): siRNA sense strand
uucagaaacucaagauguu

SEQ ID NO: 955925 - RNA, 19 nt, Homo sapiens
  misc_RNA (1)...(19): siRNA sense strand
uaacaagggaaucuucugu

SEQ ID NO: 955926 - RNA, 19 nt, Homo sapiens
  misc_RNA (1)...(19): siRNA sense strand
agacuuacggucaaugauu

SEQ ID NO: 955927 - RNA, 19 nt, Homo sapiens
  misc_RNA (1)...(19): siRNA sense strand
guugaccacuauucauaug

SEQ ID NO: 955928 - RNA, 19 nt, Homo sapiens
  misc_RNA (1)...(19): siRNA sense strand
gggaugagaauggaacuug

SEQ ID NO: 955929 - RNA, 19 nt, Homo sapiens
  misc_RNA (1)...(19): siRNA sense strand
ucaaugaggcuccauaucg

SEQ ID NO: 955930 - RNA, 19 nt, Homo sapiens
  misc_RNA (1)...(19): siRNA sense strand
cuucaccuauaucuacuuu

SEQ ID NO: 955931 - RNA, 19 nt, Homo sapiens
  misc_RNA (1)...(19): siRNA sense strand
uguuagaaaguccaaguua

SEQ ID NO: 955932 - RNA, 19 nt, Homo sapiens
  misc_RNA (1)...(19): siRNA sense strand
aguggaaagugaccaauuc

SEQ ID NO: 955933 - RNA, 19 nt, Homo sapiens
  misc_RNA (1)...(19): siRNA sense strand
agagugaagagaagaauug

SEQ ID NO: 955934 - RNA, 19 nt, Homo sapiens
  misc_RNA (1)...(19): siRNA sense strand
cgacagcucaaccuuuaug

SEQ ID NO: 955935 - RNA, 19 nt, Homo sapiens
  misc_RNA (1)...(19): siRNA sense strand
ccaauucaagucuauuuca

SEQ ID NO: 955936 - RNA, 19 nt, Homo sapiens
  misc_RNA (1)...(19): siRNA sense strand
caggaaacuuuggaaaaua

SEQ ID NO: 955937 - RNA, 19 nt, Homo sapiens
  misc_RNA (1)...(19): siRNA sense strand
guaagagugaagagaagaa

SEQ ID NO: 955938 - RNA, 19 nt, Homo sapiens
  misc_RNA (1)...(19): siRNA sense strand
cacuaggucuccauugugu

SEQ ID NO: 955939 - RNA, 19 nt, Homo sapiens
  misc_RNA (1)...(19): siRNA sense strand
cuacuuuauucaacgaaga

SEQ ID NO: 955940 - RNA, 19 nt, Homo sapiens
  misc_RNA (1)...(19): siRNA sense strand
aguccaaguuacacaguuu

SEQ ID NO: 955941 - RNA, 19 nt, Homo sapiens
  misc_RNA (1)...(19): siRNA sense strand
ccaggaaacuuuggaaaau

SEQ ID NO: 955942 - RNA, 19 nt, Homo sapiens
  misc_RNA (1)...(19): siRNA sense strand
agaacaaauugcaacagau

SEQ ID NO: 955943 - RNA, 19 nt, Homo sapiens
  misc_RNA (1)...(19): siRNA sense strand
ugcugaagcuagugaagaa

SEQ ID NO: 955944 - RNA, 19 nt, Homo sapiens
  misc_RNA (1)...(19): siRNA sense strand
aaucgucugucuuaagcaa

SEQ ID NO: 955945 - RNA, 19 nt, Homo sapiens
  misc_RNA (1)...(19): siRNA sense strand
gugaccaauucaagucuau

SEQ ID NO: 955946 - RNA, 19 nt, Homo sapiens
  misc_RNA (1)...(19): siRNA sense strand
cuauucauaugcacucuca

SEQ ID NO: 955947 - RNA, 19 nt, Homo sapiens
  misc_RNA (1)...(19): siRNA sense strand
gaagcuagugaagaaaguu

SEQ ID NO: 955948 - RNA, 19 nt, Homo sapiens
  misc_RNA (1)...(19): siRNA sense strand
uuaguaagagugaagagaa

SEQ ID NO: 955949 - RNA, 19 nt, Homo sapiens
  misc_RNA (1)...(19): siRNA sense strand
cagcucaaccuuuauggau

SEQ ID NO: 955950 - RNA, 19 nt, Homo sapiens
  misc_RNA (1)...(19): siRNA sense strand
ucacccuaauuacaacuga

SEQ ID NO: 955951 - RNA, 19 nt, Homo sapiens
  misc_RNA (1)...(19): siRNA sense strand
caaauaucacccuaauuac

SEQ ID NO: 955952 - RNA, 19 nt, Homo sapiens
  misc_RNA (1)...(19): siRNA sense strand
gaggcuccauaucguaaca

SEQ ID NO: 955953 - RNA, 19 nt, Homo sapiens
  misc_RNA (1)...(19): siRNA sense strand
guucgacagcucaaccuuu

SEQ ID NO: 955954 - RNA, 19 nt, Homo sapiens
  misc_RNA (1)...(19): siRNA sense strand
gacaaauaucacccuaauu

SEQ ID NO: 955955 - RNA, 19 nt, Homo sapiens
  misc_RNA (1)...(19): siRNA sense strand
ugaccacuauucauaugca

SEQ ID NO: 955956 - RNA, 19 nt, Homo sapiens
  misc_RNA (1)...(19): siRNA sense strand
gcaacagaucaacaugcua

SEQ ID NO: 955957 - RNA, 19 nt, Homo sapiens
  misc_RNA (1)...(19): siRNA sense strand
guuggaccaucagaacaaa

SEQ ID NO: 955958 - RNA, 19 nt, Homo sapiens
  misc_RNA (1)...(19): siRNA sense strand
ucaacgaagauuucaacaa

SEQ ID NO: 955959 - RNA, 19 nt, Homo sapiens
  misc_RNA (1)...(19): siRNA sense strand
ccagauaaagaugaugauu

SEQ ID NO: 955960 - RNA, 19 nt, Homo sapiens
  misc_RNA (1)...(19): siRNA sense strand
agaaucgucugucuuaagc

SEQ ID NO: 955961 - RNA, 19 nt, Homo sapiens
  misc_RNA (1)...(19): siRNA sense strand
cuucagaaacucaagaugu

SEQ ID NO: 955962 - RNA, 19 nt, Homo sapiens
  misc_RNA (1)...(19): siRNA sense strand
uuagaaaguccaaguuaca

SEQ ID NO: 955963 - RNA, 19 nt, Homo sapiens
  misc_RNA (1)...(19): siRNA sense strand
ugaagcuagugaagaaagu

SEQ ID NO: 955964 - RNA, 19 nt, Homo sapiens
  misc_RNA (1)...(19): siRNA sense strand
ggaccaucagaacaaauug

SEQ ID NO: 955965 - RNA, 19 nt, Homo sapiens
  misc_RNA (1)...(19): siRNA sense strand
acagaucaacaugcuauuu

SEQ ID NO: 955966 - RNA, 19 nt, Homo sapiens
  misc_RNA (1)...(19): siRNA sense strand
ccacuaggucuccauugug

SEQ ID NO: 955967 - RNA, 19 nt, Homo sapiens
  misc_RNA (1)...(19): siRNA sense strand
cuaggucuccauuguguga

SEQ ID NO: 955968 - RNA, 19 nt, Homo sapiens
  misc_RNA (1)...(19): siRNA sense strand
gcuagugaagaaaguuuau

SEQ ID NO: 955969 - RNA, 19 nt, Homo sapiens
  misc_RNA (1)...(19): siRNA sense strand
aaucauaauucugccuuag

SEQ ID NO: 955970 - RNA, 19 nt, Homo sapiens
  misc_RNA (1)...(19): siRNA sense strand
cuaacauggagaaucauaa

SEQ ID NO: 955971 - RNA, 19 nt, Homo sapiens
  misc_RNA (1)...(19): siRNA sense strand
uccacuaggucuccauugu

SEQ ID NO: 955972 - RNA, 19 nt, Homo sapiens
  misc_RNA (1)...(19): siRNA sense strand
caacuucucaauaccacau

SEQ ID NO: 955973 - RNA, 19 nt, Homo sapiens
  misc_RNA (1)...(19): siRNA sense strand
ugagccagauaaagaugau

SEQ ID NO: 955974 - RNA, 19 nt, Homo sapiens
  misc_RNA (1)...(19): siRNA sense strand
gguugcaaaugccuacgau

SEQ ID NO: 955975 - RNA, 19 nt, Homo sapiens
  misc_RNA (1)...(19): siRNA sense strand
aaagugaccaauucaaguc

SEQ ID NO: 955976 - RNA, 19 nt, Homo sapiens
  misc_RNA (1)...(19): siRNA sense strand
ucagacuuacggucaauga

SEQ ID NO: 955977 - RNA, 19 nt, Homo sapiens
  misc_RNA (1)...(19): siRNA sense strand
ucauaauucugccuuagcu

SEQ ID NO: 955978 - RNA, 19 nt, Homo sapiens
  misc_RNA (1)...(19): siRNA sense strand
gauuucaacaagaagcauu

SEQ ID NO: 955979 - RNA, 19 nt, Homo sapiens
  misc_RNA (1)...(19): siRNA sense strand
uaguaagagugaagagaag

SEQ ID NO: 955980 - RNA, 19 nt, Homo sapiens
  misc_RNA (1)...(19): siRNA sense strand
ugagaauggaacuugcaua

SEQ ID NO: 955981 - RNA, 19 nt, Homo sapiens
  misc_RNA (1)...(19): siRNA sense strand
gaugaggucuucuccauuu

SEQ ID NO: 955982 - RNA, 19 nt, Homo sapiens
  misc_RNA (1)...(19): siRNA sense strand
caacauuucuucuuccuuu

SEQ ID NO: 955983 - RNA, 19 nt, Homo sapiens
  misc_RNA (1)...(19): siRNA sense strand
gggaauaccuggaacaaga

SEQ ID NO: 955984 - RNA, 19 nt, Homo sapiens
  misc_RNA (1)...(19): siRNA sense strand
gaacugaacgggcuggaua

SEQ ID NO: 955985 - RNA, 19 nt, Homo sapiens
  misc_RNA (1)...(19): siRNA sense strand
gaacagcaaggucgaagua

SEQ ID NO: 955986 - RNA, 19 nt, Homo sapiens
  misc_RNA (1)...(19): siRNA sense strand
caagaaagcagcccuggua

SEQ ID NO: 955987 - RNA, 19 nt, Homo sapiens
  misc_RNA (1)...(19): siRNA sense strand
uaaauuugcugugguguuu

SEQ ID NO: 955988 - RNA, 19 nt, Homo sapiens
  misc_RNA (1)...(19): siRNA sense strand
gcaccacccuacagcauuu

SEQ ID NO: 955989 - RNA, 19 nt, Homo sapiens
  misc_RNA (1)...(19): siRNA sense strand
cugcagaccuuucggguua

SEQ ID NO: 955990 - RNA, 19 nt, Homo sapiens
  misc_RNA (1)...(19): siRNA sense strand
gcaaauggccuuucugagu

SEQ ID NO: 955991 - RNA, 19 nt, Homo sapiens
  misc_RNA (1)...(19): siRNA sense strand
ggacagauccagggcguua

SEQ ID NO: 955992 - RNA, 19 nt, Homo sapiens
  misc_RNA (1)...(19): siRNA sense strand
gcagagagggcacuacaaa

SEQ ID NO: 955993 - RNA, 19 nt, Homo sapiens
  misc_RNA (1)...(19): siRNA sense strand
ggccugagaucuucacuga

SEQ ID NO: 955994 - RNA, 19 nt, Homo sapiens
  misc_RNA (1)...(19): siRNA sense strand
gcagggaacuaguguuaca

SEQ ID NO: 955995 - RNA, 19 nt, Homo sapiens
  misc_RNA (1)...(19): siRNA sense strand
ccaaugacaccauguauga

SEQ ID NO: 955996 - RNA, 19 nt, Homo sapiens
  misc_RNA (1)...(19): siRNA sense strand
caaugacacuugcuuccua

SEQ ID NO: 955997 - RNA, 19 nt, Homo sapiens
  misc_RNA (1)...(19): siRNA sense strand
gcaggccaaugcaggauaa

SEQ ID NO: 955998 - RNA, 19 nt, Homo sapiens
  misc_RNA (1)...(19): siRNA sense strand
ccaguuuccugaugaguuu

SEQ ID NO: 955999 - RNA, 19 nt, Homo sapiens
  misc_RNA (1)...(19): siRNA sense strand
ggacuucguucaucugaca

SEQ ID NO: 956000 - RNA, 19 nt, Homo sapiens
  misc_RNA (1)...(19): siRNA sense strand
gcauuguggucuccaguuu

SEQ ID NO: 956001 - RNA, 19 nt, Homo sapiens
  misc_RNA (1)...(19): siRNA sense strand
gcagaucaacuccauggua

SEQ ID NO: 956002 - RNA, 19 nt, Homo sapiens
  misc_RNA (1)...(19): siRNA sense strand
gaaugaggccugaacagaa

SEQ ID NO: 956003 - RNA, 19 nt, Homo sapiens
  misc_RNA (1)...(19): siRNA sense strand
gaaccagaauggacaacug

SEQ ID NO: 956004 - RNA, 19 nt, Homo sapiens
  misc_RNA (1)...(19): siRNA sense strand
gaaggaggcucuggcaaag

SEQ ID NO: 956005 - RNA, 19 nt, Homo sapiens
  misc_RNA (1)...(19): siRNA sense strand
gagcugggauggcugcuau

SEQ ID NO: 956006 - RNA, 19 nt, Homo sapiens
  misc_RNA (1)...(19): siRNA sense strand
gagcaaauggccuuucuga

SEQ ID NO: 956007 - RNA, 19 nt, Homo sapiens
  misc_RNA (1)...(19): siRNA sense strand
gaaaggagagcccagaaca

SEQ ID NO: 956008 - RNA, 19 nt, Homo sapiens
  misc_RNA (1)...(19): siRNA sense strand
ggacuuaccgauccaguug

SEQ ID NO: 956009 - RNA, 19 nt, Homo sapiens
  misc_RNA (1)...(19): siRNA sense strand
caaguacccaccaaccuua

SEQ ID NO: 956010 - RNA, 19 nt, Homo sapiens
  misc_RNA (1)...(19): siRNA sense strand
cagaaccugugccaaauug

SEQ ID NO: 956011 - RNA, 19 nt, Homo sapiens
  misc_RNA (1)...(19): siRNA sense strand
ccagacagcugugugguau

SEQ ID NO: 956012 - RNA, 19 nt, Homo sapiens
  misc_RNA (1)...(19): siRNA sense strand
ugacagcgcuggguuauac

SEQ ID NO: 956013 - RNA, 19 nt, Homo sapiens
  misc_RNA (1)...(19): siRNA sense strand
gggaagugcuggagaccuu

SEQ ID NO: 956014 - RNA, 19 nt, Homo sapiens
  misc_RNA (1)...(19): siRNA sense strand
gcucagcccucaccagauc

SEQ ID NO: 956015 - RNA, 19 nt, Homo sapiens
  misc_RNA (1)...(19): siRNA sense strand
ggaaugaggccugaacaga

SEQ ID NO: 956016 - RNA, 19 nt, Homo sapiens
  misc_RNA (1)...(19): siRNA sense strand
ggacagacuauccaaugaa

SEQ ID NO: 956017 - RNA, 19 nt, Homo sapiens
  misc_RNA (1)...(19): siRNA sense strand
caacuucuccauccacuug

SEQ ID NO: 956018 - RNA, 19 nt, Homo sapiens
  misc_RNA (1)...(19): siRNA sense strand
cagaggagcuccagcacau

SEQ ID NO: 956019 - RNA, 19 nt, Homo sapiens
  misc_RNA (1)...(19): siRNA sense strand
caacccagauugcagagau

SEQ ID NO: 956020 - RNA, 19 nt, Homo sapiens
  misc_RNA (1)...(19): siRNA sense strand
gagagacauuugccacaga

SEQ ID NO: 956021 - RNA, 19 nt, Homo sapiens
  misc_RNA (1)...(19): siRNA sense strand
gacagacuauccaaugaau

SEQ ID NO: 956022 - RNA, 19 nt, Homo sapiens
  misc_RNA (1)...(19): siRNA sense strand
gcaaguacccaccaaccuu

SEQ ID NO: 956023 - RNA, 19 nt, Homo sapiens
  misc_RNA (1)...(19): siRNA sense strand
cauuaaagcugcuacaacu

SEQ ID NO: 956024 - RNA, 19 nt, Homo sapiens
  misc_RNA (1)...(19): siRNA sense strand
gcaguaaccucuccuuuuc

SEQ ID NO: 956025 - RNA, 19 nt, Homo sapiens
  misc_RNA (1)...(19): siRNA sense strand
ccucccagcucuucauuga

SEQ ID NO: 956026 - RNA, 19 nt, Homo sapiens
  misc_RNA (1)...(19): siRNA sense strand
ccacucagcuccgcauugu

SEQ ID NO: 956027 - RNA, 19 nt, Homo sapiens
  misc_RNA (1)...(19): siRNA sense strand
gccaaauugugcagaugua

SEQ ID NO: 956028 - RNA, 19 nt, Homo sapiens
  misc_RNA (1)...(19): siRNA sense strand
gaaagcagcccugguagca

SEQ ID NO: 956029 - RNA, 19 nt, Homo sapiens
  misc_RNA (1)...(19): siRNA sense strand
gauuacagcccaggaauga

SEQ ID NO: 956030 - RNA, 19 nt, Homo sapiens
  misc_RNA (1)...(19): siRNA sense strand
ugaacgggcuggauagcaa

SEQ ID NO: 956031 - RNA, 19 nt, Homo sapiens
  misc_RNA (1)...(19): siRNA sense strand
ugucaucccuccuccuaaa

SEQ ID NO: 956032 - RNA, 19 nt, Homo sapiens
  misc_RNA (1)...(19): siRNA sense strand
cuuaauaggucuaggagau

SEQ ID NO: 956033 - RNA, 19 nt, Homo sapiens
  misc_RNA (1)...(19): siRNA sense strand
gcaagcuacuccuggacuu

SEQ ID NO: 956034 - RNA, 19 nt, Homo sapiens
  misc_RNA (1)...(19): siRNA sense strand
gaccuuaggcccuuugguu

SEQ ID NO: 956035 - RNA, 19 nt, Homo sapiens
  misc_RNA (1)...(19): siRNA sense strand
agauggagcucucagacuu

SEQ ID NO: 956036 - RNA, 19 nt, Homo sapiens
  misc_RNA (1)...(19): siRNA sense strand
cuacagcauuuccaacuuc

SEQ ID NO: 956037 - RNA, 19 nt, Homo sapiens
  misc_RNA (1)...(19): siRNA sense strand
caucccuccuccuaaauuu

SEQ ID NO: 956038 - RNA, 19 nt, Homo sapiens
  misc_RNA (1)...(19): siRNA sense strand
gcagcuugguaggcucuua

SEQ ID NO: 956039 - RNA, 19 nt, Homo sapiens
  misc_RNA (1)...(19): siRNA sense strand
ggacugccugacauuauuu

SEQ ID NO: 956040 - RNA, 19 nt, Homo sapiens
  misc_RNA (1)...(19): siRNA sense strand
gagccaggaugaaguagag

SEQ ID NO: 956041 - RNA, 19 nt, Homo sapiens
  misc_RNA (1)...(19): siRNA sense strand
ggaggcauguccugugagu

SEQ ID NO: 956042 - RNA, 19 nt, Homo sapiens
  misc_RNA (1)...(19): siRNA sense strand
ugucaccacucaucccuuu

SEQ ID NO: 956043 - RNA, 19 nt, Homo sapiens
  misc_RNA (1)...(19): siRNA sense strand
ccacacgccuacacuaucu

SEQ ID NO: 956044 - RNA, 19 nt, Homo sapiens
  misc_RNA (1)...(19): siRNA sense strand
ucuaggagaucgggaacua

SEQ ID NO: 956045 - RNA, 19 nt, Homo sapiens
  misc_RNA (1)...(19): siRNA sense strand
ccagacaacugcuccuucu

SEQ ID NO: 956046 - RNA, 19 nt, Homo sapiens
  misc_RNA (1)...(19): siRNA sense strand
ucuaucagcugcccacuag

SEQ ID NO: 956047 - RNA, 19 nt, Homo sapiens
  misc_RNA (1)...(19): siRNA sense strand
gagcugcuggccugcuuua

SEQ ID NO: 956048 - RNA, 19 nt, Homo sapiens
  misc_RNA (1)...(19): siRNA sense strand
gcagaccuuucggguuaaa

SEQ ID NO: 956049 - RNA, 19 nt, Homo sapiens
  misc_RNA (1)...(19): siRNA sense strand
gcucugcggcuccaugauu

SEQ ID NO: 956050 - RNA, 19 nt, Homo sapiens
  misc_RNA (1)...(19): siRNA sense strand
gagcagcgacgagcaguug

SEQ ID NO: 956051 - RNA, 19 nt, Homo sapiens
  misc_RNA (1)...(19): siRNA sense strand
gaaccugugccaaauugug

SEQ ID NO: 956052 - RNA, 19 nt, Homo sapiens
  misc_RNA (1)...(19): siRNA sense strand
acagagagcacacgacaga

SEQ ID NO: 956053 - RNA, 19 nt, Homo sapiens
  misc_RNA (1)...(19): siRNA sense strand
aaggacggguggcauauga

SEQ ID NO: 956054 - RNA, 19 nt, Homo sapiens
  misc_RNA (1)...(19): siRNA sense strand
cagaaggacggguggcaua

SEQ ID NO: 956055 - RNA, 19 nt, Homo sapiens
  misc_RNA (1)...(19): siRNA sense strand
ggagucuguucuugggaaa

SEQ ID NO: 956056 - RNA, 19 nt, Homo sapiens
  misc_RNA (1)...(19): siRNA sense strand
ggagagcccagaacagcaa

SEQ ID NO: 956057 - RNA, 19 nt, Homo sapiens
  misc_RNA (1)...(19): siRNA sense strand
ccagugcucugaggaacaa

SEQ ID NO: 956058 - RNA, 19 nt, Homo sapiens
  misc_RNA (1)...(19): siRNA sense strand
gaggacugccugacauuau

SEQ ID NO: 956059 - RNA, 19 nt, Homo sapiens
  misc_RNA (1)...(19): siRNA sense strand
gccagagccugauaccaau

SEQ ID NO: 956060 - RNA, 19 nt, Homo sapiens
  misc_RNA (1)...(19): siRNA sense strand
uuacuccucuugccauuuc

SEQ ID NO: 956061 - RNA, 19 nt, Homo sapiens
  misc_RNA (1)...(19): siRNA sense strand
gcaagcuggacgccuagua

SEQ ID NO: 956062 - RNA, 19 nt, Homo sapiens
  misc_RNA (1)...(19): siRNA sense strand
caugguagacuuccuugaa

SEQ ID NO: 956063 - RNA, 19 nt, Homo sapiens
  misc_RNA (1)...(19): siRNA sense strand
agaaggaggcucuggcaaa

SEQ ID NO: 956064 - RNA, 19 nt, Homo sapiens
  misc_RNA (1)...(19): siRNA sense strand
uucaacagcugcucuuaug

SEQ ID NO: 956065 - RNA, 19 nt, Homo sapiens
  misc_RNA (1)...(19): siRNA sense strand
gcacaguuucucuggaaga

SEQ ID NO: 956066 - RNA, 19 nt, Homo sapiens
  misc_RNA (1)...(19): siRNA sense strand
cugcagggaacuaguguua

SEQ ID NO: 956067 - RNA, 19 nt, Homo sapiens
  misc_RNA (1)...(19): siRNA sense strand
uggaugcgaucugcaguaa

SEQ ID NO: 956068 - RNA, 19 nt, Homo sapiens
  misc_RNA (1)...(19): siRNA sense strand
gcaggagacccaggacuug

SEQ ID NO: 956069 - RNA, 19 nt, Homo sapiens
  misc_RNA (1)...(19): siRNA sense strand
aggcauguccugugaguuu

SEQ ID NO: 956070 - RNA, 19 nt, Homo sapiens
  misc_RNA (1)...(19): siRNA sense strand
gcagaguggucggcaugug

SEQ ID NO: 956071 - RNA, 19 nt, Homo sapiens
  misc_RNA (1)...(19): siRNA sense strand
gauggagcucucagacuuu

SEQ ID NO: 956072 - RNA, 19 nt, Homo sapiens
  misc_RNA (1)...(19): siRNA sense strand
caagcuacuccuggacuua

SEQ ID NO: 956073 - RNA, 19 nt, Homo sapiens
  misc_RNA (1)...(19): siRNA sense strand
caucagcaguugggaguuc

SEQ ID NO: 956074 - RNA, 19 nt, Homo sapiens
  misc_RNA (1)...(19): siRNA sense strand
gugauggucugugccaaug

SEQ ID NO: 956075 - RNA, 19 nt, Homo sapiens
  misc_RNA (1)...(19): siRNA sense strand
uguacugccugguggguuu

SEQ ID NO: 956076 - RNA, 19 nt, Homo sapiens
  misc_RNA (1)...(19): siRNA sense strand
gaggagcuccagcacauca

SEQ ID NO: 956077 - RNA, 19 nt, Homo sapiens
  misc_RNA (1)...(19): siRNA sense strand
uauucacucugucuacuga

SEQ ID NO: 956078 - RNA, 19 nt, Homo sapiens
  misc_RNA (1)...(19): siRNA sense strand
caagcuggacgccuaguau

SEQ ID NO: 956079 - RNA, 19 nt, Homo sapiens
  misc_RNA (1)...(19): siRNA sense strand
ggaagugcuggagaccuua

SEQ ID NO: 956080 - RNA, 19 nt, Homo sapiens
  misc_RNA (1)...(19): siRNA sense strand
cgacugggagccaaugcua

SEQ ID NO: 956081 - RNA, 19 nt, Homo sapiens
  misc_RNA (1)...(19): siRNA sense strand
ggaaagagaugccaagacu

SEQ ID NO: 956082 - RNA, 19 nt, Homo sapiens
  misc_RNA (1)...(19): siRNA sense strand
guacacagaagguauagua

SEQ ID NO: 956083 - RNA, 19 nt, Homo sapiens
  misc_RNA (1)...(19): siRNA sense strand
gagagagcccugauugaua

SEQ ID NO: 956084 - RNA, 19 nt, Homo sapiens
  misc_RNA (1)...(19): siRNA sense strand
gaagaagcaaggaagauuu

SEQ ID NO: 956085 - RNA, 19 nt, Homo sapiens
  misc_RNA (1)...(19): siRNA sense strand
gaugagaaaucuuuagaag

SEQ ID NO: 956086 - RNA, 19 nt, Homo sapiens
  misc_RNA (1)...(19): siRNA sense strand
ccagagccauucuuaacua

SEQ ID NO: 956087 - RNA, 19 nt, Homo sapiens
  misc_RNA (1)...(19): siRNA sense strand
cagaagauuuggacaaguu

SEQ ID NO: 956088 - RNA, 19 nt, Homo sapiens
  misc_RNA (1)...(19): siRNA sense strand
gagaaagccucccauggau

SEQ ID NO: 956089 - RNA, 19 nt, Homo sapiens
  misc_RNA (1)...(19): siRNA sense strand
cagaagguauaguagauuu

SEQ ID NO: 956090 - RNA, 19 nt, Homo sapiens
  misc_RNA (1)...(19): siRNA sense strand
gaaagccucccauggauga

SEQ ID NO: 956091 - RNA, 19 nt, Homo sapiens
  misc_RNA (1)...(19): siRNA sense strand
gaguagaguuggaagagaa

SEQ ID NO: 956092 - RNA, 19 nt, Homo sapiens
  misc_RNA (1)...(19): siRNA sense strand
gcaaauacaaccuuuaugg

SEQ ID NO: 956093 - RNA, 19 nt, Homo sapiens
  misc_RNA (1)...(19): siRNA sense strand
agagagcccugauugauau

SEQ ID NO: 956094 - RNA, 19 nt, Homo sapiens
  misc_RNA (1)...(19): siRNA sense strand
gaagguauaguagauuuga

SEQ ID NO: 956095 - RNA, 19 nt, Homo sapiens
  misc_RNA (1)...(19): siRNA sense strand
cuacuucccugccuuugaa

SEQ ID NO: 956096 - RNA, 19 nt, Homo sapiens
  misc_RNA (1)...(19): siRNA sense strand
ggagagagcccugauugau

SEQ ID NO: 956097 - RNA, 19 nt, Homo sapiens
  misc_RNA (1)...(19): siRNA sense strand
gagcccugauugauaugua

SEQ ID NO: 956098 - RNA, 19 nt, Homo sapiens
  misc_RNA (1)...(19): siRNA sense strand
caaggaagauuuucagguu

SEQ ID NO: 956099 - RNA, 19 nt, Homo sapiens
  misc_RNA (1)...(19): siRNA sense strand
ugauugauauguacacaga

SEQ ID NO: 956100 - RNA, 19 nt, Homo sapiens
  misc_RNA (1)...(19): siRNA sense strand
ggaguagaguuggaagaga

SEQ ID NO: 956101 - RNA, 19 nt, Homo sapiens
  misc_RNA (1)...(19): siRNA sense strand
uaagaaaugaugggaguuu

SEQ ID NO: 956102 - RNA, 19 nt, Homo sapiens
  misc_RNA (1)...(19): siRNA sense strand
cacagaagguauaguagau

SEQ ID NO: 956103 - RNA, 19 nt, Homo sapiens
  misc_RNA (1)...(19): siRNA sense strand
gaagauuuggacaaguuaa

SEQ ID NO: 956104 - RNA, 19 nt, Homo sapiens
  misc_RNA (1)...(19): siRNA sense strand
ugacugaaaugauccuucu

SEQ ID NO: 956105 - RNA, 19 nt, Homo sapiens
  misc_RNA (1)...(19): siRNA sense strand
gaaggagagagcccugauu

SEQ ID NO: 956106 - RNA, 19 nt, Homo sapiens
  misc_RNA (1)...(19): siRNA sense strand
cagcaaauacaaccuuuau

SEQ ID NO: 956107 - RNA, 19 nt, Homo sapiens
  misc_RNA (1)...(19): siRNA sense strand
gagccauucuuaacuacau

SEQ ID NO: 956108 - RNA, 19 nt, Homo sapiens
  misc_RNA (1)...(19): siRNA sense strand
agagaaagccucccaugga

SEQ ID NO: 956109 - RNA, 19 nt, Homo sapiens
  misc_RNA (1)...(19): siRNA sense strand
gagcugggcugacauucac

SEQ ID NO: 956110 - RNA, 19 nt, Homo sapiens
  misc_RNA (1)...(19): siRNA sense strand
gccagcaaauacaaccuuu

SEQ ID NO: 956111 - RNA, 19 nt, Homo sapiens
  misc_RNA (1)...(19): siRNA sense strand
cagaccagagccauucuua

SEQ ID NO: 956112 - RNA, 19 nt, Homo sapiens
  misc_RNA (1)...(19): siRNA sense strand
gaccagagccauucuuaac

SEQ ID NO: 956113 - RNA, 19 nt, Homo sapiens
  misc_RNA (1)...(19): siRNA sense strand
auacaaccuuuaugggaaa

SEQ ID NO: 956114 - RNA, 19 nt, Homo sapiens
  misc_RNA (1)...(19): siRNA sense strand
ggaugagaaaucuuuagaa

SEQ ID NO: 956115 - RNA, 19 nt, Homo sapiens
  misc_RNA (1)...(19): siRNA sense strand
agacugccuuggucaaaga

SEQ ID NO: 956116 - RNA, 19 nt, Homo sapiens
  misc_RNA (1)...(19): siRNA sense strand
gcagaagauuuggacaagu

SEQ ID NO: 956117 - RNA, 19 nt, Homo sapiens
  misc_RNA (1)...(19): siRNA sense strand
ccauggaugagaaaucuuu

SEQ ID NO: 956118 - RNA, 19 nt, Homo sapiens
  misc_RNA (1)...(19): siRNA sense strand
ggaagauuuucagguuuua

SEQ ID NO: 956119 - RNA, 19 nt, Homo sapiens
  misc_RNA (1)...(19): siRNA sense strand
gauccuucuucugcucaua

SEQ ID NO: 956120 - RNA, 19 nt, Homo sapiens
  misc_RNA (1)...(19): siRNA sense strand
uuggacaaguuaagaaaug

SEQ ID NO: 956121 - RNA, 19 nt, Homo sapiens
  misc_RNA (1)...(19): siRNA sense strand
gauauguacacagaaggua

SEQ ID NO: 956122 - RNA, 19 nt, Homo sapiens
  misc_RNA (1)...(19): siRNA sense strand
ccagcaaauacaaccuuua

SEQ ID NO: 956123 - RNA, 19 nt, Homo sapiens
  misc_RNA (1)...(19): siRNA sense strand
acacagaagguauaguaga

SEQ ID NO: 956124 - RNA, 19 nt, Homo sapiens
  misc_RNA (1)...(19): siRNA sense strand
uauguacacagaagguaua

SEQ ID NO: 956125 - RNA, 19 nt, Homo sapiens
  misc_RNA (1)...(19): siRNA sense strand
agaagaagcaaggaagauu

SEQ ID NO: 956126 - RNA, 19 nt, Homo sapiens
  misc_RNA (1)...(19): siRNA sense strand
gauuuggacaaguuaagaa

SEQ ID NO: 956127 - RNA, 19 nt, Homo sapiens
  misc_RNA (1)...(19): siRNA sense strand
uggacaaguuaagaaauga

SEQ ID NO: 956128 - RNA, 19 nt, Homo sapiens
  misc_RNA (1)...(19): siRNA sense strand
ggacaaguuaagaaaugau

SEQ ID NO: 956129 - RNA, 19 nt, Homo sapiens
  misc_RNA (1)...(19): siRNA sense strand
aagaaaugaugggaguuug

SEQ ID NO: 956130 - RNA, 19 nt, Homo sapiens
  misc_RNA (1)...(19): siRNA sense strand
gaggaaagagaugccaaga

SEQ ID NO: 956131 - RNA, 19 nt, Homo sapiens
  misc_RNA (1)...(19): siRNA sense strand
agaguuggaagagaaauuu

SEQ ID NO: 956132 - RNA, 19 nt, Homo sapiens
  misc_RNA (1)...(19): siRNA sense strand
aaggagagagcccugauug

SEQ ID NO: 956133 - RNA, 19 nt, Homo sapiens
  misc_RNA (1)...(19): siRNA sense strand
gacaaguuaagaaaugaug

SEQ ID NO: 956134 - RNA, 19 nt, Homo sapiens
  misc_RNA (1)...(19): siRNA sense strand
agaagauuuggacaaguua

SEQ ID NO: 956135 - RNA, 19 nt, Homo sapiens
  misc_RNA (1)...(19): siRNA sense strand
cagcuggaguagaguugga

SEQ ID NO: 956136 - RNA, 19 nt, Homo sapiens
  misc_RNA (1)...(19): siRNA sense strand
gcuacuucccugccuuuga

SEQ ID NO: 956137 - RNA, 19 nt, Homo sapiens
  misc_RNA (1)...(19): siRNA sense strand
guauaguagauuugacuga

SEQ ID NO: 956138 - RNA, 19 nt, Homo sapiens
  misc_RNA (1)...(19): siRNA sense strand
gcugagcugggcugacauu

SEQ ID NO: 956139 - RNA, 19 nt, Homo sapiens
  misc_RNA (1)...(19): siRNA sense strand
ggcugcagcuggaguagag

SEQ ID NO: 956140 - RNA, 19 nt, Homo sapiens
  misc_RNA (1)...(19): siRNA sense strand
gaaaugaugggaguuugcu

SEQ ID NO: 956141 - RNA, 19 nt, Homo sapiens
  misc_RNA (1)...(19): siRNA sense strand
agaccagagccauucuuaa

SEQ ID NO: 956142 - RNA, 19 nt, Homo sapiens
  misc_RNA (1)...(19): siRNA sense strand
cauggaugagaaaucuuua

SEQ ID NO: 956143 - RNA, 19 nt, Homo sapiens
  misc_RNA (1)...(19): siRNA sense strand
gaaagacaugaaggagaga

SEQ ID NO: 956144 - RNA, 19 nt, Homo sapiens
  misc_RNA (1)...(19): siRNA sense strand
ugcccacggugaagaaguu

SEQ ID NO: 956145 - RNA, 19 nt, Homo sapiens
  misc_RNA (1)...(19): siRNA sense strand
gugcagaccagagccauuc

SEQ ID NO: 956146 - RNA, 19 nt, Homo sapiens
  misc_RNA (1)...(19): siRNA sense strand
gcagaccagagccauucuu

SEQ ID NO: 956147 - RNA, 19 nt, Homo sapiens
  misc_RNA (1)...(19): siRNA sense strand
ugaaaugauccuucuucug

SEQ ID NO: 956148 - RNA, 19 nt, Homo sapiens
  misc_RNA (1)...(19): siRNA sense strand
uggaugagaaaucuuuaga

SEQ ID NO: 956149 - RNA, 19 nt, Homo sapiens
  misc_RNA (1)...(19): siRNA sense strand
ucccauggaugagaaaucu

SEQ ID NO: 956150 - RNA, 19 nt, Homo sapiens
  misc_RNA (1)...(19): siRNA sense strand
cagagccauucuuaacuac

SEQ ID NO: 956151 - RNA, 19 nt, Homo sapiens
  misc_RNA (1)...(19): siRNA sense strand
ugguggaacuuuucuacua

SEQ ID NO: 956152 - RNA, 19 nt, Homo sapiens
  misc_RNA (1)...(19): siRNA sense strand
gaacaucccuccuuauuuu

SEQ ID NO: 956153 - RNA, 19 nt, Homo sapiens
  misc_RNA (1)...(19): siRNA sense strand
caacaaagauauagugauc

SEQ ID NO: 956154 - RNA, 19 nt, Homo sapiens
  misc_RNA (1)...(19): siRNA sense strand
gaagaugaguugacaccuu

SEQ ID NO: 956155 - RNA, 19 nt, Homo sapiens
  misc_RNA (1)...(19): siRNA sense strand
gaaggagguugcagcauug

SEQ ID NO: 956156 - RNA, 19 nt, Homo sapiens
  misc_RNA (1)...(19): siRNA sense strand
ccacggaucugacuacuca

SEQ ID NO: 956157 - RNA, 19 nt, Homo sapiens
  misc_RNA (1)...(19): siRNA sense strand
caaaguguguacaucagua

SEQ ID NO: 956158 - RNA, 19 nt, Homo sapiens
  misc_RNA (1)...(19): siRNA sense strand
guacaucaguaagaucaua

SEQ ID NO: 956159 - RNA, 19 nt, Homo sapiens
  misc_RNA (1)...(19): siRNA sense strand
ggaagaugcccuuuacuga

SEQ ID NO: 956160 - RNA, 19 nt, Homo sapiens
  misc_RNA (1)...(19): siRNA sense strand
gaagaugcccuuuacugaa

SEQ ID NO: 956161 - RNA, 19 nt, Homo sapiens
  misc_RNA (1)...(19): siRNA sense strand
ucucaagccuccuccaaua

SEQ ID NO: 956162 - RNA, 19 nt, Homo sapiens
  misc_RNA (1)...(19): siRNA sense strand
ggagaaagaggaaacagaa

SEQ ID NO: 956163 - RNA, 19 nt, Homo sapiens
  misc_RNA (1)...(19): siRNA sense strand
caagaggucucagaucuau

SEQ ID NO: 956164 - RNA, 19 nt, Homo sapiens
  misc_RNA (1)...(19): siRNA sense strand
gaagagaaccuugaagcaa

SEQ ID NO: 956165 - RNA, 19 nt, Homo sapiens
  misc_RNA (1)...(19): siRNA sense strand
ggaacaucccuccuuauuu

SEQ ID NO: 956166 - RNA, 19 nt, Homo sapiens
  misc_RNA (1)...(19): siRNA sense strand
auacagaagugacagcuuu

SEQ ID NO: 956167 - RNA, 19 nt, Homo sapiens
  misc_RNA (1)...(19): siRNA sense strand
agaaggagguugcagcauu

SEQ ID NO: 956168 - RNA, 19 nt, Homo sapiens
  misc_RNA (1)...(19): siRNA sense strand
gugccaaccucuuuaguga

SEQ ID NO: 956169 - RNA, 19 nt, Homo sapiens
  misc_RNA (1)...(19): siRNA sense strand
ggaaaguuaccaagagaaa

SEQ ID NO: 956170 - RNA, 19 nt, Homo sapiens
  misc_RNA (1)...(19): siRNA sense strand
ucaagugucuggagaagga

SEQ ID NO: 956171 - RNA, 19 nt, Homo sapiens
  misc_RNA (1)...(19): siRNA sense strand
caaguggagacuauaaaua

SEQ ID NO: 956172 - RNA, 19 nt, Homo sapiens
  misc_RNA (1)...(19): siRNA sense strand
gaagugacagcuuugagaa

SEQ ID NO: 956173 - RNA, 19 nt, Homo sapiens
  misc_RNA (1)...(19): siRNA sense strand
gaagggaaaguuaccaaga

SEQ ID NO: 956174 - RNA, 19 nt, Homo sapiens
  misc_RNA (1)...(19): siRNA sense strand
aggaagagauaguuugauu

SEQ ID NO: 956175 - RNA, 19 nt, Homo sapiens
  misc_RNA (1)...(19): siRNA sense strand
aagaugcccuuuacugaaa

SEQ ID NO: 956176 - RNA, 19 nt, Homo sapiens
  misc_RNA (1)...(19): siRNA sense strand
gaagcucaacaaagauaua

SEQ ID NO: 956177 - RNA, 19 nt, Homo sapiens
  misc_RNA (1)...(19): siRNA sense strand
gauguccaauucaagauga

SEQ ID NO: 956178 - RNA, 19 nt, Homo sapiens
  misc_RNA (1)...(19): siRNA sense strand
gacaugagcauccagugua

SEQ ID NO: 956179 - RNA, 19 nt, Homo sapiens
  misc_RNA (1)...(19): siRNA sense strand
ggaagagauaguuugauuu

SEQ ID NO: 956180 - RNA, 19 nt, Homo sapiens
  misc_RNA (1)...(19): siRNA sense strand
gcugugguguucuauggua

SEQ ID NO: 956181 - RNA, 19 nt, Homo sapiens
  misc_RNA (1)...(19): siRNA sense strand
aagaugaguugacaccuuu

SEQ ID NO: 956182 - RNA, 19 nt, Homo sapiens
  misc_RNA (1)...(19): siRNA sense strand
ugaagcaaguggagacuau

SEQ ID NO: 956183 - RNA, 19 nt, Homo sapiens
  misc_RNA (1)...(19): siRNA sense strand
agaguuggaugaccagaaa

SEQ ID NO: 956184 - RNA, 19 nt, Homo sapiens
  misc_RNA (1)...(19): siRNA sense strand
gaugaaggcuaucguugag

SEQ ID NO: 956185 - RNA, 19 nt, Homo sapiens
  misc_RNA (1)...(19): siRNA sense strand
ugaaggcuaucguugagaa

SEQ ID NO: 956186 - RNA, 19 nt, Homo sapiens
  misc_RNA (1)...(19): siRNA sense strand
ccaaggcuauguuugaauc

SEQ ID NO: 956187 - RNA, 19 nt, Homo sapiens
  misc_RNA (1)...(19): siRNA sense strand
ggcccaagguggaguauuc

SEQ ID NO: 956188 - RNA, 19 nt, Homo sapiens
  misc_RNA (1)...(19): siRNA sense strand
ugaagguucuggaagcaaa

SEQ ID NO: 956189 - RNA, 19 nt, Homo sapiens
  misc_RNA (1)...(19): siRNA sense strand
gccaaccucuuuagugaug

SEQ ID NO: 956190 - RNA, 19 nt, Homo sapiens
  misc_RNA (1)...(19): siRNA sense strand
gcaaguggagacuauaaau

SEQ ID NO: 956191 - RNA, 19 nt, Homo sapiens
  misc_RNA (1)...(19): siRNA sense strand
ccaagacccggaccuuuaa

SEQ ID NO: 956192 - RNA, 19 nt, Homo sapiens
  misc_RNA (1)...(19): siRNA sense strand
uaugggagucgucagauua

SEQ ID NO: 956193 - RNA, 19 nt, Homo sapiens
  misc_RNA (1)...(19): siRNA sense strand
gauaaugaagguucuggaa

SEQ ID NO: 956194 - RNA, 19 nt, Homo sapiens
  misc_RNA (1)...(19): siRNA sense strand
cagggugggagucauauua

SEQ ID NO: 956195 - RNA, 19 nt, Homo sapiens
  misc_RNA (1)...(19): siRNA sense strand
auaaagcucuaucgggaaa

SEQ ID NO: 956196 - RNA, 19 nt, Homo sapiens
  misc_RNA (1)...(19): siRNA sense strand
gcccaagguugaagcaaug

SEQ ID NO: 956197 - RNA, 19 nt, Homo sapiens
  misc_RNA (1)...(19): siRNA sense strand
cauaagcagugaucgagau

SEQ ID NO: 956198 - RNA, 19 nt, Homo sapiens
  misc_RNA (1)...(19): siRNA sense strand
ugacauugcccaagguuga

SEQ ID NO: 956199 - RNA, 19 nt, Homo sapiens
  misc_RNA (1)...(19): siRNA sense strand
ugaagaagcagaggaagaa

SEQ ID NO: 956200 - RNA, 19 nt, Homo sapiens
  misc_RNA (1)...(19): siRNA sense strand
gaaacaaaugaaccaguga

SEQ ID NO: 956201 - RNA, 19 nt, Homo sapiens
  misc_RNA (1)...(19): siRNA sense strand
ggaucaugcuguucaccaa

SEQ ID NO: 956202 - RNA, 19 nt, Homo sapiens
  misc_RNA (1)...(19): siRNA sense strand
ucagugcucugcucaucaa

SEQ ID NO: 956203 - RNA, 19 nt, Homo sapiens
  misc_RNA (1)...(19): siRNA sense strand
auacaggcaucuuccuuga

SEQ ID NO: 956204 - RNA, 19 nt, Homo sapiens
  misc_RNA (1)...(19): siRNA sense strand
gagcaggugggcaagauga

SEQ ID NO: 956205 - RNA, 19 nt, Homo sapiens
  misc_RNA (1)...(19): siRNA sense strand
caagcuagaagaccuguug

SEQ ID NO: 956206 - RNA, 19 nt, Homo sapiens
  misc_RNA (1)...(19): siRNA sense strand
ggaccucaggguucacuuu

SEQ ID NO: 956207 - RNA, 19 nt, Homo sapiens
  misc_RNA (1)...(19): siRNA sense strand
gagugaagaugaguugaca

SEQ ID NO: 956208 - RNA, 19 nt, Homo sapiens
  misc_RNA (1)...(19): siRNA sense strand
cgagggcgaugaagaagca

SEQ ID NO: 956209 - RNA, 19 nt, Homo sapiens
  misc_RNA (1)...(19): siRNA sense strand
gaagcaaguggagacuaua

SEQ ID NO: 956210 - RNA, 19 nt, Homo sapiens
  misc_RNA (1)...(19): siRNA sense strand
gaaagaggaaacagaagag

SEQ ID NO: 956211 - RNA, 19 nt, Homo sapiens
  misc_RNA (1)...(19): siRNA sense strand
gcacucagcagguuaaagc

SEQ ID NO: 956212 - RNA, 19 nt, Homo sapiens
  misc_RNA (1)...(19): siRNA sense strand
gaccaaagccggugaucuc

SEQ ID NO: 956213 - RNA, 19 nt, Homo sapiens
  misc_RNA (1)...(19): siRNA sense strand
ggaucugacuacucacuca

SEQ ID NO: 956214 - RNA, 19 nt, Homo sapiens
  misc_RNA (1)...(19): siRNA sense strand
ggucugugccaaccucuuu

SEQ ID NO: 956215 - RNA, 19 nt, Homo sapiens
  misc_RNA (1)...(19): siRNA sense strand
caagguggaguauucagaa

SEQ ID NO: 956216 - RNA, 19 nt, Homo sapiens
  misc_RNA (1)...(19): siRNA sense strand
guuugaugcucauggguuu

SEQ ID NO: 956217 - RNA, 19 nt, Homo sapiens
  misc_RNA (1)...(19): siRNA sense strand
acagagauaucaucagcau

SEQ ID NO: 956218 - RNA, 19 nt, Homo sapiens
  misc_RNA (1)...(19): siRNA sense strand
uuagugauguccaauucaa

SEQ ID NO: 956219 - RNA, 19 nt, Homo sapiens
  misc_RNA (1)...(19): siRNA sense strand
ugacauauccuuguucuac

SEQ ID NO: 956220 - RNA, 19 nt, Homo sapiens
  misc_RNA (1)...(19): siRNA sense strand
gacauauccuuguucuaca

SEQ ID NO: 956221 - RNA, 19 nt, Homo sapiens
  misc_RNA (1)...(19): siRNA sense strand
auaagaggaucaugcuguu

SEQ ID NO: 956222 - RNA, 19 nt, Homo sapiens
  misc_RNA (1)...(19): siRNA sense strand
caagaugaaggcuaucguu

SEQ ID NO: 956223 - RNA, 19 nt, Homo sapiens
  misc_RNA (1)...(19): siRNA sense strand
agauuauacuggagaaaga

SEQ ID NO: 956224 - RNA, 19 nt, Homo sapiens
  misc_RNA (1)...(19): siRNA sense strand
ccaagaggucucagaucua

SEQ ID NO: 956225 - RNA, 19 nt, Homo sapiens
  misc_RNA (1)...(19): siRNA sense strand
ucaagccuccuccaauaaa

SEQ ID NO: 956226 - RNA, 19 nt, Homo sapiens
  misc_RNA (1)...(19): siRNA sense strand
gcuuugacauauccuuguu

SEQ ID NO: 956227 - RNA, 19 nt, Homo sapiens
  misc_RNA (1)...(19): siRNA sense strand
agagauaucaucagcauag

SEQ ID NO: 956228 - RNA, 19 nt, Homo sapiens
  misc_RNA (1)...(19): siRNA sense strand
gagcugaagacccacauca

SEQ ID NO: 956229 - RNA, 19 nt, Homo sapiens
  misc_RNA (1)...(19): siRNA sense strand
gagaaaacacgauaaugaa

SEQ ID NO: 956230 - RNA, 19 nt, Homo sapiens
  misc_RNA (1)...(19): siRNA sense strand
ggaagaacaagaagagaac

SEQ ID NO: 956231 - RNA, 19 nt, Homo sapiens
  misc_RNA (1)...(19): siRNA sense strand
ggcccucccuguucgugua

SEQ ID NO: 956232 - RNA, 19 nt, Homo sapiens
  misc_RNA (1)...(19): siRNA sense strand
agaaagaggaaacagaaga

SEQ ID NO: 956233 - RNA, 19 nt, Homo sapiens
  misc_RNA (1)...(19): siRNA sense strand
acccggaccuuuaauacaa

SEQ ID NO: 956234 - RNA, 19 nt, Homo sapiens
  misc_RNA (1)...(19): siRNA sense strand
accaagacccggaccuuua

SEQ ID NO: 956235 - RNA, 19 nt, Homo sapiens
  misc_RNA (1)...(19): siRNA sense strand
gcucaacaaagauauagug

SEQ ID NO: 956236 - RNA, 19 nt, Homo sapiens
  misc_RNA (1)...(19): siRNA sense strand
guaagaucauaagcaguga

SEQ ID NO: 956237 - RNA, 19 nt, Homo sapiens
  misc_RNA (1)...(19): siRNA sense strand
ucuagagcuugaccaguuu

SEQ ID NO: 956238 - RNA, 19 nt, Homo sapiens
  misc_RNA (1)...(19): siRNA sense strand
ugaggaauccagcaagcua

SEQ ID NO: 956239 - RNA, 19 nt, Homo sapiens
  misc_RNA (1)...(19): siRNA sense strand
gcuccuugguggaugaguu

SEQ ID NO: 956240 - RNA, 19 nt, Homo sapiens
  misc_RNA (1)...(19): siRNA sense strand
gugcucugcucaucaagug

SEQ ID NO: 956241 - RNA, 19 nt, Homo sapiens
  misc_RNA (1)...(19): siRNA sense strand
gagcauccaguguauccaa

SEQ ID NO: 956242 - RNA, 19 nt, Homo sapiens
  misc_RNA (1)...(19): siRNA sense strand
uggaagcccucaccaagca

SEQ ID NO: 956243 - RNA, 19 nt, Homo sapiens
  misc_RNA (1)...(19): siRNA sense strand
ucaggaagagauaguuuga

SEQ ID NO: 956244 - RNA, 19 nt, Homo sapiens
  misc_RNA (1)...(19): siRNA sense strand
ccuccaaggcuauguuuga

SEQ ID NO: 956245 - RNA, 19 nt, Homo sapiens
  misc_RNA (1)...(19): siRNA sense strand
gguggaguauucagaagag

SEQ ID NO: 956246 - RNA, 19 nt, Homo sapiens
  misc_RNA (1)...(19): siRNA sense strand
gaguuuaaggagcuuguuu

SEQ ID NO: 956247 - RNA, 19 nt, Homo sapiens
  misc_RNA (1)...(19): siRNA sense strand
acccuuugcugaugauaaa

SEQ ID NO: 956248 - RNA, 19 nt, Homo sapiens
  misc_RNA (1)...(19): siRNA sense strand
ggaaacagaagagcuaaaa

SEQ ID NO: 956249 - RNA, 19 nt, Homo sapiens
  misc_RNA (1)...(19): siRNA sense strand
agaggaaacagaagagcua

SEQ ID NO: 956250 - RNA, 19 nt, Homo sapiens
  misc_RNA (1)...(19): siRNA sense strand
ggaagguucgcgccaagga

SEQ ID NO: 956251 - RNA, 19 nt, Homo sapiens
  misc_RNA (1)...(19): siRNA sense strand
guucagugcucugcucauc

SEQ ID NO: 956252 - RNA, 19 nt, Homo sapiens
  misc_RNA (1)...(19): siRNA sense strand
gugaagaacucgaguauuu

SEQ ID NO: 956253 - RNA, 19 nt, Homo sapiens
  misc_RNA (1)...(19): siRNA sense strand
gaaagaagcccaagauguc

SEQ ID NO: 956254 - RNA, 19 nt, Homo sapiens
  misc_RNA (1)...(19): siRNA sense strand
ggagcuagaugaagaagga

SEQ ID NO: 956255 - RNA, 19 nt, Homo sapiens
  misc_RNA (1)...(19): siRNA sense strand
gcuuaaggauguaaagauu

SEQ ID NO: 956256 - RNA, 19 nt, Homo sapiens
  misc_RNA (1)...(19): siRNA sense strand
ugacacgucuaucaaguuu

SEQ ID NO: 956257 - RNA, 19 nt, Homo sapiens
  misc_RNA (1)...(19): siRNA sense strand
gagcuucucuucucuccaa

SEQ ID NO: 956258 - RNA, 19 nt, Homo sapiens
  misc_RNA (1)...(19): siRNA sense strand
gcaauucaaucgggaaaug

SEQ ID NO: 956259 - RNA, 19 nt, Homo sapiens
  misc_RNA (1)...(19): siRNA sense strand
gaagaggccuugaauuucc

SEQ ID NO: 956260 - RNA, 19 nt, Homo sapiens
  misc_RNA (1)...(19): siRNA sense strand
gaagagaagcccaaagaca

SEQ ID NO: 956261 - RNA, 19 nt, Homo sapiens
  misc_RNA (1)...(19): siRNA sense strand
gaaagcaguuagccucaca

SEQ ID NO: 956262 - RNA, 19 nt, Homo sapiens
  misc_RNA (1)...(19): siRNA sense strand
ggaggagacucgaaagaag

SEQ ID NO: 956263 - RNA, 19 nt, Homo sapiens
  misc_RNA (1)...(19): siRNA sense strand
gcagcaagauggucaagca

SEQ ID NO: 956264 - RNA, 19 nt, Homo sapiens
  misc_RNA (1)...(19): siRNA sense strand
gcaguuagccucacagaag

SEQ ID NO: 956265 - RNA, 19 nt, Homo sapiens
  misc_RNA (1)...(19): siRNA sense strand
aagauuagcgugagcuuua

SEQ ID NO: 956266 - RNA, 19 nt, Homo sapiens
  misc_RNA (1)...(19): siRNA sense strand
ucccuugucugcauuauaa

SEQ ID NO: 956267 - RNA, 19 nt, Homo sapiens
  misc_RNA (1)...(19): siRNA sense strand
ggagaagcguuuugacuuu

SEQ ID NO: 956268 - RNA, 19 nt, Homo sapiens
  misc_RNA (1)...(19): siRNA sense strand
aucagaagcucauuacuuu

SEQ ID NO: 956269 - RNA, 19 nt, Homo sapiens
  misc_RNA (1)...(19): siRNA sense strand
ccucaucccugacuuuguu

SEQ ID NO: 956270 - RNA, 19 nt, Homo sapiens
  misc_RNA (1)...(19): siRNA sense strand
gaagcucauuacuuuauca

SEQ ID NO: 956271 - RNA, 19 nt, Homo sapiens
  misc_RNA (1)...(19): siRNA sense strand
gcaaagaugaauccguuga

SEQ ID NO: 956272 - RNA, 19 nt, Homo sapiens
  misc_RNA (1)...(19): siRNA sense strand
gaagaacucgaguauuuua

SEQ ID NO: 956273 - RNA, 19 nt, Homo sapiens
  misc_RNA (1)...(19): siRNA sense strand
uaagaaggaugaggagaau

SEQ ID NO: 956274 - RNA, 19 nt, Homo sapiens
  misc_RNA (1)...(19): siRNA sense strand
ggaugagccugacucuaug

SEQ ID NO: 956275 - RNA, 19 nt, Homo sapiens
  misc_RNA (1)...(19): siRNA sense strand
ucgaugaguuagaagauuu

SEQ ID NO: 956276 - RNA, 19 nt, Homo sapiens
  misc_RNA (1)...(19): siRNA sense strand
caaagacagugaagaacuc

SEQ ID NO: 956277 - RNA, 19 nt, Homo sapiens
  misc_RNA (1)...(19): siRNA sense strand
gagacagaguggaugaaga

SEQ ID NO: 956278 - RNA, 19 nt, Homo sapiens
  misc_RNA (1)...(19): siRNA sense strand
cgaaagaagcccaagaugu

SEQ ID NO: 956279 - RNA, 19 nt, Homo sapiens
  misc_RNA (1)...(19): siRNA sense strand
gaacaagagaguuggaaag

SEQ ID NO: 956280 - RNA, 19 nt, Homo sapiens
  misc_RNA (1)...(19): siRNA sense strand
caagaugcacccacaaaga

SEQ ID NO: 956281 - RNA, 19 nt, Homo sapiens
  misc_RNA (1)...(19): siRNA sense strand
cuacggagcuucucuucuc

SEQ ID NO: 956282 - RNA, 19 nt, Homo sapiens
  misc_RNA (1)...(19): siRNA sense strand
gaagagugaauacgucaug

SEQ ID NO: 956283 - RNA, 19 nt, Homo sapiens
  misc_RNA (1)...(19): siRNA sense strand
accgagagcugcaggagua

SEQ ID NO: 956284 - RNA, 19 nt, Homo sapiens
  misc_RNA (1)...(19): siRNA sense strand
ugagagugcugauaagaag

SEQ ID NO: 956285 - RNA, 19 nt, Homo sapiens
  misc_RNA (1)...(19): siRNA sense strand
cagaagcucauuacuuuau

SEQ ID NO: 956286 - RNA, 19 nt, Homo sapiens
  misc_RNA (1)...(19): siRNA sense strand
ggacaagagugugauugag

SEQ ID NO: 956287 - RNA, 19 nt, Homo sapiens
  misc_RNA (1)...(19): siRNA sense strand
ggucuuuacugcgcaugua

SEQ ID NO: 956288 - RNA, 19 nt, Homo sapiens
  misc_RNA (1)...(19): siRNA sense strand
gcccaaagacagugaagaa

SEQ ID NO: 956289 - RNA, 19 nt, Homo sapiens
  misc_RNA (1)...(19): siRNA sense strand
augaagaggccuugaauuu

SEQ ID NO: 956290 - RNA, 19 nt, Homo sapiens
  misc_RNA (1)...(19): siRNA sense strand
ccguugaucucgaggaauu

SEQ ID NO: 956291 - RNA, 19 nt, Homo sapiens
  misc_RNA (1)...(19): siRNA sense strand
ccgaugaugaccaagauua

SEQ ID NO: 956292 - RNA, 19 nt, Homo sapiens
  misc_RNA (1)...(19): siRNA sense strand
aaacacgacccuccucuga

SEQ ID NO: 956293 - RNA, 19 nt, Homo sapiens
  misc_RNA (1)...(19): siRNA sense strand
gguccgcccugucuauaau

SEQ ID NO: 956294 - RNA, 19 nt, Homo sapiens
  misc_RNA (1)...(19): siRNA sense strand
uggaugagccugacucuau

SEQ ID NO: 956295 - RNA, 19 nt, Homo sapiens
  misc_RNA (1)...(19): siRNA sense strand
gaugaugaccaagauuaaa

SEQ ID NO: 956296 - RNA, 19 nt, Homo sapiens
  misc_RNA (1)...(19): siRNA sense strand
ugagcaaguuacugugaaa

SEQ ID NO: 956297 - RNA, 19 nt, Homo sapiens
  misc_RNA (1)...(19): siRNA sense strand
ggacgagaaagacccacua

SEQ ID NO: 956298 - RNA, 19 nt, Homo sapiens
  misc_RNA (1)...(19): siRNA sense strand
guucacggcuaaagcaauc

SEQ ID NO: 956299 - RNA, 19 nt, Homo sapiens
  misc_RNA (1)...(19): siRNA sense strand
gggaggagacucgaaagaa

SEQ ID NO: 956300 - RNA, 19 nt, Homo sapiens
  misc_RNA (1)...(19): siRNA sense strand
gaggcuagcugaggaaagg

SEQ ID NO: 956301 - RNA, 19 nt, Homo sapiens
  misc_RNA (1)...(19): siRNA sense strand
ggugacacgucuaucaagu

SEQ ID NO: 956302 - RNA, 19 nt, Homo sapiens
  misc_RNA (1)...(19): siRNA sense strand
gaugaagaggccuugaauu

SEQ ID NO: 956303 - RNA, 19 nt, Homo sapiens
  misc_RNA (1)...(19): siRNA sense strand
agaaggaugaggagaauga

SEQ ID NO: 956304 - RNA, 19 nt, Homo sapiens
  misc_RNA (1)...(19): siRNA sense strand
ggagacaucggacaagagu

SEQ ID NO: 956305 - RNA, 19 nt, Homo sapiens
  misc_RNA (1)...(19): siRNA sense strand
gugccucggugaccauuga

SEQ ID NO: 956306 - RNA, 19 nt, Homo sapiens
  misc_RNA (1)...(19): siRNA sense strand
guccaguggugcagaggua

SEQ ID NO: 956307 - RNA, 19 nt, Homo sapiens
  misc_RNA (1)...(19): siRNA sense strand
ggaugaagaggccuugaau

SEQ ID NO: 956308 - RNA, 19 nt, Homo sapiens
  misc_RNA (1)...(19): siRNA sense strand
gcacccacaugucaagaac

SEQ ID NO: 956309 - RNA, 19 nt, Homo sapiens
  misc_RNA (1)...(19): siRNA sense strand
uagcaucccuugucugcau

SEQ ID NO: 956310 - RNA, 19 nt, Homo sapiens
  misc_RNA (1)...(19): siRNA sense strand
uggaugcucugcuggaaga

SEQ ID NO: 956311 - RNA, 19 nt, Homo sapiens
  misc_RNA (1)...(19): siRNA sense strand
gaaagggaggagacucgaa

SEQ ID NO: 956312 - RNA, 19 nt, Homo sapiens
  misc_RNA (1)...(19): siRNA sense strand
gaagaggcuagcugaggaa

SEQ ID NO: 956313 - RNA, 19 nt, Homo sapiens
  misc_RNA (1)...(19): siRNA sense strand
gcagcaguaugccaagaag

SEQ ID NO: 956314 - RNA, 19 nt, Homo sapiens
  misc_RNA (1)...(19): siRNA sense strand
caggagacaucggacaaga

SEQ ID NO: 956315 - RNA, 19 nt, Homo sapiens
  misc_RNA (1)...(19): siRNA sense strand
caguuagccucacagaaga

SEQ ID NO: 956316 - RNA, 19 nt, Homo sapiens
  misc_RNA (1)...(19): siRNA sense strand
aaucagaagcucauuacuu

SEQ ID NO: 956317 - RNA, 19 nt, Homo sapiens
  misc_RNA (1)...(19): siRNA sense strand
gccaaucagaagcucauua

SEQ ID NO: 956318 - RNA, 19 nt, Homo sapiens
  misc_RNA (1)...(19): siRNA sense strand
gaucaugacauuccauaac

SEQ ID NO: 956319 - RNA, 19 nt, Homo sapiens
  misc_RNA (1)...(19): siRNA sense strand
gagcuacacuggaaauccu

SEQ ID NO: 956320 - RNA, 19 nt, Homo sapiens
  misc_RNA (1)...(19): siRNA sense strand
gugcaugcuugucccuuug

SEQ ID NO: 956321 - RNA, 19 nt, Homo sapiens
  misc_RNA (1)...(19): siRNA sense strand
ucauagacccgaacuguag

SEQ ID NO: 956322 - RNA, 19 nt, Homo sapiens
  misc_RNA (1)...(19): siRNA sense strand
gcaagaugcacccacaaag

SEQ ID NO: 956323 - RNA, 19 nt, Homo sapiens
  misc_RNA (1)...(19): siRNA sense strand
acacgacccuccucugagu

SEQ ID NO: 956324 - RNA, 19 nt, Homo sapiens
  misc_RNA (1)...(19): siRNA sense strand
ugaagaggccuugaauuuc

SEQ ID NO: 956325 - RNA, 19 nt, Homo sapiens
  misc_RNA (1)...(19): siRNA sense strand
ggaugacuuugacaacgau

SEQ ID NO: 956326 - RNA, 19 nt, Homo sapiens
  misc_RNA (1)...(19): siRNA sense strand
ucagaagcucauuacuuua

SEQ ID NO: 956327 - RNA, 19 nt, Homo sapiens
  misc_RNA (1)...(19): siRNA sense strand
uaaagcaaucguucagaga

SEQ ID NO: 956328 - RNA, 19 nt, Homo sapiens
  misc_RNA (1)...(19): siRNA sense strand
aaagaugaauccguugauc

SEQ ID NO: 956329 - RNA, 19 nt, Homo sapiens
  misc_RNA (1)...(19): siRNA sense strand
gugcugauaagaaggauga

SEQ ID NO: 956330 - RNA, 19 nt, Homo sapiens
  misc_RNA (1)...(19): siRNA sense strand
aaagggaggagacucgaaa

SEQ ID NO: 956331 - RNA, 19 nt, Homo sapiens
  misc_RNA (1)...(19): siRNA sense strand
uguaagaacaagagaguug

SEQ ID NO: 956332 - RNA, 19 nt, Homo sapiens
  misc_RNA (1)...(19): siRNA sense strand
aagaugcacccacaaagaa

SEQ ID NO: 956333 - RNA, 19 nt, Homo sapiens
  misc_RNA (1)...(19): siRNA sense strand
ucucuucucuccaaaggau

SEQ ID NO: 956334 - RNA, 19 nt, Homo sapiens
  misc_RNA (1)...(19): siRNA sense strand
cgaugaugaccaagauuaa

SEQ ID NO: 956335 - RNA, 19 nt, Homo sapiens
  misc_RNA (1)...(19): siRNA sense strand
caauuuggagcuagaugaa

SEQ ID NO: 956336 - RNA, 19 nt, Homo sapiens
  misc_RNA (1)...(19): siRNA sense strand
caagguccgcccugucuau

SEQ ID NO: 956337 - RNA, 19 nt, Homo sapiens
  misc_RNA (1)...(19): siRNA sense strand
gugagagugcugauaagaa

SEQ ID NO: 956338 - RNA, 19 nt, Homo sapiens
  misc_RNA (1)...(19): siRNA sense strand
gagaguuggaaagcaguua

SEQ ID NO: 956339 - RNA, 19 nt, Homo sapiens
  misc_RNA (1)...(19): siRNA sense strand
cugaagagaagcccaaaga

SEQ ID NO: 956340 - RNA, 19 nt, Homo sapiens
  misc_RNA (1)...(19): siRNA sense strand
gaaauccucaucccugacu

SEQ ID NO: 956341 - RNA, 19 nt, Homo sapiens
  misc_RNA (1)...(19): siRNA sense strand
gcaggaguaaggacaggaa

SEQ ID NO: 956342 - RNA, 19 nt, Homo sapiens
  misc_RNA (1)...(19): siRNA sense strand
caaagucgaggugugcaaa

SEQ ID NO: 956343 - RNA, 19 nt, Homo sapiens
  misc_RNA (1)...(19): siRNA sense strand
cugcagagcuggaguuucc

SEQ ID NO: 956344 - RNA, 19 nt, Homo sapiens
  misc_RNA (1)...(19): siRNA sense strand
aagcaaucguucagagaga

SEQ ID NO: 956345 - RNA, 19 nt, Homo sapiens
  misc_RNA (1)...(19): siRNA sense strand
aguaugcagugcucgauga

SEQ ID NO: 956346 - RNA, 19 nt, Homo sapiens
  misc_RNA (1)...(19): siRNA sense strand
cgugcaugcuugucccuuu

SEQ ID NO: 956347 - RNA, 19 nt, Homo sapiens
  misc_RNA (1)...(19): siRNA sense strand
gcuguugucuccauaucag

SEQ ID NO: 956348 - RNA, 19 nt, Homo sapiens
  misc_RNA (1)...(19): siRNA sense strand
acggguggaucaugacauu

SEQ ID NO: 956349 - RNA, 19 nt, Homo sapiens
  misc_RNA (1)...(19): siRNA sense strand
ggaaauccgaggucugcau

SEQ ID NO: 956350 - RNA, 19 nt, Homo sapiens
  misc_RNA (1)...(19): siRNA sense strand
ccaaagacagugaagaacu

SEQ ID NO: 956351 - RNA, 19 nt, Homo sapiens
  misc_RNA (1)...(19): siRNA sense strand
gaacccaagugagccuuuu

SEQ ID NO: 956352 - RNA, 19 nt, Homo sapiens
  misc_RNA (1)...(19): siRNA sense strand
ggaaugccaucaccggaua

SEQ ID NO: 956353 - RNA, 19 nt, Homo sapiens
  misc_RNA (1)...(19): siRNA sense strand
ggagagaucuacagaccaa

SEQ ID NO: 956354 - RNA, 19 nt, Homo sapiens
  misc_RNA (1)...(19): siRNA sense strand
ugagaacacucuuaaaguu

SEQ ID NO: 956355 - RNA, 19 nt, Homo sapiens
  misc_RNA (1)...(19): siRNA sense strand
ggacgcacauccugacauu

SEQ ID NO: 956356 - RNA, 19 nt, Homo sapiens
  misc_RNA (1)...(19): siRNA sense strand
gauuugaucugaacagcua

SEQ ID NO: 956357 - RNA, 19 nt, Homo sapiens
  misc_RNA (1)...(19): siRNA sense strand
gaacguagccagccaguca

SEQ ID NO: 956358 - RNA, 19 nt, Homo sapiens
  misc_RNA (1)...(19): siRNA sense strand
guauggagguugguuauaa

SEQ ID NO: 956359 - RNA, 19 nt, Homo sapiens
  misc_RNA (1)...(19): siRNA sense strand
gaagauaccgccagauguu

SEQ ID NO: 956360 - RNA, 19 nt, Homo sapiens
  misc_RNA (1)...(19): siRNA sense strand
gaacuggccuggaccucaa

SEQ ID NO: 956361 - RNA, 19 nt, Homo sapiens
  misc_RNA (1)...(19): siRNA sense strand
gcauguugguucacuauga

SEQ ID NO: 956362 - RNA, 19 nt, Homo sapiens
  misc_RNA (1)...(19): siRNA sense strand
ccaacuaccugacuuucuu

SEQ ID NO: 956363 - RNA, 19 nt, Homo sapiens
  misc_RNA (1)...(19): siRNA sense strand
gaagcagaacuuacuauug

SEQ ID NO: 956364 - RNA, 19 nt, Homo sapiens
  misc_RNA (1)...(19): siRNA sense strand
aaaguggaaucgugcuaua

SEQ ID NO: 956365 - RNA, 19 nt, Homo sapiens
  misc_RNA (1)...(19): siRNA sense strand
gcccugaaaucuuuaacuu

SEQ ID NO: 956366 - RNA, 19 nt, Homo sapiens
  misc_RNA (1)...(19): siRNA sense strand
aagcagaacuuacuauugg

SEQ ID NO: 956367 - RNA, 19 nt, Homo sapiens
  misc_RNA (1)...(19): siRNA sense strand
gaugagaacacucuuaaag

SEQ ID NO: 956368 - RNA, 19 nt, Homo sapiens
  misc_RNA (1)...(19): siRNA sense strand
uaagggagaauuccaacua

SEQ ID NO: 956369 - RNA, 19 nt, Homo sapiens
  misc_RNA (1)...(19): siRNA sense strand
uuggaaagcugaagcagaa

SEQ ID NO: 956370 - RNA, 19 nt, Homo sapiens
  misc_RNA (1)...(19): siRNA sense strand
caugcaagccuucuuacua

SEQ ID NO: 956371 - RNA, 19 nt, Homo sapiens
  misc_RNA (1)...(19): siRNA sense strand
ccugaaaucuuuaacuuac

SEQ ID NO: 956372 - RNA, 19 nt, Homo sapiens
  misc_RNA (1)...(19): siRNA sense strand
ggaugaggcugguguuacu

SEQ ID NO: 956373 - RNA, 19 nt, Homo sapiens
  misc_RNA (1)...(19): siRNA sense strand
uauagggacuguuugacaa

SEQ ID NO: 956374 - RNA, 19 nt, Homo sapiens
  misc_RNA (1)...(19): siRNA sense strand
gggcaucaguacauucaau

SEQ ID NO: 956375 - RNA, 19 nt, Homo sapiens
  misc_RNA (1)...(19): siRNA sense strand
ccaaauuucuccugauggu

SEQ ID NO: 956376 - RNA, 19 nt, Homo sapiens
  misc_RNA (1)...(19): siRNA sense strand
gaccauguauaaccagugu

SEQ ID NO: 956377 - RNA, 19 nt, Homo sapiens
  misc_RNA (1)...(19): siRNA sense strand
caacuaccugacuuucuua

SEQ ID NO: 956378 - RNA, 19 nt, Homo sapiens
  misc_RNA (1)...(19): siRNA sense strand
uacuauagcuggauuugau

SEQ ID NO: 956379 - RNA, 19 nt, Homo sapiens
  misc_RNA (1)...(19): siRNA sense strand
uggcaugucuggugauuag

SEQ ID NO: 956380 - RNA, 19 nt, Homo sapiens
  misc_RNA (1)...(19): siRNA sense strand
agacugagcaaguggagua

SEQ ID NO: 956381 - RNA, 19 nt, Homo sapiens
  misc_RNA (1)...(19): siRNA sense strand
gggaagauaccgccagaug

SEQ ID NO: 956382 - RNA, 19 nt, Homo sapiens
  misc_RNA (1)...(19): siRNA sense strand
uauggagguugguuauaaa

SEQ ID NO: 956383 - RNA, 19 nt, Homo sapiens
  misc_RNA (1)...(19): siRNA sense strand
guagccagccagucaaauu

SEQ ID NO: 956384 - RNA, 19 nt, Homo sapiens
  misc_RNA (1)...(19): siRNA sense strand
ggaagauaccgccagaugu

SEQ ID NO: 956385 - RNA, 19 nt, Homo sapiens
  misc_RNA (1)...(19): siRNA sense strand
caauguaggagcucuauca

SEQ ID NO: 956386 - RNA, 19 nt, Homo sapiens
  misc_RNA (1)...(19): siRNA sense strand
ccugaacgguggaugagaa

SEQ ID NO: 956387 - RNA, 19 nt, Homo sapiens
  misc_RNA (1)...(19): siRNA sense strand
ggagccagccccuuauuua

SEQ ID NO: 956388 - RNA, 19 nt, Homo sapiens
  misc_RNA (1)...(19): siRNA sense strand
uguaggagcucuaucaaaa

SEQ ID NO: 956389 - RNA, 19 nt, Homo sapiens
  misc_RNA (1)...(19): siRNA sense strand
gagaucuacagaccaagua

SEQ ID NO: 956390 - RNA, 19 nt, Homo sapiens
  misc_RNA (1)...(19): siRNA sense strand
gaacuuacuauuggcaugu

SEQ ID NO: 956391 - RNA, 19 nt, Homo sapiens
  misc_RNA (1)...(19): siRNA sense strand
caaguaaucaagccaguca

SEQ ID NO: 956392 - RNA, 19 nt, Homo sapiens
  misc_RNA (1)...(19): siRNA sense strand
ggaccucaaagccaacaaa

SEQ ID NO: 956393 - RNA, 19 nt, Homo sapiens
  misc_RNA (1)...(19): siRNA sense strand
aaucaagccagucaaugua

SEQ ID NO: 956394 - RNA, 19 nt, Homo sapiens
  misc_RNA (1)...(19): siRNA sense strand
gaagagaugauugggaaag

SEQ ID NO: 956395 - RNA, 19 nt, Homo sapiens
  misc_RNA (1)...(19): siRNA sense strand
gaaagcugaagcagaacuu

SEQ ID NO: 956396 - RNA, 19 nt, Homo sapiens
  misc_RNA (1)...(19): siRNA sense strand
uaaucaagccagucaaugu

SEQ ID NO: 956397 - RNA, 19 nt, Homo sapiens
  misc_RNA (1)...(19): siRNA sense strand
ugaagcagaacuuacuauu

SEQ ID NO: 956398 - RNA, 19 nt, Homo sapiens
  misc_RNA (1)...(19): siRNA sense strand
cggaaaaccugaucccaaa

SEQ ID NO: 956399 - RNA, 19 nt, Homo sapiens
  misc_RNA (1)...(19): siRNA sense strand
gaggaaaccagggucauuc

SEQ ID NO: 956400 - RNA, 19 nt, Homo sapiens
  misc_RNA (1)...(19): siRNA sense strand
cugaugaagugcuggauuc

SEQ ID NO: 956401 - RNA, 19 nt, Homo sapiens
  misc_RNA (1)...(19): siRNA sense strand
ggaugagaacacucuuaaa

SEQ ID NO: 956402 - RNA, 19 nt, Homo sapiens
  misc_RNA (1)...(19): siRNA sense strand
caaaauggguugggaagau

SEQ ID NO: 956403 - RNA, 19 nt, Homo sapiens
  misc_RNA (1)...(19): siRNA sense strand
gcuggauucugccaugcaa

SEQ ID NO: 956404 - RNA, 19 nt, Homo sapiens
  misc_RNA (1)...(19): siRNA sense strand
cuacagaccaaguaaucaa

SEQ ID NO: 956405 - RNA, 19 nt, Homo sapiens
  misc_RNA (1)...(19): siRNA sense strand
uggaugagaacacucuuaa

SEQ ID NO: 956406 - RNA, 19 nt, Homo sapiens
  misc_RNA (1)...(19): siRNA sense strand
gcaugucuggugauuaguu

SEQ ID NO: 956407 - RNA, 19 nt, Homo sapiens
  misc_RNA (1)...(19): siRNA sense strand
aggcugguguuacugauga

SEQ ID NO: 956408 - RNA, 19 nt, Homo sapiens
  misc_RNA (1)...(19): siRNA sense strand
uggcagugauugcuccuau

SEQ ID NO: 956409 - RNA, 19 nt, Homo sapiens
  misc_RNA (1)...(19): siRNA sense strand
uacaagacauggcagugau

SEQ ID NO: 956410 - RNA, 19 nt, Homo sapiens
  misc_RNA (1)...(19): siRNA sense strand
cauggaaccacucaguauu

SEQ ID NO: 956411 - RNA, 19 nt, Homo sapiens
  misc_RNA (1)...(19): siRNA sense strand
ccauggaaccacucaguau

SEQ ID NO: 956412 - RNA, 19 nt, Homo sapiens
  misc_RNA (1)...(19): siRNA sense strand
uaaaguuccuccagauucc

SEQ ID NO: 956413 - RNA, 19 nt, Homo sapiens
  misc_RNA (1)...(19): siRNA sense strand
ugccaaauuucuccugaug

SEQ ID NO: 956414 - RNA, 19 nt, Homo sapiens
  misc_RNA (1)...(19): siRNA sense strand
augcaagccuucuuacuag

SEQ ID NO: 956415 - RNA, 19 nt, Homo sapiens
  misc_RNA (1)...(19): siRNA sense strand
uuaaaguuccuccagauuc

SEQ ID NO: 956416 - RNA, 19 nt, Homo sapiens
  misc_RNA (1)...(19): siRNA sense strand
caaaguggaaucgugcuau

SEQ ID NO: 956417 - RNA, 19 nt, Homo sapiens
  misc_RNA (1)...(19): siRNA sense strand
guggaugagaacacucuua

SEQ ID NO: 956418 - RNA, 19 nt, Homo sapiens
  misc_RNA (1)...(19): siRNA sense strand
uagcuggauuugaucugaa

SEQ ID NO: 956419 - RNA, 19 nt, Homo sapiens
  misc_RNA (1)...(19): siRNA sense strand
caagacauggcagugauug

SEQ ID NO: 956420 - RNA, 19 nt, Homo sapiens
  misc_RNA (1)...(19): siRNA sense strand
aaaauggguugggaagaua

SEQ ID NO: 956421 - RNA, 19 nt, Homo sapiens
  misc_RNA (1)...(19): siRNA sense strand
guaaucaagccagucaaug

SEQ ID NO: 956422 - RNA, 19 nt, Homo sapiens
  misc_RNA (1)...(19): siRNA sense strand
uagagaccauguauaacca

SEQ ID NO: 956423 - RNA, 19 nt, Homo sapiens
  misc_RNA (1)...(19): siRNA sense strand
ccauguauaaccaguguau

SEQ ID NO: 956424 - RNA, 19 nt, Homo sapiens
  misc_RNA (1)...(19): siRNA sense strand
acacucgaagggucuauaa

SEQ ID NO: 956425 - RNA, 19 nt, Homo sapiens
  misc_RNA (1)...(19): siRNA sense strand
agugauugcuccuaugcuu

SEQ ID NO: 956426 - RNA, 19 nt, Homo sapiens
  misc_RNA (1)...(19): siRNA sense strand
gcugaagcagaacuuacua

SEQ ID NO: 956427 - RNA, 19 nt, Homo sapiens
  misc_RNA (1)...(19): siRNA sense strand
uuaguucugugacuguguu

SEQ ID NO: 956428 - RNA, 19 nt, Homo sapiens
  misc_RNA (1)...(19): siRNA sense strand
caugucuggugauuaguuc

SEQ ID NO: 956429 - RNA, 19 nt, Homo sapiens
  misc_RNA (1)...(19): siRNA sense strand
gaucuacagaccaaguaau

SEQ ID NO: 956430 - RNA, 19 nt, Homo sapiens
  misc_RNA (1)...(19): siRNA sense strand
cagauguggucacggucaa

SEQ ID NO: 956431 - RNA, 19 nt, Homo sapiens
  misc_RNA (1)...(19): siRNA sense strand
gaaaaccugaucccaaaau

SEQ ID NO: 956432 - RNA, 19 nt, Homo sapiens
  misc_RNA (1)...(19): siRNA sense strand
gggagugucucugucaaaa

SEQ ID NO: 956433 - RNA, 19 nt, Homo sapiens
  misc_RNA (1)...(19): siRNA sense strand
ucuuaaaguuccuccagau

SEQ ID NO: 956434 - RNA, 19 nt, Homo sapiens
  misc_RNA (1)...(19): siRNA sense strand
uuacaagacauggcaguga

SEQ ID NO: 956435 - RNA, 19 nt, Homo sapiens
  misc_RNA (1)...(19): siRNA sense strand
cauaugccaacccaccuaa

SEQ ID NO: 956436 - RNA, 19 nt, Homo sapiens
  misc_RNA (1)...(19): siRNA sense strand
uagccagccagucaaauug

SEQ ID NO: 956437 - RNA, 19 nt, Homo sapiens
  misc_RNA (1)...(19): siRNA sense strand
gcaccaugaagagaugauu

SEQ ID NO: 956438 - RNA, 19 nt, Homo sapiens
  misc_RNA (1)...(19): siRNA sense strand
ggugauuaguucugugacu

SEQ ID NO: 956439 - RNA, 19 nt, Homo sapiens
  misc_RNA (1)...(19): siRNA sense strand
cccugaaaucuuuaacuua

SEQ ID NO: 956440 - RNA, 19 nt, Homo sapiens
  misc_RNA (1)...(19): siRNA sense strand
ugccaugcaagccuucuua

SEQ ID NO: 956441 - RNA, 19 nt, Homo sapiens
  misc_RNA (1)...(19): siRNA sense strand
ggucaaguaaagagaagau

SEQ ID NO: 956442 - RNA, 19 nt, Homo sapiens
  misc_RNA (1)...(19): siRNA sense strand
gccagccagucaaauugga

SEQ ID NO: 956443 - RNA, 19 nt, Homo sapiens
  misc_RNA (1)...(19): siRNA sense strand
gcagugauugcuccuaugc

SEQ ID NO: 956444 - RNA, 19 nt, Homo sapiens
  misc_RNA (1)...(19): siRNA sense strand
ggcagugauugcuccuaug

SEQ ID NO: 956445 - RNA, 19 nt, Homo sapiens
  misc_RNA (1)...(19): siRNA sense strand
auagcuggauuugaucuga

SEQ ID NO: 956446 - RNA, 19 nt, Homo sapiens
  misc_RNA (1)...(19): siRNA sense strand
ggucuauaagggagaauuc

SEQ ID NO: 956447 - RNA, 19 nt, Homo sapiens
  misc_RNA (1)...(19): siRNA sense strand
acaaggaccacugugagaa

SEQ ID NO: 956448 - RNA, 19 nt, Homo sapiens
  misc_RNA (1)...(19): siRNA sense strand
gagugucucugucaaaagu

SEQ ID NO: 956449 - RNA, 19 nt, Homo sapiens
  misc_RNA (1)...(19): siRNA sense strand
acucaguauugcaccauga

SEQ ID NO: 956450 - RNA, 19 nt, Homo sapiens
  misc_RNA (1)...(19): siRNA sense strand
uaggagcucuaucaaaaug

SEQ ID NO: 956451 - RNA, 19 nt, Homo sapiens
  misc_RNA (1)...(19): siRNA sense strand
aaaccugaucccaaaauua

SEQ ID NO: 956452 - RNA, 19 nt, Homo sapiens
  misc_RNA (1)...(19): siRNA sense strand
auacauaacucgcuucaua

SEQ ID NO: 956453 - RNA, 19 nt, Homo sapiens
  misc_RNA (1)...(19): siRNA sense strand
cagugaagcuaucaaguua

SEQ ID NO: 956454 - RNA, 19 nt, Homo sapiens
  misc_RNA (1)...(19): siRNA sense strand
gccauaagcuuacgguuga

SEQ ID NO: 956455 - RNA, 19 nt, Homo sapiens
  misc_RNA (1)...(19): siRNA sense strand
ggaauucgagguaccaaua

SEQ ID NO: 956456 - RNA, 19 nt, Homo sapiens
  misc_RNA (1)...(19): siRNA sense strand
gcaauaggccgaagugcua

SEQ ID NO: 956457 - RNA, 19 nt, Homo sapiens
  misc_RNA (1)...(19): siRNA sense strand
ugaaagaacugugaggaaa

SEQ ID NO: 956458 - RNA, 19 nt, Homo sapiens
  misc_RNA (1)...(19): siRNA sense strand
ccaaagcaauggacgaaga

SEQ ID NO: 956459 - RNA, 19 nt, Homo sapiens
  misc_RNA (1)...(19): siRNA sense strand
ggaagaaacauugaacuug

SEQ ID NO: 956460 - RNA, 19 nt, Homo sapiens
  misc_RNA (1)...(19): siRNA sense strand
guacuuaucaugcuuggaa

SEQ ID NO: 956461 - RNA, 19 nt, Homo sapiens
  misc_RNA (1)...(19): siRNA sense strand
aagaagaaaucaaccuuug

SEQ ID NO: 956462 - RNA, 19 nt, Homo sapiens
  misc_RNA (1)...(19): siRNA sense strand
gaaauauacccaaagcaau

SEQ ID NO: 956463 - RNA, 19 nt, Homo sapiens
  misc_RNA (1)...(19): siRNA sense strand
gcagaaauauacccaaagc

SEQ ID NO: 956464 - RNA, 19 nt, Homo sapiens
  misc_RNA (1)...(19): siRNA sense strand
ggacgaagaccuuuuggua

SEQ ID NO: 956465 - RNA, 19 nt, Homo sapiens
  misc_RNA (1)...(19): siRNA sense strand
uugccaagcuucaagauga

SEQ ID NO: 956466 - RNA, 19 nt, Homo sapiens
  misc_RNA (1)...(19): siRNA sense strand
gcuagaaguuguccagucu

SEQ ID NO: 956467 - RNA, 19 nt, Homo sapiens
  misc_RNA (1)...(19): siRNA sense strand
aagcagaaauauacccaaa

SEQ ID NO: 956468 - RNA, 19 nt, Homo sapiens
  misc_RNA (1)...(19): siRNA sense strand
caagaugaaagaacuguga

SEQ ID NO: 956469 - RNA, 19 nt, Homo sapiens
  misc_RNA (1)...(19): siRNA sense strand
gaugcuagaguaguaauaa

SEQ ID NO: 956470 - RNA, 19 nt, Homo sapiens
  misc_RNA (1)...(19): siRNA sense strand
ugccagagccauaagcuua

SEQ ID NO: 956471 - RNA, 19 nt, Homo sapiens
  misc_RNA (1)...(19): siRNA sense strand
gaagaugccauagcaagug

SEQ ID NO: 956472 - RNA, 19 nt, Homo sapiens
  misc_RNA (1)...(19): siRNA sense strand
gaaaagaauuacacagaag

SEQ ID NO: 956473 - RNA, 19 nt, Homo sapiens
  misc_RNA (1)...(19): siRNA sense strand
cacagaagaugccauagca

SEQ ID NO: 956474 - RNA, 19 nt, Homo sapiens
  misc_RNA (1)...(19): siRNA sense strand
gaagauguuuagugcaaaa

SEQ ID NO: 956475 - RNA, 19 nt, Homo sapiens
  misc_RNA (1)...(19): siRNA sense strand
agaaauauacccaaagcaa

SEQ ID NO: 956476 - RNA, 19 nt, Homo sapiens
  misc_RNA (1)...(19): siRNA sense strand
uuacacagaagaugccaua

SEQ ID NO: 956477 - RNA, 19 nt, Homo sapiens
  misc_RNA (1)...(19): siRNA sense strand
gcaagugacagugaagcua

SEQ ID NO: 956478 - RNA, 19 nt, Homo sapiens
  misc_RNA (1)...(19): siRNA sense strand
cauagcaagugacagugaa

SEQ ID NO: 956479 - RNA, 19 nt, Homo sapiens
  misc_RNA (1)...(19): siRNA sense strand
auaacucgcuucauagcaa

SEQ ID NO: 956480 - RNA, 19 nt, Homo sapiens
  misc_RNA (1)...(19): siRNA sense strand
aaauauacccaaagcaaug

SEQ ID NO: 956481 - RNA, 19 nt, Homo sapiens
  misc_RNA (1)...(19): siRNA sense strand
cgagguaccaauauaguug

SEQ ID NO: 956482 - RNA, 19 nt, Homo sapiens
  misc_RNA (1)...(19): siRNA sense strand
uugaagauguuuagugcaa

SEQ ID NO: 956483 - RNA, 19 nt, Homo sapiens
  misc_RNA (1)...(19): siRNA sense strand
ugguauuucugccuuaauu

SEQ ID NO: 956484 - RNA, 19 nt, Homo sapiens
  misc_RNA (1)...(19): siRNA sense strand
ccaggaagcggugaagaaa

SEQ ID NO: 956485 - RNA, 19 nt, Homo sapiens
  misc_RNA (1)...(19): siRNA sense strand
guaccaauauaguuguucu

SEQ ID NO: 956486 - RNA, 19 nt, Homo sapiens
  misc_RNA (1)...(19): siRNA sense strand
gaaaauuugugcccuugau

SEQ ID NO: 956487 - RNA, 19 nt, Homo sapiens
  misc_RNA (1)...(19): siRNA sense strand
gaauacauaacucgcuuca

SEQ ID NO: 956488 - RNA, 19 nt, Homo sapiens
  misc_RNA (1)...(19): siRNA sense strand
gaauucgagguaccaauau

SEQ ID NO: 956489 - RNA, 19 nt, Homo sapiens
  misc_RNA (1)...(19): siRNA sense strand
caagugacagugaagcuau

SEQ ID NO: 956490 - RNA, 19 nt, Homo sapiens
  misc_RNA (1)...(19): siRNA sense strand
aauucgagguaccaauaua

SEQ ID NO: 956491 - RNA, 19 nt, Homo sapiens
  misc_RNA (1)...(19): siRNA sense strand
uagcaacuuuaaagcagaa

SEQ ID NO: 956492 - RNA, 19 nt, Homo sapiens
  misc_RNA (1)...(19): siRNA sense strand
acagugaagcuaucaaguu

SEQ ID NO: 956493 - RNA, 19 nt, Homo sapiens
  misc_RNA (1)...(19): siRNA sense strand
gcaauggacgaagaccuuu

SEQ ID NO: 956494 - RNA, 19 nt, Homo sapiens
  misc_RNA (1)...(19): siRNA sense strand
gaaagaacugugaggaaaa

SEQ ID NO: 956495 - RNA, 19 nt, Homo sapiens
  misc_RNA (1)...(19): siRNA sense strand
ggacuuacugcugaugcua

SEQ ID NO: 956496 - RNA, 19 nt, Homo sapiens
  misc_RNA (1)...(19): siRNA sense strand
aagaugccauagcaaguga

SEQ ID NO: 956497 - RNA, 19 nt, Homo sapiens
  misc_RNA (1)...(19): siRNA sense strand
gcuagaguaguaauaaaca

SEQ ID NO: 956498 - RNA, 19 nt, Homo sapiens
  misc_RNA (1)...(19): siRNA sense strand
ugaagauguuuagugcaaa

SEQ ID NO: 956499 - RNA, 19 nt, Homo sapiens
  misc_RNA (1)...(19): siRNA sense strand
ugaugaugaugguaucuca

SEQ ID NO: 956500 - RNA, 19 nt, Homo sapiens
  misc_RNA (1)...(19): siRNA sense strand
cuucauagcaacuuuaaag

SEQ ID NO: 956501 - RNA, 19 nt, Homo sapiens
  misc_RNA (1)...(19): siRNA sense strand
gaacugugaggaaaauuug

SEQ ID NO: 956502 - RNA, 19 nt, Homo sapiens
  misc_RNA (1)...(19): siRNA sense strand
caagauuguaucagacaga

SEQ ID NO: 956503 - RNA, 19 nt, Homo sapiens
  misc_RNA (1)...(19): siRNA sense strand
caaccuuugaagauguuua

SEQ ID NO: 956504 - RNA, 19 nt, Homo sapiens
  misc_RNA (1)...(19): siRNA sense strand
aggaagcggugaagaaagg

SEQ ID NO: 956505 - RNA, 19 nt, Homo sapiens
  misc_RNA (1)...(19): siRNA sense strand
acgaagaccuuuugguauu

SEQ ID NO: 956506 - RNA, 19 nt, Homo sapiens
  misc_RNA (1)...(19): siRNA sense strand
aaauuugugcccuugauga

SEQ ID NO: 956507 - RNA, 19 nt, Homo sapiens
  misc_RNA (1)...(19): siRNA sense strand
uggaagaaacauugaacuu

SEQ ID NO: 956508 - RNA, 19 nt, Homo sapiens
  misc_RNA (1)...(19): siRNA sense strand
guauuucugccuuaauugu

SEQ ID NO: 956509 - RNA, 19 nt, Homo sapiens
  misc_RNA (1)...(19): siRNA sense strand
cgaagaccuuuugguauuu

SEQ ID NO: 956510 - RNA, 19 nt, Homo sapiens
  misc_RNA (1)...(19): siRNA sense strand
ccauagcaagugacaguga

SEQ ID NO: 956511 - RNA, 19 nt, Homo sapiens
  misc_RNA (1)...(19): siRNA sense strand
gauguuuagugcaaaagaa

SEQ ID NO: 956512 - RNA, 19 nt, Homo sapiens
  misc_RNA (1)...(19): siRNA sense strand
aagcuuugcuagaaguugu

SEQ ID NO: 956513 - RNA, 19 nt, Homo sapiens
  misc_RNA (1)...(19): siRNA sense strand
guggagugccagagccaua

SEQ ID NO: 956514 - RNA, 19 nt, Homo sapiens
  misc_RNA (1)...(19): siRNA sense strand
ggaaggcaaaugcaauagg

SEQ ID NO: 956515 - RNA, 19 nt, Homo sapiens
  misc_RNA (1)...(19): siRNA sense strand
ugaugaugguaucucaaga

SEQ ID NO: 956516 - RNA, 19 nt, Homo sapiens
  misc_RNA (1)...(19): siRNA sense strand
gaaacauugaacuugcuau

SEQ ID NO: 956517 - RNA, 19 nt, Homo sapiens
  misc_RNA (1)...(19): siRNA sense strand
uaaaagcuuugcuagaagu

SEQ ID NO: 956518 - RNA, 19 nt, Homo sapiens
  misc_RNA (1)...(19): siRNA sense strand
uuggaaggcaaaugcaaua

SEQ ID NO: 956519 - RNA, 19 nt, Homo sapiens
  misc_RNA (1)...(19): siRNA sense strand
gguauuucugccuuaauug

SEQ ID NO: 956520 - RNA, 19 nt, Homo sapiens
  misc_RNA (1)...(19): siRNA sense strand
cuaaaacuguucgagaauu

SEQ ID NO: 956521 - RNA, 19 nt, Homo sapiens
  misc_RNA (1)...(19): siRNA sense strand
gcauggcuuuugcaguuuu

SEQ ID NO: 956522 - RNA, 19 nt, Homo sapiens
  misc_RNA (1)...(19): siRNA sense strand
caauaggccgaagugcuaa

SEQ ID NO: 956523 - RNA, 19 nt, Homo sapiens
  misc_RNA (1)...(19): siRNA sense strand
ugcugaugcuagaguagua

SEQ ID NO: 956524 - RNA, 19 nt, Homo sapiens
  misc_RNA (1)...(19): siRNA sense strand
gagguaccaauauaguugu

SEQ ID NO: 956525 - RNA, 19 nt, Homo sapiens
  misc_RNA (1)...(19): siRNA sense strand
gcggucggaauucgaggua

SEQ ID NO: 956526 - RNA, 19 nt, Homo sapiens
  misc_RNA (1)...(19): siRNA sense strand
aguugaauaugcccaggaa

SEQ ID NO: 956527 - RNA, 19 nt, Homo sapiens
  misc_RNA (1)...(19): siRNA sense strand
gaagaccuuuugguauuuc

SEQ ID NO: 956528 - RNA, 19 nt, Homo sapiens
  misc_RNA (1)...(19): siRNA sense strand
ucauagcaacuuuaaagca

SEQ ID NO: 956529 - RNA, 19 nt, Homo sapiens
  misc_RNA (1)...(19): siRNA sense strand
cccaggaagcggugaagaa

SEQ ID NO: 956530 - RNA, 19 nt, Homo sapiens
  misc_RNA (1)...(19): siRNA sense strand
ggaaucaacuugccagaau

SEQ ID NO: 956531 - RNA, 19 nt, Homo sapiens
  misc_RNA (1)...(19): siRNA sense strand
gagaacugcucauggacua

SEQ ID NO: 956532 - RNA, 19 nt, Homo sapiens
  misc_RNA (1)...(19): siRNA sense strand
gagaauugcucaagauguc

SEQ ID NO: 956533 - RNA, 19 nt, Homo sapiens
  misc_RNA (1)...(19): siRNA sense strand
aaacuuuacucacugauug

SEQ ID NO: 956534 - RNA, 19 nt, Homo sapiens
  misc_RNA (1)...(19): siRNA sense strand
gaaucaacuugccagaauu

SEQ ID NO: 956535 - RNA, 19 nt, Homo sapiens
  misc_RNA (1)...(19): siRNA sense strand
cagagagccugcuaaguga

SEQ ID NO: 956536 - RNA, 19 nt, Homo sapiens
  misc_RNA (1)...(19): siRNA sense strand
gguaauauuugaggaauca

SEQ ID NO: 956537 - RNA, 19 nt, Homo sapiens
  misc_RNA (1)...(19): siRNA sense strand
ccagagagccugcuaagug

SEQ ID NO: 956538 - RNA, 19 nt, Homo sapiens
  misc_RNA (1)...(19): siRNA sense strand
caagauguccugcggcuuu

SEQ ID NO: 956539 - RNA, 19 nt, Homo sapiens
  misc_RNA (1)...(19): siRNA sense strand
gauuucgacuuguuaagaa

SEQ ID NO: 956540 - RNA, 19 nt, Homo sapiens
  misc_RNA (1)...(19): siRNA sense strand
cuacugggauuauguuguu

SEQ ID NO: 956541 - RNA, 19 nt, Homo sapiens
  misc_RNA (1)...(19): siRNA sense strand
ccaaaucaaagcaaacuaa

SEQ ID NO: 956542 - RNA, 19 nt, Homo sapiens
  misc_RNA (1)...(19): siRNA sense strand
ggagaacugucuguccaaa

SEQ ID NO: 956543 - RNA, 19 nt, Homo sapiens
  misc_RNA (1)...(19): siRNA sense strand
caggagaacugcucaugga

SEQ ID NO: 956544 - RNA, 19 nt, Homo sapiens
  misc_RNA (1)...(19): siRNA sense strand
ggccagcauuucagaauug

SEQ ID NO: 956545 - RNA, 19 nt, Homo sapiens
  misc_RNA (1)...(19): siRNA sense strand
gcacgugaacuuggaaauu

SEQ ID NO: 956546 - RNA, 19 nt, Homo sapiens
  misc_RNA (1)...(19): siRNA sense strand
cacgugaacuuggaaauug

SEQ ID NO: 956547 - RNA, 19 nt, Homo sapiens
  misc_RNA (1)...(19): siRNA sense strand
uggauaggauuguguguga

SEQ ID NO: 956548 - RNA, 19 nt, Homo sapiens
  misc_RNA (1)...(19): siRNA sense strand
gagguaauauuugaggaau

SEQ ID NO: 956549 - RNA, 19 nt, Homo sapiens
  misc_RNA (1)...(19): siRNA sense strand
gauaggauugugugugauu

SEQ ID NO: 956550 - RNA, 19 nt, Homo sapiens
  misc_RNA (1)...(19): siRNA sense strand
agaacugucuguccaaauc

SEQ ID NO: 956551 - RNA, 19 nt, Homo sapiens
  misc_RNA (1)...(19): siRNA sense strand
ucaaagcaaacuaaacuug

SEQ ID NO: 956552 - RNA, 19 nt, Homo sapiens
  misc_RNA (1)...(19): siRNA sense strand
aaacuugguugcucaaagg

SEQ ID NO: 956553 - RNA, 19 nt, Homo sapiens
  misc_RNA (1)...(19): siRNA sense strand
ggauuucgacuuguuaaga

SEQ ID NO: 956554 - RNA, 19 nt, Homo sapiens
  misc_RNA (1)...(19): siRNA sense strand
ggauuauguuguuccugaa

SEQ ID NO: 956555 - RNA, 19 nt, Homo sapiens
  misc_RNA (1)...(19): siRNA sense strand
uaaacuugguugcucaaag

SEQ ID NO: 956556 - RNA, 19 nt, Homo sapiens
  misc_RNA (1)...(19): siRNA sense strand
gaacugucuguccaaauca

SEQ ID NO: 956557 - RNA, 19 nt, Homo sapiens
  misc_RNA (1)...(19): siRNA sense strand
gagagccugcuaagugauu

SEQ ID NO: 956558 - RNA, 19 nt, Homo sapiens
  misc_RNA (1)...(19): siRNA sense strand
gauuggaacaacagugauu

SEQ ID NO: 956559 - RNA, 19 nt, Homo sapiens
  misc_RNA (1)...(19): siRNA sense strand
ggacuagcuucagggacuu

SEQ ID NO: 956560 - RNA, 19 nt, Homo sapiens
  misc_RNA (1)...(19): siRNA sense strand
ggaacaacagugauugaag

SEQ ID NO: 956561 - RNA, 19 nt, Homo sapiens
  misc_RNA (1)...(19): siRNA sense strand
aaagcaaacuaaacuuggu

SEQ ID NO: 956562 - RNA, 19 nt, Homo sapiens
  misc_RNA (1)...(19): siRNA sense strand
ggucgcuucuccucugguu

SEQ ID NO: 956563 - RNA, 19 nt, Homo sapiens
  misc_RNA (1)...(19): siRNA sense strand
cggccagcauuucagaauu

SEQ ID NO: 956564 - RNA, 19 nt, Homo sapiens
  misc_RNA (1)...(19): siRNA sense strand
aaucaacuugccagaauuu

SEQ ID NO: 956565 - RNA, 19 nt, Homo sapiens
  misc_RNA (1)...(19): siRNA sense strand
caacuugccagaauuuggu

SEQ ID NO: 956566 - RNA, 19 nt, Homo sapiens
  misc_RNA (1)...(19): siRNA sense strand
guaccuacuuuugagcuua

SEQ ID NO: 956567 - RNA, 19 nt, Homo sapiens
  misc_RNA (1)...(19): siRNA sense strand
ucaggauuucgacuuguua

SEQ ID NO: 956568 - RNA, 19 nt, Homo sapiens
  misc_RNA (1)...(19): siRNA sense strand
cgagguaauauuugaggaa

SEQ ID NO: 956569 - RNA, 19 nt, Homo sapiens
  misc_RNA (1)...(19): siRNA sense strand
gcucaggauuucgacuugu

SEQ ID NO: 956570 - RNA, 19 nt, Homo sapiens
  misc_RNA (1)...(19): siRNA sense strand
ggcuugcgagguuguguua

SEQ ID NO: 956571 - RNA, 19 nt, Homo sapiens
  misc_RNA (1)...(19): siRNA sense strand
gagaacugucuguccaaau

SEQ ID NO: 956572 - RNA, 19 nt, Homo sapiens
  misc_RNA (1)...(19): siRNA sense strand
ugacuacugggauuauguu

SEQ ID NO: 956573 - RNA, 19 nt, Homo sapiens
  misc_RNA (1)...(19): siRNA sense strand
cuugcgagguuguguuaug

SEQ ID NO: 956574 - RNA, 19 nt, Homo sapiens
  misc_RNA (1)...(19): siRNA sense strand
gauucuagcgucguaccua

SEQ ID NO: 956575 - RNA, 19 nt, Homo sapiens
  misc_RNA (1)...(19): siRNA sense strand
gcaguuugagcagcaagaa

SEQ ID NO: 956576 - RNA, 19 nt, Homo sapiens
  misc_RNA (1)...(19): siRNA sense strand
gcuaagugauuuugacuac

SEQ ID NO: 956577 - RNA, 19 nt, Homo sapiens
  misc_RNA (1)...(19): siRNA sense strand
gugugauucuagcgucgua

SEQ ID NO: 956578 - RNA, 19 nt, Homo sapiens
  misc_RNA (1)...(19): siRNA sense strand
ggauaggauugugugugau

SEQ ID NO: 956579 - RNA, 19 nt, Homo sapiens
  misc_RNA (1)...(19): siRNA sense strand
uuaaaaugcuggagaacug

SEQ ID NO: 956580 - RNA, 19 nt, Homo sapiens
  misc_RNA (1)...(19): siRNA sense strand
cagagaauugcucaagaug

SEQ ID NO: 956581 - RNA, 19 nt, Homo sapiens
  misc_RNA (1)...(19): siRNA sense strand
uaagugauuuugacuacug

SEQ ID NO: 956582 - RNA, 19 nt, Homo sapiens
  misc_RNA (1)...(19): siRNA sense strand
acgugaacuuggaaauuga

SEQ ID NO: 956583 - RNA, 19 nt, Homo sapiens
  misc_RNA (1)...(19): siRNA sense strand
caggauuucgacuuguuaa

SEQ ID NO: 956584 - RNA, 19 nt, Homo sapiens
  misc_RNA (1)...(19): siRNA sense strand
gauuuugacuacugggauu

SEQ ID NO: 956585 - RNA, 19 nt, Homo sapiens
  misc_RNA (1)...(19): siRNA sense strand
cucaggauuucgacuuguu

SEQ ID NO: 956586 - RNA, 19 nt, Homo sapiens
  misc_RNA (1)...(19): siRNA sense strand
cagcucaggauuucgacuu

SEQ ID NO: 956587 - RNA, 19 nt, Homo sapiens
  misc_RNA (1)...(19): siRNA sense strand
aggauugugugugauucua

SEQ ID NO: 956588 - RNA, 19 nt, Homo sapiens
  misc_RNA (1)...(19): siRNA sense strand
gaacuggaagaaacaauua

SEQ ID NO: 956589 - RNA, 19 nt, Homo sapiens
  misc_RNA (1)...(19): siRNA sense strand
cgagaaauguuuaugaaga

SEQ ID NO: 956590 - RNA, 19 nt, Homo sapiens
  misc_RNA (1)...(19): siRNA sense strand
ggauaaaguccgagaaaug

SEQ ID NO: 956591 - RNA, 19 nt, Homo sapiens
  misc_RNA (1)...(19): siRNA sense strand
gaagaaugcccaugucaca

SEQ ID NO: 956592 - RNA, 19 nt, Homo sapiens
  misc_RNA (1)...(19): siRNA sense strand
gauaaaguccgagaaaugu

SEQ ID NO: 956593 - RNA, 19 nt, Homo sapiens
  misc_RNA (1)...(19): siRNA sense strand
ggaagcagcggacacaugu

SEQ ID NO: 956594 - RNA, 19 nt, Homo sapiens
  misc_RNA (1)...(19): siRNA sense strand
cgaacacugugcaccaauu

SEQ ID NO: 956595 - RNA, 19 nt, Homo sapiens
  misc_RNA (1)...(19): siRNA sense strand
uaaaguccgagaaauguuu

SEQ ID NO: 956596 - RNA, 19 nt, Homo sapiens
  misc_RNA (1)...(19): siRNA sense strand
gggauaaaguccgagaaau

SEQ ID NO: 956597 - RNA, 19 nt, Homo sapiens
  misc_RNA (1)...(19): siRNA sense strand
aagcagcggacacauguua

SEQ ID NO: 956598 - RNA, 19 nt, Homo sapiens
  misc_RNA (1)...(19): siRNA sense strand
gaacacugugcaccaauuc

SEQ ID NO: 956599 - RNA, 19 nt, Homo sapiens
  misc_RNA (1)...(19): siRNA sense strand
uccgagaaauguuuaugaa

SEQ ID NO: 956600 - RNA, 19 nt, Homo sapiens
  misc_RNA (1)...(19): siRNA sense strand
cgaacuggaagaaacaauu

SEQ ID NO: 956601 - RNA, 19 nt, Homo sapiens
  misc_RNA (1)...(19): siRNA sense strand
gcgccaaggccaaaggauu

SEQ ID NO: 956602 - RNA, 19 nt, Homo sapiens
  misc_RNA (1)...(19): siRNA sense strand
cgccaaggccaaaggauuu

SEQ ID NO: 956603 - RNA, 19 nt, Homo sapiens
  misc_RNA (1)...(19): siRNA sense strand
gaucgaacuggaagaaaca

SEQ ID NO: 956604 - RNA, 19 nt, Homo sapiens
  misc_RNA (1)...(19): siRNA sense strand
gggaaagaucgaacuggaa

SEQ ID NO: 956605 - RNA, 19 nt, Homo sapiens
  misc_RNA (1)...(19): siRNA sense strand
gaaaaugggacgggauaaa

SEQ ID NO: 956606 - RNA, 19 nt, Homo sapiens
  misc_RNA (1)...(19): siRNA sense strand
caauuaaaguauggaagca

SEQ ID NO: 956607 - RNA, 19 nt, Homo sapiens
  misc_RNA (1)...(19): siRNA sense strand
gaaagaucgaacuggaaga

SEQ ID NO: 956608 - RNA, 19 nt, Homo sapiens
  misc_RNA (1)...(19): siRNA sense strand
gcagcggacacauguuaug

SEQ ID NO: 956609 - RNA, 19 nt, Homo sapiens
  misc_RNA (1)...(19): siRNA sense strand
aaaguccgagaaauguuua

SEQ ID NO: 956610 - RNA, 19 nt, Homo sapiens
  misc_RNA (1)...(19): siRNA sense strand
aaagaucgaacuggaagaa

SEQ ID NO: 956611 - RNA, 19 nt, Homo sapiens
  misc_RNA (1)...(19): siRNA sense strand
uugaucuucuggucauuaa

SEQ ID NO: 956612 - RNA, 19 nt, Homo sapiens
  misc_RNA (1)...(19): siRNA sense strand
gggaggugccgaacacugu

SEQ ID NO: 956613 - RNA, 19 nt, Homo sapiens
  misc_RNA (1)...(19): siRNA sense strand
cuauccaaguucuauguug

SEQ ID NO: 956614 - RNA, 19 nt, Homo sapiens
  misc_RNA (1)...(19): siRNA sense strand
guugaucuucuggucauua

SEQ ID NO: 956615 - RNA, 19 nt, Homo sapiens
  misc_RNA (1)...(19): siRNA sense strand
uaugaagaaugcccauguc

SEQ ID NO: 956616 - RNA, 19 nt, Homo sapiens
  misc_RNA (1)...(19): siRNA sense strand
gccgaacacugugcaccaa

SEQ ID NO: 956617 - RNA, 19 nt, Homo sapiens
  misc_RNA (1)...(19): siRNA sense strand
cgggauaaaguccgagaaa

SEQ ID NO: 956618 - RNA, 19 nt, Homo sapiens
  misc_RNA (1)...(19): siRNA sense strand
agaaugcccaugucacaga

SEQ ID NO: 956619 - RNA, 19 nt, Homo sapiens
  misc_RNA (1)...(19): siRNA sense strand
gaucuucuggucauuaagg

SEQ ID NO: 956620 - RNA, 19 nt, Homo sapiens
  misc_RNA (1)...(19): siRNA sense strand
cagaagcgccaaggccaaa

SEQ ID NO: 956621 - RNA, 19 nt, Homo sapiens
  misc_RNA (1)...(19): siRNA sense strand
guccgagaaauguuuauga

SEQ ID NO: 956622 - RNA, 19 nt, Homo sapiens
  misc_RNA (1)...(19): siRNA sense strand
ccagggugguugaucuucu

SEQ ID NO: 956623 - RNA, 19 nt, Homo sapiens
  misc_RNA (1)...(19): siRNA sense strand
augcgguucuuccaugaaa

SEQ ID NO: 956624 - RNA, 19 nt, Homo sapiens
  misc_RNA (1)...(19): siRNA sense strand
agaucgaacuggaagaaac

SEQ ID NO: 956625 - RNA, 19 nt, Homo sapiens
  misc_RNA (1)...(19): siRNA sense strand
cagggugguugaucuucug

SEQ ID NO: 956626 - RNA, 19 nt, Homo sapiens
  misc_RNA (1)...(19): siRNA sense strand
uuaugcgguucuuccauga

SEQ ID NO: 956627 - RNA, 19 nt, Homo sapiens
  misc_RNA (1)...(19): siRNA sense strand
gaagcagcggacacauguu

SEQ ID NO: 956628 - RNA, 19 nt, Homo sapiens
  misc_RNA (1)...(19): siRNA sense strand
guucuauguuggccacgau

SEQ ID NO: 956629 - RNA, 19 nt, Homo sapiens
  misc_RNA (1)...(19): siRNA sense strand
gauuuccuauccaaguucu

SEQ ID NO: 956630 - RNA, 19 nt, Homo sapiens
  misc_RNA (1)...(19): siRNA sense strand
gcaaauaccugaaagauug

SEQ ID NO: 956631 - RNA, 19 nt, Homo sapiens
  misc_RNA (1)...(19): siRNA sense strand
gagaagaauucagaagaaa

SEQ ID NO: 956632 - RNA, 19 nt, Homo sapiens
  misc_RNA (1)...(19): siRNA sense strand
gcaaacaauucggcaaguu

SEQ ID NO: 956633 - RNA, 19 nt, Homo sapiens
  misc_RNA (1)...(19): siRNA sense strand
gauacaauccggaugauga

SEQ ID NO: 956634 - RNA, 19 nt, Homo sapiens
  misc_RNA (1)...(19): siRNA sense strand
agagaagaauucagaagaa

SEQ ID NO: 956635 - RNA, 19 nt, Homo sapiens
  misc_RNA (1)...(19): siRNA sense strand
gaagaauucagaagaaaca

SEQ ID NO: 956636 - RNA, 19 nt, Homo sapiens
  misc_RNA (1)...(19): siRNA sense strand
gaugauuacucaaggcaau

SEQ ID NO: 956637 - RNA, 19 nt, Homo sapiens
  misc_RNA (1)...(19): siRNA sense strand
uaaagcaguucguaagaag

SEQ ID NO: 956638 - RNA, 19 nt, Homo sapiens
  misc_RNA (1)...(19): siRNA sense strand
guaagaaggcaacaaguuc

SEQ ID NO: 956639 - RNA, 19 nt, Homo sapiens
  misc_RNA (1)...(19): siRNA sense strand
gcaauaugcagcucaagga

SEQ ID NO: 956640 - RNA, 19 nt, Homo sapiens
  misc_RNA (1)...(19): siRNA sense strand
uuaaagcaguucguaagaa

SEQ ID NO: 956641 - RNA, 19 nt, Homo sapiens
  misc_RNA (1)...(19): siRNA sense strand
ggcaagagaagaauucaga

SEQ ID NO: 956642 - RNA, 19 nt, Homo sapiens
  misc_RNA (1)...(19): siRNA sense strand
gaucgcaaauaccugaaag

SEQ ID NO: 956643 - RNA, 19 nt, Homo sapiens
  misc_RNA (1)...(19): siRNA sense strand
gaaagauugggcaagagaa

SEQ ID NO: 956644 - RNA, 19 nt, Homo sapiens
  misc_RNA (1)...(19): siRNA sense strand
ccugaaagauugggcaaga

SEQ ID NO: 956645 - RNA, 19 nt, Homo sapiens
  misc_RNA (1)...(19): siRNA sense strand
aaaugauucugaucgcaaa

SEQ ID NO: 956646 - RNA, 19 nt, Homo sapiens
  misc_RNA (1)...(19): siRNA sense strand
gcaagagaagaauucagaa

SEQ ID NO: 956647 - RNA, 19 nt, Homo sapiens
  misc_RNA (1)...(19): siRNA sense strand
caaacaauucggcaaguuc

SEQ ID NO: 956648 - RNA, 19 nt, Homo sapiens
  misc_RNA (1)...(19): siRNA sense strand
cguaagaaggcaacaaguu

SEQ ID NO: 956649 - RNA, 19 nt, Homo sapiens
  misc_RNA (1)...(19): siRNA sense strand
auaugcagcucaaggaguu

SEQ ID NO: 956650 - RNA, 19 nt, Homo sapiens
  misc_RNA (1)...(19): siRNA sense strand
guuaaagcaguucguaaga

SEQ ID NO: 956651 - RNA, 19 nt, Homo sapiens
  misc_RNA (1)...(19): siRNA sense strand
ugaaagauugggcaagaga

SEQ ID NO: 956652 - RNA, 19 nt, Homo sapiens
  misc_RNA (1)...(19): siRNA sense strand
aagagaagaauucagaaga

SEQ ID NO: 956653 - RNA, 19 nt, Homo sapiens
  misc_RNA (1)...(19): siRNA sense strand
aacaaguucuucuccucua

SEQ ID NO: 956654 - RNA, 19 nt, Homo sapiens
  misc_RNA (1)...(19): siRNA sense strand
caagagaagaauucagaag

SEQ ID NO: 956655 - RNA, 19 nt, Homo sapiens
  misc_RNA (1)...(19): siRNA sense strand
cgcaaauaccugaaagauu

SEQ ID NO: 956656 - RNA, 19 nt, Homo sapiens
  misc_RNA (1)...(19): siRNA sense strand
cggcaaguuccaaaugauu

SEQ ID NO: 956657 - RNA, 19 nt, Homo sapiens
  misc_RNA (1)...(19): siRNA sense strand
gaaggauuuugcaaacaau

SEQ ID NO: 956658 - RNA, 19 nt, Homo sapiens
  misc_RNA (1)...(19): siRNA sense strand
gcaaguuccaaaugauucu

SEQ ID NO: 956659 - RNA, 19 nt, Homo sapiens
  misc_RNA (1)...(19): siRNA sense strand
ggcaaguuccaaaugauuc

SEQ ID NO: 956660 - RNA, 19 nt, Homo sapiens
  misc_RNA (1)...(19): siRNA sense strand
agaaggauuuugcaaacaa

SEQ ID NO: 956661 - RNA, 19 nt, Homo sapiens
  misc_RNA (1)...(19): siRNA sense strand
caauucggcaaguuccaaa

SEQ ID NO: 956662 - RNA, 19 nt, Homo sapiens
  misc_RNA (1)...(19): siRNA sense strand
ugauucugaucgcaaauac

SEQ ID NO: 956663 - RNA, 19 nt, Homo sapiens
  misc_RNA (1)...(19): siRNA sense strand
gaucauaucugaaauacag

SEQ ID NO: 956664 - RNA, 19 nt, Homo sapiens
  misc_RNA (1)...(19): siRNA sense strand
caaauccagugauaucuaa

SEQ ID NO: 956665 - RNA, 19 nt, Homo sapiens
  misc_RNA (1)...(19): siRNA sense strand
caacacagauucccagaag

SEQ ID NO: 956666 - RNA, 19 nt, Homo sapiens
  misc_RNA (1)...(19): siRNA sense strand
caagacugcuuucagauau

SEQ ID NO: 956667 - RNA, 19 nt, Homo sapiens
  misc_RNA (1)...(19): siRNA sense strand
guuagaugcuacugaauuu

SEQ ID NO: 956668 - RNA, 19 nt, Homo sapiens
  misc_RNA (1)...(19): siRNA sense strand
caauguaucucuaugaagu

SEQ ID NO: 956669 - RNA, 19 nt, Homo sapiens
  misc_RNA (1)...(19): siRNA sense strand
ggaagaugcuuggagagaa

SEQ ID NO: 956670 - RNA, 19 nt, Homo sapiens
  misc_RNA (1)...(19): siRNA sense strand
uuacaagacugcuuucaga

SEQ ID NO: 956671 - RNA, 19 nt, Homo sapiens
  misc_RNA (1)...(19): siRNA sense strand
gcaagcaaguggcccucua

SEQ ID NO: 956672 - RNA, 19 nt, Homo sapiens
  misc_RNA (1)...(19): siRNA sense strand
ggugguggcucgauuuaga

SEQ ID NO: 956673 - RNA, 19 nt, Homo sapiens
  misc_RNA (1)...(19): siRNA sense strand
ugaaucagcugccagacuu

SEQ ID NO: 956674 - RNA, 19 nt, Homo sapiens
  misc_RNA (1)...(19): siRNA sense strand
gaagaaguguuuggaaguc

SEQ ID NO: 956675 - RNA, 19 nt, Homo sapiens
  misc_RNA (1)...(19): siRNA sense strand
ucuauuagcccaucaacua

SEQ ID NO: 956676 - RNA, 19 nt, Homo sapiens
  misc_RNA (1)...(19): siRNA sense strand
guacaaauccagugauauc

SEQ ID NO: 956677 - RNA, 19 nt, Homo sapiens
  misc_RNA (1)...(19): siRNA sense strand
uaaaaugcaucgucacuuu

SEQ ID NO: 956678 - RNA, 19 nt, Homo sapiens
  misc_RNA (1)...(19): siRNA sense strand
ggaccuaugucugcaaauc

SEQ ID NO: 956679 - RNA, 19 nt, Homo sapiens
  misc_RNA (1)...(19): siRNA sense strand
uaucugaaauacaggcuuu

SEQ ID NO: 956680 - RNA, 19 nt, Homo sapiens
  misc_RNA (1)...(19): siRNA sense strand
cccagaagcugaacaagau

SEQ ID NO: 956681 - RNA, 19 nt, Homo sapiens
  misc_RNA (1)...(19): siRNA sense strand
gaagaugcuuggagagaac

SEQ ID NO: 956682 - RNA, 19 nt, Homo sapiens
  misc_RNA (1)...(19): siRNA sense strand
caacuccgguuagaugcua

SEQ ID NO: 956683 - RNA, 19 nt, Homo sapiens
  misc_RNA (1)...(19): siRNA sense strand
cuacauccauaccagauau

SEQ ID NO: 956684 - RNA, 19 nt, Homo sapiens
  misc_RNA (1)...(19): siRNA sense strand
ggaaaacuccuguugcuuu

SEQ ID NO: 956685 - RNA, 19 nt, Homo sapiens
  misc_RNA (1)...(19): siRNA sense strand
ccaauuacaagacugcuuu

SEQ ID NO: 956686 - RNA, 19 nt, Homo sapiens
  misc_RNA (1)...(19): siRNA sense strand
gaagucaacaugaacaaag

SEQ ID NO: 956687 - RNA, 19 nt, Homo sapiens
  misc_RNA (1)...(19): siRNA sense strand
ugaaauacaggcuuuacaa

SEQ ID NO: 956688 - RNA, 19 nt, Homo sapiens
  misc_RNA (1)...(19): siRNA sense strand
cucaacagcuacauccaua

SEQ ID NO: 956689 - RNA, 19 nt, Homo sapiens
  misc_RNA (1)...(19): siRNA sense strand
ucaaagccguuccuacaca

SEQ ID NO: 956690 - RNA, 19 nt, Homo sapiens
  misc_RNA (1)...(19): siRNA sense strand
gaaauacaggcuuuacaag

SEQ ID NO: 956691 - RNA, 19 nt, Homo sapiens
  misc_RNA (1)...(19): siRNA sense strand
caugaacggugacaacaca

SEQ ID NO: 956692 - RNA, 19 nt, Homo sapiens
  misc_RNA (1)...(19): siRNA sense strand
acaagacugcuuucagaua

SEQ ID NO: 956693 - RNA, 19 nt, Homo sapiens
  misc_RNA (1)...(19): siRNA sense strand
uugcagcccuucaagauga

SEQ ID NO: 956694 - RNA, 19 nt, Homo sapiens
  misc_RNA (1)...(19): siRNA sense strand
gaggugguggcucgauuua

SEQ ID NO: 956695 - RNA, 19 nt, Homo sapiens
  misc_RNA (1)...(19): siRNA sense strand
gguuagaugcuacugaauu

SEQ ID NO: 956696 - RNA, 19 nt, Homo sapiens
  misc_RNA (1)...(19): siRNA sense strand
ccauuccgguugaugcuaa

SEQ ID NO: 956697 - RNA, 19 nt, Homo sapiens
  misc_RNA (1)...(19): siRNA sense strand
ggacaagacgcacagaaac

SEQ ID NO: 956698 - RNA, 19 nt, Homo sapiens
  misc_RNA (1)...(19): siRNA sense strand
gcaaugugccaauuacaag

SEQ ID NO: 956699 - RNA, 19 nt, Homo sapiens
  misc_RNA (1)...(19): siRNA sense strand
caucaacuauagaagaagu

SEQ ID NO: 956700 - RNA, 19 nt, Homo sapiens
  misc_RNA (1)...(19): siRNA sense strand
ccagcuuuacguucuauua

SEQ ID NO: 956701 - RNA, 19 nt, Homo sapiens
  misc_RNA (1)...(19): siRNA sense strand
ccgguuagaugcuacugaa

SEQ ID NO: 956702 - RNA, 19 nt, Homo sapiens
  misc_RNA (1)...(19): siRNA sense strand
agacaacuccgguuagaug

SEQ ID NO: 956703 - RNA, 19 nt, Homo sapiens
  misc_RNA (1)...(19): siRNA sense strand
cccaauguaucucuaugaa

SEQ ID NO: 956704 - RNA, 19 nt, Homo sapiens
  misc_RNA (1)...(19): siRNA sense strand
cccaucaacuauagaagaa

SEQ ID NO: 956705 - RNA, 19 nt, Homo sapiens
  misc_RNA (1)...(19): siRNA sense strand
gagcaagccagccggauca

SEQ ID NO: 956706 - RNA, 19 nt, Homo sapiens
  misc_RNA (1)...(19): siRNA sense strand
caagaccagcugaugcuuu

SEQ ID NO: 956707 - RNA, 19 nt, Homo sapiens
  misc_RNA (1)...(19): siRNA sense strand
ggaagucaacaugaacaaa

SEQ ID NO: 956708 - RNA, 19 nt, Homo sapiens
  misc_RNA (1)...(19): siRNA sense strand
acucaacccugucgcuuug

SEQ ID NO: 956709 - RNA, 19 nt, Homo sapiens
  misc_RNA (1)...(19): siRNA sense strand
aaauacaggcuuuacaaga

SEQ ID NO: 956710 - RNA, 19 nt, Homo sapiens
  misc_RNA (1)...(19): siRNA sense strand
gaagcugaacaagaucaua

SEQ ID NO: 956711 - RNA, 19 nt, Homo sapiens
  misc_RNA (1)...(19): siRNA sense strand
guuuggaagucaacaugaa

SEQ ID NO: 956712 - RNA, 19 nt, Homo sapiens
  misc_RNA (1)...(19): siRNA sense strand
aauacaggcuuuacaagag

SEQ ID NO: 956713 - RNA, 19 nt, Homo sapiens
  misc_RNA (1)...(19): siRNA sense strand
uuagacaacuccgguuaga

SEQ ID NO: 956714 - RNA, 19 nt, Homo sapiens
  misc_RNA (1)...(19): siRNA sense strand
ggaucaacaagccgcauuu

SEQ ID NO: 956715 - RNA, 19 nt, Homo sapiens
  misc_RNA (1)...(19): siRNA sense strand
gaacggugacaacacagau

SEQ ID NO: 956716 - RNA, 19 nt, Homo sapiens
  misc_RNA (1)...(19): siRNA sense strand
uaccagauaucccacucaa

SEQ ID NO: 956717 - RNA, 19 nt, Homo sapiens
  misc_RNA (1)...(19): siRNA sense strand
cugagaaguuuccggaaug

SEQ ID NO: 956718 - RNA, 19 nt, Homo sapiens
  misc_RNA (1)...(19): siRNA sense strand
caaagccguuccuacacau

SEQ ID NO: 956719 - RNA, 19 nt, Homo sapiens
  misc_RNA (1)...(19): siRNA sense strand
cuacugaauuugccugucu

SEQ ID NO: 956720 - RNA, 19 nt, Homo sapiens
  misc_RNA (1)...(19): siRNA sense strand
ucaagugggcuaagagugu

SEQ ID NO: 956721 - RNA, 19 nt, Homo sapiens
  misc_RNA (1)...(19): siRNA sense strand
acaaauccagugauaucua

SEQ ID NO: 956722 - RNA, 19 nt, Homo sapiens
  misc_RNA (1)...(19): siRNA sense strand
ucagauauguacaaaucca

SEQ ID NO: 956723 - RNA, 19 nt, Homo sapiens
  misc_RNA (1)...(19): siRNA sense strand
gcuuucagauauguacaaa

SEQ ID NO: 956724 - RNA, 19 nt, Homo sapiens
  misc_RNA (1)...(19): siRNA sense strand
gcccaucaacuauagaaga

SEQ ID NO: 956725 - RNA, 19 nt, Homo sapiens
  misc_RNA (1)...(19): siRNA sense strand
gggcgugucggcugaagaa

SEQ ID NO: 956726 - RNA, 19 nt, Homo sapiens
  misc_RNA (1)...(19): siRNA sense strand
cgugucggcugaagaagug

SEQ ID NO: 956727 - RNA, 19 nt, Homo sapiens
  misc_RNA (1)...(19): siRNA sense strand
gcuacauccauaccagaua

SEQ ID NO: 956728 - RNA, 19 nt, Homo sapiens
  misc_RNA (1)...(19): siRNA sense strand
gguugaugcuaacacucua

SEQ ID NO: 956729 - RNA, 19 nt, Homo sapiens
  misc_RNA (1)...(19): siRNA sense strand
caagccagccggaucaaca

SEQ ID NO: 956730 - RNA, 19 nt, Homo sapiens
  misc_RNA (1)...(19): siRNA sense strand
cuacuuccguggacacaag

SEQ ID NO: 956731 - RNA, 19 nt, Homo sapiens
  misc_RNA (1)...(19): siRNA sense strand
aagucaacaugaacaaaga

SEQ ID NO: 956732 - RNA, 19 nt, Homo sapiens
  misc_RNA (1)...(19): siRNA sense strand
uauuagcccaucaacuaua

SEQ ID NO: 956733 - RNA, 19 nt, Homo sapiens
  misc_RNA (1)...(19): siRNA sense strand
acuguuuguucuaggaaua

SEQ ID NO: 956734 - RNA, 19 nt, Homo sapiens
  misc_RNA (1)...(19): siRNA sense strand
ugccagacuucucuucaug

SEQ ID NO: 956735 - RNA, 19 nt, Homo sapiens
  misc_RNA (1)...(19): siRNA sense strand
auguacaaauccagugaua

SEQ ID NO: 956736 - RNA, 19 nt, Homo sapiens
  misc_RNA (1)...(19): siRNA sense strand
gcugaagaaguguuuggaa

SEQ ID NO: 956737 - RNA, 19 nt, Homo sapiens
  misc_RNA (1)...(19): siRNA sense strand
ugaauuugccugucuaaaa

SEQ ID NO: 956738 - RNA, 19 nt, Homo sapiens
  misc_RNA (1)...(19): siRNA sense strand
gauauccccugcaaagugu

SEQ ID NO: 956739 - RNA, 19 nt, Homo sapiens
  misc_RNA (1)...(19): siRNA sense strand
agacugcuuucagauaugu

SEQ ID NO: 956740 - RNA, 19 nt, Homo sapiens
  misc_RNA (1)...(19): siRNA sense strand
caacaagccgcauuuuaga

SEQ ID NO: 956741 - RNA, 19 nt, Homo sapiens
  misc_RNA (1)...(19): siRNA sense strand
ccagacuucucuucaugag

SEQ ID NO: 956742 - RNA, 19 nt, Homo sapiens
  misc_RNA (1)...(19): siRNA sense strand
acugagaaguuuccggaau

SEQ ID NO: 956743 - RNA, 19 nt, Homo sapiens
  misc_RNA (1)...(19): siRNA sense strand
uggacaagacgcacagaaa

SEQ ID NO: 956744 - RNA, 19 nt, Homo sapiens
  misc_RNA (1)...(19): siRNA sense strand
aagcugaacaagaucauau

SEQ ID NO: 956745 - RNA, 19 nt, Homo sapiens
  misc_RNA (1)...(19): siRNA sense strand
ugaagaaguguuuggaagu

SEQ ID NO: 956746 - RNA, 19 nt, Homo sapiens
  misc_RNA (1)...(19): siRNA sense strand
aagaggugguggcucgauu

SEQ ID NO: 956747 - RNA, 19 nt, Homo sapiens
  misc_RNA (1)...(19): siRNA sense strand
agaaguguuuggaagucaa

SEQ ID NO: 956748 - RNA, 19 nt, Homo sapiens
  misc_RNA (1)...(19): siRNA sense strand
uuucaaagccguuccuaca

SEQ ID NO: 956749 - RNA, 19 nt, Homo sapiens
  misc_RNA (1)...(19): siRNA sense strand
ggcuguaucuggcaugaac

SEQ ID NO: 956750 - RNA, 19 nt, Homo sapiens
  misc_RNA (1)...(19): siRNA sense strand
caaugugccaauuacaaga

SEQ ID NO: 956751 - RNA, 19 nt, Homo sapiens
  misc_RNA (1)...(19): siRNA sense strand
cauugcagcccuucaagau

SEQ ID NO: 956752 - RNA, 19 nt, Homo sapiens
  misc_RNA (1)...(19): siRNA sense strand
gcucaacagcuacauccau

SEQ ID NO: 956753 - RNA, 19 nt, Homo sapiens
  misc_RNA (1)...(19): siRNA sense strand
gccagacuucucuucauga

SEQ ID NO: 956754 - RNA, 19 nt, Homo sapiens
  misc_RNA (1)...(19): siRNA sense strand
cuacacauagugguucuga

SEQ ID NO: 956755 - RNA, 19 nt, Homo sapiens
  misc_RNA (1)...(19): siRNA sense strand
cagauucccagaagcugaa

SEQ ID NO: 956756 - RNA, 19 nt, Homo sapiens
  misc_RNA (1)...(19): siRNA sense strand
ucuccacgcugucuuugca

SEQ ID NO: 956757 - RNA, 19 nt, Homo sapiens
  misc_RNA (1)...(19): siRNA sense strand
aagaccagcugaugcuuuu

SEQ ID NO: 956758 - RNA, 19 nt, Homo sapiens
  misc_RNA (1)...(19): siRNA sense strand
ugcgacggcugcucagguu

SEQ ID NO: 956759 - RNA, 19 nt, Homo sapiens
  misc_RNA (1)...(19): siRNA sense strand
gcucagcuaacgcucaaca

SEQ ID NO: 956760 - RNA, 19 nt, Homo sapiens
  misc_RNA (1)...(19): siRNA sense strand
ucccagaagcugaacaaga

SEQ ID NO: 956761 - RNA, 19 nt, Homo sapiens
  misc_RNA (1)...(19): siRNA sense strand
aaaugcaucgucacuuuca

SEQ ID NO: 956762 - RNA, 19 nt, Homo sapiens
  misc_RNA (1)...(19): siRNA sense strand
cagcuuuacguucuauuag

SEQ ID NO: 956763 - RNA, 19 nt, Homo sapiens
  misc_RNA (1)...(19): siRNA sense strand
ucacagaucuuucucuaaa

SEQ ID NO: 956764 - RNA, 19 nt, Homo sapiens
  misc_RNA (1)...(19): siRNA sense strand
gcucacagaucuuucucua

SEQ ID NO: 956765 - RNA, 19 nt, Homo sapiens
  misc_RNA (1)...(19): siRNA sense strand
gccagaagcucacagaucu

SEQ ID NO: 956766 - RNA, 19 nt, Homo sapiens
  misc_RNA (1)...(19): siRNA sense strand
gcuacaaccucaccgacaa

SEQ ID NO: 956767 - RNA, 19 nt, Homo sapiens
  misc_RNA (1)...(19): siRNA sense strand
gcucaacauuggacagugu

SEQ ID NO: 956768 - RNA, 19 nt, Homo sapiens
  misc_RNA (1)...(19): siRNA sense strand
ccacaucucaugccuguuc

SEQ ID NO: 956769 - RNA, 19 nt, Homo sapiens
  misc_RNA (1)...(19): siRNA sense strand
cagaagcucacagaucuuu

SEQ ID NO: 956770 - RNA, 19 nt, Homo sapiens
  misc_RNA (1)...(19): siRNA sense strand
gcagcaacaucaccaacac

SEQ ID NO: 956771 - RNA, 19 nt, Homo sapiens
  misc_RNA (1)...(19): siRNA sense strand
gauguuucguucugugaca

SEQ ID NO: 956772 - RNA, 19 nt, Homo sapiens
  misc_RNA (1)...(19): siRNA sense strand
caccaacacuggccuucug

SEQ ID NO: 956773 - RNA, 19 nt, Homo sapiens
  misc_RNA (1)...(19): siRNA sense strand
gaagcucacagaucuuucu

SEQ ID NO: 956774 - RNA, 19 nt, Homo sapiens
  misc_RNA (1)...(19): siRNA sense strand
ggacagugugugcgcauca

SEQ ID NO: 956775 - RNA, 19 nt, Homo sapiens
  misc_RNA (1)...(19): siRNA sense strand
acaagggccuggagcugau

SEQ ID NO: 956776 - RNA, 19 nt, Homo sapiens
  misc_RNA (1)...(19): siRNA sense strand
gcgcuccugugacaacauc

SEQ ID NO: 956777 - RNA, 19 nt, Homo sapiens
  misc_RNA (1)...(19): siRNA sense strand
ugacggacagugagaagga

SEQ ID NO: 956778 - RNA, 19 nt, Homo sapiens
  misc_RNA (1)...(19): siRNA sense strand
ucaccggcauagaccugua

SEQ ID NO: 956779 - RNA, 19 nt, Homo sapiens
  misc_RNA (1)...(19): siRNA sense strand
aaccugcgcuccugugaca

SEQ ID NO: 956780 - RNA, 19 nt, Homo sapiens
  misc_RNA (1)...(19): siRNA sense strand
gcauagcccaguaccucaa

SEQ ID NO: 956781 - RNA, 19 nt, Homo sapiens
  misc_RNA (1)...(19): siRNA sense strand
gagccaacucaccggcaua

SEQ ID NO: 956782 - RNA, 19 nt, Homo sapiens
  misc_RNA (1)...(19): siRNA sense strand
gcuccugccacaucaguga

SEQ ID NO: 956783 - RNA, 19 nt, Homo sapiens
  misc_RNA (1)...(19): siRNA sense strand
acacuggccuucugcucau

SEQ ID NO: 956784 - RNA, 19 nt, Homo sapiens
  misc_RNA (1)...(19): siRNA sense strand
uggauggccucaagucucu

SEQ ID NO: 956785 - RNA, 19 nt, Homo sapiens
  misc_RNA (1)...(19): siRNA sense strand
ggucugcagcgccucaaga

SEQ ID NO: 956786 - RNA, 19 nt, Homo sapiens
  misc_RNA (1)...(19): siRNA sense strand
gccgccaccuuucggaugu

SEQ ID NO: 956787 - RNA, 19 nt, Homo sapiens
  misc_RNA (1)...(19): siRNA sense strand
caacaucgagagccucaac

SEQ ID NO: 956788 - RNA, 19 nt, Homo sapiens
  misc_RNA (1)...(19): siRNA sense strand
guacucaaccugggacucu

SEQ ID NO: 956789 - RNA, 19 nt, Homo sapiens
  misc_RNA (1)...(19): siRNA sense strand
ggcagaugacggacaguga

SEQ ID NO: 956790 - RNA, 19 nt, Homo sapiens
  misc_RNA (1)...(19): siRNA sense strand
cagcgccucaagagccuua

SEQ ID NO: 956791 - RNA, 19 nt, Homo sapiens
  misc_RNA (1)...(19): siRNA sense strand
caaggugggagaccagagu

SEQ ID NO: 956792 - RNA, 19 nt, Homo sapiens
  misc_RNA (1)...(19): siRNA sense strand
ccugugacaacaucaguga

SEQ ID NO: 956793 - RNA, 19 nt, Homo sapiens
  misc_RNA (1)...(19): siRNA sense strand
agaaauaccuggagaauua

SEQ ID NO: 956794 - RNA, 19 nt, Homo sapiens
  misc_RNA (1)...(19): siRNA sense strand
ggacaaccaagaagaaaua

SEQ ID NO: 956795 - RNA, 19 nt, Homo sapiens
  misc_RNA (1)...(19): siRNA sense strand
guacaagacucccauauac

SEQ ID NO: 956796 - RNA, 19 nt, Homo sapiens
  misc_RNA (1)...(19): siRNA sense strand
ucagucagcuguccuuuau

SEQ ID NO: 956797 - RNA, 19 nt, Homo sapiens
  misc_RNA (1)...(19): siRNA sense strand
gagcaacgccaauaucuau

SEQ ID NO: 956798 - RNA, 19 nt, Homo sapiens
  misc_RNA (1)...(19): siRNA sense strand
ggaccggccuuucgaagau

SEQ ID NO: 956799 - RNA, 19 nt, Homo sapiens
  misc_RNA (1)...(19): siRNA sense strand
agaauuaccucaacugucu

SEQ ID NO: 956800 - RNA, 19 nt, Homo sapiens
  misc_RNA (1)...(19): siRNA sense strand
gaaccugcacucuguauuc

SEQ ID NO: 956801 - RNA, 19 nt, Homo sapiens
  misc_RNA (1)...(19): siRNA sense strand
aagaagaaauaccgucauu

SEQ ID NO: 956802 - RNA, 19 nt, Homo sapiens
  misc_RNA (1)...(19): siRNA sense strand
gaauuggccuugggcauca

SEQ ID NO: 956803 - RNA, 19 nt, Homo sapiens
  misc_RNA (1)...(19): siRNA sense strand
gaccugcacuaccgacuga

SEQ ID NO: 956804 - RNA, 19 nt, Homo sapiens
  misc_RNA (1)...(19): siRNA sense strand
gcaaucuuaucaccaagga

SEQ ID NO: 956805 - RNA, 19 nt, Homo sapiens
  misc_RNA (1)...(19): siRNA sense strand
cagcauggcgggacuauau

SEQ ID NO: 956806 - RNA, 19 nt, Homo sapiens
  misc_RNA (1)...(19): siRNA sense strand
ucuaugagcuucagucucu

SEQ ID NO: 956807 - RNA, 19 nt, Homo sapiens
  misc_RNA (1)...(19): siRNA sense strand
guacaggucuugcgaucag

SEQ ID NO: 956808 - RNA, 19 nt, Homo sapiens
  misc_RNA (1)...(19): siRNA sense strand
ugucuauucugcuguuuaa

SEQ ID NO: 956809 - RNA, 19 nt, Homo sapiens
  misc_RNA (1)...(19): siRNA sense strand
gccgagaccaaguuuguua

SEQ ID NO: 956810 - RNA, 19 nt, Homo sapiens
  misc_RNA (1)...(19): siRNA sense strand
gcaacgccaauaucuauga

SEQ ID NO: 956811 - RNA, 19 nt, Homo sapiens
  misc_RNA (1)...(19): siRNA sense strand
ucucggagcucaucuacau

SEQ ID NO: 956812 - RNA, 19 nt, Homo sapiens
  misc_RNA (1)...(19): siRNA sense strand
ugaacaaggugggcgauga

SEQ ID NO: 956813 - RNA, 19 nt, Homo sapiens
  misc_RNA (1)...(19): siRNA sense strand
gaaccaucccucaugaaug

SEQ ID NO: 956814 - RNA, 19 nt, Homo sapiens
  misc_RNA (1)...(19): siRNA sense strand
ggaaccaucccucaugaau

SEQ ID NO: 956815 - RNA, 19 nt, Homo sapiens
  misc_RNA (1)...(19): siRNA sense strand
caaggugggcgaugagauu

SEQ ID NO: 956816 - RNA, 19 nt, Homo sapiens
  misc_RNA (1)...(19): siRNA sense strand
gugggaaccugcacucugu

SEQ ID NO: 956817 - RNA, 19 nt, Homo sapiens
  misc_RNA (1)...(19): siRNA sense strand
gugaugacuucuuccaguu

SEQ ID NO: 956818 - RNA, 19 nt, Homo sapiens
  misc_RNA (1)...(19): siRNA sense strand
gcacugcuucggugugauu

SEQ ID NO: 956819 - RNA, 19 nt, Homo sapiens
  misc_RNA (1)...(19): siRNA sense strand
acagcaaucuuaucaccaa

SEQ ID NO: 956820 - RNA, 19 nt, Homo sapiens
  misc_RNA (1)...(19): siRNA sense strand
ggugccaucucauuuguuc

SEQ ID NO: 956821 - RNA, 19 nt, Homo sapiens
  misc_RNA (1)...(19): siRNA sense strand
gacuggaccuugccuaugg

SEQ ID NO: 956822 - RNA, 19 nt, Homo sapiens
  misc_RNA (1)...(19): siRNA sense strand
gcugagagcaacgccaaua

SEQ ID NO: 956823 - RNA, 19 nt, Homo sapiens
  misc_RNA (1)...(19): siRNA sense strand
gguugaguccugagguuua

SEQ ID NO: 956824 - RNA, 19 nt, Homo sapiens
  misc_RNA (1)...(19): siRNA sense strand
gcauggcgggacuauauuu

SEQ ID NO: 956825 - RNA, 19 nt, Homo sapiens
  misc_RNA (1)...(19): siRNA sense strand
agagguggcugguggugaa

SEQ ID NO: 956826 - RNA, 19 nt, Homo sapiens
  misc_RNA (1)...(19): siRNA sense strand
gaugacuucuuccaguugu

SEQ ID NO: 956827 - RNA, 19 nt, Homo sapiens
  misc_RNA (1)...(19): siRNA sense strand
uucauuagcugcucagaug

SEQ ID NO: 956828 - RNA, 19 nt, Homo sapiens
  misc_RNA (1)...(19): siRNA sense strand
ccaccaaggccaaguacaa

SEQ ID NO: 956829 - RNA, 19 nt, Homo sapiens
  misc_RNA (1)...(19): siRNA sense strand
gacaggugccaucucauuu

SEQ ID NO: 956830 - RNA, 19 nt, Homo sapiens
  misc_RNA (1)...(19): siRNA sense strand
uguuaucgcugguccaaga

SEQ ID NO: 956831 - RNA, 19 nt, Homo sapiens
  misc_RNA (1)...(19): siRNA sense strand
gggacuauauuuccaucug

SEQ ID NO: 956832 - RNA, 19 nt, Homo sapiens
  misc_RNA (1)...(19): siRNA sense strand
ggcaaggacuacagcaauc

SEQ ID NO: 956833 - RNA, 19 nt, Homo sapiens
  misc_RNA (1)...(19): siRNA sense strand
cuauucugcuguuuaaaga

SEQ ID NO: 956834 - RNA, 19 nt, Homo sapiens
  misc_RNA (1)...(19): siRNA sense strand
ggagaauuaccucaacugu

SEQ ID NO: 956835 - RNA, 19 nt, Homo sapiens
  misc_RNA (1)...(19): siRNA sense strand
cagcagggacucuggagaa

SEQ ID NO: 956836 - RNA, 19 nt, Homo sapiens
  misc_RNA (1)...(19): siRNA sense strand
gagagcaacgccaauaucu

SEQ ID NO: 956837 - RNA, 19 nt, Homo sapiens
  misc_RNA (1)...(19): siRNA sense strand
guacaugugccucgagaca

SEQ ID NO: 956838 - RNA, 19 nt, Homo sapiens
  misc_RNA (1)...(19): siRNA sense strand
gaccggacagucaucauug

SEQ ID NO: 956839 - RNA, 19 nt, Homo sapiens
  misc_RNA (1)...(19): siRNA sense strand
ccauucugcacuuuacuua

SEQ ID NO: 956840 - RNA, 19 nt, Homo sapiens
  misc_RNA (1)...(19): siRNA sense strand
gggcaaggacuacagcaau

SEQ ID NO: 956841 - RNA, 19 nt, Homo sapiens
  misc_RNA (1)...(19): siRNA sense strand
agaccucucucacaaccaa

SEQ ID NO: 956842 - RNA, 19 nt, Homo sapiens
  misc_RNA (1)...(19): siRNA sense strand
agacaggugccaucucauu

SEQ ID NO: 956843 - RNA, 19 nt, Homo sapiens
  misc_RNA (1)...(19): siRNA sense strand
gacacaaagucuugaugag

SEQ ID NO: 956844 - RNA, 19 nt, Homo sapiens
  misc_RNA (1)...(19): siRNA sense strand
caucauugguucugcaaac

SEQ ID NO: 956845 - RNA, 19 nt, Homo sapiens
  misc_RNA (1)...(19): siRNA sense strand
gaacaaggugggcgaugag

SEQ ID NO: 956846 - RNA, 19 nt, Homo sapiens
  misc_RNA (1)...(19): siRNA sense strand
aguacaagacucccauaua

SEQ ID NO: 956847 - RNA, 19 nt, Homo sapiens
  misc_RNA (1)...(19): siRNA sense strand
ggacuacagcaaucuuauc

SEQ ID NO: 956848 - RNA, 19 nt, Homo sapiens
  misc_RNA (1)...(19): siRNA sense strand
aacaguggcuauagcaaga

SEQ ID NO: 956849 - RNA, 19 nt, Homo sapiens
  misc_RNA (1)...(19): siRNA sense strand
gaauggggcagguuacuuu

SEQ ID NO: 956850 - RNA, 19 nt, Homo sapiens
  misc_RNA (1)...(19): siRNA sense strand
ggacuggaccuugccuaug

SEQ ID NO: 956851 - RNA, 19 nt, Homo sapiens
  misc_RNA (1)...(19): siRNA sense strand
gcucuuugacccuggcuuu

SEQ ID NO: 956852 - RNA, 19 nt, Homo sapiens
  misc_RNA (1)...(19): siRNA sense strand
ucccacagguccuugauuc

SEQ ID NO: 956853 - RNA, 19 nt, Homo sapiens
  misc_RNA (1)...(19): siRNA sense strand
caggugccaucucauuugu

SEQ ID NO: 956854 - RNA, 19 nt, Homo sapiens
  misc_RNA (1)...(19): siRNA sense strand
guucugcaaacaucaauga

SEQ ID NO: 956855 - RNA, 19 nt, Homo sapiens
  misc_RNA (1)...(19): siRNA sense strand
gacuacagcaaucuuauca

SEQ ID NO: 956856 - RNA, 19 nt, Homo sapiens
  misc_RNA (1)...(19): siRNA sense strand
cacagguccuugauucuca

SEQ ID NO: 956857 - RNA, 19 nt, Homo sapiens
  misc_RNA (1)...(19): siRNA sense strand
caaguacaagacucccaua

SEQ ID NO: 956858 - RNA, 19 nt, Homo sapiens
  misc_RNA (1)...(19): siRNA sense strand
ccuagaggaugagucuuug

SEQ ID NO: 956859 - RNA, 19 nt, Homo sapiens
  misc_RNA (1)...(19): siRNA sense strand
gagaugcaggcaacagaga

SEQ ID NO: 956860 - RNA, 19 nt, Homo sapiens
  misc_RNA (1)...(19): siRNA sense strand
aauccugcaucgccuuaaa

SEQ ID NO: 956861 - RNA, 19 nt, Homo sapiens
  misc_RNA (1)...(19): siRNA sense strand
cagaaauaccuggagaauu

SEQ ID NO: 956862 - RNA, 19 nt, Homo sapiens
  misc_RNA (1)...(19): siRNA sense strand
gcagccagcaaacagaaau

SEQ ID NO: 956863 - RNA, 19 nt, Homo sapiens
  misc_RNA (1)...(19): siRNA sense strand
cccuagaaguguggacaua

SEQ ID NO: 956864 - RNA, 19 nt, Homo sapiens
  misc_RNA (1)...(19): siRNA sense strand
cagcacuuccucuacauug

SEQ ID NO: 956865 - RNA, 19 nt, Homo sapiens
  misc_RNA (1)...(19): siRNA sense strand
gcaccaccguacaggucuu

SEQ ID NO: 956866 - RNA, 19 nt, Homo sapiens
  misc_RNA (1)...(19): siRNA sense strand
gaccggccuuucgaagauu

SEQ ID NO: 956867 - RNA, 19 nt, Homo sapiens
  misc_RNA (1)...(19): siRNA sense strand
guuuaaagaaguggaauug

SEQ ID NO: 956868 - RNA, 19 nt, Homo sapiens
  misc_RNA (1)...(19): siRNA sense strand
gugguugaguccugagguu

SEQ ID NO: 956869 - RNA, 19 nt, Homo sapiens
  misc_RNA (1)...(19): siRNA sense strand
gucagucagcuguccuuua

SEQ ID NO: 956870 - RNA, 19 nt, Homo sapiens
  misc_RNA (1)...(19): siRNA sense strand
caacgccaauaucuaugag

SEQ ID NO: 956871 - RNA, 19 nt, Homo sapiens
  misc_RNA (1)...(19): siRNA sense strand
acggaaccaucccucauga

SEQ ID NO: 956872 - RNA, 19 nt, Homo sapiens
  misc_RNA (1)...(19): siRNA sense strand
gacggaaccaucccucaug

SEQ ID NO: 956873 - RNA, 19 nt, Homo sapiens
  misc_RNA (1)...(19): siRNA sense strand
aaucaguucuucauuagcu

SEQ ID NO: 956874 - RNA, 19 nt, Homo sapiens
  misc_RNA (1)...(19): siRNA sense strand
gagaacuccauccucaaug

SEQ ID NO: 956875 - RNA, 19 nt, Homo sapiens
  misc_RNA (1)...(19): siRNA sense strand
caucaacaguggcuauagc

SEQ ID NO: 956876 - RNA, 19 nt, Homo sapiens
  misc_RNA (1)...(19): siRNA sense strand
ggaaccugcacucuguauu

SEQ ID NO: 956877 - RNA, 19 nt, Homo sapiens
  misc_RNA (1)...(19): siRNA sense strand
cgcuggaacuucaccaaga

SEQ ID NO: 956878 - RNA, 19 nt, Homo sapiens
  misc_RNA (1)...(19): siRNA sense strand
cagggacucuggagaacuc

SEQ ID NO: 956879 - RNA, 19 nt, Homo sapiens
  misc_RNA (1)...(19): siRNA sense strand
gagaccaaguuuguuaucg

SEQ ID NO: 956880 - RNA, 19 nt, Homo sapiens
  misc_RNA (1)...(19): siRNA sense strand
ucaucuacauccacagcaa

SEQ ID NO: 956881 - RNA, 19 nt, Homo sapiens
  misc_RNA (1)...(19): siRNA sense strand
ucaauccugcaucgccuua

SEQ ID NO: 956882 - RNA, 19 nt, Homo sapiens
  misc_RNA (1)...(19): siRNA sense strand
ccugcacucuguauucugu

SEQ ID NO: 956883 - RNA, 19 nt, Homo sapiens
  misc_RNA (1)...(19): siRNA sense strand
ccgacugacugaccuugga

SEQ ID NO: 956884 - RNA, 19 nt, Homo sapiens
  misc_RNA (1)...(19): siRNA sense strand
ggugggcgaugagauugug

SEQ ID NO: 956885 - RNA, 19 nt, Homo sapiens
  misc_RNA (1)...(19): siRNA sense strand
gggcaucaacaguggcuau

SEQ ID NO: 956886 - RNA, 19 nt, Homo sapiens
  misc_RNA (1)...(19): siRNA sense strand
gcacuuccucuacauugag

SEQ ID NO: 956887 - RNA, 19 nt, Homo sapiens
  misc_RNA (1)...(19): siRNA sense strand
gcuggaacuucaccaagac

SEQ ID NO: 956888 - RNA, 19 nt, Homo sapiens
  misc_RNA (1)...(19): siRNA sense strand
cagaccaagugacguugug

SEQ ID NO: 956889 - RNA, 19 nt, Homo sapiens
  misc_RNA (1)...(19): siRNA sense strand
gcaagagggcgcugaugcu

SEQ ID NO: 956890 - RNA, 19 nt, Homo sapiens
  misc_RNA (1)...(19): siRNA sense strand
gaugagauuguggacagaa

SEQ ID NO: 956891 - RNA, 19 nt, Homo sapiens
  misc_RNA (1)...(19): siRNA sense strand
auucugcacuuuacuuaca

SEQ ID NO: 956892 - RNA, 19 nt, Homo sapiens
  misc_RNA (1)...(19): siRNA sense strand
ccaggccauucugcacuuu

SEQ ID NO: 956893 - RNA, 19 nt, Homo sapiens
  misc_RNA (1)...(19): siRNA sense strand
ggauaaaguuguuggauua

SEQ ID NO: 956894 - RNA, 19 nt, Homo sapiens
  misc_RNA (1)...(19): siRNA sense strand
gaaagcagaucuuguuauu

SEQ ID NO: 956895 - RNA, 19 nt, Homo sapiens
  misc_RNA (1)...(19): siRNA sense strand
ggucaucucuucuauugua

SEQ ID NO: 956896 - RNA, 19 nt, Homo sapiens
  misc_RNA (1)...(19): siRNA sense strand
gaaagaagacauucagaaa

SEQ ID NO: 956897 - RNA, 19 nt, Homo sapiens
  misc_RNA (1)...(19): siRNA sense strand
caaagcagcuacacaaaga

SEQ ID NO: 956898 - RNA, 19 nt, Homo sapiens
  misc_RNA (1)...(19): siRNA sense strand
cgacuuauccugcaaauug

SEQ ID NO: 956899 - RNA, 19 nt, Homo sapiens
  misc_RNA (1)...(19): siRNA sense strand
aagcagaucuuguuauuag

SEQ ID NO: 956900 - RNA, 19 nt, Homo sapiens
  misc_RNA (1)...(19): siRNA sense strand
ggacuuaucaacacugaaa

SEQ ID NO: 956901 - RNA, 19 nt, Homo sapiens
  misc_RNA (1)...(19): siRNA sense strand
gaacaaucaucagcuggaa

SEQ ID NO: 956902 - RNA, 19 nt, Homo sapiens
  misc_RNA (1)...(19): siRNA sense strand
ucagaaagcagaucuuguu

SEQ ID NO: 956903 - RNA, 19 nt, Homo sapiens
  misc_RNA (1)...(19): siRNA sense strand
cguuuacucuggauguuua

SEQ ID NO: 956904 - RNA, 19 nt, Homo sapiens
  misc_RNA (1)...(19): siRNA sense strand
gcaaagcagcuacacaaag

SEQ ID NO: 956905 - RNA, 19 nt, Homo sapiens
  misc_RNA (1)...(19): siRNA sense strand
uggauaaaguuguuggauu

SEQ ID NO: 956906 - RNA, 19 nt, Homo sapiens
  misc_RNA (1)...(19): siRNA sense strand
cagaaagcagaucuuguua

SEQ ID NO: 956907 - RNA, 19 nt, Homo sapiens
  misc_RNA (1)...(19): siRNA sense strand
agggucaucucuucuauug

SEQ ID NO: 956908 - RNA, 19 nt, Homo sapiens
  misc_RNA (1)...(19): siRNA sense strand
ucaauggacuuaucaacac

SEQ ID NO: 956909 - RNA, 19 nt, Homo sapiens
  misc_RNA (1)...(19): siRNA sense strand
aagaagacauucagaaagc

SEQ ID NO: 956910 - RNA, 19 nt, Homo sapiens
  misc_RNA (1)...(19): siRNA sense strand
gaagcuguuuggagacucu

SEQ ID NO: 956911 - RNA, 19 nt, Homo sapiens
  misc_RNA (1)...(19): siRNA sense strand
caaccgacuuauccugcaa

SEQ ID NO: 956912 - RNA, 19 nt, Homo sapiens
  misc_RNA (1)...(19): siRNA sense strand
guagggaccaccagcuuug

SEQ ID NO: 956913 - RNA, 19 nt, Homo sapiens
  misc_RNA (1)...(19): siRNA sense strand
guuuacagguacaaggauu

SEQ ID NO: 956914 - RNA, 19 nt, Homo sapiens
  misc_RNA (1)...(19): siRNA sense strand
aaaucgagagccuugguua

SEQ ID NO: 956915 - RNA, 19 nt, Homo sapiens
  misc_RNA (1)...(19): siRNA sense strand
cguagugguuauaaacgaa

SEQ ID NO: 956916 - RNA, 19 nt, Homo sapiens
  misc_RNA (1)...(19): siRNA sense strand
uggcaaagcagcuacacaa

SEQ ID NO: 956917 - RNA, 19 nt, Homo sapiens
  misc_RNA (1)...(19): siRNA sense strand
gcagaucuuguuauuaguc

SEQ ID NO: 956918 - RNA, 19 nt, Homo sapiens
  misc_RNA (1)...(19): siRNA sense strand
aaagaagacauucagaaag

SEQ ID NO: 956919 - RNA, 19 nt, Homo sapiens
  misc_RNA (1)...(19): siRNA sense strand
cagaucuuguuauuaguca

SEQ ID NO: 956920 - RNA, 19 nt, Homo sapiens
  misc_RNA (1)...(19): siRNA sense strand
ggcaaagcagcuacacaaa

SEQ ID NO: 956921 - RNA, 19 nt, Homo sapiens
  misc_RNA (1)...(19): siRNA sense strand
cagcuuugacgaccucauu

SEQ ID NO: 956922 - RNA, 19 nt, Homo sapiens
  misc_RNA (1)...(19): siRNA sense strand
ggaacuggcaaagcagcua

SEQ ID NO: 956923 - RNA, 19 nt, Homo sapiens
  misc_RNA (1)...(19): siRNA sense strand
ucgagagccuugguuacaa

SEQ ID NO: 956924 - RNA, 19 nt, Homo sapiens
  misc_RNA (1)...(19): siRNA sense strand
gucaauggacuuaucaaca

SEQ ID NO: 956925 - RNA, 19 nt, Homo sapiens
  misc_RNA (1)...(19): siRNA sense strand
agaaagcagaucuuguuau

SEQ ID NO: 956926 - RNA, 19 nt, Homo sapiens
  misc_RNA (1)...(19): siRNA sense strand
cgagagccuugguuacaac

SEQ ID NO: 956927 - RNA, 19 nt, Homo sapiens
  misc_RNA (1)...(19): siRNA sense strand
gagggucaucucuucuauu

SEQ ID NO: 956928 - RNA, 19 nt, Homo sapiens
  misc_RNA (1)...(19): siRNA sense strand
gacuuauccugcaaauugg

SEQ ID NO: 956929 - RNA, 19 nt, Homo sapiens
  misc_RNA (1)...(19): siRNA sense strand
guagugguuauaaacgaaa

SEQ ID NO: 956930 - RNA, 19 nt, Homo sapiens
  misc_RNA (1)...(19): siRNA sense strand
caauggacuuaucaacacu

SEQ ID NO: 956931 - RNA, 19 nt, Homo sapiens
  misc_RNA (1)...(19): siRNA sense strand
cucuggauguuuacaggua

SEQ ID NO: 956932 - RNA, 19 nt, Homo sapiens
  misc_RNA (1)...(19): siRNA sense strand
gcaggugcaggaagcuguu

SEQ ID NO: 956933 - RNA, 19 nt, Homo sapiens
  misc_RNA (1)...(19): siRNA sense strand
acgaaaaguugaugaacaa

SEQ ID NO: 956934 - RNA, 19 nt, Homo sapiens
  misc_RNA (1)...(19): siRNA sense strand
acacaaagagggucaucuc

SEQ ID NO: 956935 - RNA, 19 nt, Homo sapiens
  misc_RNA (1)...(19): siRNA sense strand
cguagggaccaccagcuuu

SEQ ID NO: 956936 - RNA, 19 nt, Homo sapiens
  misc_RNA (1)...(19): siRNA sense strand
cacgcuuccugggcuguua

SEQ ID NO: 956937 - RNA, 19 nt, Homo sapiens
  misc_RNA (1)...(19): siRNA sense strand
gguuauaaacgaaaaguug

SEQ ID NO: 956938 - RNA, 19 nt, Homo sapiens
  misc_RNA (1)...(19): siRNA sense strand
caacugaaguggacauuaa

SEQ ID NO: 956939 - RNA, 19 nt, Homo sapiens
  misc_RNA (1)...(19): siRNA sense strand
ggaaaucucucacguccaa

SEQ ID NO: 956940 - RNA, 19 nt, Homo sapiens
  misc_RNA (1)...(19): siRNA sense strand
gaaguacccucaagaguuc

SEQ ID NO: 956941 - RNA, 19 nt, Homo sapiens
  misc_RNA (1)...(19): siRNA sense strand
ggaagucugucuaugguuu

SEQ ID NO: 956942 - RNA, 19 nt, Homo sapiens
  misc_RNA (1)...(19): siRNA sense strand
ggaaauauggcaagaguuu

SEQ ID NO: 956943 - RNA, 19 nt, Homo sapiens
  misc_RNA (1)...(19): siRNA sense strand
gaaggaaccuggacgauac

SEQ ID NO: 956944 - RNA, 19 nt, Homo sapiens
  misc_RNA (1)...(19): siRNA sense strand
gagacaagauugaaaggaa

SEQ ID NO: 956945 - RNA, 19 nt, Homo sapiens
  misc_RNA (1)...(19): siRNA sense strand
gcaaauacaguuagauaga

SEQ ID NO: 956946 - RNA, 19 nt, Homo sapiens
  misc_RNA (1)...(19): siRNA sense strand
gaagaugaguuacaacaac

SEQ ID NO: 956947 - RNA, 19 nt, Homo sapiens
  misc_RNA (1)...(19): siRNA sense strand
aaagaggccuauuaaagaa

SEQ ID NO: 956948 - RNA, 19 nt, Homo sapiens
  misc_RNA (1)...(19): siRNA sense strand
gaauacgacccguuucuuu

SEQ ID NO: 956949 - RNA, 19 nt, Homo sapiens
  misc_RNA (1)...(19): siRNA sense strand
gagcacauuuacaaacuga

SEQ ID NO: 956950 - RNA, 19 nt, Homo sapiens
  misc_RNA (1)...(19): siRNA sense strand
gacuggagcucgcagacua

SEQ ID NO: 956951 - RNA, 19 nt, Homo sapiens
  misc_RNA (1)...(19): siRNA sense strand
gaagagagacaagauugaa

SEQ ID NO: 956952 - RNA, 19 nt, Homo sapiens
  misc_RNA (1)...(19): siRNA sense strand
gaucauguccucacacuca

SEQ ID NO: 956953 - RNA, 19 nt, Homo sapiens
  misc_RNA (1)...(19): siRNA sense strand
aaacuaaaccuccaacaga

SEQ ID NO: 956954 - RNA, 19 nt, Homo sapiens
  misc_RNA (1)...(19): siRNA sense strand
uaaguuacacggaacagua

SEQ ID NO: 956955 - RNA, 19 nt, Homo sapiens
  misc_RNA (1)...(19): siRNA sense strand
aaagauggaagacgucaua

SEQ ID NO: 956956 - RNA, 19 nt, Homo sapiens
  misc_RNA (1)...(19): siRNA sense strand
uagcacggaugcaagauga

SEQ ID NO: 956957 - RNA, 19 nt, Homo sapiens
  misc_RNA (1)...(19): siRNA sense strand
gugccuggauguguaaaua

SEQ ID NO: 956958 - RNA, 19 nt, Homo sapiens
  misc_RNA (1)...(19): siRNA sense strand
gaagucugucuaugguuua

SEQ ID NO: 956959 - RNA, 19 nt, Homo sapiens
  misc_RNA (1)...(19): siRNA sense strand
caacagaagaugaguuaca

SEQ ID NO: 956960 - RNA, 19 nt, Homo sapiens
  misc_RNA (1)...(19): siRNA sense strand
gaaguggacauuaagaagu

SEQ ID NO: 956961 - RNA, 19 nt, Homo sapiens
  misc_RNA (1)...(19): siRNA sense strand
cucaagaguucaggaaaua

SEQ ID NO: 956962 - RNA, 19 nt, Homo sapiens
  misc_RNA (1)...(19): siRNA sense strand
gcccgugccuggaugugua

SEQ ID NO: 956963 - RNA, 19 nt, Homo sapiens
  misc_RNA (1)...(19): siRNA sense strand
caggaaauauggcaagagu

SEQ ID NO: 956964 - RNA, 19 nt, Homo sapiens
  misc_RNA (1)...(19): siRNA sense strand
ugaguuacaacaacagaua

SEQ ID NO: 956965 - RNA, 19 nt, Homo sapiens
  misc_RNA (1)...(19): siRNA sense strand
caagaagagagacaagauu

SEQ ID NO: 956966 - RNA, 19 nt, Homo sapiens
  misc_RNA (1)...(19): siRNA sense strand
ugaaggaaccuggacgaua

SEQ ID NO: 956967 - RNA, 19 nt, Homo sapiens
  misc_RNA (1)...(19): siRNA sense strand
agaaguacccucaagaguu

SEQ ID NO: 956968 - RNA, 19 nt, Homo sapiens
  misc_RNA (1)...(19): siRNA sense strand
cugacagucuacuaaguua

SEQ ID NO: 956969 - RNA, 19 nt, Homo sapiens
  misc_RNA (1)...(19): siRNA sense strand
acacagauuaugccguuua

SEQ ID NO: 956970 - RNA, 19 nt, Homo sapiens
  misc_RNA (1)...(19): siRNA sense strand
uaagaagucauccagaaug

SEQ ID NO: 956971 - RNA, 19 nt, Homo sapiens
  misc_RNA (1)...(19): siRNA sense strand
uaaagaaguacccucaaga

SEQ ID NO: 956972 - RNA, 19 nt, Homo sapiens
  misc_RNA (1)...(19): siRNA sense strand
uggcaaauacaguuagaua

SEQ ID NO: 956973 - RNA, 19 nt, Homo sapiens
  misc_RNA (1)...(19): siRNA sense strand
gaaacuaaaccuccaacag

SEQ ID NO: 956974 - RNA, 19 nt, Homo sapiens
  misc_RNA (1)...(19): siRNA sense strand
gcacggaugcaagaugaaa

SEQ ID NO: 956975 - RNA, 19 nt, Homo sapiens
  misc_RNA (1)...(19): siRNA sense strand
ccagugcuauuaacuugga

SEQ ID NO: 956976 - RNA, 19 nt, Homo sapiens
  misc_RNA (1)...(19): siRNA sense strand
ccucaagaguucaggaaau

SEQ ID NO: 956977 - RNA, 19 nt, Homo sapiens
  misc_RNA (1)...(19): siRNA sense strand
acccauggcuguccgauga

SEQ ID NO: 956978 - RNA, 19 nt, Homo sapiens
  misc_RNA (1)...(19): siRNA sense strand
gauggaagacgucauagca

SEQ ID NO: 956979 - RNA, 19 nt, Homo sapiens
  misc_RNA (1)...(19): siRNA sense strand
uuagauagacaucgguuaa

SEQ ID NO: 956980 - RNA, 19 nt, Homo sapiens
  misc_RNA (1)...(19): siRNA sense strand
gcacauuuacaaacugaug

SEQ ID NO: 956981 - RNA, 19 nt, Homo sapiens
  misc_RNA (1)...(19): siRNA sense strand
gcugacagucuacuaaguu

SEQ ID NO: 956982 - RNA, 19 nt, Homo sapiens
  misc_RNA (1)...(19): siRNA sense strand
auuaagaagucauccagaa

SEQ ID NO: 956983 - RNA, 19 nt, Homo sapiens
  misc_RNA (1)...(19): siRNA sense strand
uauaagauccagugccuau

SEQ ID NO: 956984 - RNA, 19 nt, Homo sapiens
  misc_RNA (1)...(19): siRNA sense strand
gaaccuggacgauacacau

SEQ ID NO: 956985 - RNA, 19 nt, Homo sapiens
  misc_RNA (1)...(19): siRNA sense strand
uuaaagaaguacccucaag

SEQ ID NO: 956986 - RNA, 19 nt, Homo sapiens
  misc_RNA (1)...(19): siRNA sense strand
acacggaacaguauuuaga

SEQ ID NO: 956987 - RNA, 19 nt, Homo sapiens
  misc_RNA (1)...(19): siRNA sense strand
caaauacaguuagauagac

SEQ ID NO: 956988 - RNA, 19 nt, Homo sapiens
  misc_RNA (1)...(19): siRNA sense strand
cuacuucuuuccaaucuca

SEQ ID NO: 956989 - RNA, 19 nt, Homo sapiens
  misc_RNA (1)...(19): siRNA sense strand
aaaagucgcugacagucua

SEQ ID NO: 956990 - RNA, 19 nt, Homo sapiens
  misc_RNA (1)...(19): siRNA sense strand
aacuaaaccuccaacagaa

SEQ ID NO: 956991 - RNA, 19 nt, Homo sapiens
  misc_RNA (1)...(19): siRNA sense strand
ccacacacccacaccagaa

SEQ ID NO: 956992 - RNA, 19 nt, Homo sapiens
  misc_RNA (1)...(19): siRNA sense strand
gcaagcagaagcacaagca

SEQ ID NO: 956993 - RNA, 19 nt, Homo sapiens
  misc_RNA (1)...(19): siRNA sense strand
uccaacagaagaugaguua

SEQ ID NO: 956994 - RNA, 19 nt, Homo sapiens
  misc_RNA (1)...(19): siRNA sense strand
ggagcacauuuacaaacug

SEQ ID NO: 956995 - RNA, 19 nt, Homo sapiens
  misc_RNA (1)...(19): siRNA sense strand
caagaguucaggaaauaug

SEQ ID NO: 956996 - RNA, 19 nt, Homo sapiens
  misc_RNA (1)...(19): siRNA sense strand
gacgauacacauuugaaga

SEQ ID NO: 956997 - RNA, 19 nt, Homo sapiens
  misc_RNA (1)...(19): siRNA sense strand
gcccacggcuacuucuuuc

SEQ ID NO: 956998 - RNA, 19 nt, Homo sapiens
  misc_RNA (1)...(19): siRNA sense strand
uaagauccagugccuauca

SEQ ID NO: 956999 - RNA, 19 nt, Homo sapiens
  misc_RNA (1)...(19): siRNA sense strand
cgauacacauuugaagaug

SEQ ID NO: 957000 - RNA, 19 nt, Homo sapiens
  misc_RNA (1)...(19): siRNA sense strand
aaaagaggccuauuaaaga

SEQ ID NO: 957001 - RNA, 19 nt, Homo sapiens
  misc_RNA (1)...(19): siRNA sense strand
ggaagugggaguucauuuu

SEQ ID NO: 957002 - RNA, 19 nt, Homo sapiens
  misc_RNA (1)...(19): siRNA sense strand
ccacacauaacgugaagga

SEQ ID NO: 957003 - RNA, 19 nt, Homo sapiens
  misc_RNA (1)...(19): siRNA sense strand
ccuuaaauuucuagaguca

SEQ ID NO: 957004 - RNA, 19 nt, Homo sapiens
  misc_RNA (1)...(19): siRNA sense strand
gaguuacaacaacagauaa

SEQ ID NO: 957005 - RNA, 19 nt, Homo sapiens
  misc_RNA (1)...(19): siRNA sense strand
aacagaagaugaguuacaa

SEQ ID NO: 957006 - RNA, 19 nt, Homo sapiens
  misc_RNA (1)...(19): siRNA sense strand
ccuagcgucuucucugguu

SEQ ID NO: 957007 - RNA, 19 nt, Homo sapiens
  misc_RNA (1)...(19): siRNA sense strand
aagaagagagacaagauug

SEQ ID NO: 957008 - RNA, 19 nt, Homo sapiens
  misc_RNA (1)...(19): siRNA sense strand
ucacaguccuacccacaca

SEQ ID NO: 957009 - RNA, 19 nt, Homo sapiens
  misc_RNA (1)...(19): siRNA sense strand
ggacgauacacauuugaag

SEQ ID NO: 957010 - RNA, 19 nt, Homo sapiens
  misc_RNA (1)...(19): siRNA sense strand
ccuggacgauacacauuug

SEQ ID NO: 957011 - RNA, 19 nt, Homo sapiens
  misc_RNA (1)...(19): siRNA sense strand
uuacacggaacaguauuua

SEQ ID NO: 957012 - RNA, 19 nt, Homo sapiens
  misc_RNA (1)...(19): siRNA sense strand
ccaacaugcugguguacag

SEQ ID NO: 957013 - RNA, 19 nt, Homo sapiens
  misc_RNA (1)...(19): siRNA sense strand
uuccaagaguuaugacaaa

SEQ ID NO: 957014 - RNA, 19 nt, Homo sapiens
  misc_RNA (1)...(19): siRNA sense strand
aagaugaguuacaacaaca

SEQ ID NO: 957015 - RNA, 19 nt, Homo sapiens
  misc_RNA (1)...(19): siRNA sense strand
cagaagaugaguuacaaca

SEQ ID NO: 957016 - RNA, 19 nt, Homo sapiens
  misc_RNA (1)...(19): siRNA sense strand
aagcaaaaguggacaagaa

SEQ ID NO: 957017 - RNA, 19 nt, Homo sapiens
  misc_RNA (1)...(19): siRNA sense strand
gcauugaaagacccaguug

SEQ ID NO: 957018 - RNA, 19 nt, Homo sapiens
  misc_RNA (1)...(19): siRNA sense strand
ggacaagaagagagacaag

SEQ ID NO: 957019 - RNA, 19 nt, Homo sapiens
  misc_RNA (1)...(19): siRNA sense strand
gcauggacgaggcauugaa

SEQ ID NO: 957020 - RNA, 19 nt, Homo sapiens
  misc_RNA (1)...(19): siRNA sense strand
gccgaugaaucacccaaca

SEQ ID NO: 957021 - RNA, 19 nt, Homo sapiens
  misc_RNA (1)...(19): siRNA sense strand
acacggaagucugucuaug

SEQ ID NO: 957022 - RNA, 19 nt, Homo sapiens
  misc_RNA (1)...(19): siRNA sense strand
gacaagaagagagacaaga

SEQ ID NO: 957023 - RNA, 19 nt, Homo sapiens
  misc_RNA (1)...(19): siRNA sense strand
cgaugaaucacccaacaug

SEQ ID NO: 957024 - RNA, 19 nt, Homo sapiens
  misc_RNA (1)...(19): siRNA sense strand
gacaagauugaaaggaaga

SEQ ID NO: 957025 - RNA, 19 nt, Homo sapiens
  misc_RNA (1)...(19): siRNA sense strand
aaacacggaagucugucua

SEQ ID NO: 957026 - RNA, 19 nt, Homo sapiens
  misc_RNA (1)...(19): siRNA sense strand
cuaaaccuccaacagaaga

SEQ ID NO: 957027 - RNA, 19 nt, Homo sapiens
  misc_RNA (1)...(19): siRNA sense strand
ggacgaggcauugaaagac

SEQ ID NO: 957028 - RNA, 19 nt, Homo sapiens
  misc_RNA (1)...(19): siRNA sense strand
gacagucuacuaaguuaca

SEQ ID NO: 957029 - RNA, 19 nt, Homo sapiens
  misc_RNA (1)...(19): siRNA sense strand
agaagagagacaagauuga

SEQ ID NO: 957030 - RNA, 19 nt, Homo sapiens
  misc_RNA (1)...(19): siRNA sense strand
guuacacggaacaguauuu

SEQ ID NO: 957031 - RNA, 19 nt, Homo sapiens
  misc_RNA (1)...(19): siRNA sense strand
acaagaagagagacaagau

SEQ ID NO: 957032 - RNA, 19 nt, Homo sapiens
  misc_RNA (1)...(19): siRNA sense strand
cagaucauguccucacacu

SEQ ID NO: 957033 - RNA, 19 nt, Homo sapiens
  misc_RNA (1)...(19): siRNA sense strand
cauggacgaggcauugaaa

SEQ ID NO: 957034 - RNA, 19 nt, Homo sapiens
  misc_RNA (1)...(19): siRNA sense strand
gaugaguuacaacaacaga

SEQ ID NO: 957035 - RNA, 19 nt, Homo sapiens
  misc_RNA (1)...(19): siRNA sense strand
guuagauagacaucgguua

SEQ ID NO: 957036 - RNA, 19 nt, Homo sapiens
  misc_RNA (1)...(19): siRNA sense strand
cucaauggaucgcagaaca

SEQ ID NO: 957037 - RNA, 19 nt, Homo sapiens
  misc_RNA (1)...(19): siRNA sense strand
ggcaguggaggaccugaaa

SEQ ID NO: 957038 - RNA, 19 nt, Homo sapiens
  misc_RNA (1)...(19): siRNA sense strand
gaagaaagguugauggaaa

SEQ ID NO: 957039 - RNA, 19 nt, Homo sapiens
  misc_RNA (1)...(19): siRNA sense strand
gaaugaaacuccaaagaaa

SEQ ID NO: 957040 - RNA, 19 nt, Homo sapiens
  misc_RNA (1)...(19): siRNA sense strand
gaucagaauuucaacaaga

SEQ ID NO: 957041 - RNA, 19 nt, Homo sapiens
  misc_RNA (1)...(19): siRNA sense strand
aaagguugauggaaaguua

SEQ ID NO: 957042 - RNA, 19 nt, Homo sapiens
  misc_RNA (1)...(19): siRNA sense strand
uaaauccucugcaacaauu

SEQ ID NO: 957043 - RNA, 19 nt, Homo sapiens
  misc_RNA (1)...(19): siRNA sense strand
gagcaaaacuaacacaauu

SEQ ID NO: 957044 - RNA, 19 nt, Homo sapiens
  misc_RNA (1)...(19): siRNA sense strand
ggaaacagagccauaaauc

SEQ ID NO: 957045 - RNA, 19 nt, Homo sapiens
  misc_RNA (1)...(19): siRNA sense strand
ugucaguacuguaacauaa

SEQ ID NO: 957046 - RNA, 19 nt, Homo sapiens
  misc_RNA (1)...(19): siRNA sense strand
gauugcacauccuauugua

SEQ ID NO: 957047 - RNA, 19 nt, Homo sapiens
  misc_RNA (1)...(19): siRNA sense strand
caaucuaaguccagaagaa

SEQ ID NO: 957048 - RNA, 19 nt, Homo sapiens
  misc_RNA (1)...(19): siRNA sense strand
gaucuucacauucaaauuc

SEQ ID NO: 957049 - RNA, 19 nt, Homo sapiens
  misc_RNA (1)...(19): siRNA sense strand
ugucagcguugcacaaauu

SEQ ID NO: 957050 - RNA, 19 nt, Homo sapiens
  misc_RNA (1)...(19): siRNA sense strand
gaaucuaagccaucuaaug

SEQ ID NO: 957051 - RNA, 19 nt, Homo sapiens
  misc_RNA (1)...(19): siRNA sense strand
gaaggaggaaggaagaaga

SEQ ID NO: 957052 - RNA, 19 nt, Homo sapiens
  misc_RNA (1)...(19): siRNA sense strand
ccaaguguacccagcguua

SEQ ID NO: 957053 - RNA, 19 nt, Homo sapiens
  misc_RNA (1)...(19): siRNA sense strand
guacccagcguuauccuuu

SEQ ID NO: 957054 - RNA, 19 nt, Homo sapiens
  misc_RNA (1)...(19): siRNA sense strand
agaaugaaacuccaaagaa

SEQ ID NO: 957055 - RNA, 19 nt, Homo sapiens
  misc_RNA (1)...(19): siRNA sense strand
gaacagugcaaacagcaau

SEQ ID NO: 957056 - RNA, 19 nt, Homo sapiens
  misc_RNA (1)...(19): siRNA sense strand
ccugggaucuucacauuca

SEQ ID NO: 957057 - RNA, 19 nt, Homo sapiens
  misc_RNA (1)...(19): siRNA sense strand
uguaagaagugugcucaaa

SEQ ID NO: 957058 - RNA, 19 nt, Homo sapiens
  misc_RNA (1)...(19): siRNA sense strand
guaacauaauugcagcauu

SEQ ID NO: 957059 - RNA, 19 nt, Homo sapiens
  misc_RNA (1)...(19): siRNA sense strand
ggaaggaagaagaaagguu

SEQ ID NO: 957060 - RNA, 19 nt, Homo sapiens
  misc_RNA (1)...(19): siRNA sense strand
gauggaaaguuauuaugcu

SEQ ID NO: 957061 - RNA, 19 nt, Homo sapiens
  misc_RNA (1)...(19): siRNA sense strand
gaagugugcucaaaaugug

SEQ ID NO: 957062 - RNA, 19 nt, Homo sapiens
  misc_RNA (1)...(19): siRNA sense strand
cauaaauccucugcaacaa

SEQ ID NO: 957063 - RNA, 19 nt, Homo sapiens
  misc_RNA (1)...(19): siRNA sense strand
gagaaagaccagcaucauc

SEQ ID NO: 957064 - RNA, 19 nt, Homo sapiens
  misc_RNA (1)...(19): siRNA sense strand
uaugcuggcucuguacuuu

SEQ ID NO: 957065 - RNA, 19 nt, Homo sapiens
  misc_RNA (1)...(19): siRNA sense strand
ccauaaauccucugcaaca

SEQ ID NO: 957066 - RNA, 19 nt, Homo sapiens
  misc_RNA (1)...(19): siRNA sense strand
ggaagaagaaagguugaug

SEQ ID NO: 957067 - RNA, 19 nt, Homo sapiens
  misc_RNA (1)...(19): siRNA sense strand
cagaaugaaacuccaaaga

SEQ ID NO: 957068 - RNA, 19 nt, Homo sapiens
  misc_RNA (1)...(19): siRNA sense strand
uuacugcagaucagaauuu

SEQ ID NO: 957069 - RNA, 19 nt, Homo sapiens
  misc_RNA (1)...(19): siRNA sense strand
caaauucaucuucuucauc

SEQ ID NO: 957070 - RNA, 19 nt, Homo sapiens
  misc_RNA (1)...(19): siRNA sense strand
uuauuaugcuggcucugua

SEQ ID NO: 957071 - RNA, 19 nt, Homo sapiens
  misc_RNA (1)...(19): siRNA sense strand
uaagaagugugcucaaaau

SEQ ID NO: 957072 - RNA, 19 nt, Homo sapiens
  misc_RNA (1)...(19): siRNA sense strand
caaggaaugucggauugca

SEQ ID NO: 957073 - RNA, 19 nt, Homo sapiens
  misc_RNA (1)...(19): siRNA sense strand
gaaagguugauggaaaguu

SEQ ID NO: 957074 - RNA, 19 nt, Homo sapiens
  misc_RNA (1)...(19): siRNA sense strand
aagaaagguugauggaaag

SEQ ID NO: 957075 - RNA, 19 nt, Homo sapiens
  misc_RNA (1)...(19): siRNA sense strand
cagaucagaauuucaacaa

SEQ ID NO: 957076 - RNA, 19 nt, Homo sapiens
  misc_RNA (1)...(19): siRNA sense strand
gagcagggacuguggaaac

SEQ ID NO: 957077 - RNA, 19 nt, Homo sapiens
  misc_RNA (1)...(19): siRNA sense strand
ugcaaggaaugucggauug

SEQ ID NO: 957078 - RNA, 19 nt, Homo sapiens
  misc_RNA (1)...(19): siRNA sense strand
gaccaccucagaccuguga

SEQ ID NO: 957079 - RNA, 19 nt, Homo sapiens
  misc_RNA (1)...(19): siRNA sense strand
gaaacagagccauaaaucc

SEQ ID NO: 957080 - RNA, 19 nt, Homo sapiens
  misc_RNA (1)...(19): siRNA sense strand
gaagacgaaagaacaaagg

SEQ ID NO: 957081 - RNA, 19 nt, Homo sapiens
  misc_RNA (1)...(19): siRNA sense strand
ggaggaaggaagaagaaag

SEQ ID NO: 957082 - RNA, 19 nt, Homo sapiens
  misc_RNA (1)...(19): siRNA sense strand
ucaucuucuucaucucuua

SEQ ID NO: 957083 - RNA, 19 nt, Homo sapiens
  misc_RNA (1)...(19): siRNA sense strand
uaauggagauagguguaug

SEQ ID NO: 957084 - RNA, 19 nt, Homo sapiens
  misc_RNA (1)...(19): siRNA sense strand
aaacagagccauaaauccu

SEQ ID NO: 957085 - RNA, 19 nt, Homo sapiens
  misc_RNA (1)...(19): siRNA sense strand
gaggaaggaagaagaaagg

SEQ ID NO: 957086 - RNA, 19 nt, Homo sapiens
  misc_RNA (1)...(19): siRNA sense strand
gcagaucagaauuucaaca

SEQ ID NO: 957087 - RNA, 19 nt, Homo sapiens
  misc_RNA (1)...(19): siRNA sense strand
uggaaucuaagccaucuaa

SEQ ID NO: 957088 - RNA, 19 nt, Homo sapiens
  misc_RNA (1)...(19): siRNA sense strand
agccugggaucuucacauu

SEQ ID NO: 957089 - RNA, 19 nt, Homo sapiens
  misc_RNA (1)...(19): siRNA sense strand
agccauaaauccucugcaa

SEQ ID NO: 957090 - RNA, 19 nt, Homo sapiens
  misc_RNA (1)...(19): siRNA sense strand
caacaagagagcaaaacua

SEQ ID NO: 957091 - RNA, 19 nt, Homo sapiens
  misc_RNA (1)...(19): siRNA sense strand
gaagaagagcagggacugu

SEQ ID NO: 957092 - RNA, 19 nt, Homo sapiens
  misc_RNA (1)...(19): siRNA sense strand
cacaaaaucagcaaucuaa

SEQ ID NO: 957093 - RNA, 19 nt, Homo sapiens
  misc_RNA (1)...(19): siRNA sense strand
caagagagcaaaacuaaca

SEQ ID NO: 957094 - RNA, 19 nt, Homo sapiens
  misc_RNA (1)...(19): siRNA sense strand
cagcaguagccaucacaaa

SEQ ID NO: 957095 - RNA, 19 nt, Homo sapiens
  misc_RNA (1)...(19): siRNA sense strand
gaaagaccagcaucaucca

SEQ ID NO: 957096 - RNA, 19 nt, Homo sapiens
  misc_RNA (1)...(19): siRNA sense strand
uugcacauccuauuguaaa

SEQ ID NO: 957097 - RNA, 19 nt, Homo sapiens
  misc_RNA (1)...(19): siRNA sense strand
caucaucaccaccaucauc

SEQ ID NO: 957098 - RNA, 19 nt, Homo sapiens
  misc_RNA (1)...(19): siRNA sense strand
uacagaagacgaaagaaca

SEQ ID NO: 957099 - RNA, 19 nt, Homo sapiens
  misc_RNA (1)...(19): siRNA sense strand
cugcagaucagaauuucaa

SEQ ID NO: 957100 - RNA, 19 nt, Homo sapiens
  misc_RNA (1)...(19): siRNA sense strand
guaagaagugugcucaaaa

SEQ ID NO: 957101 - RNA, 19 nt, Homo sapiens
  misc_RNA (1)...(19): siRNA sense strand
gcaaucuaaguccagaaga

SEQ ID NO: 957102 - RNA, 19 nt, Homo sapiens
  misc_RNA (1)...(19): siRNA sense strand
cgaaagaacaaaggaagag

SEQ ID NO: 957103 - RNA, 19 nt, Homo sapiens
  misc_RNA (1)...(19): siRNA sense strand
ggaaggaggaaggaagaag

SEQ ID NO: 957104 - RNA, 19 nt, Homo sapiens
  misc_RNA (1)...(19): siRNA sense strand
cagaagacgaaagaacaaa

SEQ ID NO: 957105 - RNA, 19 nt, Homo sapiens
  misc_RNA (1)...(19): siRNA sense strand
aagaagaaagguugaugga

SEQ ID NO: 957106 - RNA, 19 nt, Homo sapiens
  misc_RNA (1)...(19): siRNA sense strand
guggaaacagagccauaaa

SEQ ID NO: 957107 - RNA, 19 nt, Homo sapiens
  misc_RNA (1)...(19): siRNA sense strand
guacuuacugcagaucaga

SEQ ID NO: 957108 - RNA, 19 nt, Homo sapiens
  misc_RNA (1)...(19): siRNA sense strand
acagaagacgaaagaacaa

SEQ ID NO: 957109 - RNA, 19 nt, Homo sapiens
  misc_RNA (1)...(19): siRNA sense strand
aaauguacuuacugcagau

SEQ ID NO: 957110 - RNA, 19 nt, Homo sapiens
  misc_RNA (1)...(19): siRNA sense strand
caccaucgucacagcagua

SEQ ID NO: 957111 - RNA, 19 nt, Homo sapiens
  misc_RNA (1)...(19): siRNA sense strand
ggaucuucacauucaaauu

SEQ ID NO: 957112 - RNA, 19 nt, Homo sapiens
  misc_RNA (1)...(19): siRNA sense strand
agacgaaagaacaaaggaa

SEQ ID NO: 957113 - RNA, 19 nt, Homo sapiens
  misc_RNA (1)...(19): siRNA sense strand
ucaccaccaucaucaccau

SEQ ID NO: 957114 - RNA, 19 nt, Homo sapiens
  misc_RNA (1)...(19): siRNA sense strand
gcaguagccaucacaaaau

SEQ ID NO: 957115 - RNA, 19 nt, Homo sapiens
  misc_RNA (1)...(19): siRNA sense strand
ucuaauggagauaggugua

SEQ ID NO: 957116 - RNA, 19 nt, Homo sapiens
  misc_RNA (1)...(19): siRNA sense strand
ugagaaagaccagcaucau

SEQ ID NO: 957117 - RNA, 19 nt, Homo sapiens
  misc_RNA (1)...(19): siRNA sense strand
cucaaaaugugaagcaauu

SEQ ID NO: 957118 - RNA, 19 nt, Homo sapiens
  misc_RNA (1)...(19): siRNA sense strand
gcagguagcucauauguuu

SEQ ID NO: 957119 - RNA, 19 nt, Homo sapiens
  misc_RNA (1)...(19): siRNA sense strand
gaagagagaauucaaacua

SEQ ID NO: 957120 - RNA, 19 nt, Homo sapiens
  misc_RNA (1)...(19): siRNA sense strand
ggaauucacuuacucagaa

SEQ ID NO: 957121 - RNA, 19 nt, Homo sapiens
  misc_RNA (1)...(19): siRNA sense strand
uaacagaggaauucacuua

SEQ ID NO: 957122 - RNA, 19 nt, Homo sapiens
  misc_RNA (1)...(19): siRNA sense strand
gcucauauguuuccugcaa

SEQ ID NO: 957123 - RNA, 19 nt, Homo sapiens
  misc_RNA (1)...(19): siRNA sense strand
ggaaguggcagcauucuga

SEQ ID NO: 957124 - RNA, 19 nt, Homo sapiens
  misc_RNA (1)...(19): siRNA sense strand
ccacagaagguuucguuua

SEQ ID NO: 957125 - RNA, 19 nt, Homo sapiens
  misc_RNA (1)...(19): siRNA sense strand
gagcaucugucuccaggaa

SEQ ID NO: 957126 - RNA, 19 nt, Homo sapiens
  misc_RNA (1)...(19): siRNA sense strand
acacagcacuuauaaauac

SEQ ID NO: 957127 - RNA, 19 nt, Homo sapiens
  misc_RNA (1)...(19): siRNA sense strand
gaaacagaauaugugagua

SEQ ID NO: 957128 - RNA, 19 nt, Homo sapiens
  misc_RNA (1)...(19): siRNA sense strand
agacaguuguggccuauaa

SEQ ID NO: 957129 - RNA, 19 nt, Homo sapiens
  misc_RNA (1)...(19): siRNA sense strand
ucaaacacagcacuuauaa

SEQ ID NO: 957130 - RNA, 19 nt, Homo sapiens
  misc_RNA (1)...(19): siRNA sense strand
auacgggccugaugaaauu

SEQ ID NO: 957131 - RNA, 19 nt, Homo sapiens
  misc_RNA (1)...(19): siRNA sense strand
gaucaggacccuugacuuc

SEQ ID NO: 957132 - RNA, 19 nt, Homo sapiens
  misc_RNA (1)...(19): siRNA sense strand
ggaaagauaagacaguugu

SEQ ID NO: 957133 - RNA, 19 nt, Homo sapiens
  misc_RNA (1)...(19): siRNA sense strand
gaagguuucguuuagguuu

SEQ ID NO: 957134 - RNA, 19 nt, Homo sapiens
  misc_RNA (1)...(19): siRNA sense strand
cagagaaccauacauacua

SEQ ID NO: 957135 - RNA, 19 nt, Homo sapiens
  misc_RNA (1)...(19): siRNA sense strand
cacagaagguuucguuuag

SEQ ID NO: 957136 - RNA, 19 nt, Homo sapiens
  misc_RNA (1)...(19): siRNA sense strand
gcuuugaacucagaccuuu

SEQ ID NO: 957137 - RNA, 19 nt, Homo sapiens
  misc_RNA (1)...(19): siRNA sense strand
gaaauguggugaaaagguu

SEQ ID NO: 957138 - RNA, 19 nt, Homo sapiens
  misc_RNA (1)...(19): siRNA sense strand
ucaccaagguagccuguau

SEQ ID NO: 957139 - RNA, 19 nt, Homo sapiens
  misc_RNA (1)...(19): siRNA sense strand
gcaaagcagcacauucaga

SEQ ID NO: 957140 - RNA, 19 nt, Homo sapiens
  misc_RNA (1)...(19): siRNA sense strand
ccaggaacguggucacuca

SEQ ID NO: 957141 - RNA, 19 nt, Homo sapiens
  misc_RNA (1)...(19): siRNA sense strand
cagaauaugugaguauaag

SEQ ID NO: 957142 - RNA, 19 nt, Homo sapiens
  misc_RNA (1)...(19): siRNA sense strand
gaaccauacauacuacaga

SEQ ID NO: 957143 - RNA, 19 nt, Homo sapiens
  misc_RNA (1)...(19): siRNA sense strand
gacaacacccugcuucugu

SEQ ID NO: 957144 - RNA, 19 nt, Homo sapiens
  misc_RNA (1)...(19): siRNA sense strand
ucacauggauaccgucucu

SEQ ID NO: 957145 - RNA, 19 nt, Homo sapiens
  misc_RNA (1)...(19): siRNA sense strand
gcaaggugaagauuuggaa

SEQ ID NO: 957146 - RNA, 19 nt, Homo sapiens
  misc_RNA (1)...(19): siRNA sense strand
caaagcaaacucaaacaca

SEQ ID NO: 957147 - RNA, 19 nt, Homo sapiens
  misc_RNA (1)...(19): siRNA sense strand
uaagacaguuguggccuau

SEQ ID NO: 957148 - RNA, 19 nt, Homo sapiens
  misc_RNA (1)...(19): siRNA sense strand
uaaauacgggccugaugaa

SEQ ID NO: 957149 - RNA, 19 nt, Homo sapiens
  misc_RNA (1)...(19): siRNA sense strand
gaccuaagacagacucgaa

SEQ ID NO: 957150 - RNA, 19 nt, Homo sapiens
  misc_RNA (1)...(19): siRNA sense strand
cgaaacagaauaugugagu

SEQ ID NO: 957151 - RNA, 19 nt, Homo sapiens
  misc_RNA (1)...(19): siRNA sense strand
caaacacagcacuuauaaa

SEQ ID NO: 957152 - RNA, 19 nt, Homo sapiens
  misc_RNA (1)...(19): siRNA sense strand
gcaggaaguggcagcauuc

SEQ ID NO: 957153 - RNA, 19 nt, Homo sapiens
  misc_RNA (1)...(19): siRNA sense strand
gacgccaucuccuuauugu

SEQ ID NO: 957154 - RNA, 19 nt, Homo sapiens
  misc_RNA (1)...(19): siRNA sense strand
caaccaaggcagcaauugu

SEQ ID NO: 957155 - RNA, 19 nt, Homo sapiens
  misc_RNA (1)...(19): siRNA sense strand
gagagaauucaaacuaaag

SEQ ID NO: 957156 - RNA, 19 nt, Homo sapiens
  misc_RNA (1)...(19): siRNA sense strand
aagacagacucgaaacaga

SEQ ID NO: 957157 - RNA, 19 nt, Homo sapiens
  misc_RNA (1)...(19): siRNA sense strand
caauggcuuuggaggagaa

SEQ ID NO: 957158 - RNA, 19 nt, Homo sapiens
  misc_RNA (1)...(19): siRNA sense strand
agauaaaacccucagauua

SEQ ID NO: 957159 - RNA, 19 nt, Homo sapiens
  misc_RNA (1)...(19): siRNA sense strand
cagaagguuucguuuaggu

SEQ ID NO: 957160 - RNA, 19 nt, Homo sapiens
  misc_RNA (1)...(19): siRNA sense strand
ggaaacagcaaagcaaacu

SEQ ID NO: 957161 - RNA, 19 nt, Homo sapiens
  misc_RNA (1)...(19): siRNA sense strand
gugacgccaucuccuuauu

SEQ ID NO: 957162 - RNA, 19 nt, Homo sapiens
  misc_RNA (1)...(19): siRNA sense strand
gauacuggagccugccuuu

SEQ ID NO: 957163 - RNA, 19 nt, Homo sapiens
  misc_RNA (1)...(19): siRNA sense strand
agacagacucgaaacagaa

SEQ ID NO: 957164 - RNA, 19 nt, Homo sapiens
  misc_RNA (1)...(19): siRNA sense strand
ggacaacacccugcuucug

SEQ ID NO: 957165 - RNA, 19 nt, Homo sapiens
  misc_RNA (1)...(19): siRNA sense strand
gaguauagcccagcucaca

SEQ ID NO: 957166 - RNA, 19 nt, Homo sapiens
  misc_RNA (1)...(19): siRNA sense strand
uagcccagcucacauggau

SEQ ID NO: 957167 - RNA, 19 nt, Homo sapiens
  misc_RNA (1)...(19): siRNA sense strand
cagaggaauucacuuacuc

SEQ ID NO: 957168 - RNA, 19 nt, Homo sapiens
  misc_RNA (1)...(19): siRNA sense strand
aaacagcaaagcaaacuca

SEQ ID NO: 957169 - RNA, 19 nt, Homo sapiens
  misc_RNA (1)...(19): siRNA sense strand
aacaugagaucaccaaggu

SEQ ID NO: 957170 - RNA, 19 nt, Homo sapiens
  misc_RNA (1)...(19): siRNA sense strand
gauugcaaggugaagauuu

SEQ ID NO: 957171 - RNA, 19 nt, Homo sapiens
  misc_RNA (1)...(19): siRNA sense strand
ggacagaguguggaaagag

SEQ ID NO: 957172 - RNA, 19 nt, Homo sapiens
  misc_RNA (1)...(19): siRNA sense strand
auaaauacgggccugauga

SEQ ID NO: 957173 - RNA, 19 nt, Homo sapiens
  misc_RNA (1)...(19): siRNA sense strand
uuuaauugcuaccucauca

SEQ ID NO: 957174 - RNA, 19 nt, Homo sapiens
  misc_RNA (1)...(19): siRNA sense strand
gguagccuguauucccaaa

SEQ ID NO: 957175 - RNA, 19 nt, Homo sapiens
  misc_RNA (1)...(19): siRNA sense strand
cuaaagcuuuucaagagua

SEQ ID NO: 957176 - RNA, 19 nt, Homo sapiens
  misc_RNA (1)...(19): siRNA sense strand
cagcaaagcaaacucaaac

SEQ ID NO: 957177 - RNA, 19 nt, Homo sapiens
  misc_RNA (1)...(19): siRNA sense strand
gccuugaugccuuuaauug

SEQ ID NO: 957178 - RNA, 19 nt, Homo sapiens
  misc_RNA (1)...(19): siRNA sense strand
aaacaagcuccuccacaga

SEQ ID NO: 957179 - RNA, 19 nt, Homo sapiens
  misc_RNA (1)...(19): siRNA sense strand
guuguggccuauaauugga

SEQ ID NO: 957180 - RNA, 19 nt, Homo sapiens
  misc_RNA (1)...(19): siRNA sense strand
ugucguggcugcuuugaac

SEQ ID NO: 957181 - RNA, 19 nt, Homo sapiens
  misc_RNA (1)...(19): siRNA sense strand
ccagagaaccauacauacu

SEQ ID NO: 957182 - RNA, 19 nt, Homo sapiens
  misc_RNA (1)...(19): siRNA sense strand
gacaggauggucaugaugu

SEQ ID NO: 957183 - RNA, 19 nt, Homo sapiens
  misc_RNA (1)...(19): siRNA sense strand
uagccuguauucccaaauc

SEQ ID NO: 957184 - RNA, 19 nt, Homo sapiens
  misc_RNA (1)...(19): siRNA sense strand
guauagcccagcucacaug

SEQ ID NO: 957185 - RNA, 19 nt, Homo sapiens
  misc_RNA (1)...(19): siRNA sense strand
ggcuggaacugcaggaagu

SEQ ID NO: 957186 - RNA, 19 nt, Homo sapiens
  misc_RNA (1)...(19): siRNA sense strand
gcaaagcaaacucaaacac

SEQ ID NO: 957187 - RNA, 19 nt, Homo sapiens
  misc_RNA (1)...(19): siRNA sense strand
cucaaacacagcacuuaua

SEQ ID NO: 957188 - RNA, 19 nt, Homo sapiens
  misc_RNA (1)...(19): siRNA sense strand
gaaagauaagacaguugug

SEQ ID NO: 957189 - RNA, 19 nt, Homo sapiens
  misc_RNA (1)...(19): siRNA sense strand
acagaggaauucacuuacu

SEQ ID NO: 957190 - RNA, 19 nt, Homo sapiens
  misc_RNA (1)...(19): siRNA sense strand
ugaagucaguguggaugga

SEQ ID NO: 957191 - RNA, 19 nt, Homo sapiens
  misc_RNA (1)...(19): siRNA sense strand
agagaaccauacauacuac

SEQ ID NO: 957192 - RNA, 19 nt, Homo sapiens
  misc_RNA (1)...(19): siRNA sense strand
ccaaauccagccaguucuu

SEQ ID NO: 957193 - RNA, 19 nt, Homo sapiens
  misc_RNA (1)...(19): siRNA sense strand
gagggaaagauaagacagu

SEQ ID NO: 957194 - RNA, 19 nt, Homo sapiens
  misc_RNA (1)...(19): siRNA sense strand
ugcaggaaguggcagcauu

SEQ ID NO: 957195 - RNA, 19 nt, Homo sapiens
  misc_RNA (1)...(19): siRNA sense strand
ucaggacccuugacuucuc

SEQ ID NO: 957196 - RNA, 19 nt, Homo sapiens
  misc_RNA (1)...(19): siRNA sense strand
gaagauaaaacccucagau

SEQ ID NO: 957197 - RNA, 19 nt, Homo sapiens
  misc_RNA (1)...(19): siRNA sense strand
auugcaaggugaagauuug

SEQ ID NO: 957198 - RNA, 19 nt, Homo sapiens
  misc_RNA (1)...(19): siRNA sense strand
gcacauucagaccuacugu

SEQ ID NO: 957199 - RNA, 19 nt, Homo sapiens
  misc_RNA (1)...(19): siRNA sense strand
agggaaagauaagacaguu

SEQ ID NO: 957200 - RNA, 19 nt, Homo sapiens
  misc_RNA (1)...(19): siRNA sense strand
cgggccugaugaaauuaua

SEQ ID NO: 957201 - RNA, 19 nt, Homo sapiens
  misc_RNA (1)...(19): siRNA sense strand
cauuggccuugaugccuuu

SEQ ID NO: 957202 - RNA, 19 nt, Homo sapiens
  misc_RNA (1)...(19): siRNA sense strand
cugcagcaauggcuuugga

SEQ ID NO: 957203 - RNA, 19 nt, Homo sapiens
  misc_RNA (1)...(19): siRNA sense strand
acauucagaccuacuguga

SEQ ID NO: 957204 - RNA, 19 nt, Homo sapiens
  misc_RNA (1)...(19): siRNA sense strand
ucauauguuuccugcaaag

SEQ ID NO: 957205 - RNA, 19 nt, Homo sapiens
  misc_RNA (1)...(19): siRNA sense strand
acaguuguggccuauaauu

SEQ ID NO: 957206 - RNA, 19 nt, Homo sapiens
  misc_RNA (1)...(19): siRNA sense strand
acaggauggucaugaugug

SEQ ID NO: 957207 - RNA, 19 nt, Homo sapiens
  misc_RNA (1)...(19): siRNA sense strand
cgccaucuccuuauugugu

SEQ ID NO: 957208 - RNA, 19 nt, Homo sapiens
  misc_RNA (1)...(19): siRNA sense strand
gggaaagauaagacaguug

SEQ ID NO: 957209 - RNA, 19 nt, Homo sapiens
  misc_RNA (1)...(19): siRNA sense strand
ugacgccaucuccuuauug

SEQ ID NO: 957210 - RNA, 19 nt, Homo sapiens
  misc_RNA (1)...(19): siRNA sense strand
caccuugucucuggaugga

SEQ ID NO: 957211 - RNA, 19 nt, Homo sapiens
  misc_RNA (1)...(19): siRNA sense strand
uugaugccuuuaauugcua

SEQ ID NO: 957212 - RNA, 19 nt, Homo sapiens
  misc_RNA (1)...(19): siRNA sense strand
gacagacucgaaacagaau

SEQ ID NO: 957213 - RNA, 19 nt, Homo sapiens
  misc_RNA (1)...(19): siRNA sense strand
ggcugcagguagcucauau

SEQ ID NO: 957214 - RNA, 19 nt, Homo sapiens
  misc_RNA (1)...(19): siRNA sense strand
aacaagcuccuccacagaa

SEQ ID NO: 957215 - RNA, 19 nt, Homo sapiens
  misc_RNA (1)...(19): siRNA sense strand
gggcugcagguagcucaua

SEQ ID NO: 957216 - RNA, 19 nt, Homo sapiens
  misc_RNA (1)...(19): siRNA sense strand
ggaucaggacccuugacuu

SEQ ID NO: 957217 - RNA, 19 nt, Homo sapiens
  misc_RNA (1)...(19): siRNA sense strand
gcugugaagccacguugug

SEQ ID NO: 957218 - RNA, 19 nt, Homo sapiens
  misc_RNA (1)...(19): siRNA sense strand
ggaacauccugaaguuuaa

SEQ ID NO: 957219 - RNA, 19 nt, Homo sapiens
  misc_RNA (1)...(19): siRNA sense strand
uaucaaggcugaaggagaa

SEQ ID NO: 957220 - RNA, 19 nt, Homo sapiens
  misc_RNA (1)...(19): siRNA sense strand
gaagagaaggugagaaguu

SEQ ID NO: 957221 - RNA, 19 nt, Homo sapiens
  misc_RNA (1)...(19): siRNA sense strand
ugacugacauggaagagaa

SEQ ID NO: 957222 - RNA, 19 nt, Homo sapiens
  misc_RNA (1)...(19): siRNA sense strand
aagagaaggugagaaguug

SEQ ID NO: 957223 - RNA, 19 nt, Homo sapiens
  misc_RNA (1)...(19): siRNA sense strand
gaucaugccaccaguguag

SEQ ID NO: 957224 - RNA, 19 nt, Homo sapiens
  misc_RNA (1)...(19): siRNA sense strand
ggugagaaguugugaaacg

SEQ ID NO: 957225 - RNA, 19 nt, Homo sapiens
  misc_RNA (1)...(19): siRNA sense strand
caaggacaccagcaacuga

SEQ ID NO: 957226 - RNA, 19 nt, Homo sapiens
  misc_RNA (1)...(19): siRNA sense strand
ccaccggcguugaguacuu

SEQ ID NO: 957227 - RNA, 19 nt, Homo sapiens
  misc_RNA (1)...(19): siRNA sense strand
uggaugccauucugacuga

SEQ ID NO: 957228 - RNA, 19 nt, Homo sapiens
  misc_RNA (1)...(19): siRNA sense strand
gguguugggcucuucauug

SEQ ID NO: 957229 - RNA, 19 nt, Homo sapiens
  misc_RNA (1)...(19): siRNA sense strand
ggacaccagcaacugaaga

SEQ ID NO: 957230 - RNA, 19 nt, Homo sapiens
  misc_RNA (1)...(19): siRNA sense strand
gcucuucauugguguggau

SEQ ID NO: 957231 - RNA, 19 nt, Homo sapiens
  misc_RNA (1)...(19): siRNA sense strand
gagaaggugagaaguugug

SEQ ID NO: 957232 - RNA, 19 nt, Homo sapiens
  misc_RNA (1)...(19): siRNA sense strand
cauucugacugacauggaa

SEQ ID NO: 957233 - RNA, 19 nt, Homo sapiens
  misc_RNA (1)...(19): siRNA sense strand
ugaaugucuuggagaagga

SEQ ID NO: 957234 - RNA, 19 nt, Homo sapiens
  misc_RNA (1)...(19): siRNA sense strand
guguugggcucuucauugg

SEQ ID NO: 957235 - RNA, 19 nt, Homo sapiens
  misc_RNA (1)...(19): siRNA sense strand
gaaggagaacuacguuuug

SEQ ID NO: 957236 - RNA, 19 nt, Homo sapiens
  misc_RNA (1)...(19): siRNA sense strand
gaaggugagaaguugugaa

SEQ ID NO: 957237 - RNA, 19 nt, Homo sapiens
  misc_RNA (1)...(19): siRNA sense strand
ucaaagaugaggccacaag

SEQ ID NO: 957238 - RNA, 19 nt, Homo sapiens
  misc_RNA (1)...(19): siRNA sense strand
aaggugagaaguugugaaa

SEQ ID NO: 957239 - RNA, 19 nt, Homo sapiens
  misc_RNA (1)...(19): siRNA sense strand
cacggcaggugguggcaaa

SEQ ID NO: 957240 - RNA, 19 nt, Homo sapiens
  misc_RNA (1)...(19): siRNA sense strand
aaagcuggaugccauucug

SEQ ID NO: 957241 - RNA, 19 nt, Homo sapiens
  misc_RNA (1)...(19): siRNA sense strand
aaagaugaggccacaagga

SEQ ID NO: 957242 - RNA, 19 nt, Homo sapiens
  misc_RNA (1)...(19): siRNA sense strand
gcaaagcuggaugccauuc

SEQ ID NO: 957243 - RNA, 19 nt, Homo sapiens
  misc_RNA (1)...(19): siRNA sense strand
gcugaaggagaacuacguu

SEQ ID NO: 957244 - RNA, 19 nt, Homo sapiens
  misc_RNA (1)...(19): siRNA sense strand
caaggcugaaggagaacua

SEQ ID NO: 957245 - RNA, 19 nt, Homo sapiens
  misc_RNA (1)...(19): siRNA sense strand
ggaucaugccaccagugua

SEQ ID NO: 957246 - RNA, 19 nt, Homo sapiens
  misc_RNA (1)...(19): siRNA sense strand
ugaaggagaacuacguuuu

SEQ ID NO: 957247 - RNA, 19 nt, Homo sapiens
  misc_RNA (1)...(19): siRNA sense strand
gaacauccugaaguuuaag

SEQ ID NO: 957248 - RNA, 19 nt, Homo sapiens
  misc_RNA (1)...(19): siRNA sense strand
gcuucagccuggacaaugc

SEQ ID NO: 957249 - RNA, 19 nt, Homo sapiens
  misc_RNA (1)...(19): siRNA sense strand
ggaagagaaggugagaagu

SEQ ID NO: 957250 - RNA, 19 nt, Homo sapiens
  misc_RNA (1)...(19): siRNA sense strand
uggaagagaaggugagaag

SEQ ID NO: 957251 - RNA, 19 nt, Homo sapiens
  misc_RNA (1)...(19): siRNA sense strand
ggaacauccugaaguuuaa

SEQ ID NO: 957252 - RNA, 19 nt, Homo sapiens
  misc_RNA (1)...(19): siRNA sense strand
uaucaaggcugaaggagaa

SEQ ID NO: 957253 - RNA, 19 nt, Homo sapiens
  misc_RNA (1)...(19): siRNA sense strand
gaagagaaggugagaaguu

SEQ ID NO: 957254 - RNA, 19 nt, Homo sapiens
  misc_RNA (1)...(19): siRNA sense strand
caccugagcucccugauug

SEQ ID NO: 957255 - RNA, 19 nt, Homo sapiens
  misc_RNA (1)...(19): siRNA sense strand
ugacugacauggaagagaa

SEQ ID NO: 957256 - RNA, 19 nt, Homo sapiens
  misc_RNA (1)...(19): siRNA sense strand
cgaggauccuguuaagauu

SEQ ID NO: 957257 - RNA, 19 nt, Homo sapiens
  misc_RNA (1)...(19): siRNA sense strand
cagaauacaucgauugcau

SEQ ID NO: 957258 - RNA, 19 nt, Homo sapiens
  misc_RNA (1)...(19): siRNA sense strand
gaauacaucgauugcauca

SEQ ID NO: 957259 - RNA, 19 nt, Homo sapiens
  misc_RNA (1)...(19): siRNA sense strand
aagagaaggugagaaguug

SEQ ID NO: 957260 - RNA, 19 nt, Homo sapiens
  misc_RNA (1)...(19): siRNA sense strand
ugacaucagucccuacaag

SEQ ID NO: 957261 - RNA, 19 nt, Homo sapiens
  misc_RNA (1)...(19): siRNA sense strand
gaucaugccaccaguguag

SEQ ID NO: 957262 - RNA, 19 nt, Homo sapiens
  misc_RNA (1)...(19): siRNA sense strand
ggugagaaguugugaaacg

SEQ ID NO: 957263 - RNA, 19 nt, Homo sapiens
  misc_RNA (1)...(19): siRNA sense strand
caaggacaccagcaacuga

SEQ ID NO: 957264 - RNA, 19 nt, Homo sapiens
  misc_RNA (1)...(19): siRNA sense strand
gggcagaauacaucgauug

SEQ ID NO: 957265 - RNA, 19 nt, Homo sapiens
  misc_RNA (1)...(19): siRNA sense strand
ccaccggcguugaguacuu

SEQ ID NO: 957266 - RNA, 19 nt, Homo sapiens
  misc_RNA (1)...(19): siRNA sense strand
uggaugccauucugacuga

SEQ ID NO: 957267 - RNA, 19 nt, Homo sapiens
  misc_RNA (1)...(19): siRNA sense strand
gguguugggcucuucauug

SEQ ID NO: 957268 - RNA, 19 nt, Homo sapiens
  misc_RNA (1)...(19): siRNA sense strand
ggacaccagcaacugaaga

SEQ ID NO: 957269 - RNA, 19 nt, Homo sapiens
  misc_RNA (1)...(19): siRNA sense strand
ccgaggauccuguuaagau

SEQ ID NO: 957270 - RNA, 19 nt, Homo sapiens
  misc_RNA (1)...(19): siRNA sense strand
cccaagggcaguacaugua

SEQ ID NO: 957271 - RNA, 19 nt, Homo sapiens
  misc_RNA (1)...(19): siRNA sense strand
gaggauccuguuaagauug

SEQ ID NO: 957272 - RNA, 19 nt, Homo sapiens
  misc_RNA (1)...(19): siRNA sense strand
caucagucccuacaaguuc

SEQ ID NO: 957273 - RNA, 19 nt, Homo sapiens
  misc_RNA (1)...(19): siRNA sense strand
gagaaggugagaaguugug

SEQ ID NO: 957274 - RNA, 19 nt, Homo sapiens
  misc_RNA (1)...(19): siRNA sense strand
gcucuucauugguguggau

SEQ ID NO: 957275 - RNA, 19 nt, Homo sapiens
  misc_RNA (1)...(19): siRNA sense strand
cauucugacugacauggaa

SEQ ID NO: 957276 - RNA, 19 nt, Homo sapiens
  misc_RNA (1)...(19): siRNA sense strand
ugaaugucuuggagaagga

SEQ ID NO: 957277 - RNA, 19 nt, Homo sapiens
  misc_RNA (1)...(19): siRNA sense strand
guguugggcucuucauugg

SEQ ID NO: 957278 - RNA, 19 nt, Homo sapiens
  misc_RNA (1)...(19): siRNA sense strand
gaaggagaacuacguuuug

SEQ ID NO: 957279 - RNA, 19 nt, Homo sapiens
  misc_RNA (1)...(19): siRNA sense strand
caacggcucaucagcucuu

SEQ ID NO: 957280 - RNA, 19 nt, Homo sapiens
  misc_RNA (1)...(19): siRNA sense strand
gaaggugagaaguugugaa

SEQ ID NO: 957281 - RNA, 19 nt, Homo sapiens
  misc_RNA (1)...(19): siRNA sense strand
cugagucucugcccagugu

SEQ ID NO: 957282 - RNA, 19 nt, Homo sapiens
  misc_RNA (1)...(19): siRNA sense strand
aaggugagaaguugugaaa

SEQ ID NO: 957283 - RNA, 19 nt, Homo sapiens
  misc_RNA (1)...(19): siRNA sense strand
cacggcaggugguggcaaa

SEQ ID NO: 957284 - RNA, 19 nt, Homo sapiens
  misc_RNA (1)...(19): siRNA sense strand
ucaaagaugaggccacaag

SEQ ID NO: 957285 - RNA, 19 nt, Homo sapiens
  misc_RNA (1)...(19): siRNA sense strand
aaagcuggaugccauucug

SEQ ID NO: 957286 - RNA, 19 nt, Homo sapiens
  misc_RNA (1)...(19): siRNA sense strand
ccaccugagcucccugauu

SEQ ID NO: 957287 - RNA, 19 nt, Homo sapiens
  misc_RNA (1)...(19): siRNA sense strand
ugagcucccugauugacau

SEQ ID NO: 957288 - RNA, 19 nt, Homo sapiens
  misc_RNA (1)...(19): siRNA sense strand
gcaaagcuggaugccauuc

SEQ ID NO: 957289 - RNA, 19 nt, Homo sapiens
  misc_RNA (1)...(19): siRNA sense strand
gcugaaggagaacuacguu

SEQ ID NO: 957290 - RNA, 19 nt, Homo sapiens
  misc_RNA (1)...(19): siRNA sense strand
caaggcugaaggagaacua

SEQ ID NO: 957291 - RNA, 19 nt, Homo sapiens
  misc_RNA (1)...(19): siRNA sense strand
aaagaugaggccacaagga

SEQ ID NO: 957292 - RNA, 19 nt, Homo sapiens
  misc_RNA (1)...(19): siRNA sense strand
ggaucaugccaccagugua

SEQ ID NO: 957293 - RNA, 19 nt, Homo sapiens
  misc_RNA (1)...(19): siRNA sense strand
gacaucagucccuacaagu

SEQ ID NO: 957294 - RNA, 19 nt, Homo sapiens
  misc_RNA (1)...(19): siRNA sense strand
gaacauccugaaguuuaag

SEQ ID NO: 957295 - RNA, 19 nt, Homo sapiens
  misc_RNA (1)...(19): siRNA sense strand
ugaaggagaacuacguuuu

SEQ ID NO: 957296 - RNA, 19 nt, Homo sapiens
  misc_RNA (1)...(19): siRNA sense strand
gcuucagccuggacaaugc

SEQ ID NO: 957297 - RNA, 19 nt, Homo sapiens
  misc_RNA (1)...(19): siRNA sense strand
ggaagagaaggugagaagu

SEQ ID NO: 957298 - RNA, 19 nt, Homo sapiens
  misc_RNA (1)...(19): siRNA sense strand
uggaagagaaggugagaag

SEQ ID NO: 957299 - RNA, 19 nt, Homo sapiens
  misc_RNA (1)...(19): siRNA sense strand
gaacauaagagaauucaug

SEQ ID NO: 957300 - RNA, 19 nt, Homo sapiens
  misc_RNA (1)...(19): siRNA sense strand
cuacaaaugugaagaaugu

SEQ ID NO: 957301 - RNA, 19 nt, Homo sapiens
  misc_RNA (1)...(19): siRNA sense strand
cuacaaaugugaagaaugu

SEQ ID NO: 957302 - RNA, 19 nt, Homo sapiens
  misc_RNA (1)...(19): siRNA sense strand
gagagaaacccuacaaaug

SEQ ID NO: 957303 - RNA, 19 nt, Homo sapiens
  misc_RNA (1)...(19): siRNA sense strand
ggagagaaacccuacauau

SEQ ID NO: 957304 - RNA, 19 nt, Homo sapiens
  misc_RNA (1)...(19): siRNA sense strand
ggagagaaacccuacauau

SEQ ID NO: 957305 - RNA, 19 nt, Homo sapiens
  misc_RNA (1)...(19): siRNA sense strand
ccacaacucuuacgacaca

SEQ ID NO: 957306 - RNA, 19 nt, Homo sapiens
  misc_RNA (1)...(19): siRNA sense strand
gagaaacccuacauaugug

SEQ ID NO: 957307 - RNA, 19 nt, Homo sapiens
  misc_RNA (1)...(19): siRNA sense strand
gagaaacccuacaaaugug

SEQ ID NO: 957308 - RNA, 19 nt, Homo sapiens
  misc_RNA (1)...(19): siRNA sense strand
gagagaaacccuacauaug

SEQ ID NO: 957309 - RNA, 19 nt, Homo sapiens
  misc_RNA (1)...(19): siRNA sense strand
gagagaaacccuacauaug

SEQ ID NO: 957310 - RNA, 19 nt, Homo sapiens
  misc_RNA (1)...(19): siRNA sense strand
gagagaaacccuacacaug

SEQ ID NO: 957311 - RNA, 19 nt, Homo sapiens
  misc_RNA (1)...(19): siRNA sense strand
gagaaacccuacacaugug

SEQ ID NO: 957312 - RNA, 19 nt, Homo sapiens
  misc_RNA (1)...(19): siRNA sense strand
cuacaagugugaagaaugu

SEQ ID NO: 957313 - RNA, 19 nt, Homo sapiens
  misc_RNA (1)...(19): siRNA sense strand
aaacaguccucacacuuga

SEQ ID NO: 957314 - RNA, 19 nt, Homo sapiens
  misc_RNA (1)...(19): siRNA sense strand
ggagagaaacccuacaaau

SEQ ID NO: 957315 - RNA, 19 nt, Homo sapiens
  misc_RNA (1)...(19): siRNA sense strand
ccucacaccuuacuaaaca

SEQ ID NO: 957316 - RNA, 19 nt, Homo sapiens
  misc_RNA (1)...(19): siRNA sense strand
agagaaacccuacauaugu

SEQ ID NO: 957317 - RNA, 19 nt, Homo sapiens
  misc_RNA (1)...(19): siRNA sense strand
agagaaacccuacauaugu

SEQ ID NO: 957318 - RNA, 19 nt, Homo sapiens
  misc_RNA (1)...(19): siRNA sense strand
agagaaacccuacaaaugu

SEQ ID NO: 957319 - RNA, 19 nt, Homo sapiens
  misc_RNA (1)...(19): siRNA sense strand
ccucaacccuuaauuuaca

SEQ ID NO: 957320 - RNA, 19 nt, Homo sapiens
  misc_RNA (1)...(19): siRNA sense strand
acacauaagagaauccaua

SEQ ID NO: 957321 - RNA, 19 nt, Homo sapiens
  misc_RNA (1)...(19): siRNA sense strand
cgaagaauguggcaauguc

SEQ ID NO: 957322 - RNA, 19 nt, Homo sapiens
  misc_RNA (1)...(19): siRNA sense strand
gaauguggcaaugucuuua

SEQ ID NO: 957323 - RNA, 19 nt, Homo sapiens
  misc_RNA (1)...(19): siRNA sense strand
aaccaauccucaacccuua

SEQ ID NO: 957324 - RNA, 19 nt, Homo sapiens
  misc_RNA (1)...(19): siRNA sense strand
uaaacaguccucacacuug

SEQ ID NO: 957325 - RNA, 19 nt, Homo sapiens
  misc_RNA (1)...(19): siRNA sense strand
ccucagacuuugcuaaaca

SEQ ID NO: 957326 - RNA, 19 nt, Homo sapiens
  misc_RNA (1)...(19): siRNA sense strand
cauaagagaauucauacug

SEQ ID NO: 957327 - RNA, 19 nt, Homo sapiens
  misc_RNA (1)...(19): siRNA sense strand
ggaaaauccuuuaauaggu

SEQ ID NO: 957328 - RNA, 19 nt, Homo sapiens
  misc_RNA (1)...(19): siRNA sense strand
uaccacauccucagacuuu

SEQ ID NO: 957329 - RNA, 19 nt, Homo sapiens
  misc_RNA (1)...(19): siRNA sense strand
ccucaacccuuaauguaca

SEQ ID NO: 957330 - RNA, 19 nt, Homo sapiens
  misc_RNA (1)...(19): siRNA sense strand
agagaaacccuacacaugu

SEQ ID NO: 957331 - RNA, 19 nt, Homo sapiens
  misc_RNA (1)...(19): siRNA sense strand
ggagagaaacccuacacau

SEQ ID NO: 957332 - RNA, 19 nt, Homo sapiens
  misc_RNA (1)...(19): siRNA sense strand
cauaagagaauccauacug

SEQ ID NO: 957333 - RNA, 19 nt, Homo sapiens
  misc_RNA (1)...(19): siRNA sense strand
caacucuuacgacacauaa

SEQ ID NO: 957334 - RNA, 19 nt, Homo sapiens
  misc_RNA (1)...(19): siRNA sense strand
ccuuuaaaguguuugcaaa

SEQ ID NO: 957335 - RNA, 19 nt, Homo sapiens
  misc_RNA (1)...(19): siRNA sense strand
gguccucacaccuuacuaa

SEQ ID NO: 957336 - RNA, 19 nt, Homo sapiens
  misc_RNA (1)...(19): siRNA sense strand
gaaauucuacaagugugaa

SEQ ID NO: 957337 - RNA, 19 nt, Homo sapiens
  misc_RNA (1)...(19): siRNA sense strand
acucgguccucacaccuua

SEQ ID NO: 957338 - RNA, 19 nt, Homo sapiens
  misc_RNA (1)...(19): siRNA sense strand
uuuaauagguccacaacuc

SEQ ID NO: 957339 - RNA, 19 nt, Homo sapiens
  misc_RNA (1)...(19): siRNA sense strand
agacuuugcuaaacauaag

SEQ ID NO: 957340 - RNA, 19 nt, Homo sapiens
  misc_RNA (1)...(19): siRNA sense strand
cauaagagaauucauacag

SEQ ID NO: 957341 - RNA, 19 nt, Homo sapiens
  misc_RNA (1)...(19): siRNA sense strand
guccucaacccuuaaugua

SEQ ID NO: 957342 - RNA, 19 nt, Homo sapiens
  misc_RNA (1)...(19): siRNA sense strand
ucacaccuuacuaaacaua

SEQ ID NO: 957343 - RNA, 19 nt, Homo sapiens
  misc_RNA (1)...(19): siRNA sense strand
gaauucauacuggagagaa

SEQ ID NO: 957344 - RNA, 19 nt, Homo sapiens
  misc_RNA (1)...(19): siRNA sense strand
aauugguccucaacccuua

SEQ ID NO: 957345 - RNA, 19 nt, Homo sapiens
  misc_RNA (1)...(19): siRNA sense strand
aauagguccacaacucuua

SEQ ID NO: 957346 - RNA, 19 nt, Homo sapiens
  misc_RNA (1)...(19): siRNA sense strand
aauccucaacccuuaauuu

SEQ ID NO: 957347 - RNA, 19 nt, Homo sapiens
  misc_RNA (1)...(19): siRNA sense strand
gaauucaugcuggagagaa

SEQ ID NO: 957348 - RNA, 19 nt, Homo sapiens
  misc_RNA (1)...(19): siRNA sense strand
gaagaauguggcaaugucu

SEQ ID NO: 957349 - RNA, 19 nt, Homo sapiens
  misc_RNA (1)...(19): siRNA sense strand
agaauguggcaaugucuuu

SEQ ID NO: 957350 - RNA, 19 nt, Homo sapiens
  misc_RNA (1)...(19): siRNA sense strand
gaaacccuacauaugugaa

SEQ ID NO: 957351 - RNA, 19 nt, Homo sapiens
  misc_RNA (1)...(19): siRNA sense strand
gaaacccuacaaaugugaa

SEQ ID NO: 957352 - RNA, 19 nt, Homo sapiens
  misc_RNA (1)...(19): siRNA sense strand
gcuaaacauaagagaauuc

SEQ ID NO: 957353 - RNA, 19 nt, Homo sapiens
  misc_RNA (1)...(19): siRNA sense strand
auccucaacccuuaauuua

SEQ ID NO: 957354 - RNA, 19 nt, Homo sapiens
  misc_RNA (1)...(19): siRNA sense strand
gaauguggaaaauccuuua

SEQ ID NO: 957355 - RNA, 19 nt, Homo sapiens
  misc_RNA (1)...(19): siRNA sense strand
cagacuuugcuaaacauaa

SEQ ID NO: 957356 - RNA, 19 nt, Homo sapiens
  misc_RNA (1)...(19): siRNA sense strand
caggagagaaacccuacaa

SEQ ID NO: 957357 - RNA, 19 nt, Homo sapiens
  misc_RNA (1)...(19): siRNA sense strand
guacacaagagaauucacu

SEQ ID NO: 957358 - RNA, 19 nt, Homo sapiens
  misc_RNA (1)...(19): siRNA sense strand
gguccucaacccuuaaugu

SEQ ID NO: 957359 - RNA, 19 nt, Homo sapiens
  misc_RNA (1)...(19): siRNA sense strand
gaaacccuacacaugugaa

SEQ ID NO: 957360 - RNA, 19 nt, Homo sapiens
  misc_RNA (1)...(19): siRNA sense strand
aauucaugcuggagagaaa

SEQ ID NO: 957361 - RNA, 19 nt, Homo sapiens
  misc_RNA (1)...(19): siRNA sense strand
uuaaacaguccucacacuu

SEQ ID NO: 957362 - RNA, 19 nt, Homo sapiens
  misc_RNA (1)...(19): siRNA sense strand
uuacgacacauaagagaau

SEQ ID NO: 957363 - RNA, 19 nt, Homo sapiens
  misc_RNA (1)...(19): siRNA sense strand
gaauucauacaggagagaa

SEQ ID NO: 957364 - RNA, 19 nt, Homo sapiens
  misc_RNA (1)...(19): siRNA sense strand
gcgaagaauguggcaaugu

SEQ ID NO: 957365 - RNA, 19 nt, Homo sapiens
  misc_RNA (1)...(19): siRNA sense strand
uggagagaaacccuacaua

SEQ ID NO: 957366 - RNA, 19 nt, Homo sapiens
  misc_RNA (1)...(19): siRNA sense strand
uggagagaaacccuacaua

SEQ ID NO: 957367 - RNA, 19 nt, Homo sapiens
  misc_RNA (1)...(19): siRNA sense strand
uaauagguccacaacucuu

SEQ ID NO: 957368 - RNA, 19 nt, Homo sapiens
  misc_RNA (1)...(19): siRNA sense strand
uguaaacaauguggcaaag

SEQ ID NO: 957369 - RNA, 19 nt, Homo sapiens
  misc_RNA (1)...(19): siRNA sense strand
gugugaagaaugugguaaa

SEQ ID NO: 957370 - RNA, 19 nt, Homo sapiens
  misc_RNA (1)...(19): siRNA sense strand
gagaauucacucuggaaaa

SEQ ID NO: 957371 - RNA, 19 nt, Homo sapiens
  misc_RNA (1)...(19): siRNA sense strand
aauucauacuggagagaaa

SEQ ID NO: 957372 - RNA, 19 nt, Homo sapiens
  misc_RNA (1)...(19): siRNA sense strand
aauucauacuggagagaaa

SEQ ID NO: 957373 - RNA, 19 nt, Homo sapiens
  misc_RNA (1)...(19): siRNA sense strand
ggacuuaacuccauugauu

SEQ ID NO: 957374 - RNA, 19 nt, Homo sapiens
  misc_RNA (1)...(19): siRNA sense strand
gagcagagaugaagaaagu

SEQ ID NO: 957375 - RNA, 19 nt, Homo sapiens
  misc_RNA (1)...(19): siRNA sense strand
agacuugacuugcagauua

SEQ ID NO: 957376 - RNA, 19 nt, Homo sapiens
  misc_RNA (1)...(19): siRNA sense strand
gagaagccuuuguuguuua

SEQ ID NO: 957377 - RNA, 19 nt, Homo sapiens
  misc_RNA (1)...(19): siRNA sense strand
gaacaucccaguuauauca

SEQ ID NO: 957378 - RNA, 19 nt, Homo sapiens
  misc_RNA (1)...(19): siRNA sense strand
gaagaaagucccuaugcaa

SEQ ID NO: 957379 - RNA, 19 nt, Homo sapiens
  misc_RNA (1)...(19): siRNA sense strand
cagagaagccuuuguuguu

SEQ ID NO: 957380 - RNA, 19 nt, Homo sapiens
  misc_RNA (1)...(19): siRNA sense strand
agagaagccuuuguuguuu

SEQ ID NO: 957381 - RNA, 19 nt, Homo sapiens
  misc_RNA (1)...(19): siRNA sense strand
gaagaaaacuuugaacauc

SEQ ID NO: 957382 - RNA, 19 nt, Homo sapiens
  misc_RNA (1)...(19): siRNA sense strand
gaagagagcagagaugaag

SEQ ID NO: 957383 - RNA, 19 nt, Homo sapiens
  misc_RNA (1)...(19): siRNA sense strand
caacacaggcagccaagaa

SEQ ID NO: 957384 - RNA, 19 nt, Homo sapiens
  misc_RNA (1)...(19): siRNA sense strand
gacuugacuugcagauuaa

SEQ ID NO: 957385 - RNA, 19 nt, Homo sapiens
  misc_RNA (1)...(19): siRNA sense strand
ccaagaagcuaaaagaaga

SEQ ID NO: 957386 - RNA, 19 nt, Homo sapiens
  misc_RNA (1)...(19): siRNA sense strand
gcaccaagacccgcucgua

SEQ ID NO: 957387 - RNA, 19 nt, Homo sapiens
  misc_RNA (1)...(19): siRNA sense strand
ugaagaaagucccuaugca

SEQ ID NO: 957388 - RNA, 19 nt, Homo sapiens
  misc_RNA (1)...(19): siRNA sense strand
agaagccuuuguuguuuaa

SEQ ID NO: 957389 - RNA, 19 nt, Homo sapiens
  misc_RNA (1)...(19): siRNA sense strand
aaaugaaacugcugauaac

SEQ ID NO: 957390 - RNA, 19 nt, Homo sapiens
  misc_RNA (1)...(19): siRNA sense strand
cuaugcaacuucccucuau

SEQ ID NO: 957391 - RNA, 19 nt, Homo sapiens
  misc_RNA (1)...(19): siRNA sense strand
uaucagagaagccuuuguu

SEQ ID NO: 957392 - RNA, 19 nt, Homo sapiens
  misc_RNA (1)...(19): siRNA sense strand
gaaaaugaaacugcugaua

SEQ ID NO: 957393 - RNA, 19 nt, Homo sapiens
  misc_RNA (1)...(19): siRNA sense strand
cagauuaaguuaucaacac

SEQ ID NO: 957394 - RNA, 19 nt, Homo sapiens
  misc_RNA (1)...(19): siRNA sense strand
gagauuuccugcagagacu

SEQ ID NO: 957395 - RNA, 19 nt, Homo sapiens
  misc_RNA (1)...(19): siRNA sense strand
ggaagugucagccagagau

SEQ ID NO: 957396 - RNA, 19 nt, Homo sapiens
  misc_RNA (1)...(19): siRNA sense strand
gaagugucagccagagauu

SEQ ID NO: 957397 - RNA, 19 nt, Homo sapiens
  misc_RNA (1)...(19): siRNA sense strand
gggcaucgcgcucaaguac

SEQ ID NO: 957398 - RNA, 19 nt, Homo sapiens
  misc_RNA (1)...(19): siRNA sense strand
ccucaagaaucugauguuc

SEQ ID NO: 957399 - RNA, 19 nt, Homo sapiens
  misc_RNA (1)...(19): siRNA sense strand
ucagagaagccuuuguugu

SEQ ID NO: 957400 - RNA, 19 nt, Homo sapiens
  misc_RNA (1)...(19): siRNA sense strand
gcaacuucccucuaucaca

SEQ ID NO: 957401 - RNA, 19 nt, Homo sapiens
  misc_RNA (1)...(19): siRNA sense strand
gcagauuaaguuaucaaca

SEQ ID NO: 957402 - RNA, 19 nt, Homo sapiens
  misc_RNA (1)...(19): siRNA sense strand
acuuugaacaucccaguua

SEQ ID NO: 957403 - RNA, 19 nt, Homo sapiens
  misc_RNA (1)...(19): siRNA sense strand
aagaagagagcagagauga

SEQ ID NO: 957404 - RNA, 19 nt, Homo sapiens
  misc_RNA (1)...(19): siRNA sense strand
gagagcagagaugaagaaa

SEQ ID NO: 957405 - RNA, 19 nt, Homo sapiens
  misc_RNA (1)...(19): siRNA sense strand
gaugaagaaagucccuaug

SEQ ID NO: 957406 - RNA, 19 nt, Homo sapiens
  misc_RNA (1)...(19): siRNA sense strand
ucacgauggaacagauuaa

SEQ ID NO: 957407 - RNA, 19 nt, Homo sapiens
  misc_RNA (1)...(19): siRNA sense strand
aagccuuuguuguuuaaug

SEQ ID NO: 957408 - RNA, 19 nt, Homo sapiens
  misc_RNA (1)...(19): siRNA sense strand
aaagaagagagcagagaug

SEQ ID NO: 957409 - RNA, 19 nt, Homo sapiens
  misc_RNA (1)...(19): siRNA sense strand
uaaaagggccaauaaacug

SEQ ID NO: 957410 - RNA, 19 nt, Homo sapiens
  misc_RNA (1)...(19): siRNA sense strand
agagagcagagaugaagaa

SEQ ID NO: 957411 - RNA, 19 nt, Homo sapiens
  misc_RNA (1)...(19): siRNA sense strand
uugaacaucccaguuauau

SEQ ID NO: 957412 - RNA, 19 nt, Homo sapiens
  misc_RNA (1)...(19): siRNA sense strand
gagacuugacuugcagauu

SEQ ID NO: 957413 - RNA, 19 nt, Homo sapiens
  misc_RNA (1)...(19): siRNA sense strand
gcgcucaaguacgguguca

SEQ ID NO: 957414 - RNA, 19 nt, Homo sapiens
  misc_RNA (1)...(19): siRNA sense strand
ucaaguacggugucacgau

SEQ ID NO: 957415 - RNA, 19 nt, Homo sapiens
  misc_RNA (1)...(19): siRNA sense strand
ucccaguccucaagaaucu

SEQ ID NO: 957416 - RNA, 19 nt, Homo sapiens
  misc_RNA (1)...(19): siRNA sense strand
gucacgauggaacagauua

SEQ ID NO: 957417 - RNA, 19 nt, Homo sapiens
  misc_RNA (1)...(19): siRNA sense strand
cuuugaacaucccaguuau

SEQ ID NO: 957418 - RNA, 19 nt, Homo sapiens
  misc_RNA (1)...(19): siRNA sense strand
gacuuaacuccauugauuc

SEQ ID NO: 957419 - RNA, 19 nt, Homo sapiens
  misc_RNA (1)...(19): siRNA sense strand
gcaguuagcugaugccaua

SEQ ID NO: 957420 - RNA, 19 nt, Homo sapiens
  misc_RNA (1)...(19): siRNA sense strand
gaugaaaucccuccaggua

SEQ ID NO: 957421 - RNA, 19 nt, Homo sapiens
  misc_RNA (1)...(19): siRNA sense strand
ugccauagcuguuaucaaa

SEQ ID NO: 957422 - RNA, 19 nt, Homo sapiens
  misc_RNA (1)...(19): siRNA sense strand
ccacgagacuuaacauuuc

SEQ ID NO: 957423 - RNA, 19 nt, Homo sapiens
  misc_RNA (1)...(19): siRNA sense strand
gcacagaccaugccacuca

SEQ ID NO: 957424 - RNA, 19 nt, Homo sapiens
  misc_RNA (1)...(19): siRNA sense strand
ugaaaucccuccagguaga

SEQ ID NO: 957425 - RNA, 19 nt, Homo sapiens
  misc_RNA (1)...(19): siRNA sense strand
uagcacagaugaugaaauc

SEQ ID NO: 957426 - RNA, 19 nt, Homo sapiens
  misc_RNA (1)...(19): siRNA sense strand
gacuuaacauuucagauga

SEQ ID NO: 957427 - RNA, 19 nt, Homo sapiens
  misc_RNA (1)...(19): siRNA sense strand
gucaugagcauaguuauua

SEQ ID NO: 957428 - RNA, 19 nt, Homo sapiens
  misc_RNA (1)...(19): siRNA sense strand
ucaaacaauugcuucaguu

SEQ ID NO: 957429 - RNA, 19 nt, Homo sapiens
  misc_RNA (1)...(19): siRNA sense strand
gacaggauccuagaaauug

SEQ ID NO: 957430 - RNA, 19 nt, Homo sapiens
  misc_RNA (1)...(19): siRNA sense strand
gaaugaggauaagaugaga

SEQ ID NO: 957431 - RNA, 19 nt, Homo sapiens
  misc_RNA (1)...(19): siRNA sense strand
uagauggguucacugcuuu

SEQ ID NO: 957432 - RNA, 19 nt, Homo sapiens
  misc_RNA (1)...(19): siRNA sense strand
gaaaagcauuaucaacaga

SEQ ID NO: 957433 - RNA, 19 nt, Homo sapiens
  misc_RNA (1)...(19): siRNA sense strand
ugacaggauccuagaaauu

SEQ ID NO: 957434 - RNA, 19 nt, Homo sapiens
  misc_RNA (1)...(19): siRNA sense strand
gagaagcucgggaauucaa

SEQ ID NO: 957435 - RNA, 19 nt, Homo sapiens
  misc_RNA (1)...(19): siRNA sense strand
gcugaugccauagcuguua

SEQ ID NO: 957436 - RNA, 19 nt, Homo sapiens
  misc_RNA (1)...(19): siRNA sense strand
agacuuaacauuucagaug

SEQ ID NO: 957437 - RNA, 19 nt, Homo sapiens
  misc_RNA (1)...(19): siRNA sense strand
uuagauggguucacugcuu

SEQ ID NO: 957438 - RNA, 19 nt, Homo sapiens
  misc_RNA (1)...(19): siRNA sense strand
ucgcagggcucauuauguc

SEQ ID NO: 957439 - RNA, 19 nt, Homo sapiens
  misc_RNA (1)...(19): siRNA sense strand
caaacaauugcuucaguug

SEQ ID NO: 957440 - RNA, 19 nt, Homo sapiens
  misc_RNA (1)...(19): siRNA sense strand
gaucgcagggcucauuaug

SEQ ID NO: 957441 - RNA, 19 nt, Homo sapiens
  misc_RNA (1)...(19): siRNA sense strand
ccauagcuguuaucaaagg

SEQ ID NO: 957442 - RNA, 19 nt, Homo sapiens
  misc_RNA (1)...(19): siRNA sense strand
aaacaauugcuucaguuga

SEQ ID NO: 957443 - RNA, 19 nt, Homo sapiens
  misc_RNA (1)...(19): siRNA sense strand
aaaguuagcacagaugaug

SEQ ID NO: 957444 - RNA, 19 nt, Homo sapiens
  misc_RNA (1)...(19): siRNA sense strand
acaggauccuagaaauuga

SEQ ID NO: 957445 - RNA, 19 nt, Homo sapiens
  misc_RNA (1)...(19): siRNA sense strand
caugacaggauccuagaaa

SEQ ID NO: 957446 - RNA, 19 nt, Homo sapiens
  misc_RNA (1)...(19): siRNA sense strand
cagaugauuuaaagauugg

SEQ ID NO: 957447 - RNA, 19 nt, Homo sapiens
  misc_RNA (1)...(19): siRNA sense strand
caacagaaugaggauaaga

SEQ ID NO: 957448 - RNA, 19 nt, Homo sapiens
  misc_RNA (1)...(19): siRNA sense strand
ggaauguaccagccacugu

SEQ ID NO: 957449 - RNA, 19 nt, Homo sapiens
  misc_RNA (1)...(19): siRNA sense strand
guuauuagauggguucacu

SEQ ID NO: 957450 - RNA, 19 nt, Homo sapiens
  misc_RNA (1)...(19): siRNA sense strand
uugagucucuucaccauuc

SEQ ID NO: 957451 - RNA, 19 nt, Homo sapiens
  misc_RNA (1)...(19): siRNA sense strand
gggaucgcagggcucauua

SEQ ID NO: 957452 - RNA, 19 nt, Homo sapiens
  misc_RNA (1)...(19): siRNA sense strand
gaccaugccacucaaacug

SEQ ID NO: 957453 - RNA, 19 nt, Homo sapiens
  misc_RNA (1)...(19): siRNA sense strand
cacgagacuuaacauuuca

SEQ ID NO: 957454 - RNA, 19 nt, Homo sapiens
  misc_RNA (1)...(19): siRNA sense strand
cagaaugaggauaagauga

SEQ ID NO: 957455 - RNA, 19 nt, Homo sapiens
  misc_RNA (1)...(19): siRNA sense strand
gaggaaucuuugagucucu

SEQ ID NO: 957456 - RNA, 19 nt, Homo sapiens
  misc_RNA (1)...(19): siRNA sense strand
uccacgagacuuaacauuu

SEQ ID NO: 957457 - RNA, 19 nt, Homo sapiens
  misc_RNA (1)...(19): siRNA sense strand
ugagcauaguuauuagaug

SEQ ID NO: 957458 - RNA, 19 nt, Homo sapiens
  misc_RNA (1)...(19): siRNA sense strand
ucaugagcauaguuauuag

SEQ ID NO: 957459 - RNA, 19 nt, Homo sapiens
  misc_RNA (1)...(19): siRNA sense strand
uagcuguuaucaaaggaau

SEQ ID NO: 957460 - RNA, 19 nt, Homo sapiens
  misc_RNA (1)...(19): siRNA sense strand
ugucaugagcauaguuauu

SEQ ID NO: 957461 - RNA, 19 nt, Homo sapiens
  misc_RNA (1)...(19): siRNA sense strand
gaggauaagaugagaaaau

SEQ ID NO: 957462 - RNA, 19 nt, Homo sapiens
  misc_RNA (1)...(19): siRNA sense strand
gaaaucccuccagguagau

SEQ ID NO: 957463 - RNA, 19 nt, Homo sapiens
  misc_RNA (1)...(19): siRNA sense strand
gcuguuaucaaaggaaugu

SEQ ID NO: 957464 - RNA, 19 nt, Homo sapiens
  misc_RNA (1)...(19): siRNA sense strand
gagaaaauccuucaaucag

SEQ ID NO: 957465 - RNA, 19 nt, Homo sapiens
  misc_RNA (1)...(19): siRNA sense strand
agaaugaggauaagaugag

SEQ ID NO: 957466 - RNA, 19 nt, Homo sapiens
  misc_RNA (1)...(19): siRNA sense strand
gcaugacaggauccuagaa

SEQ ID NO: 957467 - RNA, 19 nt, Homo sapiens
  misc_RNA (1)...(19): siRNA sense strand
ggaccgacugaaagaggaa

SEQ ID NO: 957468 - RNA, 19 nt, Homo sapiens
  misc_RNA (1)...(19): siRNA sense strand
uuggguuccucaaacaauu

SEQ ID NO: 957469 - RNA, 19 nt, Homo sapiens
  misc_RNA (1)...(19): siRNA sense strand
gcagggcucauuaugucau

SEQ ID NO: 957470 - RNA, 19 nt, Homo sapiens
  misc_RNA (1)...(19): siRNA sense strand
ccaugccacucaaacugau

SEQ ID NO: 957471 - RNA, 19 nt, Homo sapiens
  misc_RNA (1)...(19): siRNA sense strand
cucaaacaauugcuucagu

SEQ ID NO: 957472 - RNA, 19 nt, Homo sapiens
  misc_RNA (1)...(19): siRNA sense strand
cauagcuguuaucaaagga

SEQ ID NO: 957473 - RNA, 19 nt, Homo sapiens
  misc_RNA (1)...(19): siRNA sense strand
guuugaggaccgacugaaa

SEQ ID NO: 957474 - RNA, 19 nt, Homo sapiens
  misc_RNA (1)...(19): siRNA sense strand
cacagaccaugccacucaa

SEQ ID NO: 957475 - RNA, 19 nt, Homo sapiens
  misc_RNA (1)...(19): siRNA sense strand
auccuucaaucagcaguua

SEQ ID NO: 957476 - RNA, 19 nt, Homo sapiens
  misc_RNA (1)...(19): siRNA sense strand
ucaacagaaugaggauaag

SEQ ID NO: 957477 - RNA, 19 nt, Homo sapiens
  misc_RNA (1)...(19): siRNA sense strand
gagggagccuugagccuuu

SEQ ID NO: 957478 - RNA, 19 nt, Homo sapiens
  misc_RNA (1)...(19): siRNA sense strand
acaaggaccuaggacauuu

SEQ ID NO: 957479 - RNA, 19 nt, Homo sapiens
  misc_RNA (1)...(19): siRNA sense strand
gcacacugcuucagacacu

SEQ ID NO: 957480 - RNA, 19 nt, Homo sapiens
  misc_RNA (1)...(19): siRNA sense strand
gacaaggaccuaggacauu

SEQ ID NO: 957481 - RNA, 19 nt, Homo sapiens
  misc_RNA (1)...(19): siRNA sense strand
gggcaucgcaagaagagaa

SEQ ID NO: 957482 - RNA, 19 nt, Homo sapiens
  misc_RNA (1)...(19): siRNA sense strand
gcaagaagagaagcacaga

SEQ ID NO: 957483 - RNA, 19 nt, Homo sapiens
  misc_RNA (1)...(19): siRNA sense strand
gcucugcugugugacuuug

SEQ ID NO: 957484 - RNA, 19 nt, Homo sapiens
  misc_RNA (1)...(19): siRNA sense strand
ccagagggcaucgcaagaa

SEQ ID NO: 957485 - RNA, 19 nt, Homo sapiens
  misc_RNA (1)...(19): siRNA sense strand
ugacaaggaccuaggacau

SEQ ID NO: 957486 - RNA, 19 nt, Homo sapiens
  misc_RNA (1)...(19): siRNA sense strand
caagaagagaagcacagaa

SEQ ID NO: 957487 - RNA, 19 nt, Homo sapiens
  misc_RNA (1)...(19): siRNA sense strand
cagagggcaucgcaagaag

SEQ ID NO: 957488 - RNA, 19 nt, Homo sapiens
  misc_RNA (1)...(19): siRNA sense strand
cuucucagauucccuccuu

SEQ ID NO: 957489 - RNA, 19 nt, Homo sapiens
  misc_RNA (1)...(19): siRNA sense strand
aagaagagaagcacagaag

SEQ ID NO: 957490 - RNA, 19 nt, Homo sapiens
  misc_RNA (1)...(19): siRNA sense strand
gcugugugacuuugagguu

SEQ ID NO: 957491 - RNA, 19 nt, Homo sapiens
  misc_RNA (1)...(19): siRNA sense strand
gagggcaucgcaagaagag

SEQ ID NO: 957492 - RNA, 19 nt, Homo sapiens
  misc_RNA (1)...(19): siRNA sense strand
ugcccugucuucaguggaa

SEQ ID NO: 957493 - RNA, 19 nt, Homo sapiens
  misc_RNA (1)...(19): siRNA sense strand
ggcaggagagacacucaga

SEQ ID NO: 957494 - RNA, 19 nt, Homo sapiens
  misc_RNA (1)...(19): siRNA sense strand
gaagagacauccugaccaa

SEQ ID NO: 957495 - RNA, 19 nt, Homo sapiens
  misc_RNA (1)...(19): siRNA sense strand
agacacagcuggcagaaau

SEQ ID NO: 957496 - RNA, 19 nt, Homo sapiens
  misc_RNA (1)...(19): siRNA sense strand
cagacgaccugcaguggua

SEQ ID NO: 957497 - RNA, 19 nt, Homo sapiens
  misc_RNA (1)...(19): siRNA sense strand
caacagugugcaaguaaua

SEQ ID NO: 957498 - RNA, 19 nt, Homo sapiens
  misc_RNA (1)...(19): siRNA sense strand
gaccaacagugugcaagua

SEQ ID NO: 957499 - RNA, 19 nt, Homo sapiens
  misc_RNA (1)...(19): siRNA sense strand
uugaacagcugaagauuga

SEQ ID NO: 957500 - RNA, 19 nt, Homo sapiens
  misc_RNA (1)...(19): siRNA sense strand
ggacaagaccgaacugcuu

SEQ ID NO: 957501 - RNA, 19 nt, Homo sapiens
  misc_RNA (1)...(19): siRNA sense strand
aaccaaaccuucaaugaga

SEQ ID NO: 957502 - RNA, 19 nt, Homo sapiens
  misc_RNA (1)...(19): siRNA sense strand
ggcaaggacucacuucuuc

SEQ ID NO: 957503 - RNA, 19 nt, Homo sapiens
  misc_RNA (1)...(19): siRNA sense strand
ggaacgaaaugaggaacuu

SEQ ID NO: 957504 - RNA, 19 nt, Homo sapiens
  misc_RNA (1)...(19): siRNA sense strand
gggaagcgccucuauggaa

SEQ ID NO: 957505 - RNA, 19 nt, Homo sapiens
  misc_RNA (1)...(19): siRNA sense strand
gaaccaaaccuucaaugag

SEQ ID NO: 957506 - RNA, 19 nt, Homo sapiens
  misc_RNA (1)...(19): siRNA sense strand
gaacagcugaagauugaga

SEQ ID NO: 957507 - RNA, 19 nt, Homo sapiens
  misc_RNA (1)...(19): siRNA sense strand
uggaggagcugaagaagca

SEQ ID NO: 957508 - RNA, 19 nt, Homo sapiens
  misc_RNA (1)...(19): siRNA sense strand
gcagcaaggugaccaacag

SEQ ID NO: 957509 - RNA, 19 nt, Homo sapiens
  misc_RNA (1)...(19): siRNA sense strand
gcagaggcgugaggcagaa

SEQ ID NO: 957510 - RNA, 19 nt, Homo sapiens
  misc_RNA (1)...(19): siRNA sense strand
gaacgaaaugaggaacuuu

SEQ ID NO: 957511 - RNA, 19 nt, Homo sapiens
  misc_RNA (1)...(19): siRNA sense strand
gcaaggugaccaacagugu

SEQ ID NO: 957512 - RNA, 19 nt, Homo sapiens
  misc_RNA (1)...(19): siRNA sense strand
ccaacagugugcaaguaau

SEQ ID NO: 957513 - RNA, 19 nt, Homo sapiens
  misc_RNA (1)...(19): siRNA sense strand
agcagagccuggugcauuu

SEQ ID NO: 957514 - RNA, 19 nt, Homo sapiens
  misc_RNA (1)...(19): siRNA sense strand
gaagaucagggaggccaaa

SEQ ID NO: 957515 - RNA, 19 nt, Homo sapiens
  misc_RNA (1)...(19): siRNA sense strand
agagacauccugaccaaga

SEQ ID NO: 957516 - RNA, 19 nt, Homo sapiens
  misc_RNA (1)...(19): siRNA sense strand
aagcagagccuggugcauu

SEQ ID NO: 957517 - RNA, 19 nt, Homo sapiens
  misc_RNA (1)...(19): siRNA sense strand
ucaagaagcagguggugau

SEQ ID NO: 957518 - RNA, 19 nt, Homo sapiens
  misc_RNA (1)...(19): siRNA sense strand
uaauaacccacgugaagga

SEQ ID NO: 957519 - RNA, 19 nt, Homo sapiens
  misc_RNA (1)...(19): siRNA sense strand
agaaccaaaccuucaauga

SEQ ID NO: 957520 - RNA, 19 nt, Homo sapiens
  misc_RNA (1)...(19): siRNA sense strand
gagaaccaaaccuucaaug

SEQ ID NO: 957521 - RNA, 19 nt, Homo sapiens
  misc_RNA (1)...(19): siRNA sense strand
agaagcagguggugaugca

SEQ ID NO: 957522 - RNA, 19 nt, Homo sapiens
  misc_RNA (1)...(19): siRNA sense strand
ucccagcgcuacaaccuau

SEQ ID NO: 957523 - RNA, 19 nt, Homo sapiens
  misc_RNA (1)...(19): siRNA sense strand
cccagggucugcuucuuau

SEQ ID NO: 957524 - RNA, 19 nt, Homo sapiens
  misc_RNA (1)...(19): siRNA sense strand
gaaaauugaggaacgaaau

SEQ ID NO: 957525 - RNA, 19 nt, Homo sapiens
  misc_RNA (1)...(19): siRNA sense strand
cagggucugcuucuuauug

SEQ ID NO: 957526 - RNA, 19 nt, Homo sapiens
  misc_RNA (1)...(19): siRNA sense strand
gaggaacuuuuaaaacuuc

SEQ ID NO: 957527 - RNA, 19 nt, Homo sapiens
  misc_RNA (1)...(19): siRNA sense strand
ggacggacaacaucagacu

SEQ ID NO: 957528 - RNA, 19 nt, Homo sapiens
  misc_RNA (1)...(19): siRNA sense strand
gggaggaagaggacaagga

SEQ ID NO: 957529 - RNA, 19 nt, Homo sapiens
  misc_RNA (1)...(19): siRNA sense strand
gagacauccugaccaagac

SEQ ID NO: 957530 - RNA, 19 nt, Homo sapiens
  misc_RNA (1)...(19): siRNA sense strand
gaccaggaucgaugaggaa

SEQ ID NO: 957531 - RNA, 19 nt, Homo sapiens
  misc_RNA (1)...(19): siRNA sense strand
aagccuuucucccuucuug

SEQ ID NO: 957532 - RNA, 19 nt, Homo sapiens
  misc_RNA (1)...(19): siRNA sense strand
ccgaggagguccagaagcu

SEQ ID NO: 957533 - RNA, 19 nt, Homo sapiens
  misc_RNA (1)...(19): siRNA sense strand
ccaaaccuucaaugagaaa

SEQ ID NO: 957534 - RNA, 19 nt, Homo sapiens
  misc_RNA (1)...(19): siRNA sense strand
augggcagcugucggauga

SEQ ID NO: 957535 - RNA, 19 nt, Homo sapiens
  misc_RNA (1)...(19): siRNA sense strand
ggagagggauggggaagga

SEQ ID NO: 957536 - RNA, 19 nt, Homo sapiens
  misc_RNA (1)...(19): siRNA sense strand
ccaccacgcuagccucacu

SEQ ID NO: 957537 - RNA, 19 nt, Homo sapiens
  misc_RNA (1)...(19): siRNA sense strand
aguaauaacccacgugaag

SEQ ID NO: 957538 - RNA, 19 nt, Homo sapiens
  misc_RNA (1)...(19): siRNA sense strand
caggaucgaugaggaagag

SEQ ID NO: 957539 - RNA, 19 nt, Homo sapiens
  misc_RNA (1)...(19): siRNA sense strand
gcugaagauugagaaccaa

SEQ ID NO: 957540 - RNA, 19 nt, Homo sapiens
  misc_RNA (1)...(19): siRNA sense strand
uaacccacgugaaggaaaa

SEQ ID NO: 957541 - RNA, 19 nt, Homo sapiens
  misc_RNA (1)...(19): siRNA sense strand
gguccgaggagguccagaa

SEQ ID NO: 957542 - RNA, 19 nt, Homo sapiens
  misc_RNA (1)...(19): siRNA sense strand
agggucugcuucuuauuga

SEQ ID NO: 957543 - RNA, 19 nt, Homo sapiens
  misc_RNA (1)...(19): siRNA sense strand
ugcgagagguggagcagau

SEQ ID NO: 957544 - RNA, 19 nt, Homo sapiens
  misc_RNA (1)...(19): siRNA sense strand
cuauggaagggacgaguuu

SEQ ID NO: 957545 - RNA, 19 nt, Homo sapiens
  misc_RNA (1)...(19): siRNA sense strand
aaauugaggaacgaaauga

SEQ ID NO: 957546 - RNA, 19 nt, Homo sapiens
  misc_RNA (1)...(19): siRNA sense strand
aagcguaccugcgccaucu

SEQ ID NO: 957547 - RNA, 19 nt, Homo sapiens
  misc_RNA (1)...(19): siRNA sense strand
cacgcuagccucacuuugu

SEQ ID NO: 957548 - RNA, 19 nt, Homo sapiens
  misc_RNA (1)...(19): siRNA sense strand
gaagaaaagguggacaaga

SEQ ID NO: 957549 - RNA, 19 nt, Homo sapiens
  misc_RNA (1)...(19): siRNA sense strand
uccaggcacucaagaagca

SEQ ID NO: 957550 - RNA, 19 nt, Homo sapiens
  misc_RNA (1)...(19): siRNA sense strand
accaaaccuucaaugagaa

SEQ ID NO: 957551 - RNA, 19 nt, Homo sapiens
  misc_RNA (1)...(19): siRNA sense strand
caagaagcagguggugaug

SEQ ID NO: 957552 - RNA, 19 nt, Homo sapiens
  misc_RNA (1)...(19): siRNA sense strand
accuauaccugcagcacaa

SEQ ID NO: 957553 - RNA, 19 nt, Homo sapiens
  misc_RNA (1)...(19): siRNA sense strand
aggaggagacgcagagaga

SEQ ID NO: 957554 - RNA, 19 nt, Homo sapiens
  misc_RNA (1)...(19): siRNA sense strand
ugaagugccuuacaaguuu

SEQ ID NO: 957555 - RNA, 19 nt, Homo sapiens
  misc_RNA (1)...(19): siRNA sense strand
agaaguacgucgugaagaa

SEQ ID NO: 957556 - RNA, 19 nt, Homo sapiens
  misc_RNA (1)...(19): siRNA sense strand
caucugcgcuacaaccuuu

SEQ ID NO: 957557 - RNA, 19 nt, Homo sapiens
  misc_RNA (1)...(19): siRNA sense strand
gauucuggaucaaccauuu

SEQ ID NO: 957558 - RNA, 19 nt, Homo sapiens
  misc_RNA (1)...(19): siRNA sense strand
ucacagguuucugggauua

SEQ ID NO: 957559 - RNA, 19 nt, Homo sapiens
  misc_RNA (1)...(19): siRNA sense strand
acaauuacccuguuucuga

SEQ ID NO: 957560 - RNA, 19 nt, Homo sapiens
  misc_RNA (1)...(19): siRNA sense strand
gaagugccuuacaaguuug

SEQ ID NO: 957561 - RNA, 19 nt, Homo sapiens
  misc_RNA (1)...(19): siRNA sense strand
ucucuacuauggacagaua

SEQ ID NO: 957562 - RNA, 19 nt, Homo sapiens
  misc_RNA (1)...(19): siRNA sense strand
acuggaauauugacccuua

SEQ ID NO: 957563 - RNA, 19 nt, Homo sapiens
  misc_RNA (1)...(19): siRNA sense strand
agagacugaucgcugaaua

SEQ ID NO: 957564 - RNA, 19 nt, Homo sapiens
  misc_RNA (1)...(19): siRNA sense strand
aggcuuauguacagaagua

SEQ ID NO: 957565 - RNA, 19 nt, Homo sapiens
  misc_RNA (1)...(19): siRNA sense strand
ggugauggccgugguguuu

SEQ ID NO: 957566 - RNA, 19 nt, Homo sapiens
  misc_RNA (1)...(19): siRNA sense strand
ggcggagacuggagauuga

SEQ ID NO: 957567 - RNA, 19 nt, Homo sapiens
  misc_RNA (1)...(19): siRNA sense strand
caauuacccuguuucugau

SEQ ID NO: 957568 - RNA, 19 nt, Homo sapiens
  misc_RNA (1)...(19): siRNA sense strand
cugaaucucucccuguuau

SEQ ID NO: 957569 - RNA, 19 nt, Homo sapiens
  misc_RNA (1)...(19): siRNA sense strand
acugaucgcugaauaugga

SEQ ID NO: 957570 - RNA, 19 nt, Homo sapiens
  misc_RNA (1)...(19): siRNA sense strand
gaauuguguugauccucuu

SEQ ID NO: 957571 - RNA, 19 nt, Homo sapiens
  misc_RNA (1)...(19): siRNA sense strand
agauugaagugccuuacaa

SEQ ID NO: 957572 - RNA, 19 nt, Homo sapiens
  misc_RNA (1)...(19): siRNA sense strand
aguacgucgugaagaauua

SEQ ID NO: 957573 - RNA, 19 nt, Homo sapiens
  misc_RNA (1)...(19): siRNA sense strand
caucacguuucuuccauuc

SEQ ID NO: 957574 - RNA, 19 nt, Homo sapiens
  misc_RNA (1)...(19): siRNA sense strand
gccgaugcuucacagguuu

SEQ ID NO: 957575 - RNA, 19 nt, Homo sapiens
  misc_RNA (1)...(19): siRNA sense strand
ccaccuacauguuaguuuu

SEQ ID NO: 957576 - RNA, 19 nt, Homo sapiens
  misc_RNA (1)...(19): siRNA sense strand
ugucauaguugugccauuc

SEQ ID NO: 957577 - RNA, 19 nt, Homo sapiens
  misc_RNA (1)...(19): siRNA sense strand
gaucaccgcacuccucauc

SEQ ID NO: 957578 - RNA, 19 nt, Homo sapiens
  misc_RNA (1)...(19): siRNA sense strand
cuccuuaucucuacuaugg

SEQ ID NO: 957579 - RNA, 19 nt, Homo sapiens
  misc_RNA (1)...(19): siRNA sense strand
gaaguacgucgugaagaau

SEQ ID NO: 957580 - RNA, 19 nt, Homo sapiens
  misc_RNA (1)...(19): siRNA sense strand
gcugaaucucucccuguua

SEQ ID NO: 957581 - RNA, 19 nt, Homo sapiens
  misc_RNA (1)...(19): siRNA sense strand
gauguauauuggccaagug

SEQ ID NO: 957582 - RNA, 19 nt, Homo sapiens
  misc_RNA (1)...(19): siRNA sense strand
ugccauucuuccuguguua

SEQ ID NO: 957583 - RNA, 19 nt, Homo sapiens
  misc_RNA (1)...(19): siRNA sense strand
gagacugaucgcugaauau

SEQ ID NO: 957584 - RNA, 19 nt, Homo sapiens
  misc_RNA (1)...(19): siRNA sense strand
gccggaggcuuauguacag

SEQ ID NO: 957585 - RNA, 19 nt, Homo sapiens
  misc_RNA (1)...(19): siRNA sense strand
caaguuuguuaccuacaca

SEQ ID NO: 957586 - RNA, 19 nt, Homo sapiens
  misc_RNA (1)...(19): siRNA sense strand
ggaggcuuauguacagaag

SEQ ID NO: 957587 - RNA, 19 nt, Homo sapiens
  misc_RNA (1)...(19): siRNA sense strand
ucucucacugcaaguauua

SEQ ID NO: 957588 - RNA, 19 nt, Homo sapiens
  misc_RNA (1)...(19): siRNA sense strand
gcagugggaauuguguuga

SEQ ID NO: 957589 - RNA, 19 nt, Homo sapiens
  misc_RNA (1)...(19): siRNA sense strand
ggacaccaccaccauucug

SEQ ID NO: 957590 - RNA, 19 nt, Homo sapiens
  misc_RNA (1)...(19): siRNA sense strand
uucacucacuggaauauug

SEQ ID NO: 957591 - RNA, 19 nt, Homo sapiens
  misc_RNA (1)...(19): siRNA sense strand
uauccaagcccgcugaauc

SEQ ID NO: 957592 - RNA, 19 nt, Homo sapiens
  misc_RNA (1)...(19): siRNA sense strand
gcucuacacugggaugcau

SEQ ID NO: 957593 - RNA, 19 nt, Homo sapiens
  misc_RNA (1)...(19): siRNA sense strand
ccaguauccauuuguguug

SEQ ID NO: 957594 - RNA, 19 nt, Homo sapiens
  misc_RNA (1)...(19): siRNA sense strand
uugaagugccuuacaaguu

SEQ ID NO: 957595 - RNA, 19 nt, Homo sapiens
  misc_RNA (1)...(19): siRNA sense strand
ggagugaccauaggauucu

SEQ ID NO: 957596 - RNA, 19 nt, Homo sapiens
  misc_RNA (1)...(19): siRNA sense strand
ccucuugguucgucagcuu

SEQ ID NO: 957597 - RNA, 19 nt, Homo sapiens
  misc_RNA (1)...(19): siRNA sense strand
guuggcaucugcgcuacaa

SEQ ID NO: 957598 - RNA, 19 nt, Homo sapiens
  misc_RNA (1)...(19): siRNA sense strand
gagauugaagugccuuaca

SEQ ID NO: 957599 - RNA, 19 nt, Homo sapiens
  misc_RNA (1)...(19): siRNA sense strand
gacccuuauuuauccagaa

SEQ ID NO: 957600 - RNA, 19 nt, Homo sapiens
  misc_RNA (1)...(19): siRNA sense strand
gggcuggagugaccauagg

SEQ ID NO: 957601 - RNA, 19 nt, Homo sapiens
  misc_RNA (1)...(19): siRNA sense strand
gcggacaccaccaccauuc

SEQ ID NO: 957602 - RNA, 19 nt, Homo sapiens
  misc_RNA (1)...(19): siRNA sense strand
auuacccuguuucugauua

SEQ ID NO: 957603 - RNA, 19 nt, Homo sapiens
  misc_RNA (1)...(19): siRNA sense strand
ucacucacuggaauauuga

SEQ ID NO: 957604 - RNA, 19 nt, Homo sapiens
  misc_RNA (1)...(19): siRNA sense strand
ugccgaugcuucacagguu

SEQ ID NO: 957605 - RNA, 19 nt, Homo sapiens
  misc_RNA (1)...(19): siRNA sense strand
accauaggauucuggauca

SEQ ID NO: 957606 - RNA, 19 nt, Homo sapiens
  misc_RNA (1)...(19): siRNA sense strand
agacugaucgcugaauaug

SEQ ID NO: 957607 - RNA, 19 nt, Homo sapiens
  misc_RNA (1)...(19): siRNA sense strand
ucauaguugugccauucuu

SEQ ID NO: 957608 - RNA, 19 nt, Homo sapiens
  misc_RNA (1)...(19): siRNA sense strand
ugcauacgguccuggaugu

SEQ ID NO: 957609 - RNA, 19 nt, Homo sapiens
  misc_RNA (1)...(19): siRNA sense strand
ucucacugcaaguauuaua

SEQ ID NO: 957610 - RNA, 19 nt, Homo sapiens
  misc_RNA (1)...(19): siRNA sense strand
uguuacaauuacccuguuu

SEQ ID NO: 957611 - RNA, 19 nt, Homo sapiens
  misc_RNA (1)...(19): siRNA sense strand
gugccauucuuccuguguu

SEQ ID NO: 957612 - RNA, 19 nt, Homo sapiens
  misc_RNA (1)...(19): siRNA sense strand
ugauguauauuggccaagu

SEQ ID NO: 957613 - RNA, 19 nt, Homo sapiens
  misc_RNA (1)...(19): siRNA sense strand
acacaucuguuggcaucug

SEQ ID NO: 957614 - RNA, 19 nt, Homo sapiens
  misc_RNA (1)...(19): siRNA sense strand
gagacuggagauugaagug

SEQ ID NO: 957615 - RNA, 19 nt, Homo sapiens
  misc_RNA (1)...(19): siRNA sense strand
guguuacaauuacccuguu

SEQ ID NO: 957616 - RNA, 19 nt, Homo sapiens
  misc_RNA (1)...(19): siRNA sense strand
gaucgcugaauauggaaug

SEQ ID NO: 957617 - RNA, 19 nt, Homo sapiens
  misc_RNA (1)...(19): siRNA sense strand
uauugacccuuauuuaucc

SEQ ID NO: 957618 - RNA, 19 nt, Homo sapiens
  misc_RNA (1)...(19): siRNA sense strand
ccuuauuuauccagaagau

SEQ ID NO: 957619 - RNA, 19 nt, Homo sapiens
  misc_RNA (1)...(19): siRNA sense strand
cgcugaaucucucccuguu

SEQ ID NO: 957620 - RNA, 19 nt, Homo sapiens
  misc_RNA (1)...(19): siRNA sense strand
acaucacguuucuuccauu

SEQ ID NO: 957621 - RNA, 19 nt, Homo sapiens
  misc_RNA (1)...(19): siRNA sense strand
ucacguuucuuccauucac

SEQ ID NO: 957622 - RNA, 19 nt, Homo sapiens
  misc_RNA (1)...(19): siRNA sense strand
ggagacuggagauugaagu

SEQ ID NO: 957623 - RNA, 19 nt, Homo sapiens
  misc_RNA (1)...(19): siRNA sense strand
cagugggaauuguguugau

SEQ ID NO: 957624 - RNA, 19 nt, Homo sapiens
  misc_RNA (1)...(19): siRNA sense strand
ucuuccagcuuguauccaa

SEQ ID NO: 957625 - RNA, 19 nt, Homo sapiens
  misc_RNA (1)...(19): siRNA sense strand
ucaccgcacuccucaucgu

SEQ ID NO: 957626 - RNA, 19 nt, Homo sapiens
  misc_RNA (1)...(19): siRNA sense strand
gaacuaaacuagacgauga

SEQ ID NO: 957627 - RNA, 19 nt, Homo sapiens
  misc_RNA (1)...(19): siRNA sense strand
caacagcuauuuagugaaa

SEQ ID NO: 957628 - RNA, 19 nt, Homo sapiens
  misc_RNA (1)...(19): siRNA sense strand
gaaagaagcauguuuaacu

SEQ ID NO: 957629 - RNA, 19 nt, Homo sapiens
  misc_RNA (1)...(19): siRNA sense strand
caauaaaguuguugcagaa

SEQ ID NO: 957630 - RNA, 19 nt, Homo sapiens
  misc_RNA (1)...(19): siRNA sense strand
caaggagaauuaggauuua

SEQ ID NO: 957631 - RNA, 19 nt, Homo sapiens
  misc_RNA (1)...(19): siRNA sense strand
gaaacgaguagguaagaua

SEQ ID NO: 957632 - RNA, 19 nt, Homo sapiens
  misc_RNA (1)...(19): siRNA sense strand
gcuaauggcugaggugaaa

SEQ ID NO: 957633 - RNA, 19 nt, Homo sapiens
  misc_RNA (1)...(19): siRNA sense strand
ccaguuggcuguguucaua

SEQ ID NO: 957634 - RNA, 19 nt, Homo sapiens
  misc_RNA (1)...(19): siRNA sense strand
gggacuguaugcugaaaua

SEQ ID NO: 957635 - RNA, 19 nt, Homo sapiens
  misc_RNA (1)...(19): siRNA sense strand
gacgacagguucuaacauu

SEQ ID NO: 957636 - RNA, 19 nt, Homo sapiens
  misc_RNA (1)...(19): siRNA sense strand
guucauagaggcagcauua

SEQ ID NO: 957637 - RNA, 19 nt, Homo sapiens
  misc_RNA (1)...(19): siRNA sense strand
gcugaaagaagcauguuua

SEQ ID NO: 957638 - RNA, 19 nt, Homo sapiens
  misc_RNA (1)...(19): siRNA sense strand
ccaaggagaauuaggauuu

SEQ ID NO: 957639 - RNA, 19 nt, Homo sapiens
  misc_RNA (1)...(19): siRNA sense strand
gaucgggcaucaccugaaa

SEQ ID NO: 957640 - RNA, 19 nt, Homo sapiens
  misc_RNA (1)...(19): siRNA sense strand
caaaggaguuggcugaaag

SEQ ID NO: 957641 - RNA, 19 nt, Homo sapiens
  misc_RNA (1)...(19): siRNA sense strand
uaagauaccagacgaagaa

SEQ ID NO: 957642 - RNA, 19 nt, Homo sapiens
  misc_RNA (1)...(19): siRNA sense strand
gggauaauaugcaaucaag

SEQ ID NO: 957643 - RNA, 19 nt, Homo sapiens
  misc_RNA (1)...(19): siRNA sense strand
aaucuuugcugggauaaua

SEQ ID NO: 957644 - RNA, 19 nt, Homo sapiens
  misc_RNA (1)...(19): siRNA sense strand
cccaacagcuauuuaguga

SEQ ID NO: 957645 - RNA, 19 nt, Homo sapiens
  misc_RNA (1)...(19): siRNA sense strand
aaacugguaugaaggaaug

SEQ ID NO: 957646 - RNA, 19 nt, Homo sapiens
  misc_RNA (1)...(19): siRNA sense strand
gauagaaguuggugaaucc

SEQ ID NO: 957647 - RNA, 19 nt, Homo sapiens
  misc_RNA (1)...(19): siRNA sense strand
gaagugaucgugccuuuac

SEQ ID NO: 957648 - RNA, 19 nt, Homo sapiens
  misc_RNA (1)...(19): siRNA sense strand
ucaaaggaguuggcugaaa

SEQ ID NO: 957649 - RNA, 19 nt, Homo sapiens
  misc_RNA (1)...(19): siRNA sense strand
gauguuaccaauaaaguug

SEQ ID NO: 957650 - RNA, 19 nt, Homo sapiens
  misc_RNA (1)...(19): siRNA sense strand
ugaaggaacuaaacuagac

SEQ ID NO: 957651 - RNA, 19 nt, Homo sapiens
  misc_RNA (1)...(19): siRNA sense strand
guucuaacauucccaugga

SEQ ID NO: 957652 - RNA, 19 nt, Homo sapiens
  misc_RNA (1)...(19): siRNA sense strand
ccacuucaguuacuacaag

SEQ ID NO: 957653 - RNA, 19 nt, Homo sapiens
  misc_RNA (1)...(19): siRNA sense strand
ggaaggagcucggggaaga

SEQ ID NO: 957654 - RNA, 19 nt, Homo sapiens
  misc_RNA (1)...(19): siRNA sense strand
gacgaugaauuucuugaca

SEQ ID NO: 957655 - RNA, 19 nt, Homo sapiens
  misc_RNA (1)...(19): siRNA sense strand
gaugaaaacugguaugaag

SEQ ID NO: 957656 - RNA, 19 nt, Homo sapiens
  misc_RNA (1)...(19): siRNA sense strand
uaggaaugcugaacacugu

SEQ ID NO: 957657 - RNA, 19 nt, Homo sapiens
  misc_RNA (1)...(19): siRNA sense strand
ggaagugaucgugccuuua

SEQ ID NO: 957658 - RNA, 19 nt, Homo sapiens
  misc_RNA (1)...(19): siRNA sense strand
cgaugaauuucuugacaug

SEQ ID NO: 957659 - RNA, 19 nt, Homo sapiens
  misc_RNA (1)...(19): siRNA sense strand
gugaauccaugaagcuaau

SEQ ID NO: 957660 - RNA, 19 nt, Homo sapiens
  misc_RNA (1)...(19): siRNA sense strand
gaaguuggugaauccauga

SEQ ID NO: 957661 - RNA, 19 nt, Homo sapiens
  misc_RNA (1)...(19): siRNA sense strand
uggaaucuuugcugggaua

SEQ ID NO: 957662 - RNA, 19 nt, Homo sapiens
  misc_RNA (1)...(19): siRNA sense strand
uggaagugaucgugccuuu

SEQ ID NO: 957663 - RNA, 19 nt, Homo sapiens
  misc_RNA (1)...(19): siRNA sense strand
aauaaguggugcugaagga

SEQ ID NO: 957664 - RNA, 19 nt, Homo sapiens
  misc_RNA (1)...(19): siRNA sense strand
uaaaagagaucgggcauca

SEQ ID NO: 957665 - RNA, 19 nt, Homo sapiens
  misc_RNA (1)...(19): siRNA sense strand
gcagagcaagcuacagaug

SEQ ID NO: 957666 - RNA, 19 nt, Homo sapiens
  misc_RNA (1)...(19): siRNA sense strand
gauaauaugcaaucaagcu

SEQ ID NO: 957667 - RNA, 19 nt, Homo sapiens
  misc_RNA (1)...(19): siRNA sense strand
uuaauuacguggaagugau

SEQ ID NO: 957668 - RNA, 19 nt, Homo sapiens
  misc_RNA (1)...(19): siRNA sense strand
ggacaucauuacauuaacc

SEQ ID NO: 957669 - RNA, 19 nt, Homo sapiens
  misc_RNA (1)...(19): siRNA sense strand
caagcuaauaggugccuua

SEQ ID NO: 957670 - RNA, 19 nt, Homo sapiens
  misc_RNA (1)...(19): siRNA sense strand
ccgccuggauuacgauuau

SEQ ID NO: 957671 - RNA, 19 nt, Homo sapiens
  misc_RNA (1)...(19): siRNA sense strand
aaaccaaggagaauuagga

SEQ ID NO: 957672 - RNA, 19 nt, Homo sapiens
  misc_RNA (1)...(19): siRNA sense strand
ugaauuucuugacauggaa

SEQ ID NO: 957673 - RNA, 19 nt, Homo sapiens
  misc_RNA (1)...(19): siRNA sense strand
ggagaauuaggauuuaaag

SEQ ID NO: 957674 - RNA, 19 nt, Homo sapiens
  misc_RNA (1)...(19): siRNA sense strand
ggaaugauacacggagaau

SEQ ID NO: 957675 - RNA, 19 nt, Homo sapiens
  misc_RNA (1)...(19): siRNA sense strand
gaauaucuucagccaaauc

SEQ ID NO: 957676 - RNA, 19 nt, Homo sapiens
  misc_RNA (1)...(19): siRNA sense strand
uagaacaagucagccaguu

SEQ ID NO: 957677 - RNA, 19 nt, Homo sapiens
  misc_RNA (1)...(19): siRNA sense strand
acuagacgaugaauuucuu

SEQ ID NO: 957678 - RNA, 19 nt, Homo sapiens
  misc_RNA (1)...(19): siRNA sense strand
ggugaauccaugaagcuaa

SEQ ID NO: 957679 - RNA, 19 nt, Homo sapiens
  misc_RNA (1)...(19): siRNA sense strand
ugauagaaguuggugaauc

SEQ ID NO: 957680 - RNA, 19 nt, Homo sapiens
  misc_RNA (1)...(19): siRNA sense strand
guagugaagacgacagguu

SEQ ID NO: 957681 - RNA, 19 nt, Homo sapiens
  misc_RNA (1)...(19): siRNA sense strand
cacagacaguccacagaga

SEQ ID NO: 957682 - RNA, 19 nt, Homo sapiens
  misc_RNA (1)...(19): siRNA sense strand
gauaccagacgaagaaguc

SEQ ID NO: 957683 - RNA, 19 nt, Homo sapiens
  misc_RNA (1)...(19): siRNA sense strand
guaagauaccagacgaaga

SEQ ID NO: 957684 - RNA, 19 nt, Homo sapiens
  misc_RNA (1)...(19): siRNA sense strand
gcugaaggaacuaaacuag

SEQ ID NO: 957685 - RNA, 19 nt, Homo sapiens
  misc_RNA (1)...(19): siRNA sense strand
agaggcagcauuagacuau

SEQ ID NO: 957686 - RNA, 19 nt, Homo sapiens
  misc_RNA (1)...(19): siRNA sense strand
ucauagaggcagcauuaga

SEQ ID NO: 957687 - RNA, 19 nt, Homo sapiens
  misc_RNA (1)...(19): siRNA sense strand
agaaaaccaaggagaauua

SEQ ID NO: 957688 - RNA, 19 nt, Homo sapiens
  misc_RNA (1)...(19): siRNA sense strand
ugaagacgacagguucuaa

SEQ ID NO: 957689 - RNA, 19 nt, Homo sapiens
  misc_RNA (1)...(19): siRNA sense strand
caccaccucuguagugaag

SEQ ID NO: 957690 - RNA, 19 nt, Homo sapiens
  misc_RNA (1)...(19): siRNA sense strand
agacgaagaagucagacaa

SEQ ID NO: 957691 - RNA, 19 nt, Homo sapiens
  misc_RNA (1)...(19): siRNA sense strand
uaaagaaggggacaucauu

SEQ ID NO: 957692 - RNA, 19 nt, Homo sapiens
  misc_RNA (1)...(19): siRNA sense strand
cuucaguuacuacaagaua

SEQ ID NO: 957693 - RNA, 19 nt, Homo sapiens
  misc_RNA (1)...(19): siRNA sense strand
ggaccucccaacagcuauu

SEQ ID NO: 957694 - RNA, 19 nt, Homo sapiens
  misc_RNA (1)...(19): siRNA sense strand
cugaaagaagcauguuuaa

SEQ ID NO: 957695 - RNA, 19 nt, Homo sapiens
  misc_RNA (1)...(19): siRNA sense strand
ggggaagacuccaccuuug

SEQ ID NO: 957696 - RNA, 19 nt, Homo sapiens
  misc_RNA (1)...(19): siRNA sense strand
gucguggucucuaugacuu

SEQ ID NO: 957697 - RNA, 19 nt, Homo sapiens
  misc_RNA (1)...(19): siRNA sense strand
gaagacgacagguucuaac

SEQ ID NO: 957698 - RNA, 19 nt, Homo sapiens
  misc_RNA (1)...(19): siRNA sense strand
gggaagacuccaccuuugg

SEQ ID NO: 957699 - RNA, 19 nt, Homo sapiens
  misc_RNA (1)...(19): siRNA sense strand
gaaaacugguaugaaggaa

SEQ ID NO: 957700 - RNA, 19 nt, Homo sapiens
  misc_RNA (1)...(19): siRNA sense strand
uauugauccacuucaguua

SEQ ID NO: 957701 - RNA, 19 nt, Homo sapiens
  misc_RNA (1)...(19): siRNA sense strand
ggggacaucauuacauuaa

SEQ ID NO: 957702 - RNA, 19 nt, Homo sapiens
  misc_RNA (1)...(19): siRNA sense strand
caagcuacagaugcgaaua

SEQ ID NO: 957703 - RNA, 19 nt, Homo sapiens
  misc_RNA (1)...(19): siRNA sense strand
cugcagagcaagcuacaga

SEQ ID NO: 957704 - RNA, 19 nt, Homo sapiens
  misc_RNA (1)...(19): siRNA sense strand
gccuggauuacgauuauaa

SEQ ID NO: 957705 - RNA, 19 nt, Homo sapiens
  misc_RNA (1)...(19): siRNA sense strand
augaauuucuugacaugga

SEQ ID NO: 957706 - RNA, 19 nt, Homo sapiens
  misc_RNA (1)...(19): siRNA sense strand
cagacaguccacagagauu

SEQ ID NO: 957707 - RNA, 19 nt, Homo sapiens
  misc_RNA (1)...(19): siRNA sense strand
gccaaauccagcauacaga

SEQ ID NO: 957708 - RNA, 19 nt, Homo sapiens
  misc_RNA (1)...(19): siRNA sense strand
aaagaaggggacaucauua

SEQ ID NO: 957709 - RNA, 19 nt, Homo sapiens
  misc_RNA (1)...(19): siRNA sense strand
ggaguucuagugagcucaa

SEQ ID NO: 957710 - RNA, 19 nt, Homo sapiens
  misc_RNA (1)...(19): siRNA sense strand
ugaaaaggaguucuaguga

SEQ ID NO: 957711 - RNA, 19 nt, Homo sapiens
  misc_RNA (1)...(19): siRNA sense strand
caagccaaggccugugaaa

SEQ ID NO: 957712 - RNA, 19 nt, Homo sapiens
  misc_RNA (1)...(19): siRNA sense strand
cuacagaugcgaauaucag

SEQ ID NO: 957713 - RNA, 19 nt, Homo sapiens
  misc_RNA (1)...(19): siRNA sense strand
gcugggauaauaugcaauc

SEQ ID NO: 957714 - RNA, 19 nt, Homo sapiens
  misc_RNA (1)...(19): siRNA sense strand
ggugaagaccacaggauac

SEQ ID NO: 957715 - RNA, 19 nt, Homo sapiens
  misc_RNA (1)...(19): siRNA sense strand
gauucuuccccauuaauua

SEQ ID NO: 957716 - RNA, 19 nt, Homo sapiens
  misc_RNA (1)...(19): siRNA sense strand
gcaagcuacagaugcgaau

SEQ ID NO: 957717 - RNA, 19 nt, Homo sapiens
  misc_RNA (1)...(19): siRNA sense strand
agcauuagacuaucacaga

SEQ ID NO: 957718 - RNA, 19 nt, Homo sapiens
  misc_RNA (1)...(19): siRNA sense strand
aggcagcauuagacuauca

SEQ ID NO: 957719 - RNA, 19 nt, Homo sapiens
  misc_RNA (1)...(19): siRNA sense strand
aagaaacgaguagguaaga

SEQ ID NO: 957720 - RNA, 19 nt, Homo sapiens
  misc_RNA (1)...(19): siRNA sense strand
aaagaaacgaguagguaag

SEQ ID NO: 957721 - RNA, 19 nt, Homo sapiens
  misc_RNA (1)...(19): siRNA sense strand
aaaagaaacgaguagguaa

SEQ ID NO: 957722 - RNA, 19 nt, Homo sapiens
  misc_RNA (1)...(19): siRNA sense strand
agaacaagucagccaguug

SEQ ID NO: 957723 - RNA, 19 nt, Homo sapiens
  misc_RNA (1)...(19): siRNA sense strand
gugaagacgacagguucua

SEQ ID NO: 957724 - RNA, 19 nt, Homo sapiens
  misc_RNA (1)...(19): siRNA sense strand
ucagccaaauccagcauac

SEQ ID NO: 957725 - RNA, 19 nt, Homo sapiens
  misc_RNA (1)...(19): siRNA sense strand
cauagaggcagcauuagac

SEQ ID NO: 957726 - RNA, 19 nt, Homo sapiens
  misc_RNA (1)...(19): siRNA sense strand
gaacaccucugguaccaaa

SEQ ID NO: 957727 - RNA, 19 nt, Homo sapiens
  misc_RNA (1)...(19): siRNA sense strand
uaaaggacauugugacuga

SEQ ID NO: 957728 - RNA, 19 nt, Homo sapiens
  misc_RNA (1)...(19): siRNA sense strand
acauuaaccugcuggauua

SEQ ID NO: 957729 - RNA, 19 nt, Homo sapiens
  misc_RNA (1)...(19): siRNA sense strand
gagaacaucuuccacucaa

SEQ ID NO: 957730 - RNA, 19 nt, Homo sapiens
  misc_RNA (1)...(19): siRNA sense strand
gagagaggauuuacuccaa

SEQ ID NO: 957731 - RNA, 19 nt, Homo sapiens
  misc_RNA (1)...(19): siRNA sense strand
gauccugacugcugucuug

SEQ ID NO: 957732 - RNA, 19 nt, Homo sapiens
  misc_RNA (1)...(19): siRNA sense strand
caccaugaauucuuacuuu

SEQ ID NO: 957733 - RNA, 19 nt, Homo sapiens
  misc_RNA (1)...(19): siRNA sense strand
gcaaagagauucgcaaaau

SEQ ID NO: 957734 - RNA, 19 nt, Homo sapiens
  misc_RNA (1)...(19): siRNA sense strand
gaacaucuuccacucaaug

SEQ ID NO: 957735 - RNA, 19 nt, Homo sapiens
  misc_RNA (1)...(19): siRNA sense strand
gugcugaccugcuucaaug

SEQ ID NO: 957736 - RNA, 19 nt, Homo sapiens
  misc_RNA (1)...(19): siRNA sense strand
gacauuaaccugcuggauu

SEQ ID NO: 957737 - RNA, 19 nt, Homo sapiens
  misc_RNA (1)...(19): siRNA sense strand
gcacacggacagccucuuu

SEQ ID NO: 957738 - RNA, 19 nt, Homo sapiens
  misc_RNA (1)...(19): siRNA sense strand
gaacaauaccgugcaaauc

SEQ ID NO: 957739 - RNA, 19 nt, Homo sapiens
  misc_RNA (1)...(19): siRNA sense strand
ggauugcaguucucaagug

SEQ ID NO: 957740 - RNA, 19 nt, Homo sapiens
  misc_RNA (1)...(19): siRNA sense strand
gaacaagcaccuggaagug

SEQ ID NO: 957741 - RNA, 19 nt, Homo sapiens
  misc_RNA (1)...(19): siRNA sense strand
ugacugagagcaacaaguu

SEQ ID NO: 957742 - RNA, 19 nt, Homo sapiens
  misc_RNA (1)...(19): siRNA sense strand
ucaaagaaguggccaacgu

SEQ ID NO: 957743 - RNA, 19 nt, Homo sapiens
  misc_RNA (1)...(19): siRNA sense strand
cuacugaacaccucuggua

SEQ ID NO: 957744 - RNA, 19 nt, Homo sapiens
  misc_RNA (1)...(19): siRNA sense strand
ccaaaggcuuagaauguuc

SEQ ID NO: 957745 - RNA, 19 nt, Homo sapiens
  misc_RNA (1)...(19): siRNA sense strand
ggucagaggcccuuucauc

SEQ ID NO: 957746 - RNA, 19 nt, Homo sapiens
  misc_RNA (1)...(19): siRNA sense strand
gagaggauuuacuccaaca

SEQ ID NO: 957747 - RNA, 19 nt, Homo sapiens
  misc_RNA (1)...(19): siRNA sense strand
cagaggcccuuucaucauc

SEQ ID NO: 957748 - RNA, 19 nt, Homo sapiens
  misc_RNA (1)...(19): siRNA sense strand
uaccaaaggcuuagaaugu

SEQ ID NO: 957749 - RNA, 19 nt, Homo sapiens
  misc_RNA (1)...(19): siRNA sense strand
gugcaaaucaagcauguga

SEQ ID NO: 957750 - RNA, 19 nt, Homo sapiens
  misc_RNA (1)...(19): siRNA sense strand
uaaggaaccagcugaagga

SEQ ID NO: 957751 - RNA, 19 nt, Homo sapiens
  misc_RNA (1)...(19): siRNA sense strand
gaacuaccggcacgccuau

SEQ ID NO: 957752 - RNA, 19 nt, Homo sapiens
  misc_RNA (1)...(19): siRNA sense strand
acaauaccgugcaaaucaa

SEQ ID NO: 957753 - RNA, 19 nt, Homo sapiens
  misc_RNA (1)...(19): siRNA sense strand
uugagaagguccagaacaa

SEQ ID NO: 957754 - RNA, 19 nt, Homo sapiens
  misc_RNA (1)...(19): siRNA sense strand
ggagaacaucuuccacuca

SEQ ID NO: 957755 - RNA, 19 nt, Homo sapiens
  misc_RNA (1)...(19): siRNA sense strand
aagcggaucugagcuccua

SEQ ID NO: 957756 - RNA, 19 nt, Homo sapiens
  misc_RNA (1)...(19): siRNA sense strand
caacucccaccaugaauuc

SEQ ID NO: 957757 - RNA, 19 nt, Homo sapiens
  misc_RNA (1)...(19): siRNA sense strand
gcaaccagagccugaugaa

SEQ ID NO: 957758 - RNA, 19 nt, Homo sapiens
  misc_RNA (1)...(19): siRNA sense strand
ccagaacaauaccgugcaa

SEQ ID NO: 957759 - RNA, 19 nt, Homo sapiens
  misc_RNA (1)...(19): siRNA sense strand
uggauuaccugccggagau

SEQ ID NO: 957760 - RNA, 19 nt, Homo sapiens
  misc_RNA (1)...(19): siRNA sense strand
gaacaaccccuaccugauc

SEQ ID NO: 957761 - RNA, 19 nt, Homo sapiens
  misc_RNA (1)...(19): siRNA sense strand
gggaugaugaccaggauug

SEQ ID NO: 957762 - RNA, 19 nt, Homo sapiens
  misc_RNA (1)...(19): siRNA sense strand
uggcagcgcuggagaucga

SEQ ID NO: 957763 - RNA, 19 nt, Homo sapiens
  misc_RNA (1)...(19): siRNA sense strand
gcaagaaaagcaucaaaga

SEQ ID NO: 957764 - RNA, 19 nt, Homo sapiens
  misc_RNA (1)...(19): siRNA sense strand
caaagagauucgcaaaaug

SEQ ID NO: 957765 - RNA, 19 nt, Homo sapiens
  misc_RNA (1)...(19): siRNA sense strand
ugacaauggcaaagagauu

SEQ ID NO: 957766 - RNA, 19 nt, Homo sapiens
  misc_RNA (1)...(19): siRNA sense strand
ccacuucaacgugcucuuu

SEQ ID NO: 957767 - RNA, 19 nt, Homo sapiens
  misc_RNA (1)...(19): siRNA sense strand
aacaauaccgugcaaauca

SEQ ID NO: 957768 - RNA, 19 nt, Homo sapiens
  misc_RNA (1)...(19): siRNA sense strand
guaccaaaggcuuagaaug

SEQ ID NO: 957769 - RNA, 19 nt, Homo sapiens
  misc_RNA (1)...(19): siRNA sense strand
ugaucaaccuucucaagag

SEQ ID NO: 957770 - RNA, 19 nt, Homo sapiens
  misc_RNA (1)...(19): siRNA sense strand
gugauccacugccagacaa

SEQ ID NO: 957771 - RNA, 19 nt, Homo sapiens
  misc_RNA (1)...(19): siRNA sense strand
cucccaccaugaauucuua

SEQ ID NO: 957772 - RNA, 19 nt, Homo sapiens
  misc_RNA (1)...(19): siRNA sense strand
accaaaggcuuagaauguu

SEQ ID NO: 957773 - RNA, 19 nt, Homo sapiens
  misc_RNA (1)...(19): siRNA sense strand
ccagaugguuccugugacu

SEQ ID NO: 957774 - RNA, 19 nt, Homo sapiens
  misc_RNA (1)...(19): siRNA sense strand
gcuccuagaccgccuuuua

SEQ ID NO: 957775 - RNA, 19 nt, Homo sapiens
  misc_RNA (1)...(19): siRNA sense strand
ucgcagagguggacaagcu

SEQ ID NO: 957776 - RNA, 19 nt, Homo sapiens
  misc_RNA (1)...(19): siRNA sense strand
gaccucauccagaaguuug

SEQ ID NO: 957777 - RNA, 19 nt, Homo sapiens
  misc_RNA (1)...(19): siRNA sense strand
caaaaugugugagguuguu

SEQ ID NO: 957778 - RNA, 19 nt, Homo sapiens
  misc_RNA (1)...(19): siRNA sense strand
gggaguucguggcccagaa

SEQ ID NO: 957779 - RNA, 19 nt, Homo sapiens
  misc_RNA (1)...(19): siRNA sense strand
uggaggugcuggcagaaau

SEQ ID NO: 957780 - RNA, 19 nt, Homo sapiens
  misc_RNA (1)...(19): siRNA sense strand
ggaggucaccguggacuuc

SEQ ID NO: 957781 - RNA, 19 nt, Homo sapiens
  misc_RNA (1)...(19): siRNA sense strand
caagaaaagcaucaaagaa

SEQ ID NO: 957782 - RNA, 19 nt, Homo sapiens
  misc_RNA (1)...(19): siRNA sense strand
ucaacucccaccaugaauu

SEQ ID NO: 957783 - RNA, 19 nt, Homo sapiens
  misc_RNA (1)...(19): siRNA sense strand
gacaauggcaaagagauuc

SEQ ID NO: 957784 - RNA, 19 nt, Homo sapiens
  misc_RNA (1)...(19): siRNA sense strand
cuacgaugaccgcaagaaa

SEQ ID NO: 957785 - RNA, 19 nt, Homo sapiens
  misc_RNA (1)...(19): siRNA sense strand
ugaccaggauugcaguucu

SEQ ID NO: 957786 - RNA, 19 nt, Homo sapiens
  misc_RNA (1)...(19): siRNA sense strand
gucagaggcccuuucauca

SEQ ID NO: 957787 - RNA, 19 nt, Homo sapiens
  misc_RNA (1)...(19): siRNA sense strand
ucaaugacaagcuguacga

SEQ ID NO: 957788 - RNA, 19 nt, Homo sapiens
  misc_RNA (1)...(19): siRNA sense strand
cagccucuuucccauccua

SEQ ID NO: 957789 - RNA, 19 nt, Homo sapiens
  misc_RNA (1)...(19): siRNA sense strand
ucuaccaccucuacaucaa

SEQ ID NO: 957790 - RNA, 19 nt, Homo sapiens
  misc_RNA (1)...(19): siRNA sense strand
guccagaugguuccuguga

SEQ ID NO: 957791 - RNA, 19 nt, Homo sapiens
  misc_RNA (1)...(19): siRNA sense strand
uugcugagauggccaacau

SEQ ID NO: 957792 - RNA, 19 nt, Homo sapiens
  misc_RNA (1)...(19): siRNA sense strand
gugugaaguuugcugagau

SEQ ID NO: 957793 - RNA, 19 nt, Homo sapiens
  misc_RNA (1)...(19): siRNA sense strand
gaggucagaggcccuuuca

SEQ ID NO: 957794 - RNA, 19 nt, Homo sapiens
  misc_RNA (1)...(19): siRNA sense strand
ugaaucggaugaggugauc

SEQ ID NO: 957795 - RNA, 19 nt, Homo sapiens
  misc_RNA (1)...(19): siRNA sense strand
aaacuccucggaagauguu

SEQ ID NO: 957796 - RNA, 19 nt, Homo sapiens
  misc_RNA (1)...(19): siRNA sense strand
ggagucggugccagacauu

SEQ ID NO: 957797 - RNA, 19 nt, Homo sapiens
  misc_RNA (1)...(19): siRNA sense strand
agaacaauaccgugcaaau

SEQ ID NO: 957798 - RNA, 19 nt, Homo sapiens
  misc_RNA (1)...(19): siRNA sense strand
gaccaggauugcaguucuc

SEQ ID NO: 957799 - RNA, 19 nt, Homo sapiens
  misc_RNA (1)...(19): siRNA sense strand
uggcaaagagauucgcaaa

SEQ ID NO: 957800 - RNA, 19 nt, Homo sapiens
  misc_RNA (1)...(19): siRNA sense strand
agaacaagcaccuggaagu

SEQ ID NO: 957801 - RNA, 19 nt, Homo sapiens
  misc_RNA (1)...(19): siRNA sense strand
ugaaugcggagaacaucuu

SEQ ID NO: 957802 - RNA, 19 nt, Homo sapiens
  misc_RNA (1)...(19): siRNA sense strand
gacguuaucggaugaaucg

SEQ ID NO: 957803 - RNA, 19 nt, Homo sapiens
  misc_RNA (1)...(19): siRNA sense strand
gaaaagcaucaaagaagug

SEQ ID NO: 957804 - RNA, 19 nt, Homo sapiens
  misc_RNA (1)...(19): siRNA sense strand
ugugaaguuugcugagaug

SEQ ID NO: 957805 - RNA, 19 nt, Homo sapiens
  misc_RNA (1)...(19): siRNA sense strand
gcucuaccaccucuacauc

SEQ ID NO: 957806 - RNA, 19 nt, Homo sapiens
  misc_RNA (1)...(19): siRNA sense strand
ucuacaacaucgucaaggu

SEQ ID NO: 957807 - RNA, 19 nt, Homo sapiens
  misc_RNA (1)...(19): siRNA sense strand
ggauuuacuccaacaacca

SEQ ID NO: 957808 - RNA, 19 nt, Homo sapiens
  misc_RNA (1)...(19): siRNA sense strand
gaaugcggagaacaucuuc

SEQ ID NO: 957809 - RNA, 19 nt, Homo sapiens
  misc_RNA (1)...(19): siRNA sense strand
ucagaggcccuuucaucau

SEQ ID NO: 957810 - RNA, 19 nt, Homo sapiens
  misc_RNA (1)...(19): siRNA sense strand
gggugacaauggcaaagag

SEQ ID NO: 957811 - RNA, 19 nt, Homo sapiens
  misc_RNA (1)...(19): siRNA sense strand
uaucggaugaaucggauga

SEQ ID NO: 957812 - RNA, 19 nt, Homo sapiens
  misc_RNA (1)...(19): siRNA sense strand
acgaugcccugccaaagca

SEQ ID NO: 957813 - RNA, 19 nt, Homo sapiens
  misc_RNA (1)...(19): siRNA sense strand
gccgcgucaugcugccuua

SEQ ID NO: 957814 - RNA, 19 nt, Homo sapiens
  misc_RNA (1)...(19): siRNA sense strand
aguuugaccuggugagcuu

SEQ ID NO: 957815 - RNA, 19 nt, Homo sapiens
  misc_RNA (1)...(19): siRNA sense strand
aaugacaagcuguacgaaa

SEQ ID NO: 957816 - RNA, 19 nt, Homo sapiens
  misc_RNA (1)...(19): siRNA sense strand
gagucggugccagacauua

SEQ ID NO: 957817 - RNA, 19 nt, Homo sapiens
  misc_RNA (1)...(19): siRNA sense strand
ccaacauccuggugaucca

SEQ ID NO: 957818 - RNA, 19 nt, Homo sapiens
  misc_RNA (1)...(19): siRNA sense strand
caugaucaaccuucucaag

SEQ ID NO: 957819 - RNA, 19 nt, Homo sapiens
  misc_RNA (1)...(19): siRNA sense strand
ccaccaugaauucuuacuu

SEQ ID NO: 957820 - RNA, 19 nt, Homo sapiens
  misc_RNA (1)...(19): siRNA sense strand
ggaggugcuggcagaaauc

SEQ ID NO: 957821 - RNA, 19 nt, Homo sapiens
  misc_RNA (1)...(19): siRNA sense strand
gcaaggacucagggcucua

SEQ ID NO: 957822 - RNA, 19 nt, Homo sapiens
  misc_RNA (1)...(19): siRNA sense strand
gaucgugcagguccuaaac

SEQ ID NO: 957823 - RNA, 19 nt, Homo sapiens
  misc_RNA (1)...(19): siRNA sense strand
ggaucgugcagguccuaaa

SEQ ID NO: 957824 - RNA, 19 nt, Homo sapiens
  misc_RNA (1)...(19): siRNA sense strand
agaaaagcaucaaagaagu

SEQ ID NO: 957825 - RNA, 19 nt, Homo sapiens
  misc_RNA (1)...(19): siRNA sense strand
ggugauccacugccagaca

SEQ ID NO: 957826 - RNA, 19 nt, Homo sapiens
  misc_RNA (1)...(19): siRNA sense strand
gaaagaaggccuaugauua

SEQ ID NO: 957827 - RNA, 19 nt, Homo sapiens
  misc_RNA (1)...(19): siRNA sense strand
gaagaacaaugaucuggua

SEQ ID NO: 957828 - RNA, 19 nt, Homo sapiens
  misc_RNA (1)...(19): siRNA sense strand
ggacauagauucuggaagu

SEQ ID NO: 957829 - RNA, 19 nt, Homo sapiens
  misc_RNA (1)...(19): siRNA sense strand
gagcaagguuugagugaua

SEQ ID NO: 957830 - RNA, 19 nt, Homo sapiens
  misc_RNA (1)...(19): siRNA sense strand
gaacaaugaucugguaguu

SEQ ID NO: 957831 - RNA, 19 nt, Homo sapiens
  misc_RNA (1)...(19): siRNA sense strand
gaacagaaaggucaaauca

SEQ ID NO: 957832 - RNA, 19 nt, Homo sapiens
  misc_RNA (1)...(19): siRNA sense strand
guacaugacugauauuaca

SEQ ID NO: 957833 - RNA, 19 nt, Homo sapiens
  misc_RNA (1)...(19): siRNA sense strand
ggacaaagaagaacauaug

SEQ ID NO: 957834 - RNA, 19 nt, Homo sapiens
  misc_RNA (1)...(19): siRNA sense strand
ggaaagaaggccuaugauu

SEQ ID NO: 957835 - RNA, 19 nt, Homo sapiens
  misc_RNA (1)...(19): siRNA sense strand
cagaggaaguagaucauaa

SEQ ID NO: 957836 - RNA, 19 nt, Homo sapiens
  misc_RNA (1)...(19): siRNA sense strand
gaaggccuaugauuauuuc

SEQ ID NO: 957837 - RNA, 19 nt, Homo sapiens
  misc_RNA (1)...(19): siRNA sense strand
ggcuauggcuuucacuuaa

SEQ ID NO: 957838 - RNA, 19 nt, Homo sapiens
  misc_RNA (1)...(19): siRNA sense strand
aaagaaggccuaugauuau

SEQ ID NO: 957839 - RNA, 19 nt, Homo sapiens
  misc_RNA (1)...(19): siRNA sense strand
gaucaauggugucuuugug

SEQ ID NO: 957840 - RNA, 19 nt, Homo sapiens
  misc_RNA (1)...(19): siRNA sense strand
acagaaaggucaaaucauc

SEQ ID NO: 957841 - RNA, 19 nt, Homo sapiens
  misc_RNA (1)...(19): siRNA sense strand
gaaaggaagcaauggcuau

SEQ ID NO: 957842 - RNA, 19 nt, Homo sapiens
  misc_RNA (1)...(19): siRNA sense strand
uaggaucaauggugucuuu

SEQ ID NO: 957843 - RNA, 19 nt, Homo sapiens
  misc_RNA (1)...(19): siRNA sense strand
uggaaacccuggaucauga

SEQ ID NO: 957844 - RNA, 19 nt, Homo sapiens
  misc_RNA (1)...(19): siRNA sense strand
aaacacggguggacuugaa

SEQ ID NO: 957845 - RNA, 19 nt, Homo sapiens
  misc_RNA (1)...(19): siRNA sense strand
ggaauucagugacuuuacu

SEQ ID NO: 957846 - RNA, 19 nt, Homo sapiens
  misc_RNA (1)...(19): siRNA sense strand
gaaggaaggaggcagcuau

SEQ ID NO: 957847 - RNA, 19 nt, Homo sapiens
  misc_RNA (1)...(19): siRNA sense strand
gcuauggcuuucacuuaaa

SEQ ID NO: 957848 - RNA, 19 nt, Homo sapiens
  misc_RNA (1)...(19): siRNA sense strand
uaugagagcuggaguucug

SEQ ID NO: 957849 - RNA, 19 nt, Homo sapiens
  misc_RNA (1)...(19): siRNA sense strand
gucaagaacugcccaaugg

SEQ ID NO: 957850 - RNA, 19 nt, Homo sapiens
  misc_RNA (1)...(19): siRNA sense strand
ccauuucucuacuaucaaa

SEQ ID NO: 957851 - RNA, 19 nt, Homo sapiens
  misc_RNA (1)...(19): siRNA sense strand
caauggcuaugguuucuau

SEQ ID NO: 957852 - RNA, 19 nt, Homo sapiens
  misc_RNA (1)...(19): siRNA sense strand
gagcagaagauacaauuca

SEQ ID NO: 957853 - RNA, 19 nt, Homo sapiens
  misc_RNA (1)...(19): siRNA sense strand
ggagacagaguucuuagga

SEQ ID NO: 957854 - RNA, 19 nt, Homo sapiens
  misc_RNA (1)...(19): siRNA sense strand
gaucauaagccuaaacucu

SEQ ID NO: 957855 - RNA, 19 nt, Homo sapiens
  misc_RNA (1)...(19): siRNA sense strand
gaagcaauggcuaugguuu

SEQ ID NO: 957856 - RNA, 19 nt, Homo sapiens
  misc_RNA (1)...(19): siRNA sense strand
gaauggaggugugcaaacu

SEQ ID NO: 957857 - RNA, 19 nt, Homo sapiens
  misc_RNA (1)...(19): siRNA sense strand
gggugaaugugcuagauga

SEQ ID NO: 957858 - RNA, 19 nt, Homo sapiens
  misc_RNA (1)...(19): siRNA sense strand
ggacaaagaaacugacaag

SEQ ID NO: 957859 - RNA, 19 nt, Homo sapiens
  misc_RNA (1)...(19): siRNA sense strand
gcaaaacuauggcuucuuc

SEQ ID NO: 957860 - RNA, 19 nt, Homo sapiens
  misc_RNA (1)...(19): siRNA sense strand
gaggcuggcuugaagaaca

SEQ ID NO: 957861 - RNA, 19 nt, Homo sapiens
  misc_RNA (1)...(19): siRNA sense strand
ggguguacaugacugauau

SEQ ID NO: 957862 - RNA, 19 nt, Homo sapiens
  misc_RNA (1)...(19): siRNA sense strand
ucacauucuucuuccaauu

SEQ ID NO: 957863 - RNA, 19 nt, Homo sapiens
  misc_RNA (1)...(19): siRNA sense strand
ugaagugaauggagagaau

SEQ ID NO: 957864 - RNA, 19 nt, Homo sapiens
  misc_RNA (1)...(19): siRNA sense strand
gcagaagauacaauucaaa

SEQ ID NO: 957865 - RNA, 19 nt, Homo sapiens
  misc_RNA (1)...(19): siRNA sense strand
gauggagacagaguucuua

SEQ ID NO: 957866 - RNA, 19 nt, Homo sapiens
  misc_RNA (1)...(19): siRNA sense strand
ucagugacuuuacuaguuc

SEQ ID NO: 957867 - RNA, 19 nt, Homo sapiens
  misc_RNA (1)...(19): siRNA sense strand
uagaugaacccuaugagaa

SEQ ID NO: 957868 - RNA, 19 nt, Homo sapiens
  misc_RNA (1)...(19): siRNA sense strand
uguacagacuggcucauuu

SEQ ID NO: 957869 - RNA, 19 nt, Homo sapiens
  misc_RNA (1)...(19): siRNA sense strand
caaagagacggacaacaug

SEQ ID NO: 957870 - RNA, 19 nt, Homo sapiens
  misc_RNA (1)...(19): siRNA sense strand
gagaucagacuucacuguu

SEQ ID NO: 957871 - RNA, 19 nt, Homo sapiens
  misc_RNA (1)...(19): siRNA sense strand
guggaaagaaggccuauga

SEQ ID NO: 957872 - RNA, 19 nt, Homo sapiens
  misc_RNA (1)...(19): siRNA sense strand
ugaaagaguugggucaaag

SEQ ID NO: 957873 - RNA, 19 nt, Homo sapiens
  misc_RNA (1)...(19): siRNA sense strand
gaaagagugggaauucagu

SEQ ID NO: 957874 - RNA, 19 nt, Homo sapiens
  misc_RNA (1)...(19): siRNA sense strand
gagacagaguucuuaggau

SEQ ID NO: 957875 - RNA, 19 nt, Homo sapiens
  misc_RNA (1)...(19): siRNA sense strand
aauguaaacuguccaagca

SEQ ID NO: 957876 - RNA, 19 nt, Homo sapiens
  misc_RNA (1)...(19): siRNA sense strand
ggcuaugguuucuaucuga

SEQ ID NO: 957877 - RNA, 19 nt, Homo sapiens
  misc_RNA (1)...(19): siRNA sense strand
gaauucagugacuuuacua

SEQ ID NO: 957878 - RNA, 19 nt, Homo sapiens
  misc_RNA (1)...(19): siRNA sense strand
uggcugggcuagaggauga

SEQ ID NO: 957879 - RNA, 19 nt, Homo sapiens
  misc_RNA (1)...(19): siRNA sense strand
acaaagagacggacaacau

SEQ ID NO: 957880 - RNA, 19 nt, Homo sapiens
  misc_RNA (1)...(19): siRNA sense strand
gaauuguggagaugaagaa

SEQ ID NO: 957881 - RNA, 19 nt, Homo sapiens
  misc_RNA (1)...(19): siRNA sense strand
gaaagaguugggucaaagu

SEQ ID NO: 957882 - RNA, 19 nt, Homo sapiens
  misc_RNA (1)...(19): siRNA sense strand
aagaaggccuaugauuauu

SEQ ID NO: 957883 - RNA, 19 nt, Homo sapiens
  misc_RNA (1)...(19): siRNA sense strand
cagaaagagugggaauuca

SEQ ID NO: 957884 - RNA, 19 nt, Homo sapiens
  misc_RNA (1)...(19): siRNA sense strand
guagaaaugauuagaaagg

SEQ ID NO: 957885 - RNA, 19 nt, Homo sapiens
  misc_RNA (1)...(19): siRNA sense strand
caacggcgagucuguggaa

SEQ ID NO: 957886 - RNA, 19 nt, Homo sapiens
  misc_RNA (1)...(19): siRNA sense strand
ugaaaacuguccaagguaa

SEQ ID NO: 957887 - RNA, 19 nt, Homo sapiens
  misc_RNA (1)...(19): siRNA sense strand
ggagcaagguuugagugau

SEQ ID NO: 957888 - RNA, 19 nt, Homo sapiens
  misc_RNA (1)...(19): siRNA sense strand
gcucugcuaucucgugaag

SEQ ID NO: 957889 - RNA, 19 nt, Homo sapiens
  misc_RNA (1)...(19): siRNA sense strand
ggccuaugauuauuuccaa

SEQ ID NO: 957890 - RNA, 19 nt, Homo sapiens
  misc_RNA (1)...(19): siRNA sense strand
gaaugucacacuucuaguc

SEQ ID NO: 957891 - RNA, 19 nt, Homo sapiens
  misc_RNA (1)...(19): siRNA sense strand
ggagaucagacuucacugu

SEQ ID NO: 957892 - RNA, 19 nt, Homo sapiens
  misc_RNA (1)...(19): siRNA sense strand
agaggaggcuggcuugaag

SEQ ID NO: 957893 - RNA, 19 nt, Homo sapiens
  misc_RNA (1)...(19): siRNA sense strand
agaaggugguggauagaau

SEQ ID NO: 957894 - RNA, 19 nt, Homo sapiens
  misc_RNA (1)...(19): siRNA sense strand
ugacuuggcugggcuagag

SEQ ID NO: 957895 - RNA, 19 nt, Homo sapiens
  misc_RNA (1)...(19): siRNA sense strand
caucaaagagguacagaag

SEQ ID NO: 957896 - RNA, 19 nt, Homo sapiens
  misc_RNA (1)...(19): siRNA sense strand
gcaagaagggcaaaacuau

SEQ ID NO: 957897 - RNA, 19 nt, Homo sapiens
  misc_RNA (1)...(19): siRNA sense strand
gcuauggcuucucucugaa

SEQ ID NO: 957898 - RNA, 19 nt, Homo sapiens
  misc_RNA (1)...(19): siRNA sense strand
aagaacauaugcagguugu

SEQ ID NO: 957899 - RNA, 19 nt, Homo sapiens
  misc_RNA (1)...(19): siRNA sense strand
gaaggugguggauagaauc

SEQ ID NO: 957900 - RNA, 19 nt, Homo sapiens
  misc_RNA (1)...(19): siRNA sense strand
uucagugacuuuacuaguu

SEQ ID NO: 957901 - RNA, 19 nt, Homo sapiens
  misc_RNA (1)...(19): siRNA sense strand
uggcuauggcuuucacuua

SEQ ID NO: 957902 - RNA, 19 nt, Homo sapiens
  misc_RNA (1)...(19): siRNA sense strand
agaucagacuucacuguug

SEQ ID NO: 957903 - RNA, 19 nt, Homo sapiens
  misc_RNA (1)...(19): siRNA sense strand
gaauggagagaauguagag

SEQ ID NO: 957904 - RNA, 19 nt, Homo sapiens
  misc_RNA (1)...(19): siRNA sense strand
ggguggacuugaaagaguu

SEQ ID NO: 957905 - RNA, 19 nt, Homo sapiens
  misc_RNA (1)...(19): siRNA sense strand
ucagaaagagugggaauuc

SEQ ID NO: 957906 - RNA, 19 nt, Homo sapiens
  misc_RNA (1)...(19): siRNA sense strand
caagauggagacagaguuc

SEQ ID NO: 957907 - RNA, 19 nt, Homo sapiens
  misc_RNA (1)...(19): siRNA sense strand
ucugcuaucucgugaagga

SEQ ID NO: 957908 - RNA, 19 nt, Homo sapiens
  misc_RNA (1)...(19): siRNA sense strand
ccagagcagugggaagaau

SEQ ID NO: 957909 - RNA, 19 nt, Homo sapiens
  misc_RNA (1)...(19): siRNA sense strand
gagaaggugguggauagaa

SEQ ID NO: 957910 - RNA, 19 nt, Homo sapiens
  misc_RNA (1)...(19): siRNA sense strand
ugucaucauugaagugaau

SEQ ID NO: 957911 - RNA, 19 nt, Homo sapiens
  misc_RNA (1)...(19): siRNA sense strand
agaagaacauaugcagguu

SEQ ID NO: 957912 - RNA, 19 nt, Homo sapiens
  misc_RNA (1)...(19): siRNA sense strand
cuccauuucucuacuauca

SEQ ID NO: 957913 - RNA, 19 nt, Homo sapiens
  misc_RNA (1)...(19): siRNA sense strand
ggaagcaauggcuaugguu

SEQ ID NO: 957914 - RNA, 19 nt, Homo sapiens
  misc_RNA (1)...(19): siRNA sense strand
caagguuugagugauaaua

SEQ ID NO: 957915 - RNA, 19 nt, Homo sapiens
  misc_RNA (1)...(19): siRNA sense strand
agaaggccuaugauuauuu

SEQ ID NO: 957916 - RNA, 19 nt, Homo sapiens
  misc_RNA (1)...(19): siRNA sense strand
cuucuagucuguggaaaga

SEQ ID NO: 957917 - RNA, 19 nt, Homo sapiens
  misc_RNA (1)...(19): siRNA sense strand
gaagugaauggagagaaug

SEQ ID NO: 957918 - RNA, 19 nt, Homo sapiens
  misc_RNA (1)...(19): siRNA sense strand
ggaggcagcuauggcuucu

SEQ ID NO: 957919 - RNA, 19 nt, Homo sapiens
  misc_RNA (1)...(19): siRNA sense strand
gaaggagcaagguuugagu

SEQ ID NO: 957920 - RNA, 19 nt, Homo sapiens
  misc_RNA (1)...(19): siRNA sense strand
gccaggcucauucaucaaa

SEQ ID NO: 957921 - RNA, 19 nt, Homo sapiens
  misc_RNA (1)...(19): siRNA sense strand
cugccaggcucauucauca

SEQ ID NO: 957922 - RNA, 19 nt, Homo sapiens
  misc_RNA (1)...(19): siRNA sense strand
aaguagaucauaagccuaa

SEQ ID NO: 957923 - RNA, 19 nt, Homo sapiens
  misc_RNA (1)...(19): siRNA sense strand
agcuauggcuucucucuga

SEQ ID NO: 957924 - RNA, 19 nt, Homo sapiens
  misc_RNA (1)...(19): siRNA sense strand
ugugcuagaugaacccuau

SEQ ID NO: 957925 - RNA, 19 nt, Homo sapiens
  misc_RNA (1)...(19): siRNA sense strand
gcuaagaaaaucccuauug

SEQ ID NO: 957926 - RNA, 19 nt, Homo sapiens
  misc_RNA (1)...(19): siRNA sense strand
ggacuucuaugacaaauaa

SEQ ID NO: 957927 - RNA, 19 nt, Homo sapiens
  misc_RNA (1)...(19): siRNA sense strand
acacagacaugcagcaguu

SEQ ID NO: 957928 - RNA, 19 nt, Homo sapiens
  misc_RNA (1)...(19): siRNA sense strand
cugcugagcuuacuggaaa

SEQ ID NO: 957929 - RNA, 19 nt, Homo sapiens
  misc_RNA (1)...(19): siRNA sense strand
ggaaaggcugcucgugaua

SEQ ID NO: 957930 - RNA, 19 nt, Homo sapiens
  misc_RNA (1)...(19): siRNA sense strand
gaaaggcugcucgugauau

SEQ ID NO: 957931 - RNA, 19 nt, Homo sapiens
  misc_RNA (1)...(19): siRNA sense strand
ggaagcugguggauugcaa

SEQ ID NO: 957932 - RNA, 19 nt, Homo sapiens
  misc_RNA (1)...(19): siRNA sense strand
ugcaggagcugaaggcaaa

SEQ ID NO: 957933 - RNA, 19 nt, Homo sapiens
  misc_RNA (1)...(19): siRNA sense strand
gagcccacguggacuucua

SEQ ID NO: 957934 - RNA, 19 nt, Homo sapiens
  misc_RNA (1)...(19): siRNA sense strand
uaacaucucgucccucugu

SEQ ID NO: 957935 - RNA, 19 nt, Homo sapiens
  misc_RNA (1)...(19): siRNA sense strand
caaggugucagcccagaaa

SEQ ID NO: 957936 - RNA, 19 nt, Homo sapiens
  misc_RNA (1)...(19): siRNA sense strand
aaaggcugcucgugauaug

SEQ ID NO: 957937 - RNA, 19 nt, Homo sapiens
  misc_RNA (1)...(19): siRNA sense strand
cccagaaacugcugagcuu

SEQ ID NO: 957938 - RNA, 19 nt, Homo sapiens
  misc_RNA (1)...(19): siRNA sense strand
ucugugcccugcaaccuuu

SEQ ID NO: 957939 - RNA, 19 nt, Homo sapiens
  misc_RNA (1)...(19): siRNA sense strand
ugagggugcugaacuaugc

SEQ ID NO: 957940 - RNA, 19 nt, Homo sapiens
  misc_RNA (1)...(19): siRNA sense strand
gcuccgugcuuguccuuag

SEQ ID NO: 957941 - RNA, 19 nt, Homo sapiens
  misc_RNA (1)...(19): siRNA sense strand
gacugcugcuuaucaacaa

SEQ ID NO: 957942 - RNA, 19 nt, Homo sapiens
  misc_RNA (1)...(19): siRNA sense strand
ccagaaacugcugagcuua

SEQ ID NO: 957943 - RNA, 19 nt, Homo sapiens
  misc_RNA (1)...(19): siRNA sense strand
gcgcuguacugugcaggaa

SEQ ID NO: 957944 - RNA, 19 nt, Homo sapiens
  misc_RNA (1)...(19): siRNA sense strand
aggaaaggcugcucgugau

SEQ ID NO: 957945 - RNA, 19 nt, Homo sapiens
  misc_RNA (1)...(19): siRNA sense strand
gcuguacugugcaggaaag

SEQ ID NO: 957946 - RNA, 19 nt, Homo sapiens
  misc_RNA (1)...(19): siRNA sense strand
cacguggacuucuaugaca

SEQ ID NO: 957947 - RNA, 19 nt, Homo sapiens
  misc_RNA (1)...(19): siRNA sense strand
cgacugcugcuuaucaaca

SEQ ID NO: 957948 - RNA, 19 nt, Homo sapiens
  misc_RNA (1)...(19): siRNA sense strand
cuacugggcacugaacuug

SEQ ID NO: 957949 - RNA, 19 nt, Homo sapiens
  misc_RNA (1)...(19): siRNA sense strand
gcaaggugucagcccagaa

SEQ ID NO: 957950 - RNA, 19 nt, Homo sapiens
  misc_RNA (1)...(19): siRNA sense strand
gaaaaggacgaguucaagu

SEQ ID NO: 957951 - RNA, 19 nt, Homo sapiens
  misc_RNA (1)...(19): siRNA sense strand
uccaugcucugccugacuu

SEQ ID NO: 957952 - RNA, 19 nt, Homo sapiens
  misc_RNA (1)...(19): siRNA sense strand
guccuggccucaacagaac

SEQ ID NO: 957953 - RNA, 19 nt, Homo sapiens
  misc_RNA (1)...(19): siRNA sense strand
ggaaaguggugucauggau

SEQ ID NO: 957954 - RNA, 19 nt, Homo sapiens
  misc_RNA (1)...(19): siRNA sense strand
gaaaguggugucauggaua

SEQ ID NO: 957955 - RNA, 19 nt, Homo sapiens
  misc_RNA (1)...(19): siRNA sense strand
ggagaugucccuggaagaa

SEQ ID NO: 957956 - RNA, 19 nt, Homo sapiens
  misc_RNA (1)...(19): siRNA sense strand
ugucauggauagaugugua

SEQ ID NO: 957957 - RNA, 19 nt, Homo sapiens
  misc_RNA (1)...(19): siRNA sense strand
agaggaaaguggugucaug

SEQ ID NO: 957958 - RNA, 19 nt, Homo sapiens
  misc_RNA (1)...(19): siRNA sense strand
aaaguggugucauggauag

SEQ ID NO: 957959 - RNA, 19 nt, Homo sapiens
  misc_RNA (1)...(19): siRNA sense strand
cagugugaaugcagaccua

SEQ ID NO: 957960 - RNA, 19 nt, Homo sapiens
  misc_RNA (1)...(19): siRNA sense strand
ccacugggcagcaccaagu

SEQ ID NO: 957961 - RNA, 19 nt, Homo sapiens
  misc_RNA (1)...(19): siRNA sense strand
agaugucccuggaagaaca

SEQ ID NO: 957962 - RNA, 19 nt, Homo sapiens
  misc_RNA (1)...(19): siRNA sense strand
acgauggccuggagugugu

SEQ ID NO: 957963 - RNA, 19 nt, Homo sapiens
  misc_RNA (1)...(19): siRNA sense strand
guggugucauggauagaug

SEQ ID NO: 957964 - RNA, 19 nt, Homo sapiens
  misc_RNA (1)...(19): siRNA sense strand
ggacaacauucuucccuuu

SEQ ID NO: 957965 - RNA, 19 nt, Homo sapiens
  misc_RNA (1)...(19): siRNA sense strand
cauuaaagcuucuucugaa

SEQ ID NO: 957966 - RNA, 19 nt, Homo sapiens
  misc_RNA (1)...(19): siRNA sense strand
caacauucuucccuuuaug

SEQ ID NO: 957967 - RNA, 19 nt, Homo sapiens
  misc_RNA (1)...(19): siRNA sense strand
uaaggaaguguguaaauga

SEQ ID NO: 957968 - RNA, 19 nt, Homo sapiens
  misc_RNA (1)...(19): siRNA sense strand
gacaacauucuucccuuua

SEQ ID NO: 957969 - RNA, 19 nt, Homo sapiens
  misc_RNA (1)...(19): siRNA sense strand
cuaaggaaguguguaaaug

SEQ ID NO: 957970 - RNA, 19 nt, Homo sapiens
  misc_RNA (1)...(19): siRNA sense strand
ccaucagccuuuguaguua

SEQ ID NO: 957971 - RNA, 19 nt, Homo sapiens
  misc_RNA (1)...(19): siRNA sense strand
gcuacugccuuccucauca

SEQ ID NO: 957972 - RNA, 19 nt, Homo sapiens
  misc_RNA (1)...(19): siRNA sense strand
gggcuaaggaaguguguaa

SEQ ID NO: 957973 - RNA, 19 nt, Homo sapiens
  misc_RNA (1)...(19): siRNA sense strand
acaacauucuucccuuuau

SEQ ID NO: 957974 - RNA, 19 nt, Homo sapiens
  misc_RNA (1)...(19): siRNA sense strand
ccauuaaagcuucuucuga

SEQ ID NO: 957975 - RNA, 19 nt, Homo sapiens
  misc_RNA (1)...(19): siRNA sense strand
gcuaaggaaguguguaaau

SEQ ID NO: 957976 - RNA, 19 nt, Homo sapiens
  misc_RNA (1)...(19): siRNA sense strand
ugacaaguuggcaccuuua

SEQ ID NO: 957977 - RNA, 19 nt, Homo sapiens
  misc_RNA (1)...(19): siRNA sense strand
caucagccuuuguaguuac

SEQ ID NO: 957978 - RNA, 19 nt, Homo sapiens
  misc_RNA (1)...(19): siRNA sense strand
uggaggcgcuaucacacuu

SEQ ID NO: 957979 - RNA, 19 nt, Homo sapiens
  misc_RNA (1)...(19): siRNA sense strand
uugacaaguuggcaccuuu

SEQ ID NO: 957980 - RNA, 19 nt, Homo sapiens
  misc_RNA (1)...(19): siRNA sense strand
cuacugccuuccucaucaa

SEQ ID NO: 957981 - RNA, 19 nt, Homo sapiens
  misc_RNA (1)...(19): siRNA sense strand
gugaccaucagccuuugua

SEQ ID NO: 957982 - RNA, 19 nt, Homo sapiens
  misc_RNA (1)...(19): siRNA sense strand
cugaagcugugaagaaacu

SEQ ID NO: 957983 - RNA, 19 nt, Homo sapiens
  misc_RNA (1)...(19): siRNA sense strand
accaucagccuuuguaguu

SEQ ID NO: 957984 - RNA, 19 nt, Homo sapiens
  misc_RNA (1)...(19): siRNA sense strand
acucugggcauuucuguug

SEQ ID NO: 957985 - RNA, 19 nt, Homo sapiens
  misc_RNA (1)...(19): siRNA sense strand
gaccaucagccuuuguagu

SEQ ID NO: 957986 - RNA, 19 nt, Homo sapiens
  misc_RNA (1)...(19): siRNA sense strand
caaguuggcaccuuuaccu

SEQ ID NO: 957987 - RNA, 19 nt, Homo sapiens
  misc_RNA (1)...(19): siRNA sense strand
aaggaaguguguaaaugag

SEQ ID NO: 957988 - RNA, 19 nt, Homo sapiens
  misc_RNA (1)...(19): siRNA sense strand
guugacaaguuggcaccuu

SEQ ID NO: 957989 - RNA, 19 nt, Homo sapiens
  misc_RNA (1)...(19): siRNA sense strand
caacaaaccagaaggaaga

SEQ ID NO: 957990 - RNA, 19 nt, Homo sapiens
  misc_RNA (1)...(19): siRNA sense strand
ccaaguauauaaacagguu

SEQ ID NO: 957991 - RNA, 19 nt, Homo sapiens
  misc_RNA (1)...(19): siRNA sense strand
gauagucccuuuggagaug

SEQ ID NO: 957992 - RNA, 19 nt, Homo sapiens
  misc_RNA (1)...(19): siRNA sense strand
cauucaagauagucccuuu

SEQ ID NO: 957993 - RNA, 19 nt, Homo sapiens
  misc_RNA (1)...(19): siRNA sense strand
gcacccacccugauugaca

SEQ ID NO: 957994 - RNA, 19 nt, Homo sapiens
  misc_RNA (1)...(19): siRNA sense strand
uuugguggcugcagucuga

SEQ ID NO: 957995 - RNA, 19 nt, Homo sapiens
  misc_RNA (1)...(19): siRNA sense strand
ugccagcacuuccucauuc

SEQ ID NO: 957996 - RNA, 19 nt, Homo sapiens
  misc_RNA (1)...(19): siRNA sense strand
ccauacagcugucccuacu

SEQ ID NO: 957997 - RNA, 19 nt, Homo sapiens
  misc_RNA (1)...(19): siRNA sense strand
ucaagauagucccuuugga

SEQ ID NO: 957998 - RNA, 19 nt, Homo sapiens
  misc_RNA (1)...(19): siRNA sense strand
agcagaaccuccacacaug

SEQ ID NO: 957999 - RNA, 19 nt, Homo sapiens
  misc_RNA (1)...(19): siRNA sense strand
caacuccccugagcuguuu

SEQ ID NO: 958000 - RNA, 19 nt, Homo sapiens
  misc_RNA (1)...(19): siRNA sense strand
gugguggccaaguauauaa

SEQ ID NO: 958001 - RNA, 19 nt, Homo sapiens
  misc_RNA (1)...(19): siRNA sense strand
gauggccucucucccuucu

SEQ ID NO: 958002 - RNA, 19 nt, Homo sapiens
  misc_RNA (1)...(19): siRNA sense strand
gggaagcaagggugacaga

SEQ ID NO: 958003 - RNA, 19 nt, Homo sapiens
  misc_RNA (1)...(19): siRNA sense strand
cagcacccacccugauuga

SEQ ID NO: 958004 - RNA, 19 nt, Homo sapiens
  misc_RNA (1)...(19): siRNA sense strand
ggccagaggaugacauucu

SEQ ID NO: 958005 - RNA, 19 nt, Homo sapiens
  misc_RNA (1)...(19): siRNA sense strand
aagcagaaccuccacacau

SEQ ID NO: 958006 - RNA, 19 nt, Homo sapiens
  misc_RNA (1)...(19): siRNA sense strand
ccacugagggacagaugug

SEQ ID NO: 958007 - RNA, 19 nt, Homo sapiens
  misc_RNA (1)...(19): siRNA sense strand
acuccgugguggccaagua

SEQ ID NO: 958008 - RNA, 19 nt, Homo sapiens
  misc_RNA (1)...(19): siRNA sense strand
aggaugacauucuguacca

SEQ ID NO: 958009 - RNA, 19 nt, Homo sapiens
  misc_RNA (1)...(19): siRNA sense strand
cgugguggccaaguauaua

SEQ ID NO: 958010 - RNA, 19 nt, Homo sapiens
  misc_RNA (1)...(19): siRNA sense strand
gaaggaagaccccauacag

SEQ ID NO: 958011 - RNA, 19 nt, Homo sapiens
  misc_RNA (1)...(19): siRNA sense strand
gaacaggcucagggaagca

SEQ ID NO: 958012 - RNA, 19 nt, Homo sapiens
  misc_RNA (1)...(19): siRNA sense strand
uucaggaaauaaagcagaa

SEQ ID NO: 958013 - RNA, 19 nt, Homo sapiens
  misc_RNA (1)...(19): siRNA sense strand
gaagagaccugugaucauu

SEQ ID NO: 958014 - RNA, 19 nt, Homo sapiens
  misc_RNA (1)...(19): siRNA sense strand
gaucacaguuguacacuaa

SEQ ID NO: 958015 - RNA, 19 nt, Homo sapiens
  misc_RNA (1)...(19): siRNA sense strand
ccaaguggcugcugaaauu

SEQ ID NO: 958016 - RNA, 19 nt, Homo sapiens
  misc_RNA (1)...(19): siRNA sense strand
gaggagccuucauuuauaa

SEQ ID NO: 958017 - RNA, 19 nt, Homo sapiens
  misc_RNA (1)...(19): siRNA sense strand
gaggugcucucucccaaua

SEQ ID NO: 958018 - RNA, 19 nt, Homo sapiens
  misc_RNA (1)...(19): siRNA sense strand
gagaacauguuuaccuuug

SEQ ID NO: 958019 - RNA, 19 nt, Homo sapiens
  misc_RNA (1)...(19): siRNA sense strand
gcaggacgaugcucacauu

SEQ ID NO: 958020 - RNA, 19 nt, Homo sapiens
  misc_RNA (1)...(19): siRNA sense strand
gcagauugaagaagaaaua

SEQ ID NO: 958021 - RNA, 19 nt, Homo sapiens
  misc_RNA (1)...(19): siRNA sense strand
guacaggugcgguccauua

SEQ ID NO: 958022 - RNA, 19 nt, Homo sapiens
  misc_RNA (1)...(19): siRNA sense strand
ggagggaaaugccuauuag

SEQ ID NO: 958023 - RNA, 19 nt, Homo sapiens
  misc_RNA (1)...(19): siRNA sense strand
agaggagccuucauuuaua

SEQ ID NO: 958024 - RNA, 19 nt, Homo sapiens
  misc_RNA (1)...(19): siRNA sense strand
ccaacugccuauuagauuu

SEQ ID NO: 958025 - RNA, 19 nt, Homo sapiens
  misc_RNA (1)...(19): siRNA sense strand
gguaauagccaaagucaau

SEQ ID NO: 958026 - RNA, 19 nt, Homo sapiens
  misc_RNA (1)...(19): siRNA sense strand
gggaggccauggagcuuua

SEQ ID NO: 958027 - RNA, 19 nt, Homo sapiens
  misc_RNA (1)...(19): siRNA sense strand
gcagaggaucuauggaaua

SEQ ID NO: 958028 - RNA, 19 nt, Homo sapiens
  misc_RNA (1)...(19): siRNA sense strand
ucacauauguuaguaagga

SEQ ID NO: 958029 - RNA, 19 nt, Homo sapiens
  misc_RNA (1)...(19): siRNA sense strand
ggugaagcaucaaccaauu

SEQ ID NO: 958030 - RNA, 19 nt, Homo sapiens
  misc_RNA (1)...(19): siRNA sense strand
gauaagaagagaccuguga

SEQ ID NO: 958031 - RNA, 19 nt, Homo sapiens
  misc_RNA (1)...(19): siRNA sense strand
gggaaaugccuauuagauu

SEQ ID NO: 958032 - RNA, 19 nt, Homo sapiens
  misc_RNA (1)...(19): siRNA sense strand
cagaggagccuucauuuau

SEQ ID NO: 958033 - RNA, 19 nt, Homo sapiens
  misc_RNA (1)...(19): siRNA sense strand
gcucuuacuugccauuuau

SEQ ID NO: 958034 - RNA, 19 nt, Homo sapiens
  misc_RNA (1)...(19): siRNA sense strand
gaaugaggcugagaagcaa

SEQ ID NO: 958035 - RNA, 19 nt, Homo sapiens
  misc_RNA (1)...(19): siRNA sense strand
uaacuucugccauugauaa

SEQ ID NO: 958036 - RNA, 19 nt, Homo sapiens
  misc_RNA (1)...(19): siRNA sense strand
caaagucaauggugaacug

SEQ ID NO: 958037 - RNA, 19 nt, Homo sapiens
  misc_RNA (1)...(19): siRNA sense strand
gaucauucaucgagccauu

SEQ ID NO: 958038 - RNA, 19 nt, Homo sapiens
  misc_RNA (1)...(19): siRNA sense strand
ggaaugaggcugagaagca

SEQ ID NO: 958039 - RNA, 19 nt, Homo sapiens
  misc_RNA (1)...(19): siRNA sense strand
ccagaggagccuucauuua

SEQ ID NO: 958040 - RNA, 19 nt, Homo sapiens
  misc_RNA (1)...(19): siRNA sense strand
uugcaaagguccacaugua

SEQ ID NO: 958041 - RNA, 19 nt, Homo sapiens
  misc_RNA (1)...(19): siRNA sense strand
ugucagcccuggagaauau

SEQ ID NO: 958042 - RNA, 19 nt, Homo sapiens
  misc_RNA (1)...(19): siRNA sense strand
gcacagcuggcucaguaua

SEQ ID NO: 958043 - RNA, 19 nt, Homo sapiens
  misc_RNA (1)...(19): siRNA sense strand
caacugccuauuagauuua

SEQ ID NO: 958044 - RNA, 19 nt, Homo sapiens
  misc_RNA (1)...(19): siRNA sense strand
uggcuucuccuuucaauua

SEQ ID NO: 958045 - RNA, 19 nt, Homo sapiens
  misc_RNA (1)...(19): siRNA sense strand
ccagggcacugucuaaugu

SEQ ID NO: 958046 - RNA, 19 nt, Homo sapiens
  misc_RNA (1)...(19): siRNA sense strand
gcgagaacauguuuaccuu

SEQ ID NO: 958047 - RNA, 19 nt, Homo sapiens
  misc_RNA (1)...(19): siRNA sense strand
gcaaagaaccgagaucaca

SEQ ID NO: 958048 - RNA, 19 nt, Homo sapiens
  misc_RNA (1)...(19): siRNA sense strand
caggugcgguccauuaauu

SEQ ID NO: 958049 - RNA, 19 nt, Homo sapiens
  misc_RNA (1)...(19): siRNA sense strand
cagaggaucuauggaauau

SEQ ID NO: 958050 - RNA, 19 nt, Homo sapiens
  misc_RNA (1)...(19): siRNA sense strand
ucagguauccagugaauuu

SEQ ID NO: 958051 - RNA, 19 nt, Homo sapiens
  misc_RNA (1)...(19): siRNA sense strand
ccuauuagauuugcugauu

SEQ ID NO: 958052 - RNA, 19 nt, Homo sapiens
  misc_RNA (1)...(19): siRNA sense strand
gaacauguuuaccuuugag

SEQ ID NO: 958053 - RNA, 19 nt, Homo sapiens
  misc_RNA (1)...(19): siRNA sense strand
cccaggagauggagcauuu

SEQ ID NO: 958054 - RNA, 19 nt, Homo sapiens
  misc_RNA (1)...(19): siRNA sense strand
caauuaaaccugucaacaa

SEQ ID NO: 958055 - RNA, 19 nt, Homo sapiens
  misc_RNA (1)...(19): siRNA sense strand
ggagaaccguggaaaauga

SEQ ID NO: 958056 - RNA, 19 nt, Homo sapiens
  misc_RNA (1)...(19): siRNA sense strand
guaaagccaucauaaaaga

SEQ ID NO: 958057 - RNA, 19 nt, Homo sapiens
  misc_RNA (1)...(19): siRNA sense strand
uaggagagauugagaugug

SEQ ID NO: 958058 - RNA, 19 nt, Homo sapiens
  misc_RNA (1)...(19): siRNA sense strand
ggagcagauugaagaagaa

SEQ ID NO: 958059 - RNA, 19 nt, Homo sapiens
  misc_RNA (1)...(19): siRNA sense strand
aaacaacgccuuaccaagu

SEQ ID NO: 958060 - RNA, 19 nt, Homo sapiens
  misc_RNA (1)...(19): siRNA sense strand
cccaauauguacaacagua

SEQ ID NO: 958061 - RNA, 19 nt, Homo sapiens
  misc_RNA (1)...(19): siRNA sense strand
gaaauccuccuggaaaugu

SEQ ID NO: 958062 - RNA, 19 nt, Homo sapiens
  misc_RNA (1)...(19): siRNA sense strand
gcuuacagauuucauacga

SEQ ID NO: 958063 - RNA, 19 nt, Homo sapiens
  misc_RNA (1)...(19): siRNA sense strand
gcacaguggagcagauuga

SEQ ID NO: 958064 - RNA, 19 nt, Homo sapiens
  misc_RNA (1)...(19): siRNA sense strand
auaacaagaugaugagaga

SEQ ID NO: 958065 - RNA, 19 nt, Homo sapiens
  misc_RNA (1)...(19): siRNA sense strand
ugacuuggaucacaguugu

SEQ ID NO: 958066 - RNA, 19 nt, Homo sapiens
  misc_RNA (1)...(19): siRNA sense strand
uagagcugcuuacauuuga

SEQ ID NO: 958067 - RNA, 19 nt, Homo sapiens
  misc_RNA (1)...(19): siRNA sense strand
uuuaguaacuucugccauu

SEQ ID NO: 958068 - RNA, 19 nt, Homo sapiens
  misc_RNA (1)...(19): siRNA sense strand
augcacagcuggcucagua

SEQ ID NO: 958069 - RNA, 19 nt, Homo sapiens
  misc_RNA (1)...(19): siRNA sense strand
ggaucacaguuguacacua

SEQ ID NO: 958070 - RNA, 19 nt, Homo sapiens
  misc_RNA (1)...(19): siRNA sense strand
ccaucaaugugcuacaauu

SEQ ID NO: 958071 - RNA, 19 nt, Homo sapiens
  misc_RNA (1)...(19): siRNA sense strand
agauugagauguggaauga

SEQ ID NO: 958072 - RNA, 19 nt, Homo sapiens
  misc_RNA (1)...(19): siRNA sense strand
ggagggcaauccggaaaug

SEQ ID NO: 958073 - RNA, 19 nt, Homo sapiens
  misc_RNA (1)...(19): siRNA sense strand
caagcaacaucaucacagu

SEQ ID NO: 958074 - RNA, 19 nt, Homo sapiens
  misc_RNA (1)...(19): siRNA sense strand
gauacaagcaacaucauca

SEQ ID NO: 958075 - RNA, 19 nt, Homo sapiens
  misc_RNA (1)...(19): siRNA sense strand
gagcugcuuacauuugaua

SEQ ID NO: 958076 - RNA, 19 nt, Homo sapiens
  misc_RNA (1)...(19): siRNA sense strand
gauagauaaugcuguaaac

SEQ ID NO: 958077 - RNA, 19 nt, Homo sapiens
  misc_RNA (1)...(19): siRNA sense strand
caacaucaucacaguaaga

SEQ ID NO: 958078 - RNA, 19 nt, Homo sapiens
  misc_RNA (1)...(19): siRNA sense strand
gaccaucagcucuuacuug

SEQ ID NO: 958079 - RNA, 19 nt, Homo sapiens
  misc_RNA (1)...(19): siRNA sense strand
cucuagagcugcuuacauu

SEQ ID NO: 958080 - RNA, 19 nt, Homo sapiens
  misc_RNA (1)...(19): siRNA sense strand
ucacaguuguacacuaaau

SEQ ID NO: 958081 - RNA, 19 nt, Homo sapiens
  misc_RNA (1)...(19): siRNA sense strand
ugauagccauucuuucaga

SEQ ID NO: 958082 - RNA, 19 nt, Homo sapiens
  misc_RNA (1)...(19): siRNA sense strand
ggagccuucauuuauaaua

SEQ ID NO: 958083 - RNA, 19 nt, Homo sapiens
  misc_RNA (1)...(19): siRNA sense strand
gcacgguaauagccaaagu

SEQ ID NO: 958084 - RNA, 19 nt, Homo sapiens
  misc_RNA (1)...(19): siRNA sense strand
caaaauucauggagagauu

SEQ ID NO: 958085 - RNA, 19 nt, Homo sapiens
  misc_RNA (1)...(19): siRNA sense strand
caaagguccacauguaaga

SEQ ID NO: 958086 - RNA, 19 nt, Homo sapiens
  misc_RNA (1)...(19): siRNA sense strand
gcugaaagcacgguaauag

SEQ ID NO: 958087 - RNA, 19 nt, Homo sapiens
  misc_RNA (1)...(19): siRNA sense strand
uggagcagauugaagaaga

SEQ ID NO: 958088 - RNA, 19 nt, Homo sapiens
  misc_RNA (1)...(19): siRNA sense strand
gagccuucauuuauaauac

SEQ ID NO: 958089 - RNA, 19 nt, Homo sapiens
  misc_RNA (1)...(19): siRNA sense strand
gcaaagguccacauguaag

SEQ ID NO: 958090 - RNA, 19 nt, Homo sapiens
  misc_RNA (1)...(19): siRNA sense strand
ggaaauccuccuggaaaug

SEQ ID NO: 958091 - RNA, 19 nt, Homo sapiens
  misc_RNA (1)...(19): siRNA sense strand
gcgaacaagagacaacaaa

SEQ ID NO: 958092 - RNA, 19 nt, Homo sapiens
  misc_RNA (1)...(19): siRNA sense strand
gaacagcuugauggacuuu

SEQ ID NO: 958093 - RNA, 19 nt, Homo sapiens
  misc_RNA (1)...(19): siRNA sense strand
aauuaaaccugucaacaag

SEQ ID NO: 958094 - RNA, 19 nt, Homo sapiens
  misc_RNA (1)...(19): siRNA sense strand
ggugcucucucccaauaug

SEQ ID NO: 958095 - RNA, 19 nt, Homo sapiens
  misc_RNA (1)...(19): siRNA sense strand
ugaagaaucucaggaagac

SEQ ID NO: 958096 - RNA, 19 nt, Homo sapiens
  misc_RNA (1)...(19): siRNA sense strand
gagaagcaacugcagaaca

SEQ ID NO: 958097 - RNA, 19 nt, Homo sapiens
  misc_RNA (1)...(19): siRNA sense strand
caacaaggccggaaaacuu

SEQ ID NO: 958098 - RNA, 19 nt, Homo sapiens
  misc_RNA (1)...(19): siRNA sense strand
gaucgggaaggaacaagaa

SEQ ID NO: 958099 - RNA, 19 nt, Homo sapiens
  misc_RNA (1)...(19): siRNA sense strand
acauuuggcuucuccuuuc

SEQ ID NO: 958100 - RNA, 19 nt, Homo sapiens
  misc_RNA (1)...(19): siRNA sense strand
acagcgaggugaagcauca

SEQ ID NO: 958101 - RNA, 19 nt, Homo sapiens
  misc_RNA (1)...(19): siRNA sense strand
gaacaagagacaacaaaau

SEQ ID NO: 958102 - RNA, 19 nt, Homo sapiens
  misc_RNA (1)...(19): siRNA sense strand
uccuggaaauguuuaagua

SEQ ID NO: 958103 - RNA, 19 nt, Homo sapiens
  misc_RNA (1)...(19): siRNA sense strand
ggaagacacggacacucaa

SEQ ID NO: 958104 - RNA, 19 nt, Homo sapiens
  misc_RNA (1)...(19): siRNA sense strand
gauaaacugaagaaucuca

SEQ ID NO: 958105 - RNA, 19 nt, Homo sapiens
  misc_RNA (1)...(19): siRNA sense strand
ccaagacaaggacaugaaa

SEQ ID NO: 958106 - RNA, 19 nt, Homo sapiens
  misc_RNA (1)...(19): siRNA sense strand
gcuguaaacgugcgaacaa

SEQ ID NO: 958107 - RNA, 19 nt, Homo sapiens
  misc_RNA (1)...(19): siRNA sense strand
ccaauauguacaacaguaa

SEQ ID NO: 958108 - RNA, 19 nt, Homo sapiens
  misc_RNA (1)...(19): siRNA sense strand
caaguggcugcugaaauua

SEQ ID NO: 958109 - RNA, 19 nt, Homo sapiens
  misc_RNA (1)...(19): siRNA sense strand
acaggaagaucgggaagga

SEQ ID NO: 958110 - RNA, 19 nt, Homo sapiens
  misc_RNA (1)...(19): siRNA sense strand
gaagacacggacacucaau

SEQ ID NO: 958111 - RNA, 19 nt, Homo sapiens
  misc_RNA (1)...(19): siRNA sense strand
gcccuaaaauugacauaaa

SEQ ID NO: 958112 - RNA, 19 nt, Homo sapiens
  misc_RNA (1)...(19): siRNA sense strand
gaaaacaacgccuuaccaa

SEQ ID NO: 958113 - RNA, 19 nt, Homo sapiens
  misc_RNA (1)...(19): siRNA sense strand
ccagaucgcuacuauauua

SEQ ID NO: 958114 - RNA, 19 nt, Homo sapiens
  misc_RNA (1)...(19): siRNA sense strand
ggaagaagcugaagaugag

SEQ ID NO: 958115 - RNA, 19 nt, Homo sapiens
  misc_RNA (1)...(19): siRNA sense strand
ggacagaaauaagaugaaa

SEQ ID NO: 958116 - RNA, 19 nt, Homo sapiens
  misc_RNA (1)...(19): siRNA sense strand
gaaagugguugccauaaag

SEQ ID NO: 958117 - RNA, 19 nt, Homo sapiens
  misc_RNA (1)...(19): siRNA sense strand
gaaggaaacuacaguaaac

SEQ ID NO: 958118 - RNA, 19 nt, Homo sapiens
  misc_RNA (1)...(19): siRNA sense strand
ccaagaaucucgagaaugg

SEQ ID NO: 958119 - RNA, 19 nt, Homo sapiens
  misc_RNA (1)...(19): siRNA sense strand
guccauauguaaccaaaua

SEQ ID NO: 958120 - RNA, 19 nt, Homo sapiens
  misc_RNA (1)...(19): siRNA sense strand
cauaacagcuauugaacuu

SEQ ID NO: 958121 - RNA, 19 nt, Homo sapiens
  misc_RNA (1)...(19): siRNA sense strand
guggaggccuguuugaaua

SEQ ID NO: 958122 - RNA, 19 nt, Homo sapiens
  misc_RNA (1)...(19): siRNA sense strand
ggacuggccuugaauaaaa

SEQ ID NO: 958123 - RNA, 19 nt, Homo sapiens
  misc_RNA (1)...(19): siRNA sense strand
ggaaggaaacuacaguaaa

SEQ ID NO: 958124 - RNA, 19 nt, Homo sapiens
  misc_RNA (1)...(19): siRNA sense strand
ugaaaggacucgauuaucu

SEQ ID NO: 958125 - RNA, 19 nt, Homo sapiens
  misc_RNA (1)...(19): siRNA sense strand
ggagggagcacgaaccuaa

SEQ ID NO: 958126 - RNA, 19 nt, Homo sapiens
  misc_RNA (1)...(19): siRNA sense strand
gaaccuggcccauuagaug

SEQ ID NO: 958127 - RNA, 19 nt, Homo sapiens
  misc_RNA (1)...(19): siRNA sense strand
auuagaaccuggcccauua

SEQ ID NO: 958128 - RNA, 19 nt, Homo sapiens
  misc_RNA (1)...(19): siRNA sense strand
agaaagugguugccauaaa

SEQ ID NO: 958129 - RNA, 19 nt, Homo sapiens
  misc_RNA (1)...(19): siRNA sense strand
ugaaagacaucccaaagag

SEQ ID NO: 958130 - RNA, 19 nt, Homo sapiens
  misc_RNA (1)...(19): siRNA sense strand
aaagaaaacuuccuacuug

SEQ ID NO: 958131 - RNA, 19 nt, Homo sapiens
  misc_RNA (1)...(19): siRNA sense strand
gggcauaacagcuauugaa

SEQ ID NO: 958132 - RNA, 19 nt, Homo sapiens
  misc_RNA (1)...(19): siRNA sense strand
uagaggacauucaacaaga

SEQ ID NO: 958133 - RNA, 19 nt, Homo sapiens
  misc_RNA (1)...(19): siRNA sense strand
uaagagaaauacugaaagg

SEQ ID NO: 958134 - RNA, 19 nt, Homo sapiens
  misc_RNA (1)...(19): siRNA sense strand
gaucgcuacuauauuaaga

SEQ ID NO: 958135 - RNA, 19 nt, Homo sapiens
  misc_RNA (1)...(19): siRNA sense strand
aaacccagaucgcuacuau

SEQ ID NO: 958136 - RNA, 19 nt, Homo sapiens
  misc_RNA (1)...(19): siRNA sense strand
uauuauggauccuaucuga

SEQ ID NO: 958137 - RNA, 19 nt, Homo sapiens
  misc_RNA (1)...(19): siRNA sense strand
caucggacuuggacagaaa

SEQ ID NO: 958138 - RNA, 19 nt, Homo sapiens
  misc_RNA (1)...(19): siRNA sense strand
gaagcacaaguuuauacua

SEQ ID NO: 958139 - RNA, 19 nt, Homo sapiens
  misc_RNA (1)...(19): siRNA sense strand
ucaaacagucggccuauga

SEQ ID NO: 958140 - RNA, 19 nt, Homo sapiens
  misc_RNA (1)...(19): siRNA sense strand
acaauuauuucuccucugu

SEQ ID NO: 958141 - RNA, 19 nt, Homo sapiens
  misc_RNA (1)...(19): siRNA sense strand
gggacuggaucuucacaau

SEQ ID NO: 958142 - RNA, 19 nt, Homo sapiens
  misc_RNA (1)...(19): siRNA sense strand
gauagaggacauucaacaa

SEQ ID NO: 958143 - RNA, 19 nt, Homo sapiens
  misc_RNA (1)...(19): siRNA sense strand
ccaacguccugcugucuga

SEQ ID NO: 958144 - RNA, 19 nt, Homo sapiens
  misc_RNA (1)...(19): siRNA sense strand
ucagaaagugguugccaua

SEQ ID NO: 958145 - RNA, 19 nt, Homo sapiens
  misc_RNA (1)...(19): siRNA sense strand
ggacucgauuaucuccauu

SEQ ID NO: 958146 - RNA, 19 nt, Homo sapiens
  misc_RNA (1)...(19): siRNA sense strand
ggacauucaacaagaaauc

SEQ ID NO: 958147 - RNA, 19 nt, Homo sapiens
  misc_RNA (1)...(19): siRNA sense strand
gaauaaggagccgagcuuu

SEQ ID NO: 958148 - RNA, 19 nt, Homo sapiens
  misc_RNA (1)...(19): siRNA sense strand
gcuccgcacuagaucuauu

SEQ ID NO: 958149 - RNA, 19 nt, Homo sapiens
  misc_RNA (1)...(19): siRNA sense strand
ggacuuggacagaaauaag

SEQ ID NO: 958150 - RNA, 19 nt, Homo sapiens
  misc_RNA (1)...(19): siRNA sense strand
cuaaggaguuauugaagca

SEQ ID NO: 958151 - RNA, 19 nt, Homo sapiens
  misc_RNA (1)...(19): siRNA sense strand
gaaaggacucgauuaucuc

SEQ ID NO: 958152 - RNA, 19 nt, Homo sapiens
  misc_RNA (1)...(19): siRNA sense strand
aauaaggagccgagcuuua

SEQ ID NO: 958153 - RNA, 19 nt, Homo sapiens
  misc_RNA (1)...(19): siRNA sense strand
ugcagcggcuccagagaua

SEQ ID NO: 958154 - RNA, 19 nt, Homo sapiens
  misc_RNA (1)...(19): siRNA sense strand
uugcagaguugaaggagaa

SEQ ID NO: 958155 - RNA, 19 nt, Homo sapiens
  misc_RNA (1)...(19): siRNA sense strand
gccuuucucucaguguuua

SEQ ID NO: 958156 - RNA, 19 nt, Homo sapiens
  misc_RNA (1)...(19): siRNA sense strand
uggaagaagcugaagauga

SEQ ID NO: 958157 - RNA, 19 nt, Homo sapiens
  misc_RNA (1)...(19): siRNA sense strand
ugacagacacccagaucaa

SEQ ID NO: 958158 - RNA, 19 nt, Homo sapiens
  misc_RNA (1)...(19): siRNA sense strand
ugagauagaggacauucaa

SEQ ID NO: 958159 - RNA, 19 nt, Homo sapiens
  misc_RNA (1)...(19): siRNA sense strand
aagcacaaguuuauacuac

SEQ ID NO: 958160 - RNA, 19 nt, Homo sapiens
  misc_RNA (1)...(19): siRNA sense strand
cacccgaggucaucaaaca

SEQ ID NO: 958161 - RNA, 19 nt, Homo sapiens
  misc_RNA (1)...(19): siRNA sense strand
gaaaauccacagagacauu

SEQ ID NO: 958162 - RNA, 19 nt, Homo sapiens
  misc_RNA (1)...(19): siRNA sense strand
agaggacauucaacaagaa

SEQ ID NO: 958163 - RNA, 19 nt, Homo sapiens
  misc_RNA (1)...(19): siRNA sense strand
guaaaccccucaaggaguu

SEQ ID NO: 958164 - RNA, 19 nt, Homo sapiens
  misc_RNA (1)...(19): siRNA sense strand
gaucuucacaauccgagaa

SEQ ID NO: 958165 - RNA, 19 nt, Homo sapiens
  misc_RNA (1)...(19): siRNA sense strand
gugugacaguccauaugua

SEQ ID NO: 958166 - RNA, 19 nt, Homo sapiens
  misc_RNA (1)...(19): siRNA sense strand
guuauugaagcacaaguuu

SEQ ID NO: 958167 - RNA, 19 nt, Homo sapiens
  misc_RNA (1)...(19): siRNA sense strand
ccaccgacguuggaaggaa

SEQ ID NO: 958168 - RNA, 19 nt, Homo sapiens
  misc_RNA (1)...(19): siRNA sense strand
gaggacauucaacaagaaa

SEQ ID NO: 958169 - RNA, 19 nt, Homo sapiens
  misc_RNA (1)...(19): siRNA sense strand
ucucaguguuuaucuacaa

SEQ ID NO: 958170 - RNA, 19 nt, Homo sapiens
  misc_RNA (1)...(19): siRNA sense strand
ggacuggaucuucacaauc

SEQ ID NO: 958171 - RNA, 19 nt, Homo sapiens
  misc_RNA (1)...(19): siRNA sense strand
ccuaaaggcagacccagaa

SEQ ID NO: 958172 - RNA, 19 nt, Homo sapiens
  misc_RNA (1)...(19): siRNA sense strand
ccacugcuaaggaguuauu

SEQ ID NO: 958173 - RNA, 19 nt, Homo sapiens
  misc_RNA (1)...(19): siRNA sense strand
gggacuggccuugaauaaa

SEQ ID NO: 958174 - RNA, 19 nt, Homo sapiens
  misc_RNA (1)...(19): siRNA sense strand
gacagacacccagaucaaa

SEQ ID NO: 958175 - RNA, 19 nt, Homo sapiens
  misc_RNA (1)...(19): siRNA sense strand
ccaaauauuauggauccua

SEQ ID NO: 958176 - RNA, 19 nt, Homo sapiens
  misc_RNA (1)...(19): siRNA sense strand
caccgacguuggaaggaaa

SEQ ID NO: 958177 - RNA, 19 nt, Homo sapiens
  misc_RNA (1)...(19): siRNA sense strand
ugaauaaggagccgagcuu

SEQ ID NO: 958178 - RNA, 19 nt, Homo sapiens
  misc_RNA (1)...(19): siRNA sense strand
caaagaaaacuuccuacuu

SEQ ID NO: 958179 - RNA, 19 nt, Homo sapiens
  misc_RNA (1)...(19): siRNA sense strand
caaucggacucagaaagug

SEQ ID NO: 958180 - RNA, 19 nt, Homo sapiens
  misc_RNA (1)...(19): siRNA sense strand
ugugacaguccauauguaa

SEQ ID NO: 958181 - RNA, 19 nt, Homo sapiens
  misc_RNA (1)...(19): siRNA sense strand
gagggagcacgaaccuaaa

SEQ ID NO: 958182 - RNA, 19 nt, Homo sapiens
  misc_RNA (1)...(19): siRNA sense strand
gaacuugggguccauugaa

SEQ ID NO: 958183 - RNA, 19 nt, Homo sapiens
  misc_RNA (1)...(19): siRNA sense strand
uggaaggaaacuacaguaa

SEQ ID NO: 958184 - RNA, 19 nt, Homo sapiens
  misc_RNA (1)...(19): siRNA sense strand
ucgcuacuauauuaagaga

SEQ ID NO: 958185 - RNA, 19 nt, Homo sapiens
  misc_RNA (1)...(19): siRNA sense strand
aagaugagauagaggacau

SEQ ID NO: 958186 - RNA, 19 nt, Homo sapiens
  misc_RNA (1)...(19): siRNA sense strand
agaagaaaauccacagaga

SEQ ID NO: 958187 - RNA, 19 nt, Homo sapiens
  misc_RNA (1)...(19): siRNA sense strand
gacaaucggacucagaaag

SEQ ID NO: 958188 - RNA, 19 nt, Homo sapiens
  misc_RNA (1)...(19): siRNA sense strand
uaaaggcagacccagaaga

SEQ ID NO: 958189 - RNA, 19 nt, Homo sapiens
  misc_RNA (1)...(19): siRNA sense strand
cagaaagugguugccauaa

SEQ ID NO: 958190 - RNA, 19 nt, Homo sapiens
  misc_RNA (1)...(19): siRNA sense strand
acccagaucgcuacuauau

SEQ ID NO: 958191 - RNA, 19 nt, Homo sapiens
  misc_RNA (1)...(19): siRNA sense strand
gacuuggacagaaauaaga

SEQ ID NO: 958192 - RNA, 19 nt, Homo sapiens
  misc_RNA (1)...(19): siRNA sense strand
uuggagagguguucaaagg

SEQ ID NO: 958193 - RNA, 19 nt, Homo sapiens
  misc_RNA (1)...(19): siRNA sense strand
gcauaacagcuauugaacu

SEQ ID NO: 958194 - RNA, 19 nt, Homo sapiens
  misc_RNA (1)...(19): siRNA sense strand
caucuggucccugggcaua

SEQ ID NO: 958195 - RNA, 19 nt, Homo sapiens
  misc_RNA (1)...(19): siRNA sense strand
ggaggccuguuugaauaag

SEQ ID NO: 958196 - RNA, 19 nt, Homo sapiens
  misc_RNA (1)...(19): siRNA sense strand
ucccaagaaucucgagaau

SEQ ID NO: 958197 - RNA, 19 nt, Homo sapiens
  misc_RNA (1)...(19): siRNA sense strand
acuacgcaaugcaaagaaa

SEQ ID NO: 958198 - RNA, 19 nt, Homo sapiens
  misc_RNA (1)...(19): siRNA sense strand
gaaacccagaucgcuacua

SEQ ID NO: 958199 - RNA, 19 nt, Homo sapiens
  misc_RNA (1)...(19): siRNA sense strand
aaaucacagugcugaguca

SEQ ID NO: 958200 - RNA, 19 nt, Homo sapiens
  misc_RNA (1)...(19): siRNA sense strand
auaaggagccgagcuuuag

SEQ ID NO: 958201 - RNA, 19 nt, Homo sapiens
  misc_RNA (1)...(19): siRNA sense strand
agaagcugaagaugagaua

SEQ ID NO: 958202 - RNA, 19 nt, Homo sapiens
  misc_RNA (1)...(19): siRNA sense strand
caguccauauguaaccaaa

SEQ ID NO: 958203 - RNA, 19 nt, Homo sapiens
  misc_RNA (1)...(19): siRNA sense strand
acugaaaggacucgauuau

SEQ ID NO: 958204 - RNA, 19 nt, Homo sapiens
  misc_RNA (1)...(19): siRNA sense strand
cugcuaaggaguuauugaa

SEQ ID NO: 958205 - RNA, 19 nt, Homo sapiens
  misc_RNA (1)...(19): siRNA sense strand
aggugaagcuggcggacuu

SEQ ID NO: 958206 - RNA, 19 nt, Homo sapiens
  misc_RNA (1)...(19): siRNA sense strand
gaugagauagaggacauuc

SEQ ID NO: 958207 - RNA, 19 nt, Homo sapiens
  misc_RNA (1)...(19): siRNA sense strand
ccaucggacuuggacagaa

SEQ ID NO: 958208 - RNA, 19 nt, Homo sapiens
  misc_RNA (1)...(19): siRNA sense strand
gaagaagcugaagaugaga

SEQ ID NO: 958209 - RNA, 19 nt, Homo sapiens
  misc_RNA (1)...(19): siRNA sense strand
uaaggagccgagcuuuaga

SEQ ID NO: 958210 - RNA, 19 nt, Homo sapiens
  misc_RNA (1)...(19): siRNA sense strand
gacauucaacaagaaauca

SEQ ID NO: 958211 - RNA, 19 nt, Homo sapiens
  misc_RNA (1)...(19): siRNA sense strand
acaaucggacucagaaagu

SEQ ID NO: 958212 - RNA, 19 nt, Homo sapiens
  misc_RNA (1)...(19): siRNA sense strand
aagaaaacuuccuacuuga

SEQ ID NO: 958213 - RNA, 19 nt, Homo sapiens
  misc_RNA (1)...(19): siRNA sense strand
ugacagaagucccuuugua

SEQ ID NO: 958214 - RNA, 19 nt, Homo sapiens
  misc_RNA (1)...(19): siRNA sense strand
ccaaacauauggccacuuu

SEQ ID NO: 958215 - RNA, 19 nt, Homo sapiens
  misc_RNA (1)...(19): siRNA sense strand
ucagagaacuuaagguuga

SEQ ID NO: 958216 - RNA, 19 nt, Homo sapiens
  misc_RNA (1)...(19): siRNA sense strand
caaacucucuucuccauug

SEQ ID NO: 958217 - RNA, 19 nt, Homo sapiens
  misc_RNA (1)...(19): siRNA sense strand
ggauccaucuuccugguua

SEQ ID NO: 958218 - RNA, 19 nt, Homo sapiens
  misc_RNA (1)...(19): siRNA sense strand
gguagaagguguccaggaa

SEQ ID NO: 958219 - RNA, 19 nt, Homo sapiens
  misc_RNA (1)...(19): siRNA sense strand
aaccagaacugccaaauug

SEQ ID NO: 958220 - RNA, 19 nt, Homo sapiens
  misc_RNA (1)...(19): siRNA sense strand
gcaagcaucccacaucuga

SEQ ID NO: 958221 - RNA, 19 nt, Homo sapiens
  misc_RNA (1)...(19): siRNA sense strand
gggaugugcccuauaauaa

SEQ ID NO: 958222 - RNA, 19 nt, Homo sapiens
  misc_RNA (1)...(19): siRNA sense strand
ccaauggacuuaagcuaga

SEQ ID NO: 958223 - RNA, 19 nt, Homo sapiens
  misc_RNA (1)...(19): siRNA sense strand
gaauuacuccuaugaugaa

SEQ ID NO: 958224 - RNA, 19 nt, Homo sapiens
  misc_RNA (1)...(19): siRNA sense strand
ucaacaaccucaugaguca

SEQ ID NO: 958225 - RNA, 19 nt, Homo sapiens
  misc_RNA (1)...(19): siRNA sense strand
gcacggacuuacaccuauu

SEQ ID NO: 958226 - RNA, 19 nt, Homo sapiens
  misc_RNA (1)...(19): siRNA sense strand
ggagugagcucuuaauccu

SEQ ID NO: 958227 - RNA, 19 nt, Homo sapiens
  misc_RNA (1)...(19): siRNA sense strand
gacagaagucccuuuguaa

SEQ ID NO: 958228 - RNA, 19 nt, Homo sapiens
  misc_RNA (1)...(19): siRNA sense strand
uaagguugaugaccaaaug

SEQ ID NO: 958229 - RNA, 19 nt, Homo sapiens
  misc_RNA (1)...(19): siRNA sense strand
ggcaacaaguggacuauuc

SEQ ID NO: 958230 - RNA, 19 nt, Homo sapiens
  misc_RNA (1)...(19): siRNA sense strand
ccaaaggccuaccucugaa

SEQ ID NO: 958231 - RNA, 19 nt, Homo sapiens
  misc_RNA (1)...(19): siRNA sense strand
cauaaugggcuauucauau

SEQ ID NO: 958232 - RNA, 19 nt, Homo sapiens
  misc_RNA (1)...(19): siRNA sense strand
gugaauuacuccuaugaug

SEQ ID NO: 958233 - RNA, 19 nt, Homo sapiens
  misc_RNA (1)...(19): siRNA sense strand
ccucugaccugaccauuuc

SEQ ID NO: 958234 - RNA, 19 nt, Homo sapiens
  misc_RNA (1)...(19): siRNA sense strand
gaacugccaaauugacaaa

SEQ ID NO: 958235 - RNA, 19 nt, Homo sapiens
  misc_RNA (1)...(19): siRNA sense strand
agagaaauuuggacagcua

SEQ ID NO: 958236 - RNA, 19 nt, Homo sapiens
  misc_RNA (1)...(19): siRNA sense strand
cagacgagcucuccagcaa

SEQ ID NO: 958237 - RNA, 19 nt, Homo sapiens
  misc_RNA (1)...(19): siRNA sense strand
agagaaagcguuguccuua

SEQ ID NO: 958238 - RNA, 19 nt, Homo sapiens
  misc_RNA (1)...(19): siRNA sense strand
gagaaagcguuguccuuac

SEQ ID NO: 958239 - RNA, 19 nt, Homo sapiens
  misc_RNA (1)...(19): siRNA sense strand
gacaagugguacauggaaa

SEQ ID NO: 958240 - RNA, 19 nt, Homo sapiens
  misc_RNA (1)...(19): siRNA sense strand
guucguaugucugaaauuc

SEQ ID NO: 958241 - RNA, 19 nt, Homo sapiens
  misc_RNA (1)...(19): siRNA sense strand
gcaagguuaccaaacauau

SEQ ID NO: 958242 - RNA, 19 nt, Homo sapiens
  misc_RNA (1)...(19): siRNA sense strand
gaccauuuccucugcaauu

SEQ ID NO: 958243 - RNA, 19 nt, Homo sapiens
  misc_RNA (1)...(19): siRNA sense strand
gaaauucuuggugcucuuu

SEQ ID NO: 958244 - RNA, 19 nt, Homo sapiens
  misc_RNA (1)...(19): siRNA sense strand
gaagucccuuuguaacauc

SEQ ID NO: 958245 - RNA, 19 nt, Homo sapiens
  misc_RNA (1)...(19): siRNA sense strand
ugaauuacuccuaugauga

SEQ ID NO: 958246 - RNA, 19 nt, Homo sapiens
  misc_RNA (1)...(19): siRNA sense strand
ggaggaaggaauaaguuug

SEQ ID NO: 958247 - RNA, 19 nt, Homo sapiens
  misc_RNA (1)...(19): siRNA sense strand
gaaaggaaggauccaucuu

SEQ ID NO: 958248 - RNA, 19 nt, Homo sapiens
  misc_RNA (1)...(19): siRNA sense strand
cauccacucugccuccaaa

SEQ ID NO: 958249 - RNA, 19 nt, Homo sapiens
  misc_RNA (1)...(19): siRNA sense strand
aagcaucccacaucugaua

SEQ ID NO: 958250 - RNA, 19 nt, Homo sapiens
  misc_RNA (1)...(19): siRNA sense strand
gcagcagacagagaaauuu

SEQ ID NO: 958251 - RNA, 19 nt, Homo sapiens
  misc_RNA (1)...(19): siRNA sense strand
caucugauacuggaacuuu

SEQ ID NO: 958252 - RNA, 19 nt, Homo sapiens
  misc_RNA (1)...(19): siRNA sense strand
ggaguaguaucuucuucag

SEQ ID NO: 958253 - RNA, 19 nt, Homo sapiens
  misc_RNA (1)...(19): siRNA sense strand
uaaagugucuggguaccau

SEQ ID NO: 958254 - RNA, 19 nt, Homo sapiens
  misc_RNA (1)...(19): siRNA sense strand
gcagacagagaaauuugga

SEQ ID NO: 958255 - RNA, 19 nt, Homo sapiens
  misc_RNA (1)...(19): siRNA sense strand
ucuuggugcucuuuaguuu

SEQ ID NO: 958256 - RNA, 19 nt, Homo sapiens
  misc_RNA (1)...(19): siRNA sense strand
ggaaaggaaggauccaucu

SEQ ID NO: 958257 - RNA, 19 nt, Homo sapiens
  misc_RNA (1)...(19): siRNA sense strand
aaaccagaacugccaaauu

SEQ ID NO: 958258 - RNA, 19 nt, Homo sapiens
  misc_RNA (1)...(19): siRNA sense strand
cagcaagcaucccacaucu

SEQ ID NO: 958259 - RNA, 19 nt, Homo sapiens
  misc_RNA (1)...(19): siRNA sense strand
gaaauuuggacagcuacuu

SEQ ID NO: 958260 - RNA, 19 nt, Homo sapiens
  misc_RNA (1)...(19): siRNA sense strand
uagaagguguccaggaaca

SEQ ID NO: 958261 - RNA, 19 nt, Homo sapiens
  misc_RNA (1)...(19): siRNA sense strand
cugagcaccuuugggcuua

SEQ ID NO: 958262 - RNA, 19 nt, Homo sapiens
  misc_RNA (1)...(19): siRNA sense strand
ggccaggaguaguaucuuc

SEQ ID NO: 958263 - RNA, 19 nt, Homo sapiens
  misc_RNA (1)...(19): siRNA sense strand
gaagaucuggaagagcuuu

SEQ ID NO: 958264 - RNA, 19 nt, Homo sapiens
  misc_RNA (1)...(19): siRNA sense strand
cgacaagugguacauggaa

SEQ ID NO: 958265 - RNA, 19 nt, Homo sapiens
  misc_RNA (1)...(19): siRNA sense strand
guaguaucuucuucagaga

SEQ ID NO: 958266 - RNA, 19 nt, Homo sapiens
  misc_RNA (1)...(19): siRNA sense strand
caugcugccuugccuccua

SEQ ID NO: 958267 - RNA, 19 nt, Homo sapiens
  misc_RNA (1)...(19): siRNA sense strand
cacaggaguuaguggcaaa

SEQ ID NO: 958268 - RNA, 19 nt, Homo sapiens
  misc_RNA (1)...(19): siRNA sense strand
gagugggccaggaguagua

SEQ ID NO: 958269 - RNA, 19 nt, Homo sapiens
  misc_RNA (1)...(19): siRNA sense strand
ccugcaagguuaccaaaca

SEQ ID NO: 958270 - RNA, 19 nt, Homo sapiens
  misc_RNA (1)...(19): siRNA sense strand
caauggacuuaagcuagaa

SEQ ID NO: 958271 - RNA, 19 nt, Homo sapiens
  misc_RNA (1)...(19): siRNA sense strand
cagcagacagagaaauuug

SEQ ID NO: 958272 - RNA, 19 nt, Homo sapiens
  misc_RNA (1)...(19): siRNA sense strand
cgagaguucguaugucuga

SEQ ID NO: 958273 - RNA, 19 nt, Homo sapiens
  misc_RNA (1)...(19): siRNA sense strand
gaggaaggaauaaguuugg

SEQ ID NO: 958274 - RNA, 19 nt, Homo sapiens
  misc_RNA (1)...(19): siRNA sense strand
gaacggggaugugcccuau

SEQ ID NO: 958275 - RNA, 19 nt, Homo sapiens
  misc_RNA (1)...(19): siRNA sense strand
gaguucguaugucugaaau

SEQ ID NO: 958276 - RNA, 19 nt, Homo sapiens
  misc_RNA (1)...(19): siRNA sense strand
agaagucccuuuguaacau

SEQ ID NO: 958277 - RNA, 19 nt, Homo sapiens
  misc_RNA (1)...(19): siRNA sense strand
cagaagucccuuuguaaca

SEQ ID NO: 958278 - RNA, 19 nt, Homo sapiens
  misc_RNA (1)...(19): siRNA sense strand
uccaaaggccuaccucuga

SEQ ID NO: 958279 - RNA, 19 nt, Homo sapiens
  misc_RNA (1)...(19): siRNA sense strand
agaaagcguuguccuuacu

SEQ ID NO: 958280 - RNA, 19 nt, Homo sapiens
  misc_RNA (1)...(19): siRNA sense strand
cugcuggagugagcucuua

SEQ ID NO: 958281 - RNA, 19 nt, Homo sapiens
  misc_RNA (1)...(19): siRNA sense strand
ccuuugggcuuaugugcaa

SEQ ID NO: 958282 - RNA, 19 nt, Homo sapiens
  misc_RNA (1)...(19): siRNA sense strand
uccaagcuaugcccucuga

SEQ ID NO: 958283 - RNA, 19 nt, Homo sapiens
  misc_RNA (1)...(19): siRNA sense strand
uguaagggccgaccgaaug

SEQ ID NO: 958284 - RNA, 19 nt, Homo sapiens
  misc_RNA (1)...(19): siRNA sense strand
uuacuccuaugaugaagau

SEQ ID NO: 958285 - RNA, 19 nt, Homo sapiens
  misc_RNA (1)...(19): siRNA sense strand
acagcuacuucuucgacua

SEQ ID NO: 958286 - RNA, 19 nt, Homo sapiens
  misc_RNA (1)...(19): siRNA sense strand
gcucuuuaguuuagauguc

SEQ ID NO: 958287 - RNA, 19 nt, Homo sapiens
  misc_RNA (1)...(19): siRNA sense strand
ucguaugucugaaauucuu

SEQ ID NO: 958288 - RNA, 19 nt, Homo sapiens
  misc_RNA (1)...(19): siRNA sense strand
ccacauuuaccgacaagug

SEQ ID NO: 958289 - RNA, 19 nt, Homo sapiens
  misc_RNA (1)...(19): siRNA sense strand
gagaacuuaagguugauga

SEQ ID NO: 958290 - RNA, 19 nt, Homo sapiens
  misc_RNA (1)...(19): siRNA sense strand
aaugggcuauucauauaug

SEQ ID NO: 958291 - RNA, 19 nt, Homo sapiens
  misc_RNA (1)...(19): siRNA sense strand
gagcaccuuugggcuuaug

SEQ ID NO: 958292 - RNA, 19 nt, Homo sapiens
  misc_RNA (1)...(19): siRNA sense strand
cuucagagaacuuaagguu

SEQ ID NO: 958293 - RNA, 19 nt, Homo sapiens
  misc_RNA (1)...(19): siRNA sense strand
aauggugaauuacuccuau

SEQ ID NO: 958294 - RNA, 19 nt, Homo sapiens
  misc_RNA (1)...(19): siRNA sense strand
gaugugcccuauaauaacc

SEQ ID NO: 958295 - RNA, 19 nt, Homo sapiens
  misc_RNA (1)...(19): siRNA sense strand
cugcuggacuacacaaugu

SEQ ID NO: 958296 - RNA, 19 nt, Homo sapiens
  misc_RNA (1)...(19): siRNA sense strand
agugguacauggaaaggaa

SEQ ID NO: 958297 - RNA, 19 nt, Homo sapiens
  misc_RNA (1)...(19): siRNA sense strand
cgaccacauuuaccgacaa

SEQ ID NO: 958298 - RNA, 19 nt, Homo sapiens
  misc_RNA (1)...(19): siRNA sense strand
ggcuauucauauauggaua

SEQ ID NO: 958299 - RNA, 19 nt, Homo sapiens
  misc_RNA (1)...(19): siRNA sense strand
acauauggccacuuuccua

SEQ ID NO: 958300 - RNA, 19 nt, Homo sapiens
  misc_RNA (1)...(19): siRNA sense strand
caagguuaccaaacauaug

SEQ ID NO: 958301 - RNA, 19 nt, Homo sapiens
  misc_RNA (1)...(19): siRNA sense strand
cagagaaagcguuguccuu

SEQ ID NO: 958302 - RNA, 19 nt, Homo sapiens
  misc_RNA (1)...(19): siRNA sense strand
ggaugugcccuauaauaac

SEQ ID NO: 958303 - RNA, 19 nt, Homo sapiens
  misc_RNA (1)...(19): siRNA sense strand
cgaacaguccaaaauaaua

SEQ ID NO: 958304 - RNA, 19 nt, Homo sapiens
  misc_RNA (1)...(19): siRNA sense strand
gagccacccucaacaaccu

SEQ ID NO: 958305 - RNA, 19 nt, Homo sapiens
  misc_RNA (1)...(19): siRNA sense strand
gaccacauuuaccgacaag

SEQ ID NO: 958306 - RNA, 19 nt, Homo sapiens
  misc_RNA (1)...(19): siRNA sense strand
gggcuuaugugcaaaaugg

SEQ ID NO: 958307 - RNA, 19 nt, Homo sapiens
  misc_RNA (1)...(19): siRNA sense strand
ugaaagcugcaagggauuu

SEQ ID NO: 958308 - RNA, 19 nt, Homo sapiens
  misc_RNA (1)...(19): siRNA sense strand
cagcucacccgaguccaua

SEQ ID NO: 958309 - RNA, 19 nt, Homo sapiens
  misc_RNA (1)...(19): siRNA sense strand
ugaugaagaucuggaagag

SEQ ID NO: 958310 - RNA, 19 nt, Homo sapiens
  misc_RNA (1)...(19): siRNA sense strand
ugaagugugagccagauga

SEQ ID NO: 958311 - RNA, 19 nt, Homo sapiens
  misc_RNA (1)...(19): siRNA sense strand
ugaaauucuuggugcucuu

SEQ ID NO: 958312 - RNA, 19 nt, Homo sapiens
  misc_RNA (1)...(19): siRNA sense strand
ugaaauguugcaugccaaa

SEQ ID NO: 958313 - RNA, 19 nt, Homo sapiens
  misc_RNA (1)...(19): siRNA sense strand
ggacuucucuauauagcua

SEQ ID NO: 958314 - RNA, 19 nt, Homo sapiens
  misc_RNA (1)...(19): siRNA sense strand
gcacuuccaugcccuucua

SEQ ID NO: 958315 - RNA, 19 nt, Homo sapiens
  misc_RNA (1)...(19): siRNA sense strand
gaucuggcaugcauauuug

SEQ ID NO: 958316 - RNA, 19 nt, Homo sapiens
  misc_RNA (1)...(19): siRNA sense strand
gaaaauaugucagcucuug

SEQ ID NO: 958317 - RNA, 19 nt, Homo sapiens
  misc_RNA (1)...(19): siRNA sense strand
gcagaaguauuugauugaa

SEQ ID NO: 958318 - RNA, 19 nt, Homo sapiens
  misc_RNA (1)...(19): siRNA sense strand
ccaccuggcuaauauauuc

SEQ ID NO: 958319 - RNA, 19 nt, Homo sapiens
  misc_RNA (1)...(19): siRNA sense strand
caaaucaacugacuguagu

SEQ ID NO: 958320 - RNA, 19 nt, Homo sapiens
  misc_RNA (1)...(19): siRNA sense strand
gcacaggaauauggcauga

SEQ ID NO: 958321 - RNA, 19 nt, Homo sapiens
  misc_RNA (1)...(19): siRNA sense strand
ucaacugacuguaguaaug

SEQ ID NO: 958322 - RNA, 19 nt, Homo sapiens
  misc_RNA (1)...(19): siRNA sense strand
gaaugacacuggcuuggau

SEQ ID NO: 958323 - RNA, 19 nt, Homo sapiens
  misc_RNA (1)...(19): siRNA sense strand
gaagaggcccguuaucauc

SEQ ID NO: 958324 - RNA, 19 nt, Homo sapiens
  misc_RNA (1)...(19): siRNA sense strand
gagcaaagcaccauucaag

SEQ ID NO: 958325 - RNA, 19 nt, Homo sapiens
  misc_RNA (1)...(19): siRNA sense strand
caagaguuauuaagucuca

SEQ ID NO: 958326 - RNA, 19 nt, Homo sapiens
  misc_RNA (1)...(19): siRNA sense strand
ggacagcauccaugagaaa

SEQ ID NO: 958327 - RNA, 19 nt, Homo sapiens
  misc_RNA (1)...(19): siRNA sense strand
ccaagaagcagaagccauu

SEQ ID NO: 958328 - RNA, 19 nt, Homo sapiens
  misc_RNA (1)...(19): siRNA sense strand
gaaacacgaagaugcugua

SEQ ID NO: 958329 - RNA, 19 nt, Homo sapiens
  misc_RNA (1)...(19): siRNA sense strand
cauccugacuucaaucuug

SEQ ID NO: 958330 - RNA, 19 nt, Homo sapiens
  misc_RNA (1)...(19): siRNA sense strand
cggcagaaguauuugauug

SEQ ID NO: 958331 - RNA, 19 nt, Homo sapiens
  misc_RNA (1)...(19): siRNA sense strand
gaacaaucacuaucaaguc

SEQ ID NO: 958332 - RNA, 19 nt, Homo sapiens
  misc_RNA (1)...(19): siRNA sense strand
guaaugccacccacucuuu

SEQ ID NO: 958333 - RNA, 19 nt, Homo sapiens
  misc_RNA (1)...(19): siRNA sense strand
ggaccuggcagacacauug

SEQ ID NO: 958334 - RNA, 19 nt, Homo sapiens
  misc_RNA (1)...(19): siRNA sense strand
ccugcacagucacuuauua

SEQ ID NO: 958335 - RNA, 19 nt, Homo sapiens
  misc_RNA (1)...(19): siRNA sense strand
ggaugaagcccaagaagca

SEQ ID NO: 958336 - RNA, 19 nt, Homo sapiens
  misc_RNA (1)...(19): siRNA sense strand
ccagaaauaccucuuugaa

SEQ ID NO: 958337 - RNA, 19 nt, Homo sapiens
  misc_RNA (1)...(19): siRNA sense strand
aagcaccauucaagaguua

SEQ ID NO: 958338 - RNA, 19 nt, Homo sapiens
  misc_RNA (1)...(19): siRNA sense strand
gcccagaaauaccucuuug

SEQ ID NO: 958339 - RNA, 19 nt, Homo sapiens
  misc_RNA (1)...(19): siRNA sense strand
gcaaagcaccauucaagag

SEQ ID NO: 958340 - RNA, 19 nt, Homo sapiens
  misc_RNA (1)...(19): siRNA sense strand
ccaaagaacaacagcuuga

SEQ ID NO: 958341 - RNA, 19 nt, Homo sapiens
  misc_RNA (1)...(19): siRNA sense strand
gaauucugcuacaccauag

SEQ ID NO: 958342 - RNA, 19 nt, Homo sapiens
  misc_RNA (1)...(19): siRNA sense strand
ugaauucugcuacaccaua

SEQ ID NO: 958343 - RNA, 19 nt, Homo sapiens
  misc_RNA (1)...(19): siRNA sense strand
acacgaagaugcuguacca

SEQ ID NO: 958344 - RNA, 19 nt, Homo sapiens
  misc_RNA (1)...(19): siRNA sense strand
ucugggacuucucuauaua

SEQ ID NO: 958345 - RNA, 19 nt, Homo sapiens
  misc_RNA (1)...(19): siRNA sense strand
cuucaaaggcacaggaaua

SEQ ID NO: 958346 - RNA, 19 nt, Homo sapiens
  misc_RNA (1)...(19): siRNA sense strand
aagaccaucccauuacuua

SEQ ID NO: 958347 - RNA, 19 nt, Homo sapiens
  misc_RNA (1)...(19): siRNA sense strand
gcaugcauauuugaacaau

SEQ ID NO: 958348 - RNA, 19 nt, Homo sapiens
  misc_RNA (1)...(19): siRNA sense strand
uaagucucauuucaacuga

SEQ ID NO: 958349 - RNA, 19 nt, Homo sapiens
  misc_RNA (1)...(19): siRNA sense strand
caaaggcacaggaauaugg

SEQ ID NO: 958350 - RNA, 19 nt, Homo sapiens
  misc_RNA (1)...(19): siRNA sense strand
ucccuucgcuuccguguga

SEQ ID NO: 958351 - RNA, 19 nt, Homo sapiens
  misc_RNA (1)...(19): siRNA sense strand
gaagaccaucccauuacuu

SEQ ID NO: 958352 - RNA, 19 nt, Homo sapiens
  misc_RNA (1)...(19): siRNA sense strand
gaaucuacaucugacaaag

SEQ ID NO: 958353 - RNA, 19 nt, Homo sapiens
  misc_RNA (1)...(19): siRNA sense strand
cagaggacauuaggacuuc

SEQ ID NO: 958354 - RNA, 19 nt, Homo sapiens
  misc_RNA (1)...(19): siRNA sense strand
uccaugcccuucuacaauu

SEQ ID NO: 958355 - RNA, 19 nt, Homo sapiens
  misc_RNA (1)...(19): siRNA sense strand
gggacagcauccaugagaa

SEQ ID NO: 958356 - RNA, 19 nt, Homo sapiens
  misc_RNA (1)...(19): siRNA sense strand
uaaugccacccacucuuua

SEQ ID NO: 958357 - RNA, 19 nt, Homo sapiens
  misc_RNA (1)...(19): siRNA sense strand
ucaaaucaacugacuguag

SEQ ID NO: 958358 - RNA, 19 nt, Homo sapiens
  misc_RNA (1)...(19): siRNA sense strand
gcucacauccaacaaaugg

SEQ ID NO: 958359 - RNA, 19 nt, Homo sapiens
  misc_RNA (1)...(19): siRNA sense strand
caaagcaccauucaagagu

SEQ ID NO: 958360 - RNA, 19 nt, Homo sapiens
  misc_RNA (1)...(19): siRNA sense strand
uuuacuaccugaugaugaa

SEQ ID NO: 958361 - RNA, 19 nt, Homo sapiens
  misc_RNA (1)...(19): siRNA sense strand
gagaaucuacaucugacaa

SEQ ID NO: 958362 - RNA, 19 nt, Homo sapiens
  misc_RNA (1)...(19): siRNA sense strand
ggauuuacugggcaaacua

SEQ ID NO: 958363 - RNA, 19 nt, Homo sapiens
  misc_RNA (1)...(19): siRNA sense strand
aaucugggacuucucuaua

SEQ ID NO: 958364 - RNA, 19 nt, Homo sapiens
  misc_RNA (1)...(19): siRNA sense strand
aaagcaccauucaagaguu

SEQ ID NO: 958365 - RNA, 19 nt, Homo sapiens
  misc_RNA (1)...(19): siRNA sense strand
cagcauccaugagaaaaua

SEQ ID NO: 958366 - RNA, 19 nt, Homo sapiens
  misc_RNA (1)...(19): siRNA sense strand
ggcagaaguauuugauuga

SEQ ID NO: 958367 - RNA, 19 nt, Homo sapiens
  misc_RNA (1)...(19): siRNA sense strand
gaaucugggacuucucuau

SEQ ID NO: 958368 - RNA, 19 nt, Homo sapiens
  misc_RNA (1)...(19): siRNA sense strand
gaagggaaacacgaagaug

SEQ ID NO: 958369 - RNA, 19 nt, Homo sapiens
  misc_RNA (1)...(19): siRNA sense strand
caccauagcccagaaauac

SEQ ID NO: 958370 - RNA, 19 nt, Homo sapiens
  misc_RNA (1)...(19): siRNA sense strand
gaagauccuggucaugcuu

SEQ ID NO: 958371 - RNA, 19 nt, Homo sapiens
  misc_RNA (1)...(19): siRNA sense strand
uagagcuugugccugcuua

SEQ ID NO: 958372 - RNA, 19 nt, Homo sapiens
  misc_RNA (1)...(19): siRNA sense strand
ucugagaucuggcaugcau

SEQ ID NO: 958373 - RNA, 19 nt, Homo sapiens
  misc_RNA (1)...(19): siRNA sense strand
cuucuacaauucagaggaa

SEQ ID NO: 958374 - RNA, 19 nt, Homo sapiens
  misc_RNA (1)...(19): siRNA sense strand
acugaagaccaucccauua

SEQ ID NO: 958375 - RNA, 19 nt, Homo sapiens
  misc_RNA (1)...(19): siRNA sense strand
uuauuacuguggcguggua

SEQ ID NO: 958376 - RNA, 19 nt, Homo sapiens
  misc_RNA (1)...(19): siRNA sense strand
gacacuggcuuggaugaag

SEQ ID NO: 958377 - RNA, 19 nt, Homo sapiens
  misc_RNA (1)...(19): siRNA sense strand
gcaccauucaagaguuauu

SEQ ID NO: 958378 - RNA, 19 nt, Homo sapiens
  misc_RNA (1)...(19): siRNA sense strand
ugaagaggcccguuaucau

SEQ ID NO: 958379 - RNA, 19 nt, Homo sapiens
  misc_RNA (1)...(19): siRNA sense strand
ugaagaccaucccauuacu

SEQ ID NO: 958380 - RNA, 19 nt, Homo sapiens
  misc_RNA (1)...(19): siRNA sense strand
agaucuggcaugcauauuu

SEQ ID NO: 958381 - RNA, 19 nt, Homo sapiens
  misc_RNA (1)...(19): siRNA sense strand
ugaacaaucacuaucaagu

SEQ ID NO: 958382 - RNA, 19 nt, Homo sapiens
  misc_RNA (1)...(19): siRNA sense strand
cagaaauaccucuuugaag

SEQ ID NO: 958383 - RNA, 19 nt, Homo sapiens
  misc_RNA (1)...(19): siRNA sense strand
cagcagcggcagaaguauu

SEQ ID NO: 958384 - RNA, 19 nt, Homo sapiens
  misc_RNA (1)...(19): siRNA sense strand
caucuggccaaugauauuu

SEQ ID NO: 958385 - RNA, 19 nt, Homo sapiens
  misc_RNA (1)...(19): siRNA sense strand
ccucaaaucaacugacugu

SEQ ID NO: 958386 - RNA, 19 nt, Homo sapiens
  misc_RNA (1)...(19): siRNA sense strand
caccauucaagaguuauua

SEQ ID NO: 958387 - RNA, 19 nt, Homo sapiens
  misc_RNA (1)...(19): siRNA sense strand
acaccauagcccagaaaua

SEQ ID NO: 958388 - RNA, 19 nt, Homo sapiens
  misc_RNA (1)...(19): siRNA sense strand
uaugucagcucuugauucc

SEQ ID NO: 958389 - RNA, 19 nt, Homo sapiens
  misc_RNA (1)...(19): siRNA sense strand
aaagaacaacagcuugaug

SEQ ID NO: 958390 - RNA, 19 nt, Homo sapiens
  misc_RNA (1)...(19): siRNA sense strand
ggcccucagucuagccaaa

SEQ ID NO: 958391 - RNA, 19 nt, Homo sapiens
  misc_RNA (1)...(19): siRNA sense strand
ugagaucuggcaugcauau

SEQ ID NO: 958392 - RNA, 19 nt, Homo sapiens
  misc_RNA (1)...(19): siRNA sense strand
uggcaugcauauuugaaca

SEQ ID NO: 958393 - RNA, 19 nt, Homo sapiens
  misc_RNA (1)...(19): siRNA sense strand
aagaacaacagcuugaugu

SEQ ID NO: 958394 - RNA, 19 nt, Homo sapiens
  misc_RNA (1)...(19): siRNA sense strand
caaagaacaacagcuugau

SEQ ID NO: 958395 - RNA, 19 nt, Homo sapiens
  misc_RNA (1)...(19): siRNA sense strand
ugcagcagcggcagaagua

SEQ ID NO: 958396 - RNA, 19 nt, Homo sapiens
  misc_RNA (1)...(19): siRNA sense strand
ccaugcccuucuacaauuc

SEQ ID NO: 958397 - RNA, 19 nt, Homo sapiens
  misc_RNA (1)...(19): siRNA sense strand
aaaaccaucuuuguucuga

SEQ ID NO: 958398 - RNA, 19 nt, Homo sapiens
  misc_RNA (1)...(19): siRNA sense strand
ccauucgcauccugacuuc

SEQ ID NO: 958399 - RNA, 19 nt, Homo sapiens
  misc_RNA (1)...(19): siRNA sense strand
gccauucgcauccugacuu

SEQ ID NO: 958400 - RNA, 19 nt, Homo sapiens
  misc_RNA (1)...(19): siRNA sense strand
gauuuacugggcaaacuau

SEQ ID NO: 958401 - RNA, 19 nt, Homo sapiens
  misc_RNA (1)...(19): siRNA sense strand
ggaacagaggacauuagga

SEQ ID NO: 958402 - RNA, 19 nt, Homo sapiens
  misc_RNA (1)...(19): siRNA sense strand
acuaugaagaggcccguua

SEQ ID NO: 958403 - RNA, 19 nt, Homo sapiens
  misc_RNA (1)...(19): siRNA sense strand
ucuggccaaugauauuuau

SEQ ID NO: 958404 - RNA, 19 nt, Homo sapiens
  misc_RNA (1)...(19): siRNA sense strand
aggcucacauccaacaaau

SEQ ID NO: 958405 - RNA, 19 nt, Homo sapiens
  misc_RNA (1)...(19): siRNA sense strand
cagacacauuguacaccaa

SEQ ID NO: 958406 - RNA, 19 nt, Homo sapiens
  misc_RNA (1)...(19): siRNA sense strand
cuacaauucagaggaagaa

SEQ ID NO: 958407 - RNA, 19 nt, Homo sapiens
  misc_RNA (1)...(19): siRNA sense strand
uuaagucucauuucaacug

SEQ ID NO: 958408 - RNA, 19 nt, Homo sapiens
  misc_RNA (1)...(19): siRNA sense strand
aaaccaucuuuguucugaa

SEQ ID NO: 958409 - RNA, 19 nt, Homo sapiens
  misc_RNA (1)...(19): siRNA sense strand
ugaagauccuggucaugcu

SEQ ID NO: 958410 - RNA, 19 nt, Homo sapiens
  misc_RNA (1)...(19): siRNA sense strand
aaauaugucagcucuugau

SEQ ID NO: 958411 - RNA, 19 nt, Homo sapiens
  misc_RNA (1)...(19): siRNA sense strand
cagucuagccaaagaacaa

SEQ ID NO: 958412 - RNA, 19 nt, Homo sapiens
  misc_RNA (1)...(19): siRNA sense strand
agauccuggucaugcuuua

SEQ ID NO: 958413 - RNA, 19 nt, Homo sapiens
  misc_RNA (1)...(19): siRNA sense strand
gauaaucacucaugaagaa

SEQ ID NO: 958414 - RNA, 19 nt, Homo sapiens
  misc_RNA (1)...(19): siRNA sense strand
gaacaucaaucccagaaga

SEQ ID NO: 958415 - RNA, 19 nt, Homo sapiens
  misc_RNA (1)...(19): siRNA sense strand
gagaaacccuauaaaugua

SEQ ID NO: 958416 - RNA, 19 nt, Homo sapiens
  misc_RNA (1)...(19): siRNA sense strand
aaagacaucuguacaguaa

SEQ ID NO: 958417 - RNA, 19 nt, Homo sapiens
  misc_RNA (1)...(19): siRNA sense strand
caaaccaagugugauauua

SEQ ID NO: 958418 - RNA, 19 nt, Homo sapiens
  misc_RNA (1)...(19): siRNA sense strand
agagaaaccuuaugaaugu

SEQ ID NO: 958419 - RNA, 19 nt, Homo sapiens
  misc_RNA (1)...(19): siRNA sense strand
gagagaaacccuauaaaug

SEQ ID NO: 958420 - RNA, 19 nt, Homo sapiens
  misc_RNA (1)...(19): siRNA sense strand
gagaaacccuaugaaugua

SEQ ID NO: 958421 - RNA, 19 nt, Homo sapiens
  misc_RNA (1)...(19): siRNA sense strand
gagaaacccuaugaaugua

SEQ ID NO: 958422 - RNA, 19 nt, Homo sapiens
  misc_RNA (1)...(19): siRNA sense strand
gagaaacccuaugaaugua

SEQ ID NO: 958423 - RNA, 19 nt, Homo sapiens
  misc_RNA (1)...(19): siRNA sense strand
uagaaacacuuacaagcua

SEQ ID NO: 958424 - RNA, 19 nt, Homo sapiens
  misc_RNA (1)...(19): siRNA sense strand
ggaaugggauugucuggau

SEQ ID NO: 958425 - RNA, 19 nt, Homo sapiens
  misc_RNA (1)...(19): siRNA sense strand
caacaucagagaauucaua

SEQ ID NO: 958426 - RNA, 19 nt, Homo sapiens
  misc_RNA (1)...(19): siRNA sense strand
caacaucagagaauucaua

SEQ ID NO: 958427 - RNA, 19 nt, Homo sapiens
  misc_RNA (1)...(19): siRNA sense strand
ggagagaaacccuauaaau

SEQ ID NO: 958428 - RNA, 19 nt, Homo sapiens
  misc_RNA (1)...(19): siRNA sense strand
gaaauguaaugacugugaa

SEQ ID NO: 958429 - RNA, 19 nt, Homo sapiens
  misc_RNA (1)...(19): siRNA sense strand
gagagaaaccuuaugaaug

SEQ ID NO: 958430 - RNA, 19 nt, Homo sapiens
  misc_RNA (1)...(19): siRNA sense strand
gaagagauaaucacucaug

SEQ ID NO: 958431 - RNA, 19 nt, Homo sapiens
  misc_RNA (1)...(19): siRNA sense strand
ggagagagacccuaugaau

SEQ ID NO: 958432 - RNA, 19 nt, Homo sapiens
  misc_RNA (1)...(19): siRNA sense strand
gaaacccuaugaauguauu

SEQ ID NO: 958433 - RNA, 19 nt, Homo sapiens
  misc_RNA (1)...(19): siRNA sense strand
ggagagagacccuaugaau

SEQ ID NO: 958434 - RNA, 19 nt, Homo sapiens
  misc_RNA (1)...(19): siRNA sense strand
gaaagcauuuagcaacaga

SEQ ID NO: 958435 - RNA, 19 nt, Homo sapiens
  misc_RNA (1)...(19): siRNA sense strand
caacaucagaggauucaua

SEQ ID NO: 958436 - RNA, 19 nt, Homo sapiens
  misc_RNA (1)...(19): siRNA sense strand
gcuauaaccuugaauacuc

SEQ ID NO: 958437 - RNA, 19 nt, Homo sapiens
  misc_RNA (1)...(19): siRNA sense strand
gagagaaacccuaugaaug

SEQ ID NO: 958438 - RNA, 19 nt, Homo sapiens
  misc_RNA (1)...(19): siRNA sense strand
guacaucagagaauacaua

SEQ ID NO: 958439 - RNA, 19 nt, Homo sapiens
  misc_RNA (1)...(19): siRNA sense strand
gagagaaacccuaugaaug

SEQ ID NO: 958440 - RNA, 19 nt, Homo sapiens
  misc_RNA (1)...(19): siRNA sense strand
gagagaaacccuaugaaug

SEQ ID NO: 958441 - RNA, 19 nt, Homo sapiens
  misc_RNA (1)...(19): siRNA sense strand
gggauugucuggauucuuc

SEQ ID NO: 958442 - RNA, 19 nt, Homo sapiens
  misc_RNA (1)...(19): siRNA sense strand
ggagagaaaccuuaugaau

SEQ ID NO: 958443 - RNA, 19 nt, Homo sapiens
  misc_RNA (1)...(19): siRNA sense strand
gaucauccauugcucaaca

SEQ ID NO: 958444 - RNA, 19 nt, Homo sapiens
  misc_RNA (1)...(19): siRNA sense strand
gaaaguacauaaacaugac

SEQ ID NO: 958445 - RNA, 19 nt, Homo sapiens
  misc_RNA (1)...(19): siRNA sense strand
guaaugugaugcuagagaa

SEQ ID NO: 958446 - RNA, 19 nt, Homo sapiens
  misc_RNA (1)...(19): siRNA sense strand
gagaagaguggaaauguga

SEQ ID NO: 958447 - RNA, 19 nt, Homo sapiens
  misc_RNA (1)...(19): siRNA sense strand
caucagaacccacugcuuu

SEQ ID NO: 958448 - RNA, 19 nt, Homo sapiens
  misc_RNA (1)...(19): siRNA sense strand
gaaggcguguuucaaggaa

SEQ ID NO: 958449 - RNA, 19 nt, Homo sapiens
  misc_RNA (1)...(19): siRNA sense strand
gcugggagccuauauguga

SEQ ID NO: 958450 - RNA, 19 nt, Homo sapiens
  misc_RNA (1)...(19): siRNA sense strand
gagagacccuaugaaugua

SEQ ID NO: 958451 - RNA, 19 nt, Homo sapiens
  misc_RNA (1)...(19): siRNA sense strand
ggagagaaacccuaugaau

SEQ ID NO: 958452 - RNA, 19 nt, Homo sapiens
  misc_RNA (1)...(19): siRNA sense strand
gagagacccuaugaaugua

SEQ ID NO: 958453 - RNA, 19 nt, Homo sapiens
  misc_RNA (1)...(19): siRNA sense strand
ggagagaaacccuaugaau

SEQ ID NO: 958454 - RNA, 19 nt, Homo sapiens
  misc_RNA (1)...(19): siRNA sense strand
ggagagaaacccuaugaau

SEQ ID NO: 958455 - RNA, 19 nt, Homo sapiens
  misc_RNA (1)...(19): siRNA sense strand
caacaucugcgaguucaua

SEQ ID NO: 958456 - RNA, 19 nt, Homo sapiens
  misc_RNA (1)...(19): siRNA sense strand
caacaucagcgaguucaua

SEQ ID NO: 958457 - RNA, 19 nt, Homo sapiens
  misc_RNA (1)...(19): siRNA sense strand
gugcauaccuuacuguaca

SEQ ID NO: 958458 - RNA, 19 nt, Homo sapiens
  misc_RNA (1)...(19): siRNA sense strand
ugagagagaacaagaauau

SEQ ID NO: 958459 - RNA, 19 nt, Homo sapiens
  misc_RNA (1)...(19): siRNA sense strand
guaaucagaaggcguguuu

SEQ ID NO: 958460 - RNA, 19 nt, Homo sapiens
  misc_RNA (1)...(19): siRNA sense strand
gaaacccuaugaauguaau

SEQ ID NO: 958461 - RNA, 19 nt, Homo sapiens
  misc_RNA (1)...(19): siRNA sense strand
ggaaagccuucagucagaa

SEQ ID NO: 958462 - RNA, 19 nt, Homo sapiens
  misc_RNA (1)...(19): siRNA sense strand
agagaaacccuauaaaugu

SEQ ID NO: 958463 - RNA, 19 nt, Homo sapiens
  misc_RNA (1)...(19): siRNA sense strand
gaacuacaggaucuuggua

SEQ ID NO: 958464 - RNA, 19 nt, Homo sapiens
  misc_RNA (1)...(19): siRNA sense strand
gggaaagcauuuagcaaca

SEQ ID NO: 958465 - RNA, 19 nt, Homo sapiens
  misc_RNA (1)...(19): siRNA sense strand
guucaucccuuacucuuca

SEQ ID NO: 958466 - RNA, 19 nt, Homo sapiens
  misc_RNA (1)...(19): siRNA sense strand
gagaaaccuuaugaaugua

SEQ ID NO: 958467 - RNA, 19 nt, Homo sapiens
  misc_RNA (1)...(19): siRNA sense strand
gaaugggauugucuggauu

SEQ ID NO: 958468 - RNA, 19 nt, Homo sapiens
  misc_RNA (1)...(19): siRNA sense strand
agagaaacccuaugaaugu

SEQ ID NO: 958469 - RNA, 19 nt, Homo sapiens
  misc_RNA (1)...(19): siRNA sense strand
agagaaacccuaugaaugu

SEQ ID NO: 958470 - RNA, 19 nt, Homo sapiens
  misc_RNA (1)...(19): siRNA sense strand
gagaauucauacuggagaa

SEQ ID NO: 958471 - RNA, 19 nt, Homo sapiens
  misc_RNA (1)...(19): siRNA sense strand
agagaaacccuaugaaugu

SEQ ID NO: 958472 - RNA, 19 nt, Homo sapiens
  misc_RNA (1)...(19): siRNA sense strand
agacaucuguacaguaaug

SEQ ID NO: 958473 - RNA, 19 nt, Homo sapiens
  misc_RNA (1)...(19): siRNA sense strand
gagagagacccuaugaaug

SEQ ID NO: 958474 - RNA, 19 nt, Homo sapiens
  misc_RNA (1)...(19): siRNA sense strand
gagagagacccuaugaaug

SEQ ID NO: 958475 - RNA, 19 nt, Homo sapiens
  misc_RNA (1)...(19): siRNA sense strand
ucagagauguggcuguaga

SEQ ID NO: 958476 - RNA, 19 nt, Homo sapiens
  misc_RNA (1)...(19): siRNA sense strand
caaagacaucuguacagua

SEQ ID NO: 958477 - RNA, 19 nt, Homo sapiens
  misc_RNA (1)...(19): siRNA sense strand
guacaguaaugugaugcua

SEQ ID NO: 958478 - RNA, 19 nt, Homo sapiens
  misc_RNA (1)...(19): siRNA sense strand
agcaaugacucgucccuua

SEQ ID NO: 958479 - RNA, 19 nt, Homo sapiens
  misc_RNA (1)...(19): siRNA sense strand
gaaacacuuacaagcuaua

SEQ ID NO: 958480 - RNA, 19 nt, Homo sapiens
  misc_RNA (1)...(19): siRNA sense strand
agagagacccuaugaaugu

SEQ ID NO: 958481 - RNA, 19 nt, Homo sapiens
  misc_RNA (1)...(19): siRNA sense strand
agagagacccuaugaaugu

SEQ ID NO: 958482 - RNA, 19 nt, Homo sapiens
  misc_RNA (1)...(19): siRNA sense strand
gaaacccuaugaauguauc

SEQ ID NO: 958483 - RNA, 19 nt, Homo sapiens
  misc_RNA (1)...(19): siRNA sense strand
gaauguaagguaugucgaa

SEQ ID NO: 958484 - RNA, 19 nt, Homo sapiens
  misc_RNA (1)...(19): siRNA sense strand
agccagaguucaucccuua

SEQ ID NO: 958485 - RNA, 19 nt, Homo sapiens
  misc_RNA (1)...(19): siRNA sense strand
ggagaaaguacauaaacau

SEQ ID NO: 958486 - RNA, 19 nt, Homo sapiens
  misc_RNA (1)...(19): siRNA sense strand
gcaaccagguaaucagaag

SEQ ID NO: 958487 - RNA, 19 nt, Homo sapiens
  misc_RNA (1)...(19): siRNA sense strand
ccuuaugaauguacuguuu

SEQ ID NO: 958488 - RNA, 19 nt, Homo sapiens
  misc_RNA (1)...(19): siRNA sense strand
gaaagcauucagccagauu

SEQ ID NO: 958489 - RNA, 19 nt, Homo sapiens
  misc_RNA (1)...(19): siRNA sense strand
gagauaaucacucaugaag

SEQ ID NO: 958490 - RNA, 19 nt, Homo sapiens
  misc_RNA (1)...(19): siRNA sense strand
gagaaaguacauaaacaug

SEQ ID NO: 958491 - RNA, 19 nt, Homo sapiens
  misc_RNA (1)...(19): siRNA sense strand
gcucaucaccagagaauuc

SEQ ID NO: 958492 - RNA, 19 nt, Homo sapiens
  misc_RNA (1)...(19): siRNA sense strand
ucaaagacaucuguacagu

SEQ ID NO: 958493 - RNA, 19 nt, Homo sapiens
  misc_RNA (1)...(19): siRNA sense strand
aggaagagauaaucacuca

SEQ ID NO: 958494 - RNA, 19 nt, Homo sapiens
  misc_RNA (1)...(19): siRNA sense strand
gcauuuagccuucgugcau

SEQ ID NO: 958495 - RNA, 19 nt, Homo sapiens
  misc_RNA (1)...(19): siRNA sense strand
cuagagaacuacaggaucu

SEQ ID NO: 958496 - RNA, 19 nt, Homo sapiens
  misc_RNA (1)...(19): siRNA sense strand
caucaaagaauucauacug

SEQ ID NO: 958497 - RNA, 19 nt, Homo sapiens
  misc_RNA (1)...(19): siRNA sense strand
uaugugagacugaagaauu

SEQ ID NO: 958498 - RNA, 19 nt, Homo sapiens
  misc_RNA (1)...(19): siRNA sense strand
ggaaagcauucagccagau

SEQ ID NO: 958499 - RNA, 19 nt, Homo sapiens
  misc_RNA (1)...(19): siRNA sense strand
ggaaggccuuuagccagaa

SEQ ID NO: 958500 - RNA, 19 nt, Homo sapiens
  misc_RNA (1)...(19): siRNA sense strand
ugaaauguaaugacuguga

SEQ ID NO: 958501 - RNA, 19 nt, Homo sapiens
  misc_RNA (1)...(19): siRNA sense strand
acauaaacaugacacacaa

SEQ ID NO: 958502 - RNA, 19 nt, Homo sapiens
  misc_RNA (1)...(19): siRNA sense strand
augugagacugaagaauua

SEQ ID NO: 958503 - RNA, 19 nt, Homo sapiens
  misc_RNA (1)...(19): siRNA sense strand
gagagaagaguggaaaugu

SEQ ID NO: 958504 - RNA, 19 nt, Homo sapiens
  misc_RNA (1)...(19): siRNA sense strand
caccagagaauucacauug

SEQ ID NO: 958505 - RNA, 19 nt, Homo sapiens
  misc_RNA (1)...(19): siRNA sense strand
caucaaagaguucauacug

SEQ ID NO: 958506 - RNA, 19 nt, Homo sapiens
  misc_RNA (1)...(19): siRNA sense strand
agauguggcuguagacuuc

SEQ ID NO: 958507 - RNA, 19 nt, Homo sapiens
  misc_RNA (1)...(19): siRNA sense strand
acaguaaugugaugcuaga

SEQ ID NO: 958508 - RNA, 19 nt, Homo sapiens
  misc_RNA (1)...(19): siRNA sense strand
aggaaagccuucagucaga

SEQ ID NO: 958509 - RNA, 19 nt, Homo sapiens
  misc_RNA (1)...(19): siRNA sense strand
gaugagagagaacaagaau

SEQ ID NO: 958510 - RNA, 19 nt, Homo sapiens
  misc_RNA (1)...(19): siRNA sense strand
gaaaggcaaccagguaauc

SEQ ID NO: 958511 - RNA, 19 nt, Homo sapiens
  misc_RNA (1)...(19): siRNA sense strand
caucagagaauucauacug

SEQ ID NO: 958512 - RNA, 19 nt, Homo sapiens
  misc_RNA (1)...(19): siRNA sense strand
caucagagaauucauacug

SEQ ID NO: 958513 - RNA, 19 nt, Homo sapiens
  misc_RNA (1)...(19): siRNA sense strand
ccaggaacaucaccaauaa

SEQ ID NO: 958514 - RNA, 19 nt, Homo sapiens
  misc_RNA (1)...(19): siRNA sense strand
gaacaaaguccucuacaau

SEQ ID NO: 958515 - RNA, 19 nt, Homo sapiens
  misc_RNA (1)...(19): siRNA sense strand
ggaacaaaguccucuacaa

SEQ ID NO: 958516 - RNA, 19 nt, Homo sapiens
  misc_RNA (1)...(19): siRNA sense strand
gcucauuccuucuacaauu

SEQ ID NO: 958517 - RNA, 19 nt, Homo sapiens
  misc_RNA (1)...(19): siRNA sense strand
gaaagauuguggacagcaa

SEQ ID NO: 958518 - RNA, 19 nt, Homo sapiens
  misc_RNA (1)...(19): siRNA sense strand
gcaacuacgugcucuucaa

SEQ ID NO: 958519 - RNA, 19 nt, Homo sapiens
  misc_RNA (1)...(19): siRNA sense strand
gaacaucaccaauaaaucg

SEQ ID NO: 958520 - RNA, 19 nt, Homo sapiens
  misc_RNA (1)...(19): siRNA sense strand
gaaggagaaggcacuagua

SEQ ID NO: 958521 - RNA, 19 nt, Homo sapiens
  misc_RNA (1)...(19): siRNA sense strand
guacaacuuugacaaccuu

SEQ ID NO: 958522 - RNA, 19 nt, Homo sapiens
  misc_RNA (1)...(19): siRNA sense strand
ucgcagggaugcuggagua

SEQ ID NO: 958523 - RNA, 19 nt, Homo sapiens
  misc_RNA (1)...(19): siRNA sense strand
gaggauaccaggaacauca

SEQ ID NO: 958524 - RNA, 19 nt, Homo sapiens
  misc_RNA (1)...(19): siRNA sense strand
gcgaggcaguuuaugaguu

SEQ ID NO: 958525 - RNA, 19 nt, Homo sapiens
  misc_RNA (1)...(19): siRNA sense strand
cggagacgcugaaggagaa

SEQ ID NO: 958526 - RNA, 19 nt, Homo sapiens
  misc_RNA (1)...(19): siRNA sense strand
gcugauguccucacugaaa

SEQ ID NO: 958527 - RNA, 19 nt, Homo sapiens
  misc_RNA (1)...(19): siRNA sense strand
aaaguccucuacaauggua

SEQ ID NO: 958528 - RNA, 19 nt, Homo sapiens
  misc_RNA (1)...(19): siRNA sense strand
caucuucaccgcagucuuu

SEQ ID NO: 958529 - RNA, 19 nt, Homo sapiens
  misc_RNA (1)...(19): siRNA sense strand
gcuauuaccagacagagaa

SEQ ID NO: 958530 - RNA, 19 nt, Homo sapiens
  misc_RNA (1)...(19): siRNA sense strand
acaaaguccucuacaaugg

SEQ ID NO: 958531 - RNA, 19 nt, Homo sapiens
  misc_RNA (1)...(19): siRNA sense strand
ggagaaggcacuaguagag

SEQ ID NO: 958532 - RNA, 19 nt, Homo sapiens
  misc_RNA (1)...(19): siRNA sense strand
agacagagaacgaggauga

SEQ ID NO: 958533 - RNA, 19 nt, Homo sapiens
  misc_RNA (1)...(19): siRNA sense strand
uacaacagcuccagcaaca

SEQ ID NO: 958534 - RNA, 19 nt, Homo sapiens
  misc_RNA (1)...(19): siRNA sense strand
ugugacaccuuccgaaaga

SEQ ID NO: 958535 - RNA, 19 nt, Homo sapiens
  misc_RNA (1)...(19): siRNA sense strand
cgaggcaguuuaugaguuc

SEQ ID NO: 958536 - RNA, 19 nt, Homo sapiens
  misc_RNA (1)...(19): siRNA sense strand
acuacgugcucuucaauuu

SEQ ID NO: 958537 - RNA, 19 nt, Homo sapiens
  misc_RNA (1)...(19): siRNA sense strand
ucaagaaucccuacaacau

SEQ ID NO: 958538 - RNA, 19 nt, Homo sapiens
  misc_RNA (1)...(19): siRNA sense strand
cuucaucuuugccuucuuu

SEQ ID NO: 958539 - RNA, 19 nt, Homo sapiens
  misc_RNA (1)...(19): siRNA sense strand
ucacguugcugcuggauac

SEQ ID NO: 958540 - RNA, 19 nt, Homo sapiens
  misc_RNA (1)...(19): siRNA sense strand
uccugacccucuccaauua

SEQ ID NO: 958541 - RNA, 19 nt, Homo sapiens
  misc_RNA (1)...(19): siRNA sense strand
caggaggacuggaacaaag

SEQ ID NO: 958542 - RNA, 19 nt, Homo sapiens
  misc_RNA (1)...(19): siRNA sense strand
ccaccugugucaacuggaa

SEQ ID NO: 958543 - RNA, 19 nt, Homo sapiens
  misc_RNA (1)...(19): siRNA sense strand
ggcaugcgguccugcagaa

SEQ ID NO: 958544 - RNA, 19 nt, Homo sapiens
  misc_RNA (1)...(19): siRNA sense strand
caucugcugugccuucuuc

SEQ ID NO: 958545 - RNA, 19 nt, Homo sapiens
  misc_RNA (1)...(19): siRNA sense strand
ggagcgcuauuaccagaca

SEQ ID NO: 958546 - RNA, 19 nt, Homo sapiens
  misc_RNA (1)...(19): siRNA sense strand
ugccagaccggaagaauuu

SEQ ID NO: 958547 - RNA, 19 nt, Homo sapiens
  misc_RNA (1)...(19): siRNA sense strand
gcuuguguauggucccuuu

SEQ ID NO: 958548 - RNA, 19 nt, Homo sapiens
  misc_RNA (1)...(19): siRNA sense strand
gcaggccuuugaugacuuc

SEQ ID NO: 958549 - RNA, 19 nt, Homo sapiens
  misc_RNA (1)...(19): siRNA sense strand
ggaagaauuuugacuccuu

SEQ ID NO: 958550 - RNA, 19 nt, Homo sapiens
  misc_RNA (1)...(19): siRNA sense strand
ucuggaggcuaaucuguga

SEQ ID NO: 958551 - RNA, 19 nt, Homo sapiens
  misc_RNA (1)...(19): siRNA sense strand
cuccagcccuugcuugaaa

SEQ ID NO: 958552 - RNA, 19 nt, Homo sapiens
  misc_RNA (1)...(19): siRNA sense strand
acgcugauguccucacuga

SEQ ID NO: 958553 - RNA, 19 nt, Homo sapiens
  misc_RNA (1)...(19): siRNA sense strand
caagaaucccuacaacauc

SEQ ID NO: 958554 - RNA, 19 nt, Homo sapiens
  misc_RNA (1)...(19): siRNA sense strand
caucaagaaucccuacaac

SEQ ID NO: 958555 - RNA, 19 nt, Homo sapiens
  misc_RNA (1)...(19): siRNA sense strand
ccaugucgcugcccaagag

SEQ ID NO: 958556 - RNA, 19 nt, Homo sapiens
  misc_RNA (1)...(19): siRNA sense strand
gggugcagcucuucaaagg

SEQ ID NO: 958557 - RNA, 19 nt, Homo sapiens
  misc_RNA (1)...(19): siRNA sense strand
gcucugugcuggccuucug

SEQ ID NO: 958558 - RNA, 19 nt, Homo sapiens
  misc_RNA (1)...(19): siRNA sense strand
uggcugaaaugacagugaa

SEQ ID NO: 958559 - RNA, 19 nt, Homo sapiens
  misc_RNA (1)...(19): siRNA sense strand
gaagaggagagcucagaag

SEQ ID NO: 958560 - RNA, 19 nt, Homo sapiens
  misc_RNA (1)...(19): siRNA sense strand
ccaacaaguccgaaucaga

SEQ ID NO: 958561 - RNA, 19 nt, Homo sapiens
  misc_RNA (1)...(19): siRNA sense strand
gagcagcccgaggagcuua

SEQ ID NO: 958562 - RNA, 19 nt, Homo sapiens
  misc_RNA (1)...(19): siRNA sense strand
uaccaacgcccuagaaauc

SEQ ID NO: 958563 - RNA, 19 nt, Homo sapiens
  misc_RNA (1)...(19): siRNA sense strand
gaaacccaucggcaacauu

SEQ ID NO: 958564 - RNA, 19 nt, Homo sapiens
  misc_RNA (1)...(19): siRNA sense strand
cucauuccuucuacaauuu

SEQ ID NO: 958565 - RNA, 19 nt, Homo sapiens
  misc_RNA (1)...(19): siRNA sense strand
gucaucaucuuccuuaacu

SEQ ID NO: 958566 - RNA, 19 nt, Homo sapiens
  misc_RNA (1)...(19): siRNA sense strand
caacuacgugcucuucaau

SEQ ID NO: 958567 - RNA, 19 nt, Homo sapiens
  misc_RNA (1)...(19): siRNA sense strand
cuuaugcucuucaucuuca

SEQ ID NO: 958568 - RNA, 19 nt, Homo sapiens
  misc_RNA (1)...(19): siRNA sense strand
aagaaucccuacaacaucu

SEQ ID NO: 958569 - RNA, 19 nt, Homo sapiens
  misc_RNA (1)...(19): siRNA sense strand
ccaugccgacugccacuua

SEQ ID NO: 958570 - RNA, 19 nt, Homo sapiens
  misc_RNA (1)...(19): siRNA sense strand
agacagcgaggcaguuuau

SEQ ID NO: 958571 - RNA, 19 nt, Homo sapiens
  misc_RNA (1)...(19): siRNA sense strand
ggaacaucaccaauaaauc

SEQ ID NO: 958572 - RNA, 19 nt, Homo sapiens
  misc_RNA (1)...(19): siRNA sense strand
gcaugggcaucgaauacca

SEQ ID NO: 958573 - RNA, 19 nt, Homo sapiens
  misc_RNA (1)...(19): siRNA sense strand
ugguguacauccuucguaa

SEQ ID NO: 958574 - RNA, 19 nt, Homo sapiens
  misc_RNA (1)...(19): siRNA sense strand
gccaggagagccaggauga

SEQ ID NO: 958575 - RNA, 19 nt, Homo sapiens
  misc_RNA (1)...(19): siRNA sense strand
ucucuucggcugcaaguuu

SEQ ID NO: 958576 - RNA, 19 nt, Homo sapiens
  misc_RNA (1)...(19): siRNA sense strand
gaugcuuccuaccugagaa

SEQ ID NO: 958577 - RNA, 19 nt, Homo sapiens
  misc_RNA (1)...(19): siRNA sense strand
caucgucacugucuuucag

SEQ ID NO: 958578 - RNA, 19 nt, Homo sapiens
  misc_RNA (1)...(19): siRNA sense strand
ucauguacuuugugaugga

SEQ ID NO: 958579 - RNA, 19 nt, Homo sapiens
  misc_RNA (1)...(19): siRNA sense strand
aaacccaucggcaacauug

SEQ ID NO: 958580 - RNA, 19 nt, Homo sapiens
  misc_RNA (1)...(19): siRNA sense strand
ggccaucgucacugucuuu

SEQ ID NO: 958581 - RNA, 19 nt, Homo sapiens
  misc_RNA (1)...(19): siRNA sense strand
ugaagaccauggacaacgu

SEQ ID NO: 958582 - RNA, 19 nt, Homo sapiens
  misc_RNA (1)...(19): siRNA sense strand
gaaccgaugcuuccuaccu

SEQ ID NO: 958583 - RNA, 19 nt, Homo sapiens
  misc_RNA (1)...(19): siRNA sense strand
ccucuccaauuacaucuuc

SEQ ID NO: 958584 - RNA, 19 nt, Homo sapiens
  misc_RNA (1)...(19): siRNA sense strand
gcauguuggucauccuucu

SEQ ID NO: 958585 - RNA, 19 nt, Homo sapiens
  misc_RNA (1)...(19): siRNA sense strand
cuugcggucuggacuauga

SEQ ID NO: 958586 - RNA, 19 nt, Homo sapiens
  misc_RNA (1)...(19): siRNA sense strand
cgaccgcucagggccauua

SEQ ID NO: 958587 - RNA, 19 nt, Homo sapiens
  misc_RNA (1)...(19): siRNA sense strand
cggcaacauuguagucauc

SEQ ID NO: 958588 - RNA, 19 nt, Homo sapiens
  misc_RNA (1)...(19): siRNA sense strand
cgucuucaccagccucuuu

SEQ ID NO: 958589 - RNA, 19 nt, Homo sapiens
  misc_RNA (1)...(19): siRNA sense strand
gcucgccgaccgugaaaug

SEQ ID NO: 958590 - RNA, 19 nt, Homo sapiens
  misc_RNA (1)...(19): siRNA sense strand
acaagcugcuggagacaca

SEQ ID NO: 958591 - RNA, 19 nt, Homo sapiens
  misc_RNA (1)...(19): siRNA sense strand
caucgugggcuccuucuuc

SEQ ID NO: 958592 - RNA, 19 nt, Homo sapiens
  misc_RNA (1)...(19): siRNA sense strand
acagcgaggcaguuuauga

SEQ ID NO: 958593 - RNA, 19 nt, Homo sapiens
  misc_RNA (1)...(19): siRNA sense strand
gagggcaaccugagcaaag

SEQ ID NO: 958594 - RNA, 19 nt, Homo sapiens
  misc_RNA (1)...(19): siRNA sense strand
aacaaaguccucuacaaug

SEQ ID NO: 958595 - RNA, 19 nt, Homo sapiens
  misc_RNA (1)...(19): siRNA sense strand
gugggcuccuucuucauga

SEQ ID NO: 958596 - RNA, 19 nt, Homo sapiens
  misc_RNA (1)...(19): siRNA sense strand
accaggaacaucaccaaua

SEQ ID NO: 958597 - RNA, 19 nt, Homo sapiens
  misc_RNA (1)...(19): siRNA sense strand
gcaacauuguagucaucug

SEQ ID NO: 958598 - RNA, 19 nt, Homo sapiens
  misc_RNA (1)...(19): siRNA sense strand
ggagagccaggaugaagag

SEQ ID NO: 958599 - RNA, 19 nt, Homo sapiens
  misc_RNA (1)...(19): siRNA sense strand
gcucuucaucuucaucuuc

SEQ ID NO: 958600 - RNA, 19 nt, Homo sapiens
  misc_RNA (1)...(19): siRNA sense strand
ugacaccuuccgaaagauu

SEQ ID NO: 958601 - RNA, 19 nt, Homo sapiens
  misc_RNA (1)...(19): siRNA sense strand
ucagacagcgaggcaguuu

SEQ ID NO: 958602 - RNA, 19 nt, Homo sapiens
  misc_RNA (1)...(19): siRNA sense strand
caccggagacgcugaagga

SEQ ID NO: 958603 - RNA, 19 nt, Homo sapiens
  misc_RNA (1)...(19): siRNA sense strand
ggaaccaguacuacaccaa

SEQ ID NO: 958604 - RNA, 19 nt, Homo sapiens
  misc_RNA (1)...(19): siRNA sense strand
ccguggagaugguggugaa

SEQ ID NO: 958605 - RNA, 19 nt, Homo sapiens
  misc_RNA (1)...(19): siRNA sense strand
aggaacaucaccaauaaau

SEQ ID NO: 958606 - RNA, 19 nt, Homo sapiens
  misc_RNA (1)...(19): siRNA sense strand
ggagaugguggugaagaug

SEQ ID NO: 958607 - RNA, 19 nt, Homo sapiens
  misc_RNA (1)...(19): siRNA sense strand
cagcaugggcaucgaauac

SEQ ID NO: 958608 - RNA, 19 nt, Homo sapiens
  misc_RNA (1)...(19): siRNA sense strand
cuucuacaauuucaucuac

SEQ ID NO: 958609 - RNA, 19 nt, Homo sapiens
  misc_RNA (1)...(19): siRNA sense strand
cuugucaucaucuuccuua

SEQ ID NO: 958610 - RNA, 19 nt, Homo sapiens
  misc_RNA (1)...(19): siRNA sense strand
aagaggagagcucagaaga

SEQ ID NO: 958611 - RNA, 19 nt, Homo sapiens
  misc_RNA (1)...(19): siRNA sense strand
cagggaugcuggaguacuc

SEQ ID NO: 958612 - RNA, 19 nt, Homo sapiens
  misc_RNA (1)...(19): siRNA sense strand
cuacgugcucuucaauuug

SEQ ID NO: 958613 - RNA, 19 nt, Homo sapiens
  misc_RNA (1)...(19): siRNA sense strand
ccaggaacaucaccaauaa

SEQ ID NO: 958614 - RNA, 19 nt, Homo sapiens
  misc_RNA (1)...(19): siRNA sense strand
gaacaaaguccucuacaau

SEQ ID NO: 958615 - RNA, 19 nt, Homo sapiens
  misc_RNA (1)...(19): siRNA sense strand
ggaacaaaguccucuacaa

SEQ ID NO: 958616 - RNA, 19 nt, Homo sapiens
  misc_RNA (1)...(19): siRNA sense strand
gcucauuccuucuacaauu

SEQ ID NO: 958617 - RNA, 19 nt, Homo sapiens
  misc_RNA (1)...(19): siRNA sense strand
gaaagauuguggacagcaa

SEQ ID NO: 958618 - RNA, 19 nt, Homo sapiens
  misc_RNA (1)...(19): siRNA sense strand
gcaacuacgugcucuucaa

SEQ ID NO: 958619 - RNA, 19 nt, Homo sapiens
  misc_RNA (1)...(19): siRNA sense strand
gaacaucaccaauaaaucg

SEQ ID NO: 958620 - RNA, 19 nt, Homo sapiens
  misc_RNA (1)...(19): siRNA sense strand
gaaggagaaggcacuagua

SEQ ID NO: 958621 - RNA, 19 nt, Homo sapiens
  misc_RNA (1)...(19): siRNA sense strand
guacaacuuugacaaccuu

SEQ ID NO: 958622 - RNA, 19 nt, Homo sapiens
  misc_RNA (1)...(19): siRNA sense strand
ucgcagggaugcuggagua

SEQ ID NO: 958623 - RNA, 19 nt, Homo sapiens
  misc_RNA (1)...(19): siRNA sense strand
gaggauaccaggaacauca

SEQ ID NO: 958624 - RNA, 19 nt, Homo sapiens
  misc_RNA (1)...(19): siRNA sense strand
gcgaggcaguuuaugaguu

SEQ ID NO: 958625 - RNA, 19 nt, Homo sapiens
  misc_RNA (1)...(19): siRNA sense strand
cggagacgcugaaggagaa

SEQ ID NO: 958626 - RNA, 19 nt, Homo sapiens
  misc_RNA (1)...(19): siRNA sense strand
gcugauguccucacugaaa

SEQ ID NO: 958627 - RNA, 19 nt, Homo sapiens
  misc_RNA (1)...(19): siRNA sense strand
aaaguccucuacaauggua

SEQ ID NO: 958628 - RNA, 19 nt, Homo sapiens
  misc_RNA (1)...(19): siRNA sense strand
caucuucaccgcagucuuu

SEQ ID NO: 958629 - RNA, 19 nt, Homo sapiens
  misc_RNA (1)...(19): siRNA sense strand
gcuauuaccagacagagaa

SEQ ID NO: 958630 - RNA, 19 nt, Homo sapiens
  misc_RNA (1)...(19): siRNA sense strand
acaaaguccucuacaaugg

SEQ ID NO: 958631 - RNA, 19 nt, Homo sapiens
  misc_RNA (1)...(19): siRNA sense strand
ggagaaggcacuaguagag

SEQ ID NO: 958632 - RNA, 19 nt, Homo sapiens
  misc_RNA (1)...(19): siRNA sense strand
agacagagaacgaggauga

SEQ ID NO: 958633 - RNA, 19 nt, Homo sapiens
  misc_RNA (1)...(19): siRNA sense strand
uacaacagcuccagcaaca

SEQ ID NO: 958634 - RNA, 19 nt, Homo sapiens
  misc_RNA (1)...(19): siRNA sense strand
ugugacaccuuccgaaaga

SEQ ID NO: 958635 - RNA, 19 nt, Homo sapiens
  misc_RNA (1)...(19): siRNA sense strand
cgaggcaguuuaugaguuc

SEQ ID NO: 958636 - RNA, 19 nt, Homo sapiens
  misc_RNA (1)...(19): siRNA sense strand
acuacgugcucuucaauuu

SEQ ID NO: 958637 - RNA, 19 nt, Homo sapiens
  misc_RNA (1)...(19): siRNA sense strand
ucaagaaucccuacaacau

SEQ ID NO: 958638 - RNA, 19 nt, Homo sapiens
  misc_RNA (1)...(19): siRNA sense strand
cuucaucuuugccuucuuu

SEQ ID NO: 958639 - RNA, 19 nt, Homo sapiens
  misc_RNA (1)...(19): siRNA sense strand
ucacguugcugcuggauac

SEQ ID NO: 958640 - RNA, 19 nt, Homo sapiens
  misc_RNA (1)...(19): siRNA sense strand
uccugacccucuccaauua

SEQ ID NO: 958641 - RNA, 19 nt, Homo sapiens
  misc_RNA (1)...(19): siRNA sense strand
caggaggacuggaacaaag

SEQ ID NO: 958642 - RNA, 19 nt, Homo sapiens
  misc_RNA (1)...(19): siRNA sense strand
ccaccugugucaacuggaa

SEQ ID NO: 958643 - RNA, 19 nt, Homo sapiens
  misc_RNA (1)...(19): siRNA sense strand
ggcaugcgguccugcagaa

SEQ ID NO: 958644 - RNA, 19 nt, Homo sapiens
  misc_RNA (1)...(19): siRNA sense strand
caucugcugugccuucuuc

SEQ ID NO: 958645 - RNA, 19 nt, Homo sapiens
  misc_RNA (1)...(19): siRNA sense strand
ggagcgcuauuaccagaca

SEQ ID NO: 958646 - RNA, 19 nt, Homo sapiens
  misc_RNA (1)...(19): siRNA sense strand
ugccagaccggaagaauuu

SEQ ID NO: 958647 - RNA, 19 nt, Homo sapiens
  misc_RNA (1)...(19): siRNA sense strand
gcuuguguauggucccuuu

SEQ ID NO: 958648 - RNA, 19 nt, Homo sapiens
  misc_RNA (1)...(19): siRNA sense strand
gcaggccuuugaugacuuc

SEQ ID NO: 958649 - RNA, 19 nt, Homo sapiens
  misc_RNA (1)...(19): siRNA sense strand
ggaagaauuuugacuccuu

SEQ ID NO: 958650 - RNA, 19 nt, Homo sapiens
  misc_RNA (1)...(19): siRNA sense strand
ucuggaggcuaaucuguga

SEQ ID NO: 958651 - RNA, 19 nt, Homo sapiens
  misc_RNA (1)...(19): siRNA sense strand
cuccagcccuugcuugaaa

SEQ ID NO: 958652 - RNA, 19 nt, Homo sapiens
  misc_RNA (1)...(19): siRNA sense strand
acgcugauguccucacuga

SEQ ID NO: 958653 - RNA, 19 nt, Homo sapiens
  misc_RNA (1)...(19): siRNA sense strand
caagaaucccuacaacauc

SEQ ID NO: 958654 - RNA, 19 nt, Homo sapiens
  misc_RNA (1)...(19): siRNA sense strand
caucaagaaucccuacaac

SEQ ID NO: 958655 - RNA, 19 nt, Homo sapiens
  misc_RNA (1)...(19): siRNA sense strand
ccaugucgcugcccaagag

SEQ ID NO: 958656 - RNA, 19 nt, Homo sapiens
  misc_RNA (1)...(19): siRNA sense strand
gggugcagcucuucaaagg

SEQ ID NO: 958657 - RNA, 19 nt, Homo sapiens
  misc_RNA (1)...(19): siRNA sense strand
gcucugugcuggccuucug

SEQ ID NO: 958658 - RNA, 19 nt, Homo sapiens
  misc_RNA (1)...(19): siRNA sense strand
uggcugaaaugacagugaa

SEQ ID NO: 958659 - RNA, 19 nt, Homo sapiens
  misc_RNA (1)...(19): siRNA sense strand
gaagaggagagcucagaag

SEQ ID NO: 958660 - RNA, 19 nt, Homo sapiens
  misc_RNA (1)...(19): siRNA sense strand
ccaacaaguccgaaucaga

SEQ ID NO: 958661 - RNA, 19 nt, Homo sapiens
  misc_RNA (1)...(19): siRNA sense strand
gagcagcccgaggagcuua

SEQ ID NO: 958662 - RNA, 19 nt, Homo sapiens
  misc_RNA (1)...(19): siRNA sense strand
uaccaacgcccuagaaauc

SEQ ID NO: 958663 - RNA, 19 nt, Homo sapiens
  misc_RNA (1)...(19): siRNA sense strand
gaaacccaucggcaacauu

SEQ ID NO: 958664 - RNA, 19 nt, Homo sapiens
  misc_RNA (1)...(19): siRNA sense strand
cucauuccuucuacaauuu

SEQ ID NO: 958665 - RNA, 19 nt, Homo sapiens
  misc_RNA (1)...(19): siRNA sense strand
gucaucaucuuccuuaacu

SEQ ID NO: 958666 - RNA, 19 nt, Homo sapiens
  misc_RNA (1)...(19): siRNA sense strand
caacuacgugcucuucaau

SEQ ID NO: 958667 - RNA, 19 nt, Homo sapiens
  misc_RNA (1)...(19): siRNA sense strand
cuuaugcucuucaucuuca

SEQ ID NO: 958668 - RNA, 19 nt, Homo sapiens
  misc_RNA (1)...(19): siRNA sense strand
aagaaucccuacaacaucu

SEQ ID NO: 958669 - RNA, 19 nt, Homo sapiens
  misc_RNA (1)...(19): siRNA sense strand
ccaugccgacugccacuua

SEQ ID NO: 958670 - RNA, 19 nt, Homo sapiens
  misc_RNA (1)...(19): siRNA sense strand
agacagcgaggcaguuuau

SEQ ID NO: 958671 - RNA, 19 nt, Homo sapiens
  misc_RNA (1)...(19): siRNA sense strand
ggaacaucaccaauaaauc

SEQ ID NO: 958672 - RNA, 19 nt, Homo sapiens
  misc_RNA (1)...(19): siRNA sense strand
gcaugggcaucgaauacca

SEQ ID NO: 958673 - RNA, 19 nt, Homo sapiens
  misc_RNA (1)...(19): siRNA sense strand
ugguguacauccuucguaa

SEQ ID NO: 958674 - RNA, 19 nt, Homo sapiens
  misc_RNA (1)...(19): siRNA sense strand
gccaggagagccaggauga

SEQ ID NO: 958675 - RNA, 19 nt, Homo sapiens
  misc_RNA (1)...(19): siRNA sense strand
ucucuucggcugcaaguuu

SEQ ID NO: 958676 - RNA, 19 nt, Homo sapiens
  misc_RNA (1)...(19): siRNA sense strand
gaugcuuccuaccugagaa

SEQ ID NO: 958677 - RNA, 19 nt, Homo sapiens
  misc_RNA (1)...(19): siRNA sense strand
caucgucacugucuuucag

SEQ ID NO: 958678 - RNA, 19 nt, Homo sapiens
  misc_RNA (1)...(19): siRNA sense strand
ucauguacuuugugaugga

SEQ ID NO: 958679 - RNA, 19 nt, Homo sapiens
  misc_RNA (1)...(19): siRNA sense strand
aaacccaucggcaacauug

SEQ ID NO: 958680 - RNA, 19 nt, Homo sapiens
  misc_RNA (1)...(19): siRNA sense strand
ggccaucgucacugucuuu

SEQ ID NO: 958681 - RNA, 19 nt, Homo sapiens
  misc_RNA (1)...(19): siRNA sense strand
ugaagaccauggacaacgu

SEQ ID NO: 958682 - RNA, 19 nt, Homo sapiens
  misc_RNA (1)...(19): siRNA sense strand
gaaccgaugcuuccuaccu

SEQ ID NO: 958683 - RNA, 19 nt, Homo sapiens
  misc_RNA (1)...(19): siRNA sense strand
ccucuccaauuacaucuuc

SEQ ID NO: 958684 - RNA, 19 nt, Homo sapiens
  misc_RNA (1)...(19): siRNA sense strand
gcauguuggucauccuucu

SEQ ID NO: 958685 - RNA, 19 nt, Homo sapiens
  misc_RNA (1)...(19): siRNA sense strand
cuugcggucuggacuauga

SEQ ID NO: 958686 - RNA, 19 nt, Homo sapiens
  misc_RNA (1)...(19): siRNA sense strand
cgaccgcucagggccauua

SEQ ID NO: 958687 - RNA, 19 nt, Homo sapiens
  misc_RNA (1)...(19): siRNA sense strand
cggcaacauuguagucauc

SEQ ID NO: 958688 - RNA, 19 nt, Homo sapiens
  misc_RNA (1)...(19): siRNA sense strand
cgucuucaccagccucuuu

SEQ ID NO: 958689 - RNA, 19 nt, Homo sapiens
  misc_RNA (1)...(19): siRNA sense strand
gcucgccgaccgugaaaug

SEQ ID NO: 958690 - RNA, 19 nt, Homo sapiens
  misc_RNA (1)...(19): siRNA sense strand
acaagcugcuggagacaca

SEQ ID NO: 958691 - RNA, 19 nt, Homo sapiens
  misc_RNA (1)...(19): siRNA sense strand
caucgugggcuccuucuuc

SEQ ID NO: 958692 - RNA, 19 nt, Homo sapiens
  misc_RNA (1)...(19): siRNA sense strand
acagcgaggcaguuuauga

SEQ ID NO: 958693 - RNA, 19 nt, Homo sapiens
  misc_RNA (1)...(19): siRNA sense strand
gagggcaaccugagcaaag

SEQ ID NO: 958694 - RNA, 19 nt, Homo sapiens
  misc_RNA (1)...(19): siRNA sense strand
aacaaaguccucuacaaug

SEQ ID NO: 958695 - RNA, 19 nt, Homo sapiens
  misc_RNA (1)...(19): siRNA sense strand
gugggcuccuucuucauga

SEQ ID NO: 958696 - RNA, 19 nt, Homo sapiens
  misc_RNA (1)...(19): siRNA sense strand
accaggaacaucaccaaua

SEQ ID NO: 958697 - RNA, 19 nt, Homo sapiens
  misc_RNA (1)...(19): siRNA sense strand
gcaacauuguagucaucug

SEQ ID NO: 958698 - RNA, 19 nt, Homo sapiens
  misc_RNA (1)...(19): siRNA sense strand
ggagagccaggaugaagag

SEQ ID NO: 958699 - RNA, 19 nt, Homo sapiens
  misc_RNA (1)...(19): siRNA sense strand
gcucuucaucuucaucuuc

SEQ ID NO: 958700 - RNA, 19 nt, Homo sapiens
  misc_RNA (1)...(19): siRNA sense strand
ugacaccuuccgaaagauu

SEQ ID NO: 958701 - RNA, 19 nt, Homo sapiens
  misc_RNA (1)...(19): siRNA sense strand
ucagacagcgaggcaguuu

SEQ ID NO: 958702 - RNA, 19 nt, Homo sapiens
  misc_RNA (1)...(19): siRNA sense strand
caccggagacgcugaagga

SEQ ID NO: 958703 - RNA, 19 nt, Homo sapiens
  misc_RNA (1)...(19): siRNA sense strand
ggaaccaguacuacaccaa

SEQ ID NO: 958704 - RNA, 19 nt, Homo sapiens
  misc_RNA (1)...(19): siRNA sense strand
ccguggagaugguggugaa

SEQ ID NO: 958705 - RNA, 19 nt, Homo sapiens
  misc_RNA (1)...(19): siRNA sense strand
aggaacaucaccaauaaau

SEQ ID NO: 958706 - RNA, 19 nt, Homo sapiens
  misc_RNA (1)...(19): siRNA sense strand
ggagaugguggugaagaug

SEQ ID NO: 958707 - RNA, 19 nt, Homo sapiens
  misc_RNA (1)...(19): siRNA sense strand
cagcaugggcaucgaauac

SEQ ID NO: 958708 - RNA, 19 nt, Homo sapiens
  misc_RNA (1)...(19): siRNA sense strand
cuucuacaauuucaucuac

SEQ ID NO: 958709 - RNA, 19 nt, Homo sapiens
  misc_RNA (1)...(19): siRNA sense strand
cuugucaucaucuuccuua

SEQ ID NO: 958710 - RNA, 19 nt, Homo sapiens
  misc_RNA (1)...(19): siRNA sense strand
aagaggagagcucagaaga

SEQ ID NO: 958711 - RNA, 19 nt, Homo sapiens
  misc_RNA (1)...(19): siRNA sense strand
cagggaugcuggaguacuc

SEQ ID NO: 958712 - RNA, 19 nt, Homo sapiens
  misc_RNA (1)...(19): siRNA sense strand
cuacgugcucuucaauuug

SEQ ID NO: 958713 - RNA, 19 nt, Homo sapiens
  misc_RNA (1)...(19): siRNA sense strand
ccaggaacaucaccaauaa

SEQ ID NO: 958714 - RNA, 19 nt, Homo sapiens
  misc_RNA (1)...(19): siRNA sense strand
gaacaaaguccucuacaau

SEQ ID NO: 958715 - RNA, 19 nt, Homo sapiens
  misc_RNA (1)...(19): siRNA sense strand
ggaacaaaguccucuacaa

SEQ ID NO: 958716 - RNA, 19 nt, Homo sapiens
  misc_RNA (1)...(19): siRNA sense strand
gcucauuccuucuacaauu

SEQ ID NO: 958717 - RNA, 19 nt, Homo sapiens
  misc_RNA (1)...(19): siRNA sense strand
gaaagauuguggacagcaa

SEQ ID NO: 958718 - RNA, 19 nt, Homo sapiens
  misc_RNA (1)...(19): siRNA sense strand
gcaacuacgugcucuucaa

SEQ ID NO: 958719 - RNA, 19 nt, Homo sapiens
  misc_RNA (1)...(19): siRNA sense strand
gaacaucaccaauaaaucg

SEQ ID NO: 958720 - RNA, 19 nt, Homo sapiens
  misc_RNA (1)...(19): siRNA sense strand
gaaggagaaggcacuagua

SEQ ID NO: 958721 - RNA, 19 nt, Homo sapiens
  misc_RNA (1)...(19): siRNA sense strand
guacaacuuugacaaccuu

SEQ ID NO: 958722 - RNA, 19 nt, Homo sapiens
  misc_RNA (1)...(19): siRNA sense strand
ucgcagggaugcuggagua

SEQ ID NO: 958723 - RNA, 19 nt, Homo sapiens
  misc_RNA (1)...(19): siRNA sense strand
gaggauaccaggaacauca

SEQ ID NO: 958724 - RNA, 19 nt, Homo sapiens
  misc_RNA (1)...(19): siRNA sense strand
gcgaggcaguuuaugaguu

SEQ ID NO: 958725 - RNA, 19 nt, Homo sapiens
  misc_RNA (1)...(19): siRNA sense strand
cggagacgcugaaggagaa

SEQ ID NO: 958726 - RNA, 19 nt, Homo sapiens
  misc_RNA (1)...(19): siRNA sense strand
gcugauguccucacugaaa

SEQ ID NO: 958727 - RNA, 19 nt, Homo sapiens
  misc_RNA (1)...(19): siRNA sense strand
aaaguccucuacaauggua

SEQ ID NO: 958728 - RNA, 19 nt, Homo sapiens
  misc_RNA (1)...(19): siRNA sense strand
caucuucaccgcagucuuu

SEQ ID NO: 958729 - RNA, 19 nt, Homo sapiens
  misc_RNA (1)...(19): siRNA sense strand
gcuauuaccagacagagaa

SEQ ID NO: 958730 - RNA, 19 nt, Homo sapiens
  misc_RNA (1)...(19): siRNA sense strand
acaaaguccucuacaaugg

SEQ ID NO: 958731 - RNA, 19 nt, Homo sapiens
  misc_RNA (1)...(19): siRNA sense strand
ggagaaggcacuaguagag

SEQ ID NO: 958732 - RNA, 19 nt, Homo sapiens
  misc_RNA (1)...(19): siRNA sense strand
agacagagaacgaggauga

SEQ ID NO: 958733 - RNA, 19 nt, Homo sapiens
  misc_RNA (1)...(19): siRNA sense strand
uacaacagcuccagcaaca

SEQ ID NO: 958734 - RNA, 19 nt, Homo sapiens
  misc_RNA (1)...(19): siRNA sense strand
ugugacaccuuccgaaaga

SEQ ID NO: 958735 - RNA, 19 nt, Homo sapiens
  misc_RNA (1)...(19): siRNA sense strand
cgaggcaguuuaugaguuc

SEQ ID NO: 958736 - RNA, 19 nt, Homo sapiens
  misc_RNA (1)...(19): siRNA sense strand
acuacgugcucuucaauuu

SEQ ID NO: 958737 - RNA, 19 nt, Homo sapiens
  misc_RNA (1)...(19): siRNA sense strand
ucaagaaucccuacaacau

SEQ ID NO: 958738 - RNA, 19 nt, Homo sapiens
  misc_RNA (1)...(19): siRNA sense strand
cuucaucuuugccuucuuu

SEQ ID NO: 958739 - RNA, 19 nt, Homo sapiens
  misc_RNA (1)...(19): siRNA sense strand
ucacguugcugcuggauac

SEQ ID NO: 958740 - RNA, 19 nt, Homo sapiens
  misc_RNA (1)...(19): siRNA sense strand
uccugacccucuccaauua

SEQ ID NO: 958741 - RNA, 19 nt, Homo sapiens
  misc_RNA (1)...(19): siRNA sense strand
caggaggacuggaacaaag

SEQ ID NO: 958742 - RNA, 19 nt, Homo sapiens
  misc_RNA (1)...(19): siRNA sense strand
ccaccugugucaacuggaa

SEQ ID NO: 958743 - RNA, 19 nt, Homo sapiens
  misc_RNA (1)...(19): siRNA sense strand
ggcaugcgguccugcagaa

SEQ ID NO: 958744 - RNA, 19 nt, Homo sapiens
  misc_RNA (1)...(19): siRNA sense strand
caucugcugugccuucuuc

SEQ ID NO: 958745 - RNA, 19 nt, Homo sapiens
  misc_RNA (1)...(19): siRNA sense strand
ggagcgcuauuaccagaca

SEQ ID NO: 958746 - RNA, 19 nt, Homo sapiens
  misc_RNA (1)...(19): siRNA sense strand
ugccagaccggaagaauuu

SEQ ID NO: 958747 - RNA, 19 nt, Homo sapiens
  misc_RNA (1)...(19): siRNA sense strand
gcuuguguauggucccuuu

SEQ ID NO: 958748 - RNA, 19 nt, Homo sapiens
  misc_RNA (1)...(19): siRNA sense strand
gcaggccuuugaugacuuc

SEQ ID NO: 958749 - RNA, 19 nt, Homo sapiens
  misc_RNA (1)...(19): siRNA sense strand
ggaagaauuuugacuccuu

SEQ ID NO: 958750 - RNA, 19 nt, Homo sapiens
  misc_RNA (1)...(19): siRNA sense strand
ucuggaggcuaaucuguga

SEQ ID NO: 958751 - RNA, 19 nt, Homo sapiens
  misc_RNA (1)...(19): siRNA sense strand
cuccagcccuugcuugaaa

SEQ ID NO: 958752 - RNA, 19 nt, Homo sapiens
  misc_RNA (1)...(19): siRNA sense strand
acgcugauguccucacuga

SEQ ID NO: 958753 - RNA, 19 nt, Homo sapiens
  misc_RNA (1)...(19): siRNA sense strand
caagaaucccuacaacauc

SEQ ID NO: 958754 - RNA, 19 nt, Homo sapiens
  misc_RNA (1)...(19): siRNA sense strand
caucaagaaucccuacaac

SEQ ID NO: 958755 - RNA, 19 nt, Homo sapiens
  misc_RNA (1)...(19): siRNA sense strand
ccaugucgcugcccaagag

SEQ ID NO: 958756 - RNA, 19 nt, Homo sapiens
  misc_RNA (1)...(19): siRNA sense strand
gggugcagcucuucaaagg

SEQ ID NO: 958757 - RNA, 19 nt, Homo sapiens
  misc_RNA (1)...(19): siRNA sense strand
gcucugugcuggccuucug

SEQ ID NO: 958758 - RNA, 19 nt, Homo sapiens
  misc_RNA (1)...(19): siRNA sense strand
uggcugaaaugacagugaa

SEQ ID NO: 958759 - RNA, 19 nt, Homo sapiens
  misc_RNA (1)...(19): siRNA sense strand
gaagaggagagcucagaag

SEQ ID NO: 958760 - RNA, 19 nt, Homo sapiens
  misc_RNA (1)...(19): siRNA sense strand
ccaacaaguccgaaucaga

SEQ ID NO: 958761 - RNA, 19 nt, Homo sapiens
  misc_RNA (1)...(19): siRNA sense strand
gagcagcccgaggagcuua

SEQ ID NO: 958762 - RNA, 19 nt, Homo sapiens
  misc_RNA (1)...(19): siRNA sense strand
uaccaacgcccuagaaauc

SEQ ID NO: 958763 - RNA, 19 nt, Homo sapiens
  misc_RNA (1)...(19): siRNA sense strand
gaaacccaucggcaacauu

SEQ ID NO: 958764 - RNA, 19 nt, Homo sapiens
  misc_RNA (1)...(19): siRNA sense strand
cucauuccuucuacaauuu

SEQ ID NO: 958765 - RNA, 19 nt, Homo sapiens
  misc_RNA (1)...(19): siRNA sense strand
gucaucaucuuccuuaacu

SEQ ID NO: 958766 - RNA, 19 nt, Homo sapiens
  misc_RNA (1)...(19): siRNA sense strand
caacuacgugcucuucaau

SEQ ID NO: 958767 - RNA, 19 nt, Homo sapiens
  misc_RNA (1)...(19): siRNA sense strand
cuuaugcucuucaucuuca

SEQ ID NO: 958768 - RNA, 19 nt, Homo sapiens
  misc_RNA (1)...(19): siRNA sense strand
aagaaucccuacaacaucu

SEQ ID NO: 958769 - RNA, 19 nt, Homo sapiens
  misc_RNA (1)...(19): siRNA sense strand
ccaugccgacugccacuua

SEQ ID NO: 958770 - RNA, 19 nt, Homo sapiens
  misc_RNA (1)...(19): siRNA sense strand
agacagcgaggcaguuuau

SEQ ID NO: 958771 - RNA, 19 nt, Homo sapiens
  misc_RNA (1)...(19): siRNA sense strand
ggaacaucaccaauaaauc

SEQ ID NO: 958772 - RNA, 19 nt, Homo sapiens
  misc_RNA (1)...(19): siRNA sense strand
gcaugggcaucgaauacca

SEQ ID NO: 958773 - RNA, 19 nt, Homo sapiens
  misc_RNA (1)...(19): siRNA sense strand
ugguguacauccuucguaa

SEQ ID NO: 958774 - RNA, 19 nt, Homo sapiens
  misc_RNA (1)...(19): siRNA sense strand
gccaggagagccaggauga

SEQ ID NO: 958775 - RNA, 19 nt, Homo sapiens
  misc_RNA (1)...(19): siRNA sense strand
ucucuucggcugcaaguuu

SEQ ID NO: 958776 - RNA, 19 nt, Homo sapiens
  misc_RNA (1)...(19): siRNA sense strand
gaugcuuccuaccugagaa

SEQ ID NO: 958777 - RNA, 19 nt, Homo sapiens
  misc_RNA (1)...(19): siRNA sense strand
caucgucacugucuuucag

SEQ ID NO: 958778 - RNA, 19 nt, Homo sapiens
  misc_RNA (1)...(19): siRNA sense strand
ucauguacuuugugaugga

SEQ ID NO: 958779 - RNA, 19 nt, Homo sapiens
  misc_RNA (1)...(19): siRNA sense strand
aaacccaucggcaacauug

SEQ ID NO: 958780 - RNA, 19 nt, Homo sapiens
  misc_RNA (1)...(19): siRNA sense strand
ggccaucgucacugucuuu

SEQ ID NO: 958781 - RNA, 19 nt, Homo sapiens
  misc_RNA (1)...(19): siRNA sense strand
ugaagaccauggacaacgu

SEQ ID NO: 958782 - RNA, 19 nt, Homo sapiens
  misc_RNA (1)...(19): siRNA sense strand
gaaccgaugcuuccuaccu

SEQ ID NO: 958783 - RNA, 19 nt, Homo sapiens
  misc_RNA (1)...(19): siRNA sense strand
ccucuccaauuacaucuuc

SEQ ID NO: 958784 - RNA, 19 nt, Homo sapiens
  misc_RNA (1)...(19): siRNA sense strand
gcauguuggucauccuucu

SEQ ID NO: 958785 - RNA, 19 nt, Homo sapiens
  misc_RNA (1)...(19): siRNA sense strand
cuugcggucuggacuauga

SEQ ID NO: 958786 - RNA, 19 nt, Homo sapiens
  misc_RNA (1)...(19): siRNA sense strand
cgaccgcucagggccauua

SEQ ID NO: 958787 - RNA, 19 nt, Homo sapiens
  misc_RNA (1)...(19): siRNA sense strand
cggcaacauuguagucauc

SEQ ID NO: 958788 - RNA, 19 nt, Homo sapiens
  misc_RNA (1)...(19): siRNA sense strand
cgucuucaccagccucuuu

SEQ ID NO: 958789 - RNA, 19 nt, Homo sapiens
  misc_RNA (1)...(19): siRNA sense strand
gcucgccgaccgugaaaug

SEQ ID NO: 958790 - RNA, 19 nt, Homo sapiens
  misc_RNA (1)...(19): siRNA sense strand
acaagcugcuggagacaca

SEQ ID NO: 958791 - RNA, 19 nt, Homo sapiens
  misc_RNA (1)...(19): siRNA sense strand
caucgugggcuccuucuuc

SEQ ID NO: 958792 - RNA, 19 nt, Homo sapiens
  misc_RNA (1)...(19): siRNA sense strand
acagcgaggcaguuuauga

SEQ ID NO: 958793 - RNA, 19 nt, Homo sapiens
  misc_RNA (1)...(19): siRNA sense strand
gagggcaaccugagcaaag

SEQ ID NO: 958794 - RNA, 19 nt, Homo sapiens
  misc_RNA (1)...(19): siRNA sense strand
aacaaaguccucuacaaug

SEQ ID NO: 958795 - RNA, 19 nt, Homo sapiens
  misc_RNA (1)...(19): siRNA sense strand
gugggcuccuucuucauga

SEQ ID NO: 958796 - RNA, 19 nt, Homo sapiens
  misc_RNA (1)...(19): siRNA sense strand
accaggaacaucaccaaua

SEQ ID NO: 958797 - RNA, 19 nt, Homo sapiens
  misc_RNA (1)...(19): siRNA sense strand
gcaacauuguagucaucug

SEQ ID NO: 958798 - RNA, 19 nt, Homo sapiens
  misc_RNA (1)...(19): siRNA sense strand
ggagagccaggaugaagag

SEQ ID NO: 958799 - RNA, 19 nt, Homo sapiens
  misc_RNA (1)...(19): siRNA sense strand
gcucuucaucuucaucuuc

SEQ ID NO: 958800 - RNA, 19 nt, Homo sapiens
  misc_RNA (1)...(19): siRNA sense strand
ugacaccuuccgaaagauu

SEQ ID NO: 958801 - RNA, 19 nt, Homo sapiens
  misc_RNA (1)...(19): siRNA sense strand
ucagacagcgaggcaguuu

SEQ ID NO: 958802 - RNA, 19 nt, Homo sapiens
  misc_RNA (1)...(19): siRNA sense strand
caccggagacgcugaagga

SEQ ID NO: 958803 - RNA, 19 nt, Homo sapiens
  misc_RNA (1)...(19): siRNA sense strand
ggaaccaguacuacaccaa

SEQ ID NO: 958804 - RNA, 19 nt, Homo sapiens
  misc_RNA (1)...(19): siRNA sense strand
ccguggagaugguggugaa

SEQ ID NO: 958805 - RNA, 19 nt, Homo sapiens
  misc_RNA (1)...(19): siRNA sense strand
aggaacaucaccaauaaau

SEQ ID NO: 958806 - RNA, 19 nt, Homo sapiens
  misc_RNA (1)...(19): siRNA sense strand
ggagaugguggugaagaug

SEQ ID NO: 958807 - RNA, 19 nt, Homo sapiens
  misc_RNA (1)...(19): siRNA sense strand
cagcaugggcaucgaauac

SEQ ID NO: 958808 - RNA, 19 nt, Homo sapiens
  misc_RNA (1)...(19): siRNA sense strand
cuucuacaauuucaucuac

SEQ ID NO: 958809 - RNA, 19 nt, Homo sapiens
  misc_RNA (1)...(19): siRNA sense strand
cuugucaucaucuuccuua

SEQ ID NO: 958810 - RNA, 19 nt, Homo sapiens
  misc_RNA (1)...(19): siRNA sense strand
aagaggagagcucagaaga

SEQ ID NO: 958811 - RNA, 19 nt, Homo sapiens
  misc_RNA (1)...(19): siRNA sense strand
cagggaugcuggaguacuc

SEQ ID NO: 958812 - RNA, 19 nt, Homo sapiens
  misc_RNA (1)...(19): siRNA sense strand
cuacgugcucuucaauuug

SEQ ID NO: 958813 - RNA, 19 nt, Homo sapiens
  misc_RNA (1)...(19): siRNA sense strand
ccaggaacaucaccaauaa

SEQ ID NO: 958814 - RNA, 19 nt, Homo sapiens
  misc_RNA (1)...(19): siRNA sense strand
gaacaaaguccucuacaau

SEQ ID NO: 958815 - RNA, 19 nt, Homo sapiens
  misc_RNA (1)...(19): siRNA sense strand
ggaacaaaguccucuacaa

SEQ ID NO: 958816 - RNA, 19 nt, Homo sapiens
  misc_RNA (1)...(19): siRNA sense strand
gcucauuccuucuacaauu

SEQ ID NO: 958817 - RNA, 19 nt, Homo sapiens
  misc_RNA (1)...(19): siRNA sense strand
gaaagauuguggacagcaa

SEQ ID NO: 958818 - RNA, 19 nt, Homo sapiens
  misc_RNA (1)...(19): siRNA sense strand
gcaacuacgugcucuucaa

SEQ ID NO: 958819 - RNA, 19 nt, Homo sapiens
  misc_RNA (1)...(19): siRNA sense strand
gaacaucaccaauaaaucg

SEQ ID NO: 958820 - RNA, 19 nt, Homo sapiens
  misc_RNA (1)...(19): siRNA sense strand
gaaggagaaggcacuagua

SEQ ID NO: 958821 - RNA, 19 nt, Homo sapiens
  misc_RNA (1)...(19): siRNA sense strand
guacaacuuugacaaccuu

SEQ ID NO: 958822 - RNA, 19 nt, Homo sapiens
  misc_RNA (1)...(19): siRNA sense strand
ucgcagggaugcuggagua

SEQ ID NO: 958823 - RNA, 19 nt, Homo sapiens
  misc_RNA (1)...(19): siRNA sense strand
gaggauaccaggaacauca

SEQ ID NO: 958824 - RNA, 19 nt, Homo sapiens
  misc_RNA (1)...(19): siRNA sense strand
gcgaggcaguuuaugaguu

SEQ ID NO: 958825 - RNA, 19 nt, Homo sapiens
  misc_RNA (1)...(19): siRNA sense strand
cggagacgcugaaggagaa

SEQ ID NO: 958826 - RNA, 19 nt, Homo sapiens
  misc_RNA (1)...(19): siRNA sense strand
gcugauguccucacugaaa

SEQ ID NO: 958827 - RNA, 19 nt, Homo sapiens
  misc_RNA (1)...(19): siRNA sense strand
aaaguccucuacaauggua

SEQ ID NO: 958828 - RNA, 19 nt, Homo sapiens
  misc_RNA (1)...(19): siRNA sense strand
caucuucaccgcagucuuu

SEQ ID NO: 958829 - RNA, 19 nt, Homo sapiens
  misc_RNA (1)...(19): siRNA sense strand
gcuauuaccagacagagaa

SEQ ID NO: 958830 - RNA, 19 nt, Homo sapiens
  misc_RNA (1)...(19): siRNA sense strand
acaaaguccucuacaaugg

SEQ ID NO: 958831 - RNA, 19 nt, Homo sapiens
  misc_RNA (1)...(19): siRNA sense strand
ggagaaggcacuaguagag

SEQ ID NO: 958832 - RNA, 19 nt, Homo sapiens
  misc_RNA (1)...(19): siRNA sense strand
agacagagaacgaggauga

SEQ ID NO: 958833 - RNA, 19 nt, Homo sapiens
  misc_RNA (1)...(19): siRNA sense strand
uacaacagcuccagcaaca

SEQ ID NO: 958834 - RNA, 19 nt, Homo sapiens
  misc_RNA (1)...(19): siRNA sense strand
ugugacaccuuccgaaaga

SEQ ID NO: 958835 - RNA, 19 nt, Homo sapiens
  misc_RNA (1)...(19): siRNA sense strand
cgaggcaguuuaugaguuc

SEQ ID NO: 958836 - RNA, 19 nt, Homo sapiens
  misc_RNA (1)...(19): siRNA sense strand
acuacgugcucuucaauuu

SEQ ID NO: 958837 - RNA, 19 nt, Homo sapiens
  misc_RNA (1)...(19): siRNA sense strand
ucaagaaucccuacaacau

SEQ ID NO: 958838 - RNA, 19 nt, Homo sapiens
  misc_RNA (1)...(19): siRNA sense strand
cuucaucuuugccuucuuu

SEQ ID NO: 958839 - RNA, 19 nt, Homo sapiens
  misc_RNA (1)...(19): siRNA sense strand
ucacguugcugcuggauac

SEQ ID NO: 958840 - RNA, 19 nt, Homo sapiens
  misc_RNA (1)...(19): siRNA sense strand
uccugacccucuccaauua

SEQ ID NO: 958841 - RNA, 19 nt, Homo sapiens
  misc_RNA (1)...(19): siRNA sense strand
caggaggacuggaacaaag

SEQ ID NO: 958842 - RNA, 19 nt, Homo sapiens
  misc_RNA (1)...(19): siRNA sense strand
ccaccugugucaacuggaa

SEQ ID NO: 958843 - RNA, 19 nt, Homo sapiens
  misc_RNA (1)...(19): siRNA sense strand
ggcaugcgguccugcagaa

SEQ ID NO: 958844 - RNA, 19 nt, Homo sapiens
  misc_RNA (1)...(19): siRNA sense strand
caucugcugugccuucuuc

SEQ ID NO: 958845 - RNA, 19 nt, Homo sapiens
  misc_RNA (1)...(19): siRNA sense strand
ggagcgcuauuaccagaca

SEQ ID NO: 958846 - RNA, 19 nt, Homo sapiens
  misc_RNA (1)...(19): siRNA sense strand
ugccagaccggaagaauuu

SEQ ID NO: 958847 - RNA, 19 nt, Homo sapiens
  misc_RNA (1)...(19): siRNA sense strand
gcuuguguauggucccuuu

SEQ ID NO: 958848 - RNA, 19 nt, Homo sapiens
  misc_RNA (1)...(19): siRNA sense strand
gcaggccuuugaugacuuc

SEQ ID NO: 958849 - RNA, 19 nt, Homo sapiens
  misc_RNA (1)...(19): siRNA sense strand
ggaagaauuuugacuccuu

SEQ ID NO: 958850 - RNA, 19 nt, Homo sapiens
  misc_RNA (1)...(19): siRNA sense strand
ucuggaggcuaaucuguga

SEQ ID NO: 958851 - RNA, 19 nt, Homo sapiens
  misc_RNA (1)...(19): siRNA sense strand
cuccagcccuugcuugaaa

SEQ ID NO: 958852 - RNA, 19 nt, Homo sapiens
  misc_RNA (1)...(19): siRNA sense strand
acgcugauguccucacuga

SEQ ID NO: 958853 - RNA, 19 nt, Homo sapiens
  misc_RNA (1)...(19): siRNA sense strand
caagaaucccuacaacauc

SEQ ID NO: 958854 - RNA, 19 nt, Homo sapiens
  misc_RNA (1)...(19): siRNA sense strand
caucaagaaucccuacaac

SEQ ID NO: 958855 - RNA, 19 nt, Homo sapiens
  misc_RNA (1)...(19): siRNA sense strand
ccaugucgcugcccaagag

SEQ ID NO: 958856 - RNA, 19 nt, Homo sapiens
  misc_RNA (1)...(19): siRNA sense strand
gggugcagcucuucaaagg

SEQ ID NO: 958857 - RNA, 19 nt, Homo sapiens
  misc_RNA (1)...(19): siRNA sense strand
gcucugugcuggccuucug

SEQ ID NO: 958858 - RNA, 19 nt, Homo sapiens
  misc_RNA (1)...(19): siRNA sense strand
uggcugaaaugacagugaa

SEQ ID NO: 958859 - RNA, 19 nt, Homo sapiens
  misc_RNA (1)...(19): siRNA sense strand
gaagaggagagcucagaag

SEQ ID NO: 958860 - RNA, 19 nt, Homo sapiens
  misc_RNA (1)...(19): siRNA sense strand
ccaacaaguccgaaucaga

SEQ ID NO: 958861 - RNA, 19 nt, Homo sapiens
  misc_RNA (1)...(19): siRNA sense strand
gagcagcccgaggagcuua

SEQ ID NO: 958862 - RNA, 19 nt, Homo sapiens
  misc_RNA (1)...(19): siRNA sense strand
uaccaacgcccuagaaauc

SEQ ID NO: 958863 - RNA, 19 nt, Homo sapiens
  misc_RNA (1)...(19): siRNA sense strand
gaaacccaucggcaacauu

SEQ ID NO: 958864 - RNA, 19 nt, Homo sapiens
  misc_RNA (1)...(19): siRNA sense strand
cucauuccuucuacaauuu

SEQ ID NO: 958865 - RNA, 19 nt, Homo sapiens
  misc_RNA (1)...(19): siRNA sense strand
gucaucaucuuccuuaacu

SEQ ID NO: 958866 - RNA, 19 nt, Homo sapiens
  misc_RNA (1)...(19): siRNA sense strand
caacuacgugcucuucaau

SEQ ID NO: 958867 - RNA, 19 nt, Homo sapiens
  misc_RNA (1)...(19): siRNA sense strand
cuuaugcucuucaucuuca

SEQ ID NO: 958868 - RNA, 19 nt, Homo sapiens
  misc_RNA (1)...(19): siRNA sense strand
aagaaucccuacaacaucu

SEQ ID NO: 958869 - RNA, 19 nt, Homo sapiens
  misc_RNA (1)...(19): siRNA sense strand
ccaugccgacugccacuua

SEQ ID NO: 958870 - RNA, 19 nt, Homo sapiens
  misc_RNA (1)...(19): siRNA sense strand
agacagcgaggcaguuuau

SEQ ID NO: 958871 - RNA, 19 nt, Homo sapiens
  misc_RNA (1)...(19): siRNA sense strand
ggaacaucaccaauaaauc

SEQ ID NO: 958872 - RNA, 19 nt, Homo sapiens
  misc_RNA (1)...(19): siRNA sense strand
gcaugggcaucgaauacca

SEQ ID NO: 958873 - RNA, 19 nt, Homo sapiens
  misc_RNA (1)...(19): siRNA sense strand
ugguguacauccuucguaa

SEQ ID NO: 958874 - RNA, 19 nt, Homo sapiens
  misc_RNA (1)...(19): siRNA sense strand
gccaggagagccaggauga

SEQ ID NO: 958875 - RNA, 19 nt, Homo sapiens
  misc_RNA (1)...(19): siRNA sense strand
ucucuucggcugcaaguuu

SEQ ID NO: 958876 - RNA, 19 nt, Homo sapiens
  misc_RNA (1)...(19): siRNA sense strand
gaugcuuccuaccugagaa

SEQ ID NO: 958877 - RNA, 19 nt, Homo sapiens
  misc_RNA (1)...(19): siRNA sense strand
caucgucacugucuuucag

SEQ ID NO: 958878 - RNA, 19 nt, Homo sapiens
  misc_RNA (1)...(19): siRNA sense strand
ucauguacuuugugaugga

SEQ ID NO: 958879 - RNA, 19 nt, Homo sapiens
  misc_RNA (1)...(19): siRNA sense strand
aaacccaucggcaacauug

SEQ ID NO: 958880 - RNA, 19 nt, Homo sapiens
  misc_RNA (1)...(19): siRNA sense strand
ggccaucgucacugucuuu

SEQ ID NO: 958881 - RNA, 19 nt, Homo sapiens
  misc_RNA (1)...(19): siRNA sense strand
ugaagaccauggacaacgu

SEQ ID NO: 958882 - RNA, 19 nt, Homo sapiens
  misc_RNA (1)...(19): siRNA sense strand
gaaccgaugcuuccuaccu

SEQ ID NO: 958883 - RNA, 19 nt, Homo sapiens
  misc_RNA (1)...(19): siRNA sense strand
ccucuccaauuacaucuuc

SEQ ID NO: 958884 - RNA, 19 nt, Homo sapiens
  misc_RNA (1)...(19): siRNA sense strand
gcauguuggucauccuucu

SEQ ID NO: 958885 - RNA, 19 nt, Homo sapiens
  misc_RNA (1)...(19): siRNA sense strand
cuugcggucuggacuauga

SEQ ID NO: 958886 - RNA, 19 nt, Homo sapiens
  misc_RNA (1)...(19): siRNA sense strand
cgaccgcucagggccauua

SEQ ID NO: 958887 - RNA, 19 nt, Homo sapiens
  misc_RNA (1)...(19): siRNA sense strand
cggcaacauuguagucauc

SEQ ID NO: 958888 - RNA, 19 nt, Homo sapiens
  misc_RNA (1)...(19): siRNA sense strand
cgucuucaccagccucuuu

SEQ ID NO: 958889 - RNA, 19 nt, Homo sapiens
  misc_RNA (1)...(19): siRNA sense strand
gcucgccgaccgugaaaug

SEQ ID NO: 958890 - RNA, 19 nt, Homo sapiens
  misc_RNA (1)...(19): siRNA sense strand
acaagcugcuggagacaca

SEQ ID NO: 958891 - RNA, 19 nt, Homo sapiens
  misc_RNA (1)...(19): siRNA sense strand
caucgugggcuccuucuuc

SEQ ID NO: 958892 - RNA, 19 nt, Homo sapiens
  misc_RNA (1)...(19): siRNA sense strand
acagcgaggcaguuuauga

SEQ ID NO: 958893 - RNA, 19 nt, Homo sapiens
  misc_RNA (1)...(19): siRNA sense strand
gagggcaaccugagcaaag

SEQ ID NO: 958894 - RNA, 19 nt, Homo sapiens
  misc_RNA (1)...(19): siRNA sense strand
aacaaaguccucuacaaug

SEQ ID NO: 958895 - RNA, 19 nt, Homo sapiens
  misc_RNA (1)...(19): siRNA sense strand
gugggcuccuucuucauga

SEQ ID NO: 958896 - RNA, 19 nt, Homo sapiens
  misc_RNA (1)...(19): siRNA sense strand
accaggaacaucaccaaua

SEQ ID NO: 958897 - RNA, 19 nt, Homo sapiens
  misc_RNA (1)...(19): siRNA sense strand
gcaacauuguagucaucug

SEQ ID NO: 958898 - RNA, 19 nt, Homo sapiens
  misc_RNA (1)...(19): siRNA sense strand
ggagagccaggaugaagag

SEQ ID NO: 958899 - RNA, 19 nt, Homo sapiens
  misc_RNA (1)...(19): siRNA sense strand
gcucuucaucuucaucuuc

SEQ ID NO: 958900 - RNA, 19 nt, Homo sapiens
  misc_RNA (1)...(19): siRNA sense strand
ugacaccuuccgaaagauu

SEQ ID NO: 958901 - RNA, 19 nt, Homo sapiens
  misc_RNA (1)...(19): siRNA sense strand
ucagacagcgaggcaguuu

SEQ ID NO: 958902 - RNA, 19 nt, Homo sapiens
  misc_RNA (1)...(19): siRNA sense strand
caccggagacgcugaagga

SEQ ID NO: 958903 - RNA, 19 nt, Homo sapiens
  misc_RNA (1)...(19): siRNA sense strand
ggaaccaguacuacaccaa

SEQ ID NO: 958904 - RNA, 19 nt, Homo sapiens
  misc_RNA (1)...(19): siRNA sense strand
ccguggagaugguggugaa

SEQ ID NO: 958905 - RNA, 19 nt, Homo sapiens
  misc_RNA (1)...(19): siRNA sense strand
aggaacaucaccaauaaau

SEQ ID NO: 958906 - RNA, 19 nt, Homo sapiens
  misc_RNA (1)...(19): siRNA sense strand
ggagaugguggugaagaug

SEQ ID NO: 958907 - RNA, 19 nt, Homo sapiens
  misc_RNA (1)...(19): siRNA sense strand
cagcaugggcaucgaauac

SEQ ID NO: 958908 - RNA, 19 nt, Homo sapiens
  misc_RNA (1)...(19): siRNA sense strand
cuucuacaauuucaucuac

SEQ ID NO: 958909 - RNA, 19 nt, Homo sapiens
  misc_RNA (1)...(19): siRNA sense strand
cuugucaucaucuuccuua

SEQ ID NO: 958910 - RNA, 19 nt, Homo sapiens
  misc_RNA (1)...(19): siRNA sense strand
aagaggagagcucagaaga

SEQ ID NO: 958911 - RNA, 19 nt, Homo sapiens
  misc_RNA (1)...(19): siRNA sense strand
cagggaugcuggaguacuc

SEQ ID NO: 958912 - RNA, 19 nt, Homo sapiens
  misc_RNA (1)...(19): siRNA sense strand
cuacgugcucuucaauuug

SEQ ID NO: 958913 - RNA, 19 nt, Homo sapiens
  misc_RNA (1)...(19): siRNA sense strand
ccaggaacaucaccaauaa

SEQ ID NO: 958914 - RNA, 19 nt, Homo sapiens
  misc_RNA (1)...(19): siRNA sense strand
gaacaaaguccucuacaau

SEQ ID NO: 958915 - RNA, 19 nt, Homo sapiens
  misc_RNA (1)...(19): siRNA sense strand
ggaacaaaguccucuacaa

SEQ ID NO: 958916 - RNA, 19 nt, Homo sapiens
  misc_RNA (1)...(19): siRNA sense strand
gcucauuccuucuacaauu

SEQ ID NO: 958917 - RNA, 19 nt, Homo sapiens
  misc_RNA (1)...(19): siRNA sense strand
gaaagauuguggacagcaa

SEQ ID NO: 958918 - RNA, 19 nt, Homo sapiens
  misc_RNA (1)...(19): siRNA sense strand
gcaacuacgugcucuucaa

SEQ ID NO: 958919 - RNA, 19 nt, Homo sapiens
  misc_RNA (1)...(19): siRNA sense strand
gaacaucaccaauaaaucg

SEQ ID NO: 958920 - RNA, 19 nt, Homo sapiens
  misc_RNA (1)...(19): siRNA sense strand
gaaggagaaggcacuagua

SEQ ID NO: 958921 - RNA, 19 nt, Homo sapiens
  misc_RNA (1)...(19): siRNA sense strand
guacaacuuugacaaccuu

SEQ ID NO: 958922 - RNA, 19 nt, Homo sapiens
  misc_RNA (1)...(19): siRNA sense strand
ucgcagggaugcuggagua

SEQ ID NO: 958923 - RNA, 19 nt, Homo sapiens
  misc_RNA (1)...(19): siRNA sense strand
gaggauaccaggaacauca

SEQ ID NO: 958924 - RNA, 19 nt, Homo sapiens
  misc_RNA (1)...(19): siRNA sense strand
gcgaggcaguuuaugaguu

SEQ ID NO: 958925 - RNA, 19 nt, Homo sapiens
  misc_RNA (1)...(19): siRNA sense strand
cggagacgcugaaggagaa

SEQ ID NO: 958926 - RNA, 19 nt, Homo sapiens
  misc_RNA (1)...(19): siRNA sense strand
gcugauguccucacugaaa

SEQ ID NO: 958927 - RNA, 19 nt, Homo sapiens
  misc_RNA (1)...(19): siRNA sense strand
aaaguccucuacaauggua

SEQ ID NO: 958928 - RNA, 19 nt, Homo sapiens
  misc_RNA (1)...(19): siRNA sense strand
caucuucaccgcagucuuu

SEQ ID NO: 958929 - RNA, 19 nt, Homo sapiens
  misc_RNA (1)...(19): siRNA sense strand
gcuauuaccagacagagaa

SEQ ID NO: 958930 - RNA, 19 nt, Homo sapiens
  misc_RNA (1)...(19): siRNA sense strand
acaaaguccucuacaaugg

SEQ ID NO: 958931 - RNA, 19 nt, Homo sapiens
  misc_RNA (1)...(19): siRNA sense strand
ggagaaggcacuaguagag

SEQ ID NO: 958932 - RNA, 19 nt, Homo sapiens
  misc_RNA (1)...(19): siRNA sense strand
agacagagaacgaggauga

SEQ ID NO: 958933 - RNA, 19 nt, Homo sapiens
  misc_RNA (1)...(19): siRNA sense strand
uacaacagcuccagcaaca

SEQ ID NO: 958934 - RNA, 19 nt, Homo sapiens
  misc_RNA (1)...(19): siRNA sense strand
ugugacaccuuccgaaaga

SEQ ID NO: 958935 - RNA, 19 nt, Homo sapiens
  misc_RNA (1)...(19): siRNA sense strand
cgaggcaguuuaugaguuc

SEQ ID NO: 958936 - RNA, 19 nt, Homo sapiens
  misc_RNA (1)...(19): siRNA sense strand
acuacgugcucuucaauuu

SEQ ID NO: 958937 - RNA, 19 nt, Homo sapiens
  misc_RNA (1)...(19): siRNA sense strand
ucaagaaucccuacaacau

SEQ ID NO: 958938 - RNA, 19 nt, Homo sapiens
  misc_RNA (1)...(19): siRNA sense strand
cuucaucuuugccuucuuu

SEQ ID NO: 958939 - RNA, 19 nt, Homo sapiens
  misc_RNA (1)...(19): siRNA sense strand
ucacguugcugcuggauac

SEQ ID NO: 958940 - RNA, 19 nt, Homo sapiens
  misc_RNA (1)...(19): siRNA sense strand
uccugacccucuccaauua

SEQ ID NO: 958941 - RNA, 19 nt, Homo sapiens
  misc_RNA (1)...(19): siRNA sense strand
caggaggacuggaacaaag

SEQ ID NO: 958942 - RNA, 19 nt, Homo sapiens
  misc_RNA (1)...(19): siRNA sense strand
ccaccugugucaacuggaa

SEQ ID NO: 958943 - RNA, 19 nt, Homo sapiens
  misc_RNA (1)...(19): siRNA sense strand
ggcaugcgguccugcagaa

SEQ ID NO: 958944 - RNA, 19 nt, Homo sapiens
  misc_RNA (1)...(19): siRNA sense strand
caucugcugugccuucuuc

SEQ ID NO: 958945 - RNA, 19 nt, Homo sapiens
  misc_RNA (1)...(19): siRNA sense strand
ggagcgcuauuaccagaca

SEQ ID NO: 958946 - RNA, 19 nt, Homo sapiens
  misc_RNA (1)...(19): siRNA sense strand
ugccagaccggaagaauuu

SEQ ID NO: 958947 - RNA, 19 nt, Homo sapiens
  misc_RNA (1)...(19): siRNA sense strand
gcuuguguauggucccuuu

SEQ ID NO: 958948 - RNA, 19 nt, Homo sapiens
  misc_RNA (1)...(19): siRNA sense strand
gcaggccuuugaugacuuc

SEQ ID NO: 958949 - RNA, 19 nt, Homo sapiens
  misc_RNA (1)...(19): siRNA sense strand
ggaagaauuuugacuccuu

SEQ ID NO: 958950 - RNA, 19 nt, Homo sapiens
  misc_RNA (1)...(19): siRNA sense strand
ucuggaggcuaaucuguga

SEQ ID NO: 958951 - RNA, 19 nt, Homo sapiens
  misc_RNA (1)...(19): siRNA sense strand
cuccagcccuugcuugaaa

SEQ ID NO: 958952 - RNA, 19 nt, Homo sapiens
  misc_RNA (1)...(19): siRNA sense strand
acgcugauguccucacuga

SEQ ID NO: 958953 - RNA, 19 nt, Homo sapiens
  misc_RNA (1)...(19): siRNA sense strand
caagaaucccuacaacauc

SEQ ID NO: 958954 - RNA, 19 nt, Homo sapiens
  misc_RNA (1)...(19): siRNA sense strand
caucaagaaucccuacaac

SEQ ID NO: 958955 - RNA, 19 nt, Homo sapiens
  misc_RNA (1)...(19): siRNA sense strand
ccaugucgcugcccaagag

SEQ ID NO: 958956 - RNA, 19 nt, Homo sapiens
  misc_RNA (1)...(19): siRNA sense strand
gggugcagcucuucaaagg

SEQ ID NO: 958957 - RNA, 19 nt, Homo sapiens
  misc_RNA (1)...(19): siRNA sense strand
gcucugugcuggccuucug

SEQ ID NO: 958958 - RNA, 19 nt, Homo sapiens
  misc_RNA (1)...(19): siRNA sense strand
uggcugaaaugacagugaa

SEQ ID NO: 958959 - RNA, 19 nt, Homo sapiens
  misc_RNA (1)...(19): siRNA sense strand
gaagaggagagcucagaag

SEQ ID NO: 958960 - RNA, 19 nt, Homo sapiens
  misc_RNA (1)...(19): siRNA sense strand
ccaacaaguccgaaucaga

SEQ ID NO: 958961 - RNA, 19 nt, Homo sapiens
  misc_RNA (1)...(19): siRNA sense strand
gagcagcccgaggagcuua

SEQ ID NO: 958962 - RNA, 19 nt, Homo sapiens
  misc_RNA (1)...(19): siRNA sense strand
uaccaacgcccuagaaauc

SEQ ID NO: 958963 - RNA, 19 nt, Homo sapiens
  misc_RNA (1)...(19): siRNA sense strand
gaaacccaucggcaacauu

SEQ ID NO: 958964 - RNA, 19 nt, Homo sapiens
  misc_RNA (1)...(19): siRNA sense strand
cucauuccuucuacaauuu

SEQ ID NO: 958965 - RNA, 19 nt, Homo sapiens
  misc_RNA (1)...(19): siRNA sense strand
gucaucaucuuccuuaacu

SEQ ID NO: 958966 - RNA, 19 nt, Homo sapiens
  misc_RNA (1)...(19): siRNA sense strand
caacuacgugcucuucaau

SEQ ID NO: 958967 - RNA, 19 nt, Homo sapiens
  misc_RNA (1)...(19): siRNA sense strand
cuuaugcucuucaucuuca

SEQ ID NO: 958968 - RNA, 19 nt, Homo sapiens
  misc_RNA (1)...(19): siRNA sense strand
aagaaucccuacaacaucu

SEQ ID NO: 958969 - RNA, 19 nt, Homo sapiens
  misc_RNA (1)...(19): siRNA sense strand
ccaugccgacugccacuua

SEQ ID NO: 958970 - RNA, 19 nt, Homo sapiens
  misc_RNA (1)...(19): siRNA sense strand
agacagcgaggcaguuuau

SEQ ID NO: 958971 - RNA, 19 nt, Homo sapiens
  misc_RNA (1)...(19): siRNA sense strand
ggaacaucaccaauaaauc

SEQ ID NO: 958972 - RNA, 19 nt, Homo sapiens
  misc_RNA (1)...(19): siRNA sense strand
gcaugggcaucgaauacca

SEQ ID NO: 958973 - RNA, 19 nt, Homo sapiens
  misc_RNA (1)...(19): siRNA sense strand
ugguguacauccuucguaa

SEQ ID NO: 958974 - RNA, 19 nt, Homo sapiens
  misc_RNA (1)...(19): siRNA sense strand
gccaggagagccaggauga

SEQ ID NO: 958975 - RNA, 19 nt, Homo sapiens
  misc_RNA (1)...(19): siRNA sense strand
ucucuucggcugcaaguuu

SEQ ID NO: 958976 - RNA, 19 nt, Homo sapiens
  misc_RNA (1)...(19): siRNA sense strand
gaugcuuccuaccugagaa

SEQ ID NO: 958977 - RNA, 19 nt, Homo sapiens
  misc_RNA (1)...(19): siRNA sense strand
caucgucacugucuuucag

SEQ ID NO: 958978 - RNA, 19 nt, Homo sapiens
  misc_RNA (1)...(19): siRNA sense strand
ucauguacuuugugaugga

SEQ ID NO: 958979 - RNA, 19 nt, Homo sapiens
  misc_RNA (1)...(19): siRNA sense strand
aaacccaucggcaacauug

SEQ ID NO: 958980 - RNA, 19 nt, Homo sapiens
  misc_RNA (1)...(19): siRNA sense strand
ggccaucgucacugucuuu

SEQ ID NO: 958981 - RNA, 19 nt, Homo sapiens
  misc_RNA (1)...(19): siRNA sense strand
ugaagaccauggacaacgu

SEQ ID NO: 958982 - RNA, 19 nt, Homo sapiens
  misc_RNA (1)...(19): siRNA sense strand
gaaccgaugcuuccuaccu

SEQ ID NO: 958983 - RNA, 19 nt, Homo sapiens
  misc_RNA (1)...(19): siRNA sense strand
ccucuccaauuacaucuuc

SEQ ID NO: 958984 - RNA, 19 nt, Homo sapiens
  misc_RNA (1)...(19): siRNA sense strand
gcauguuggucauccuucu

SEQ ID NO: 958985 - RNA, 19 nt, Homo sapiens
  misc_RNA (1)...(19): siRNA sense strand
cuugcggucuggacuauga

SEQ ID NO: 958986 - RNA, 19 nt, Homo sapiens
  misc_RNA (1)...(19): siRNA sense strand
cgaccgcucagggccauua

SEQ ID NO: 958987 - RNA, 19 nt, Homo sapiens
  misc_RNA (1)...(19): siRNA sense strand
cggcaacauuguagucauc

SEQ ID NO: 958988 - RNA, 19 nt, Homo sapiens
  misc_RNA (1)...(19): siRNA sense strand
cgucuucaccagccucuuu

SEQ ID NO: 958989 - RNA, 19 nt, Homo sapiens
  misc_RNA (1)...(19): siRNA sense strand
gcucgccgaccgugaaaug

SEQ ID NO: 958990 - RNA, 19 nt, Homo sapiens
  misc_RNA (1)...(19): siRNA sense strand
acaagcugcuggagacaca

SEQ ID NO: 958991 - RNA, 19 nt, Homo sapiens
  misc_RNA (1)...(19): siRNA sense strand
caucgugggcuccuucuuc

SEQ ID NO: 958992 - RNA, 19 nt, Homo sapiens
  misc_RNA (1)...(19): siRNA sense strand
acagcgaggcaguuuauga

SEQ ID NO: 958993 - RNA, 19 nt, Homo sapiens
  misc_RNA (1)...(19): siRNA sense strand
gagggcaaccugagcaaag

SEQ ID NO: 958994 - RNA, 19 nt, Homo sapiens
  misc_RNA (1)...(19): siRNA sense strand
aacaaaguccucuacaaug

SEQ ID NO: 958995 - RNA, 19 nt, Homo sapiens
  misc_RNA (1)...(19): siRNA sense strand
gugggcuccuucuucauga

SEQ ID NO: 958996 - RNA, 19 nt, Homo sapiens
  misc_RNA (1)...(19): siRNA sense strand
accaggaacaucaccaaua

SEQ ID NO: 958997 - RNA, 19 nt, Homo sapiens
  misc_RNA (1)...(19): siRNA sense strand
gcaacauuguagucaucug

SEQ ID NO: 958998 - RNA, 19 nt, Homo sapiens
  misc_RNA (1)...(19): siRNA sense strand
ggagagccaggaugaagag

SEQ ID NO: 958999 - RNA, 19 nt, Homo sapiens
  misc_RNA (1)...(19): siRNA sense strand
gcucuucaucuucaucuuc

SEQ ID NO: 959000 - RNA, 19 nt, Homo sapiens
  misc_RNA (1)...(19): siRNA sense strand
ugacaccuuccgaaagauu

SEQ ID NO: 959001 - RNA, 19 nt, Homo sapiens
  misc_RNA (1)...(19): siRNA sense strand
ucagacagcgaggcaguuu

SEQ ID NO: 959002 - RNA, 19 nt, Homo sapiens
  misc_RNA (1)...(19): siRNA sense strand
caccggagacgcugaagga

SEQ ID NO: 959003 - RNA, 19 nt, Homo sapiens
  misc_RNA (1)...(19): siRNA sense strand
ggaaccaguacuacaccaa

SEQ ID NO: 959004 - RNA, 19 nt, Homo sapiens
  misc_RNA (1)...(19): siRNA sense strand
ccguggagaugguggugaa

SEQ ID NO: 959005 - RNA, 19 nt, Homo sapiens
  misc_RNA (1)...(19): siRNA sense strand
aggaacaucaccaauaaau

SEQ ID NO: 959006 - RNA, 19 nt, Homo sapiens
  misc_RNA (1)...(19): siRNA sense strand
ggagaugguggugaagaug

SEQ ID NO: 959007 - RNA, 19 nt, Homo sapiens
  misc_RNA (1)...(19): siRNA sense strand
cagcaugggcaucgaauac

SEQ ID NO: 959008 - RNA, 19 nt, Homo sapiens
  misc_RNA (1)...(19): siRNA sense strand
cuucuacaauuucaucuac

SEQ ID NO: 959009 - RNA, 19 nt, Homo sapiens
  misc_RNA (1)...(19): siRNA sense strand
cuugucaucaucuuccuua

SEQ ID NO: 959010 - RNA, 19 nt, Homo sapiens
  misc_RNA (1)...(19): siRNA sense strand
aagaggagagcucagaaga

SEQ ID NO: 959011 - RNA, 19 nt, Homo sapiens
  misc_RNA (1)...(19): siRNA sense strand
cagggaugcuggaguacuc

SEQ ID NO: 959012 - RNA, 19 nt, Homo sapiens
  misc_RNA (1)...(19): siRNA sense strand
cuacgugcucuucaauuug

SEQ ID NO: 959013 - RNA, 19 nt, Homo sapiens
  misc_RNA (1)...(19): siRNA sense strand
ccaggaacaucaccaauaa

SEQ ID NO: 959014 - RNA, 19 nt, Homo sapiens
  misc_RNA (1)...(19): siRNA sense strand
gaacaaaguccucuacaau

SEQ ID NO: 959015 - RNA, 19 nt, Homo sapiens
  misc_RNA (1)...(19): siRNA sense strand
ggaacaaaguccucuacaa

SEQ ID NO: 959016 - RNA, 19 nt, Homo sapiens
  misc_RNA (1)...(19): siRNA sense strand
gcucauuccuucuacaauu

SEQ ID NO: 959017 - RNA, 19 nt, Homo sapiens
  misc_RNA (1)...(19): siRNA sense strand
gaaagauuguggacagcaa

SEQ ID NO: 959018 - RNA, 19 nt, Homo sapiens
  misc_RNA (1)...(19): siRNA sense strand
gcaacuacgugcucuucaa

SEQ ID NO: 959019 - RNA, 19 nt, Homo sapiens
  misc_RNA (1)...(19): siRNA sense strand
gaacaucaccaauaaaucg

SEQ ID NO: 959020 - RNA, 19 nt, Homo sapiens
  misc_RNA (1)...(19): siRNA sense strand
gaaggagaaggcacuagua

SEQ ID NO: 959021 - RNA, 19 nt, Homo sapiens
  misc_RNA (1)...(19): siRNA sense strand
guacaacuuugacaaccuu

SEQ ID NO: 959022 - RNA, 19 nt, Homo sapiens
  misc_RNA (1)...(19): siRNA sense strand
ucgcagggaugcuggagua

SEQ ID NO: 959023 - RNA, 19 nt, Homo sapiens
  misc_RNA (1)...(19): siRNA sense strand
gaggauaccaggaacauca

SEQ ID NO: 959024 - RNA, 19 nt, Homo sapiens
  misc_RNA (1)...(19): siRNA sense strand
gcgaggcaguuuaugaguu

SEQ ID NO: 959025 - RNA, 19 nt, Homo sapiens
  misc_RNA (1)...(19): siRNA sense strand
cggagacgcugaaggagaa

SEQ ID NO: 959026 - RNA, 19 nt, Homo sapiens
  misc_RNA (1)...(19): siRNA sense strand
gcugauguccucacugaaa

SEQ ID NO: 959027 - RNA, 19 nt, Homo sapiens
  misc_RNA (1)...(19): siRNA sense strand
aaaguccucuacaauggua

SEQ ID NO: 959028 - RNA, 19 nt, Homo sapiens
  misc_RNA (1)...(19): siRNA sense strand
caucuucaccgcagucuuu

SEQ ID NO: 959029 - RNA, 19 nt, Homo sapiens
  misc_RNA (1)...(19): siRNA sense strand
gcuauuaccagacagagaa

SEQ ID NO: 959030 - RNA, 19 nt, Homo sapiens
  misc_RNA (1)...(19): siRNA sense strand
acaaaguccucuacaaugg

SEQ ID NO: 959031 - RNA, 19 nt, Homo sapiens
  misc_RNA (1)...(19): siRNA sense strand
ggagaaggcacuaguagag

SEQ ID NO: 959032 - RNA, 19 nt, Homo sapiens
  misc_RNA (1)...(19): siRNA sense strand
agacagagaacgaggauga

SEQ ID NO: 959033 - RNA, 19 nt, Homo sapiens
  misc_RNA (1)...(19): siRNA sense strand
uacaacagcuccagcaaca

SEQ ID NO: 959034 - RNA, 19 nt, Homo sapiens
  misc_RNA (1)...(19): siRNA sense strand
ugugacaccuuccgaaaga

SEQ ID NO: 959035 - RNA, 19 nt, Homo sapiens
  misc_RNA (1)...(19): siRNA sense strand
cgaggcaguuuaugaguuc

SEQ ID NO: 959036 - RNA, 19 nt, Homo sapiens
  misc_RNA (1)...(19): siRNA sense strand
acuacgugcucuucaauuu

SEQ ID NO: 959037 - RNA, 19 nt, Homo sapiens
  misc_RNA (1)...(19): siRNA sense strand
ucaagaaucccuacaacau

SEQ ID NO: 959038 - RNA, 19 nt, Homo sapiens
  misc_RNA (1)...(19): siRNA sense strand
cuucaucuuugccuucuuu

SEQ ID NO: 959039 - RNA, 19 nt, Homo sapiens
  misc_RNA (1)...(19): siRNA sense strand
ucacguugcugcuggauac

SEQ ID NO: 959040 - RNA, 19 nt, Homo sapiens
  misc_RNA (1)...(19): siRNA sense strand
uccugacccucuccaauua

SEQ ID NO: 959041 - RNA, 19 nt, Homo sapiens
  misc_RNA (1)...(19): siRNA sense strand
caggaggacuggaacaaag

SEQ ID NO: 959042 - RNA, 19 nt, Homo sapiens
  misc_RNA (1)...(19): siRNA sense strand
ccaccugugucaacuggaa

SEQ ID NO: 959043 - RNA, 19 nt, Homo sapiens
  misc_RNA (1)...(19): siRNA sense strand
ggcaugcgguccugcagaa

SEQ ID NO: 959044 - RNA, 19 nt, Homo sapiens
  misc_RNA (1)...(19): siRNA sense strand
caucugcugugccuucuuc

SEQ ID NO: 959045 - RNA, 19 nt, Homo sapiens
  misc_RNA (1)...(19): siRNA sense strand
ggagcgcuauuaccagaca

SEQ ID NO: 959046 - RNA, 19 nt, Homo sapiens
  misc_RNA (1)...(19): siRNA sense strand
ugccagaccggaagaauuu

SEQ ID NO: 959047 - RNA, 19 nt, Homo sapiens
  misc_RNA (1)...(19): siRNA sense strand
gcuuguguauggucccuuu

SEQ ID NO: 959048 - RNA, 19 nt, Homo sapiens
  misc_RNA (1)...(19): siRNA sense strand
gcaggccuuugaugacuuc

SEQ ID NO: 959049 - RNA, 19 nt, Homo sapiens
  misc_RNA (1)...(19): siRNA sense strand
ggaagaauuuugacuccuu

SEQ ID NO: 959050 - RNA, 19 nt, Homo sapiens
  misc_RNA (1)...(19): siRNA sense strand
ucuggaggcuaaucuguga

SEQ ID NO: 959051 - RNA, 19 nt, Homo sapiens
  misc_RNA (1)...(19): siRNA sense strand
cuccagcccuugcuugaaa

SEQ ID NO: 959052 - RNA, 19 nt, Homo sapiens
  misc_RNA (1)...(19): siRNA sense strand
acgcugauguccucacuga

SEQ ID NO: 959053 - RNA, 19 nt, Homo sapiens
  misc_RNA (1)...(19): siRNA sense strand
caagaaucccuacaacauc

SEQ ID NO: 959054 - RNA, 19 nt, Homo sapiens
  misc_RNA (1)...(19): siRNA sense strand
caucaagaaucccuacaac

SEQ ID NO: 959055 - RNA, 19 nt, Homo sapiens
  misc_RNA (1)...(19): siRNA sense strand
ccaugucgcugcccaagag

SEQ ID NO: 959056 - RNA, 19 nt, Homo sapiens
  misc_RNA (1)...(19): siRNA sense strand
gggugcagcucuucaaagg

SEQ ID NO: 959057 - RNA, 19 nt, Homo sapiens
  misc_RNA (1)...(19): siRNA sense strand
gcucugugcuggccuucug

SEQ ID NO: 959058 - RNA, 19 nt, Homo sapiens
  misc_RNA (1)...(19): siRNA sense strand
uggcugaaaugacagugaa

SEQ ID NO: 959059 - RNA, 19 nt, Homo sapiens
  misc_RNA (1)...(19): siRNA sense strand
gaagaggagagcucagaag

SEQ ID NO: 959060 - RNA, 19 nt, Homo sapiens
  misc_RNA (1)...(19): siRNA sense strand
ccaacaaguccgaaucaga

SEQ ID NO: 959061 - RNA, 19 nt, Homo sapiens
  misc_RNA (1)...(19): siRNA sense strand
gagcagcccgaggagcuua

SEQ ID NO: 959062 - RNA, 19 nt, Homo sapiens
  misc_RNA (1)...(19): siRNA sense strand
uaccaacgcccuagaaauc

SEQ ID NO: 959063 - RNA, 19 nt, Homo sapiens
  misc_RNA (1)...(19): siRNA sense strand
gaaacccaucggcaacauu

SEQ ID NO: 959064 - RNA, 19 nt, Homo sapiens
  misc_RNA (1)...(19): siRNA sense strand
cucauuccuucuacaauuu

SEQ ID NO: 959065 - RNA, 19 nt, Homo sapiens
  misc_RNA (1)...(19): siRNA sense strand
gucaucaucuuccuuaacu

SEQ ID NO: 959066 - RNA, 19 nt, Homo sapiens
  misc_RNA (1)...(19): siRNA sense strand
caacuacgugcucuucaau

SEQ ID NO: 959067 - RNA, 19 nt, Homo sapiens
  misc_RNA (1)...(19): siRNA sense strand
cuuaugcucuucaucuuca

SEQ ID NO: 959068 - RNA, 19 nt, Homo sapiens
  misc_RNA (1)...(19): siRNA sense strand
aagaaucccuacaacaucu

SEQ ID NO: 959069 - RNA, 19 nt, Homo sapiens
  misc_RNA (1)...(19): siRNA sense strand
ccaugccgacugccacuua

SEQ ID NO: 959070 - RNA, 19 nt, Homo sapiens
  misc_RNA (1)...(19): siRNA sense strand
agacagcgaggcaguuuau

SEQ ID NO: 959071 - RNA, 19 nt, Homo sapiens
  misc_RNA (1)...(19): siRNA sense strand
ggaacaucaccaauaaauc

SEQ ID NO: 959072 - RNA, 19 nt, Homo sapiens
  misc_RNA (1)...(19): siRNA sense strand
gcaugggcaucgaauacca

SEQ ID NO: 959073 - RNA, 19 nt, Homo sapiens
  misc_RNA (1)...(19): siRNA sense strand
ugguguacauccuucguaa

SEQ ID NO: 959074 - RNA, 19 nt, Homo sapiens
  misc_RNA (1)...(19): siRNA sense strand
gccaggagagccaggauga

SEQ ID NO: 959075 - RNA, 19 nt, Homo sapiens
  misc_RNA (1)...(19): siRNA sense strand
ucucuucggcugcaaguuu

SEQ ID NO: 959076 - RNA, 19 nt, Homo sapiens
  misc_RNA (1)...(19): siRNA sense strand
gaugcuuccuaccugagaa

SEQ ID NO: 959077 - RNA, 19 nt, Homo sapiens
  misc_RNA (1)...(19): siRNA sense strand
caucgucacugucuuucag

SEQ ID NO: 959078 - RNA, 19 nt, Homo sapiens
  misc_RNA (1)...(19): siRNA sense strand
ucauguacuuugugaugga

SEQ ID NO: 959079 - RNA, 19 nt, Homo sapiens
  misc_RNA (1)...(19): siRNA sense strand
aaacccaucggcaacauug

SEQ ID NO: 959080 - RNA, 19 nt, Homo sapiens
  misc_RNA (1)...(19): siRNA sense strand
ggccaucgucacugucuuu

SEQ ID NO: 959081 - RNA, 19 nt, Homo sapiens
  misc_RNA (1)...(19): siRNA sense strand
ugaagaccauggacaacgu

SEQ ID NO: 959082 - RNA, 19 nt, Homo sapiens
  misc_RNA (1)...(19): siRNA sense strand
gaaccgaugcuuccuaccu

SEQ ID NO: 959083 - RNA, 19 nt, Homo sapiens
  misc_RNA (1)...(19): siRNA sense strand
ccucuccaauuacaucuuc

SEQ ID NO: 959084 - RNA, 19 nt, Homo sapiens
  misc_RNA (1)...(19): siRNA sense strand
gcauguuggucauccuucu

SEQ ID NO: 959085 - RNA, 19 nt, Homo sapiens
  misc_RNA (1)...(19): siRNA sense strand
cuugcggucuggacuauga

SEQ ID NO: 959086 - RNA, 19 nt, Homo sapiens
  misc_RNA (1)...(19): siRNA sense strand
cgaccgcucagggccauua

SEQ ID NO: 959087 - RNA, 19 nt, Homo sapiens
  misc_RNA (1)...(19): siRNA sense strand
cggcaacauuguagucauc

SEQ ID NO: 959088 - RNA, 19 nt, Homo sapiens
  misc_RNA (1)...(19): siRNA sense strand
cgucuucaccagccucuuu

SEQ ID NO: 959089 - RNA, 19 nt, Homo sapiens
  misc_RNA (1)...(19): siRNA sense strand
gcucgccgaccgugaaaug

SEQ ID NO: 959090 - RNA, 19 nt, Homo sapiens
  misc_RNA (1)...(19): siRNA sense strand
acaagcugcuggagacaca

SEQ ID NO: 959091 - RNA, 19 nt, Homo sapiens
  misc_RNA (1)...(19): siRNA sense strand
caucgugggcuccuucuuc

SEQ ID NO: 959092 - RNA, 19 nt, Homo sapiens
  misc_RNA (1)...(19): siRNA sense strand
acagcgaggcaguuuauga

SEQ ID NO: 959093 - RNA, 19 nt, Homo sapiens
  misc_RNA (1)...(19): siRNA sense strand
gagggcaaccugagcaaag

SEQ ID NO: 959094 - RNA, 19 nt, Homo sapiens
  misc_RNA (1)...(19): siRNA sense strand
aacaaaguccucuacaaug

SEQ ID NO: 959095 - RNA, 19 nt, Homo sapiens
  misc_RNA (1)...(19): siRNA sense strand
gugggcuccuucuucauga

SEQ ID NO: 959096 - RNA, 19 nt, Homo sapiens
  misc_RNA (1)...(19): siRNA sense strand
accaggaacaucaccaaua

SEQ ID NO: 959097 - RNA, 19 nt, Homo sapiens
  misc_RNA (1)...(19): siRNA sense strand
gcaacauuguagucaucug

SEQ ID NO: 959098 - RNA, 19 nt, Homo sapiens
  misc_RNA (1)...(19): siRNA sense strand
ggagagccaggaugaagag

SEQ ID NO: 959099 - RNA, 19 nt, Homo sapiens
  misc_RNA (1)...(19): siRNA sense strand
gcucuucaucuucaucuuc

SEQ ID NO: 959100 - RNA, 19 nt, Homo sapiens
  misc_RNA (1)...(19): siRNA sense strand
ugacaccuuccgaaagauu

SEQ ID NO: 959101 - RNA, 19 nt, Homo sapiens
  misc_RNA (1)...(19): siRNA sense strand
ucagacagcgaggcaguuu

SEQ ID NO: 959102 - RNA, 19 nt, Homo sapiens
  misc_RNA (1)...(19): siRNA sense strand
caccggagacgcugaagga

SEQ ID NO: 959103 - RNA, 19 nt, Homo sapiens
  misc_RNA (1)...(19): siRNA sense strand
ggaaccaguacuacaccaa

SEQ ID NO: 959104 - RNA, 19 nt, Homo sapiens
  misc_RNA (1)...(19): siRNA sense strand
ccguggagaugguggugaa

SEQ ID NO: 959105 - RNA, 19 nt, Homo sapiens
  misc_RNA (1)...(19): siRNA sense strand
aggaacaucaccaauaaau

SEQ ID NO: 959106 - RNA, 19 nt, Homo sapiens
  misc_RNA (1)...(19): siRNA sense strand
ggagaugguggugaagaug

SEQ ID NO: 959107 - RNA, 19 nt, Homo sapiens
  misc_RNA (1)...(19): siRNA sense strand
cagcaugggcaucgaauac

SEQ ID NO: 959108 - RNA, 19 nt, Homo sapiens
  misc_RNA (1)...(19): siRNA sense strand
cuucuacaauuucaucuac

SEQ ID NO: 959109 - RNA, 19 nt, Homo sapiens
  misc_RNA (1)...(19): siRNA sense strand
cuugucaucaucuuccuua

SEQ ID NO: 959110 - RNA, 19 nt, Homo sapiens
  misc_RNA (1)...(19): siRNA sense strand
aagaggagagcucagaaga

SEQ ID NO: 959111 - RNA, 19 nt, Homo sapiens
  misc_RNA (1)...(19): siRNA sense strand
cagggaugcuggaguacuc

SEQ ID NO: 959112 - RNA, 19 nt, Homo sapiens
  misc_RNA (1)...(19): siRNA sense strand
cuacgugcucuucaauuug

SEQ ID NO: 959113 - RNA, 19 nt, Homo sapiens
  misc_RNA (1)...(19): siRNA sense strand
ccaggaacaucaccaauaa

SEQ ID NO: 959114 - RNA, 19 nt, Homo sapiens
  misc_RNA (1)...(19): siRNA sense strand
gaacaaaguccucuacaau

SEQ ID NO: 959115 - RNA, 19 nt, Homo sapiens
  misc_RNA (1)...(19): siRNA sense strand
ggaacaaaguccucuacaa

SEQ ID NO: 959116 - RNA, 19 nt, Homo sapiens
  misc_RNA (1)...(19): siRNA sense strand
gcucauuccuucuacaauu

SEQ ID NO: 959117 - RNA, 19 nt, Homo sapiens
  misc_RNA (1)...(19): siRNA sense strand
gaaagauuguggacagcaa

SEQ ID NO: 959118 - RNA, 19 nt, Homo sapiens
  misc_RNA (1)...(19): siRNA sense strand
gcaacuacgugcucuucaa

SEQ ID NO: 959119 - RNA, 19 nt, Homo sapiens
  misc_RNA (1)...(19): siRNA sense strand
gaacaucaccaauaaaucg

SEQ ID NO: 959120 - RNA, 19 nt, Homo sapiens
  misc_RNA (1)...(19): siRNA sense strand
gaaggagaaggcacuagua

SEQ ID NO: 959121 - RNA, 19 nt, Homo sapiens
  misc_RNA (1)...(19): siRNA sense strand
guacaacuuugacaaccuu

SEQ ID NO: 959122 - RNA, 19 nt, Homo sapiens
  misc_RNA (1)...(19): siRNA sense strand
ucgcagggaugcuggagua

SEQ ID NO: 959123 - RNA, 19 nt, Homo sapiens
  misc_RNA (1)...(19): siRNA sense strand
gaggauaccaggaacauca

SEQ ID NO: 959124 - RNA, 19 nt, Homo sapiens
  misc_RNA (1)...(19): siRNA sense strand
gcgaggcaguuuaugaguu

SEQ ID NO: 959125 - RNA, 19 nt, Homo sapiens
  misc_RNA (1)...(19): siRNA sense strand
cggagacgcugaaggagaa

SEQ ID NO: 959126 - RNA, 19 nt, Homo sapiens
  misc_RNA (1)...(19): siRNA sense strand
gcugauguccucacugaaa

SEQ ID NO: 959127 - RNA, 19 nt, Homo sapiens
  misc_RNA (1)...(19): siRNA sense strand
aaaguccucuacaauggua

SEQ ID NO: 959128 - RNA, 19 nt, Homo sapiens
  misc_RNA (1)...(19): siRNA sense strand
caucuucaccgcagucuuu

SEQ ID NO: 959129 - RNA, 19 nt, Homo sapiens
  misc_RNA (1)...(19): siRNA sense strand
gcuauuaccagacagagaa

SEQ ID NO: 959130 - RNA, 19 nt, Homo sapiens
  misc_RNA (1)...(19): siRNA sense strand
acaaaguccucuacaaugg

SEQ ID NO: 959131 - RNA, 19 nt, Homo sapiens
  misc_RNA (1)...(19): siRNA sense strand
ggagaaggcacuaguagag

SEQ ID NO: 959132 - RNA, 19 nt, Homo sapiens
  misc_RNA (1)...(19): siRNA sense strand
agacagagaacgaggauga

SEQ ID NO: 959133 - RNA, 19 nt, Homo sapiens
  misc_RNA (1)...(19): siRNA sense strand
uacaacagcuccagcaaca

SEQ ID NO: 959134 - RNA, 19 nt, Homo sapiens
  misc_RNA (1)...(19): siRNA sense strand
ugugacaccuuccgaaaga

SEQ ID NO: 959135 - RNA, 19 nt, Homo sapiens
  misc_RNA (1)...(19): siRNA sense strand
cgaggcaguuuaugaguuc

SEQ ID NO: 959136 - RNA, 19 nt, Homo sapiens
  misc_RNA (1)...(19): siRNA sense strand
acuacgugcucuucaauuu

SEQ ID NO: 959137 - RNA, 19 nt, Homo sapiens
  misc_RNA (1)...(19): siRNA sense strand
ucaagaaucccuacaacau

SEQ ID NO: 959138 - RNA, 19 nt, Homo sapiens
  misc_RNA (1)...(19): siRNA sense strand
cuucaucuuugccuucuuu

SEQ ID NO: 959139 - RNA, 19 nt, Homo sapiens
  misc_RNA (1)...(19): siRNA sense strand
ucacguugcugcuggauac

SEQ ID NO: 959140 - RNA, 19 nt, Homo sapiens
  misc_RNA (1)...(19): siRNA sense strand
uccugacccucuccaauua

SEQ ID NO: 959141 - RNA, 19 nt, Homo sapiens
  misc_RNA (1)...(19): siRNA sense strand
caggaggacuggaacaaag

SEQ ID NO: 959142 - RNA, 19 nt, Homo sapiens
  misc_RNA (1)...(19): siRNA sense strand
ccaccugugucaacuggaa

SEQ ID NO: 959143 - RNA, 19 nt, Homo sapiens
  misc_RNA (1)...(19): siRNA sense strand
ggcaugcgguccugcagaa

SEQ ID NO: 959144 - RNA, 19 nt, Homo sapiens
  misc_RNA (1)...(19): siRNA sense strand
caucugcugugccuucuuc

SEQ ID NO: 959145 - RNA, 19 nt, Homo sapiens
  misc_RNA (1)...(19): siRNA sense strand
ggagcgcuauuaccagaca

SEQ ID NO: 959146 - RNA, 19 nt, Homo sapiens
  misc_RNA (1)...(19): siRNA sense strand
ugccagaccggaagaauuu

SEQ ID NO: 959147 - RNA, 19 nt, Homo sapiens
  misc_RNA (1)...(19): siRNA sense strand
gcuuguguauggucccuuu

SEQ ID NO: 959148 - RNA, 19 nt, Homo sapiens
  misc_RNA (1)...(19): siRNA sense strand
gcaggccuuugaugacuuc

SEQ ID NO: 959149 - RNA, 19 nt, Homo sapiens
  misc_RNA (1)...(19): siRNA sense strand
ggaagaauuuugacuccuu

SEQ ID NO: 959150 - RNA, 19 nt, Homo sapiens
  misc_RNA (1)...(19): siRNA sense strand
ucuggaggcuaaucuguga

SEQ ID NO: 959151 - RNA, 19 nt, Homo sapiens
  misc_RNA (1)...(19): siRNA sense strand
cuccagcccuugcuugaaa

SEQ ID NO: 959152 - RNA, 19 nt, Homo sapiens
  misc_RNA (1)...(19): siRNA sense strand
acgcugauguccucacuga

SEQ ID NO: 959153 - RNA, 19 nt, Homo sapiens
  misc_RNA (1)...(19): siRNA sense strand
caagaaucccuacaacauc

SEQ ID NO: 959154 - RNA, 19 nt, Homo sapiens
  misc_RNA (1)...(19): siRNA sense strand
caucaagaaucccuacaac

SEQ ID NO: 959155 - RNA, 19 nt, Homo sapiens
  misc_RNA (1)...(19): siRNA sense strand
ccaugucgcugcccaagag

SEQ ID NO: 959156 - RNA, 19 nt, Homo sapiens
  misc_RNA (1)...(19): siRNA sense strand
gggugcagcucuucaaagg

SEQ ID NO: 959157 - RNA, 19 nt, Homo sapiens
  misc_RNA (1)...(19): siRNA sense strand
gcucugugcuggccuucug

SEQ ID NO: 959158 - RNA, 19 nt, Homo sapiens
  misc_RNA (1)...(19): siRNA sense strand
uggcugaaaugacagugaa

SEQ ID NO: 959159 - RNA, 19 nt, Homo sapiens
  misc_RNA (1)...(19): siRNA sense strand
gaagaggagagcucagaag

SEQ ID NO: 959160 - RNA, 19 nt, Homo sapiens
  misc_RNA (1)...(19): siRNA sense strand
ccaacaaguccgaaucaga

SEQ ID NO: 959161 - RNA, 19 nt, Homo sapiens
  misc_RNA (1)...(19): siRNA sense strand
gagcagcccgaggagcuua

SEQ ID NO: 959162 - RNA, 19 nt, Homo sapiens
  misc_RNA (1)...(19): siRNA sense strand
uaccaacgcccuagaaauc

SEQ ID NO: 959163 - RNA, 19 nt, Homo sapiens
  misc_RNA (1)...(19): siRNA sense strand
gaaacccaucggcaacauu

SEQ ID NO: 959164 - RNA, 19 nt, Homo sapiens
  misc_RNA (1)...(19): siRNA sense strand
cucauuccuucuacaauuu

SEQ ID NO: 959165 - RNA, 19 nt, Homo sapiens
  misc_RNA (1)...(19): siRNA sense strand
gucaucaucuuccuuaacu

SEQ ID NO: 959166 - RNA, 19 nt, Homo sapiens
  misc_RNA (1)...(19): siRNA sense strand
caacuacgugcucuucaau

SEQ ID NO: 959167 - RNA, 19 nt, Homo sapiens
  misc_RNA (1)...(19): siRNA sense strand
cuuaugcucuucaucuuca

SEQ ID NO: 959168 - RNA, 19 nt, Homo sapiens
  misc_RNA (1)...(19): siRNA sense strand
aagaaucccuacaacaucu

SEQ ID NO: 959169 - RNA, 19 nt, Homo sapiens
  misc_RNA (1)...(19): siRNA sense strand
ccaugccgacugccacuua

SEQ ID NO: 959170 - RNA, 19 nt, Homo sapiens
  misc_RNA (1)...(19): siRNA sense strand
agacagcgaggcaguuuau

SEQ ID NO: 959171 - RNA, 19 nt, Homo sapiens
  misc_RNA (1)...(19): siRNA sense strand
ggaacaucaccaauaaauc

SEQ ID NO: 959172 - RNA, 19 nt, Homo sapiens
  misc_RNA (1)...(19): siRNA sense strand
gcaugggcaucgaauacca

SEQ ID NO: 959173 - RNA, 19 nt, Homo sapiens
  misc_RNA (1)...(19): siRNA sense strand
ugguguacauccuucguaa

SEQ ID NO: 959174 - RNA, 19 nt, Homo sapiens
  misc_RNA (1)...(19): siRNA sense strand
gccaggagagccaggauga

SEQ ID NO: 959175 - RNA, 19 nt, Homo sapiens
  misc_RNA (1)...(19): siRNA sense strand
ucucuucggcugcaaguuu

SEQ ID NO: 959176 - RNA, 19 nt, Homo sapiens
  misc_RNA (1)...(19): siRNA sense strand
gaugcuuccuaccugagaa

SEQ ID NO: 959177 - RNA, 19 nt, Homo sapiens
  misc_RNA (1)...(19): siRNA sense strand
caucgucacugucuuucag

SEQ ID NO: 959178 - RNA, 19 nt, Homo sapiens
  misc_RNA (1)...(19): siRNA sense strand
ucauguacuuugugaugga

SEQ ID NO: 959179 - RNA, 19 nt, Homo sapiens
  misc_RNA (1)...(19): siRNA sense strand
aaacccaucggcaacauug

SEQ ID NO: 959180 - RNA, 19 nt, Homo sapiens
  misc_RNA (1)...(19): siRNA sense strand
ggccaucgucacugucuuu

SEQ ID NO: 959181 - RNA, 19 nt, Homo sapiens
  misc_RNA (1)...(19): siRNA sense strand
ugaagaccauggacaacgu

SEQ ID NO: 959182 - RNA, 19 nt, Homo sapiens
  misc_RNA (1)...(19): siRNA sense strand
gaaccgaugcuuccuaccu

SEQ ID NO: 959183 - RNA, 19 nt, Homo sapiens
  misc_RNA (1)...(19): siRNA sense strand
ccucuccaauuacaucuuc

SEQ ID NO: 959184 - RNA, 19 nt, Homo sapiens
  misc_RNA (1)...(19): siRNA sense strand
gcauguuggucauccuucu

SEQ ID NO: 959185 - RNA, 19 nt, Homo sapiens
  misc_RNA (1)...(19): siRNA sense strand
cuugcggucuggacuauga

SEQ ID NO: 959186 - RNA, 19 nt, Homo sapiens
  misc_RNA (1)...(19): siRNA sense strand
cgaccgcucagggccauua

SEQ ID NO: 959187 - RNA, 19 nt, Homo sapiens
  misc_RNA (1)...(19): siRNA sense strand
cggcaacauuguagucauc

SEQ ID NO: 959188 - RNA, 19 nt, Homo sapiens
  misc_RNA (1)...(19): siRNA sense strand
cgucuucaccagccucuuu

SEQ ID NO: 959189 - RNA, 19 nt, Homo sapiens
  misc_RNA (1)...(19): siRNA sense strand
gcucgccgaccgugaaaug

SEQ ID NO: 959190 - RNA, 19 nt, Homo sapiens
  misc_RNA (1)...(19): siRNA sense strand
acaagcugcuggagacaca

SEQ ID NO: 959191 - RNA, 19 nt, Homo sapiens
  misc_RNA (1)...(19): siRNA sense strand
caucgugggcuccuucuuc

SEQ ID NO: 959192 - RNA, 19 nt, Homo sapiens
  misc_RNA (1)...(19): siRNA sense strand
acagcgaggcaguuuauga

SEQ ID NO: 959193 - RNA, 19 nt, Homo sapiens
  misc_RNA (1)...(19): siRNA sense strand
gagggcaaccugagcaaag

SEQ ID NO: 959194 - RNA, 19 nt, Homo sapiens
  misc_RNA (1)...(19): siRNA sense strand
aacaaaguccucuacaaug

SEQ ID NO: 959195 - RNA, 19 nt, Homo sapiens
  misc_RNA (1)...(19): siRNA sense strand
gugggcuccuucuucauga

SEQ ID NO: 959196 - RNA, 19 nt, Homo sapiens
  misc_RNA (1)...(19): siRNA sense strand
accaggaacaucaccaaua

SEQ ID NO: 959197 - RNA, 19 nt, Homo sapiens
  misc_RNA (1)...(19): siRNA sense strand
gcaacauuguagucaucug

SEQ ID NO: 959198 - RNA, 19 nt, Homo sapiens
  misc_RNA (1)...(19): siRNA sense strand
ggagagccaggaugaagag

SEQ ID NO: 959199 - RNA, 19 nt, Homo sapiens
  misc_RNA (1)...(19): siRNA sense strand
gcucuucaucuucaucuuc

SEQ ID NO: 959200 - RNA, 19 nt, Homo sapiens
  misc_RNA (1)...(19): siRNA sense strand
ugacaccuuccgaaagauu

SEQ ID NO: 959201 - RNA, 19 nt, Homo sapiens
  misc_RNA (1)...(19): siRNA sense strand
ucagacagcgaggcaguuu

SEQ ID NO: 959202 - RNA, 19 nt, Homo sapiens
  misc_RNA (1)...(19): siRNA sense strand
caccggagacgcugaagga

SEQ ID NO: 959203 - RNA, 19 nt, Homo sapiens
  misc_RNA (1)...(19): siRNA sense strand
ggaaccaguacuacaccaa

SEQ ID NO: 959204 - RNA, 19 nt, Homo sapiens
  misc_RNA (1)...(19): siRNA sense strand
ccguggagaugguggugaa

SEQ ID NO: 959205 - RNA, 19 nt, Homo sapiens
  misc_RNA (1)...(19): siRNA sense strand
aggaacaucaccaauaaau

SEQ ID NO: 959206 - RNA, 19 nt, Homo sapiens
  misc_RNA (1)...(19): siRNA sense strand
ggagaugguggugaagaug

SEQ ID NO: 959207 - RNA, 19 nt, Homo sapiens
  misc_RNA (1)...(19): siRNA sense strand
cagcaugggcaucgaauac

SEQ ID NO: 959208 - RNA, 19 nt, Homo sapiens
  misc_RNA (1)...(19): siRNA sense strand
cuucuacaauuucaucuac

SEQ ID NO: 959209 - RNA, 19 nt, Homo sapiens
  misc_RNA (1)...(19): siRNA sense strand
cuugucaucaucuuccuua

SEQ ID NO: 959210 - RNA, 19 nt, Homo sapiens
  misc_RNA (1)...(19): siRNA sense strand
aagaggagagcucagaaga

SEQ ID NO: 959211 - RNA, 19 nt, Homo sapiens
  misc_RNA (1)...(19): siRNA sense strand
cagggaugcuggaguacuc

SEQ ID NO: 959212 - RNA, 19 nt, Homo sapiens
  misc_RNA (1)...(19): siRNA sense strand
cuacgugcucuucaauuug

SEQ ID NO: 959213 - RNA, 19 nt, Homo sapiens
  misc_RNA (1)...(19): siRNA sense strand
ccaggaacaucaccaauaa

SEQ ID NO: 959214 - RNA, 19 nt, Homo sapiens
  misc_RNA (1)...(19): siRNA sense strand
gaacaaaguccucuacaau

SEQ ID NO: 959215 - RNA, 19 nt, Homo sapiens
  misc_RNA (1)...(19): siRNA sense strand
ggaacaaaguccucuacaa

SEQ ID NO: 959216 - RNA, 19 nt, Homo sapiens
  misc_RNA (1)...(19): siRNA sense strand
gcucauuccuucuacaauu

SEQ ID NO: 959217 - RNA, 19 nt, Homo sapiens
  misc_RNA (1)...(19): siRNA sense strand
gaaagauuguggacagcaa

SEQ ID NO: 959218 - RNA, 19 nt, Homo sapiens
  misc_RNA (1)...(19): siRNA sense strand
gcaacuacgugcucuucaa

SEQ ID NO: 959219 - RNA, 19 nt, Homo sapiens
  misc_RNA (1)...(19): siRNA sense strand
gaacaucaccaauaaaucg

SEQ ID NO: 959220 - RNA, 19 nt, Homo sapiens
  misc_RNA (1)...(19): siRNA sense strand
gaaggagaaggcacuagua

SEQ ID NO: 959221 - RNA, 19 nt, Homo sapiens
  misc_RNA (1)...(19): siRNA sense strand
guacaacuuugacaaccuu

SEQ ID NO: 959222 - RNA, 19 nt, Homo sapiens
  misc_RNA (1)...(19): siRNA sense strand
ucgcagggaugcuggagua

SEQ ID NO: 959223 - RNA, 19 nt, Homo sapiens
  misc_RNA (1)...(19): siRNA sense strand
gaggauaccaggaacauca

SEQ ID NO: 959224 - RNA, 19 nt, Homo sapiens
  misc_RNA (1)...(19): siRNA sense strand
gcgaggcaguuuaugaguu

SEQ ID NO: 959225 - RNA, 19 nt, Homo sapiens
  misc_RNA (1)...(19): siRNA sense strand
cggagacgcugaaggagaa

SEQ ID NO: 959226 - RNA, 19 nt, Homo sapiens
  misc_RNA (1)...(19): siRNA sense strand
gcugauguccucacugaaa

SEQ ID NO: 959227 - RNA, 19 nt, Homo sapiens
  misc_RNA (1)...(19): siRNA sense strand
aaaguccucuacaauggua

SEQ ID NO: 959228 - RNA, 19 nt, Homo sapiens
  misc_RNA (1)...(19): siRNA sense strand
caucuucaccgcagucuuu

SEQ ID NO: 959229 - RNA, 19 nt, Homo sapiens
  misc_RNA (1)...(19): siRNA sense strand
gcuauuaccagacagagaa

SEQ ID NO: 959230 - RNA, 19 nt, Homo sapiens
  misc_RNA (1)...(19): siRNA sense strand
acaaaguccucuacaaugg

SEQ ID NO: 959231 - RNA, 19 nt, Homo sapiens
  misc_RNA (1)...(19): siRNA sense strand
ggagaaggcacuaguagag

SEQ ID NO: 959232 - RNA, 19 nt, Homo sapiens
  misc_RNA (1)...(19): siRNA sense strand
agacagagaacgaggauga

SEQ ID NO: 959233 - RNA, 19 nt, Homo sapiens
  misc_RNA (1)...(19): siRNA sense strand
uacaacagcuccagcaaca

SEQ ID NO: 959234 - RNA, 19 nt, Homo sapiens
  misc_RNA (1)...(19): siRNA sense strand
ugugacaccuuccgaaaga

SEQ ID NO: 959235 - RNA, 19 nt, Homo sapiens
  misc_RNA (1)...(19): siRNA sense strand
cgaggcaguuuaugaguuc

SEQ ID NO: 959236 - RNA, 19 nt, Homo sapiens
  misc_RNA (1)...(19): siRNA sense strand
acuacgugcucuucaauuu

SEQ ID NO: 959237 - RNA, 19 nt, Homo sapiens
  misc_RNA (1)...(19): siRNA sense strand
ucaagaaucccuacaacau

SEQ ID NO: 959238 - RNA, 19 nt, Homo sapiens
  misc_RNA (1)...(19): siRNA sense strand
cuucaucuuugccuucuuu

SEQ ID NO: 959239 - RNA, 19 nt, Homo sapiens
  misc_RNA (1)...(19): siRNA sense strand
ucacguugcugcuggauac

SEQ ID NO: 959240 - RNA, 19 nt, Homo sapiens
  misc_RNA (1)...(19): siRNA sense strand
uccugacccucuccaauua

SEQ ID NO: 959241 - RNA, 19 nt, Homo sapiens
  misc_RNA (1)...(19): siRNA sense strand
caggaggacuggaacaaag

SEQ ID NO: 959242 - RNA, 19 nt, Homo sapiens
  misc_RNA (1)...(19): siRNA sense strand
ccaccugugucaacuggaa

SEQ ID NO: 959243 - RNA, 19 nt, Homo sapiens
  misc_RNA (1)...(19): siRNA sense strand
ggcaugcgguccugcagaa

SEQ ID NO: 959244 - RNA, 19 nt, Homo sapiens
  misc_RNA (1)...(19): siRNA sense strand
caucugcugugccuucuuc

SEQ ID NO: 959245 - RNA, 19 nt, Homo sapiens
  misc_RNA (1)...(19): siRNA sense strand
ggagcgcuauuaccagaca

SEQ ID NO: 959246 - RNA, 19 nt, Homo sapiens
  misc_RNA (1)...(19): siRNA sense strand
ugccagaccggaagaauuu

SEQ ID NO: 959247 - RNA, 19 nt, Homo sapiens
  misc_RNA (1)...(19): siRNA sense strand
gcuuguguauggucccuuu

SEQ ID NO: 959248 - RNA, 19 nt, Homo sapiens
  misc_RNA (1)...(19): siRNA sense strand
gcaggccuuugaugacuuc

SEQ ID NO: 959249 - RNA, 19 nt, Homo sapiens
  misc_RNA (1)...(19): siRNA sense strand
ggaagaauuuugacuccuu

SEQ ID NO: 959250 - RNA, 19 nt, Homo sapiens
  misc_RNA (1)...(19): siRNA sense strand
ucuggaggcuaaucuguga

SEQ ID NO: 959251 - RNA, 19 nt, Homo sapiens
  misc_RNA (1)...(19): siRNA sense strand
cuccagcccuugcuugaaa

SEQ ID NO: 959252 - RNA, 19 nt, Homo sapiens
  misc_RNA (1)...(19): siRNA sense strand
acgcugauguccucacuga

SEQ ID NO: 959253 - RNA, 19 nt, Homo sapiens
  misc_RNA (1)...(19): siRNA sense strand
caagaaucccuacaacauc

SEQ ID NO: 959254 - RNA, 19 nt, Homo sapiens
  misc_RNA (1)...(19): siRNA sense strand
caucaagaaucccuacaac

SEQ ID NO: 959255 - RNA, 19 nt, Homo sapiens
  misc_RNA (1)...(19): siRNA sense strand
ccaugucgcugcccaagag

SEQ ID NO: 959256 - RNA, 19 nt, Homo sapiens
  misc_RNA (1)...(19): siRNA sense strand
gggugcagcucuucaaagg

SEQ ID NO: 959257 - RNA, 19 nt, Homo sapiens
  misc_RNA (1)...(19): siRNA sense strand
gcucugugcuggccuucug

SEQ ID NO: 959258 - RNA, 19 nt, Homo sapiens
  misc_RNA (1)...(19): siRNA sense strand
uggcugaaaugacagugaa

SEQ ID NO: 959259 - RNA, 19 nt, Homo sapiens
  misc_RNA (1)...(19): siRNA sense strand
gaagaggagagcucagaag

SEQ ID NO: 959260 - RNA, 19 nt, Homo sapiens
  misc_RNA (1)...(19): siRNA sense strand
ccaacaaguccgaaucaga

SEQ ID NO: 959261 - RNA, 19 nt, Homo sapiens
  misc_RNA (1)...(19): siRNA sense strand
gagcagcccgaggagcuua

SEQ ID NO: 959262 - RNA, 19 nt, Homo sapiens
  misc_RNA (1)...(19): siRNA sense strand
uaccaacgcccuagaaauc

SEQ ID NO: 959263 - RNA, 19 nt, Homo sapiens
  misc_RNA (1)...(19): siRNA sense strand
gaaacccaucggcaacauu

SEQ ID NO: 959264 - RNA, 19 nt, Homo sapiens
  misc_RNA (1)...(19): siRNA sense strand
cucauuccuucuacaauuu

SEQ ID NO: 959265 - RNA, 19 nt, Homo sapiens
  misc_RNA (1)...(19): siRNA sense strand
gucaucaucuuccuuaacu

SEQ ID NO: 959266 - RNA, 19 nt, Homo sapiens
  misc_RNA (1)...(19): siRNA sense strand
caacuacgugcucuucaau

SEQ ID NO: 959267 - RNA, 19 nt, Homo sapiens
  misc_RNA (1)...(19): siRNA sense strand
cuuaugcucuucaucuuca

SEQ ID NO: 959268 - RNA, 19 nt, Homo sapiens
  misc_RNA (1)...(19): siRNA sense strand
aagaaucccuacaacaucu

SEQ ID NO: 959269 - RNA, 19 nt, Homo sapiens
  misc_RNA (1)...(19): siRNA sense strand
ccaugccgacugccacuua

SEQ ID NO: 959270 - RNA, 19 nt, Homo sapiens
  misc_RNA (1)...(19): siRNA sense strand
agacagcgaggcaguuuau

SEQ ID NO: 959271 - RNA, 19 nt, Homo sapiens
  misc_RNA (1)...(19): siRNA sense strand
ggaacaucaccaauaaauc

SEQ ID NO: 959272 - RNA, 19 nt, Homo sapiens
  misc_RNA (1)...(19): siRNA sense strand
gcaugggcaucgaauacca

SEQ ID NO: 959273 - RNA, 19 nt, Homo sapiens
  misc_RNA (1)...(19): siRNA sense strand
ugguguacauccuucguaa

SEQ ID NO: 959274 - RNA, 19 nt, Homo sapiens
  misc_RNA (1)...(19): siRNA sense strand
gccaggagagccaggauga

SEQ ID NO: 959275 - RNA, 19 nt, Homo sapiens
  misc_RNA (1)...(19): siRNA sense strand
ucucuucggcugcaaguuu

SEQ ID NO: 959276 - RNA, 19 nt, Homo sapiens
  misc_RNA (1)...(19): siRNA sense strand
gaugcuuccuaccugagaa

SEQ ID NO: 959277 - RNA, 19 nt, Homo sapiens
  misc_RNA (1)...(19): siRNA sense strand
caucgucacugucuuucag

SEQ ID NO: 959278 - RNA, 19 nt, Homo sapiens
  misc_RNA (1)...(19): siRNA sense strand
ucauguacuuugugaugga

SEQ ID NO: 959279 - RNA, 19 nt, Homo sapiens
  misc_RNA (1)...(19): siRNA sense strand
aaacccaucggcaacauug

SEQ ID NO: 959280 - RNA, 19 nt, Homo sapiens
  misc_RNA (1)...(19): siRNA sense strand
ggccaucgucacugucuuu

SEQ ID NO: 959281 - RNA, 19 nt, Homo sapiens
  misc_RNA (1)...(19): siRNA sense strand
ugaagaccauggacaacgu

SEQ ID NO: 959282 - RNA, 19 nt, Homo sapiens
  misc_RNA (1)...(19): siRNA sense strand
gaaccgaugcuuccuaccu

SEQ ID NO: 959283 - RNA, 19 nt, Homo sapiens
  misc_RNA (1)...(19): siRNA sense strand
ccucuccaauuacaucuuc

SEQ ID NO: 959284 - RNA, 19 nt, Homo sapiens
  misc_RNA (1)...(19): siRNA sense strand
gcauguuggucauccuucu

SEQ ID NO: 959285 - RNA, 19 nt, Homo sapiens
  misc_RNA (1)...(19): siRNA sense strand
cuugcggucuggacuauga

SEQ ID NO: 959286 - RNA, 19 nt, Homo sapiens
  misc_RNA (1)...(19): siRNA sense strand
cgaccgcucagggccauua

SEQ ID NO: 959287 - RNA, 19 nt, Homo sapiens
  misc_RNA (1)...(19): siRNA sense strand
cggcaacauuguagucauc

SEQ ID NO: 959288 - RNA, 19 nt, Homo sapiens
  misc_RNA (1)...(19): siRNA sense strand
cgucuucaccagccucuuu

SEQ ID NO: 959289 - RNA, 19 nt, Homo sapiens
  misc_RNA (1)...(19): siRNA sense strand
gcucgccgaccgugaaaug

SEQ ID NO: 959290 - RNA, 19 nt, Homo sapiens
  misc_RNA (1)...(19): siRNA sense strand
acaagcugcuggagacaca

SEQ ID NO: 959291 - RNA, 19 nt, Homo sapiens
  misc_RNA (1)...(19): siRNA sense strand
caucgugggcuccuucuuc

SEQ ID NO: 959292 - RNA, 19 nt, Homo sapiens
  misc_RNA (1)...(19): siRNA sense strand
acagcgaggcaguuuauga

SEQ ID NO: 959293 - RNA, 19 nt, Homo sapiens
  misc_RNA (1)...(19): siRNA sense strand
gagggcaaccugagcaaag

SEQ ID NO: 959294 - RNA, 19 nt, Homo sapiens
  misc_RNA (1)...(19): siRNA sense strand
aacaaaguccucuacaaug

SEQ ID NO: 959295 - RNA, 19 nt, Homo sapiens
  misc_RNA (1)...(19): siRNA sense strand
gugggcuccuucuucauga

SEQ ID NO: 959296 - RNA, 19 nt, Homo sapiens
  misc_RNA (1)...(19): siRNA sense strand
accaggaacaucaccaaua

SEQ ID NO: 959297 - RNA, 19 nt, Homo sapiens
  misc_RNA (1)...(19): siRNA sense strand
gcaacauuguagucaucug

SEQ ID NO: 959298 - RNA, 19 nt, Homo sapiens
  misc_RNA (1)...(19): siRNA sense strand
ggagagccaggaugaagag

SEQ ID NO: 959299 - RNA, 19 nt, Homo sapiens
  misc_RNA (1)...(19): siRNA sense strand
gcucuucaucuucaucuuc

SEQ ID NO: 959300 - RNA, 19 nt, Homo sapiens
  misc_RNA (1)...(19): siRNA sense strand
ugacaccuuccgaaagauu

SEQ ID NO: 959301 - RNA, 19 nt, Homo sapiens
  misc_RNA (1)...(19): siRNA sense strand
ucagacagcgaggcaguuu

SEQ ID NO: 959302 - RNA, 19 nt, Homo sapiens
  misc_RNA (1)...(19): siRNA sense strand
caccggagacgcugaagga

SEQ ID NO: 959303 - RNA, 19 nt, Homo sapiens
  misc_RNA (1)...(19): siRNA sense strand
ggaaccaguacuacaccaa

SEQ ID NO: 959304 - RNA, 19 nt, Homo sapiens
  misc_RNA (1)...(19): siRNA sense strand
ccguggagaugguggugaa

SEQ ID NO: 959305 - RNA, 19 nt, Homo sapiens
  misc_RNA (1)...(19): siRNA sense strand
aggaacaucaccaauaaau

SEQ ID NO: 959306 - RNA, 19 nt, Homo sapiens
  misc_RNA (1)...(19): siRNA sense strand
ggagaugguggugaagaug

SEQ ID NO: 959307 - RNA, 19 nt, Homo sapiens
  misc_RNA (1)...(19): siRNA sense strand
cagcaugggcaucgaauac

SEQ ID NO: 959308 - RNA, 19 nt, Homo sapiens
  misc_RNA (1)...(19): siRNA sense strand
cuucuacaauuucaucuac

SEQ ID NO: 959309 - RNA, 19 nt, Homo sapiens
  misc_RNA (1)...(19): siRNA sense strand
cuugucaucaucuuccuua

SEQ ID NO: 959310 - RNA, 19 nt, Homo sapiens
  misc_RNA (1)...(19): siRNA sense strand
aagaggagagcucagaaga

SEQ ID NO: 959311 - RNA, 19 nt, Homo sapiens
  misc_RNA (1)...(19): siRNA sense strand
cagggaugcuggaguacuc

SEQ ID NO: 959312 - RNA, 19 nt, Homo sapiens
  misc_RNA (1)...(19): siRNA sense strand
cuacgugcucuucaauuug

SEQ ID NO: 959313 - RNA, 19 nt, Homo sapiens
  misc_RNA (1)...(19): siRNA sense strand
ccaggaacaucaccaauaa

SEQ ID NO: 959314 - RNA, 19 nt, Homo sapiens
  misc_RNA (1)...(19): siRNA sense strand
gaacaaaguccucuacaau

SEQ ID NO: 959315 - RNA, 19 nt, Homo sapiens
  misc_RNA (1)...(19): siRNA sense strand
ggaacaaaguccucuacaa

SEQ ID NO: 959316 - RNA, 19 nt, Homo sapiens
  misc_RNA (1)...(19): siRNA sense strand
gcucauuccuucuacaauu

SEQ ID NO: 959317 - RNA, 19 nt, Homo sapiens
  misc_RNA (1)...(19): siRNA sense strand
gaaagauuguggacagcaa

SEQ ID NO: 959318 - RNA, 19 nt, Homo sapiens
  misc_RNA (1)...(19): siRNA sense strand
gcaacuacgugcucuucaa

SEQ ID NO: 959319 - RNA, 19 nt, Homo sapiens
  misc_RNA (1)...(19): siRNA sense strand
gaacaucaccaauaaaucg

SEQ ID NO: 959320 - RNA, 19 nt, Homo sapiens
  misc_RNA (1)...(19): siRNA sense strand
gaaggagaaggcacuagua

SEQ ID NO: 959321 - RNA, 19 nt, Homo sapiens
  misc_RNA (1)...(19): siRNA sense strand
guacaacuuugacaaccuu

SEQ ID NO: 959322 - RNA, 19 nt, Homo sapiens
  misc_RNA (1)...(19): siRNA sense strand
ucgcagggaugcuggagua

SEQ ID NO: 959323 - RNA, 19 nt, Homo sapiens
  misc_RNA (1)...(19): siRNA sense strand
gaggauaccaggaacauca

SEQ ID NO: 959324 - RNA, 19 nt, Homo sapiens
  misc_RNA (1)...(19): siRNA sense strand
gcgaggcaguuuaugaguu

SEQ ID NO: 959325 - RNA, 19 nt, Homo sapiens
  misc_RNA (1)...(19): siRNA sense strand
cggagacgcugaaggagaa

SEQ ID NO: 959326 - RNA, 19 nt, Homo sapiens
  misc_RNA (1)...(19): siRNA sense strand
gcugauguccucacugaaa

SEQ ID NO: 959327 - RNA, 19 nt, Homo sapiens
  misc_RNA (1)...(19): siRNA sense strand
aaaguccucuacaauggua

SEQ ID NO: 959328 - RNA, 19 nt, Homo sapiens
  misc_RNA (1)...(19): siRNA sense strand
caucuucaccgcagucuuu

SEQ ID NO: 959329 - RNA, 19 nt, Homo sapiens
  misc_RNA (1)...(19): siRNA sense strand
gcuauuaccagacagagaa

SEQ ID NO: 959330 - RNA, 19 nt, Homo sapiens
  misc_RNA (1)...(19): siRNA sense strand
acaaaguccucuacaaugg

SEQ ID NO: 959331 - RNA, 19 nt, Homo sapiens
  misc_RNA (1)...(19): siRNA sense strand
ggagaaggcacuaguagag

SEQ ID NO: 959332 - RNA, 19 nt, Homo sapiens
  misc_RNA (1)...(19): siRNA sense strand
agacagagaacgaggauga

SEQ ID NO: 959333 - RNA, 19 nt, Homo sapiens
  misc_RNA (1)...(19): siRNA sense strand
uacaacagcuccagcaaca

SEQ ID NO: 959334 - RNA, 19 nt, Homo sapiens
  misc_RNA (1)...(19): siRNA sense strand
ugugacaccuuccgaaaga

SEQ ID NO: 959335 - RNA, 19 nt, Homo sapiens
  misc_RNA (1)...(19): siRNA sense strand
cgaggcaguuuaugaguuc

SEQ ID NO: 959336 - RNA, 19 nt, Homo sapiens
  misc_RNA (1)...(19): siRNA sense strand
acuacgugcucuucaauuu

SEQ ID NO: 959337 - RNA, 19 nt, Homo sapiens
  misc_RNA (1)...(19): siRNA sense strand
ucaagaaucccuacaacau

SEQ ID NO: 959338 - RNA, 19 nt, Homo sapiens
  misc_RNA (1)...(19): siRNA sense strand
cuucaucuuugccuucuuu

SEQ ID NO: 959339 - RNA, 19 nt, Homo sapiens
  misc_RNA (1)...(19): siRNA sense strand
ucacguugcugcuggauac

SEQ ID NO: 959340 - RNA, 19 nt, Homo sapiens
  misc_RNA (1)...(19): siRNA sense strand
uccugacccucuccaauua

SEQ ID NO: 959341 - RNA, 19 nt, Homo sapiens
  misc_RNA (1)...(19): siRNA sense strand
caggaggacuggaacaaag

SEQ ID NO: 959342 - RNA, 19 nt, Homo sapiens
  misc_RNA (1)...(19): siRNA sense strand
ccaccugugucaacuggaa

SEQ ID NO: 959343 - RNA, 19 nt, Homo sapiens
  misc_RNA (1)...(19): siRNA sense strand
ggcaugcgguccugcagaa

SEQ ID NO: 959344 - RNA, 19 nt, Homo sapiens
  misc_RNA (1)...(19): siRNA sense strand
caucugcugugccuucuuc

SEQ ID NO: 959345 - RNA, 19 nt, Homo sapiens
  misc_RNA (1)...(19): siRNA sense strand
ggagcgcuauuaccagaca

SEQ ID NO: 959346 - RNA, 19 nt, Homo sapiens
  misc_RNA (1)...(19): siRNA sense strand
ugccagaccggaagaauuu

SEQ ID NO: 959347 - RNA, 19 nt, Homo sapiens
  misc_RNA (1)...(19): siRNA sense strand
gcuuguguauggucccuuu

SEQ ID NO: 959348 - RNA, 19 nt, Homo sapiens
  misc_RNA (1)...(19): siRNA sense strand
gcaggccuuugaugacuuc

SEQ ID NO: 959349 - RNA, 19 nt, Homo sapiens
  misc_RNA (1)...(19): siRNA sense strand
ggaagaauuuugacuccuu

SEQ ID NO: 959350 - RNA, 19 nt, Homo sapiens
  misc_RNA (1)...(19): siRNA sense strand
ucuggaggcuaaucuguga

SEQ ID NO: 959351 - RNA, 19 nt, Homo sapiens
  misc_RNA (1)...(19): siRNA sense strand
cuccagcccuugcuugaaa

SEQ ID NO: 959352 - RNA, 19 nt, Homo sapiens
  misc_RNA (1)...(19): siRNA sense strand
acgcugauguccucacuga

SEQ ID NO: 959353 - RNA, 19 nt, Homo sapiens
  misc_RNA (1)...(19): siRNA sense strand
caagaaucccuacaacauc

SEQ ID NO: 959354 - RNA, 19 nt, Homo sapiens
  misc_RNA (1)...(19): siRNA sense strand
caucaagaaucccuacaac

SEQ ID NO: 959355 - RNA, 19 nt, Homo sapiens
  misc_RNA (1)...(19): siRNA sense strand
ccaugucgcugcccaagag

SEQ ID NO: 959356 - RNA, 19 nt, Homo sapiens
  misc_RNA (1)...(19): siRNA sense strand
gggugcagcucuucaaagg

SEQ ID NO: 959357 - RNA, 19 nt, Homo sapiens
  misc_RNA (1)...(19): siRNA sense strand
gcucugugcuggccuucug

SEQ ID NO: 959358 - RNA, 19 nt, Homo sapiens
  misc_RNA (1)...(19): siRNA sense strand
uggcugaaaugacagugaa

SEQ ID NO: 959359 - RNA, 19 nt, Homo sapiens
  misc_RNA (1)...(19): siRNA sense strand
gaagaggagagcucagaag

SEQ ID NO: 959360 - RNA, 19 nt, Homo sapiens
  misc_RNA (1)...(19): siRNA sense strand
ccaacaaguccgaaucaga

SEQ ID NO: 959361 - RNA, 19 nt, Homo sapiens
  misc_RNA (1)...(19): siRNA sense strand
gagcagcccgaggagcuua

SEQ ID NO: 959362 - RNA, 19 nt, Homo sapiens
  misc_RNA (1)...(19): siRNA sense strand
uaccaacgcccuagaaauc

SEQ ID NO: 959363 - RNA, 19 nt, Homo sapiens
  misc_RNA (1)...(19): siRNA sense strand
gaaacccaucggcaacauu

SEQ ID NO: 959364 - RNA, 19 nt, Homo sapiens
  misc_RNA (1)...(19): siRNA sense strand
cucauuccuucuacaauuu

SEQ ID NO: 959365 - RNA, 19 nt, Homo sapiens
  misc_RNA (1)...(19): siRNA sense strand
gucaucaucuuccuuaacu

SEQ ID NO: 959366 - RNA, 19 nt, Homo sapiens
  misc_RNA (1)...(19): siRNA sense strand
caacuacgugcucuucaau

SEQ ID NO: 959367 - RNA, 19 nt, Homo sapiens
  misc_RNA (1)...(19): siRNA sense strand
cuuaugcucuucaucuuca

SEQ ID NO: 959368 - RNA, 19 nt, Homo sapiens
  misc_RNA (1)...(19): siRNA sense strand
aagaaucccuacaacaucu

SEQ ID NO: 959369 - RNA, 19 nt, Homo sapiens
  misc_RNA (1)...(19): siRNA sense strand
ccaugccgacugccacuua

SEQ ID NO: 959370 - RNA, 19 nt, Homo sapiens
  misc_RNA (1)...(19): siRNA sense strand
agacagcgaggcaguuuau

SEQ ID NO: 959371 - RNA, 19 nt, Homo sapiens
  misc_RNA (1)...(19): siRNA sense strand
ggaacaucaccaauaaauc

SEQ ID NO: 959372 - RNA, 19 nt, Homo sapiens
  misc_RNA (1)...(19): siRNA sense strand
gcaugggcaucgaauacca

SEQ ID NO: 959373 - RNA, 19 nt, Homo sapiens
  misc_RNA (1)...(19): siRNA sense strand
ugguguacauccuucguaa

SEQ ID NO: 959374 - RNA, 19 nt, Homo sapiens
  misc_RNA (1)...(19): siRNA sense strand
gccaggagagccaggauga

SEQ ID NO: 959375 - RNA, 19 nt, Homo sapiens
  misc_RNA (1)...(19): siRNA sense strand
ucucuucggcugcaaguuu

SEQ ID NO: 959376 - RNA, 19 nt, Homo sapiens
  misc_RNA (1)...(19): siRNA sense strand
gaugcuuccuaccugagaa

SEQ ID NO: 959377 - RNA, 19 nt, Homo sapiens
  misc_RNA (1)...(19): siRNA sense strand
caucgucacugucuuucag

SEQ ID NO: 959378 - RNA, 19 nt, Homo sapiens
  misc_RNA (1)...(19): siRNA sense strand
ucauguacuuugugaugga

SEQ ID NO: 959379 - RNA, 19 nt, Homo sapiens
  misc_RNA (1)...(19): siRNA sense strand
aaacccaucggcaacauug

SEQ ID NO: 959380 - RNA, 19 nt, Homo sapiens
  misc_RNA (1)...(19): siRNA sense strand
ggccaucgucacugucuuu

SEQ ID NO: 959381 - RNA, 19 nt, Homo sapiens
  misc_RNA (1)...(19): siRNA sense strand
ugaagaccauggacaacgu

SEQ ID NO: 959382 - RNA, 19 nt, Homo sapiens
  misc_RNA (1)...(19): siRNA sense strand
gaaccgaugcuuccuaccu

SEQ ID NO: 959383 - RNA, 19 nt, Homo sapiens
  misc_RNA (1)...(19): siRNA sense strand
ccucuccaauuacaucuuc

SEQ ID NO: 959384 - RNA, 19 nt, Homo sapiens
  misc_RNA (1)...(19): siRNA sense strand
gcauguuggucauccuucu

SEQ ID NO: 959385 - RNA, 19 nt, Homo sapiens
  misc_RNA (1)...(19): siRNA sense strand
cuugcggucuggacuauga

SEQ ID NO: 959386 - RNA, 19 nt, Homo sapiens
  misc_RNA (1)...(19): siRNA sense strand
cgaccgcucagggccauua

SEQ ID NO: 959387 - RNA, 19 nt, Homo sapiens
  misc_RNA (1)...(19): siRNA sense strand
cggcaacauuguagucauc

SEQ ID NO: 959388 - RNA, 19 nt, Homo sapiens
  misc_RNA (1)...(19): siRNA sense strand
cgucuucaccagccucuuu

SEQ ID NO: 959389 - RNA, 19 nt, Homo sapiens
  misc_RNA (1)...(19): siRNA sense strand
gcucgccgaccgugaaaug

SEQ ID NO: 959390 - RNA, 19 nt, Homo sapiens
  misc_RNA (1)...(19): siRNA sense strand
acaagcugcuggagacaca

SEQ ID NO: 959391 - RNA, 19 nt, Homo sapiens
  misc_RNA (1)...(19): siRNA sense strand
caucgugggcuccuucuuc

SEQ ID NO: 959392 - RNA, 19 nt, Homo sapiens
  misc_RNA (1)...(19): siRNA sense strand
acagcgaggcaguuuauga

SEQ ID NO: 959393 - RNA, 19 nt, Homo sapiens
  misc_RNA (1)...(19): siRNA sense strand
gagggcaaccugagcaaag

SEQ ID NO: 959394 - RNA, 19 nt, Homo sapiens
  misc_RNA (1)...(19): siRNA sense strand
aacaaaguccucuacaaug

SEQ ID NO: 959395 - RNA, 19 nt, Homo sapiens
  misc_RNA (1)...(19): siRNA sense strand
gugggcuccuucuucauga

SEQ ID NO: 959396 - RNA, 19 nt, Homo sapiens
  misc_RNA (1)...(19): siRNA sense strand
accaggaacaucaccaaua

SEQ ID NO: 959397 - RNA, 19 nt, Homo sapiens
  misc_RNA (1)...(19): siRNA sense strand
gcaacauuguagucaucug

SEQ ID NO: 959398 - RNA, 19 nt, Homo sapiens
  misc_RNA (1)...(19): siRNA sense strand
ggagagccaggaugaagag

SEQ ID NO: 959399 - RNA, 19 nt, Homo sapiens
  misc_RNA (1)...(19): siRNA sense strand
gcucuucaucuucaucuuc

SEQ ID NO: 959400 - RNA, 19 nt, Homo sapiens
  misc_RNA (1)...(19): siRNA sense strand
ugacaccuuccgaaagauu

SEQ ID NO: 959401 - RNA, 19 nt, Homo sapiens
  misc_RNA (1)...(19): siRNA sense strand
ucagacagcgaggcaguuu

SEQ ID NO: 959402 - RNA, 19 nt, Homo sapiens
  misc_RNA (1)...(19): siRNA sense strand
caccggagacgcugaagga

SEQ ID NO: 959403 - RNA, 19 nt, Homo sapiens
  misc_RNA (1)...(19): siRNA sense strand
ggaaccaguacuacaccaa

SEQ ID NO: 959404 - RNA, 19 nt, Homo sapiens
  misc_RNA (1)...(19): siRNA sense strand
ccguggagaugguggugaa

SEQ ID NO: 959405 - RNA, 19 nt, Homo sapiens
  misc_RNA (1)...(19): siRNA sense strand
aggaacaucaccaauaaau

SEQ ID NO: 959406 - RNA, 19 nt, Homo sapiens
  misc_RNA (1)...(19): siRNA sense strand
ggagaugguggugaagaug

SEQ ID NO: 959407 - RNA, 19 nt, Homo sapiens
  misc_RNA (1)...(19): siRNA sense strand
cagcaugggcaucgaauac

SEQ ID NO: 959408 - RNA, 19 nt, Homo sapiens
  misc_RNA (1)...(19): siRNA sense strand
cuucuacaauuucaucuac

SEQ ID NO: 959409 - RNA, 19 nt, Homo sapiens
  misc_RNA (1)...(19): siRNA sense strand
cuugucaucaucuuccuua

SEQ ID NO: 959410 - RNA, 19 nt, Homo sapiens
  misc_RNA (1)...(19): siRNA sense strand
aagaggagagcucagaaga

SEQ ID NO: 959411 - RNA, 19 nt, Homo sapiens
  misc_RNA (1)...(19): siRNA sense strand
cagggaugcuggaguacuc

SEQ ID NO: 959412 - RNA, 19 nt, Homo sapiens
  misc_RNA (1)...(19): siRNA sense strand
cuacgugcucuucaauuug

SEQ ID NO: 959413 - RNA, 19 nt, Homo sapiens
  misc_RNA (1)...(19): siRNA sense strand
ccaggaacaucaccaauaa

SEQ ID NO: 959414 - RNA, 19 nt, Homo sapiens
  misc_RNA (1)...(19): siRNA sense strand
gaacaaaguccucuacaau

SEQ ID NO: 959415 - RNA, 19 nt, Homo sapiens
  misc_RNA (1)...(19): siRNA sense strand
ggaacaaaguccucuacaa

SEQ ID NO: 959416 - RNA, 19 nt, Homo sapiens
  misc_RNA (1)...(19): siRNA sense strand
gcucauuccuucuacaauu

SEQ ID NO: 959417 - RNA, 19 nt, Homo sapiens
  misc_RNA (1)...(19): siRNA sense strand
gaaagauuguggacagcaa

SEQ ID NO: 959418 - RNA, 19 nt, Homo sapiens
  misc_RNA (1)...(19): siRNA sense strand
gcaacuacgugcucuucaa

SEQ ID NO: 959419 - RNA, 19 nt, Homo sapiens
  misc_RNA (1)...(19): siRNA sense strand
gaacaucaccaauaaaucg

SEQ ID NO: 959420 - RNA, 19 nt, Homo sapiens
  misc_RNA (1)...(19): siRNA sense strand
gaaggagaaggcacuagua

SEQ ID NO: 959421 - RNA, 19 nt, Homo sapiens
  misc_RNA (1)...(19): siRNA sense strand
guacaacuuugacaaccuu

SEQ ID NO: 959422 - RNA, 19 nt, Homo sapiens
  misc_RNA (1)...(19): siRNA sense strand
ucgcagggaugcuggagua

SEQ ID NO: 959423 - RNA, 19 nt, Homo sapiens
  misc_RNA (1)...(19): siRNA sense strand
gaggauaccaggaacauca

SEQ ID NO: 959424 - RNA, 19 nt, Homo sapiens
  misc_RNA (1)...(19): siRNA sense strand
gcgaggcaguuuaugaguu

SEQ ID NO: 959425 - RNA, 19 nt, Homo sapiens
  misc_RNA (1)...(19): siRNA sense strand
cggagacgcugaaggagaa

SEQ ID NO: 959426 - RNA, 19 nt, Homo sapiens
  misc_RNA (1)...(19): siRNA sense strand
gcugauguccucacugaaa

SEQ ID NO: 959427 - RNA, 19 nt, Homo sapiens
  misc_RNA (1)...(19): siRNA sense strand
aaaguccucuacaauggua

SEQ ID NO: 959428 - RNA, 19 nt, Homo sapiens
  misc_RNA (1)...(19): siRNA sense strand
caucuucaccgcagucuuu

SEQ ID NO: 959429 - RNA, 19 nt, Homo sapiens
  misc_RNA (1)...(19): siRNA sense strand
gcuauuaccagacagagaa

SEQ ID NO: 959430 - RNA, 19 nt, Homo sapiens
  misc_RNA (1)...(19): siRNA sense strand
acaaaguccucuacaaugg

SEQ ID NO: 959431 - RNA, 19 nt, Homo sapiens
  misc_RNA (1)...(19): siRNA sense strand
ggagaaggcacuaguagag

SEQ ID NO: 959432 - RNA, 19 nt, Homo sapiens
  misc_RNA (1)...(19): siRNA sense strand
agacagagaacgaggauga

SEQ ID NO: 959433 - RNA, 19 nt, Homo sapiens
  misc_RNA (1)...(19): siRNA sense strand
uacaacagcuccagcaaca

SEQ ID NO: 959434 - RNA, 19 nt, Homo sapiens
  misc_RNA (1)...(19): siRNA sense strand
ugugacaccuuccgaaaga

SEQ ID NO: 959435 - RNA, 19 nt, Homo sapiens
  misc_RNA (1)...(19): siRNA sense strand
cgaggcaguuuaugaguuc

SEQ ID NO: 959436 - RNA, 19 nt, Homo sapiens
  misc_RNA (1)...(19): siRNA sense strand
acuacgugcucuucaauuu

SEQ ID NO: 959437 - RNA, 19 nt, Homo sapiens
  misc_RNA (1)...(19): siRNA sense strand
ucaagaaucccuacaacau

SEQ ID NO: 959438 - RNA, 19 nt, Homo sapiens
  misc_RNA (1)...(19): siRNA sense strand
cuucaucuuugccuucuuu

SEQ ID NO: 959439 - RNA, 19 nt, Homo sapiens
  misc_RNA (1)...(19): siRNA sense strand
ucacguugcugcuggauac

SEQ ID NO: 959440 - RNA, 19 nt, Homo sapiens
  misc_RNA (1)...(19): siRNA sense strand
uccugacccucuccaauua

SEQ ID NO: 959441 - RNA, 19 nt, Homo sapiens
  misc_RNA (1)...(19): siRNA sense strand
caggaggacuggaacaaag

SEQ ID NO: 959442 - RNA, 19 nt, Homo sapiens
  misc_RNA (1)...(19): siRNA sense strand
ccaccugugucaacuggaa

SEQ ID NO: 959443 - RNA, 19 nt, Homo sapiens
  misc_RNA (1)...(19): siRNA sense strand
ggcaugcgguccugcagaa

SEQ ID NO: 959444 - RNA, 19 nt, Homo sapiens
  misc_RNA (1)...(19): siRNA sense strand
caucugcugugccuucuuc

SEQ ID NO: 959445 - RNA, 19 nt, Homo sapiens
  misc_RNA (1)...(19): siRNA sense strand
ggagcgcuauuaccagaca

SEQ ID NO: 959446 - RNA, 19 nt, Homo sapiens
  misc_RNA (1)...(19): siRNA sense strand
ugccagaccggaagaauuu

SEQ ID NO: 959447 - RNA, 19 nt, Homo sapiens
  misc_RNA (1)...(19): siRNA sense strand
gcuuguguauggucccuuu

SEQ ID NO: 959448 - RNA, 19 nt, Homo sapiens
  misc_RNA (1)...(19): siRNA sense strand
gcaggccuuugaugacuuc

SEQ ID NO: 959449 - RNA, 19 nt, Homo sapiens
  misc_RNA (1)...(19): siRNA sense strand
ggaagaauuuugacuccuu

SEQ ID NO: 959450 - RNA, 19 nt, Homo sapiens
  misc_RNA (1)...(19): siRNA sense strand
ucuggaggcuaaucuguga

SEQ ID NO: 959451 - RNA, 19 nt, Homo sapiens
  misc_RNA (1)...(19): siRNA sense strand
cuccagcccuugcuugaaa

SEQ ID NO: 959452 - RNA, 19 nt, Homo sapiens
  misc_RNA (1)...(19): siRNA sense strand
acgcugauguccucacuga

SEQ ID NO: 959453 - RNA, 19 nt, Homo sapiens
  misc_RNA (1)...(19): siRNA sense strand
caagaaucccuacaacauc

SEQ ID NO: 959454 - RNA, 19 nt, Homo sapiens
  misc_RNA (1)...(19): siRNA sense strand
caucaagaaucccuacaac

SEQ ID NO: 959455 - RNA, 19 nt, Homo sapiens
  misc_RNA (1)...(19): siRNA sense strand
ccaugucgcugcccaagag

SEQ ID NO: 959456 - RNA, 19 nt, Homo sapiens
  misc_RNA (1)...(19): siRNA sense strand
gggugcagcucuucaaagg

SEQ ID NO: 959457 - RNA, 19 nt, Homo sapiens
  misc_RNA (1)...(19): siRNA sense strand
gcucugugcuggccuucug

SEQ ID NO: 959458 - RNA, 19 nt, Homo sapiens
  misc_RNA (1)...(19): siRNA sense strand
uggcugaaaugacagugaa

SEQ ID NO: 959459 - RNA, 19 nt, Homo sapiens
  misc_RNA (1)...(19): siRNA sense strand
gaagaggagagcucagaag

SEQ ID NO: 959460 - RNA, 19 nt, Homo sapiens
  misc_RNA (1)...(19): siRNA sense strand
ccaacaaguccgaaucaga

SEQ ID NO: 959461 - RNA, 19 nt, Homo sapiens
  misc_RNA (1)...(19): siRNA sense strand
gagcagcccgaggagcuua

SEQ ID NO: 959462 - RNA, 19 nt, Homo sapiens
  misc_RNA (1)...(19): siRNA sense strand
uaccaacgcccuagaaauc

SEQ ID NO: 959463 - RNA, 19 nt, Homo sapiens
  misc_RNA (1)...(19): siRNA sense strand
gaaacccaucggcaacauu

SEQ ID NO: 959464 - RNA, 19 nt, Homo sapiens
  misc_RNA (1)...(19): siRNA sense strand
cucauuccuucuacaauuu

SEQ ID NO: 959465 - RNA, 19 nt, Homo sapiens
  misc_RNA (1)...(19): siRNA sense strand
gucaucaucuuccuuaacu

SEQ ID NO: 959466 - RNA, 19 nt, Homo sapiens
  misc_RNA (1)...(19): siRNA sense strand
caacuacgugcucuucaau

SEQ ID NO: 959467 - RNA, 19 nt, Homo sapiens
  misc_RNA (1)...(19): siRNA sense strand
cuuaugcucuucaucuuca

SEQ ID NO: 959468 - RNA, 19 nt, Homo sapiens
  misc_RNA (1)...(19): siRNA sense strand
aagaaucccuacaacaucu

SEQ ID NO: 959469 - RNA, 19 nt, Homo sapiens
  misc_RNA (1)...(19): siRNA sense strand
ccaugccgacugccacuua

SEQ ID NO: 959470 - RNA, 19 nt, Homo sapiens
  misc_RNA (1)...(19): siRNA sense strand
agacagcgaggcaguuuau

SEQ ID NO: 959471 - RNA, 19 nt, Homo sapiens
  misc_RNA (1)...(19): siRNA sense strand
ggaacaucaccaauaaauc

SEQ ID NO: 959472 - RNA, 19 nt, Homo sapiens
  misc_RNA (1)...(19): siRNA sense strand
gcaugggcaucgaauacca

SEQ ID NO: 959473 - RNA, 19 nt, Homo sapiens
  misc_RNA (1)...(19): siRNA sense strand
ugguguacauccuucguaa

SEQ ID NO: 959474 - RNA, 19 nt, Homo sapiens
  misc_RNA (1)...(19): siRNA sense strand
gccaggagagccaggauga

SEQ ID NO: 959475 - RNA, 19 nt, Homo sapiens
  misc_RNA (1)...(19): siRNA sense strand
ucucuucggcugcaaguuu

SEQ ID NO: 959476 - RNA, 19 nt, Homo sapiens
  misc_RNA (1)...(19): siRNA sense strand
gaugcuuccuaccugagaa

SEQ ID NO: 959477 - RNA, 19 nt, Homo sapiens
  misc_RNA (1)...(19): siRNA sense strand
caucgucacugucuuucag

SEQ ID NO: 959478 - RNA, 19 nt, Homo sapiens
  misc_RNA (1)...(19): siRNA sense strand
ucauguacuuugugaugga

SEQ ID NO: 959479 - RNA, 19 nt, Homo sapiens
  misc_RNA (1)...(19): siRNA sense strand
aaacccaucggcaacauug

SEQ ID NO: 959480 - RNA, 19 nt, Homo sapiens
  misc_RNA (1)...(19): siRNA sense strand
ggccaucgucacugucuuu

SEQ ID NO: 959481 - RNA, 19 nt, Homo sapiens
  misc_RNA (1)...(19): siRNA sense strand
ugaagaccauggacaacgu

SEQ ID NO: 959482 - RNA, 19 nt, Homo sapiens
  misc_RNA (1)...(19): siRNA sense strand
gaaccgaugcuuccuaccu

SEQ ID NO: 959483 - RNA, 19 nt, Homo sapiens
  misc_RNA (1)...(19): siRNA sense strand
ccucuccaauuacaucuuc

SEQ ID NO: 959484 - RNA, 19 nt, Homo sapiens
  misc_RNA (1)...(19): siRNA sense strand
gcauguuggucauccuucu

SEQ ID NO: 959485 - RNA, 19 nt, Homo sapiens
  misc_RNA (1)...(19): siRNA sense strand
cuugcggucuggacuauga

SEQ ID NO: 959486 - RNA, 19 nt, Homo sapiens
  misc_RNA (1)...(19): siRNA sense strand
cgaccgcucagggccauua

SEQ ID NO: 959487 - RNA, 19 nt, Homo sapiens
  misc_RNA (1)...(19): siRNA sense strand
cggcaacauuguagucauc

SEQ ID NO: 959488 - RNA, 19 nt, Homo sapiens
  misc_RNA (1)...(19): siRNA sense strand
cgucuucaccagccucuuu

SEQ ID NO: 959489 - RNA, 19 nt, Homo sapiens
  misc_RNA (1)...(19): siRNA sense strand
gcucgccgaccgugaaaug

SEQ ID NO: 959490 - RNA, 19 nt, Homo sapiens
  misc_RNA (1)...(19): siRNA sense strand
acaagcugcuggagacaca

SEQ ID NO: 959491 - RNA, 19 nt, Homo sapiens
  misc_RNA (1)...(19): siRNA sense strand
caucgugggcuccuucuuc

SEQ ID NO: 959492 - RNA, 19 nt, Homo sapiens
  misc_RNA (1)...(19): siRNA sense strand
acagcgaggcaguuuauga

SEQ ID NO: 959493 - RNA, 19 nt, Homo sapiens
  misc_RNA (1)...(19): siRNA sense strand
gagggcaaccugagcaaag

SEQ ID NO: 959494 - RNA, 19 nt, Homo sapiens
  misc_RNA (1)...(19): siRNA sense strand
aacaaaguccucuacaaug

SEQ ID NO: 959495 - RNA, 19 nt, Homo sapiens
  misc_RNA (1)...(19): siRNA sense strand
gugggcuccuucuucauga

SEQ ID NO: 959496 - RNA, 19 nt, Homo sapiens
  misc_RNA (1)...(19): siRNA sense strand
accaggaacaucaccaaua

SEQ ID NO: 959497 - RNA, 19 nt, Homo sapiens
  misc_RNA (1)...(19): siRNA sense strand
gcaacauuguagucaucug

SEQ ID NO: 959498 - RNA, 19 nt, Homo sapiens
  misc_RNA (1)...(19): siRNA sense strand
ggagagccaggaugaagag

SEQ ID NO: 959499 - RNA, 19 nt, Homo sapiens
  misc_RNA (1)...(19): siRNA sense strand
gcucuucaucuucaucuuc

SEQ ID NO: 959500 - RNA, 19 nt, Homo sapiens
  misc_RNA (1)...(19): siRNA sense strand
ugacaccuuccgaaagauu

SEQ ID NO: 959501 - RNA, 19 nt, Homo sapiens
  misc_RNA (1)...(19): siRNA sense strand
ucagacagcgaggcaguuu

SEQ ID NO: 959502 - RNA, 19 nt, Homo sapiens
  misc_RNA (1)...(19): siRNA sense strand
caccggagacgcugaagga

SEQ ID NO: 959503 - RNA, 19 nt, Homo sapiens
  misc_RNA (1)...(19): siRNA sense strand
ggaaccaguacuacaccaa

SEQ ID NO: 959504 - RNA, 19 nt, Homo sapiens
  misc_RNA (1)...(19): siRNA sense strand
ccguggagaugguggugaa

SEQ ID NO: 959505 - RNA, 19 nt, Homo sapiens
  misc_RNA (1)...(19): siRNA sense strand
aggaacaucaccaauaaau

SEQ ID NO: 959506 - RNA, 19 nt, Homo sapiens
  misc_RNA (1)...(19): siRNA sense strand
ggagaugguggugaagaug

SEQ ID NO: 959507 - RNA, 19 nt, Homo sapiens
  misc_RNA (1)...(19): siRNA sense strand
cagcaugggcaucgaauac

SEQ ID NO: 959508 - RNA, 19 nt, Homo sapiens
  misc_RNA (1)...(19): siRNA sense strand
cuucuacaauuucaucuac

SEQ ID NO: 959509 - RNA, 19 nt, Homo sapiens
  misc_RNA (1)...(19): siRNA sense strand
cuugucaucaucuuccuua

SEQ ID NO: 959510 - RNA, 19 nt, Homo sapiens
  misc_RNA (1)...(19): siRNA sense strand
aagaggagagcucagaaga

SEQ ID NO: 959511 - RNA, 19 nt, Homo sapiens
  misc_RNA (1)...(19): siRNA sense strand
cagggaugcuggaguacuc

SEQ ID NO: 959512 - RNA, 19 nt, Homo sapiens
  misc_RNA (1)...(19): siRNA sense strand
cuacgugcucuucaauuug

SEQ ID NO: 959513 - RNA, 19 nt, Homo sapiens
  misc_RNA (1)...(19): siRNA sense strand
ccaggaacaucaccaauaa

SEQ ID NO: 959514 - RNA, 19 nt, Homo sapiens
  misc_RNA (1)...(19): siRNA sense strand
gaacaaaguccucuacaau

SEQ ID NO: 959515 - RNA, 19 nt, Homo sapiens
  misc_RNA (1)...(19): siRNA sense strand
ggaacaaaguccucuacaa

SEQ ID NO: 959516 - RNA, 19 nt, Homo sapiens
  misc_RNA (1)...(19): siRNA sense strand
gcucauuccuucuacaauu

SEQ ID NO: 959517 - RNA, 19 nt, Homo sapiens
  misc_RNA (1)...(19): siRNA sense strand
gaaagauuguggacagcaa

SEQ ID NO: 959518 - RNA, 19 nt, Homo sapiens
  misc_RNA (1)...(19): siRNA sense strand
gcaacuacgugcucuucaa

SEQ ID NO: 959519 - RNA, 19 nt, Homo sapiens
  misc_RNA (1)...(19): siRNA sense strand
gaacaucaccaauaaaucg

SEQ ID NO: 959520 - RNA, 19 nt, Homo sapiens
  misc_RNA (1)...(19): siRNA sense strand
gaaggagaaggcacuagua

SEQ ID NO: 959521 - RNA, 19 nt, Homo sapiens
  misc_RNA (1)...(19): siRNA sense strand
guacaacuuugacaaccuu

SEQ ID NO: 959522 - RNA, 19 nt, Homo sapiens
  misc_RNA (1)...(19): siRNA sense strand
ucgcagggaugcuggagua

SEQ ID NO: 959523 - RNA, 19 nt, Homo sapiens
  misc_RNA (1)...(19): siRNA sense strand
gaggauaccaggaacauca

SEQ ID NO: 959524 - RNA, 19 nt, Homo sapiens
  misc_RNA (1)...(19): siRNA sense strand
gcgaggcaguuuaugaguu

SEQ ID NO: 959525 - RNA, 19 nt, Homo sapiens
  misc_RNA (1)...(19): siRNA sense strand
cggagacgcugaaggagaa

SEQ ID NO: 959526 - RNA, 19 nt, Homo sapiens
  misc_RNA (1)...(19): siRNA sense strand
gcugauguccucacugaaa

SEQ ID NO: 959527 - RNA, 19 nt, Homo sapiens
  misc_RNA (1)...(19): siRNA sense strand
aaaguccucuacaauggua

SEQ ID NO: 959528 - RNA, 19 nt, Homo sapiens
  misc_RNA (1)...(19): siRNA sense strand
caucuucaccgcagucuuu

SEQ ID NO: 959529 - RNA, 19 nt, Homo sapiens
  misc_RNA (1)...(19): siRNA sense strand
gcuauuaccagacagagaa

SEQ ID NO: 959530 - RNA, 19 nt, Homo sapiens
  misc_RNA (1)...(19): siRNA sense strand
acaaaguccucuacaaugg

SEQ ID NO: 959531 - RNA, 19 nt, Homo sapiens
  misc_RNA (1)...(19): siRNA sense strand
ggagaaggcacuaguagag

SEQ ID NO: 959532 - RNA, 19 nt, Homo sapiens
  misc_RNA (1)...(19): siRNA sense strand
agacagagaacgaggauga

SEQ ID NO: 959533 - RNA, 19 nt, Homo sapiens
  misc_RNA (1)...(19): siRNA sense strand
uacaacagcuccagcaaca

SEQ ID NO: 959534 - RNA, 19 nt, Homo sapiens
  misc_RNA (1)...(19): siRNA sense strand
ugugacaccuuccgaaaga

SEQ ID NO: 959535 - RNA, 19 nt, Homo sapiens
  misc_RNA (1)...(19): siRNA sense strand
cgaggcaguuuaugaguuc

SEQ ID NO: 959536 - RNA, 19 nt, Homo sapiens
  misc_RNA (1)...(19): siRNA sense strand
acuacgugcucuucaauuu

SEQ ID NO: 959537 - RNA, 19 nt, Homo sapiens
  misc_RNA (1)...(19): siRNA sense strand
ucaagaaucccuacaacau

SEQ ID NO: 959538 - RNA, 19 nt, Homo sapiens
  misc_RNA (1)...(19): siRNA sense strand
cuucaucuuugccuucuuu

SEQ ID NO: 959539 - RNA, 19 nt, Homo sapiens
  misc_RNA (1)...(19): siRNA sense strand
ucacguugcugcuggauac

SEQ ID NO: 959540 - RNA, 19 nt, Homo sapiens
  misc_RNA (1)...(19): siRNA sense strand
uccugacccucuccaauua

SEQ ID NO: 959541 - RNA, 19 nt, Homo sapiens
  misc_RNA (1)...(19): siRNA sense strand
caggaggacuggaacaaag

SEQ ID NO: 959542 - RNA, 19 nt, Homo sapiens
  misc_RNA (1)...(19): siRNA sense strand
ccaccugugucaacuggaa

SEQ ID NO: 959543 - RNA, 19 nt, Homo sapiens
  misc_RNA (1)...(19): siRNA sense strand
ggcaugcgguccugcagaa

SEQ ID NO: 959544 - RNA, 19 nt, Homo sapiens
  misc_RNA (1)...(19): siRNA sense strand
caucugcugugccuucuuc

SEQ ID NO: 959545 - RNA, 19 nt, Homo sapiens
  misc_RNA (1)...(19): siRNA sense strand
ggagcgcuauuaccagaca

SEQ ID NO: 959546 - RNA, 19 nt, Homo sapiens
  misc_RNA (1)...(19): siRNA sense strand
ugccagaccggaagaauuu

SEQ ID NO: 959547 - RNA, 19 nt, Homo sapiens
  misc_RNA (1)...(19): siRNA sense strand
gcuuguguauggucccuuu

SEQ ID NO: 959548 - RNA, 19 nt, Homo sapiens
  misc_RNA (1)...(19): siRNA sense strand
gcaggccuuugaugacuuc

SEQ ID NO: 959549 - RNA, 19 nt, Homo sapiens
  misc_RNA (1)...(19): siRNA sense strand
ggaagaauuuugacuccuu

SEQ ID NO: 959550 - RNA, 19 nt, Homo sapiens
  misc_RNA (1)...(19): siRNA sense strand
ucuggaggcuaaucuguga

SEQ ID NO: 959551 - RNA, 19 nt, Homo sapiens
  misc_RNA (1)...(19): siRNA sense strand
cuccagcccuugcuugaaa

SEQ ID NO: 959552 - RNA, 19 nt, Homo sapiens
  misc_RNA (1)...(19): siRNA sense strand
acgcugauguccucacuga

SEQ ID NO: 959553 - RNA, 19 nt, Homo sapiens
  misc_RNA (1)...(19): siRNA sense strand
caagaaucccuacaacauc

SEQ ID NO: 959554 - RNA, 19 nt, Homo sapiens
  misc_RNA (1)...(19): siRNA sense strand
caucaagaaucccuacaac

SEQ ID NO: 959555 - RNA, 19 nt, Homo sapiens
  misc_RNA (1)...(19): siRNA sense strand
ccaugucgcugcccaagag

SEQ ID NO: 959556 - RNA, 19 nt, Homo sapiens
  misc_RNA (1)...(19): siRNA sense strand
gggugcagcucuucaaagg

SEQ ID NO: 959557 - RNA, 19 nt, Homo sapiens
  misc_RNA (1)...(19): siRNA sense strand
gcucugugcuggccuucug

SEQ ID NO: 959558 - RNA, 19 nt, Homo sapiens
  misc_RNA (1)...(19): siRNA sense strand
uggcugaaaugacagugaa

SEQ ID NO: 959559 - RNA, 19 nt, Homo sapiens
  misc_RNA (1)...(19): siRNA sense strand
gaagaggagagcucagaag

SEQ ID NO: 959560 - RNA, 19 nt, Homo sapiens
  misc_RNA (1)...(19): siRNA sense strand
ccaacaaguccgaaucaga

SEQ ID NO: 959561 - RNA, 19 nt, Homo sapiens
  misc_RNA (1)...(19): siRNA sense strand
gagcagcccgaggagcuua

SEQ ID NO: 959562 - RNA, 19 nt, Homo sapiens
  misc_RNA (1)...(19): siRNA sense strand
uaccaacgcccuagaaauc

SEQ ID NO: 959563 - RNA, 19 nt, Homo sapiens
  misc_RNA (1)...(19): siRNA sense strand
gaaacccaucggcaacauu

SEQ ID NO: 959564 - RNA, 19 nt, Homo sapiens
  misc_RNA (1)...(19): siRNA sense strand
cucauuccuucuacaauuu

SEQ ID NO: 959565 - RNA, 19 nt, Homo sapiens
  misc_RNA (1)...(19): siRNA sense strand
gucaucaucuuccuuaacu

SEQ ID NO: 959566 - RNA, 19 nt, Homo sapiens
  misc_RNA (1)...(19): siRNA sense strand
caacuacgugcucuucaau

SEQ ID NO: 959567 - RNA, 19 nt, Homo sapiens
  misc_RNA (1)...(19): siRNA sense strand
cuuaugcucuucaucuuca

SEQ ID NO: 959568 - RNA, 19 nt, Homo sapiens
  misc_RNA (1)...(19): siRNA sense strand
aagaaucccuacaacaucu

SEQ ID NO: 959569 - RNA, 19 nt, Homo sapiens
  misc_RNA (1)...(19): siRNA sense strand
ccaugccgacugccacuua

SEQ ID NO: 959570 - RNA, 19 nt, Homo sapiens
  misc_RNA (1)...(19): siRNA sense strand
agacagcgaggcaguuuau

SEQ ID NO: 959571 - RNA, 19 nt, Homo sapiens
  misc_RNA (1)...(19): siRNA sense strand
ggaacaucaccaauaaauc

SEQ ID NO: 959572 - RNA, 19 nt, Homo sapiens
  misc_RNA (1)...(19): siRNA sense strand
gcaugggcaucgaauacca

SEQ ID NO: 959573 - RNA, 19 nt, Homo sapiens
  misc_RNA (1)...(19): siRNA sense strand
ugguguacauccuucguaa

SEQ ID NO: 959574 - RNA, 19 nt, Homo sapiens
  misc_RNA (1)...(19): siRNA sense strand
gccaggagagccaggauga

SEQ ID NO: 959575 - RNA, 19 nt, Homo sapiens
  misc_RNA (1)...(19): siRNA sense strand
ucucuucggcugcaaguuu

SEQ ID NO: 959576 - RNA, 19 nt, Homo sapiens
  misc_RNA (1)...(19): siRNA sense strand
gaugcuuccuaccugagaa

SEQ ID NO: 959577 - RNA, 19 nt, Homo sapiens
  misc_RNA (1)...(19): siRNA sense strand
caucgucacugucuuucag

SEQ ID NO: 959578 - RNA, 19 nt, Homo sapiens
  misc_RNA (1)...(19): siRNA sense strand
ucauguacuuugugaugga

SEQ ID NO: 959579 - RNA, 19 nt, Homo sapiens
  misc_RNA (1)...(19): siRNA sense strand
aaacccaucggcaacauug

SEQ ID NO: 959580 - RNA, 19 nt, Homo sapiens
  misc_RNA (1)...(19): siRNA sense strand
ggccaucgucacugucuuu

SEQ ID NO: 959581 - RNA, 19 nt, Homo sapiens
  misc_RNA (1)...(19): siRNA sense strand
ugaagaccauggacaacgu

SEQ ID NO: 959582 - RNA, 19 nt, Homo sapiens
  misc_RNA (1)...(19): siRNA sense strand
gaaccgaugcuuccuaccu

SEQ ID NO: 959583 - RNA, 19 nt, Homo sapiens
  misc_RNA (1)...(19): siRNA sense strand
ccucuccaauuacaucuuc

SEQ ID NO: 959584 - RNA, 19 nt, Homo sapiens
  misc_RNA (1)...(19): siRNA sense strand
gcauguuggucauccuucu

SEQ ID NO: 959585 - RNA, 19 nt, Homo sapiens
  misc_RNA (1)...(19): siRNA sense strand
cuugcggucuggacuauga

SEQ ID NO: 959586 - RNA, 19 nt, Homo sapiens
  misc_RNA (1)...(19): siRNA sense strand
cgaccgcucagggccauua

SEQ ID NO: 959587 - RNA, 19 nt, Homo sapiens
  misc_RNA (1)...(19): siRNA sense strand
cggcaacauuguagucauc

SEQ ID NO: 959588 - RNA, 19 nt, Homo sapiens
  misc_RNA (1)...(19): siRNA sense strand
cgucuucaccagccucuuu

SEQ ID NO: 959589 - RNA, 19 nt, Homo sapiens
  misc_RNA (1)...(19): siRNA sense strand
gcucgccgaccgugaaaug

SEQ ID NO: 959590 - RNA, 19 nt, Homo sapiens
  misc_RNA (1)...(19): siRNA sense strand
acaagcugcuggagacaca

SEQ ID NO: 959591 - RNA, 19 nt, Homo sapiens
  misc_RNA (1)...(19): siRNA sense strand
caucgugggcuccuucuuc

SEQ ID NO: 959592 - RNA, 19 nt, Homo sapiens
  misc_RNA (1)...(19): siRNA sense strand
acagcgaggcaguuuauga

SEQ ID NO: 959593 - RNA, 19 nt, Homo sapiens
  misc_RNA (1)...(19): siRNA sense strand
gagggcaaccugagcaaag

SEQ ID NO: 959594 - RNA, 19 nt, Homo sapiens
  misc_RNA (1)...(19): siRNA sense strand
aacaaaguccucuacaaug

SEQ ID NO: 959595 - RNA, 19 nt, Homo sapiens
  misc_RNA (1)...(19): siRNA sense strand
gugggcuccuucuucauga

SEQ ID NO: 959596 - RNA, 19 nt, Homo sapiens
  misc_RNA (1)...(19): siRNA sense strand
accaggaacaucaccaaua

SEQ ID NO: 959597 - RNA, 19 nt, Homo sapiens
  misc_RNA (1)...(19): siRNA sense strand
gcaacauuguagucaucug

SEQ ID NO: 959598 - RNA, 19 nt, Homo sapiens
  misc_RNA (1)...(19): siRNA sense strand
ggagagccaggaugaagag

SEQ ID NO: 959599 - RNA, 19 nt, Homo sapiens
  misc_RNA (1)...(19): siRNA sense strand
gcucuucaucuucaucuuc

SEQ ID NO: 959600 - RNA, 19 nt, Homo sapiens
  misc_RNA (1)...(19): siRNA sense strand
ugacaccuuccgaaagauu

SEQ ID NO: 959601 - RNA, 19 nt, Homo sapiens
  misc_RNA (1)...(19): siRNA sense strand
ucagacagcgaggcaguuu

SEQ ID NO: 959602 - RNA, 19 nt, Homo sapiens
  misc_RNA (1)...(19): siRNA sense strand
caccggagacgcugaagga

SEQ ID NO: 959603 - RNA, 19 nt, Homo sapiens
  misc_RNA (1)...(19): siRNA sense strand
ggaaccaguacuacaccaa

SEQ ID NO: 959604 - RNA, 19 nt, Homo sapiens
  misc_RNA (1)...(19): siRNA sense strand
ccguggagaugguggugaa

SEQ ID NO: 959605 - RNA, 19 nt, Homo sapiens
  misc_RNA (1)...(19): siRNA sense strand
aggaacaucaccaauaaau

SEQ ID NO: 959606 - RNA, 19 nt, Homo sapiens
  misc_RNA (1)...(19): siRNA sense strand
ggagaugguggugaagaug

SEQ ID NO: 959607 - RNA, 19 nt, Homo sapiens
  misc_RNA (1)...(19): siRNA sense strand
cagcaugggcaucgaauac

SEQ ID NO: 959608 - RNA, 19 nt, Homo sapiens
  misc_RNA (1)...(19): siRNA sense strand
cuucuacaauuucaucuac

SEQ ID NO: 959609 - RNA, 19 nt, Homo sapiens
  misc_RNA (1)...(19): siRNA sense strand
cuugucaucaucuuccuua

SEQ ID NO: 959610 - RNA, 19 nt, Homo sapiens
  misc_RNA (1)...(19): siRNA sense strand
aagaggagagcucagaaga

SEQ ID NO: 959611 - RNA, 19 nt, Homo sapiens
  misc_RNA (1)...(19): siRNA sense strand
cagggaugcuggaguacuc

SEQ ID NO: 959612 - RNA, 19 nt, Homo sapiens
  misc_RNA (1)...(19): siRNA sense strand
cuacgugcucuucaauuug

SEQ ID NO: 959613 - RNA, 19 nt, Homo sapiens
  misc_RNA (1)...(19): siRNA sense strand
ccaggaacaucaccaauaa

SEQ ID NO: 959614 - RNA, 19 nt, Homo sapiens
  misc_RNA (1)...(19): siRNA sense strand
gaacaaaguccucuacaau

SEQ ID NO: 959615 - RNA, 19 nt, Homo sapiens
  misc_RNA (1)...(19): siRNA sense strand
ggaacaaaguccucuacaa

SEQ ID NO: 959616 - RNA, 19 nt, Homo sapiens
  misc_RNA (1)...(19): siRNA sense strand
gcucauuccuucuacaauu

SEQ ID NO: 959617 - RNA, 19 nt, Homo sapiens
  misc_RNA (1)...(19): siRNA sense strand
gaaagauuguggacagcaa

SEQ ID NO: 959618 - RNA, 19 nt, Homo sapiens
  misc_RNA (1)...(19): siRNA sense strand
gcaacuacgugcucuucaa

SEQ ID NO: 959619 - RNA, 19 nt, Homo sapiens
  misc_RNA (1)...(19): siRNA sense strand
gaacaucaccaauaaaucg

SEQ ID NO: 959620 - RNA, 19 nt, Homo sapiens
  misc_RNA (1)...(19): siRNA sense strand
gaaggagaaggcacuagua

SEQ ID NO: 959621 - RNA, 19 nt, Homo sapiens
  misc_RNA (1)...(19): siRNA sense strand
guacaacuuugacaaccuu

SEQ ID NO: 959622 - RNA, 19 nt, Homo sapiens
  misc_RNA (1)...(19): siRNA sense strand
ucgcagggaugcuggagua

SEQ ID NO: 959623 - RNA, 19 nt, Homo sapiens
  misc_RNA (1)...(19): siRNA sense strand
gaggauaccaggaacauca

SEQ ID NO: 959624 - RNA, 19 nt, Homo sapiens
  misc_RNA (1)...(19): siRNA sense strand
gcgaggcaguuuaugaguu

SEQ ID NO: 959625 - RNA, 19 nt, Homo sapiens
  misc_RNA (1)...(19): siRNA sense strand
cggagacgcugaaggagaa

SEQ ID NO: 959626 - RNA, 19 nt, Homo sapiens
  misc_RNA (1)...(19): siRNA sense strand
gcugauguccucacugaaa

SEQ ID NO: 959627 - RNA, 19 nt, Homo sapiens
  misc_RNA (1)...(19): siRNA sense strand
aaaguccucuacaauggua

SEQ ID NO: 959628 - RNA, 19 nt, Homo sapiens
  misc_RNA (1)...(19): siRNA sense strand
caucuucaccgcagucuuu

SEQ ID NO: 959629 - RNA, 19 nt, Homo sapiens
  misc_RNA (1)...(19): siRNA sense strand
gcuauuaccagacagagaa

SEQ ID NO: 959630 - RNA, 19 nt, Homo sapiens
  misc_RNA (1)...(19): siRNA sense strand
acaaaguccucuacaaugg

SEQ ID NO: 959631 - RNA, 19 nt, Homo sapiens
  misc_RNA (1)...(19): siRNA sense strand
ggagaaggcacuaguagag

SEQ ID NO: 959632 - RNA, 19 nt, Homo sapiens
  misc_RNA (1)...(19): siRNA sense strand
agacagagaacgaggauga

SEQ ID NO: 959633 - RNA, 19 nt, Homo sapiens
  misc_RNA (1)...(19): siRNA sense strand
uacaacagcuccagcaaca

SEQ ID NO: 959634 - RNA, 19 nt, Homo sapiens
  misc_RNA (1)...(19): siRNA sense strand
ugugacaccuuccgaaaga

SEQ ID NO: 959635 - RNA, 19 nt, Homo sapiens
  misc_RNA (1)...(19): siRNA sense strand
cgaggcaguuuaugaguuc

SEQ ID NO: 959636 - RNA, 19 nt, Homo sapiens
  misc_RNA (1)...(19): siRNA sense strand
acuacgugcucuucaauuu

SEQ ID NO: 959637 - RNA, 19 nt, Homo sapiens
  misc_RNA (1)...(19): siRNA sense strand
ucaagaaucccuacaacau

SEQ ID NO: 959638 - RNA, 19 nt, Homo sapiens
  misc_RNA (1)...(19): siRNA sense strand
cuucaucuuugccuucuuu

SEQ ID NO: 959639 - RNA, 19 nt, Homo sapiens
  misc_RNA (1)...(19): siRNA sense strand
ucacguugcugcuggauac

SEQ ID NO: 959640 - RNA, 19 nt, Homo sapiens
  misc_RNA (1)...(19): siRNA sense strand
uccugacccucuccaauua

SEQ ID NO: 959641 - RNA, 19 nt, Homo sapiens
  misc_RNA (1)...(19): siRNA sense strand
caggaggacuggaacaaag

SEQ ID NO: 959642 - RNA, 19 nt, Homo sapiens
  misc_RNA (1)...(19): siRNA sense strand
ccaccugugucaacuggaa

SEQ ID NO: 959643 - RNA, 19 nt, Homo sapiens
  misc_RNA (1)...(19): siRNA sense strand
ggcaugcgguccugcagaa

SEQ ID NO: 959644 - RNA, 19 nt, Homo sapiens
  misc_RNA (1)...(19): siRNA sense strand
caucugcugugccuucuuc

SEQ ID NO: 959645 - RNA, 19 nt, Homo sapiens
  misc_RNA (1)...(19): siRNA sense strand
ggagcgcuauuaccagaca

SEQ ID NO: 959646 - RNA, 19 nt, Homo sapiens
  misc_RNA (1)...(19): siRNA sense strand
ugccagaccggaagaauuu

SEQ ID NO: 959647 - RNA, 19 nt, Homo sapiens
  misc_RNA (1)...(19): siRNA sense strand
gcuuguguauggucccuuu

SEQ ID NO: 959648 - RNA, 19 nt, Homo sapiens
  misc_RNA (1)...(19): siRNA sense strand
gcaggccuuugaugacuuc

SEQ ID NO: 959649 - RNA, 19 nt, Homo sapiens
  misc_RNA (1)...(19): siRNA sense strand
ggaagaauuuugacuccuu

SEQ ID NO: 959650 - RNA, 19 nt, Homo sapiens
  misc_RNA (1)...(19): siRNA sense strand
ucuggaggcuaaucuguga

SEQ ID NO: 959651 - RNA, 19 nt, Homo sapiens
  misc_RNA (1)...(19): siRNA sense strand
cuccagcccuugcuugaaa

SEQ ID NO: 959652 - RNA, 19 nt, Homo sapiens
  misc_RNA (1)...(19): siRNA sense strand
acgcugauguccucacuga

SEQ ID NO: 959653 - RNA, 19 nt, Homo sapiens
  misc_RNA (1)...(19): siRNA sense strand
caagaaucccuacaacauc

SEQ ID NO: 959654 - RNA, 19 nt, Homo sapiens
  misc_RNA (1)...(19): siRNA sense strand
caucaagaaucccuacaac

SEQ ID NO: 959655 - RNA, 19 nt, Homo sapiens
  misc_RNA (1)...(19): siRNA sense strand
ccaugucgcugcccaagag

SEQ ID NO: 959656 - RNA, 19 nt, Homo sapiens
  misc_RNA (1)...(19): siRNA sense strand
gggugcagcucuucaaagg

SEQ ID NO: 959657 - RNA, 19 nt, Homo sapiens
  misc_RNA (1)...(19): siRNA sense strand
gcucugugcuggccuucug

SEQ ID NO: 959658 - RNA, 19 nt, Homo sapiens
  misc_RNA (1)...(19): siRNA sense strand
uggcugaaaugacagugaa

SEQ ID NO: 959659 - RNA, 19 nt, Homo sapiens
  misc_RNA (1)...(19): siRNA sense strand
gaagaggagagcucagaag

SEQ ID NO: 959660 - RNA, 19 nt, Homo sapiens
  misc_RNA (1)...(19): siRNA sense strand
ccaacaaguccgaaucaga

SEQ ID NO: 959661 - RNA, 19 nt, Homo sapiens
  misc_RNA (1)...(19): siRNA sense strand
gagcagcccgaggagcuua

SEQ ID NO: 959662 - RNA, 19 nt, Homo sapiens
  misc_RNA (1)...(19): siRNA sense strand
uaccaacgcccuagaaauc

SEQ ID NO: 959663 - RNA, 19 nt, Homo sapiens
  misc_RNA (1)...(19): siRNA sense strand
gaaacccaucggcaacauu

SEQ ID NO: 959664 - RNA, 19 nt, Homo sapiens
  misc_RNA (1)...(19): siRNA sense strand
cucauuccuucuacaauuu

SEQ ID NO: 959665 - RNA, 19 nt, Homo sapiens
  misc_RNA (1)...(19): siRNA sense strand
gucaucaucuuccuuaacu

SEQ ID NO: 959666 - RNA, 19 nt, Homo sapiens
  misc_RNA (1)...(19): siRNA sense strand
caacuacgugcucuucaau

SEQ ID NO: 959667 - RNA, 19 nt, Homo sapiens
  misc_RNA (1)...(19): siRNA sense strand
cuuaugcucuucaucuuca

SEQ ID NO: 959668 - RNA, 19 nt, Homo sapiens
  misc_RNA (1)...(19): siRNA sense strand
aagaaucccuacaacaucu

SEQ ID NO: 959669 - RNA, 19 nt, Homo sapiens
  misc_RNA (1)...(19): siRNA sense strand
ccaugccgacugccacuua

SEQ ID NO: 959670 - RNA, 19 nt, Homo sapiens
  misc_RNA (1)...(19): siRNA sense strand
agacagcgaggcaguuuau

SEQ ID NO: 959671 - RNA, 19 nt, Homo sapiens
  misc_RNA (1)...(19): siRNA sense strand
ggaacaucaccaauaaauc

SEQ ID NO: 959672 - RNA, 19 nt, Homo sapiens
  misc_RNA (1)...(19): siRNA sense strand
gcaugggcaucgaauacca

SEQ ID NO: 959673 - RNA, 19 nt, Homo sapiens
  misc_RNA (1)...(19): siRNA sense strand
ugguguacauccuucguaa

SEQ ID NO: 959674 - RNA, 19 nt, Homo sapiens
  misc_RNA (1)...(19): siRNA sense strand
gccaggagagccaggauga

SEQ ID NO: 959675 - RNA, 19 nt, Homo sapiens
  misc_RNA (1)...(19): siRNA sense strand
ucucuucggcugcaaguuu

SEQ ID NO: 959676 - RNA, 19 nt, Homo sapiens
  misc_RNA (1)...(19): siRNA sense strand
gaugcuuccuaccugagaa

SEQ ID NO: 959677 - RNA, 19 nt, Homo sapiens
  misc_RNA (1)...(19): siRNA sense strand
caucgucacugucuuucag

SEQ ID NO: 959678 - RNA, 19 nt, Homo sapiens
  misc_RNA (1)...(19): siRNA sense strand
ucauguacuuugugaugga

SEQ ID NO: 959679 - RNA, 19 nt, Homo sapiens
  misc_RNA (1)...(19): siRNA sense strand
aaacccaucggcaacauug

SEQ ID NO: 959680 - RNA, 19 nt, Homo sapiens
  misc_RNA (1)...(19): siRNA sense strand
ggccaucgucacugucuuu

SEQ ID NO: 959681 - RNA, 19 nt, Homo sapiens
  misc_RNA (1)...(19): siRNA sense strand
ugaagaccauggacaacgu

SEQ ID NO: 959682 - RNA, 19 nt, Homo sapiens
  misc_RNA (1)...(19): siRNA sense strand
gaaccgaugcuuccuaccu

SEQ ID NO: 959683 - RNA, 19 nt, Homo sapiens
  misc_RNA (1)...(19): siRNA sense strand
ccucuccaauuacaucuuc

SEQ ID NO: 959684 - RNA, 19 nt, Homo sapiens
  misc_RNA (1)...(19): siRNA sense strand
gcauguuggucauccuucu

SEQ ID NO: 959685 - RNA, 19 nt, Homo sapiens
  misc_RNA (1)...(19): siRNA sense strand
cuugcggucuggacuauga

SEQ ID NO: 959686 - RNA, 19 nt, Homo sapiens
  misc_RNA (1)...(19): siRNA sense strand
cgaccgcucagggccauua

SEQ ID NO: 959687 - RNA, 19 nt, Homo sapiens
  misc_RNA (1)...(19): siRNA sense strand
cggcaacauuguagucauc

SEQ ID NO: 959688 - RNA, 19 nt, Homo sapiens
  misc_RNA (1)...(19): siRNA sense strand
cgucuucaccagccucuuu

SEQ ID NO: 959689 - RNA, 19 nt, Homo sapiens
  misc_RNA (1)...(19): siRNA sense strand
gcucgccgaccgugaaaug

SEQ ID NO: 959690 - RNA, 19 nt, Homo sapiens
  misc_RNA (1)...(19): siRNA sense strand
acaagcugcuggagacaca

SEQ ID NO: 959691 - RNA, 19 nt, Homo sapiens
  misc_RNA (1)...(19): siRNA sense strand
caucgugggcuccuucuuc

SEQ ID NO: 959692 - RNA, 19 nt, Homo sapiens
  misc_RNA (1)...(19): siRNA sense strand
acagcgaggcaguuuauga

SEQ ID NO: 959693 - RNA, 19 nt, Homo sapiens
  misc_RNA (1)...(19): siRNA sense strand
gagggcaaccugagcaaag

SEQ ID NO: 959694 - RNA, 19 nt, Homo sapiens
  misc_RNA (1)...(19): siRNA sense strand
aacaaaguccucuacaaug

SEQ ID NO: 959695 - RNA, 19 nt, Homo sapiens
  misc_RNA (1)...(19): siRNA sense strand
gugggcuccuucuucauga

SEQ ID NO: 959696 - RNA, 19 nt, Homo sapiens
  misc_RNA (1)...(19): siRNA sense strand
accaggaacaucaccaaua

SEQ ID NO: 959697 - RNA, 19 nt, Homo sapiens
  misc_RNA (1)...(19): siRNA sense strand
gcaacauuguagucaucug

SEQ ID NO: 959698 - RNA, 19 nt, Homo sapiens
  misc_RNA (1)...(19): siRNA sense strand
ggagagccaggaugaagag

SEQ ID NO: 959699 - RNA, 19 nt, Homo sapiens
  misc_RNA (1)...(19): siRNA sense strand
gcucuucaucuucaucuuc

SEQ ID NO: 959700 - RNA, 19 nt, Homo sapiens
  misc_RNA (1)...(19): siRNA sense strand
ugacaccuuccgaaagauu

SEQ ID NO: 959701 - RNA, 19 nt, Homo sapiens
  misc_RNA (1)...(19): siRNA sense strand
ucagacagcgaggcaguuu

SEQ ID NO: 959702 - RNA, 19 nt, Homo sapiens
  misc_RNA (1)...(19): siRNA sense strand
caccggagacgcugaagga

SEQ ID NO: 959703 - RNA, 19 nt, Homo sapiens
  misc_RNA (1)...(19): siRNA sense strand
ggaaccaguacuacaccaa

SEQ ID NO: 959704 - RNA, 19 nt, Homo sapiens
  misc_RNA (1)...(19): siRNA sense strand
ccguggagaugguggugaa

SEQ ID NO: 959705 - RNA, 19 nt, Homo sapiens
  misc_RNA (1)...(19): siRNA sense strand
aggaacaucaccaauaaau

SEQ ID NO: 959706 - RNA, 19 nt, Homo sapiens
  misc_RNA (1)...(19): siRNA sense strand
ggagaugguggugaagaug

SEQ ID NO: 959707 - RNA, 19 nt, Homo sapiens
  misc_RNA (1)...(19): siRNA sense strand
cagcaugggcaucgaauac

SEQ ID NO: 959708 - RNA, 19 nt, Homo sapiens
  misc_RNA (1)...(19): siRNA sense strand
cuucuacaauuucaucuac

SEQ ID NO: 959709 - RNA, 19 nt, Homo sapiens
  misc_RNA (1)...(19): siRNA sense strand
cuugucaucaucuuccuua

SEQ ID NO: 959710 - RNA, 19 nt, Homo sapiens
  misc_RNA (1)...(19): siRNA sense strand
aagaggagagcucagaaga

SEQ ID NO: 959711 - RNA, 19 nt, Homo sapiens
  misc_RNA (1)...(19): siRNA sense strand
cagggaugcuggaguacuc

SEQ ID NO: 959712 - RNA, 19 nt, Homo sapiens
  misc_RNA (1)...(19): siRNA sense strand
cuacgugcucuucaauuug

SEQ ID NO: 959713 - RNA, 19 nt, Homo sapiens
  misc_RNA (1)...(19): siRNA sense strand
ccaggaacaucaccaauaa

SEQ ID NO: 959714 - RNA, 19 nt, Homo sapiens
  misc_RNA (1)...(19): siRNA sense strand
gaacaaaguccucuacaau

SEQ ID NO: 959715 - RNA, 19 nt, Homo sapiens
  misc_RNA (1)...(19): siRNA sense strand
ggaacaaaguccucuacaa

SEQ ID NO: 959716 - RNA, 19 nt, Homo sapiens
  misc_RNA (1)...(19): siRNA sense strand
gcucauuccuucuacaauu

SEQ ID NO: 959717 - RNA, 19 nt, Homo sapiens
  misc_RNA (1)...(19): siRNA sense strand
gaaagauuguggacagcaa

SEQ ID NO: 959718 - RNA, 19 nt, Homo sapiens
  misc_RNA (1)...(19): siRNA sense strand
gcaacuacgugcucuucaa

SEQ ID NO: 959719 - RNA, 19 nt, Homo sapiens
  misc_RNA (1)...(19): siRNA sense strand
gaacaucaccaauaaaucg

SEQ ID NO: 959720 - RNA, 19 nt, Homo sapiens
  misc_RNA (1)...(19): siRNA sense strand
gaaggagaaggcacuagua

SEQ ID NO: 959721 - RNA, 19 nt, Homo sapiens
  misc_RNA (1)...(19): siRNA sense strand
guacaacuuugacaaccuu

SEQ ID NO: 959722 - RNA, 19 nt, Homo sapiens
  misc_RNA (1)...(19): siRNA sense strand
ucgcagggaugcuggagua

SEQ ID NO: 959723 - RNA, 19 nt, Homo sapiens
  misc_RNA (1)...(19): siRNA sense strand
gaggauaccaggaacauca

SEQ ID NO: 959724 - RNA, 19 nt, Homo sapiens
  misc_RNA (1)...(19): siRNA sense strand
gcgaggcaguuuaugaguu

SEQ ID NO: 959725 - RNA, 19 nt, Homo sapiens
  misc_RNA (1)...(19): siRNA sense strand
cggagacgcugaaggagaa

SEQ ID NO: 959726 - RNA, 19 nt, Homo sapiens
  misc_RNA (1)...(19): siRNA sense strand
gcugauguccucacugaaa

SEQ ID NO: 959727 - RNA, 19 nt, Homo sapiens
  misc_RNA (1)...(19): siRNA sense strand
aaaguccucuacaauggua

SEQ ID NO: 959728 - RNA, 19 nt, Homo sapiens
  misc_RNA (1)...(19): siRNA sense strand
caucuucaccgcagucuuu

SEQ ID NO: 959729 - RNA, 19 nt, Homo sapiens
  misc_RNA (1)...(19): siRNA sense strand
gcuauuaccagacagagaa

SEQ ID NO: 959730 - RNA, 19 nt, Homo sapiens
  misc_RNA (1)...(19): siRNA sense strand
acaaaguccucuacaaugg

SEQ ID NO: 959731 - RNA, 19 nt, Homo sapiens
  misc_RNA (1)...(19): siRNA sense strand
ggagaaggcacuaguagag

SEQ ID NO: 959732 - RNA, 19 nt, Homo sapiens
  misc_RNA (1)...(19): siRNA sense strand
agacagagaacgaggauga

SEQ ID NO: 959733 - RNA, 19 nt, Homo sapiens
  misc_RNA (1)...(19): siRNA sense strand
uacaacagcuccagcaaca

SEQ ID NO: 959734 - RNA, 19 nt, Homo sapiens
  misc_RNA (1)...(19): siRNA sense strand
ugugacaccuuccgaaaga

SEQ ID NO: 959735 - RNA, 19 nt, Homo sapiens
  misc_RNA (1)...(19): siRNA sense strand
cgaggcaguuuaugaguuc

SEQ ID NO: 959736 - RNA, 19 nt, Homo sapiens
  misc_RNA (1)...(19): siRNA sense strand
acuacgugcucuucaauuu

SEQ ID NO: 959737 - RNA, 19 nt, Homo sapiens
  misc_RNA (1)...(19): siRNA sense strand
ucaagaaucccuacaacau

SEQ ID NO: 959738 - RNA, 19 nt, Homo sapiens
  misc_RNA (1)...(19): siRNA sense strand
cuucaucuuugccuucuuu

SEQ ID NO: 959739 - RNA, 19 nt, Homo sapiens
  misc_RNA (1)...(19): siRNA sense strand
ucacguugcugcuggauac

SEQ ID NO: 959740 - RNA, 19 nt, Homo sapiens
  misc_RNA (1)...(19): siRNA sense strand
uccugacccucuccaauua

SEQ ID NO: 959741 - RNA, 19 nt, Homo sapiens
  misc_RNA (1)...(19): siRNA sense strand
caggaggacuggaacaaag

SEQ ID NO: 959742 - RNA, 19 nt, Homo sapiens
  misc_RNA (1)...(19): siRNA sense strand
ccaccugugucaacuggaa

SEQ ID NO: 959743 - RNA, 19 nt, Homo sapiens
  misc_RNA (1)...(19): siRNA sense strand
ggcaugcgguccugcagaa

SEQ ID NO: 959744 - RNA, 19 nt, Homo sapiens
  misc_RNA (1)...(19): siRNA sense strand
caucugcugugccuucuuc

SEQ ID NO: 959745 - RNA, 19 nt, Homo sapiens
  misc_RNA (1)...(19): siRNA sense strand
ggagcgcuauuaccagaca

SEQ ID NO: 959746 - RNA, 19 nt, Homo sapiens
  misc_RNA (1)...(19): siRNA sense strand
ugccagaccggaagaauuu

SEQ ID NO: 959747 - RNA, 19 nt, Homo sapiens
  misc_RNA (1)...(19): siRNA sense strand
gcuuguguauggucccuuu

SEQ ID NO: 959748 - RNA, 19 nt, Homo sapiens
  misc_RNA (1)...(19): siRNA sense strand
gcaggccuuugaugacuuc

SEQ ID NO: 959749 - RNA, 19 nt, Homo sapiens
  misc_RNA (1)...(19): siRNA sense strand
ggaagaauuuugacuccuu

SEQ ID NO: 959750 - RNA, 19 nt, Homo sapiens
  misc_RNA (1)...(19): siRNA sense strand
ucuggaggcuaaucuguga

SEQ ID NO: 959751 - RNA, 19 nt, Homo sapiens
  misc_RNA (1)...(19): siRNA sense strand
cuccagcccuugcuugaaa

SEQ ID NO: 959752 - RNA, 19 nt, Homo sapiens
  misc_RNA (1)...(19): siRNA sense strand
acgcugauguccucacuga

SEQ ID NO: 959753 - RNA, 19 nt, Homo sapiens
  misc_RNA (1)...(19): siRNA sense strand
caagaaucccuacaacauc

SEQ ID NO: 959754 - RNA, 19 nt, Homo sapiens
  misc_RNA (1)...(19): siRNA sense strand
caucaagaaucccuacaac

SEQ ID NO: 959755 - RNA, 19 nt, Homo sapiens
  misc_RNA (1)...(19): siRNA sense strand
ccaugucgcugcccaagag

SEQ ID NO: 959756 - RNA, 19 nt, Homo sapiens
  misc_RNA (1)...(19): siRNA sense strand
gggugcagcucuucaaagg

SEQ ID NO: 959757 - RNA, 19 nt, Homo sapiens
  misc_RNA (1)...(19): siRNA sense strand
gcucugugcuggccuucug

SEQ ID NO: 959758 - RNA, 19 nt, Homo sapiens
  misc_RNA (1)...(19): siRNA sense strand
uggcugaaaugacagugaa

SEQ ID NO: 959759 - RNA, 19 nt, Homo sapiens
  misc_RNA (1)...(19): siRNA sense strand
gaagaggagagcucagaag

SEQ ID NO: 959760 - RNA, 19 nt, Homo sapiens
  misc_RNA (1)...(19): siRNA sense strand
ccaacaaguccgaaucaga

SEQ ID NO: 959761 - RNA, 19 nt, Homo sapiens
  misc_RNA (1)...(19): siRNA sense strand
gagcagcccgaggagcuua

SEQ ID NO: 959762 - RNA, 19 nt, Homo sapiens
  misc_RNA (1)...(19): siRNA sense strand
uaccaacgcccuagaaauc

SEQ ID NO: 959763 - RNA, 19 nt, Homo sapiens
  misc_RNA (1)...(19): siRNA sense strand
gaaacccaucggcaacauu

SEQ ID NO: 959764 - RNA, 19 nt, Homo sapiens
  misc_RNA (1)...(19): siRNA sense strand
cucauuccuucuacaauuu

SEQ ID NO: 959765 - RNA, 19 nt, Homo sapiens
  misc_RNA (1)...(19): siRNA sense strand
gucaucaucuuccuuaacu

SEQ ID NO: 959766 - RNA, 19 nt, Homo sapiens
  misc_RNA (1)...(19): siRNA sense strand
caacuacgugcucuucaau

SEQ ID NO: 959767 - RNA, 19 nt, Homo sapiens
  misc_RNA (1)...(19): siRNA sense strand
cuuaugcucuucaucuuca

SEQ ID NO: 959768 - RNA, 19 nt, Homo sapiens
  misc_RNA (1)...(19): siRNA sense strand
aagaaucccuacaacaucu

SEQ ID NO: 959769 - RNA, 19 nt, Homo sapiens
  misc_RNA (1)...(19): siRNA sense strand
ccaugccgacugccacuua

SEQ ID NO: 959770 - RNA, 19 nt, Homo sapiens
  misc_RNA (1)...(19): siRNA sense strand
agacagcgaggcaguuuau

SEQ ID NO: 959771 - RNA, 19 nt, Homo sapiens
  misc_RNA (1)...(19): siRNA sense strand
ggaacaucaccaauaaauc

SEQ ID NO: 959772 - RNA, 19 nt, Homo sapiens
  misc_RNA (1)...(19): siRNA sense strand
gcaugggcaucgaauacca

SEQ ID NO: 959773 - RNA, 19 nt, Homo sapiens
  misc_RNA (1)...(19): siRNA sense strand
ugguguacauccuucguaa

SEQ ID NO: 959774 - RNA, 19 nt, Homo sapiens
  misc_RNA (1)...(19): siRNA sense strand
gccaggagagccaggauga

SEQ ID NO: 959775 - RNA, 19 nt, Homo sapiens
  misc_RNA (1)...(19): siRNA sense strand
ucucuucggcugcaaguuu

SEQ ID NO: 959776 - RNA, 19 nt, Homo sapiens
  misc_RNA (1)...(19): siRNA sense strand
gaugcuuccuaccugagaa

SEQ ID NO: 959777 - RNA, 19 nt, Homo sapiens
  misc_RNA (1)...(19): siRNA sense strand
caucgucacugucuuucag

SEQ ID NO: 959778 - RNA, 19 nt, Homo sapiens
  misc_RNA (1)...(19): siRNA sense strand
ucauguacuuugugaugga

SEQ ID NO: 959779 - RNA, 19 nt, Homo sapiens
  misc_RNA (1)...(19): siRNA sense strand
aaacccaucggcaacauug

SEQ ID NO: 959780 - RNA, 19 nt, Homo sapiens
  misc_RNA (1)...(19): siRNA sense strand
ggccaucgucacugucuuu

SEQ ID NO: 959781 - RNA, 19 nt, Homo sapiens
  misc_RNA (1)...(19): siRNA sense strand
ugaagaccauggacaacgu

SEQ ID NO: 959782 - RNA, 19 nt, Homo sapiens
  misc_RNA (1)...(19): siRNA sense strand
gaaccgaugcuuccuaccu

SEQ ID NO: 959783 - RNA, 19 nt, Homo sapiens
  misc_RNA (1)...(19): siRNA sense strand
ccucuccaauuacaucuuc

SEQ ID NO: 959784 - RNA, 19 nt, Homo sapiens
  misc_RNA (1)...(19): siRNA sense strand
gcauguuggucauccuucu

SEQ ID NO: 959785 - RNA, 19 nt, Homo sapiens
  misc_RNA (1)...(19): siRNA sense strand
cuugcggucuggacuauga

SEQ ID NO: 959786 - RNA, 19 nt, Homo sapiens
  misc_RNA (1)...(19): siRNA sense strand
cgaccgcucagggccauua

SEQ ID NO: 959787 - RNA, 19 nt, Homo sapiens
  misc_RNA (1)...(19): siRNA sense strand
cggcaacauuguagucauc

SEQ ID NO: 959788 - RNA, 19 nt, Homo sapiens
  misc_RNA (1)...(19): siRNA sense strand
cgucuucaccagccucuuu

SEQ ID NO: 959789 - RNA, 19 nt, Homo sapiens
  misc_RNA (1)...(19): siRNA sense strand
gcucgccgaccgugaaaug

SEQ ID NO: 959790 - RNA, 19 nt, Homo sapiens
  misc_RNA (1)...(19): siRNA sense strand
acaagcugcuggagacaca

SEQ ID NO: 959791 - RNA, 19 nt, Homo sapiens
  misc_RNA (1)...(19): siRNA sense strand
caucgugggcuccuucuuc

SEQ ID NO: 959792 - RNA, 19 nt, Homo sapiens
  misc_RNA (1)...(19): siRNA sense strand
acagcgaggcaguuuauga

SEQ ID NO: 959793 - RNA, 19 nt, Homo sapiens
  misc_RNA (1)...(19): siRNA sense strand
gagggcaaccugagcaaag

SEQ ID NO: 959794 - RNA, 19 nt, Homo sapiens
  misc_RNA (1)...(19): siRNA sense strand
aacaaaguccucuacaaug

SEQ ID NO: 959795 - RNA, 19 nt, Homo sapiens
  misc_RNA (1)...(19): siRNA sense strand
gugggcuccuucuucauga

SEQ ID NO: 959796 - RNA, 19 nt, Homo sapiens
  misc_RNA (1)...(19): siRNA sense strand
accaggaacaucaccaaua

SEQ ID NO: 959797 - RNA, 19 nt, Homo sapiens
  misc_RNA (1)...(19): siRNA sense strand
gcaacauuguagucaucug

SEQ ID NO: 959798 - RNA, 19 nt, Homo sapiens
  misc_RNA (1)...(19): siRNA sense strand
ggagagccaggaugaagag

SEQ ID NO: 959799 - RNA, 19 nt, Homo sapiens
  misc_RNA (1)...(19): siRNA sense strand
gcucuucaucuucaucuuc

SEQ ID NO: 959800 - RNA, 19 nt, Homo sapiens
  misc_RNA (1)...(19): siRNA sense strand
ugacaccuuccgaaagauu

SEQ ID NO: 959801 - RNA, 19 nt, Homo sapiens
  misc_RNA (1)...(19): siRNA sense strand
ucagacagcgaggcaguuu

SEQ ID NO: 959802 - RNA, 19 nt, Homo sapiens
  misc_RNA (1)...(19): siRNA sense strand
caccggagacgcugaagga

SEQ ID NO: 959803 - RNA, 19 nt, Homo sapiens
  misc_RNA (1)...(19): siRNA sense strand
ggaaccaguacuacaccaa

SEQ ID NO: 959804 - RNA, 19 nt, Homo sapiens
  misc_RNA (1)...(19): siRNA sense strand
ccguggagaugguggugaa

SEQ ID NO: 959805 - RNA, 19 nt, Homo sapiens
  misc_RNA (1)...(19): siRNA sense strand
aggaacaucaccaauaaau

SEQ ID NO: 959806 - RNA, 19 nt, Homo sapiens
  misc_RNA (1)...(19): siRNA sense strand
ggagaugguggugaagaug

SEQ ID NO: 959807 - RNA, 19 nt, Homo sapiens
  misc_RNA (1)...(19): siRNA sense strand
cagcaugggcaucgaauac

SEQ ID NO: 959808 - RNA, 19 nt, Homo sapiens
  misc_RNA (1)...(19): siRNA sense strand
cuucuacaauuucaucuac

SEQ ID NO: 959809 - RNA, 19 nt, Homo sapiens
  misc_RNA (1)...(19): siRNA sense strand
cuugucaucaucuuccuua

SEQ ID NO: 959810 - RNA, 19 nt, Homo sapiens
  misc_RNA (1)...(19): siRNA sense strand
aagaggagagcucagaaga

SEQ ID NO: 959811 - RNA, 19 nt, Homo sapiens
  misc_RNA (1)...(19): siRNA sense strand
cagggaugcuggaguacuc

SEQ ID NO: 959812 - RNA, 19 nt, Homo sapiens
  misc_RNA (1)...(19): siRNA sense strand
cuacgugcucuucaauuug

SEQ ID NO: 959813 - RNA, 19 nt, Homo sapiens
  misc_RNA (1)...(19): siRNA sense strand
ccaggaacaucaccaauaa

SEQ ID NO: 959814 - RNA, 19 nt, Homo sapiens
  misc_RNA (1)...(19): siRNA sense strand
gaacaaaguccucuacaau

SEQ ID NO: 959815 - RNA, 19 nt, Homo sapiens
  misc_RNA (1)...(19): siRNA sense strand
ggaacaaaguccucuacaa

SEQ ID NO: 959816 - RNA, 19 nt, Homo sapiens
  misc_RNA (1)...(19): siRNA sense strand
gcucauuccuucuacaauu

SEQ ID NO: 959817 - RNA, 19 nt, Homo sapiens
  misc_RNA (1)...(19): siRNA sense strand
gaaagauuguggacagcaa

SEQ ID NO: 959818 - RNA, 19 nt, Homo sapiens
  misc_RNA (1)...(19): siRNA sense strand
gcaacuacgugcucuucaa

SEQ ID NO: 959819 - RNA, 19 nt, Homo sapiens
  misc_RNA (1)...(19): siRNA sense strand
gaacaucaccaauaaaucg

SEQ ID NO: 959820 - RNA, 19 nt, Homo sapiens
  misc_RNA (1)...(19): siRNA sense strand
gaaggagaaggcacuagua

SEQ ID NO: 959821 - RNA, 19 nt, Homo sapiens
  misc_RNA (1)...(19): siRNA sense strand
guacaacuuugacaaccuu

SEQ ID NO: 959822 - RNA, 19 nt, Homo sapiens
  misc_RNA (1)...(19): siRNA sense strand
ucgcagggaugcuggagua

SEQ ID NO: 959823 - RNA, 19 nt, Homo sapiens
  misc_RNA (1)...(19): siRNA sense strand
gaggauaccaggaacauca

SEQ ID NO: 959824 - RNA, 19 nt, Homo sapiens
  misc_RNA (1)...(19): siRNA sense strand
gcgaggcaguuuaugaguu

SEQ ID NO: 959825 - RNA, 19 nt, Homo sapiens
  misc_RNA (1)...(19): siRNA sense strand
cggagacgcugaaggagaa

SEQ ID NO: 959826 - RNA, 19 nt, Homo sapiens
  misc_RNA (1)...(19): siRNA sense strand
gcugauguccucacugaaa

SEQ ID NO: 959827 - RNA, 19 nt, Homo sapiens
  misc_RNA (1)...(19): siRNA sense strand
aaaguccucuacaauggua

SEQ ID NO: 959828 - RNA, 19 nt, Homo sapiens
  misc_RNA (1)...(19): siRNA sense strand
caucuucaccgcagucuuu

SEQ ID NO: 959829 - RNA, 19 nt, Homo sapiens
  misc_RNA (1)...(19): siRNA sense strand
gcuauuaccagacagagaa

SEQ ID NO: 959830 - RNA, 19 nt, Homo sapiens
  misc_RNA (1)...(19): siRNA sense strand
acaaaguccucuacaaugg

SEQ ID NO: 959831 - RNA, 19 nt, Homo sapiens
  misc_RNA (1)...(19): siRNA sense strand
ggagaaggcacuaguagag

SEQ ID NO: 959832 - RNA, 19 nt, Homo sapiens
  misc_RNA (1)...(19): siRNA sense strand
agacagagaacgaggauga

SEQ ID NO: 959833 - RNA, 19 nt, Homo sapiens
  misc_RNA (1)...(19): siRNA sense strand
uacaacagcuccagcaaca

SEQ ID NO: 959834 - RNA, 19 nt, Homo sapiens
  misc_RNA (1)...(19): siRNA sense strand
ugugacaccuuccgaaaga

SEQ ID NO: 959835 - RNA, 19 nt, Homo sapiens
  misc_RNA (1)...(19): siRNA sense strand
cgaggcaguuuaugaguuc

SEQ ID NO: 959836 - RNA, 19 nt, Homo sapiens
  misc_RNA (1)...(19): siRNA sense strand
acuacgugcucuucaauuu

SEQ ID NO: 959837 - RNA, 19 nt, Homo sapiens
  misc_RNA (1)...(19): siRNA sense strand
ucaagaaucccuacaacau

SEQ ID NO: 959838 - RNA, 19 nt, Homo sapiens
  misc_RNA (1)...(19): siRNA sense strand
cuucaucuuugccuucuuu

SEQ ID NO: 959839 - RNA, 19 nt, Homo sapiens
  misc_RNA (1)...(19): siRNA sense strand
ucacguugcugcuggauac

SEQ ID NO: 959840 - RNA, 19 nt, Homo sapiens
  misc_RNA (1)...(19): siRNA sense strand
uccugacccucuccaauua

SEQ ID NO: 959841 - RNA, 19 nt, Homo sapiens
  misc_RNA (1)...(19): siRNA sense strand
caggaggacuggaacaaag

SEQ ID NO: 959842 - RNA, 19 nt, Homo sapiens
  misc_RNA (1)...(19): siRNA sense strand
ccaccugugucaacuggaa

SEQ ID NO: 959843 - RNA, 19 nt, Homo sapiens
  misc_RNA (1)...(19): siRNA sense strand
ggcaugcgguccugcagaa

SEQ ID NO: 959844 - RNA, 19 nt, Homo sapiens
  misc_RNA (1)...(19): siRNA sense strand
caucugcugugccuucuuc

SEQ ID NO: 959845 - RNA, 19 nt, Homo sapiens
  misc_RNA (1)...(19): siRNA sense strand
ggagcgcuauuaccagaca

SEQ ID NO: 959846 - RNA, 19 nt, Homo sapiens
  misc_RNA (1)...(19): siRNA sense strand
ugccagaccggaagaauuu

SEQ ID NO: 959847 - RNA, 19 nt, Homo sapiens
  misc_RNA (1)...(19): siRNA sense strand
gcuuguguauggucccuuu

SEQ ID NO: 959848 - RNA, 19 nt, Homo sapiens
  misc_RNA (1)...(19): siRNA sense strand
gcaggccuuugaugacuuc

SEQ ID NO: 959849 - RNA, 19 nt, Homo sapiens
  misc_RNA (1)...(19): siRNA sense strand
ggaagaauuuugacuccuu

SEQ ID NO: 959850 - RNA, 19 nt, Homo sapiens
  misc_RNA (1)...(19): siRNA sense strand
ucuggaggcuaaucuguga

SEQ ID NO: 959851 - RNA, 19 nt, Homo sapiens
  misc_RNA (1)...(19): siRNA sense strand
cuccagcccuugcuugaaa

SEQ ID NO: 959852 - RNA, 19 nt, Homo sapiens
  misc_RNA (1)...(19): siRNA sense strand
acgcugauguccucacuga

SEQ ID NO: 959853 - RNA, 19 nt, Homo sapiens
  misc_RNA (1)...(19): siRNA sense strand
caagaaucccuacaacauc

SEQ ID NO: 959854 - RNA, 19 nt, Homo sapiens
  misc_RNA (1)...(19): siRNA sense strand
caucaagaaucccuacaac

SEQ ID NO: 959855 - RNA, 19 nt, Homo sapiens
  misc_RNA (1)...(19): siRNA sense strand
ccaugucgcugcccaagag

SEQ ID NO: 959856 - RNA, 19 nt, Homo sapiens
  misc_RNA (1)...(19): siRNA sense strand
gggugcagcucuucaaagg

SEQ ID NO: 959857 - RNA, 19 nt, Homo sapiens
  misc_RNA (1)...(19): siRNA sense strand
gcucugugcuggccuucug

SEQ ID NO: 959858 - RNA, 19 nt, Homo sapiens
  misc_RNA (1)...(19): siRNA sense strand
uggcugaaaugacagugaa

SEQ ID NO: 959859 - RNA, 19 nt, Homo sapiens
  misc_RNA (1)...(19): siRNA sense strand
gaagaggagagcucagaag

SEQ ID NO: 959860 - RNA, 19 nt, Homo sapiens
  misc_RNA (1)...(19): siRNA sense strand
ccaacaaguccgaaucaga

SEQ ID NO: 959861 - RNA, 19 nt, Homo sapiens
  misc_RNA (1)...(19): siRNA sense strand
gagcagcccgaggagcuua

SEQ ID NO: 959862 - RNA, 19 nt, Homo sapiens
  misc_RNA (1)...(19): siRNA sense strand
uaccaacgcccuagaaauc

SEQ ID NO: 959863 - RNA, 19 nt, Homo sapiens
  misc_RNA (1)...(19): siRNA sense strand
gaaacccaucggcaacauu

SEQ ID NO: 959864 - RNA, 19 nt, Homo sapiens
  misc_RNA (1)...(19): siRNA sense strand
cucauuccuucuacaauuu

SEQ ID NO: 959865 - RNA, 19 nt, Homo sapiens
  misc_RNA (1)...(19): siRNA sense strand
gucaucaucuuccuuaacu

SEQ ID NO: 959866 - RNA, 19 nt, Homo sapiens
  misc_RNA (1)...(19): siRNA sense strand
caacuacgugcucuucaau

SEQ ID NO: 959867 - RNA, 19 nt, Homo sapiens
  misc_RNA (1)...(19): siRNA sense strand
cuuaugcucuucaucuuca

SEQ ID NO: 959868 - RNA, 19 nt, Homo sapiens
  misc_RNA (1)...(19): siRNA sense strand
aagaaucccuacaacaucu

SEQ ID NO: 959869 - RNA, 19 nt, Homo sapiens
  misc_RNA (1)...(19): siRNA sense strand
ccaugccgacugccacuua

SEQ ID NO: 959870 - RNA, 19 nt, Homo sapiens
  misc_RNA (1)...(19): siRNA sense strand
agacagcgaggcaguuuau

SEQ ID NO: 959871 - RNA, 19 nt, Homo sapiens
  misc_RNA (1)...(19): siRNA sense strand
ggaacaucaccaauaaauc

SEQ ID NO: 959872 - RNA, 19 nt, Homo sapiens
  misc_RNA (1)...(19): siRNA sense strand
gcaugggcaucgaauacca

SEQ ID NO: 959873 - RNA, 19 nt, Homo sapiens
  misc_RNA (1)...(19): siRNA sense strand
ugguguacauccuucguaa

SEQ ID NO: 959874 - RNA, 19 nt, Homo sapiens
  misc_RNA (1)...(19): siRNA sense strand
gccaggagagccaggauga

SEQ ID NO: 959875 - RNA, 19 nt, Homo sapiens
  misc_RNA (1)...(19): siRNA sense strand
ucucuucggcugcaaguuu

SEQ ID NO: 959876 - RNA, 19 nt, Homo sapiens
  misc_RNA (1)...(19): siRNA sense strand
gaugcuuccuaccugagaa

SEQ ID NO: 959877 - RNA, 19 nt, Homo sapiens
  misc_RNA (1)...(19): siRNA sense strand
caucgucacugucuuucag

SEQ ID NO: 959878 - RNA, 19 nt, Homo sapiens
  misc_RNA (1)...(19): siRNA sense strand
ucauguacuuugugaugga

SEQ ID NO: 959879 - RNA, 19 nt, Homo sapiens
  misc_RNA (1)...(19): siRNA sense strand
aaacccaucggcaacauug

SEQ ID NO: 959880 - RNA, 19 nt, Homo sapiens
  misc_RNA (1)...(19): siRNA sense strand
ggccaucgucacugucuuu

SEQ ID NO: 959881 - RNA, 19 nt, Homo sapiens
  misc_RNA (1)...(19): siRNA sense strand
ugaagaccauggacaacgu

SEQ ID NO: 959882 - RNA, 19 nt, Homo sapiens
  misc_RNA (1)...(19): siRNA sense strand
gaaccgaugcuuccuaccu

SEQ ID NO: 959883 - RNA, 19 nt, Homo sapiens
  misc_RNA (1)...(19): siRNA sense strand
ccucuccaauuacaucuuc

SEQ ID NO: 959884 - RNA, 19 nt, Homo sapiens
  misc_RNA (1)...(19): siRNA sense strand
gcauguuggucauccuucu

SEQ ID NO: 959885 - RNA, 19 nt, Homo sapiens
  misc_RNA (1)...(19): siRNA sense strand
cuugcggucuggacuauga

SEQ ID NO: 959886 - RNA, 19 nt, Homo sapiens
  misc_RNA (1)...(19): siRNA sense strand
cgaccgcucagggccauua

SEQ ID NO: 959887 - RNA, 19 nt, Homo sapiens
  misc_RNA (1)...(19): siRNA sense strand
cggcaacauuguagucauc

SEQ ID NO: 959888 - RNA, 19 nt, Homo sapiens
  misc_RNA (1)...(19): siRNA sense strand
cgucuucaccagccucuuu

SEQ ID NO: 959889 - RNA, 19 nt, Homo sapiens
  misc_RNA (1)...(19): siRNA sense strand
gcucgccgaccgugaaaug

SEQ ID NO: 959890 - RNA, 19 nt, Homo sapiens
  misc_RNA (1)...(19): siRNA sense strand
acaagcugcuggagacaca

SEQ ID NO: 959891 - RNA, 19 nt, Homo sapiens
  misc_RNA (1)...(19): siRNA sense strand
caucgugggcuccuucuuc

SEQ ID NO: 959892 - RNA, 19 nt, Homo sapiens
  misc_RNA (1)...(19): siRNA sense strand
acagcgaggcaguuuauga

SEQ ID NO: 959893 - RNA, 19 nt, Homo sapiens
  misc_RNA (1)...(19): siRNA sense strand
gagggcaaccugagcaaag

SEQ ID NO: 959894 - RNA, 19 nt, Homo sapiens
  misc_RNA (1)...(19): siRNA sense strand
aacaaaguccucuacaaug

SEQ ID NO: 959895 - RNA, 19 nt, Homo sapiens
  misc_RNA (1)...(19): siRNA sense strand
gugggcuccuucuucauga

SEQ ID NO: 959896 - RNA, 19 nt, Homo sapiens
  misc_RNA (1)...(19): siRNA sense strand
accaggaacaucaccaaua

SEQ ID NO: 959897 - RNA, 19 nt, Homo sapiens
  misc_RNA (1)...(19): siRNA sense strand
gcaacauuguagucaucug

SEQ ID NO: 959898 - RNA, 19 nt, Homo sapiens
  misc_RNA (1)...(19): siRNA sense strand
ggagagccaggaugaagag

SEQ ID NO: 959899 - RNA, 19 nt, Homo sapiens
  misc_RNA (1)...(19): siRNA sense strand
gcucuucaucuucaucuuc

SEQ ID NO: 959900 - RNA, 19 nt, Homo sapiens
  misc_RNA (1)...(19): siRNA sense strand
ugacaccuuccgaaagauu

SEQ ID NO: 959901 - RNA, 19 nt, Homo sapiens
  misc_RNA (1)...(19): siRNA sense strand
ucagacagcgaggcaguuu

SEQ ID NO: 959902 - RNA, 19 nt, Homo sapiens
  misc_RNA (1)...(19): siRNA sense strand
caccggagacgcugaagga

SEQ ID NO: 959903 - RNA, 19 nt, Homo sapiens
  misc_RNA (1)...(19): siRNA sense strand
ggaaccaguacuacaccaa

SEQ ID NO: 959904 - RNA, 19 nt, Homo sapiens
  misc_RNA (1)...(19): siRNA sense strand
ccguggagaugguggugaa

SEQ ID NO: 959905 - RNA, 19 nt, Homo sapiens
  misc_RNA (1)...(19): siRNA sense strand
aggaacaucaccaauaaau

SEQ ID NO: 959906 - RNA, 19 nt, Homo sapiens
  misc_RNA (1)...(19): siRNA sense strand
ggagaugguggugaagaug

SEQ ID NO: 959907 - RNA, 19 nt, Homo sapiens
  misc_RNA (1)...(19): siRNA sense strand
cagcaugggcaucgaauac

SEQ ID NO: 959908 - RNA, 19 nt, Homo sapiens
  misc_RNA (1)...(19): siRNA sense strand
cuucuacaauuucaucuac

SEQ ID NO: 959909 - RNA, 19 nt, Homo sapiens
  misc_RNA (1)...(19): siRNA sense strand
cuugucaucaucuuccuua

SEQ ID NO: 959910 - RNA, 19 nt, Homo sapiens
  misc_RNA (1)...(19): siRNA sense strand
aagaggagagcucagaaga

SEQ ID NO: 959911 - RNA, 19 nt, Homo sapiens
  misc_RNA (1)...(19): siRNA sense strand
cagggaugcuggaguacuc

SEQ ID NO: 959912 - RNA, 19 nt, Homo sapiens
  misc_RNA (1)...(19): siRNA sense strand
cuacgugcucuucaauuug

SEQ ID NO: 959913 - RNA, 19 nt, Homo sapiens
  misc_RNA (1)...(19): siRNA sense strand
ccaggaacaucaccaauaa

SEQ ID NO: 959914 - RNA, 19 nt, Homo sapiens
  misc_RNA (1)...(19): siRNA sense strand
gaacaaaguccucuacaau

SEQ ID NO: 959915 - RNA, 19 nt, Homo sapiens
  misc_RNA (1)...(19): siRNA sense strand
ggaacaaaguccucuacaa

SEQ ID NO: 959916 - RNA, 19 nt, Homo sapiens
  misc_RNA (1)...(19): siRNA sense strand
gcucauuccuucuacaauu

SEQ ID NO: 959917 - RNA, 19 nt, Homo sapiens
  misc_RNA (1)...(19): siRNA sense strand
gaaagauuguggacagcaa

SEQ ID NO: 959918 - RNA, 19 nt, Homo sapiens
  misc_RNA (1)...(19): siRNA sense strand
gcaacuacgugcucuucaa

SEQ ID NO: 959919 - RNA, 19 nt, Homo sapiens
  misc_RNA (1)...(19): siRNA sense strand
gaacaucaccaauaaaucg

SEQ ID NO: 959920 - RNA, 19 nt, Homo sapiens
  misc_RNA (1)...(19): siRNA sense strand
gaaggagaaggcacuagua

SEQ ID NO: 959921 - RNA, 19 nt, Homo sapiens
  misc_RNA (1)...(19): siRNA sense strand
guacaacuuugacaaccuu

SEQ ID NO: 959922 - RNA, 19 nt, Homo sapiens
  misc_RNA (1)...(19): siRNA sense strand
ucgcagggaugcuggagua

SEQ ID NO: 959923 - RNA, 19 nt, Homo sapiens
  misc_RNA (1)...(19): siRNA sense strand
gaggauaccaggaacauca

SEQ ID NO: 959924 - RNA, 19 nt, Homo sapiens
  misc_RNA (1)...(19): siRNA sense strand
gcgaggcaguuuaugaguu

SEQ ID NO: 959925 - RNA, 19 nt, Homo sapiens
  misc_RNA (1)...(19): siRNA sense strand
cggagacgcugaaggagaa

SEQ ID NO: 959926 - RNA, 19 nt, Homo sapiens
  misc_RNA (1)...(19): siRNA sense strand
gcugauguccucacugaaa

SEQ ID NO: 959927 - RNA, 19 nt, Homo sapiens
  misc_RNA (1)...(19): siRNA sense strand
aaaguccucuacaauggua

SEQ ID NO: 959928 - RNA, 19 nt, Homo sapiens
  misc_RNA (1)...(19): siRNA sense strand
caucuucaccgcagucuuu

SEQ ID NO: 959929 - RNA, 19 nt, Homo sapiens
  misc_RNA (1)...(19): siRNA sense strand
gcuauuaccagacagagaa

SEQ ID NO: 959930 - RNA, 19 nt, Homo sapiens
  misc_RNA (1)...(19): siRNA sense strand
acaaaguccucuacaaugg

SEQ ID NO: 959931 - RNA, 19 nt, Homo sapiens
  misc_RNA (1)...(19): siRNA sense strand
ggagaaggcacuaguagag

SEQ ID NO: 959932 - RNA, 19 nt, Homo sapiens
  misc_RNA (1)...(19): siRNA sense strand
agacagagaacgaggauga

SEQ ID NO: 959933 - RNA, 19 nt, Homo sapiens
  misc_RNA (1)...(19): siRNA sense strand
uacaacagcuccagcaaca

SEQ ID NO: 959934 - RNA, 19 nt, Homo sapiens
  misc_RNA (1)...(19): siRNA sense strand
ugugacaccuuccgaaaga

SEQ ID NO: 959935 - RNA, 19 nt, Homo sapiens
  misc_RNA (1)...(19): siRNA sense strand
cgaggcaguuuaugaguuc

SEQ ID NO: 959936 - RNA, 19 nt, Homo sapiens
  misc_RNA (1)...(19): siRNA sense strand
acuacgugcucuucaauuu

SEQ ID NO: 959937 - RNA, 19 nt, Homo sapiens
  misc_RNA (1)...(19): siRNA sense strand
ucaagaaucccuacaacau

SEQ ID NO: 959938 - RNA, 19 nt, Homo sapiens
  misc_RNA (1)...(19): siRNA sense strand
cuucaucuuugccuucuuu

SEQ ID NO: 959939 - RNA, 19 nt, Homo sapiens
  misc_RNA (1)...(19): siRNA sense strand
ucacguugcugcuggauac

SEQ ID NO: 959940 - RNA, 19 nt, Homo sapiens
  misc_RNA (1)...(19): siRNA sense strand
uccugacccucuccaauua

SEQ ID NO: 959941 - RNA, 19 nt, Homo sapiens
  misc_RNA (1)...(19): siRNA sense strand
caggaggacuggaacaaag

SEQ ID NO: 959942 - RNA, 19 nt, Homo sapiens
  misc_RNA (1)...(19): siRNA sense strand
ccaccugugucaacuggaa

SEQ ID NO: 959943 - RNA, 19 nt, Homo sapiens
  misc_RNA (1)...(19): siRNA sense strand
ggcaugcgguccugcagaa

SEQ ID NO: 959944 - RNA, 19 nt, Homo sapiens
  misc_RNA (1)...(19): siRNA sense strand
caucugcugugccuucuuc

SEQ ID NO: 959945 - RNA, 19 nt, Homo sapiens
  misc_RNA (1)...(19): siRNA sense strand
ggagcgcuauuaccagaca

SEQ ID NO: 959946 - RNA, 19 nt, Homo sapiens
  misc_RNA (1)...(19): siRNA sense strand
ugccagaccggaagaauuu

SEQ ID NO: 959947 - RNA, 19 nt, Homo sapiens
  misc_RNA (1)...(19): siRNA sense strand
gcuuguguauggucccuuu

SEQ ID NO: 959948 - RNA, 19 nt, Homo sapiens
  misc_RNA (1)...(19): siRNA sense strand
gcaggccuuugaugacuuc

SEQ ID NO: 959949 - RNA, 19 nt, Homo sapiens
  misc_RNA (1)...(19): siRNA sense strand
ggaagaauuuugacuccuu

SEQ ID NO: 959950 - RNA, 19 nt, Homo sapiens
  misc_RNA (1)...(19): siRNA sense strand
ucuggaggcuaaucuguga

SEQ ID NO: 959951 - RNA, 19 nt, Homo sapiens
  misc_RNA (1)...(19): siRNA sense strand
cuccagcccuugcuugaaa

SEQ ID NO: 959952 - RNA, 19 nt, Homo sapiens
  misc_RNA (1)...(19): siRNA sense strand
acgcugauguccucacuga

SEQ ID NO: 959953 - RNA, 19 nt, Homo sapiens
  misc_RNA (1)...(19): siRNA sense strand
caagaaucccuacaacauc

SEQ ID NO: 959954 - RNA, 19 nt, Homo sapiens
  misc_RNA (1)...(19): siRNA sense strand
caucaagaaucccuacaac

SEQ ID NO: 959955 - RNA, 19 nt, Homo sapiens
  misc_RNA (1)...(19): siRNA sense strand
ccaugucgcugcccaagag

SEQ ID NO: 959956 - RNA, 19 nt, Homo sapiens
  misc_RNA (1)...(19): siRNA sense strand
gggugcagcucuucaaagg

SEQ ID NO: 959957 - RNA, 19 nt, Homo sapiens
  misc_RNA (1)...(19): siRNA sense strand
gcucugugcuggccuucug

SEQ ID NO: 959958 - RNA, 19 nt, Homo sapiens
  misc_RNA (1)...(19): siRNA sense strand
uggcugaaaugacagugaa

SEQ ID NO: 959959 - RNA, 19 nt, Homo sapiens
  misc_RNA (1)...(19): siRNA sense strand
gaagaggagagcucagaag

SEQ ID NO: 959960 - RNA, 19 nt, Homo sapiens
  misc_RNA (1)...(19): siRNA sense strand
ccaacaaguccgaaucaga

SEQ ID NO: 959961 - RNA, 19 nt, Homo sapiens
  misc_RNA (1)...(19): siRNA sense strand
gagcagcccgaggagcuua

SEQ ID NO: 959962 - RNA, 19 nt, Homo sapiens
  misc_RNA (1)...(19): siRNA sense strand
uaccaacgcccuagaaauc

SEQ ID NO: 959963 - RNA, 19 nt, Homo sapiens
  misc_RNA (1)...(19): siRNA sense strand
gaaacccaucggcaacauu

SEQ ID NO: 959964 - RNA, 19 nt, Homo sapiens
  misc_RNA (1)...(19): siRNA sense strand
cucauuccuucuacaauuu

SEQ ID NO: 959965 - RNA, 19 nt, Homo sapiens
  misc_RNA (1)...(19): siRNA sense strand
gucaucaucuuccuuaacu

SEQ ID NO: 959966 - RNA, 19 nt, Homo sapiens
  misc_RNA (1)...(19): siRNA sense strand
caacuacgugcucuucaau

SEQ ID NO: 959967 - RNA, 19 nt, Homo sapiens
  misc_RNA (1)...(19): siRNA sense strand
cuuaugcucuucaucuuca

SEQ ID NO: 959968 - RNA, 19 nt, Homo sapiens
  misc_RNA (1)...(19): siRNA sense strand
aagaaucccuacaacaucu

SEQ ID NO: 959969 - RNA, 19 nt, Homo sapiens
  misc_RNA (1)...(19): siRNA sense strand
ccaugccgacugccacuua

SEQ ID NO: 959970 - RNA, 19 nt, Homo sapiens
  misc_RNA (1)...(19): siRNA sense strand
agacagcgaggcaguuuau

SEQ ID NO: 959971 - RNA, 19 nt, Homo sapiens
  misc_RNA (1)...(19): siRNA sense strand
ggaacaucaccaauaaauc

SEQ ID NO: 959972 - RNA, 19 nt, Homo sapiens
  misc_RNA (1)...(19): siRNA sense strand
gcaugggcaucgaauacca

SEQ ID NO: 959973 - RNA, 19 nt, Homo sapiens
  misc_RNA (1)...(19): siRNA sense strand
ugguguacauccuucguaa

SEQ ID NO: 959974 - RNA, 19 nt, Homo sapiens
  misc_RNA (1)...(19): siRNA sense strand
gccaggagagccaggauga

SEQ ID NO: 959975 - RNA, 19 nt, Homo sapiens
  misc_RNA (1)...(19): siRNA sense strand
ucucuucggcugcaaguuu

SEQ ID NO: 959976 - RNA, 19 nt, Homo sapiens
  misc_RNA (1)...(19): siRNA sense strand
gaugcuuccuaccugagaa

SEQ ID NO: 959977 - RNA, 19 nt, Homo sapiens
  misc_RNA (1)...(19): siRNA sense strand
caucgucacugucuuucag

SEQ ID NO: 959978 - RNA, 19 nt, Homo sapiens
  misc_RNA (1)...(19): siRNA sense strand
ucauguacuuugugaugga

SEQ ID NO: 959979 - RNA, 19 nt, Homo sapiens
  misc_RNA (1)...(19): siRNA sense strand
aaacccaucggcaacauug

SEQ ID NO: 959980 - RNA, 19 nt, Homo sapiens
  misc_RNA (1)...(19): siRNA sense strand
ggccaucgucacugucuuu

SEQ ID NO: 959981 - RNA, 19 nt, Homo sapiens
  misc_RNA (1)...(19): siRNA sense strand
ugaagaccauggacaacgu

SEQ ID NO: 959982 - RNA, 19 nt, Homo sapiens
  misc_RNA (1)...(19): siRNA sense strand
gaaccgaugcuuccuaccu

SEQ ID NO: 959983 - RNA, 19 nt, Homo sapiens
  misc_RNA (1)...(19): siRNA sense strand
ccucuccaauuacaucuuc

SEQ ID NO: 959984 - RNA, 19 nt, Homo sapiens
  misc_RNA (1)...(19): siRNA sense strand
gcauguuggucauccuucu

SEQ ID NO: 959985 - RNA, 19 nt, Homo sapiens
  misc_RNA (1)...(19): siRNA sense strand
cuugcggucuggacuauga

SEQ ID NO: 959986 - RNA, 19 nt, Homo sapiens
  misc_RNA (1)...(19): siRNA sense strand
cgaccgcucagggccauua

SEQ ID NO: 959987 - RNA, 19 nt, Homo sapiens
  misc_RNA (1)...(19): siRNA sense strand
cggcaacauuguagucauc

SEQ ID NO: 959988 - RNA, 19 nt, Homo sapiens
  misc_RNA (1)...(19): siRNA sense strand
cgucuucaccagccucuuu

SEQ ID NO: 959989 - RNA, 19 nt, Homo sapiens
  misc_RNA (1)...(19): siRNA sense strand
gcucgccgaccgugaaaug

SEQ ID NO: 959990 - RNA, 19 nt, Homo sapiens
  misc_RNA (1)...(19): siRNA sense strand
acaagcugcuggagacaca

SEQ ID NO: 959991 - RNA, 19 nt, Homo sapiens
  misc_RNA (1)...(19): siRNA sense strand
caucgugggcuccuucuuc

SEQ ID NO: 959992 - RNA, 19 nt, Homo sapiens
  misc_RNA (1)...(19): siRNA sense strand
acagcgaggcaguuuauga

SEQ ID NO: 959993 - RNA, 19 nt, Homo sapiens
  misc_RNA (1)...(19): siRNA sense strand
gagggcaaccugagcaaag

SEQ ID NO: 959994 - RNA, 19 nt, Homo sapiens
  misc_RNA (1)...(19): siRNA sense strand
aacaaaguccucuacaaug

SEQ ID NO: 959995 - RNA, 19 nt, Homo sapiens
  misc_RNA (1)...(19): siRNA sense strand
gugggcuccuucuucauga

SEQ ID NO: 959996 - RNA, 19 nt, Homo sapiens
  misc_RNA (1)...(19): siRNA sense strand
accaggaacaucaccaaua

SEQ ID NO: 959997 - RNA, 19 nt, Homo sapiens
  misc_RNA (1)...(19): siRNA sense strand
gcaacauuguagucaucug

SEQ ID NO: 959998 - RNA, 19 nt, Homo sapiens
  misc_RNA (1)...(19): siRNA sense strand
ggagagccaggaugaagag

SEQ ID NO: 959999 - RNA, 19 nt, Homo sapiens
  misc_RNA (1)...(19): siRNA sense strand
gcucuucaucuucaucuuc

SEQ ID NO: 960000 - RNA, 19 nt, Homo sapiens
  misc_RNA (1)...(19): siRNA sense strand
ugacaccuuccgaaagauu

SEQ ID NO: 960001 - RNA, 19 nt, Homo sapiens
  misc_RNA (1)...(19): siRNA sense strand
ucagacagcgaggcaguuu

SEQ ID NO: 960002 - RNA, 19 nt, Homo sapiens
  misc_RNA (1)...(19): siRNA sense strand
caccggagacgcugaagga

SEQ ID NO: 960003 - RNA, 19 nt, Homo sapiens
  misc_RNA (1)...(19): siRNA sense strand
ggaaccaguacuacaccaa

SEQ ID NO: 960004 - RNA, 19 nt, Homo sapiens
  misc_RNA (1)...(19): siRNA sense strand
ccguggagaugguggugaa

SEQ ID NO: 960005 - RNA, 19 nt, Homo sapiens
  misc_RNA (1)...(19): siRNA sense strand
aggaacaucaccaauaaau

SEQ ID NO: 960006 - RNA, 19 nt, Homo sapiens
  misc_RNA (1)...(19): siRNA sense strand
ggagaugguggugaagaug

SEQ ID NO: 960007 - RNA, 19 nt, Homo sapiens
  misc_RNA (1)...(19): siRNA sense strand
cagcaugggcaucgaauac

SEQ ID NO: 960008 - RNA, 19 nt, Homo sapiens
  misc_RNA (1)...(19): siRNA sense strand
cuucuacaauuucaucuac

SEQ ID NO: 960009 - RNA, 19 nt, Homo sapiens
  misc_RNA (1)...(19): siRNA sense strand
cuugucaucaucuuccuua

SEQ ID NO: 960010 - RNA, 19 nt, Homo sapiens
  misc_RNA (1)...(19): siRNA sense strand
aagaggagagcucagaaga

SEQ ID NO: 960011 - RNA, 19 nt, Homo sapiens
  misc_RNA (1)...(19): siRNA sense strand
cagggaugcuggaguacuc

SEQ ID NO: 960012 - RNA, 19 nt, Homo sapiens
  misc_RNA (1)...(19): siRNA sense strand
cuacgugcucuucaauuug

SEQ ID NO: 960013 - RNA, 19 nt, Homo sapiens
  misc_RNA (1)...(19): siRNA sense strand
ggacaagaauccuucaaga

SEQ ID NO: 960014 - RNA, 19 nt, Homo sapiens
  misc_RNA (1)...(19): siRNA sense strand
gagcaccaguuaucuuuaa

SEQ ID NO: 960015 - RNA, 19 nt, Homo sapiens
  misc_RNA (1)...(19): siRNA sense strand
ggaggaagaugcagaguca

SEQ ID NO: 960016 - RNA, 19 nt, Homo sapiens
  misc_RNA (1)...(19): siRNA sense strand
gaugugaaacucuuaagua

SEQ ID NO: 960017 - RNA, 19 nt, Homo sapiens
  misc_RNA (1)...(19): siRNA sense strand
aagcagaggcaaugaauua

SEQ ID NO: 960018 - RNA, 19 nt, Homo sapiens
  misc_RNA (1)...(19): siRNA sense strand
gcacaaaagucaaaucaga

SEQ ID NO: 960019 - RNA, 19 nt, Homo sapiens
  misc_RNA (1)...(19): siRNA sense strand
cgaaggcaguccaauuaaa

SEQ ID NO: 960020 - RNA, 19 nt, Homo sapiens
  misc_RNA (1)...(19): siRNA sense strand
ccaagaggcuauucaagau

SEQ ID NO: 960021 - RNA, 19 nt, Homo sapiens
  misc_RNA (1)...(19): siRNA sense strand
ugaagaggaugaugaugaa

SEQ ID NO: 960022 - RNA, 19 nt, Homo sapiens
  misc_RNA (1)...(19): siRNA sense strand
guagcaagguuccacagaa

SEQ ID NO: 960023 - RNA, 19 nt, Homo sapiens
  misc_RNA (1)...(19): siRNA sense strand
acaagaauccuucaagaaa

SEQ ID NO: 960024 - RNA, 19 nt, Homo sapiens
  misc_RNA (1)...(19): siRNA sense strand
ccaguggucuuaagguuga

SEQ ID NO: 960025 - RNA, 19 nt, Homo sapiens
  misc_RNA (1)...(19): siRNA sense strand
aagaauugcuuccggauga

SEQ ID NO: 960026 - RNA, 19 nt, Homo sapiens
  misc_RNA (1)...(19): siRNA sense strand
uaaaggccgacaaagauua

SEQ ID NO: 960027 - RNA, 19 nt, Homo sapiens
  misc_RNA (1)...(19): siRNA sense strand
uaagguggauaaugaugaa

SEQ ID NO: 960028 - RNA, 19 nt, Homo sapiens
  misc_RNA (1)...(19): siRNA sense strand
uagcaagguuccacagaaa

SEQ ID NO: 960029 - RNA, 19 nt, Homo sapiens
  misc_RNA (1)...(19): siRNA sense strand
uacgaaggcaguccaauua

SEQ ID NO: 960030 - RNA, 19 nt, Homo sapiens
  misc_RNA (1)...(19): siRNA sense strand
caaaguggaagccaaauuc

SEQ ID NO: 960031 - RNA, 19 nt, Homo sapiens
  misc_RNA (1)...(19): siRNA sense strand
gacaagaauccuucaagaa

SEQ ID NO: 960032 - RNA, 19 nt, Homo sapiens
  misc_RNA (1)...(19): siRNA sense strand
caagaauccuucaagaaac

SEQ ID NO: 960033 - RNA, 19 nt, Homo sapiens
  misc_RNA (1)...(19): siRNA sense strand
gaaggcaguccaauuaaag

SEQ ID NO: 960034 - RNA, 19 nt, Homo sapiens
  misc_RNA (1)...(19): siRNA sense strand
acuuuaagguggauaauga

SEQ ID NO: 960035 - RNA, 19 nt, Homo sapiens
  misc_RNA (1)...(19): siRNA sense strand
ggaaaagacucaaaaccau

SEQ ID NO: 960036 - RNA, 19 nt, Homo sapiens
  misc_RNA (1)...(19): siRNA sense strand
uuuaagaacggucaguuua

SEQ ID NO: 960037 - RNA, 19 nt, Homo sapiens
  misc_RNA (1)...(19): siRNA sense strand
ugaugaagaugaugaugau

SEQ ID NO: 960038 - RNA, 19 nt, Homo sapiens
  misc_RNA (1)...(19): siRNA sense strand
ugaugaagaugaugacgau

SEQ ID NO: 960039 - RNA, 19 nt, Homo sapiens
  misc_RNA (1)...(19): siRNA sense strand
guagaagacauuaaagcaa

SEQ ID NO: 960040 - RNA, 19 nt, Homo sapiens
  misc_RNA (1)...(19): siRNA sense strand
ugaugacgaugaugaugaa

SEQ ID NO: 960041 - RNA, 19 nt, Homo sapiens
  misc_RNA (1)...(19): siRNA sense strand
ggaugaugaugaagaugau

SEQ ID NO: 960042 - RNA, 19 nt, Homo sapiens
  misc_RNA (1)...(19): siRNA sense strand
ucagggccagugcauauua

SEQ ID NO: 960043 - RNA, 19 nt, Homo sapiens
  misc_RNA (1)...(19): siRNA sense strand
ugaagaugaugaugaugau

SEQ ID NO: 960044 - RNA, 19 nt, Homo sapiens
  misc_RNA (1)...(19): siRNA sense strand
cuuaguagcuguggaggaa

SEQ ID NO: 960045 - RNA, 19 nt, Homo sapiens
  misc_RNA (1)...(19): siRNA sense strand
aaggaugaguugcacauug

SEQ ID NO: 960046 - RNA, 19 nt, Homo sapiens
  misc_RNA (1)...(19): siRNA sense strand
cagaggcaaugaauuacga

SEQ ID NO: 960047 - RNA, 19 nt, Homo sapiens
  misc_RNA (1)...(19): siRNA sense strand
gaagcagaggcaaugaauu

SEQ ID NO: 960048 - RNA, 19 nt, Homo sapiens
  misc_RNA (1)...(19): siRNA sense strand
aaaaggaccuaguucugua

SEQ ID NO: 960049 - RNA, 19 nt, Homo sapiens
  misc_RNA (1)...(19): siRNA sense strand
guucagggccagugcauau

SEQ ID NO: 960050 - RNA, 19 nt, Homo sapiens
  misc_RNA (1)...(19): siRNA sense strand
gugguucucuucccaaagu

SEQ ID NO: 960051 - RNA, 19 nt, Homo sapiens
  misc_RNA (1)...(19): siRNA sense strand
ugaagaugaugacgaugau

SEQ ID NO: 960052 - RNA, 19 nt, Homo sapiens
  misc_RNA (1)...(19): siRNA sense strand
ggaggaugugaaacucuua

SEQ ID NO: 960053 - RNA, 19 nt, Homo sapiens
  misc_RNA (1)...(19): siRNA sense strand
ggaggaggaugugaaacuc

SEQ ID NO: 960054 - RNA, 19 nt, Homo sapiens
  misc_RNA (1)...(19): siRNA sense strand
aagauucgauggacaugga

SEQ ID NO: 960055 - RNA, 19 nt, Homo sapiens
  misc_RNA (1)...(19): siRNA sense strand
aagaauccuucaagaaaca

SEQ ID NO: 960056 - RNA, 19 nt, Homo sapiens
  misc_RNA (1)...(19): siRNA sense strand
ugacgaugaugaugaagag

SEQ ID NO: 960057 - RNA, 19 nt, Homo sapiens
  misc_RNA (1)...(19): siRNA sense strand
uaagaacggucaguuuagg

SEQ ID NO: 960058 - RNA, 19 nt, Homo sapiens
  misc_RNA (1)...(19): siRNA sense strand
ccaaaguggaagccaaauu

SEQ ID NO: 960059 - RNA, 19 nt, Homo sapiens
  misc_RNA (1)...(19): siRNA sense strand
gaacuaaaggccgacaaag

SEQ ID NO: 960060 - RNA, 19 nt, Homo sapiens
  misc_RNA (1)...(19): siRNA sense strand
ggaagaugcagagucagaa

SEQ ID NO: 960061 - RNA, 19 nt, Homo sapiens
  misc_RNA (1)...(19): siRNA sense strand
uuacgaaggcaguccaauu

SEQ ID NO: 960062 - RNA, 19 nt, Homo sapiens
  misc_RNA (1)...(19): siRNA sense strand
gaggaugugaaacucuuaa

SEQ ID NO: 960063 - RNA, 19 nt, Homo sapiens
  misc_RNA (1)...(19): siRNA sense strand
agucaaaucagaauggaaa

SEQ ID NO: 960064 - RNA, 19 nt, Homo sapiens
  misc_RNA (1)...(19): siRNA sense strand
cuaaaggccgacaaagauu

SEQ ID NO: 960065 - RNA, 19 nt, Homo sapiens
  misc_RNA (1)...(19): siRNA sense strand
ggcaguccaauuaaaguaa

SEQ ID NO: 960066 - RNA, 19 nt, Homo sapiens
  misc_RNA (1)...(19): siRNA sense strand
ggaagccaaauucaucaau

SEQ ID NO: 960067 - RNA, 19 nt, Homo sapiens
  misc_RNA (1)...(19): siRNA sense strand
caucaacaccaagaucaaa

SEQ ID NO: 960068 - RNA, 19 nt, Homo sapiens
  misc_RNA (1)...(19): siRNA sense strand
gcaguccaauuaaaguaac

SEQ ID NO: 960069 - RNA, 19 nt, Homo sapiens
  misc_RNA (1)...(19): siRNA sense strand
aggaugaguugcacauugu

SEQ ID NO: 960070 - RNA, 19 nt, Homo sapiens
  misc_RNA (1)...(19): siRNA sense strand
agaggaugaugaugaagau

SEQ ID NO: 960071 - RNA, 19 nt, Homo sapiens
  misc_RNA (1)...(19): siRNA sense strand
guaacacuggcaacuuuga

SEQ ID NO: 960072 - RNA, 19 nt, Homo sapiens
  misc_RNA (1)...(19): siRNA sense strand
ccggaugacugaccaagag

SEQ ID NO: 960073 - RNA, 19 nt, Homo sapiens
  misc_RNA (1)...(19): siRNA sense strand
acuaaaggccgacaaagau

SEQ ID NO: 960074 - RNA, 19 nt, Homo sapiens
  misc_RNA (1)...(19): siRNA sense strand
gaagaggaggaggauguga

SEQ ID NO: 960075 - RNA, 19 nt, Homo sapiens
  misc_RNA (1)...(19): siRNA sense strand
caaaggaugaguugcacau

SEQ ID NO: 960076 - RNA, 19 nt, Homo sapiens
  misc_RNA (1)...(19): siRNA sense strand
aaagucaaaucagaaugga

SEQ ID NO: 960077 - RNA, 19 nt, Homo sapiens
  misc_RNA (1)...(19): siRNA sense strand
aagaugaugaugaugauga

SEQ ID NO: 960078 - RNA, 19 nt, Homo sapiens
  misc_RNA (1)...(19): siRNA sense strand
gaagaugcagagucagaag

SEQ ID NO: 960079 - RNA, 19 nt, Homo sapiens
  misc_RNA (1)...(19): siRNA sense strand
ugaacuaaaggccgacaaa

SEQ ID NO: 960080 - RNA, 19 nt, Homo sapiens
  misc_RNA (1)...(19): siRNA sense strand
guggaggaagucucuuuaa

SEQ ID NO: 960081 - RNA, 19 nt, Homo sapiens
  misc_RNA (1)...(19): siRNA sense strand
gaugaguugcacauuguug

SEQ ID NO: 960082 - RNA, 19 nt, Homo sapiens
  misc_RNA (1)...(19): siRNA sense strand
gaaaaugagcaccaguuau

SEQ ID NO: 960083 - RNA, 19 nt, Homo sapiens
  misc_RNA (1)...(19): siRNA sense strand
gaugaggaagcugaagaaa

SEQ ID NO: 960084 - RNA, 19 nt, Homo sapiens
  misc_RNA (1)...(19): siRNA sense strand
uaguagcuguggaggaaga

SEQ ID NO: 960085 - RNA, 19 nt, Homo sapiens
  misc_RNA (1)...(19): siRNA sense strand
ugaagcagaggcaaugaau

SEQ ID NO: 960086 - RNA, 19 nt, Homo sapiens
  misc_RNA (1)...(19): siRNA sense strand
uaacacuggcaacuuugaa

SEQ ID NO: 960087 - RNA, 19 nt, Homo sapiens
  misc_RNA (1)...(19): siRNA sense strand
ugacugaccaagaggcuau

SEQ ID NO: 960088 - RNA, 19 nt, Homo sapiens
  misc_RNA (1)...(19): siRNA sense strand
aaaccaucaucaacaccaa

SEQ ID NO: 960089 - RNA, 19 nt, Homo sapiens
  misc_RNA (1)...(19): siRNA sense strand
gaauggaaaagacucaaaa

SEQ ID NO: 960090 - RNA, 19 nt, Homo sapiens
  misc_RNA (1)...(19): siRNA sense strand
aagaugaugacgaugauga

SEQ ID NO: 960091 - RNA, 19 nt, Homo sapiens
  misc_RNA (1)...(19): siRNA sense strand
gaugcagagucagaagaug

SEQ ID NO: 960092 - RNA, 19 nt, Homo sapiens
  misc_RNA (1)...(19): siRNA sense strand
cgaugaugaugaagaggau

SEQ ID NO: 960093 - RNA, 19 nt, Homo sapiens
  misc_RNA (1)...(19): siRNA sense strand
ugagcaccaguuaucuuua

SEQ ID NO: 960094 - RNA, 19 nt, Homo sapiens
  misc_RNA (1)...(19): siRNA sense strand
aagaggcuauucaagaucu

SEQ ID NO: 960095 - RNA, 19 nt, Homo sapiens
  misc_RNA (1)...(19): siRNA sense strand
accaagaggcuauucaaga

SEQ ID NO: 960096 - RNA, 19 nt, Homo sapiens
  misc_RNA (1)...(19): siRNA sense strand
ugaccaagaggcuauucaa

SEQ ID NO: 960097 - RNA, 19 nt, Homo sapiens
  misc_RNA (1)...(19): siRNA sense strand
augaagaggaugaugauga

SEQ ID NO: 960098 - RNA, 19 nt, Homo sapiens
  misc_RNA (1)...(19): siRNA sense strand
ggaugugaaacucuuaagu

SEQ ID NO: 960099 - RNA, 19 nt, Homo sapiens
  misc_RNA (1)...(19): siRNA sense strand
ugaaaaugagcaccaguua

SEQ ID NO: 960100 - RNA, 19 nt, Homo sapiens
  misc_RNA (1)...(19): siRNA sense strand
gggcuggugcaaaggauga

SEQ ID NO: 960101 - RNA, 19 nt, Homo sapiens
  misc_RNA (1)...(19): siRNA sense strand
uuaaguauaucuggaaagc

SEQ ID NO: 960102 - RNA, 19 nt, Homo sapiens
  misc_RNA (1)...(19): siRNA sense strand
aaaacuugcugcugaugaa

SEQ ID NO: 960103 - RNA, 19 nt, Homo sapiens
  misc_RNA (1)...(19): siRNA sense strand
acgagauacuccagccaaa

SEQ ID NO: 960104 - RNA, 19 nt, Homo sapiens
  misc_RNA (1)...(19): siRNA sense strand
gaagaugaugaugaugaug

SEQ ID NO: 960105 - RNA, 19 nt, Homo sapiens
  misc_RNA (1)...(19): siRNA sense strand
gaacuaucuuuucgguugu

SEQ ID NO: 960106 - RNA, 19 nt, Homo sapiens
  misc_RNA (1)...(19): siRNA sense strand
gaugaugacgaugaugaug

SEQ ID NO: 960107 - RNA, 19 nt, Homo sapiens
  misc_RNA (1)...(19): siRNA sense strand
gguagcaagguuccacaga

SEQ ID NO: 960108 - RNA, 19 nt, Homo sapiens
  misc_RNA (1)...(19): siRNA sense strand
aggaggaugugaaacucuu

SEQ ID NO: 960109 - RNA, 19 nt, Homo sapiens
  misc_RNA (1)...(19): siRNA sense strand
agaggaggaggaugugaaa

SEQ ID NO: 960110 - RNA, 19 nt, Homo sapiens
  misc_RNA (1)...(19): siRNA sense strand
uuaagguggauaaugauga

SEQ ID NO: 960111 - RNA, 19 nt, Homo sapiens
  misc_RNA (1)...(19): siRNA sense strand
aaugcaagcaaguauagaa

SEQ ID NO: 960112 - RNA, 19 nt, Homo sapiens
  misc_RNA (1)...(19): siRNA sense strand
caagaggcuauucaagauc

SEQ ID NO: 960113 - RNA, 19 nt, Homo sapiens
  misc_RNA (1)...(19): siRNA sense strand
gaagacagccaagcucaua

SEQ ID NO: 960114 - RNA, 19 nt, Homo sapiens
  misc_RNA (1)...(19): siRNA sense strand
guacucaacugacaaucaa

SEQ ID NO: 960115 - RNA, 19 nt, Homo sapiens
  misc_RNA (1)...(19): siRNA sense strand
caaagaaccugcacuuggu

SEQ ID NO: 960116 - RNA, 19 nt, Homo sapiens
  misc_RNA (1)...(19): siRNA sense strand
gauacucucuccaucagaa

SEQ ID NO: 960117 - RNA, 19 nt, Homo sapiens
  misc_RNA (1)...(19): siRNA sense strand
gcacugauaagaaucuauu

SEQ ID NO: 960118 - RNA, 19 nt, Homo sapiens
  misc_RNA (1)...(19): siRNA sense strand
cagaagagaugagugaaau

SEQ ID NO: 960119 - RNA, 19 nt, Homo sapiens
  misc_RNA (1)...(19): siRNA sense strand
ucaaguuccuuccaaagaa

SEQ ID NO: 960120 - RNA, 19 nt, Homo sapiens
  misc_RNA (1)...(19): siRNA sense strand
gacuaucaguucuguuauu

SEQ ID NO: 960121 - RNA, 19 nt, Homo sapiens
  misc_RNA (1)...(19): siRNA sense strand
ggagaagauucccuugauc

SEQ ID NO: 960122 - RNA, 19 nt, Homo sapiens
  misc_RNA (1)...(19): siRNA sense strand
uagaaugccugaagcugaa

SEQ ID NO: 960123 - RNA, 19 nt, Homo sapiens
  misc_RNA (1)...(19): siRNA sense strand
cagccaagcucauaaucga

SEQ ID NO: 960124 - RNA, 19 nt, Homo sapiens
  misc_RNA (1)...(19): siRNA sense strand
guuaacauguuugugauug

SEQ ID NO: 960125 - RNA, 19 nt, Homo sapiens
  misc_RNA (1)...(19): siRNA sense strand
ucagugagaaguccagaua

SEQ ID NO: 960126 - RNA, 19 nt, Homo sapiens
  misc_RNA (1)...(19): siRNA sense strand
gaugaccuguccauagaug

SEQ ID NO: 960127 - RNA, 19 nt, Homo sapiens
  misc_RNA (1)...(19): siRNA sense strand
aagacuaucaguucuguua

SEQ ID NO: 960128 - RNA, 19 nt, Homo sapiens
  misc_RNA (1)...(19): siRNA sense strand
ccaagucaauugccaacug

SEQ ID NO: 960129 - RNA, 19 nt, Homo sapiens
  misc_RNA (1)...(19): siRNA sense strand
gaacauggacaagaucaag

SEQ ID NO: 960130 - RNA, 19 nt, Homo sapiens
  misc_RNA (1)...(19): siRNA sense strand
acacagacaacaacaagaa

SEQ ID NO: 960131 - RNA, 19 nt, Homo sapiens
  misc_RNA (1)...(19): siRNA sense strand
ggaaagacccaggaagaca

SEQ ID NO: 960132 - RNA, 19 nt, Homo sapiens
  misc_RNA (1)...(19): siRNA sense strand
gcacaacacagacaacaac

SEQ ID NO: 960133 - RNA, 19 nt, Homo sapiens
  misc_RNA (1)...(19): siRNA sense strand
caacacagacaacaacaag

SEQ ID NO: 960134 - RNA, 19 nt, Homo sapiens
  misc_RNA (1)...(19): siRNA sense strand
gcagacauguuggccaagu

SEQ ID NO: 960135 - RNA, 19 nt, Homo sapiens
  misc_RNA (1)...(19): siRNA sense strand
uuaagaggauacaccaguu

SEQ ID NO: 960136 - RNA, 19 nt, Homo sapiens
  misc_RNA (1)...(19): siRNA sense strand
gguguaugcugcuuacuac

SEQ ID NO: 960137 - RNA, 19 nt, Homo sapiens
  misc_RNA (1)...(19): siRNA sense strand
uggagaagauucccuugau

SEQ ID NO: 960138 - RNA, 19 nt, Homo sapiens
  misc_RNA (1)...(19): siRNA sense strand
agagaugagugaaaugcuu

SEQ ID NO: 960139 - RNA, 19 nt, Homo sapiens
  misc_RNA (1)...(19): siRNA sense strand
ccaugaagacuaucaguuc

SEQ ID NO: 960140 - RNA, 19 nt, Homo sapiens
  misc_RNA (1)...(19): siRNA sense strand
gugguuaacauguuuguga

SEQ ID NO: 960141 - RNA, 19 nt, Homo sapiens
  misc_RNA (1)...(19): siRNA sense strand
guacaacggcucaaagaac

SEQ ID NO: 960142 - RNA, 19 nt, Homo sapiens
  misc_RNA (1)...(19): siRNA sense strand
gaagagaugagugaaaugc

SEQ ID NO: 960143 - RNA, 19 nt, Homo sapiens
  misc_RNA (1)...(19): siRNA sense strand
ggaaaucgucagugagaag

SEQ ID NO: 960144 - RNA, 19 nt, Homo sapiens
  misc_RNA (1)...(19): siRNA sense strand
gcaugcaaguccgcuaugu

SEQ ID NO: 960145 - RNA, 19 nt, Homo sapiens
  misc_RNA (1)...(19): siRNA sense strand
caacaagaagcuggacuga

SEQ ID NO: 960146 - RNA, 19 nt, Homo sapiens
  misc_RNA (1)...(19): siRNA sense strand
uaagaggauacaccaguuu

SEQ ID NO: 960147 - RNA, 19 nt, Homo sapiens
  misc_RNA (1)...(19): siRNA sense strand
ugaagacuaucaguucugu

SEQ ID NO: 960148 - RNA, 19 nt, Homo sapiens
  misc_RNA (1)...(19): siRNA sense strand
ccagaagagaugagugaaa

SEQ ID NO: 960149 - RNA, 19 nt, Homo sapiens
  misc_RNA (1)...(19): siRNA sense strand
ccgcaucccucauaacaac

SEQ ID NO: 960150 - RNA, 19 nt, Homo sapiens
  misc_RNA (1)...(19): siRNA sense strand
caucagaacauggacaaga

SEQ ID NO: 960151 - RNA, 19 nt, Homo sapiens
  misc_RNA (1)...(19): siRNA sense strand
ccagauacucucuccauca

SEQ ID NO: 960152 - RNA, 19 nt, Homo sapiens
  misc_RNA (1)...(19): siRNA sense strand
ggguguaugcugcuuacua

SEQ ID NO: 960153 - RNA, 19 nt, Homo sapiens
  misc_RNA (1)...(19): siRNA sense strand
uggcauuuguggcuucauu

SEQ ID NO: 960154 - RNA, 19 nt, Homo sapiens
  misc_RNA (1)...(19): siRNA sense strand
cuucagcucugcuccuaug

SEQ ID NO: 960155 - RNA, 19 nt, Homo sapiens
  misc_RNA (1)...(19): siRNA sense strand
ggacauugggcaugcaagu

SEQ ID NO: 960156 - RNA, 19 nt, Homo sapiens
  misc_RNA (1)...(19): siRNA sense strand
caugaagacuaucaguucu

SEQ ID NO: 960157 - RNA, 19 nt, Homo sapiens
  misc_RNA (1)...(19): siRNA sense strand
cggauucucugcccacaag

SEQ ID NO: 960158 - RNA, 19 nt, Homo sapiens
  misc_RNA (1)...(19): siRNA sense strand
cagauacucucuccaucag

SEQ ID NO: 960159 - RNA, 19 nt, Homo sapiens
  misc_RNA (1)...(19): siRNA sense strand
uaacaacuucuaccgaaag

SEQ ID NO: 960160 - RNA, 19 nt, Homo sapiens
  misc_RNA (1)...(19): siRNA sense strand
auaacaacuucuaccgaaa

SEQ ID NO: 960161 - RNA, 19 nt, Homo sapiens
  misc_RNA (1)...(19): siRNA sense strand
uacaacggcucaaagaacu

SEQ ID NO: 960162 - RNA, 19 nt, Homo sapiens
  misc_RNA (1)...(19): siRNA sense strand
ggaaaacugugggcacuca

SEQ ID NO: 960163 - RNA, 19 nt, Homo sapiens
  misc_RNA (1)...(19): siRNA sense strand
gaaaucgucagugagaagu

SEQ ID NO: 960164 - RNA, 19 nt, Homo sapiens
  misc_RNA (1)...(19): siRNA sense strand
gucaaguuccuuccaaaga

SEQ ID NO: 960165 - RNA, 19 nt, Homo sapiens
  misc_RNA (1)...(19): siRNA sense strand
gcuccuauguccgcuucaa

SEQ ID NO: 960166 - RNA, 19 nt, Homo sapiens
  misc_RNA (1)...(19): siRNA sense strand
guggucaaguuccuuccaa

SEQ ID NO: 960167 - RNA, 19 nt, Homo sapiens
  misc_RNA (1)...(19): siRNA sense strand
gcauuuguggcuucauuuc

SEQ ID NO: 960168 - RNA, 19 nt, Homo sapiens
  misc_RNA (1)...(19): siRNA sense strand
cagccugugucucgugugu

SEQ ID NO: 960169 - RNA, 19 nt, Homo sapiens
  misc_RNA (1)...(19): siRNA sense strand
ucaacugacaaucaauuug

SEQ ID NO: 960170 - RNA, 19 nt, Homo sapiens
  misc_RNA (1)...(19): siRNA sense strand
acuaucaguucuguuauuc

SEQ ID NO: 960171 - RNA, 19 nt, Homo sapiens
  misc_RNA (1)...(19): siRNA sense strand
cagcacugauaagaaucua

SEQ ID NO: 960172 - RNA, 19 nt, Homo sapiens
  misc_RNA (1)...(19): siRNA sense strand
ggaugucuccagccugugu

SEQ ID NO: 960173 - RNA, 19 nt, Homo sapiens
  misc_RNA (1)...(19): siRNA sense strand
guggagaagauucccuuga

SEQ ID NO: 960174 - RNA, 19 nt, Homo sapiens
  misc_RNA (1)...(19): siRNA sense strand
ggaagacagccaagcucau

SEQ ID NO: 960175 - RNA, 19 nt, Homo sapiens
  misc_RNA (1)...(19): siRNA sense strand
gggcaugcaaguccgcuau

SEQ ID NO: 960176 - RNA, 19 nt, Homo sapiens
  misc_RNA (1)...(19): siRNA sense strand
cauguuggccaagucaauu

SEQ ID NO: 960177 - RNA, 19 nt, Homo sapiens
  misc_RNA (1)...(19): siRNA sense strand
ucccaauccuggcauuugu

SEQ ID NO: 960178 - RNA, 19 nt, Homo sapiens
  misc_RNA (1)...(19): siRNA sense strand
caaacccuccauccucaug

SEQ ID NO: 960179 - RNA, 19 nt, Homo sapiens
  misc_RNA (1)...(19): siRNA sense strand
ggucaaguuccuuccaaag

SEQ ID NO: 960180 - RNA, 19 nt, Homo sapiens
  misc_RNA (1)...(19): siRNA sense strand
gguuaacauguuugugauu

SEQ ID NO: 960181 - RNA, 19 nt, Homo sapiens
  misc_RNA (1)...(19): siRNA sense strand
ugagaaguccagauacucu

SEQ ID NO: 960182 - RNA, 19 nt, Homo sapiens
  misc_RNA (1)...(19): siRNA sense strand
gguacuggcggaggacauu

SEQ ID NO: 960183 - RNA, 19 nt, Homo sapiens
  misc_RNA (1)...(19): siRNA sense strand
uaucaguucuguuauuccu

SEQ ID NO: 960184 - RNA, 19 nt, Homo sapiens
  misc_RNA (1)...(19): siRNA sense strand
uccgcuauguucaccauga

SEQ ID NO: 960185 - RNA, 19 nt, Homo sapiens
  misc_RNA (1)...(19): siRNA sense strand
agacagccaagcucauaau

SEQ ID NO: 960186 - RNA, 19 nt, Homo sapiens
  misc_RNA (1)...(19): siRNA sense strand
gcacgcuggccaucccaau

SEQ ID NO: 960187 - RNA, 19 nt, Homo sapiens
  misc_RNA (1)...(19): siRNA sense strand
ggcauuuguggcuucauuu

SEQ ID NO: 960188 - RNA, 19 nt, Homo sapiens
  misc_RNA (1)...(19): siRNA sense strand
ccaagcucauaaucgacuu

SEQ ID NO: 960189 - RNA, 19 nt, Homo sapiens
  misc_RNA (1)...(19): siRNA sense strand
acucaacugacaaucaauu

SEQ ID NO: 960190 - RNA, 19 nt, Homo sapiens
  misc_RNA (1)...(19): siRNA sense strand
ggaauuauccaccauuuaa

SEQ ID NO: 960191 - RNA, 19 nt, Homo sapiens
  misc_RNA (1)...(19): siRNA sense strand
caagaaagaugcaucaauc

SEQ ID NO: 960192 - RNA, 19 nt, Homo sapiens
  misc_RNA (1)...(19): siRNA sense strand
gagaguuugucaccaguua

SEQ ID NO: 960193 - RNA, 19 nt, Homo sapiens
  misc_RNA (1)...(19): siRNA sense strand
agucauauaugcacaguua

SEQ ID NO: 960194 - RNA, 19 nt, Homo sapiens
  misc_RNA (1)...(19): siRNA sense strand
aaguguaccuugggaauua

SEQ ID NO: 960195 - RNA, 19 nt, Homo sapiens
  misc_RNA (1)...(19): siRNA sense strand
gcaccuauaucugugaugu

SEQ ID NO: 960196 - RNA, 19 nt, Homo sapiens
  misc_RNA (1)...(19): siRNA sense strand
gauucuggcuguccucuau

SEQ ID NO: 960197 - RNA, 19 nt, Homo sapiens
  misc_RNA (1)...(19): siRNA sense strand
aaagagaauuugccugugu

SEQ ID NO: 960198 - RNA, 19 nt, Homo sapiens
  misc_RNA (1)...(19): siRNA sense strand
uaucagccuuggaaguaua

SEQ ID NO: 960199 - RNA, 19 nt, Homo sapiens
  misc_RNA (1)...(19): siRNA sense strand
aaagaugcaucaaucaaca

SEQ ID NO: 960200 - RNA, 19 nt, Homo sapiens
  misc_RNA (1)...(19): siRNA sense strand
cuugacagcuggaguauca

SEQ ID NO: 960201 - RNA, 19 nt, Homo sapiens
  misc_RNA (1)...(19): siRNA sense strand
cuauaucugugaugucaaa

SEQ ID NO: 960202 - RNA, 19 nt, Homo sapiens
  misc_RNA (1)...(19): siRNA sense strand
gaagcugaccugcaaguuc

SEQ ID NO: 960203 - RNA, 19 nt, Homo sapiens
  misc_RNA (1)...(19): siRNA sense strand
gugacaagauuaacaaguc

SEQ ID NO: 960204 - RNA, 19 nt, Homo sapiens
  misc_RNA (1)...(19): siRNA sense strand
gggaauuauccaccauuua

SEQ ID NO: 960205 - RNA, 19 nt, Homo sapiens
  misc_RNA (1)...(19): siRNA sense strand
guaguggugggcauaguua

SEQ ID NO: 960206 - RNA, 19 nt, Homo sapiens
  misc_RNA (1)...(19): siRNA sense strand
gaaagaugcaucaaucaac

SEQ ID NO: 960207 - RNA, 19 nt, Homo sapiens
  misc_RNA (1)...(19): siRNA sense strand
aagggaagcugaccugcaa

SEQ ID NO: 960208 - RNA, 19 nt, Homo sapiens
  misc_RNA (1)...(19): siRNA sense strand
aagcugaccugcaaguuca

SEQ ID NO: 960209 - RNA, 19 nt, Homo sapiens
  misc_RNA (1)...(19): siRNA sense strand
guaaagagucugccuucug

SEQ ID NO: 960210 - RNA, 19 nt, Homo sapiens
  misc_RNA (1)...(19): siRNA sense strand
gcucuugacagcuggagua

SEQ ID NO: 960211 - RNA, 19 nt, Homo sapiens
  misc_RNA (1)...(19): siRNA sense strand
gcaucaaucaacauagaaa

SEQ ID NO: 960212 - RNA, 19 nt, Homo sapiens
  misc_RNA (1)...(19): siRNA sense strand
aaguucaagucuacuagua

SEQ ID NO: 960213 - RNA, 19 nt, Homo sapiens
  misc_RNA (1)...(19): siRNA sense strand
gcaguacaucagagaguuu

SEQ ID NO: 960214 - RNA, 19 nt, Homo sapiens
  misc_RNA (1)...(19): siRNA sense strand
ggaaguauauacgccaaaa

SEQ ID NO: 960215 - RNA, 19 nt, Homo sapiens
  misc_RNA (1)...(19): siRNA sense strand
ucaccagggcccagucaua

SEQ ID NO: 960216 - RNA, 19 nt, Homo sapiens
  misc_RNA (1)...(19): siRNA sense strand
gaauuugccuguguuucca

SEQ ID NO: 960217 - RNA, 19 nt, Homo sapiens
  misc_RNA (1)...(19): siRNA sense strand
ugggaauuauccaccauuu

SEQ ID NO: 960218 - RNA, 19 nt, Homo sapiens
  misc_RNA (1)...(19): siRNA sense strand
acacugagggucuuguaaa

SEQ ID NO: 960219 - RNA, 19 nt, Homo sapiens
  misc_RNA (1)...(19): siRNA sense strand
caauggcaccuauaucugu

SEQ ID NO: 960220 - RNA, 19 nt, Homo sapiens
  misc_RNA (1)...(19): siRNA sense strand
ccagggcccagucauauau

SEQ ID NO: 960221 - RNA, 19 nt, Homo sapiens
  misc_RNA (1)...(19): siRNA sense strand
gaaaucuucguggcaaaug

SEQ ID NO: 960222 - RNA, 19 nt, Homo sapiens
  misc_RNA (1)...(19): siRNA sense strand
guaucagccuuggaaguau

SEQ ID NO: 960223 - RNA, 19 nt, Homo sapiens
  misc_RNA (1)...(19): siRNA sense strand
ggacacauuaggcucuaug

SEQ ID NO: 960224 - RNA, 19 nt, Homo sapiens
  misc_RNA (1)...(19): siRNA sense strand
ugacaagaaagaugcauca

SEQ ID NO: 960225 - RNA, 19 nt, Homo sapiens
  misc_RNA (1)...(19): siRNA sense strand
agaaagaugcaucaaucaa

SEQ ID NO: 960226 - RNA, 19 nt, Homo sapiens
  misc_RNA (1)...(19): siRNA sense strand
cacaauggcaccuauaucu

SEQ ID NO: 960227 - RNA, 19 nt, Homo sapiens
  misc_RNA (1)...(19): siRNA sense strand
aagagaauuugccuguguu

SEQ ID NO: 960228 - RNA, 19 nt, Homo sapiens
  misc_RNA (1)...(19): siRNA sense strand
aguaucagccuuggaagua

SEQ ID NO: 960229 - RNA, 19 nt, Homo sapiens
  misc_RNA (1)...(19): siRNA sense strand
uauacacaauggcaccuau

SEQ ID NO: 960230 - RNA, 19 nt, Homo sapiens
  misc_RNA (1)...(19): siRNA sense strand
gcaaguucaagucuacuag

SEQ ID NO: 960231 - RNA, 19 nt, Homo sapiens
  misc_RNA (1)...(19): siRNA sense strand
ggauauccgaaagaauuaa

SEQ ID NO: 960232 - RNA, 19 nt, Homo sapiens
  misc_RNA (1)...(19): siRNA sense strand
cgacacugagggucuugua

SEQ ID NO: 960233 - RNA, 19 nt, Homo sapiens
  misc_RNA (1)...(19): siRNA sense strand
augcaucaaucaacauaga

SEQ ID NO: 960234 - RNA, 19 nt, Homo sapiens
  misc_RNA (1)...(19): siRNA sense strand
uauccaccauuuaaagaca

SEQ ID NO: 960235 - RNA, 19 nt, Homo sapiens
  misc_RNA (1)...(19): siRNA sense strand
aaacccuccugacaucguu

SEQ ID NO: 960236 - RNA, 19 nt, Homo sapiens
  misc_RNA (1)...(19): siRNA sense strand
acaagaaagaugcaucaau

SEQ ID NO: 960237 - RNA, 19 nt, Homo sapiens
  misc_RNA (1)...(19): siRNA sense strand
gguaguggugggcauaguu

SEQ ID NO: 960238 - RNA, 19 nt, Homo sapiens
  misc_RNA (1)...(19): siRNA sense strand
ucauauaugcacaguuaga

SEQ ID NO: 960239 - RNA, 19 nt, Homo sapiens
  misc_RNA (1)...(19): siRNA sense strand
gagucugccuucuggaucu

SEQ ID NO: 960240 - RNA, 19 nt, Homo sapiens
  misc_RNA (1)...(19): siRNA sense strand
ggaagcugaccugcaaguu

SEQ ID NO: 960241 - RNA, 19 nt, Homo sapiens
  misc_RNA (1)...(19): siRNA sense strand
caccagggcccagucauau

SEQ ID NO: 960242 - RNA, 19 nt, Homo sapiens
  misc_RNA (1)...(19): siRNA sense strand
gacacugagggucuuguaa

SEQ ID NO: 960243 - RNA, 19 nt, Homo sapiens
  misc_RNA (1)...(19): siRNA sense strand
guauauacgccaaaagaaa

SEQ ID NO: 960244 - RNA, 19 nt, Homo sapiens
  misc_RNA (1)...(19): siRNA sense strand
uugccuguguuuccaguuu

SEQ ID NO: 960245 - RNA, 19 nt, Homo sapiens
  misc_RNA (1)...(19): siRNA sense strand
acagugacaagauuaacaa

SEQ ID NO: 960246 - RNA, 19 nt, Homo sapiens
  misc_RNA (1)...(19): siRNA sense strand
ccauuuaaagacagaauca

SEQ ID NO: 960247 - RNA, 19 nt, Homo sapiens
  misc_RNA (1)...(19): siRNA sense strand
uggaguaucagccuuggaa

SEQ ID NO: 960248 - RNA, 19 nt, Homo sapiens
  misc_RNA (1)...(19): siRNA sense strand
agaugcaucaaucaacaua

SEQ ID NO: 960249 - RNA, 19 nt, Homo sapiens
  misc_RNA (1)...(19): siRNA sense strand
cguggcaaaugguacacaa

SEQ ID NO: 960250 - RNA, 19 nt, Homo sapiens
  misc_RNA (1)...(19): siRNA sense strand
cacugagggucuuguaaag

SEQ ID NO: 960251 - RNA, 19 nt, Homo sapiens
  misc_RNA (1)...(19): siRNA sense strand
gaguaucagccuuggaagu

SEQ ID NO: 960252 - RNA, 19 nt, Homo sapiens
  misc_RNA (1)...(19): siRNA sense strand
cauuaggcucuaugucgua

SEQ ID NO: 960253 - RNA, 19 nt, Homo sapiens
  misc_RNA (1)...(19): siRNA sense strand
ggucucacucugcucauca

SEQ ID NO: 960254 - RNA, 19 nt, Homo sapiens
  misc_RNA (1)...(19): siRNA sense strand
auacacaauggcaccuaua

SEQ ID NO: 960255 - RNA, 19 nt, Homo sapiens
  misc_RNA (1)...(19): siRNA sense strand
ccugcaaguucaagucuac

SEQ ID NO: 960256 - RNA, 19 nt, Homo sapiens
  misc_RNA (1)...(19): siRNA sense strand
ugcaguacaucagagaguu

SEQ ID NO: 960257 - RNA, 19 nt, Homo sapiens
  misc_RNA (1)...(19): siRNA sense strand
uggcuguccucuauagaag

SEQ ID NO: 960258 - RNA, 19 nt, Homo sapiens
  misc_RNA (1)...(19): siRNA sense strand
gagaauuugccuguguuuc

SEQ ID NO: 960259 - RNA, 19 nt, Homo sapiens
  misc_RNA (1)...(19): siRNA sense strand
gaagauaucugcccgucaa

SEQ ID NO: 960260 - RNA, 19 nt, Homo sapiens
  misc_RNA (1)...(19): siRNA sense strand
gggaagaaauaugaagaua

SEQ ID NO: 960261 - RNA, 19 nt, Homo sapiens
  misc_RNA (1)...(19): siRNA sense strand
ggaggcagcuguugcaauc

SEQ ID NO: 960262 - RNA, 19 nt, Homo sapiens
  misc_RNA (1)...(19): siRNA sense strand
gaaguacgacuguggagaa

SEQ ID NO: 960263 - RNA, 19 nt, Homo sapiens
  misc_RNA (1)...(19): siRNA sense strand
cauguaagaucgucgagau

SEQ ID NO: 960264 - RNA, 19 nt, Homo sapiens
  misc_RNA (1)...(19): siRNA sense strand
guacgacuguggagaagag

SEQ ID NO: 960265 - RNA, 19 nt, Homo sapiens
  misc_RNA (1)...(19): siRNA sense strand
ucaaggccauggcaaaaua

SEQ ID NO: 960266 - RNA, 19 nt, Homo sapiens
  misc_RNA (1)...(19): siRNA sense strand
uuacugggaagaaauauga

SEQ ID NO: 960267 - RNA, 19 nt, Homo sapiens
  misc_RNA (1)...(19): siRNA sense strand
gcucagcauuacguaagaa

SEQ ID NO: 960268 - RNA, 19 nt, Homo sapiens
  misc_RNA (1)...(19): siRNA sense strand
caaucaaggccauggcaaa

SEQ ID NO: 960269 - RNA, 19 nt, Homo sapiens
  misc_RNA (1)...(19): siRNA sense strand
gcccgucaacucauaauau

SEQ ID NO: 960270 - RNA, 19 nt, Homo sapiens
  misc_RNA (1)...(19): siRNA sense strand
gguauugacaucuuuacug

SEQ ID NO: 960271 - RNA, 19 nt, Homo sapiens
  misc_RNA (1)...(19): siRNA sense strand
guaagaucgucgagauguc

SEQ ID NO: 960272 - RNA, 19 nt, Homo sapiens
  misc_RNA (1)...(19): siRNA sense strand
cagaugacuuggacuucga

SEQ ID NO: 960273 - RNA, 19 nt, Homo sapiens
  misc_RNA (1)...(19): siRNA sense strand
gguugguauugacaucuuu

SEQ ID NO: 960274 - RNA, 19 nt, Homo sapiens
  misc_RNA (1)...(19): siRNA sense strand
ugacuuggacuucgagaca

SEQ ID NO: 960275 - RNA, 19 nt, Homo sapiens
  misc_RNA (1)...(19): siRNA sense strand
ggacuucgagacaggagau

SEQ ID NO: 960276 - RNA, 19 nt, Homo sapiens
  misc_RNA (1)...(19): siRNA sense strand
gaaugacuuccagcugauu

SEQ ID NO: 960277 - RNA, 19 nt, Homo sapiens
  misc_RNA (1)...(19): siRNA sense strand
ucagccaccuucccaaugc

SEQ ID NO: 960278 - RNA, 19 nt, Homo sapiens
  misc_RNA (1)...(19): siRNA sense strand
aggcagcuguugcaaucaa

SEQ ID NO: 960279 - RNA, 19 nt, Homo sapiens
  misc_RNA (1)...(19): siRNA sense strand
guugguauugacaucuuua

SEQ ID NO: 960280 - RNA, 19 nt, Homo sapiens
  misc_RNA (1)...(19): siRNA sense strand
gauaucugcccgucaacuc

SEQ ID NO: 960281 - RNA, 19 nt, Homo sapiens
  misc_RNA (1)...(19): siRNA sense strand
ucgucgagaugucuacuuc

SEQ ID NO: 960282 - RNA, 19 nt, Homo sapiens
  misc_RNA (1)...(19): siRNA sense strand
caagguccaucugguuggu

SEQ ID NO: 960283 - RNA, 19 nt, Homo sapiens
  misc_RNA (1)...(19): siRNA sense strand
ccaggauggguaccuauca

SEQ ID NO: 960284 - RNA, 19 nt, Homo sapiens
  misc_RNA (1)...(19): siRNA sense strand
gaaggcaucuguuauugaa

SEQ ID NO: 960285 - RNA, 19 nt, Homo sapiens
  misc_RNA (1)...(19): siRNA sense strand
gaagacagccauagagaaa

SEQ ID NO: 960286 - RNA, 19 nt, Homo sapiens
  misc_RNA (1)...(19): siRNA sense strand
gaggaggacuuucuaaugu

SEQ ID NO: 960287 - RNA, 19 nt, Homo sapiens
  misc_RNA (1)...(19): siRNA sense strand
ggaggaggcuucaagacuu

SEQ ID NO: 960288 - RNA, 19 nt, Homo sapiens
  misc_RNA (1)...(19): siRNA sense strand
ugaccaaccucaccaaaga

SEQ ID NO: 960289 - RNA, 19 nt, Homo sapiens
  misc_RNA (1)...(19): siRNA sense strand
ggacuguuguucucacuau

SEQ ID NO: 960290 - RNA, 19 nt, Homo sapiens
  misc_RNA (1)...(19): siRNA sense strand
gaagguugcuggacagucu

SEQ ID NO: 960291 - RNA, 19 nt, Homo sapiens
  misc_RNA (1)...(19): siRNA sense strand
gauccugaguucauuguga

SEQ ID NO: 960292 - RNA, 19 nt, Homo sapiens
  misc_RNA (1)...(19): siRNA sense strand
gaaacggcaaagaagauua

SEQ ID NO: 960293 - RNA, 19 nt, Homo sapiens
  misc_RNA (1)...(19): siRNA sense strand
gauccaaacugcaaaauug

SEQ ID NO: 960294 - RNA, 19 nt, Homo sapiens
  misc_RNA (1)...(19): siRNA sense strand
gaucaacugcgaugucaaa

SEQ ID NO: 960295 - RNA, 19 nt, Homo sapiens
  misc_RNA (1)...(19): siRNA sense strand
caaagccaauggaaacaga

SEQ ID NO: 960296 - RNA, 19 nt, Homo sapiens
  misc_RNA (1)...(19): siRNA sense strand
uggaguacauucaaacaaa

SEQ ID NO: 960297 - RNA, 19 nt, Homo sapiens
  misc_RNA (1)...(19): siRNA sense strand
gaugggagcaccagcauug

SEQ ID NO: 960298 - RNA, 19 nt, Homo sapiens
  misc_RNA (1)...(19): siRNA sense strand
gaacaaacggcuucuacuc

SEQ ID NO: 960299 - RNA, 19 nt, Homo sapiens
  misc_RNA (1)...(19): siRNA sense strand
acaaagaaacggcaaagaa

SEQ ID NO: 960300 - RNA, 19 nt, Homo sapiens
  misc_RNA (1)...(19): siRNA sense strand
caacccugcuacucacuuu

SEQ ID NO: 960301 - RNA, 19 nt, Homo sapiens
  misc_RNA (1)...(19): siRNA sense strand
gagauggacucauggaaac

SEQ ID NO: 960302 - RNA, 19 nt, Homo sapiens
  misc_RNA (1)...(19): siRNA sense strand
caucagcucuuacauacuc

SEQ ID NO: 960303 - RNA, 19 nt, Homo sapiens
  misc_RNA (1)...(19): siRNA sense strand
ggaggacuuucuaauguag

SEQ ID NO: 960304 - RNA, 19 nt, Homo sapiens
  misc_RNA (1)...(19): siRNA sense strand
uaucagaggccaccuauuc

SEQ ID NO: 960305 - RNA, 19 nt, Homo sapiens
  misc_RNA (1)...(19): siRNA sense strand
ugaagggagugaucaccua

SEQ ID NO: 960306 - RNA, 19 nt, Homo sapiens
  misc_RNA (1)...(19): siRNA sense strand
ugacuggaguacauucaaa

SEQ ID NO: 960307 - RNA, 19 nt, Homo sapiens
  misc_RNA (1)...(19): siRNA sense strand
caaccucaccaaagaguuu

SEQ ID NO: 960308 - RNA, 19 nt, Homo sapiens
  misc_RNA (1)...(19): siRNA sense strand
gaauugagcacacagucuu

SEQ ID NO: 960309 - RNA, 19 nt, Homo sapiens
  misc_RNA (1)...(19): siRNA sense strand
gagaauccuuuaucgucuu

SEQ ID NO: 960310 - RNA, 19 nt, Homo sapiens
  misc_RNA (1)...(19): siRNA sense strand
acaguggugugcuugauaa

SEQ ID NO: 960311 - RNA, 19 nt, Homo sapiens
  misc_RNA (1)...(19): siRNA sense strand
caaagaaacggcaaagaag

SEQ ID NO: 960312 - RNA, 19 nt, Homo sapiens
  misc_RNA (1)...(19): siRNA sense strand
gcacagccggucacucuga

SEQ ID NO: 960313 - RNA, 19 nt, Homo sapiens
  misc_RNA (1)...(19): siRNA sense strand
guggugugcuugauaauuc

SEQ ID NO: 960314 - RNA, 19 nt, Homo sapiens
  misc_RNA (1)...(19): siRNA sense strand
ggaguacauucaaacaaag

SEQ ID NO: 960315 - RNA, 19 nt, Homo sapiens
  misc_RNA (1)...(19): siRNA sense strand
gcaccguccuccaguuugu

SEQ ID NO: 960316 - RNA, 19 nt, Homo sapiens
  misc_RNA (1)...(19): siRNA sense strand
gagacaacccugcuacuca

SEQ ID NO: 960317 - RNA, 19 nt, Homo sapiens
  misc_RNA (1)...(19): siRNA sense strand
agaauccuuuaucgucuua

SEQ ID NO: 960318 - RNA, 19 nt, Homo sapiens
  misc_RNA (1)...(19): siRNA sense strand
ugggagagauggacucaug

SEQ ID NO: 960319 - RNA, 19 nt, Homo sapiens
  misc_RNA (1)...(19): siRNA sense strand
gcuucuggcugucacugua

SEQ ID NO: 960320 - RNA, 19 nt, Homo sapiens
  misc_RNA (1)...(19): siRNA sense strand
gagcccaacuuugcaaaca

SEQ ID NO: 960321 - RNA, 19 nt, Homo sapiens
  misc_RNA (1)...(19): siRNA sense strand
aaacggcaaagaagauuaa

SEQ ID NO: 960322 - RNA, 19 nt, Homo sapiens
  misc_RNA (1)...(19): siRNA sense strand
uugacaaccuccaucagua

SEQ ID NO: 960323 - RNA, 19 nt, Homo sapiens
  misc_RNA (1)...(19): siRNA sense strand
uaugaaggcaucuguuauu

SEQ ID NO: 960324 - RNA, 19 nt, Homo sapiens
  misc_RNA (1)...(19): siRNA sense strand
gauggguguuguccaguau

SEQ ID NO: 960325 - RNA, 19 nt, Homo sapiens
  misc_RNA (1)...(19): siRNA sense strand
agagaccacuccuucuuug

SEQ ID NO: 960326 - RNA, 19 nt, Homo sapiens
  misc_RNA (1)...(19): siRNA sense strand
gagaggaggacuuucuaau

SEQ ID NO: 960327 - RNA, 19 nt, Homo sapiens
  misc_RNA (1)...(19): siRNA sense strand
ugucaaagccggaaagauc

SEQ ID NO: 960328 - RNA, 19 nt, Homo sapiens
  misc_RNA (1)...(19): siRNA sense strand
aaaccuggaucgguccuuu

SEQ ID NO: 960329 - RNA, 19 nt, Homo sapiens
  misc_RNA (1)...(19): siRNA sense strand
cagaucaacugcgauguca

SEQ ID NO: 960330 - RNA, 19 nt, Homo sapiens
  misc_RNA (1)...(19): siRNA sense strand
aggaggacuuucuaaugua

SEQ ID NO: 960331 - RNA, 19 nt, Homo sapiens
  misc_RNA (1)...(19): siRNA sense strand
ugauggguguuguccagua

SEQ ID NO: 960332 - RNA, 19 nt, Homo sapiens
  misc_RNA (1)...(19): siRNA sense strand
gcuggugacuggaguacau

SEQ ID NO: 960333 - RNA, 19 nt, Homo sapiens
  misc_RNA (1)...(19): siRNA sense strand
uggacagucugguuacaaa

SEQ ID NO: 960334 - RNA, 19 nt, Homo sapiens
  misc_RNA (1)...(19): siRNA sense strand
gcucuuacauacucaucau

SEQ ID NO: 960335 - RNA, 19 nt, Homo sapiens
  misc_RNA (1)...(19): siRNA sense strand
cagaacauuuguacagagu

SEQ ID NO: 960336 - RNA, 19 nt, Homo sapiens
  misc_RNA (1)...(19): siRNA sense strand
gaagggagugaucaccuau

SEQ ID NO: 960337 - RNA, 19 nt, Homo sapiens
  misc_RNA (1)...(19): siRNA sense strand
cauugaaggugcugcugaa

SEQ ID NO: 960338 - RNA, 19 nt, Homo sapiens
  misc_RNA (1)...(19): siRNA sense strand
gcgagagagucaggaauca

SEQ ID NO: 960339 - RNA, 19 nt, Homo sapiens
  misc_RNA (1)...(19): siRNA sense strand
ucaagacacacacgaauuc

SEQ ID NO: 960340 - RNA, 19 nt, Homo sapiens
  misc_RNA (1)...(19): siRNA sense strand
aaagaaacggcaaagaaga

SEQ ID NO: 960341 - RNA, 19 nt, Homo sapiens
  misc_RNA (1)...(19): siRNA sense strand
gaucgguccuuuuagauga

SEQ ID NO: 960342 - RNA, 19 nt, Homo sapiens
  misc_RNA (1)...(19): siRNA sense strand
ggagcugccuuccagaaac

SEQ ID NO: 960343 - RNA, 19 nt, Homo sapiens
  misc_RNA (1)...(19): siRNA sense strand
caucgauccugaguucauu

SEQ ID NO: 960344 - RNA, 19 nt, Homo sapiens
  misc_RNA (1)...(19): siRNA sense strand
cagagaccacuccuucuuu

SEQ ID NO: 960345 - RNA, 19 nt, Homo sapiens
  misc_RNA (1)...(19): siRNA sense strand
augaaggacuuguuccaaa

SEQ ID NO: 960346 - RNA, 19 nt, Homo sapiens
  misc_RNA (1)...(19): siRNA sense strand
cgauggagagaauccuuua

SEQ ID NO: 960347 - RNA, 19 nt, Homo sapiens
  misc_RNA (1)...(19): siRNA sense strand
cuaccacgauggagagaau

SEQ ID NO: 960348 - RNA, 19 nt, Homo sapiens
  misc_RNA (1)...(19): siRNA sense strand
ccaacaagaggaaguuaau

SEQ ID NO: 960349 - RNA, 19 nt, Homo sapiens
  misc_RNA (1)...(19): siRNA sense strand
cccaucagcucuuacauac

SEQ ID NO: 960350 - RNA, 19 nt, Homo sapiens
  misc_RNA (1)...(19): siRNA sense strand
ccagagaccacuccuucuu

SEQ ID NO: 960351 - RNA, 19 nt, Homo sapiens
  misc_RNA (1)...(19): siRNA sense strand
acuaugaaggcaucuguua

SEQ ID NO: 960352 - RNA, 19 nt, Homo sapiens
  misc_RNA (1)...(19): siRNA sense strand
aggcaucuguuauugaaau

SEQ ID NO: 960353 - RNA, 19 nt, Homo sapiens
  misc_RNA (1)...(19): siRNA sense strand
uuauggcacugacguguau

SEQ ID NO: 960354 - RNA, 19 nt, Homo sapiens
  misc_RNA (1)...(19): siRNA sense strand
uagaagucauugccacuca

SEQ ID NO: 960355 - RNA, 19 nt, Homo sapiens
  misc_RNA (1)...(19): siRNA sense strand
agagauggacucauggaaa

SEQ ID NO: 960356 - RNA, 19 nt, Homo sapiens
  misc_RNA (1)...(19): siRNA sense strand
cuuagaaaguaaacccaaa

SEQ ID NO: 960357 - RNA, 19 nt, Homo sapiens
  misc_RNA (1)...(19): siRNA sense strand
caagaggaaguuaaugauc

SEQ ID NO: 960358 - RNA, 19 nt, Homo sapiens
  misc_RNA (1)...(19): siRNA sense strand
gaugucagccugggagaga

SEQ ID NO: 960359 - RNA, 19 nt, Homo sapiens
  misc_RNA (1)...(19): siRNA sense strand
ugacaaccuccaucaguau

SEQ ID NO: 960360 - RNA, 19 nt, Homo sapiens
  misc_RNA (1)...(19): siRNA sense strand
aacaagaggaaguuaauga

SEQ ID NO: 960361 - RNA, 19 nt, Homo sapiens
  misc_RNA (1)...(19): siRNA sense strand
gcaguacaccuacgaacag

SEQ ID NO: 960362 - RNA, 19 nt, Homo sapiens
  misc_RNA (1)...(19): siRNA sense strand
ggagagauggacucaugga

SEQ ID NO: 960363 - RNA, 19 nt, Homo sapiens
  misc_RNA (1)...(19): siRNA sense strand
gaugaaggacuuguuccaa

SEQ ID NO: 960364 - RNA, 19 nt, Homo sapiens
  misc_RNA (1)...(19): siRNA sense strand
gaucauccagaacauuugu

SEQ ID NO: 960365 - RNA, 19 nt, Homo sapiens
  misc_RNA (1)...(19): siRNA sense strand
agaggaggacuuucuaaug

SEQ ID NO: 960366 - RNA, 19 nt, Homo sapiens
  misc_RNA (1)...(19): siRNA sense strand
ugaagacagccauagagaa

SEQ ID NO: 960367 - RNA, 19 nt, Homo sapiens
  misc_RNA (1)...(19): siRNA sense strand
acacacgaauucucgagau

SEQ ID NO: 960368 - RNA, 19 nt, Homo sapiens
  misc_RNA (1)...(19): siRNA sense strand
ugaaggcaucuguuauuga

SEQ ID NO: 960369 - RNA, 19 nt, Homo sapiens
  misc_RNA (1)...(19): siRNA sense strand
acaaagggaguuauuccaa

SEQ ID NO: 960370 - RNA, 19 nt, Homo sapiens
  misc_RNA (1)...(19): siRNA sense strand
caacaagaggaaguuaaug

SEQ ID NO: 960371 - RNA, 19 nt, Homo sapiens
  misc_RNA (1)...(19): siRNA sense strand
gagucaggaaucaacauuu

SEQ ID NO: 960372 - RNA, 19 nt, Homo sapiens
  misc_RNA (1)...(19): siRNA sense strand
ccaauguggugguggugau

SEQ ID NO: 960373 - RNA, 19 nt, Homo sapiens
  misc_RNA (1)...(19): siRNA sense strand
cgggccaucuccuuuguga

SEQ ID NO: 960374 - RNA, 19 nt, Homo sapiens
  misc_RNA (1)...(19): siRNA sense strand
caaacaaagaaacggcaaa

SEQ ID NO: 960375 - RNA, 19 nt, Homo sapiens
  misc_RNA (1)...(19): siRNA sense strand
ugaaggacuuguuccaaaa

SEQ ID NO: 960376 - RNA, 19 nt, Homo sapiens
  misc_RNA (1)...(19): siRNA sense strand
ggagagaauccuuuaucgu

SEQ ID NO: 960377 - RNA, 19 nt, Homo sapiens
  misc_RNA (1)...(19): siRNA sense strand
aagaggagcuagaagucau

SEQ ID NO: 960378 - RNA, 19 nt, Homo sapiens
  misc_RNA (1)...(19): siRNA sense strand
gcccaacuuugcaaacaag

SEQ ID NO: 960379 - RNA, 19 nt, Homo sapiens
  misc_RNA (1)...(19): siRNA sense strand
ugaaggugcugcugaaaau

SEQ ID NO: 960380 - RNA, 19 nt, Homo sapiens
  misc_RNA (1)...(19): siRNA sense strand
gaagaauugagcacacagu

SEQ ID NO: 960381 - RNA, 19 nt, Homo sapiens
  misc_RNA (1)...(19): siRNA sense strand
ucacugugccucagaucaa

SEQ ID NO: 960382 - RNA, 19 nt, Homo sapiens
  misc_RNA (1)...(19): siRNA sense strand
agugaucaccuaugcgaua

SEQ ID NO: 960383 - RNA, 19 nt, Homo sapiens
  misc_RNA (1)...(19): siRNA sense strand
ucaagagggugggcuacug

SEQ ID NO: 960384 - RNA, 19 nt, Homo sapiens
  misc_RNA (1)...(19): siRNA sense strand
ggagaaaccuuaugaaugu

SEQ ID NO: 960385 - RNA, 19 nt, Homo sapiens
  misc_RNA (1)...(19): siRNA sense strand
gcggagagcugguuaauga

SEQ ID NO: 960386 - RNA, 19 nt, Homo sapiens
  misc_RNA (1)...(19): siRNA sense strand
ggaaauccuucacaaguaa

SEQ ID NO: 960387 - RNA, 19 nt, Homo sapiens
  misc_RNA (1)...(19): siRNA sense strand
gaucuuaccuuacuauuca

SEQ ID NO: 960388 - RNA, 19 nt, Homo sapiens
  misc_RNA (1)...(19): siRNA sense strand
acaaguaacuccuaucuuu

SEQ ID NO: 960389 - RNA, 19 nt, Homo sapiens
  misc_RNA (1)...(19): siRNA sense strand
ucacuagggugucguguua

SEQ ID NO: 960390 - RNA, 19 nt, Homo sapiens
  misc_RNA (1)...(19): siRNA sense strand
gggaaauccuucacaagua

SEQ ID NO: 960391 - RNA, 19 nt, Homo sapiens
  misc_RNA (1)...(19): siRNA sense strand
gggaaauccuucagcagua

SEQ ID NO: 960392 - RNA, 19 nt, Homo sapiens
  misc_RNA (1)...(19): siRNA sense strand
ccaagcaccuguccagauu

SEQ ID NO: 960393 - RNA, 19 nt, Homo sapiens
  misc_RNA (1)...(19): siRNA sense strand
ccaaaugguuaacuccuaa

SEQ ID NO: 960394 - RNA, 19 nt, Homo sapiens
  misc_RNA (1)...(19): siRNA sense strand
uaauaaacccagucugaua

SEQ ID NO: 960395 - RNA, 19 nt, Homo sapiens
  misc_RNA (1)...(19): siRNA sense strand
acaagaagguggugacaga

SEQ ID NO: 960396 - RNA, 19 nt, Homo sapiens
  misc_RNA (1)...(19): siRNA sense strand
gaagagcuccuaucugaca

SEQ ID NO: 960397 - RNA, 19 nt, Homo sapiens
  misc_RNA (1)...(19): siRNA sense strand
ggagaaacccuaugaaugc

SEQ ID NO: 960398 - RNA, 19 nt, Homo sapiens
  misc_RNA (1)...(19): siRNA sense strand
uuaaugagcuccugacaag

SEQ ID NO: 960399 - RNA, 19 nt, Homo sapiens
  misc_RNA (1)...(19): siRNA sense strand
gaaagaggaauucuaccaa

SEQ ID NO: 960400 - RNA, 19 nt, Homo sapiens
  misc_RNA (1)...(19): siRNA sense strand
gaagaaacacuuaagaacu

SEQ ID NO: 960401 - RNA, 19 nt, Homo sapiens
  misc_RNA (1)...(19): siRNA sense strand
cauaagagaauccauaaug

SEQ ID NO: 960402 - RNA, 19 nt, Homo sapiens
  misc_RNA (1)...(19): siRNA sense strand
aguagcagaucuuaccuua

SEQ ID NO: 960403 - RNA, 19 nt, Homo sapiens
  misc_RNA (1)...(19): siRNA sense strand
gggagaaaccuuaugaaug

SEQ ID NO: 960404 - RNA, 19 nt, Homo sapiens
  misc_RNA (1)...(19): siRNA sense strand
gggaaagcauuuagugauc

SEQ ID NO: 960405 - RNA, 19 nt, Homo sapiens
  misc_RNA (1)...(19): siRNA sense strand
guuaauaaacccagucuga

SEQ ID NO: 960406 - RNA, 19 nt, Homo sapiens
  misc_RNA (1)...(19): siRNA sense strand
gaaacccuaugaaugcaau

SEQ ID NO: 960407 - RNA, 19 nt, Homo sapiens
  misc_RNA (1)...(19): siRNA sense strand
gggagaaacccuaugaaug

SEQ ID NO: 960408 - RNA, 19 nt, Homo sapiens
  misc_RNA (1)...(19): siRNA sense strand
gccaaaugguuaacuccua

SEQ ID NO: 960409 - RNA, 19 nt, Homo sapiens
  misc_RNA (1)...(19): siRNA sense strand
gagaauucauacuggagaa

SEQ ID NO: 960410 - RNA, 19 nt, Homo sapiens
  misc_RNA (1)...(19): siRNA sense strand
agugaucccucaucccuua

SEQ ID NO: 960411 - RNA, 19 nt, Homo sapiens
  misc_RNA (1)...(19): siRNA sense strand
uagcagaucuuaccuuacu

SEQ ID NO: 960412 - RNA, 19 nt, Homo sapiens
  misc_RNA (1)...(19): siRNA sense strand
gagaaucaccaugaaugua

SEQ ID NO: 960413 - RNA, 19 nt, Homo sapiens
  misc_RNA (1)...(19): siRNA sense strand
ggaaauccuucagcaguag

SEQ ID NO: 960414 - RNA, 19 nt, Homo sapiens
  misc_RNA (1)...(19): siRNA sense strand
caaugaauguaaucagugu

SEQ ID NO: 960415 - RNA, 19 nt, Homo sapiens
  misc_RNA (1)...(19): siRNA sense strand
aauaaucucucagcuguga

SEQ ID NO: 960416 - RNA, 19 nt, Homo sapiens
  misc_RNA (1)...(19): siRNA sense strand
uaacucagcacaagagaau

SEQ ID NO: 960417 - RNA, 19 nt, Homo sapiens
  misc_RNA (1)...(19): siRNA sense strand
cagcacaagagaauucaua

SEQ ID NO: 960418 - RNA, 19 nt, Homo sapiens
  misc_RNA (1)...(19): siRNA sense strand
gaaucaccaugaauguaau

SEQ ID NO: 960419 - RNA, 19 nt, Homo sapiens
  misc_RNA (1)...(19): siRNA sense strand
agaaucaccaugaauguaa

SEQ ID NO: 960420 - RNA, 19 nt, Homo sapiens
  misc_RNA (1)...(19): siRNA sense strand
gggaugugaugcuggagaa

SEQ ID NO: 960421 - RNA, 19 nt, Homo sapiens
  misc_RNA (1)...(19): siRNA sense strand
gguuaacuccuaagaagaa

SEQ ID NO: 960422 - RNA, 19 nt, Homo sapiens
  misc_RNA (1)...(19): siRNA sense strand
ggaaagaggaauucuacca

SEQ ID NO: 960423 - RNA, 19 nt, Homo sapiens
  misc_RNA (1)...(19): siRNA sense strand
uaaccuaacucagcacaag

SEQ ID NO: 960424 - RNA, 19 nt, Homo sapiens
  misc_RNA (1)...(19): siRNA sense strand
aagaaacacuuaagaacuc

SEQ ID NO: 960425 - RNA, 19 nt, Homo sapiens
  misc_RNA (1)...(19): siRNA sense strand
gugaagaaacacuuaagaa

SEQ ID NO: 960426 - RNA, 19 nt, Homo sapiens
  misc_RNA (1)...(19): siRNA sense strand
ucucucagcugugaagaaa

SEQ ID NO: 960427 - RNA, 19 nt, Homo sapiens
  misc_RNA (1)...(19): siRNA sense strand
gaggaaagaggaauucuac

SEQ ID NO: 960428 - RNA, 19 nt, Homo sapiens
  misc_RNA (1)...(19): siRNA sense strand
ggagaaucaccaugaaugu

SEQ ID NO: 960429 - RNA, 19 nt, Homo sapiens
  misc_RNA (1)...(19): siRNA sense strand
gggagaaucaccaugaaug

SEQ ID NO: 960430 - RNA, 19 nt, Homo sapiens
  misc_RNA (1)...(19): siRNA sense strand
agacugcauuugagaauuc

SEQ ID NO: 960431 - RNA, 19 nt, Homo sapiens
  misc_RNA (1)...(19): siRNA sense strand
gaaaagaacagucuaaagg

SEQ ID NO: 960432 - RNA, 19 nt, Homo sapiens
  misc_RNA (1)...(19): siRNA sense strand
gauuuggagacucuacuua

SEQ ID NO: 960433 - RNA, 19 nt, Homo sapiens
  misc_RNA (1)...(19): siRNA sense strand
gcacaagagaauacauaau

SEQ ID NO: 960434 - RNA, 19 nt, Homo sapiens
  misc_RNA (1)...(19): siRNA sense strand
gugcacaagagaauacaua

SEQ ID NO: 960435 - RNA, 19 nt, Homo sapiens
  misc_RNA (1)...(19): siRNA sense strand
gugcacaagagaauacaua

SEQ ID NO: 960436 - RNA, 19 nt, Homo sapiens
  misc_RNA (1)...(19): siRNA sense strand
agcaguagcuuuucucuua

SEQ ID NO: 960437 - RNA, 19 nt, Homo sapiens
  misc_RNA (1)...(19): siRNA sense strand
agaacagucuaaaggugua

SEQ ID NO: 960438 - RNA, 19 nt, Homo sapiens
  misc_RNA (1)...(19): siRNA sense strand
gggcacaauagcauucaua

SEQ ID NO: 960439 - RNA, 19 nt, Homo sapiens
  misc_RNA (1)...(19): siRNA sense strand
gagaaacccuaugaaugca

SEQ ID NO: 960440 - RNA, 19 nt, Homo sapiens
  misc_RNA (1)...(19): siRNA sense strand
acuuaaagccaaaugguua

SEQ ID NO: 960441 - RNA, 19 nt, Homo sapiens
  misc_RNA (1)...(19): siRNA sense strand
gcagaucuuaccuuacuau

SEQ ID NO: 960442 - RNA, 19 nt, Homo sapiens
  misc_RNA (1)...(19): siRNA sense strand
uagggugucguguuaauaa

SEQ ID NO: 960443 - RNA, 19 nt, Homo sapiens
  misc_RNA (1)...(19): siRNA sense strand
ccaugaauguaaucagugu

SEQ ID NO: 960444 - RNA, 19 nt, Homo sapiens
  misc_RNA (1)...(19): siRNA sense strand
cgaaaucuaaccuaacuca

SEQ ID NO: 960445 - RNA, 19 nt, Homo sapiens
  misc_RNA (1)...(19): siRNA sense strand
cacgaaaucuaaccuaacu

SEQ ID NO: 960446 - RNA, 19 nt, Homo sapiens
  misc_RNA (1)...(19): siRNA sense strand
ucucagcugugaagaaaca

SEQ ID NO: 960447 - RNA, 19 nt, Homo sapiens
  misc_RNA (1)...(19): siRNA sense strand
gaauacauaccggagagaa

SEQ ID NO: 960448 - RNA, 19 nt, Homo sapiens
  misc_RNA (1)...(19): siRNA sense strand
gaauguaaucaguguggaa

SEQ ID NO: 960449 - RNA, 19 nt, Homo sapiens
  misc_RNA (1)...(19): siRNA sense strand
caccaugaauguaaucagu

SEQ ID NO: 960450 - RNA, 19 nt, Homo sapiens
  misc_RNA (1)...(19): siRNA sense strand
uuuggagacucuacuuaaa

SEQ ID NO: 960451 - RNA, 19 nt, Homo sapiens
  misc_RNA (1)...(19): siRNA sense strand
aagcaccuguccagauuug

SEQ ID NO: 960452 - RNA, 19 nt, Homo sapiens
  misc_RNA (1)...(19): siRNA sense strand
caaguaacuccuaucuuuc

SEQ ID NO: 960453 - RNA, 19 nt, Homo sapiens
  misc_RNA (1)...(19): siRNA sense strand
aauaaacccagucugauau

SEQ ID NO: 960454 - RNA, 19 nt, Homo sapiens
  misc_RNA (1)...(19): siRNA sense strand
cagcacguaagaacucaua

SEQ ID NO: 960455 - RNA, 19 nt, Homo sapiens
  misc_RNA (1)...(19): siRNA sense strand
gaagucaucguggagugaa

SEQ ID NO: 960456 - RNA, 19 nt, Homo sapiens
  misc_RNA (1)...(19): siRNA sense strand
uuaugaaugucacgauugu

SEQ ID NO: 960457 - RNA, 19 nt, Homo sapiens
  misc_RNA (1)...(19): siRNA sense strand
cacaauagcauucauacag

SEQ ID NO: 960458 - RNA, 19 nt, Homo sapiens
  misc_RNA (1)...(19): siRNA sense strand
gcacaauagcauucauaca

SEQ ID NO: 960459 - RNA, 19 nt, Homo sapiens
  misc_RNA (1)...(19): siRNA sense strand
gaacagucuaaagguguaa

SEQ ID NO: 960460 - RNA, 19 nt, Homo sapiens
  misc_RNA (1)...(19): siRNA sense strand
ugaagaaacacuuaagaac

SEQ ID NO: 960461 - RNA, 19 nt, Homo sapiens
  misc_RNA (1)...(19): siRNA sense strand
ccuuaugaaugucacgauu

SEQ ID NO: 960462 - RNA, 19 nt, Homo sapiens
  misc_RNA (1)...(19): siRNA sense strand
cacaagagaauucauacug

SEQ ID NO: 960463 - RNA, 19 nt, Homo sapiens
  misc_RNA (1)...(19): siRNA sense strand
uaucccaguuggaacaaga

SEQ ID NO: 960464 - RNA, 19 nt, Homo sapiens
  misc_RNA (1)...(19): siRNA sense strand
gaagguggugacagaggaa

SEQ ID NO: 960465 - RNA, 19 nt, Homo sapiens
  misc_RNA (1)...(19): siRNA sense strand
ugacacagcacguaagaac

SEQ ID NO: 960466 - RNA, 19 nt, Homo sapiens
  misc_RNA (1)...(19): siRNA sense strand
caccaguuguaaccucaaa

SEQ ID NO: 960467 - RNA, 19 nt, Homo sapiens
  misc_RNA (1)...(19): siRNA sense strand
gagaauucacacuggagaa

SEQ ID NO: 960468 - RNA, 19 nt, Homo sapiens
  misc_RNA (1)...(19): siRNA sense strand
gcacgaaaucuaaccuaac

SEQ ID NO: 960469 - RNA, 19 nt, Homo sapiens
  misc_RNA (1)...(19): siRNA sense strand
gacagaggaaagaggaauu

SEQ ID NO: 960470 - RNA, 19 nt, Homo sapiens
  misc_RNA (1)...(19): siRNA sense strand
uaucugacacagcacguaa

SEQ ID NO: 960471 - RNA, 19 nt, Homo sapiens
  misc_RNA (1)...(19): siRNA sense strand
ggauguggccguggaguuc

SEQ ID NO: 960472 - RNA, 19 nt, Homo sapiens
  misc_RNA (1)...(19): siRNA sense strand
ucccuuagacugcauuuga

SEQ ID NO: 960473 - RNA, 19 nt, Homo sapiens
  misc_RNA (1)...(19): siRNA sense strand
uaacuccuaagaagaaugu

SEQ ID NO: 960474 - RNA, 19 nt, Homo sapiens
  misc_RNA (1)...(19): siRNA sense strand
uagacugcauuugagaauu

SEQ ID NO: 960475 - RNA, 19 nt, Homo sapiens
  misc_RNA (1)...(19): siRNA sense strand
gcugugaagaaacacuuaa

SEQ ID NO: 960476 - RNA, 19 nt, Homo sapiens
  misc_RNA (1)...(19): siRNA sense strand
cuaugaauguaacgagugu

SEQ ID NO: 960477 - RNA, 19 nt, Homo sapiens
  misc_RNA (1)...(19): siRNA sense strand
cuaugaauguaaccagugu

SEQ ID NO: 960478 - RNA, 19 nt, Homo sapiens
  misc_RNA (1)...(19): siRNA sense strand
agcacgaaaucuaaccuaa

SEQ ID NO: 960479 - RNA, 19 nt, Homo sapiens
  misc_RNA (1)...(19): siRNA sense strand
ucacaaguaacuccuaucu

SEQ ID NO: 960480 - RNA, 19 nt, Homo sapiens
  misc_RNA (1)...(19): siRNA sense strand
gaacucauacuggagaaaa

SEQ ID NO: 960481 - RNA, 19 nt, Homo sapiens
  misc_RNA (1)...(19): siRNA sense strand
gaauguaaccaguguuuuc

SEQ ID NO: 960482 - RNA, 19 nt, Homo sapiens
  misc_RNA (1)...(19): siRNA sense strand
cuucacaaguaacuccuau

SEQ ID NO: 960483 - RNA, 19 nt, Homo sapiens
  misc_RNA (1)...(19): siRNA sense strand
gagaaaccuuaugaauguc

SEQ ID NO: 960484 - RNA, 19 nt, Homo sapiens
  misc_RNA (1)...(19): siRNA sense strand
gcagauggguuuccuguua

SEQ ID NO: 960485 - RNA, 19 nt, Homo sapiens
  misc_RNA (1)...(19): siRNA sense strand
aaaggaagcugcacaagua

SEQ ID NO: 960486 - RNA, 19 nt, Homo sapiens
  misc_RNA (1)...(19): siRNA sense strand
guucaaagcuuuaucagaa

SEQ ID NO: 960487 - RNA, 19 nt, Homo sapiens
  misc_RNA (1)...(19): siRNA sense strand
uaagguggguuaccauuua

SEQ ID NO: 960488 - RNA, 19 nt, Homo sapiens
  misc_RNA (1)...(19): siRNA sense strand
gaagaaauaagguggguua

SEQ ID NO: 960489 - RNA, 19 nt, Homo sapiens
  misc_RNA (1)...(19): siRNA sense strand
ggaaggagguggagacguu

SEQ ID NO: 960490 - RNA, 19 nt, Homo sapiens
  misc_RNA (1)...(19): siRNA sense strand
gaaaguaagccaagucgua

SEQ ID NO: 960491 - RNA, 19 nt, Homo sapiens
  misc_RNA (1)...(19): siRNA sense strand
gcagaaagaugaugagagu

SEQ ID NO: 960492 - RNA, 19 nt, Homo sapiens
  misc_RNA (1)...(19): siRNA sense strand
gaacaaaucagauaaacug

SEQ ID NO: 960493 - RNA, 19 nt, Homo sapiens
  misc_RNA (1)...(19): siRNA sense strand
gcaggugucugaaaucuug

SEQ ID NO: 960494 - RNA, 19 nt, Homo sapiens
  misc_RNA (1)...(19): siRNA sense strand
gcaaggaaaucaccucuca

SEQ ID NO: 960495 - RNA, 19 nt, Homo sapiens
  misc_RNA (1)...(19): siRNA sense strand
gaaccaagaugauaucaac

SEQ ID NO: 960496 - RNA, 19 nt, Homo sapiens
  misc_RNA (1)...(19): siRNA sense strand
gcaaggaacaaaucagaua

SEQ ID NO: 960497 - RNA, 19 nt, Homo sapiens
  misc_RNA (1)...(19): siRNA sense strand
cagaaaguauugcuuguaa

SEQ ID NO: 960498 - RNA, 19 nt, Homo sapiens
  misc_RNA (1)...(19): siRNA sense strand
gaguucagcuuuaguagaa

SEQ ID NO: 960499 - RNA, 19 nt, Homo sapiens
  misc_RNA (1)...(19): siRNA sense strand
ggaagcaggugucugaaau

SEQ ID NO: 960500 - RNA, 19 nt, Homo sapiens
  misc_RNA (1)...(19): siRNA sense strand
gaagagaauuuggacaaga

SEQ ID NO: 960501 - RNA, 19 nt, Homo sapiens
  misc_RNA (1)...(19): siRNA sense strand
ggaaaucuauguucagucu

SEQ ID NO: 960502 - RNA, 19 nt, Homo sapiens
  misc_RNA (1)...(19): siRNA sense strand
gaaauaagguggguuacca

SEQ ID NO: 960503 - RNA, 19 nt, Homo sapiens
  misc_RNA (1)...(19): siRNA sense strand
aagcagaaguucagaguaa

SEQ ID NO: 960504 - RNA, 19 nt, Homo sapiens
  misc_RNA (1)...(19): siRNA sense strand
gcaaauggacacucaagaa

SEQ ID NO: 960505 - RNA, 19 nt, Homo sapiens
  misc_RNA (1)...(19): siRNA sense strand
gaaaguauugcuuguaaga

SEQ ID NO: 960506 - RNA, 19 nt, Homo sapiens
  misc_RNA (1)...(19): siRNA sense strand
gcugacagaugccuaagaa

SEQ ID NO: 960507 - RNA, 19 nt, Homo sapiens
  misc_RNA (1)...(19): siRNA sense strand
gaaagagaauaaagugaag

SEQ ID NO: 960508 - RNA, 19 nt, Homo sapiens
  misc_RNA (1)...(19): siRNA sense strand
acaaagaagucaaggaguu

SEQ ID NO: 960509 - RNA, 19 nt, Homo sapiens
  misc_RNA (1)...(19): siRNA sense strand
cagauaaacugaaagagau

SEQ ID NO: 960510 - RNA, 19 nt, Homo sapiens
  misc_RNA (1)...(19): siRNA sense strand
caagaguacugaaggaaug

SEQ ID NO: 960511 - RNA, 19 nt, Homo sapiens
  misc_RNA (1)...(19): siRNA sense strand
gccaguacccggauucuua

SEQ ID NO: 960512 - RNA, 19 nt, Homo sapiens
  misc_RNA (1)...(19): siRNA sense strand
gaugaacagccaaaguuua

SEQ ID NO: 960513 - RNA, 19 nt, Homo sapiens
  misc_RNA (1)...(19): siRNA sense strand
ggaggcggcuggaugcaaa

SEQ ID NO: 960514 - RNA, 19 nt, Homo sapiens
  misc_RNA (1)...(19): siRNA sense strand
ugaagaaccuagcaaggaa

SEQ ID NO: 960515 - RNA, 19 nt, Homo sapiens
  misc_RNA (1)...(19): siRNA sense strand
gaaacccggucucuaguca

SEQ ID NO: 960516 - RNA, 19 nt, Homo sapiens
  misc_RNA (1)...(19): siRNA sense strand
gugaagaugucauuucuag

SEQ ID NO: 960517 - RNA, 19 nt, Homo sapiens
  misc_RNA (1)...(19): siRNA sense strand
uaaaaugccugucagaaaa

SEQ ID NO: 960518 - RNA, 19 nt, Homo sapiens
  misc_RNA (1)...(19): siRNA sense strand
gcagaguucagcuuuagua

SEQ ID NO: 960519 - RNA, 19 nt, Homo sapiens
  misc_RNA (1)...(19): siRNA sense strand
ucacggaaauguaggaguu

SEQ ID NO: 960520 - RNA, 19 nt, Homo sapiens
  misc_RNA (1)...(19): siRNA sense strand
caaagaagucaaggaguua

SEQ ID NO: 960521 - RNA, 19 nt, Homo sapiens
  misc_RNA (1)...(19): siRNA sense strand
ggugaaagccagcaaagaa

SEQ ID NO: 960522 - RNA, 19 nt, Homo sapiens
  misc_RNA (1)...(19): siRNA sense strand
cagcaacguuuaaucaaga

SEQ ID NO: 960523 - RNA, 19 nt, Homo sapiens
  misc_RNA (1)...(19): siRNA sense strand
caaggaagauagaaacagu

SEQ ID NO: 960524 - RNA, 19 nt, Homo sapiens
  misc_RNA (1)...(19): siRNA sense strand
guucagaugcucuuuauga

SEQ ID NO: 960525 - RNA, 19 nt, Homo sapiens
  misc_RNA (1)...(19): siRNA sense strand
gaaagaguacucgaggaua

SEQ ID NO: 960526 - RNA, 19 nt, Homo sapiens
  misc_RNA (1)...(19): siRNA sense strand
aggcaaagcuggacuguuc

SEQ ID NO: 960527 - RNA, 19 nt, Homo sapiens
  misc_RNA (1)...(19): siRNA sense strand
gaagauagaaacagucauc

SEQ ID NO: 960528 - RNA, 19 nt, Homo sapiens
  misc_RNA (1)...(19): siRNA sense strand
gcuuggaacucaggguuua

SEQ ID NO: 960529 - RNA, 19 nt, Homo sapiens
  misc_RNA (1)...(19): siRNA sense strand
gaaauagucaguagagaag

SEQ ID NO: 960530 - RNA, 19 nt, Homo sapiens
  misc_RNA (1)...(19): siRNA sense strand
cagaugcucuuuaugacaa

SEQ ID NO: 960531 - RNA, 19 nt, Homo sapiens
  misc_RNA (1)...(19): siRNA sense strand
gagagaauccugaucaagu

SEQ ID NO: 960532 - RNA, 19 nt, Homo sapiens
  misc_RNA (1)...(19): siRNA sense strand
cagauggguuuccuguuaa

SEQ ID NO: 960533 - RNA, 19 nt, Homo sapiens
  misc_RNA (1)...(19): siRNA sense strand
gaagauggcagugauguca

SEQ ID NO: 960534 - RNA, 19 nt, Homo sapiens
  misc_RNA (1)...(19): siRNA sense strand
gaacugcugacaaagagaa

SEQ ID NO: 960535 - RNA, 19 nt, Homo sapiens
  misc_RNA (1)...(19): siRNA sense strand
ugucugaaaucuugccuaa

SEQ ID NO: 960536 - RNA, 19 nt, Homo sapiens
  misc_RNA (1)...(19): siRNA sense strand
caagcauccucuucagaaa

SEQ ID NO: 960537 - RNA, 19 nt, Homo sapiens
  misc_RNA (1)...(19): siRNA sense strand
ugaaugagguagacaacga

SEQ ID NO: 960538 - RNA, 19 nt, Homo sapiens
  misc_RNA (1)...(19): siRNA sense strand
gaagagccagggcauauuc

SEQ ID NO: 960539 - RNA, 19 nt, Homo sapiens
  misc_RNA (1)...(19): siRNA sense strand
gaagaggaccugccagaag

SEQ ID NO: 960540 - RNA, 19 nt, Homo sapiens
  misc_RNA (1)...(19): siRNA sense strand
gaaccuagcaaggaaauca

SEQ ID NO: 960541 - RNA, 19 nt, Homo sapiens
  misc_RNA (1)...(19): siRNA sense strand
gauaaccagugugauguug

SEQ ID NO: 960542 - RNA, 19 nt, Homo sapiens
  misc_RNA (1)...(19): siRNA sense strand
ggcugaggauaaaugauua

SEQ ID NO: 960543 - RNA, 19 nt, Homo sapiens
  misc_RNA (1)...(19): siRNA sense strand
ucugaaaucuugccuaaag

SEQ ID NO: 960544 - RNA, 19 nt, Homo sapiens
  misc_RNA (1)...(19): siRNA sense strand
gagcaaggaacaaaucaga

SEQ ID NO: 960545 - RNA, 19 nt, Homo sapiens
  misc_RNA (1)...(19): siRNA sense strand
caacuucaaugcccaguac

SEQ ID NO: 960546 - RNA, 19 nt, Homo sapiens
  misc_RNA (1)...(19): siRNA sense strand
gauaagggccaguuugauc

SEQ ID NO: 960547 - RNA, 19 nt, Homo sapiens
  misc_RNA (1)...(19): siRNA sense strand
uagaggaagucaaggaaga

SEQ ID NO: 960548 - RNA, 19 nt, Homo sapiens
  misc_RNA (1)...(19): siRNA sense strand
gaagcucugggccaaauuu

SEQ ID NO: 960549 - RNA, 19 nt, Homo sapiens
  misc_RNA (1)...(19): siRNA sense strand
ggaguucauuggagaguca

SEQ ID NO: 960550 - RNA, 19 nt, Homo sapiens
  misc_RNA (1)...(19): siRNA sense strand
gacccacucuugaaggaaa

SEQ ID NO: 960551 - RNA, 19 nt, Homo sapiens
  misc_RNA (1)...(19): siRNA sense strand
ccagugugauguuguuuau

SEQ ID NO: 960552 - RNA, 19 nt, Homo sapiens
  misc_RNA (1)...(19): siRNA sense strand
gggcugaggauaaaugauu

SEQ ID NO: 960553 - RNA, 19 nt, Homo sapiens
  misc_RNA (1)...(19): siRNA sense strand
uaaccagugugauguuguu

SEQ ID NO: 960554 - RNA, 19 nt, Homo sapiens
  misc_RNA (1)...(19): siRNA sense strand
ggcagcagcccuccagaua

SEQ ID NO: 960555 - RNA, 19 nt, Homo sapiens
  misc_RNA (1)...(19): siRNA sense strand
ggagaggacggugauguaa

SEQ ID NO: 960556 - RNA, 19 nt, Homo sapiens
  misc_RNA (1)...(19): siRNA sense strand
gagaagacaacccugaaga

SEQ ID NO: 960557 - RNA, 19 nt, Homo sapiens
  misc_RNA (1)...(19): siRNA sense strand
aagcagacccuuacaauuc

SEQ ID NO: 960558 - RNA, 19 nt, Homo sapiens
  misc_RNA (1)...(19): siRNA sense strand
uaacagaaugccacuuuga

SEQ ID NO: 960559 - RNA, 19 nt, Homo sapiens
  misc_RNA (1)...(19): siRNA sense strand
uaugccagcuguacacaaa

SEQ ID NO: 960560 - RNA, 19 nt, Homo sapiens
  misc_RNA (1)...(19): siRNA sense strand
ggccaaauuucgagagaau

SEQ ID NO: 960561 - RNA, 19 nt, Homo sapiens
  misc_RNA (1)...(19): siRNA sense strand
caaggaacaaaucagauaa

SEQ ID NO: 960562 - RNA, 19 nt, Homo sapiens
  misc_RNA (1)...(19): siRNA sense strand
ucucuuggguugucgagua

SEQ ID NO: 960563 - RNA, 19 nt, Homo sapiens
  misc_RNA (1)...(19): siRNA sense strand
gaaagaugaugagagugau

SEQ ID NO: 960564 - RNA, 19 nt, Homo sapiens
  misc_RNA (1)...(19): siRNA sense strand
gcucagcauuggcaucaga

SEQ ID NO: 960565 - RNA, 19 nt, Homo sapiens
  misc_RNA (1)...(19): siRNA sense strand
ugacagaugccuaagaaau

SEQ ID NO: 960566 - RNA, 19 nt, Homo sapiens
  misc_RNA (1)...(19): siRNA sense strand
aagagaauuuggacaagaa

SEQ ID NO: 960567 - RNA, 19 nt, Homo sapiens
  misc_RNA (1)...(19): siRNA sense strand
ggagacguuucaccucgaa

SEQ ID NO: 960568 - RNA, 19 nt, Homo sapiens
  misc_RNA (1)...(19): siRNA sense strand
ucauucuccuccugaaaua

SEQ ID NO: 960569 - RNA, 19 nt, Homo sapiens
  misc_RNA (1)...(19): siRNA sense strand
gaacagccaaaguuuaugg

SEQ ID NO: 960570 - RNA, 19 nt, Homo sapiens
  misc_RNA (1)...(19): siRNA sense strand
acacaaagcggcaaaugga

SEQ ID NO: 960571 - RNA, 19 nt, Homo sapiens
  misc_RNA (1)...(19): siRNA sense strand
gcagugcagcucagagaaa

SEQ ID NO: 960572 - RNA, 19 nt, Homo sapiens
  misc_RNA (1)...(19): siRNA sense strand
ggccagacccucaacgaaa

SEQ ID NO: 960573 - RNA, 19 nt, Homo sapiens
  misc_RNA (1)...(19): siRNA sense strand
cagcagcccuccagauagu

SEQ ID NO: 960574 - RNA, 19 nt, Homo sapiens
  misc_RNA (1)...(19): siRNA sense strand
ucaaagcuuuaucagaaga

SEQ ID NO: 960575 - RNA, 19 nt, Homo sapiens
  misc_RNA (1)...(19): siRNA sense strand
cguaagagcguaugcauca

SEQ ID NO: 960576 - RNA, 19 nt, Homo sapiens
  misc_RNA (1)...(19): siRNA sense strand
agagaauacuuuacagugu

SEQ ID NO: 960577 - RNA, 19 nt, Homo sapiens
  misc_RNA (1)...(19): siRNA sense strand
gaaagaaggacagccaaca

SEQ ID NO: 960578 - RNA, 19 nt, Homo sapiens
  misc_RNA (1)...(19): siRNA sense strand
gcucaucgccaacuucaau

SEQ ID NO: 960579 - RNA, 19 nt, Homo sapiens
  misc_RNA (1)...(19): siRNA sense strand
ugaaauagucaguagagaa

SEQ ID NO: 960580 - RNA, 19 nt, Homo sapiens
  misc_RNA (1)...(19): siRNA sense strand
agaagaggcuuggaacuca

SEQ ID NO: 960581 - RNA, 19 nt, Homo sapiens
  misc_RNA (1)...(19): siRNA sense strand
gaggaaggcaauaccugua

SEQ ID NO: 960582 - RNA, 19 nt, Homo sapiens
  misc_RNA (1)...(19): siRNA sense strand
ggaagucaaggaagauaga

SEQ ID NO: 960583 - RNA, 19 nt, Homo sapiens
  misc_RNA (1)...(19): siRNA sense strand
agaaagaugaugagaguga

SEQ ID NO: 960584 - RNA, 19 nt, Homo sapiens
  misc_RNA (1)...(19): siRNA sense strand
ggaauacucugaugugauu

SEQ ID NO: 960585 - RNA, 19 nt, Homo sapiens
  misc_RNA (1)...(19): siRNA sense strand
gcagaaacgugcagauaaa

SEQ ID NO: 960586 - RNA, 19 nt, Homo sapiens
  misc_RNA (1)...(19): siRNA sense strand
gaagaaagcaaccuccaaa

SEQ ID NO: 960587 - RNA, 19 nt, Homo sapiens
  misc_RNA (1)...(19): siRNA sense strand
gaggaaggcuuauuacaag

SEQ ID NO: 960588 - RNA, 19 nt, Homo sapiens
  misc_RNA (1)...(19): siRNA sense strand
ccaaggagguuguggagaa

SEQ ID NO: 960589 - RNA, 19 nt, Homo sapiens
  misc_RNA (1)...(19): siRNA sense strand
gaagaagggaggcuuauau

SEQ ID NO: 960590 - RNA, 19 nt, Homo sapiens
  misc_RNA (1)...(19): siRNA sense strand
gaaagcaaccuccaaagug

SEQ ID NO: 960591 - RNA, 19 nt, Homo sapiens
  misc_RNA (1)...(19): siRNA sense strand
gaagaagaagggaggcuua

SEQ ID NO: 960592 - RNA, 19 nt, Homo sapiens
  misc_RNA (1)...(19): siRNA sense strand
gaugaaacuuagacacaaa

SEQ ID NO: 960593 - RNA, 19 nt, Homo sapiens
  misc_RNA (1)...(19): siRNA sense strand
ccacgaggaaggcuuauua

SEQ ID NO: 960594 - RNA, 19 nt, Homo sapiens
  misc_RNA (1)...(19): siRNA sense strand
gaggagauuuccaacuauu

SEQ ID NO: 960595 - RNA, 19 nt, Homo sapiens
  misc_RNA (1)...(19): siRNA sense strand
gaaaauagcagaugccauu

SEQ ID NO: 960596 - RNA, 19 nt, Homo sapiens
  misc_RNA (1)...(19): siRNA sense strand
gcaggaccauugagagcua

SEQ ID NO: 960597 - RNA, 19 nt, Homo sapiens
  misc_RNA (1)...(19): siRNA sense strand
gagaucaaguugcuccauu

SEQ ID NO: 960598 - RNA, 19 nt, Homo sapiens
  misc_RNA (1)...(19): siRNA sense strand
gaagggaggcuuauauagu

SEQ ID NO: 960599 - RNA, 19 nt, Homo sapiens
  misc_RNA (1)...(19): siRNA sense strand
gugcugagaucguuaagga

SEQ ID NO: 960600 - RNA, 19 nt, Homo sapiens
  misc_RNA (1)...(19): siRNA sense strand
caaucgagaggcugaauua

SEQ ID NO: 960601 - RNA, 19 nt, Homo sapiens
  misc_RNA (1)...(19): siRNA sense strand
ggaggagauuuccaacuau

SEQ ID NO: 960602 - RNA, 19 nt, Homo sapiens
  misc_RNA (1)...(19): siRNA sense strand
aagaucagcuucuauauac

SEQ ID NO: 960603 - RNA, 19 nt, Homo sapiens
  misc_RNA (1)...(19): siRNA sense strand
gcaacaguaugguggaugu

SEQ ID NO: 960604 - RNA, 19 nt, Homo sapiens
  misc_RNA (1)...(19): siRNA sense strand
gaagugcgcacccacauuc

SEQ ID NO: 960605 - RNA, 19 nt, Homo sapiens
  misc_RNA (1)...(19): siRNA sense strand
gggaagagcagccugauca

SEQ ID NO: 960606 - RNA, 19 nt, Homo sapiens
  misc_RNA (1)...(19): siRNA sense strand
uggauuaccuucggaauga

SEQ ID NO: 960607 - RNA, 19 nt, Homo sapiens
  misc_RNA (1)...(19): siRNA sense strand
gaaguggguugaggagaug

SEQ ID NO: 960608 - RNA, 19 nt, Homo sapiens
  misc_RNA (1)...(19): siRNA sense strand
aagagcagccugaucaaua

SEQ ID NO: 960609 - RNA, 19 nt, Homo sapiens
  misc_RNA (1)...(19): siRNA sense strand
ccagaccacugagcacuuu

SEQ ID NO: 960610 - RNA, 19 nt, Homo sapiens
  misc_RNA (1)...(19): siRNA sense strand
gcucagugcugcagaggau

SEQ ID NO: 960611 - RNA, 19 nt, Homo sapiens
  misc_RNA (1)...(19): siRNA sense strand
aggaggaguuugagcauaa

SEQ ID NO: 960612 - RNA, 19 nt, Homo sapiens
  misc_RNA (1)...(19): siRNA sense strand
ggagauuuccaacuauuau

SEQ ID NO: 960613 - RNA, 19 nt, Homo sapiens
  misc_RNA (1)...(19): siRNA sense strand
guggagaaauggcuggauu

SEQ ID NO: 960614 - RNA, 19 nt, Homo sapiens
  misc_RNA (1)...(19): siRNA sense strand
cgaggaaggcuuauuacaa

SEQ ID NO: 960615 - RNA, 19 nt, Homo sapiens
  misc_RNA (1)...(19): siRNA sense strand
gcugagaucguuaaggaaa

SEQ ID NO: 960616 - RNA, 19 nt, Homo sapiens
  misc_RNA (1)...(19): siRNA sense strand
ucgagaggcugaauuaaag

SEQ ID NO: 960617 - RNA, 19 nt, Homo sapiens
  misc_RNA (1)...(19): siRNA sense strand
gaggcugaauuaaagaaga

SEQ ID NO: 960618 - RNA, 19 nt, Homo sapiens
  misc_RNA (1)...(19): siRNA sense strand
uccguaaggugguggaaua

SEQ ID NO: 960619 - RNA, 19 nt, Homo sapiens
  misc_RNA (1)...(19): siRNA sense strand
caaggagguuguggagaaa

SEQ ID NO: 960620 - RNA, 19 nt, Homo sapiens
  misc_RNA (1)...(19): siRNA sense strand
gagcacaaggcaacaagaa

SEQ ID NO: 960621 - RNA, 19 nt, Homo sapiens
  misc_RNA (1)...(19): siRNA sense strand
agaaauggcuggauuaccu

SEQ ID NO: 960622 - RNA, 19 nt, Homo sapiens
  misc_RNA (1)...(19): siRNA sense strand
aauagcagaugccauugaa

SEQ ID NO: 960623 - RNA, 19 nt, Homo sapiens
  misc_RNA (1)...(19): siRNA sense strand
auacugagcaggccaauga

SEQ ID NO: 960624 - RNA, 19 nt, Homo sapiens
  misc_RNA (1)...(19): siRNA sense strand
ggaagaaagcaaccuccaa

SEQ ID NO: 960625 - RNA, 19 nt, Homo sapiens
  misc_RNA (1)...(19): siRNA sense strand
agaagaagaugcagaaacg

SEQ ID NO: 960626 - RNA, 19 nt, Homo sapiens
  misc_RNA (1)...(19): siRNA sense strand
aagaagggaggcuuauaua

SEQ ID NO: 960627 - RNA, 19 nt, Homo sapiens
  misc_RNA (1)...(19): siRNA sense strand
cagaugccauugaaaauaa

SEQ ID NO: 960628 - RNA, 19 nt, Homo sapiens
  misc_RNA (1)...(19): siRNA sense strand
gagcauaaggaggaaguuu

SEQ ID NO: 960629 - RNA, 19 nt, Homo sapiens
  misc_RNA (1)...(19): siRNA sense strand
caggaggaguuugagcaua

SEQ ID NO: 960630 - RNA, 19 nt, Homo sapiens
  misc_RNA (1)...(19): siRNA sense strand
aaaccaccguguauaagau

SEQ ID NO: 960631 - RNA, 19 nt, Homo sapiens
  misc_RNA (1)...(19): siRNA sense strand
caacuauuauggcgucucu

SEQ ID NO: 960632 - RNA, 19 nt, Homo sapiens
  misc_RNA (1)...(19): siRNA sense strand
guaaggugguggaauacuc

SEQ ID NO: 960633 - RNA, 19 nt, Homo sapiens
  misc_RNA (1)...(19): siRNA sense strand
agaaguggguugaggagau

SEQ ID NO: 960634 - RNA, 19 nt, Homo sapiens
  misc_RNA (1)...(19): siRNA sense strand
ugaaauggagaucaaguug

SEQ ID NO: 960635 - RNA, 19 nt, Homo sapiens
  misc_RNA (1)...(19): siRNA sense strand
gaagagcagccugaucaau

SEQ ID NO: 960636 - RNA, 19 nt, Homo sapiens
  misc_RNA (1)...(19): siRNA sense strand
uaaagaagaaguggguuga

SEQ ID NO: 960637 - RNA, 19 nt, Homo sapiens
  misc_RNA (1)...(19): siRNA sense strand
aagggaggcuuauauaguc

SEQ ID NO: 960638 - RNA, 19 nt, Homo sapiens
  misc_RNA (1)...(19): siRNA sense strand
gcugcaaccuggaggagau

SEQ ID NO: 960639 - RNA, 19 nt, Homo sapiens
  misc_RNA (1)...(19): siRNA sense strand
caaugaagacaccauggaa

SEQ ID NO: 960640 - RNA, 19 nt, Homo sapiens
  misc_RNA (1)...(19): siRNA sense strand
gaaauggcuggauuaccuu

SEQ ID NO: 960641 - RNA, 19 nt, Homo sapiens
  misc_RNA (1)...(19): siRNA sense strand
ggagaucucacuggguauu

SEQ ID NO: 960642 - RNA, 19 nt, Homo sapiens
  misc_RNA (1)...(19): siRNA sense strand
gcagaugccauugaaaaua

SEQ ID NO: 960643 - RNA, 19 nt, Homo sapiens
  misc_RNA (1)...(19): siRNA sense strand
agagcagccugaucaauag

SEQ ID NO: 960644 - RNA, 19 nt, Homo sapiens
  misc_RNA (1)...(19): siRNA sense strand
ggaaggcuuauuacaagga

SEQ ID NO: 960645 - RNA, 19 nt, Homo sapiens
  misc_RNA (1)...(19): siRNA sense strand
gcccuaagagcaacaguau

SEQ ID NO: 960646 - RNA, 19 nt, Homo sapiens
  misc_RNA (1)...(19): siRNA sense strand
gcagugugccaguagauca

SEQ ID NO: 960647 - RNA, 19 nt, Homo sapiens
  misc_RNA (1)...(19): siRNA sense strand
guggaauacucugauguga

SEQ ID NO: 960648 - RNA, 19 nt, Homo sapiens
  misc_RNA (1)...(19): siRNA sense strand
ugagaucguuaaggaaaug

SEQ ID NO: 960649 - RNA, 19 nt, Homo sapiens
  misc_RNA (1)...(19): siRNA sense strand
ccaaugaucaugccaaucg

SEQ ID NO: 960650 - RNA, 19 nt, Homo sapiens
  misc_RNA (1)...(19): siRNA sense strand
gacacggacccacuugaaa

SEQ ID NO: 960651 - RNA, 19 nt, Homo sapiens
  misc_RNA (1)...(19): siRNA sense strand
gagaaucugaugagcuguu

SEQ ID NO: 960652 - RNA, 19 nt, Homo sapiens
  misc_RNA (1)...(19): siRNA sense strand
ggaugccagagacccauua

SEQ ID NO: 960653 - RNA, 19 nt, Homo sapiens
  misc_RNA (1)...(19): siRNA sense strand
ugaugguguuggugacuaa

SEQ ID NO: 960654 - RNA, 19 nt, Homo sapiens
  misc_RNA (1)...(19): siRNA sense strand
gaugagcuguugggugaca

SEQ ID NO: 960655 - RNA, 19 nt, Homo sapiens
  misc_RNA (1)...(19): siRNA sense strand
gagaggcugaauuaaagaa

SEQ ID NO: 960656 - RNA, 19 nt, Homo sapiens
  misc_RNA (1)...(19): siRNA sense strand
ccuaagagcaacaguaugg

SEQ ID NO: 960657 - RNA, 19 nt, Homo sapiens
  misc_RNA (1)...(19): siRNA sense strand
gagcaacaguaugguggau

SEQ ID NO: 960658 - RNA, 19 nt, Homo sapiens
  misc_RNA (1)...(19): siRNA sense strand
ggaagagcagccugaucaa

SEQ ID NO: 960659 - RNA, 19 nt, Homo sapiens
  misc_RNA (1)...(19): siRNA sense strand
ugacacggacccacuugaa

SEQ ID NO: 960660 - RNA, 19 nt, Homo sapiens
  misc_RNA (1)...(19): siRNA sense strand
gccacaagaagauaaguug

SEQ ID NO: 960661 - RNA, 19 nt, Homo sapiens
  misc_RNA (1)...(19): siRNA sense strand
aaacgcaggaccauugaga

SEQ ID NO: 960662 - RNA, 19 nt, Homo sapiens
  misc_RNA (1)...(19): siRNA sense strand
auaagaagaagaugcagaa

SEQ ID NO: 960663 - RNA, 19 nt, Homo sapiens
  misc_RNA (1)...(19): siRNA sense strand
uggagaaauggcuggauua

SEQ ID NO: 960664 - RNA, 19 nt, Homo sapiens
  misc_RNA (1)...(19): siRNA sense strand
gcugucugauuccaugaug

SEQ ID NO: 960665 - RNA, 19 nt, Homo sapiens
  misc_RNA (1)...(19): siRNA sense strand
aaauggagaucaaguugcu

SEQ ID NO: 960666 - RNA, 19 nt, Homo sapiens
  misc_RNA (1)...(19): siRNA sense strand
ccaaugaagacaccaugga

SEQ ID NO: 960667 - RNA, 19 nt, Homo sapiens
  misc_RNA (1)...(19): siRNA sense strand
aggcugaauuaaagaagaa

SEQ ID NO: 960668 - RNA, 19 nt, Homo sapiens
  misc_RNA (1)...(19): siRNA sense strand
gaucagcuucuauauacca

SEQ ID NO: 960669 - RNA, 19 nt, Homo sapiens
  misc_RNA (1)...(19): siRNA sense strand
aggcuuauauagucaggaa

SEQ ID NO: 960670 - RNA, 19 nt, Homo sapiens
  misc_RNA (1)...(19): siRNA sense strand
ccaagggccacaagaagau

SEQ ID NO: 960671 - RNA, 19 nt, Homo sapiens
  misc_RNA (1)...(19): siRNA sense strand
agaaagcaaccuccaaagu

SEQ ID NO: 960672 - RNA, 19 nt, Homo sapiens
  misc_RNA (1)...(19): siRNA sense strand
acacggacccacuugaaau

SEQ ID NO: 960673 - RNA, 19 nt, Homo sapiens
  misc_RNA (1)...(19): siRNA sense strand
gagcuacugucaggauguc

SEQ ID NO: 960674 - RNA, 19 nt, Homo sapiens
  misc_RNA (1)...(19): siRNA sense strand
uggcaaugcugaugauggu

SEQ ID NO: 960675 - RNA, 19 nt, Homo sapiens
  misc_RNA (1)...(19): siRNA sense strand
agaagaagggaggcuuaua

SEQ ID NO: 960676 - RNA, 19 nt, Homo sapiens
  misc_RNA (1)...(19): siRNA sense strand
gagauuuccaacuauuaug

SEQ ID NO: 960677 - RNA, 19 nt, Homo sapiens
  misc_RNA (1)...(19): siRNA sense strand
caagggccacaagaagaua

SEQ ID NO: 960678 - RNA, 19 nt, Homo sapiens
  misc_RNA (1)...(19): siRNA sense strand
ggaggaaguuuugcaggaa

SEQ ID NO: 960679 - RNA, 19 nt, Homo sapiens
  misc_RNA (1)...(19): siRNA sense strand
gguggaauacucugaugug

SEQ ID NO: 960680 - RNA, 19 nt, Homo sapiens
  misc_RNA (1)...(19): siRNA sense strand
caaugcugaugaugguguu

SEQ ID NO: 960681 - RNA, 19 nt, Homo sapiens
  misc_RNA (1)...(19): siRNA sense strand
ggagaaauggcuggauuac

SEQ ID NO: 960682 - RNA, 19 nt, Homo sapiens
  misc_RNA (1)...(19): siRNA sense strand
gaagcugguccuggucuug

SEQ ID NO: 960683 - RNA, 19 nt, Homo sapiens
  misc_RNA (1)...(19): siRNA sense strand
ccauugagagcuacuguca

SEQ ID NO: 960684 - RNA, 19 nt, Homo sapiens
  misc_RNA (1)...(19): siRNA sense strand
ggaagaagcucagaaagac

SEQ ID NO: 960685 - RNA, 19 nt, Homo sapiens
  misc_RNA (1)...(19): siRNA sense strand
gagcuuugaugcugucuug

SEQ ID NO: 960686 - RNA, 19 nt, Homo sapiens
  misc_RNA (1)...(19): siRNA sense strand
caaaggaggcgcucuauag

SEQ ID NO: 960687 - RNA, 19 nt, Homo sapiens
  misc_RNA (1)...(19): siRNA sense strand
gaagggccauccagaccaa

SEQ ID NO: 960688 - RNA, 19 nt, Homo sapiens
  misc_RNA (1)...(19): siRNA sense strand
gcaaaggaggcgcucuaua

SEQ ID NO: 960689 - RNA, 19 nt, Homo sapiens
  misc_RNA (1)...(19): siRNA sense strand
agagguggcuggucauuga

SEQ ID NO: 960690 - RNA, 19 nt, Homo sapiens
  misc_RNA (1)...(19): siRNA sense strand
ccaagggacuggagccuau

SEQ ID NO: 960691 - RNA, 19 nt, Homo sapiens
  misc_RNA (1)...(19): siRNA sense strand
ggaaucugguagagaguga

SEQ ID NO: 960692 - RNA, 19 nt, Homo sapiens
  misc_RNA (1)...(19): siRNA sense strand
gcauggacauucugaagca

SEQ ID NO: 960693 - RNA, 19 nt, Homo sapiens
  misc_RNA (1)...(19): siRNA sense strand
gcaacgacaugcuccucuu

SEQ ID NO: 960694 - RNA, 19 nt, Homo sapiens
  misc_RNA (1)...(19): siRNA sense strand
ggaugucuuuguucgguuu

SEQ ID NO: 960695 - RNA, 19 nt, Homo sapiens
  misc_RNA (1)...(19): siRNA sense strand
ucagugugcuggcguuuga

SEQ ID NO: 960696 - RNA, 19 nt, Homo sapiens
  misc_RNA (1)...(19): siRNA sense strand
aggaugaggugccuaagaa

SEQ ID NO: 960697 - RNA, 19 nt, Homo sapiens
  misc_RNA (1)...(19): siRNA sense strand
gaaccacucaaaccaauuc

SEQ ID NO: 960698 - RNA, 19 nt, Homo sapiens
  misc_RNA (1)...(19): siRNA sense strand
ucacugaaaccaccaaguu

SEQ ID NO: 960699 - RNA, 19 nt, Homo sapiens
  misc_RNA (1)...(19): siRNA sense strand
ccaugaagcuggccaacca

SEQ ID NO: 960700 - RNA, 19 nt, Homo sapiens
  misc_RNA (1)...(19): siRNA sense strand
uaucagacagcaauugaaa

SEQ ID NO: 960701 - RNA, 19 nt, Homo sapiens
  misc_RNA (1)...(19): siRNA sense strand
ggacggggcuaacgaugaa

SEQ ID NO: 960702 - RNA, 19 nt, Homo sapiens
  misc_RNA (1)...(19): siRNA sense strand
agaccagugugaucaagaa

SEQ ID NO: 960703 - RNA, 19 nt, Homo sapiens
  misc_RNA (1)...(19): siRNA sense strand
gcaagggagucagggaaca

SEQ ID NO: 960704 - RNA, 19 nt, Homo sapiens
  misc_RNA (1)...(19): siRNA sense strand
aggcugaguucuuggcuuu

SEQ ID NO: 960705 - RNA, 19 nt, Homo sapiens
  misc_RNA (1)...(19): siRNA sense strand
gaacucaccaagcucauac

SEQ ID NO: 960706 - RNA, 19 nt, Homo sapiens
  misc_RNA (1)...(19): siRNA sense strand
ggagcuaaaugagguccuu

SEQ ID NO: 960707 - RNA, 19 nt, Homo sapiens
  misc_RNA (1)...(19): siRNA sense strand
ggacggaugaggacgacuu

SEQ ID NO: 960708 - RNA, 19 nt, Homo sapiens
  misc_RNA (1)...(19): siRNA sense strand
ccaagggcaucaaguucga

SEQ ID NO: 960709 - RNA, 19 nt, Homo sapiens
  misc_RNA (1)...(19): siRNA sense strand
uggaagaagcucagaaaga

SEQ ID NO: 960710 - RNA, 19 nt, Homo sapiens
  misc_RNA (1)...(19): siRNA sense strand
gagcauggacauucugaag

SEQ ID NO: 960711 - RNA, 19 nt, Homo sapiens
  misc_RNA (1)...(19): siRNA sense strand
cgaucuggaugucuuuguu

SEQ ID NO: 960712 - RNA, 19 nt, Homo sapiens
  misc_RNA (1)...(19): siRNA sense strand
gaggaugaggugccuaaga

SEQ ID NO: 960713 - RNA, 19 nt, Homo sapiens
  misc_RNA (1)...(19): siRNA sense strand
ccaccaaguuugaaaaguu

SEQ ID NO: 960714 - RNA, 19 nt, Homo sapiens
  misc_RNA (1)...(19): siRNA sense strand
ggaugaaggcccagaggau

SEQ ID NO: 960715 - RNA, 19 nt, Homo sapiens
  misc_RNA (1)...(19): siRNA sense strand
cagaaguggcccagcagua

SEQ ID NO: 960716 - RNA, 19 nt, Homo sapiens
  misc_RNA (1)...(19): siRNA sense strand
gacaagaccagugugauca

SEQ ID NO: 960717 - RNA, 19 nt, Homo sapiens
  misc_RNA (1)...(19): siRNA sense strand
gaagaagcucagaaagaca

SEQ ID NO: 960718 - RNA, 19 nt, Homo sapiens
  misc_RNA (1)...(19): siRNA sense strand
gaccaagggcaucaaguuc

SEQ ID NO: 960719 - RNA, 19 nt, Homo sapiens
  misc_RNA (1)...(19): siRNA sense strand
ccgcguggcuaagagcuuu

SEQ ID NO: 960720 - RNA, 19 nt, Homo sapiens
  misc_RNA (1)...(19): siRNA sense strand
ggcuaacgaugaagaacug

SEQ ID NO: 960721 - RNA, 19 nt, Homo sapiens
  misc_RNA (1)...(19): siRNA sense strand
cacuggagauagcauguga

SEQ ID NO: 960722 - RNA, 19 nt, Homo sapiens
  misc_RNA (1)...(19): siRNA sense strand
gcagcuggccuuccuagag

SEQ ID NO: 960723 - RNA, 19 nt, Homo sapiens
  misc_RNA (1)...(19): siRNA sense strand
ggagaagcucaaaggcaaa

SEQ ID NO: 960724 - RNA, 19 nt, Homo sapiens
  misc_RNA (1)...(19): siRNA sense strand
ggagguaaugguccggauu

SEQ ID NO: 960725 - RNA, 19 nt, Homo sapiens
  misc_RNA (1)...(19): siRNA sense strand
aaagacaagaccaguguga

SEQ ID NO: 960726 - RNA, 19 nt, Homo sapiens
  misc_RNA (1)...(19): siRNA sense strand
gucaagcaauaccaagaug

SEQ ID NO: 960727 - RNA, 19 nt, Homo sapiens
  misc_RNA (1)...(19): siRNA sense strand
gcaguaccaggacaucaug

SEQ ID NO: 960728 - RNA, 19 nt, Homo sapiens
  misc_RNA (1)...(19): siRNA sense strand
gagguaaugguccggauuc

SEQ ID NO: 960729 - RNA, 19 nt, Homo sapiens
  misc_RNA (1)...(19): siRNA sense strand
agaaagacaagaccagugu

SEQ ID NO: 960730 - RNA, 19 nt, Homo sapiens
  misc_RNA (1)...(19): siRNA sense strand
ccguggaugucgcugaauu

SEQ ID NO: 960731 - RNA, 19 nt, Homo sapiens
  misc_RNA (1)...(19): siRNA sense strand
gagcgcaucgucaagcaau

SEQ ID NO: 960732 - RNA, 19 nt, Homo sapiens
  misc_RNA (1)...(19): siRNA sense strand
agaccaagggcaucaaguu

SEQ ID NO: 960733 - RNA, 19 nt, Homo sapiens
  misc_RNA (1)...(19): siRNA sense strand
ggagucagggaacagauca

SEQ ID NO: 960734 - RNA, 19 nt, Homo sapiens
  misc_RNA (1)...(19): siRNA sense strand
gggcaucaaguucgaagug

SEQ ID NO: 960735 - RNA, 19 nt, Homo sapiens
  misc_RNA (1)...(19): siRNA sense strand
cguggagggugccaagaug

SEQ ID NO: 960736 - RNA, 19 nt, Homo sapiens
  misc_RNA (1)...(19): siRNA sense strand
caagaccagugugaucaag

SEQ ID NO: 960737 - RNA, 19 nt, Homo sapiens
  misc_RNA (1)...(19): siRNA sense strand
cugaaccacucaaaccaau

SEQ ID NO: 960738 - RNA, 19 nt, Homo sapiens
  misc_RNA (1)...(19): siRNA sense strand
gagagacccggaugaggau

SEQ ID NO: 960739 - RNA, 19 nt, Homo sapiens
  misc_RNA (1)...(19): siRNA sense strand
caucaaguucgaagugguu

SEQ ID NO: 960740 - RNA, 19 nt, Homo sapiens
  misc_RNA (1)...(19): siRNA sense strand
ugucaacaaggacgacuuu

SEQ ID NO: 960741 - RNA, 19 nt, Homo sapiens
  misc_RNA (1)...(19): siRNA sense strand
ugacagcccagcaguugga

SEQ ID NO: 960742 - RNA, 19 nt, Homo sapiens
  misc_RNA (1)...(19): siRNA sense strand
guucaaggagcaguucaaa

SEQ ID NO: 960743 - RNA, 19 nt, Homo sapiens
  misc_RNA (1)...(19): siRNA sense strand
cguggaagaagcucagaaa

SEQ ID NO: 960744 - RNA, 19 nt, Homo sapiens
  misc_RNA (1)...(19): siRNA sense strand
gaucuggaugucuuuguuc

SEQ ID NO: 960745 - RNA, 19 nt, Homo sapiens
  misc_RNA (1)...(19): siRNA sense strand
ugaacucaccaagcucaua

SEQ ID NO: 960746 - RNA, 19 nt, Homo sapiens
  misc_RNA (1)...(19): siRNA sense strand
caugugagguccgggagau

SEQ ID NO: 960747 - RNA, 19 nt, Homo sapiens
  misc_RNA (1)...(19): siRNA sense strand
uggaggccauugagaagau

SEQ ID NO: 960748 - RNA, 19 nt, Homo sapiens
  misc_RNA (1)...(19): siRNA sense strand
gcaugagagacccggauga

SEQ ID NO: 960749 - RNA, 19 nt, Homo sapiens
  misc_RNA (1)...(19): siRNA sense strand
ggaggccauugagaagaug

SEQ ID NO: 960750 - RNA, 19 nt, Homo sapiens
  misc_RNA (1)...(19): siRNA sense strand
acuggaggcugaguucuug

SEQ ID NO: 960751 - RNA, 19 nt, Homo sapiens
  misc_RNA (1)...(19): siRNA sense strand
ugaaagcgccagacaagcu

SEQ ID NO: 960752 - RNA, 19 nt, Homo sapiens
  misc_RNA (1)...(19): siRNA sense strand
gagagguggcuggucauug

SEQ ID NO: 960753 - RNA, 19 nt, Homo sapiens
  misc_RNA (1)...(19): siRNA sense strand
agacaagaccagugugauc

SEQ ID NO: 960754 - RNA, 19 nt, Homo sapiens
  misc_RNA (1)...(19): siRNA sense strand
cgacaugcuccucuucauc

SEQ ID NO: 960755 - RNA, 19 nt, Homo sapiens
  misc_RNA (1)...(19): siRNA sense strand
cagaggaugaagaggauga

SEQ ID NO: 960756 - RNA, 19 nt, Homo sapiens
  misc_RNA (1)...(19): siRNA sense strand
ccuggagacugccaugaag

SEQ ID NO: 960757 - RNA, 19 nt, Homo sapiens
  misc_RNA (1)...(19): siRNA sense strand
cacaguugcugggcccaaa

SEQ ID NO: 960758 - RNA, 19 nt, Homo sapiens
  misc_RNA (1)...(19): siRNA sense strand
gcuggaugcacuggagaua

SEQ ID NO: 960759 - RNA, 19 nt, Homo sapiens
  misc_RNA (1)...(19): siRNA sense strand
gcugaguucuuggcuuugg

SEQ ID NO: 960760 - RNA, 19 nt, Homo sapiens
  misc_RNA (1)...(19): siRNA sense strand
gcuaaaugagguccuugga

SEQ ID NO: 960761 - RNA, 19 nt, Homo sapiens
  misc_RNA (1)...(19): siRNA sense strand
caacgacaugcuccucuuc

SEQ ID NO: 960762 - RNA, 19 nt, Homo sapiens
  misc_RNA (1)...(19): siRNA sense strand
cccagaggaugaagaggau

SEQ ID NO: 960763 - RNA, 19 nt, Homo sapiens
  misc_RNA (1)...(19): siRNA sense strand
agcggcagcugcaguucua

SEQ ID NO: 960764 - RNA, 19 nt, Homo sapiens
  misc_RNA (1)...(19): siRNA sense strand
guaccaggacaucaugcaa

SEQ ID NO: 960765 - RNA, 19 nt, Homo sapiens
  misc_RNA (1)...(19): siRNA sense strand
gagacccggaugaggauga

SEQ ID NO: 960766 - RNA, 19 nt, Homo sapiens
  misc_RNA (1)...(19): siRNA sense strand
ucuaucagacagcaauuga

SEQ ID NO: 960767 - RNA, 19 nt, Homo sapiens
  misc_RNA (1)...(19): siRNA sense strand
aagaagcucagaaagacaa

SEQ ID NO: 960768 - RNA, 19 nt, Homo sapiens
  misc_RNA (1)...(19): siRNA sense strand
cgacuuggaggcugaugau

SEQ ID NO: 960769 - RNA, 19 nt, Homo sapiens
  misc_RNA (1)...(19): siRNA sense strand
uaccacugcugccgcuaga

SEQ ID NO: 960770 - RNA, 19 nt, Homo sapiens
  misc_RNA (1)...(19): siRNA sense strand
aagaggaugaggugccuaa

SEQ ID NO: 960771 - RNA, 19 nt, Homo sapiens
  misc_RNA (1)...(19): siRNA sense strand
gaagcucaaaggcaaaggu

SEQ ID NO: 960772 - RNA, 19 nt, Homo sapiens
  misc_RNA (1)...(19): siRNA sense strand
cgugaagggcaucaacuug

SEQ ID NO: 960773 - RNA, 19 nt, Homo sapiens
  misc_RNA (1)...(19): siRNA sense strand
caauugaaagcgccagaca

SEQ ID NO: 960774 - RNA, 19 nt, Homo sapiens
  misc_RNA (1)...(19): siRNA sense strand
ccacugcugccgcuagaca

SEQ ID NO: 960775 - RNA, 19 nt, Homo sapiens
  misc_RNA (1)...(19): siRNA sense strand
gcuuugaugcugucuugga

SEQ ID NO: 960776 - RNA, 19 nt, Homo sapiens
  misc_RNA (1)...(19): siRNA sense strand
gaaggaaucugucuugaaa

SEQ ID NO: 960777 - RNA, 19 nt, Homo sapiens
  misc_RNA (1)...(19): siRNA sense strand
gaacagaaauggaagcaaa

SEQ ID NO: 960778 - RNA, 19 nt, Homo sapiens
  misc_RNA (1)...(19): siRNA sense strand
gcaaagaaaugaacugaug

SEQ ID NO: 960779 - RNA, 19 nt, Homo sapiens
  misc_RNA (1)...(19): siRNA sense strand
ggacuugacucucacagua

SEQ ID NO: 960780 - RNA, 19 nt, Homo sapiens
  misc_RNA (1)...(19): siRNA sense strand
gaaagcaaaugaagggaaa

SEQ ID NO: 960781 - RNA, 19 nt, Homo sapiens
  misc_RNA (1)...(19): siRNA sense strand
gaacugauagugaauauga

SEQ ID NO: 960782 - RNA, 19 nt, Homo sapiens
  misc_RNA (1)...(19): siRNA sense strand
ccugaaagcugaaggauuu

SEQ ID NO: 960783 - RNA, 19 nt, Homo sapiens
  misc_RNA (1)...(19): siRNA sense strand
gaauuacucuggcagcuuu

SEQ ID NO: 960784 - RNA, 19 nt, Homo sapiens
  misc_RNA (1)...(19): siRNA sense strand
agaaauggcuuauaagaug

SEQ ID NO: 960785 - RNA, 19 nt, Homo sapiens
  misc_RNA (1)...(19): siRNA sense strand
gcaacgauuucuccaauga

SEQ ID NO: 960786 - RNA, 19 nt, Homo sapiens
  misc_RNA (1)...(19): siRNA sense strand
gagagaagcuuagugaaau

SEQ ID NO: 960787 - RNA, 19 nt, Homo sapiens
  misc_RNA (1)...(19): siRNA sense strand
gaaauggcuuauaagauga

SEQ ID NO: 960788 - RNA, 19 nt, Homo sapiens
  misc_RNA (1)...(19): siRNA sense strand
gaaaugcaguacauguauu

SEQ ID NO: 960789 - RNA, 19 nt, Homo sapiens
  misc_RNA (1)...(19): siRNA sense strand
gaacgcugcuacaaugauu

SEQ ID NO: 960790 - RNA, 19 nt, Homo sapiens
  misc_RNA (1)...(19): siRNA sense strand
agaacaggcugaucuuaua

SEQ ID NO: 960791 - RNA, 19 nt, Homo sapiens
  misc_RNA (1)...(19): siRNA sense strand
caguagaaauggcuuauaa

SEQ ID NO: 960792 - RNA, 19 nt, Homo sapiens
  misc_RNA (1)...(19): siRNA sense strand
gaagauccagugacaagua

SEQ ID NO: 960793 - RNA, 19 nt, Homo sapiens
  misc_RNA (1)...(19): siRNA sense strand
gcugucgccuuguuaaaua

SEQ ID NO: 960794 - RNA, 19 nt, Homo sapiens
  misc_RNA (1)...(19): siRNA sense strand
caacaugucagcaggauaa

SEQ ID NO: 960795 - RNA, 19 nt, Homo sapiens
  misc_RNA (1)...(19): siRNA sense strand
gagcaacgauuucuccaau

SEQ ID NO: 960796 - RNA, 19 nt, Homo sapiens
  misc_RNA (1)...(19): siRNA sense strand
auaaagaucugacucaaga

SEQ ID NO: 960797 - RNA, 19 nt, Homo sapiens
  misc_RNA (1)...(19): siRNA sense strand
gaagaacgaaagcaaauga

SEQ ID NO: 960798 - RNA, 19 nt, Homo sapiens
  misc_RNA (1)...(19): siRNA sense strand
aggcugaucuuauaaauga

SEQ ID NO: 960799 - RNA, 19 nt, Homo sapiens
  misc_RNA (1)...(19): siRNA sense strand
gcaguaguguggacgaauu

SEQ ID NO: 960800 - RNA, 19 nt, Homo sapiens
  misc_RNA (1)...(19): siRNA sense strand
gaagaagacucuggaacug

SEQ ID NO: 960801 - RNA, 19 nt, Homo sapiens
  misc_RNA (1)...(19): siRNA sense strand
gaacaggcugaucuuauaa

SEQ ID NO: 960802 - RNA, 19 nt, Homo sapiens
  misc_RNA (1)...(19): siRNA sense strand
auucuuagcuccagucaua

SEQ ID NO: 960803 - RNA, 19 nt, Homo sapiens
  misc_RNA (1)...(19): siRNA sense strand
gcuccgagacuuuggauua

SEQ ID NO: 960804 - RNA, 19 nt, Homo sapiens
  misc_RNA (1)...(19): siRNA sense strand
caagaacuaugcagaguca

SEQ ID NO: 960805 - RNA, 19 nt, Homo sapiens
  misc_RNA (1)...(19): siRNA sense strand
aaaggagaauacagaguua

SEQ ID NO: 960806 - RNA, 19 nt, Homo sapiens
  misc_RNA (1)...(19): siRNA sense strand
acucagaugugaauaauga

SEQ ID NO: 960807 - RNA, 19 nt, Homo sapiens
  misc_RNA (1)...(19): siRNA sense strand
gaugauggauuuagaagag

SEQ ID NO: 960808 - RNA, 19 nt, Homo sapiens
  misc_RNA (1)...(19): siRNA sense strand
cgcaauacaugcaagauaa

SEQ ID NO: 960809 - RNA, 19 nt, Homo sapiens
  misc_RNA (1)...(19): siRNA sense strand
gagaagugauggugaaagu

SEQ ID NO: 960810 - RNA, 19 nt, Homo sapiens
  misc_RNA (1)...(19): siRNA sense strand
gauggugcauguugauaaa

SEQ ID NO: 960811 - RNA, 19 nt, Homo sapiens
  misc_RNA (1)...(19): siRNA sense strand
gagaaaugcaguacaugua

SEQ ID NO: 960812 - RNA, 19 nt, Homo sapiens
  misc_RNA (1)...(19): siRNA sense strand
gaaaguucauguuguugau

SEQ ID NO: 960813 - RNA, 19 nt, Homo sapiens
  misc_RNA (1)...(19): siRNA sense strand
ggaagcagaggauauuauu

SEQ ID NO: 960814 - RNA, 19 nt, Homo sapiens
  misc_RNA (1)...(19): siRNA sense strand
ggauggagcaccaaauaaa

SEQ ID NO: 960815 - RNA, 19 nt, Homo sapiens
  misc_RNA (1)...(19): siRNA sense strand
caaguucaguggacaguga

SEQ ID NO: 960816 - RNA, 19 nt, Homo sapiens
  misc_RNA (1)...(19): siRNA sense strand
ugaagaagauccagugaca

SEQ ID NO: 960817 - RNA, 19 nt, Homo sapiens
  misc_RNA (1)...(19): siRNA sense strand
guaacauacucaccucgua

SEQ ID NO: 960818 - RNA, 19 nt, Homo sapiens
  misc_RNA (1)...(19): siRNA sense strand
gaaucugucuugaaaccaa

SEQ ID NO: 960819 - RNA, 19 nt, Homo sapiens
  misc_RNA (1)...(19): siRNA sense strand
gaacauuucccugugauau

SEQ ID NO: 960820 - RNA, 19 nt, Homo sapiens
  misc_RNA (1)...(19): siRNA sense strand
ugagacacuuucaucauuu

SEQ ID NO: 960821 - RNA, 19 nt, Homo sapiens
  misc_RNA (1)...(19): siRNA sense strand
gaacuugaacagcauauuc

SEQ ID NO: 960822 - RNA, 19 nt, Homo sapiens
  misc_RNA (1)...(19): siRNA sense strand
ggauuuagaagagguaaua

SEQ ID NO: 960823 - RNA, 19 nt, Homo sapiens
  misc_RNA (1)...(19): siRNA sense strand
ggaaugcauuauauaagug

SEQ ID NO: 960824 - RNA, 19 nt, Homo sapiens
  misc_RNA (1)...(19): siRNA sense strand
agauaaagauggugaacaa

SEQ ID NO: 960825 - RNA, 19 nt, Homo sapiens
  misc_RNA (1)...(19): siRNA sense strand
guuuagagcucaguauuga

SEQ ID NO: 960826 - RNA, 19 nt, Homo sapiens
  misc_RNA (1)...(19): siRNA sense strand
gcagcaugauguacaagaa

SEQ ID NO: 960827 - RNA, 19 nt, Homo sapiens
  misc_RNA (1)...(19): siRNA sense strand
cagcaucaguggauaauag

SEQ ID NO: 960828 - RNA, 19 nt, Homo sapiens
  misc_RNA (1)...(19): siRNA sense strand
gagggacucuucagcauca

SEQ ID NO: 960829 - RNA, 19 nt, Homo sapiens
  misc_RNA (1)...(19): siRNA sense strand
uaaagucuguggaagcuau

SEQ ID NO: 960830 - RNA, 19 nt, Homo sapiens
  misc_RNA (1)...(19): siRNA sense strand
ccauuuaccugcugaaaca

SEQ ID NO: 960831 - RNA, 19 nt, Homo sapiens
  misc_RNA (1)...(19): siRNA sense strand
gaaaagagacaacgagaaa

SEQ ID NO: 960832 - RNA, 19 nt, Homo sapiens
  misc_RNA (1)...(19): siRNA sense strand
gcagaaagagagagaguug

SEQ ID NO: 960833 - RNA, 19 nt, Homo sapiens
  misc_RNA (1)...(19): siRNA sense strand
gaaauggaagcaaacagaa

SEQ ID NO: 960834 - RNA, 19 nt, Homo sapiens
  misc_RNA (1)...(19): siRNA sense strand
cugaaugucuggccucuuu

SEQ ID NO: 960835 - RNA, 19 nt, Homo sapiens
  misc_RNA (1)...(19): siRNA sense strand
ugaacaaccucaaauacug

SEQ ID NO: 960836 - RNA, 19 nt, Homo sapiens
  misc_RNA (1)...(19): siRNA sense strand
guagaaauggcuuauaaga

SEQ ID NO: 960837 - RNA, 19 nt, Homo sapiens
  misc_RNA (1)...(19): siRNA sense strand
uaacacaagaggacauuaa

SEQ ID NO: 960838 - RNA, 19 nt, Homo sapiens
  misc_RNA (1)...(19): siRNA sense strand
agaagaagauacaccaaug

SEQ ID NO: 960839 - RNA, 19 nt, Homo sapiens
  misc_RNA (1)...(19): siRNA sense strand
guaaagagaaagcacuaaa

SEQ ID NO: 960840 - RNA, 19 nt, Homo sapiens
  misc_RNA (1)...(19): siRNA sense strand
gaacaagagccaugcaagu

SEQ ID NO: 960841 - RNA, 19 nt, Homo sapiens
  misc_RNA (1)...(19): siRNA sense strand
guacauguauuucaaagcu

SEQ ID NO: 960842 - RNA, 19 nt, Homo sapiens
  misc_RNA (1)...(19): siRNA sense strand
gaaagaggcaccacuggau

SEQ ID NO: 960843 - RNA, 19 nt, Homo sapiens
  misc_RNA (1)...(19): siRNA sense strand
cuaauggacuugacucuca

SEQ ID NO: 960844 - RNA, 19 nt, Homo sapiens
  misc_RNA (1)...(19): siRNA sense strand
agaauuccuugaucuauga

SEQ ID NO: 960845 - RNA, 19 nt, Homo sapiens
  misc_RNA (1)...(19): siRNA sense strand
uaauggaauugacagauga

SEQ ID NO: 960846 - RNA, 19 nt, Homo sapiens
  misc_RNA (1)...(19): siRNA sense strand
cgagagaagcuuagugaaa

SEQ ID NO: 960847 - RNA, 19 nt, Homo sapiens
  misc_RNA (1)...(19): siRNA sense strand
caagagccaugcaaguuuc

SEQ ID NO: 960848 - RNA, 19 nt, Homo sapiens
  misc_RNA (1)...(19): siRNA sense strand
gaagugauggugaaaguuc

SEQ ID NO: 960849 - RNA, 19 nt, Homo sapiens
  misc_RNA (1)...(19): siRNA sense strand
aaaggaagcaguagaaaug

SEQ ID NO: 960850 - RNA, 19 nt, Homo sapiens
  misc_RNA (1)...(19): siRNA sense strand
uaaacugaaugaucgaaug

SEQ ID NO: 960851 - RNA, 19 nt, Homo sapiens
  misc_RNA (1)...(19): siRNA sense strand
uguggaagcuauucuagaa

SEQ ID NO: 960852 - RNA, 19 nt, Homo sapiens
  misc_RNA (1)...(19): siRNA sense strand
cccaguaucuuauuccaaa

SEQ ID NO: 960853 - RNA, 19 nt, Homo sapiens
  misc_RNA (1)...(19): siRNA sense strand
gaaaagaauuccuugaucu

SEQ ID NO: 960854 - RNA, 19 nt, Homo sapiens
  misc_RNA (1)...(19): siRNA sense strand
agacuggaauccuaaaguu

SEQ ID NO: 960855 - RNA, 19 nt, Homo sapiens
  misc_RNA (1)...(19): siRNA sense strand
gaugagaguggcaagagua

SEQ ID NO: 960856 - RNA, 19 nt, Homo sapiens
  misc_RNA (1)...(19): siRNA sense strand
uuauaaaccuggagaagug

SEQ ID NO: 960857 - RNA, 19 nt, Homo sapiens
  misc_RNA (1)...(19): siRNA sense strand
gaucagaugagcaacgauu

SEQ ID NO: 960858 - RNA, 19 nt, Homo sapiens
  misc_RNA (1)...(19): siRNA sense strand
caaauaaagaucugacuca

SEQ ID NO: 960859 - RNA, 19 nt, Homo sapiens
  misc_RNA (1)...(19): siRNA sense strand
gaauugcgagagaagcuua

SEQ ID NO: 960860 - RNA, 19 nt, Homo sapiens
  misc_RNA (1)...(19): siRNA sense strand
gaagaugaaguccauguca

SEQ ID NO: 960861 - RNA, 19 nt, Homo sapiens
  misc_RNA (1)...(19): siRNA sense strand
ggcgucaagucaacauaua

SEQ ID NO: 960862 - RNA, 19 nt, Homo sapiens
  misc_RNA (1)...(19): siRNA sense strand
ggauaagacauuaaaggaa

SEQ ID NO: 960863 - RNA, 19 nt, Homo sapiens
  misc_RNA (1)...(19): siRNA sense strand
aaagagacaacgagaaauu

SEQ ID NO: 960864 - RNA, 19 nt, Homo sapiens
  misc_RNA (1)...(19): siRNA sense strand
gcagcagcaugauguacaa

SEQ ID NO: 960865 - RNA, 19 nt, Homo sapiens
  misc_RNA (1)...(19): siRNA sense strand
ggaagaauccuggcacugu

SEQ ID NO: 960866 - RNA, 19 nt, Homo sapiens
  misc_RNA (1)...(19): siRNA sense strand
ggagcaaugugguuuagag

SEQ ID NO: 960867 - RNA, 19 nt, Homo sapiens
  misc_RNA (1)...(19): siRNA sense strand
uagaugcuguguuugcuaa

SEQ ID NO: 960868 - RNA, 19 nt, Homo sapiens
  misc_RNA (1)...(19): siRNA sense strand
caaggucuuucgaguguau

SEQ ID NO: 960869 - RNA, 19 nt, Homo sapiens
  misc_RNA (1)...(19): siRNA sense strand
gauuauacaaccaugcaua

SEQ ID NO: 960870 - RNA, 19 nt, Homo sapiens
  misc_RNA (1)...(19): siRNA sense strand
gaugaaggaaucugucuug

SEQ ID NO: 960871 - RNA, 19 nt, Homo sapiens
  misc_RNA (1)...(19): siRNA sense strand
ugacagaugagcaaagaaa

SEQ ID NO: 960872 - RNA, 19 nt, Homo sapiens
  misc_RNA (1)...(19): siRNA sense strand
gggaagacaguguucauga

SEQ ID NO: 960873 - RNA, 19 nt, Homo sapiens
  misc_RNA (1)...(19): siRNA sense strand
ggagaaaugcaguacaugu

SEQ ID NO: 960874 - RNA, 19 nt, Homo sapiens
  misc_RNA (1)...(19): siRNA sense strand
cacaguaucacaaguagua

SEQ ID NO: 960875 - RNA, 19 nt, Homo sapiens
  misc_RNA (1)...(19): siRNA sense strand
gcgcaauacaugcaagaua

SEQ ID NO: 960876 - RNA, 19 nt, Homo sapiens
  misc_RNA (1)...(19): siRNA sense strand
gguaucagcugccucagaa

SEQ ID NO: 960877 - RNA, 19 nt, Homo sapiens
  misc_RNA (1)...(19): siRNA sense strand
gggaugcggcugcuucuuu

SEQ ID NO: 960878 - RNA, 19 nt, Homo sapiens
  misc_RNA (1)...(19): siRNA sense strand
ggaugcggcugcuucuuuc

SEQ ID NO: 960879 - RNA, 19 nt, Homo sapiens
  misc_RNA (1)...(19): siRNA sense strand
gcagcuggguuaccuguac

SEQ ID NO: 960880 - RNA, 19 nt, Homo sapiens
  misc_RNA (1)...(19): siRNA sense strand
ccauuuagcacagaaguuu

SEQ ID NO: 960881 - RNA, 19 nt, Homo sapiens
  misc_RNA (1)...(19): siRNA sense strand
gcgcaugacccauuuagca

SEQ ID NO: 960882 - RNA, 19 nt, Homo sapiens
  misc_RNA (1)...(19): siRNA sense strand
ccucagaacaggcgcauga

SEQ ID NO: 960883 - RNA, 19 nt, Homo sapiens
  misc_RNA (1)...(19): siRNA sense strand
uggccaccauccucuauuu

SEQ ID NO: 960884 - RNA, 19 nt, Homo sapiens
  misc_RNA (1)...(19): siRNA sense strand
gcuccuccgugaucuacuu

SEQ ID NO: 960885 - RNA, 19 nt, Homo sapiens
  misc_RNA (1)...(19): siRNA sense strand
cgugggcacugcucgacua

SEQ ID NO: 960886 - RNA, 19 nt, Homo sapiens
  misc_RNA (1)...(19): siRNA sense strand
gggcacugcucgacuacca

SEQ ID NO: 960887 - RNA, 19 nt, Homo sapiens
  misc_RNA (1)...(19): siRNA sense strand
acaggcgcaugacccauuu

SEQ ID NO: 960888 - RNA, 19 nt, Homo sapiens
  misc_RNA (1)...(19): siRNA sense strand
gaggcugcuucgccaguga

SEQ ID NO: 960889 - RNA, 19 nt, Homo sapiens
  misc_RNA (1)...(19): siRNA sense strand
gcucuucgagaccuucuug

SEQ ID NO: 960890 - RNA, 19 nt, Homo sapiens
  misc_RNA (1)...(19): siRNA sense strand
ccuccugagugacagcauu

SEQ ID NO: 960891 - RNA, 19 nt, Homo sapiens
  misc_RNA (1)...(19): siRNA sense strand
ccaccauccucuauuucuc

SEQ ID NO: 960892 - RNA, 19 nt, Homo sapiens
  misc_RNA (1)...(19): siRNA sense strand
ugacccauuuagcacagaa

SEQ ID NO: 960893 - RNA, 19 nt, Homo sapiens
  misc_RNA (1)...(19): siRNA sense strand
ucgccuuccuccugaguga

SEQ ID NO: 960894 - RNA, 19 nt, Homo sapiens
  misc_RNA (1)...(19): siRNA sense strand
ucagggcacagacuucaug

SEQ ID NO: 960895 - RNA, 19 nt, Homo sapiens
  misc_RNA (1)...(19): siRNA sense strand
uaucagcugccucagaaca

SEQ ID NO: 960896 - RNA, 19 nt, Homo sapiens
  misc_RNA (1)...(19): siRNA sense strand
ggacacaucuugcaucaug

SEQ ID NO: 960897 - RNA, 19 nt, Homo sapiens
  misc_RNA (1)...(19): siRNA sense strand
gaacuaaacuggguuaagg

SEQ ID NO: 960898 - RNA, 19 nt, Homo sapiens
  misc_RNA (1)...(19): siRNA sense strand
gaauaagacuccaaaggau

SEQ ID NO: 960899 - RNA, 19 nt, Homo sapiens
  misc_RNA (1)...(19): siRNA sense strand
ggaauaagacuccaaagga

SEQ ID NO: 960900 - RNA, 19 nt, Homo sapiens
  misc_RNA (1)...(19): siRNA sense strand
gcagagaccuccguugguu

SEQ ID NO: 960901 - RNA, 19 nt, Homo sapiens
  misc_RNA (1)...(19): siRNA sense strand
cagagaagauuguggugua

SEQ ID NO: 960902 - RNA, 19 nt, Homo sapiens
  misc_RNA (1)...(19): siRNA sense strand
ggucgaggcuugucugcua

SEQ ID NO: 960903 - RNA, 19 nt, Homo sapiens
  misc_RNA (1)...(19): siRNA sense strand
cagagaagaugaagaagga

SEQ ID NO: 960904 - RNA, 19 nt, Homo sapiens
  misc_RNA (1)...(19): siRNA sense strand
ugugguagaucauacaaua

SEQ ID NO: 960905 - RNA, 19 nt, Homo sapiens
  misc_RNA (1)...(19): siRNA sense strand
uagcugaugucucccauaa

SEQ ID NO: 960906 - RNA, 19 nt, Homo sapiens
  misc_RNA (1)...(19): siRNA sense strand
cagauuaacuguaaauugg

SEQ ID NO: 960907 - RNA, 19 nt, Homo sapiens
  misc_RNA (1)...(19): siRNA sense strand
gaaaugcuuccaucaggua

SEQ ID NO: 960908 - RNA, 19 nt, Homo sapiens
  misc_RNA (1)...(19): siRNA sense strand
acuaaaggaugaccgaaua

SEQ ID NO: 960909 - RNA, 19 nt, Homo sapiens
  misc_RNA (1)...(19): siRNA sense strand
ggaccaggcucgagaacug

SEQ ID NO: 960910 - RNA, 19 nt, Homo sapiens
  misc_RNA (1)...(19): siRNA sense strand
ucagagccaugaaggauuu

SEQ ID NO: 960911 - RNA, 19 nt, Homo sapiens
  misc_RNA (1)...(19): siRNA sense strand
aaucguaccuaucguauug

SEQ ID NO: 960912 - RNA, 19 nt, Homo sapiens
  misc_RNA (1)...(19): siRNA sense strand
aaggauagcuucacgaugu

SEQ ID NO: 960913 - RNA, 19 nt, Homo sapiens
  misc_RNA (1)...(19): siRNA sense strand
gaggaacucucucccacuu

SEQ ID NO: 960914 - RNA, 19 nt, Homo sapiens
  misc_RNA (1)...(19): siRNA sense strand
ucaagaagcugugcugugu

SEQ ID NO: 960915 - RNA, 19 nt, Homo sapiens
  misc_RNA (1)...(19): siRNA sense strand
cagagacccuuccaucuug

SEQ ID NO: 960916 - RNA, 19 nt, Homo sapiens
  misc_RNA (1)...(19): siRNA sense strand
uaucacaucucaggaacua

SEQ ID NO: 960917 - RNA, 19 nt, Homo sapiens
  misc_RNA (1)...(19): siRNA sense strand
gaacugugguagaucauac

SEQ ID NO: 960918 - RNA, 19 nt, Homo sapiens
  misc_RNA (1)...(19): siRNA sense strand
gaguucagaugcgucuuua

SEQ ID NO: 960919 - RNA, 19 nt, Homo sapiens
  misc_RNA (1)...(19): siRNA sense strand
gagaacuggucaacauguu

SEQ ID NO: 960920 - RNA, 19 nt, Homo sapiens
  misc_RNA (1)...(19): siRNA sense strand
guaccuaucguauugauga

SEQ ID NO: 960921 - RNA, 19 nt, Homo sapiens
  misc_RNA (1)...(19): siRNA sense strand
gauguggauuggaauaaga

SEQ ID NO: 960922 - RNA, 19 nt, Homo sapiens
  misc_RNA (1)...(19): siRNA sense strand
ggguugaacuaaaggauga

SEQ ID NO: 960923 - RNA, 19 nt, Homo sapiens
  misc_RNA (1)...(19): siRNA sense strand
gaacgaggcagccaccaau

SEQ ID NO: 960924 - RNA, 19 nt, Homo sapiens
  misc_RNA (1)...(19): siRNA sense strand
ugauggaucuauucucuau

SEQ ID NO: 960925 - RNA, 19 nt, Homo sapiens
  misc_RNA (1)...(19): siRNA sense strand
gugaguggguggauuucua

SEQ ID NO: 960926 - RNA, 19 nt, Homo sapiens
  misc_RNA (1)...(19): siRNA sense strand
aauagagacuuaugucaga

SEQ ID NO: 960927 - RNA, 19 nt, Homo sapiens
  misc_RNA (1)...(19): siRNA sense strand
gcauuaagauucagaugac

SEQ ID NO: 960928 - RNA, 19 nt, Homo sapiens
  misc_RNA (1)...(19): siRNA sense strand
gcaaaaggauguacauaag

SEQ ID NO: 960929 - RNA, 19 nt, Homo sapiens
  misc_RNA (1)...(19): siRNA sense strand
guucagaugcgucuuuauu

SEQ ID NO: 960930 - RNA, 19 nt, Homo sapiens
  misc_RNA (1)...(19): siRNA sense strand
uaaacuggguuaaggaagu

SEQ ID NO: 960931 - RNA, 19 nt, Homo sapiens
  misc_RNA (1)...(19): siRNA sense strand
aggcagaggccauguauuu

SEQ ID NO: 960932 - RNA, 19 nt, Homo sapiens
  misc_RNA (1)...(19): siRNA sense strand
ccacaagcuucuaaaccuu

SEQ ID NO: 960933 - RNA, 19 nt, Homo sapiens
  misc_RNA (1)...(19): siRNA sense strand
gcaacaccauagugcuuug

SEQ ID NO: 960934 - RNA, 19 nt, Homo sapiens
  misc_RNA (1)...(19): siRNA sense strand
gcugaugucucccauaagg

SEQ ID NO: 960935 - RNA, 19 nt, Homo sapiens
  misc_RNA (1)...(19): siRNA sense strand
gcagcuagcauccgaagga

SEQ ID NO: 960936 - RNA, 19 nt, Homo sapiens
  misc_RNA (1)...(19): siRNA sense strand
ugaucgggauggauguuua

SEQ ID NO: 960937 - RNA, 19 nt, Homo sapiens
  misc_RNA (1)...(19): siRNA sense strand
gaguggauauuccucugaa

SEQ ID NO: 960938 - RNA, 19 nt, Homo sapiens
  misc_RNA (1)...(19): siRNA sense strand
aaacuggguuaaggaagua

SEQ ID NO: 960939 - RNA, 19 nt, Homo sapiens
  misc_RNA (1)...(19): siRNA sense strand
ggaagagggaguucagaug

SEQ ID NO: 960940 - RNA, 19 nt, Homo sapiens
  misc_RNA (1)...(19): siRNA sense strand
caaguaugcccacaagcua

SEQ ID NO: 960941 - RNA, 19 nt, Homo sapiens
  misc_RNA (1)...(19): siRNA sense strand
ccaagauggugguguuugu

SEQ ID NO: 960942 - RNA, 19 nt, Homo sapiens
  misc_RNA (1)...(19): siRNA sense strand
ggaacucucucccacuuuu

SEQ ID NO: 960943 - RNA, 19 nt, Homo sapiens
  misc_RNA (1)...(19): siRNA sense strand
agauacagaugguuguuug

SEQ ID NO: 960944 - RNA, 19 nt, Homo sapiens
  misc_RNA (1)...(19): siRNA sense strand
ggauguacauaagauugaa

SEQ ID NO: 960945 - RNA, 19 nt, Homo sapiens
  misc_RNA (1)...(19): siRNA sense strand
ggaagaggaccagccauug

SEQ ID NO: 960946 - RNA, 19 nt, Homo sapiens
  misc_RNA (1)...(19): siRNA sense strand
cacgaugucugaugggaaa

SEQ ID NO: 960947 - RNA, 19 nt, Homo sapiens
  misc_RNA (1)...(19): siRNA sense strand
ggaguucagaugcgucuuu

SEQ ID NO: 960948 - RNA, 19 nt, Homo sapiens
  misc_RNA (1)...(19): siRNA sense strand
ugucaugcaugccauuuau

SEQ ID NO: 960949 - RNA, 19 nt, Homo sapiens
  misc_RNA (1)...(19): siRNA sense strand
gaggcugacuuucaaacug

SEQ ID NO: 960950 - RNA, 19 nt, Homo sapiens
  misc_RNA (1)...(19): siRNA sense strand
ccagagacccuuccaucuu

SEQ ID NO: 960951 - RNA, 19 nt, Homo sapiens
  misc_RNA (1)...(19): siRNA sense strand
ggaucacaguuaaggaaga

SEQ ID NO: 960952 - RNA, 19 nt, Homo sapiens
  misc_RNA (1)...(19): siRNA sense strand
gaugauguggauuggaaua

SEQ ID NO: 960953 - RNA, 19 nt, Homo sapiens
  misc_RNA (1)...(19): siRNA sense strand
ucacaucucaggaacuaaa

SEQ ID NO: 960954 - RNA, 19 nt, Homo sapiens
  misc_RNA (1)...(19): siRNA sense strand
uuaaggaaguaaccagaga

SEQ ID NO: 960955 - RNA, 19 nt, Homo sapiens
  misc_RNA (1)...(19): siRNA sense strand
caggacacaucuugcauca

SEQ ID NO: 960956 - RNA, 19 nt, Homo sapiens
  misc_RNA (1)...(19): siRNA sense strand
ccugagcccugaucauaug

SEQ ID NO: 960957 - RNA, 19 nt, Homo sapiens
  misc_RNA (1)...(19): siRNA sense strand
ucagaugcgucuuuauuac

SEQ ID NO: 960958 - RNA, 19 nt, Homo sapiens
  misc_RNA (1)...(19): siRNA sense strand
guggauuucuaucuucuug

SEQ ID NO: 960959 - RNA, 19 nt, Homo sapiens
  misc_RNA (1)...(19): siRNA sense strand
ccagugagagacaggauaa

SEQ ID NO: 960960 - RNA, 19 nt, Homo sapiens
  misc_RNA (1)...(19): siRNA sense strand
uaaagaacacuuccaggau

SEQ ID NO: 960961 - RNA, 19 nt, Homo sapiens
  misc_RNA (1)...(19): siRNA sense strand
caagugcuaugguacuaca

SEQ ID NO: 960962 - RNA, 19 nt, Homo sapiens
  misc_RNA (1)...(19): siRNA sense strand
aaacagacagugcugaaau

SEQ ID NO: 960963 - RNA, 19 nt, Homo sapiens
  misc_RNA (1)...(19): siRNA sense strand
ggacagggaggaacucucu

SEQ ID NO: 960964 - RNA, 19 nt, Homo sapiens
  misc_RNA (1)...(19): siRNA sense strand
gaagauacagaugguuguu

SEQ ID NO: 960965 - RNA, 19 nt, Homo sapiens
  misc_RNA (1)...(19): siRNA sense strand
aauaagacuccaaaggaua

SEQ ID NO: 960966 - RNA, 19 nt, Homo sapiens
  misc_RNA (1)...(19): siRNA sense strand
aagaacacuuccaggauga

SEQ ID NO: 960967 - RNA, 19 nt, Homo sapiens
  misc_RNA (1)...(19): siRNA sense strand
gaagcaguuuaucaauauc

SEQ ID NO: 960968 - RNA, 19 nt, Homo sapiens
  misc_RNA (1)...(19): siRNA sense strand
gcaggcagaggccauguau

SEQ ID NO: 960969 - RNA, 19 nt, Homo sapiens
  misc_RNA (1)...(19): siRNA sense strand
ccucagaacuuuguaacuc

SEQ ID NO: 960970 - RNA, 19 nt, Homo sapiens
  misc_RNA (1)...(19): siRNA sense strand
gauauaacaaucguaccua

SEQ ID NO: 960971 - RNA, 19 nt, Homo sapiens
  misc_RNA (1)...(19): siRNA sense strand
aaggaacaccucagucuuu

SEQ ID NO: 960972 - RNA, 19 nt, Homo sapiens
  misc_RNA (1)...(19): siRNA sense strand
gaucauacaauaacaagcu

SEQ ID NO: 960973 - RNA, 19 nt, Homo sapiens
  misc_RNA (1)...(19): siRNA sense strand
gcagaggccauguauuugg

SEQ ID NO: 960974 - RNA, 19 nt, Homo sapiens
  misc_RNA (1)...(19): siRNA sense strand
aaagggagucuguggguuu

SEQ ID NO: 960975 - RNA, 19 nt, Homo sapiens
  misc_RNA (1)...(19): siRNA sense strand
cagaggccauguauuugga

SEQ ID NO: 960976 - RNA, 19 nt, Homo sapiens
  misc_RNA (1)...(19): siRNA sense strand
gcaaguaugcccacaagcu

SEQ ID NO: 960977 - RNA, 19 nt, Homo sapiens
  misc_RNA (1)...(19): siRNA sense strand
ggaacugugguagaucaua

SEQ ID NO: 960978 - RNA, 19 nt, Homo sapiens
  misc_RNA (1)...(19): siRNA sense strand
ccaccaggcuucggagugu

SEQ ID NO: 960979 - RNA, 19 nt, Homo sapiens
  misc_RNA (1)...(19): siRNA sense strand
caaaggauagcuucacgau

SEQ ID NO: 960980 - RNA, 19 nt, Homo sapiens
  misc_RNA (1)...(19): siRNA sense strand
agauucagaugacaaagau

SEQ ID NO: 960981 - RNA, 19 nt, Homo sapiens
  misc_RNA (1)...(19): siRNA sense strand
ugaaacaguuaauggugau

SEQ ID NO: 960982 - RNA, 19 nt, Homo sapiens
  misc_RNA (1)...(19): siRNA sense strand
auuaugggaucacaguuaa

SEQ ID NO: 960983 - RNA, 19 nt, Homo sapiens
  misc_RNA (1)...(19): siRNA sense strand
ggaugaguguacuaagcuu

SEQ ID NO: 960984 - RNA, 19 nt, Homo sapiens
  misc_RNA (1)...(19): siRNA sense strand
gaucacaguuaaggaagag

SEQ ID NO: 960985 - RNA, 19 nt, Homo sapiens
  misc_RNA (1)...(19): siRNA sense strand
cauuaugucuguguucuca

SEQ ID NO: 960986 - RNA, 19 nt, Homo sapiens
  misc_RNA (1)...(19): siRNA sense strand
guggguggauuucuaucuu

SEQ ID NO: 960987 - RNA, 19 nt, Homo sapiens
  misc_RNA (1)...(19): siRNA sense strand
gcugugaguggguggauuu

SEQ ID NO: 960988 - RNA, 19 nt, Homo sapiens
  misc_RNA (1)...(19): siRNA sense strand
gguagaucauacaauaaca

SEQ ID NO: 960989 - RNA, 19 nt, Homo sapiens
  misc_RNA (1)...(19): siRNA sense strand
agaauuaucagcccaagau

SEQ ID NO: 960990 - RNA, 19 nt, Homo sapiens
  misc_RNA (1)...(19): siRNA sense strand
gaagaggaccagccauugc

SEQ ID NO: 960991 - RNA, 19 nt, Homo sapiens
  misc_RNA (1)...(19): siRNA sense strand
aauuaugggaucacaguua

SEQ ID NO: 960992 - RNA, 19 nt, Homo sapiens
  misc_RNA (1)...(19): siRNA sense strand
aaccugagcccugaucaua

SEQ ID NO: 960993 - RNA, 19 nt, Homo sapiens
  misc_RNA (1)...(19): siRNA sense strand
guggacagccugaagcuau

SEQ ID NO: 960994 - RNA, 19 nt, Homo sapiens
  misc_RNA (1)...(19): siRNA sense strand
ccucccagguugucaaugu

SEQ ID NO: 960995 - RNA, 19 nt, Homo sapiens
  misc_RNA (1)...(19): siRNA sense strand
ugaccggaaucccagagaa

SEQ ID NO: 960996 - RNA, 19 nt, Homo sapiens
  misc_RNA (1)...(19): siRNA sense strand
gaaauaggauugcuucaga

SEQ ID NO: 960997 - RNA, 19 nt, Homo sapiens
  misc_RNA (1)...(19): siRNA sense strand
gaaggaauauucuuucgaa

SEQ ID NO: 960998 - RNA, 19 nt, Homo sapiens
  misc_RNA (1)...(19): siRNA sense strand
guacaccaaugaucaauaa

SEQ ID NO: 960999 - RNA, 19 nt, Homo sapiens
  misc_RNA (1)...(19): siRNA sense strand
caauauggcuuacauguug

SEQ ID NO: 961000 - RNA, 19 nt, Homo sapiens
  misc_RNA (1)...(19): siRNA sense strand
aaaguucccuccaacauua

SEQ ID NO: 961001 - RNA, 19 nt, Homo sapiens
  misc_RNA (1)...(19): siRNA sense strand
gcaggaaccaugcaacuua

SEQ ID NO: 961002 - RNA, 19 nt, Homo sapiens
  misc_RNA (1)...(19): siRNA sense strand
gcuaaagcuugaacuaauu

SEQ ID NO: 961003 - RNA, 19 nt, Homo sapiens
  misc_RNA (1)...(19): siRNA sense strand
gggauguguuuauggauua

SEQ ID NO: 961004 - RNA, 19 nt, Homo sapiens
  misc_RNA (1)...(19): siRNA sense strand
gcacuaaacucuugguacu

SEQ ID NO: 961005 - RNA, 19 nt, Homo sapiens
  misc_RNA (1)...(19): siRNA sense strand
gcacauacaccaccaggaa

SEQ ID NO: 961006 - RNA, 19 nt, Homo sapiens
  misc_RNA (1)...(19): siRNA sense strand
gcauaucacugggaacaaa

SEQ ID NO: 961007 - RNA, 19 nt, Homo sapiens
  misc_RNA (1)...(19): siRNA sense strand
gaugugagcuacaacaaca

SEQ ID NO: 961008 - RNA, 19 nt, Homo sapiens
  misc_RNA (1)...(19): siRNA sense strand
gagagaaucccacaugcua

SEQ ID NO: 961009 - RNA, 19 nt, Homo sapiens
  misc_RNA (1)...(19): siRNA sense strand
aaacucagaugcuuagaug

SEQ ID NO: 961010 - RNA, 19 nt, Homo sapiens
  misc_RNA (1)...(19): siRNA sense strand
gaaugucgcugagcuggaa

SEQ ID NO: 961011 - RNA, 19 nt, Homo sapiens
  misc_RNA (1)...(19): siRNA sense strand
caacaagcucgaauccuua

SEQ ID NO: 961012 - RNA, 19 nt, Homo sapiens
  misc_RNA (1)...(19): siRNA sense strand
uacaggaacuggauuuaaa

SEQ ID NO: 961013 - RNA, 19 nt, Homo sapiens
  misc_RNA (1)...(19): siRNA sense strand
uuaccuagcuguuguuaug

SEQ ID NO: 961014 - RNA, 19 nt, Homo sapiens
  misc_RNA (1)...(19): siRNA sense strand
guacugaacagccuuaaga

SEQ ID NO: 961015 - RNA, 19 nt, Homo sapiens
  misc_RNA (1)...(19): siRNA sense strand
caaagaaagagaagaaaga

SEQ ID NO: 961016 - RNA, 19 nt, Homo sapiens
  misc_RNA (1)...(19): siRNA sense strand
ggaacaaaguggacauucu

SEQ ID NO: 961017 - RNA, 19 nt, Homo sapiens
  misc_RNA (1)...(19): siRNA sense strand
caauaacauucgcacaauu

SEQ ID NO: 961018 - RNA, 19 nt, Homo sapiens
  misc_RNA (1)...(19): siRNA sense strand
ccaugcaacuuaccaaaga

SEQ ID NO: 961019 - RNA, 19 nt, Homo sapiens
  misc_RNA (1)...(19): siRNA sense strand
gaacaaaguggacauucug

SEQ ID NO: 961020 - RNA, 19 nt, Homo sapiens
  misc_RNA (1)...(19): siRNA sense strand
acaacaagcucgaauccuu

SEQ ID NO: 961021 - RNA, 19 nt, Homo sapiens
  misc_RNA (1)...(19): siRNA sense strand
guauugccaucuccuguaa

SEQ ID NO: 961022 - RNA, 19 nt, Homo sapiens
  misc_RNA (1)...(19): siRNA sense strand
aagaucagguggucuguuu

SEQ ID NO: 961023 - RNA, 19 nt, Homo sapiens
  misc_RNA (1)...(19): siRNA sense strand
ucacugauguggcugaaau

SEQ ID NO: 961024 - RNA, 19 nt, Homo sapiens
  misc_RNA (1)...(19): siRNA sense strand
ucaaaugacuaaccuccaa

SEQ ID NO: 961025 - RNA, 19 nt, Homo sapiens
  misc_RNA (1)...(19): siRNA sense strand
gaaguuccgugcccaugug

SEQ ID NO: 961026 - RNA, 19 nt, Homo sapiens
  misc_RNA (1)...(19): siRNA sense strand
gaaaacaagcagagaauaa

SEQ ID NO: 961027 - RNA, 19 nt, Homo sapiens
  misc_RNA (1)...(19): siRNA sense strand
ugacggcacuaaacucuug

SEQ ID NO: 961028 - RNA, 19 nt, Homo sapiens
  misc_RNA (1)...(19): siRNA sense strand
gaacuaauuccagaagcua

SEQ ID NO: 961029 - RNA, 19 nt, Homo sapiens
  misc_RNA (1)...(19): siRNA sense strand
caaaucaggaggcaaagaa

SEQ ID NO: 961030 - RNA, 19 nt, Homo sapiens
  misc_RNA (1)...(19): siRNA sense strand
uugagcaucugauugguua

SEQ ID NO: 961031 - RNA, 19 nt, Homo sapiens
  misc_RNA (1)...(19): siRNA sense strand
ggaagauagugacuugauc

SEQ ID NO: 961032 - RNA, 19 nt, Homo sapiens
  misc_RNA (1)...(19): siRNA sense strand
gaagagagcaguuuuagug

SEQ ID NO: 961033 - RNA, 19 nt, Homo sapiens
  misc_RNA (1)...(19): siRNA sense strand
ccaauaacauucgcacaau

SEQ ID NO: 961034 - RNA, 19 nt, Homo sapiens
  misc_RNA (1)...(19): siRNA sense strand
gagaaucccacaugcuauu

SEQ ID NO: 961035 - RNA, 19 nt, Homo sapiens
  misc_RNA (1)...(19): siRNA sense strand
ggacaacaaacgacauuuc

SEQ ID NO: 961036 - RNA, 19 nt, Homo sapiens
  misc_RNA (1)...(19): siRNA sense strand
caaaguucccuccaacauu

SEQ ID NO: 961037 - RNA, 19 nt, Homo sapiens
  misc_RNA (1)...(19): siRNA sense strand
gcucaaaaguagaacauuu

SEQ ID NO: 961038 - RNA, 19 nt, Homo sapiens
  misc_RNA (1)...(19): siRNA sense strand
uaaguacuuuccauaccua

SEQ ID NO: 961039 - RNA, 19 nt, Homo sapiens
  misc_RNA (1)...(19): siRNA sense strand
caacaaacgacauuuccuu

SEQ ID NO: 961040 - RNA, 19 nt, Homo sapiens
  misc_RNA (1)...(19): siRNA sense strand
ccaccaacaucccaaagau

SEQ ID NO: 961041 - RNA, 19 nt, Homo sapiens
  misc_RNA (1)...(19): siRNA sense strand
uugaggaaaucaucaguuu

SEQ ID NO: 961042 - RNA, 19 nt, Homo sapiens
  misc_RNA (1)...(19): siRNA sense strand
gaugauaggacuugaaucu

SEQ ID NO: 961043 - RNA, 19 nt, Homo sapiens
  misc_RNA (1)...(19): siRNA sense strand
caagaugggcggacaacaa

SEQ ID NO: 961044 - RNA, 19 nt, Homo sapiens
  misc_RNA (1)...(19): siRNA sense strand
gcacccacaauauggcuua

SEQ ID NO: 961045 - RNA, 19 nt, Homo sapiens
  misc_RNA (1)...(19): siRNA sense strand
ggaagcagccaccaaccaa

SEQ ID NO: 961046 - RNA, 19 nt, Homo sapiens
  misc_RNA (1)...(19): siRNA sense strand
gaacugugagcuagagaga

SEQ ID NO: 961047 - RNA, 19 nt, Homo sapiens
  misc_RNA (1)...(19): siRNA sense strand
auaccuagcucuuauacau

SEQ ID NO: 961048 - RNA, 19 nt, Homo sapiens
  misc_RNA (1)...(19): siRNA sense strand
ccacauauccucgcacaga

SEQ ID NO: 961049 - RNA, 19 nt, Homo sapiens
  misc_RNA (1)...(19): siRNA sense strand
ucaaauguguuaccaucug

SEQ ID NO: 961050 - RNA, 19 nt, Homo sapiens
  misc_RNA (1)...(19): siRNA sense strand
ggaguugcaucuguucaug

SEQ ID NO: 961051 - RNA, 19 nt, Homo sapiens
  misc_RNA (1)...(19): siRNA sense strand
ggugggauguguuuaugga

SEQ ID NO: 961052 - RNA, 19 nt, Homo sapiens
  misc_RNA (1)...(19): siRNA sense strand
gguccaaacaguuaucaaa

SEQ ID NO: 961053 - RNA, 19 nt, Homo sapiens
  misc_RNA (1)...(19): siRNA sense strand
ugagaagccugugauugaa

SEQ ID NO: 961054 - RNA, 19 nt, Homo sapiens
  misc_RNA (1)...(19): siRNA sense strand
caaaacaugcucaaaagua

SEQ ID NO: 961055 - RNA, 19 nt, Homo sapiens
  misc_RNA (1)...(19): siRNA sense strand
gcaaagaaagagaagaaag

SEQ ID NO: 961056 - RNA, 19 nt, Homo sapiens
  misc_RNA (1)...(19): siRNA sense strand
ucaccucacucccagagaa

SEQ ID NO: 961057 - RNA, 19 nt, Homo sapiens
  misc_RNA (1)...(19): siRNA sense strand
ggagucacuuuauuucucu

SEQ ID NO: 961058 - RNA, 19 nt, Homo sapiens
  misc_RNA (1)...(19): siRNA sense strand
cuccacaucuuacaaaguu

SEQ ID NO: 961059 - RNA, 19 nt, Homo sapiens
  misc_RNA (1)...(19): siRNA sense strand
guacuuaauaggcaauuug

SEQ ID NO: 961060 - RNA, 19 nt, Homo sapiens
  misc_RNA (1)...(19): siRNA sense strand
gaaguucccagcaugacaa

SEQ ID NO: 961061 - RNA, 19 nt, Homo sapiens
  misc_RNA (1)...(19): siRNA sense strand
aaacucaggcagcacauuu

SEQ ID NO: 961062 - RNA, 19 nt, Homo sapiens
  misc_RNA (1)...(19): siRNA sense strand
uucagaaccugcagcauuu

SEQ ID NO: 961063 - RNA, 19 nt, Homo sapiens
  misc_RNA (1)...(19): siRNA sense strand
ccuagcuguuguuauguua

SEQ ID NO: 961064 - RNA, 19 nt, Homo sapiens
  misc_RNA (1)...(19): siRNA sense strand
gagaguugcggcaccuuaa

SEQ ID NO: 961065 - RNA, 19 nt, Homo sapiens
  misc_RNA (1)...(19): siRNA sense strand
caaaguugagcaucugauu

SEQ ID NO: 961066 - RNA, 19 nt, Homo sapiens
  misc_RNA (1)...(19): siRNA sense strand
cugagaagccugugauuga

SEQ ID NO: 961067 - RNA, 19 nt, Homo sapiens
  misc_RNA (1)...(19): siRNA sense strand
aauauucccuuugcaaaug

SEQ ID NO: 961068 - RNA, 19 nt, Homo sapiens
  misc_RNA (1)...(19): siRNA sense strand
caacuuaccgaauccugaa

SEQ ID NO: 961069 - RNA, 19 nt, Homo sapiens
  misc_RNA (1)...(19): siRNA sense strand
ggaaauuaguuugaaccau

SEQ ID NO: 961070 - RNA, 19 nt, Homo sapiens
  misc_RNA (1)...(19): siRNA sense strand
gauugguuaugagguauuu

SEQ ID NO: 961071 - RNA, 19 nt, Homo sapiens
  misc_RNA (1)...(19): siRNA sense strand
ucugauugguuaugaggua

SEQ ID NO: 961072 - RNA, 19 nt, Homo sapiens
  misc_RNA (1)...(19): siRNA sense strand
cauggucaguagcaacuuu

SEQ ID NO: 961073 - RNA, 19 nt, Homo sapiens
  misc_RNA (1)...(19): siRNA sense strand
aaacuuggagucacuuuau

SEQ ID NO: 961074 - RNA, 19 nt, Homo sapiens
  misc_RNA (1)...(19): siRNA sense strand
acuaaacucuugguacuga

SEQ ID NO: 961075 - RNA, 19 nt, Homo sapiens
  misc_RNA (1)...(19): siRNA sense strand
ugauaggacuugaaucucu

SEQ ID NO: 961076 - RNA, 19 nt, Homo sapiens
  misc_RNA (1)...(19): siRNA sense strand
gcccuuccgugguauucua

SEQ ID NO: 961077 - RNA, 19 nt, Homo sapiens
  misc_RNA (1)...(19): siRNA sense strand
gaaacucagaugcuuagau

SEQ ID NO: 961078 - RNA, 19 nt, Homo sapiens
  misc_RNA (1)...(19): siRNA sense strand
ugaccaaaguucccuccaa

SEQ ID NO: 961079 - RNA, 19 nt, Homo sapiens
  misc_RNA (1)...(19): siRNA sense strand
cgagaguuguacuuaauag

SEQ ID NO: 961080 - RNA, 19 nt, Homo sapiens
  misc_RNA (1)...(19): siRNA sense strand
aaaagcuucucaucaguua

SEQ ID NO: 961081 - RNA, 19 nt, Homo sapiens
  misc_RNA (1)...(19): siRNA sense strand
uaugugguccaaacaguua

SEQ ID NO: 961082 - RNA, 19 nt, Homo sapiens
  misc_RNA (1)...(19): siRNA sense strand
caucuccuguaaauucaaa

SEQ ID NO: 961083 - RNA, 19 nt, Homo sapiens
  misc_RNA (1)...(19): siRNA sense strand
aaauaggauugcuucagaa

SEQ ID NO: 961084 - RNA, 19 nt, Homo sapiens
  misc_RNA (1)...(19): siRNA sense strand
gcuuagaugugagcuacaa

SEQ ID NO: 961085 - RNA, 19 nt, Homo sapiens
  misc_RNA (1)...(19): siRNA sense strand
uguggaagauagugacuug

SEQ ID NO: 961086 - RNA, 19 nt, Homo sapiens
  misc_RNA (1)...(19): siRNA sense strand
ucgcacagauuucgcacuu

SEQ ID NO: 961087 - RNA, 19 nt, Homo sapiens
  misc_RNA (1)...(19): siRNA sense strand
ggugcccgaugcugucuuu

SEQ ID NO: 961088 - RNA, 19 nt, Homo sapiens
  misc_RNA (1)...(19): siRNA sense strand
gaaccaugaguggacauuu

SEQ ID NO: 961089 - RNA, 19 nt, Homo sapiens
  misc_RNA (1)...(19): siRNA sense strand
gacuugaucuauaaacucu

SEQ ID NO: 961090 - RNA, 19 nt, Homo sapiens
  misc_RNA (1)...(19): siRNA sense strand
guagccaucuuugcaggaa

SEQ ID NO: 961091 - RNA, 19 nt, Homo sapiens
  misc_RNA (1)...(19): siRNA sense strand
cuucgagaguuguacuuaa

SEQ ID NO: 961092 - RNA, 19 nt, Homo sapiens
  misc_RNA (1)...(19): siRNA sense strand
ccacugcccugcaaaaguu

SEQ ID NO: 961093 - RNA, 19 nt, Homo sapiens
  misc_RNA (1)...(19): siRNA sense strand
aaccaugaguggacauuug

SEQ ID NO: 961094 - RNA, 19 nt, Homo sapiens
  misc_RNA (1)...(19): siRNA sense strand
gguggucuguuugccagua

SEQ ID NO: 961095 - RNA, 19 nt, Homo sapiens
  misc_RNA (1)...(19): siRNA sense strand
acagaaacucagaugcuua

SEQ ID NO: 961096 - RNA, 19 nt, Homo sapiens
  misc_RNA (1)...(19): siRNA sense strand
gcagggcauuccaauauca

SEQ ID NO: 961097 - RNA, 19 nt, Homo sapiens
  misc_RNA (1)...(19): siRNA sense strand
gaaguccuccauaaucauu

SEQ ID NO: 961098 - RNA, 19 nt, Homo sapiens
  misc_RNA (1)...(19): siRNA sense strand
gcauuccaauaucacagua

SEQ ID NO: 961099 - RNA, 19 nt, Homo sapiens
  misc_RNA (1)...(19): siRNA sense strand
cuggaugacuaugugaaua

SEQ ID NO: 961100 - RNA, 19 nt, Homo sapiens
  misc_RNA (1)...(19): siRNA sense strand
agaagaaugugcagcaaaa

SEQ ID NO: 961101 - RNA, 19 nt, Homo sapiens
  misc_RNA (1)...(19): siRNA sense strand
cugcagggcauuccaauau

SEQ ID NO: 961102 - RNA, 19 nt, Homo sapiens
  misc_RNA (1)...(19): siRNA sense strand
gagagccccuggaugacua

SEQ ID NO: 961103 - RNA, 19 nt, Homo sapiens
  misc_RNA (1)...(19): siRNA sense strand
gugguucuucuacuucuuu

SEQ ID NO: 961104 - RNA, 19 nt, Homo sapiens
  misc_RNA (1)...(19): siRNA sense strand
ggaacauaaggaagugguu

SEQ ID NO: 961105 - RNA, 19 nt, Homo sapiens
  misc_RNA (1)...(19): siRNA sense strand
uccaauaucacaguaaaga

SEQ ID NO: 961106 - RNA, 19 nt, Homo sapiens
  misc_RNA (1)...(19): siRNA sense strand
ccaggggccuucacuguuc

SEQ ID NO: 961107 - RNA, 19 nt, Homo sapiens
  misc_RNA (1)...(19): siRNA sense strand
ggaagaugcugauaaauuu

SEQ ID NO: 961108 - RNA, 19 nt, Homo sapiens
  misc_RNA (1)...(19): siRNA sense strand
gaagucagcugaagcaguu

SEQ ID NO: 961109 - RNA, 19 nt, Homo sapiens
  misc_RNA (1)...(19): siRNA sense strand
gacaaguucuuuccucuua

SEQ ID NO: 961110 - RNA, 19 nt, Homo sapiens
  misc_RNA (1)...(19): siRNA sense strand
ggaauggguucuacuguuu

SEQ ID NO: 961111 - RNA, 19 nt, Homo sapiens
  misc_RNA (1)...(19): siRNA sense strand
gcaauccagugcccuauaa

SEQ ID NO: 961112 - RNA, 19 nt, Homo sapiens
  misc_RNA (1)...(19): siRNA sense strand
guaguuaucuugauggaau

SEQ ID NO: 961113 - RNA, 19 nt, Homo sapiens
  misc_RNA (1)...(19): siRNA sense strand
gggaagaugcugauaaauu

SEQ ID NO: 961114 - RNA, 19 nt, Homo sapiens
  misc_RNA (1)...(19): siRNA sense strand
gaagugcgacaccgaauuu

SEQ ID NO: 961115 - RNA, 19 nt, Homo sapiens
  misc_RNA (1)...(19): siRNA sense strand
gcaaagagaacugcaugua

SEQ ID NO: 961116 - RNA, 19 nt, Homo sapiens
  misc_RNA (1)...(19): siRNA sense strand
gcucaugagugauggauug

SEQ ID NO: 961117 - RNA, 19 nt, Homo sapiens
  misc_RNA (1)...(19): siRNA sense strand
uaacgagacuuccgucaug

SEQ ID NO: 961118 - RNA, 19 nt, Homo sapiens
  misc_RNA (1)...(19): siRNA sense strand
gaacaagguguauuauuuc

SEQ ID NO: 961119 - RNA, 19 nt, Homo sapiens
  misc_RNA (1)...(19): siRNA sense strand
gagaguaguuaucuugaug

SEQ ID NO: 961120 - RNA, 19 nt, Homo sapiens
  misc_RNA (1)...(19): siRNA sense strand
gagaugaccuucaauaacg

SEQ ID NO: 961121 - RNA, 19 nt, Homo sapiens
  misc_RNA (1)...(19): siRNA sense strand
gaacaggcauuugaagaag

SEQ ID NO: 961122 - RNA, 19 nt, Homo sapiens
  misc_RNA (1)...(19): siRNA sense strand
gaaguugccaagaggaaua

SEQ ID NO: 961123 - RNA, 19 nt, Homo sapiens
  misc_RNA (1)...(19): siRNA sense strand
gggaauggguucuacuguu

SEQ ID NO: 961124 - RNA, 19 nt, Homo sapiens
  misc_RNA (1)...(19): siRNA sense strand
gaaaggcacccugaagauu

SEQ ID NO: 961125 - RNA, 19 nt, Homo sapiens
  misc_RNA (1)...(19): siRNA sense strand
ugacgaaaguggugaaauc

SEQ ID NO: 961126 - RNA, 19 nt, Homo sapiens
  misc_RNA (1)...(19): siRNA sense strand
caaguucuuuccucuuauu

SEQ ID NO: 961127 - RNA, 19 nt, Homo sapiens
  misc_RNA (1)...(19): siRNA sense strand
ugaacacucuauccucuuu

SEQ ID NO: 961128 - RNA, 19 nt, Homo sapiens
  misc_RNA (1)...(19): siRNA sense strand
caacuuccgaucuuucaua

SEQ ID NO: 961129 - RNA, 19 nt, Homo sapiens
  misc_RNA (1)...(19): siRNA sense strand
gaagcuauccuuggacaaa

SEQ ID NO: 961130 - RNA, 19 nt, Homo sapiens
  misc_RNA (1)...(19): siRNA sense strand
gaaggagaguaguuaucuu

SEQ ID NO: 961131 - RNA, 19 nt, Homo sapiens
  misc_RNA (1)...(19): siRNA sense strand
gaacaauuguccagcaacu

SEQ ID NO: 961132 - RNA, 19 nt, Homo sapiens
  misc_RNA (1)...(19): siRNA sense strand
gcugauaaauuugaugguu

SEQ ID NO: 961133 - RNA, 19 nt, Homo sapiens
  misc_RNA (1)...(19): siRNA sense strand
cgacaagccggacuacuuu

SEQ ID NO: 961134 - RNA, 19 nt, Homo sapiens
  misc_RNA (1)...(19): siRNA sense strand
ugaggacgaccaucauuua

SEQ ID NO: 961135 - RNA, 19 nt, Homo sapiens
  misc_RNA (1)...(19): siRNA sense strand
caaaggagcccgagucucu

SEQ ID NO: 961136 - RNA, 19 nt, Homo sapiens
  misc_RNA (1)...(19): siRNA sense strand
caggagaagugcauugaug

SEQ ID NO: 961137 - RNA, 19 nt, Homo sapiens
  misc_RNA (1)...(19): siRNA sense strand
gcaguucacagcuguuaaa

SEQ ID NO: 961138 - RNA, 19 nt, Homo sapiens
  misc_RNA (1)...(19): siRNA sense strand
gcaugauccugucaguaaa

SEQ ID NO: 961139 - RNA, 19 nt, Homo sapiens
  misc_RNA (1)...(19): siRNA sense strand
ggaguaacaccaacuggaa

SEQ ID NO: 961140 - RNA, 19 nt, Homo sapiens
  misc_RNA (1)...(19): siRNA sense strand
ggagaguaguuaucuugau

SEQ ID NO: 961141 - RNA, 19 nt, Homo sapiens
  misc_RNA (1)...(19): siRNA sense strand
acucaggacugcaauaaga

SEQ ID NO: 961142 - RNA, 19 nt, Homo sapiens
  misc_RNA (1)...(19): siRNA sense strand
gcaaguggacaaguucuuu

SEQ ID NO: 961143 - RNA, 19 nt, Homo sapiens
  misc_RNA (1)...(19): siRNA sense strand
gcaguuggagugaagauug

SEQ ID NO: 961144 - RNA, 19 nt, Homo sapiens
  misc_RNA (1)...(19): siRNA sense strand
caacauccgucccauuacu

SEQ ID NO: 961145 - RNA, 19 nt, Homo sapiens
  misc_RNA (1)...(19): siRNA sense strand
cagauucacagauuuauug

SEQ ID NO: 961146 - RNA, 19 nt, Homo sapiens
  misc_RNA (1)...(19): siRNA sense strand
gagcccgagucucugauuu

SEQ ID NO: 961147 - RNA, 19 nt, Homo sapiens
  misc_RNA (1)...(19): siRNA sense strand
guucuuuccucuuauugaa

SEQ ID NO: 961148 - RNA, 19 nt, Homo sapiens
  misc_RNA (1)...(19): siRNA sense strand
cuuccgaucuuucauauuc

SEQ ID NO: 961149 - RNA, 19 nt, Homo sapiens
  misc_RNA (1)...(19): siRNA sense strand
ggacugcaauaagaaagug

SEQ ID NO: 961150 - RNA, 19 nt, Homo sapiens
  misc_RNA (1)...(19): siRNA sense strand
ucgaaagacucacuuguag

SEQ ID NO: 961151 - RNA, 19 nt, Homo sapiens
  misc_RNA (1)...(19): siRNA sense strand
gcuaugaagacgccacuaa

SEQ ID NO: 961152 - RNA, 19 nt, Homo sapiens
  misc_RNA (1)...(19): siRNA sense strand
acagugaggucuaacaaca

SEQ ID NO: 961153 - RNA, 19 nt, Homo sapiens
  misc_RNA (1)...(19): siRNA sense strand
uaccuacgguucaguuuga

SEQ ID NO: 961154 - RNA, 19 nt, Homo sapiens
  misc_RNA (1)...(19): siRNA sense strand
gagaaucagugggugacuu

SEQ ID NO: 961155 - RNA, 19 nt, Homo sapiens
  misc_RNA (1)...(19): siRNA sense strand
gauccugucaguaaauauu

SEQ ID NO: 961156 - RNA, 19 nt, Homo sapiens
  misc_RNA (1)...(19): siRNA sense strand
gaagaugcugauaaauuug

SEQ ID NO: 961157 - RNA, 19 nt, Homo sapiens
  misc_RNA (1)...(19): siRNA sense strand
gaaagacucacuuguagac

SEQ ID NO: 961158 - RNA, 19 nt, Homo sapiens
  misc_RNA (1)...(19): siRNA sense strand
gaaagacggaaggagagua

SEQ ID NO: 961159 - RNA, 19 nt, Homo sapiens
  misc_RNA (1)...(19): siRNA sense strand
gaauuaaggccacugugau

SEQ ID NO: 961160 - RNA, 19 nt, Homo sapiens
  misc_RNA (1)...(19): siRNA sense strand
cgaauuaaggccacuguga

SEQ ID NO: 961161 - RNA, 19 nt, Homo sapiens
  misc_RNA (1)...(19): siRNA sense strand
gcgacaagccggacuacuu

SEQ ID NO: 961162 - RNA, 19 nt, Homo sapiens
  misc_RNA (1)...(19): siRNA sense strand
ggaaggagaguaguuaucu

SEQ ID NO: 961163 - RNA, 19 nt, Homo sapiens
  misc_RNA (1)...(19): siRNA sense strand
gagaagugcauugauguga

SEQ ID NO: 961164 - RNA, 19 nt, Homo sapiens
  misc_RNA (1)...(19): siRNA sense strand
gaagaaguuuuccagaaug

SEQ ID NO: 961165 - RNA, 19 nt, Homo sapiens
  misc_RNA (1)...(19): siRNA sense strand
ucuauccucuuucauguug

SEQ ID NO: 961166 - RNA, 19 nt, Homo sapiens
  misc_RNA (1)...(19): siRNA sense strand
gucgaaagacucacuugua

SEQ ID NO: 961167 - RNA, 19 nt, Homo sapiens
  misc_RNA (1)...(19): siRNA sense strand
ggacgaccaucauuuaccu

SEQ ID NO: 961168 - RNA, 19 nt, Homo sapiens
  misc_RNA (1)...(19): siRNA sense strand
gaagugaacaagguguauu

SEQ ID NO: 961169 - RNA, 19 nt, Homo sapiens
  misc_RNA (1)...(19): siRNA sense strand
gacggaaggagaguaguua

SEQ ID NO: 961170 - RNA, 19 nt, Homo sapiens
  misc_RNA (1)...(19): siRNA sense strand
ccacugugauggacgugaa

SEQ ID NO: 961171 - RNA, 19 nt, Homo sapiens
  misc_RNA (1)...(19): siRNA sense strand
ugaacaggcauuugaagaa

SEQ ID NO: 961172 - RNA, 19 nt, Homo sapiens
  misc_RNA (1)...(19): siRNA sense strand
ggagucugcugaagcuauc

SEQ ID NO: 961173 - RNA, 19 nt, Homo sapiens
  misc_RNA (1)...(19): siRNA sense strand
cgcaugauccugucaguaa

SEQ ID NO: 961174 - RNA, 19 nt, Homo sapiens
  misc_RNA (1)...(19): siRNA sense strand
uugaugaccucgagaacaa

SEQ ID NO: 961175 - RNA, 19 nt, Homo sapiens
  misc_RNA (1)...(19): siRNA sense strand
acagagaaguugccaagag

SEQ ID NO: 961176 - RNA, 19 nt, Homo sapiens
  misc_RNA (1)...(19): siRNA sense strand
cgacucaggacugcaauaa

SEQ ID NO: 961177 - RNA, 19 nt, Homo sapiens
  misc_RNA (1)...(19): siRNA sense strand
agaggaauaucuacuugau

SEQ ID NO: 961178 - RNA, 19 nt, Homo sapiens
  misc_RNA (1)...(19): siRNA sense strand
uaugccagauucacagauu

SEQ ID NO: 961179 - RNA, 19 nt, Homo sapiens
  misc_RNA (1)...(19): siRNA sense strand
ccaagaggaauaucuacuu

SEQ ID NO: 961180 - RNA, 19 nt, Homo sapiens
  misc_RNA (1)...(19): siRNA sense strand
aaaggcacccugaagauug

SEQ ID NO: 961181 - RNA, 19 nt, Homo sapiens
  misc_RNA (1)...(19): siRNA sense strand
cguguuggcuaucaaagga

SEQ ID NO: 961182 - RNA, 19 nt, Homo sapiens
  misc_RNA (1)...(19): siRNA sense strand
gaccauuugugcucguguu

SEQ ID NO: 961183 - RNA, 19 nt, Homo sapiens
  misc_RNA (1)...(19): siRNA sense strand
gcacuaucauugcgaaucc

SEQ ID NO: 961184 - RNA, 19 nt, Homo sapiens
  misc_RNA (1)...(19): siRNA sense strand
ggacaaguucuuuccucuu

SEQ ID NO: 961185 - RNA, 19 nt, Homo sapiens
  misc_RNA (1)...(19): siRNA sense strand
gaguaguuaucuugaugga

SEQ ID NO: 961186 - RNA, 19 nt, Homo sapiens
  misc_RNA (1)...(19): siRNA sense strand
gacaagccggacuacuuua

SEQ ID NO: 961187 - RNA, 19 nt, Homo sapiens
  misc_RNA (1)...(19): siRNA sense strand
gagaaguugccaagaggaa

SEQ ID NO: 961188 - RNA, 19 nt, Homo sapiens
  misc_RNA (1)...(19): siRNA sense strand
ccagugcccuauaaugaag

SEQ ID NO: 961189 - RNA, 19 nt, Homo sapiens
  misc_RNA (1)...(19): siRNA sense strand
ugaagcaguuggagugaag

SEQ ID NO: 961190 - RNA, 19 nt, Homo sapiens
  misc_RNA (1)...(19): siRNA sense strand
ccaaaguggugcccauugc

SEQ ID NO: 961191 - RNA, 19 nt, Homo sapiens
  misc_RNA (1)...(19): siRNA sense strand
gaaggcuggucaugagcau

SEQ ID NO: 961192 - RNA, 19 nt, Homo sapiens
  misc_RNA (1)...(19): siRNA sense strand
gaucuuucauauucagagu

SEQ ID NO: 961193 - RNA, 19 nt, Homo sapiens
  misc_RNA (1)...(19): siRNA sense strand
acaggcauuugaagaaguu

SEQ ID NO: 961194 - RNA, 19 nt, Homo sapiens
  misc_RNA (1)...(19): siRNA sense strand
caaagagaacugcauguac

SEQ ID NO: 961195 - RNA, 19 nt, Homo sapiens
  misc_RNA (1)...(19): siRNA sense strand
cgaaaggcacccugaagau

SEQ ID NO: 961196 - RNA, 19 nt, Homo sapiens
  misc_RNA (1)...(19): siRNA sense strand
ucaaugagcaaguggacaa

SEQ ID NO: 961197 - RNA, 19 nt, Homo sapiens
  misc_RNA (1)...(19): siRNA sense strand
gugaacaagguguauuauu

SEQ ID NO: 961198 - RNA, 19 nt, Homo sapiens
  misc_RNA (1)...(19): siRNA sense strand
gccgaaggcuggucaugag

SEQ ID NO: 961199 - RNA, 19 nt, Homo sapiens
  misc_RNA (1)...(19): siRNA sense strand
uaaagcccauccuccaagu

SEQ ID NO: 961200 - RNA, 19 nt, Homo sapiens
  misc_RNA (1)...(19): siRNA sense strand
gaguaacaccaacuggaaa

SEQ ID NO: 961201 - RNA, 19 nt, Homo sapiens
  misc_RNA (1)...(19): siRNA sense strand
uaagcuucguggaugguuu

SEQ ID NO: 961202 - RNA, 19 nt, Homo sapiens
  misc_RNA (1)...(19): siRNA sense strand
gugaggacgaccaucauuu

SEQ ID NO: 961203 - RNA, 19 nt, Homo sapiens
  misc_RNA (1)...(19): siRNA sense strand
uugccagccucacuccuua

SEQ ID NO: 961204 - RNA, 19 nt, Homo sapiens
  misc_RNA (1)...(19): siRNA sense strand
ggauugaugaccucgagaa

SEQ ID NO: 961205 - RNA, 19 nt, Homo sapiens
  misc_RNA (1)...(19): siRNA sense strand
cgacugcucaugagugaug

SEQ ID NO: 961206 - RNA, 19 nt, Homo sapiens
  misc_RNA (1)...(19): siRNA sense strand
aagugaacaagguguauua

SEQ ID NO: 961207 - RNA, 19 nt, Homo sapiens
  misc_RNA (1)...(19): siRNA sense strand
gaucaaagcccucaaugaa

SEQ ID NO: 961208 - RNA, 19 nt, Homo sapiens
  misc_RNA (1)...(19): siRNA sense strand
gagcacagaugguggacaa

SEQ ID NO: 961209 - RNA, 19 nt, Homo sapiens
  misc_RNA (1)...(19): siRNA sense strand
gaaggaagccggugagaag

SEQ ID NO: 961210 - RNA, 19 nt, Homo sapiens
  misc_RNA (1)...(19): siRNA sense strand
aaacaaggcuuucgaugag

SEQ ID NO: 961211 - RNA, 19 nt, Homo sapiens
  misc_RNA (1)...(19): siRNA sense strand
gaaugaggaugaucagaag

SEQ ID NO: 961212 - RNA, 19 nt, Homo sapiens
  misc_RNA (1)...(19): siRNA sense strand
cccaagaucuuaucagaga

SEQ ID NO: 961213 - RNA, 19 nt, Homo sapiens
  misc_RNA (1)...(19): siRNA sense strand
caacgagaguccaccugaa

SEQ ID NO: 961214 - RNA, 19 nt, Homo sapiens
  misc_RNA (1)...(19): siRNA sense strand
ggaggagggugugaaggaa

SEQ ID NO: 961215 - RNA, 19 nt, Homo sapiens
  misc_RNA (1)...(19): siRNA sense strand
cacccaagaucuuaucaga

SEQ ID NO: 961216 - RNA, 19 nt, Homo sapiens
  misc_RNA (1)...(19): siRNA sense strand
ggaagcaccugggcuaagg

SEQ ID NO: 961217 - RNA, 19 nt, Homo sapiens
  misc_RNA (1)...(19): siRNA sense strand
gaacaaggucagcgacauc

SEQ ID NO: 961218 - RNA, 19 nt, Homo sapiens
  misc_RNA (1)...(19): siRNA sense strand
gcgccuggaucuugauguu

SEQ ID NO: 961219 - RNA, 19 nt, Homo sapiens
  misc_RNA (1)...(19): siRNA sense strand
ggaucaaagcccucaauga

SEQ ID NO: 961220 - RNA, 19 nt, Homo sapiens
  misc_RNA (1)...(19): siRNA sense strand
ggucagcgacaucaaauuc

SEQ ID NO: 961221 - RNA, 19 nt, Homo sapiens
  misc_RNA (1)...(19): siRNA sense strand
ggaacaaggucagcgacau

SEQ ID NO: 961222 - RNA, 19 nt, Homo sapiens
  misc_RNA (1)...(19): siRNA sense strand
caaggucagcgacaucaaa

SEQ ID NO: 961223 - RNA, 19 nt, Homo sapiens
  misc_RNA (1)...(19): siRNA sense strand
gugcaggucucagugaaug

SEQ ID NO: 961224 - RNA, 19 nt, Homo sapiens
  misc_RNA (1)...(19): siRNA sense strand
caagaucuuaucagagaaa

SEQ ID NO: 961225 - RNA, 19 nt, Homo sapiens
  misc_RNA (1)...(19): siRNA sense strand
agaaugaggaugaucagaa

SEQ ID NO: 961226 - RNA, 19 nt, Homo sapiens
  misc_RNA (1)...(19): siRNA sense strand
agaaguguguggagacugu

SEQ ID NO: 961227 - RNA, 19 nt, Homo sapiens
  misc_RNA (1)...(19): siRNA sense strand
uaccaagccuuuccuagca

SEQ ID NO: 961228 - RNA, 19 nt, Homo sapiens
  misc_RNA (1)...(19): siRNA sense strand
ccagcaaucaugucaguga

SEQ ID NO: 961229 - RNA, 19 nt, Homo sapiens
  misc_RNA (1)...(19): siRNA sense strand
acaaggugcugggcaguga

SEQ ID NO: 961230 - RNA, 19 nt, Homo sapiens
  misc_RNA (1)...(19): siRNA sense strand
gaucuuaucagagaaacug

SEQ ID NO: 961231 - RNA, 19 nt, Homo sapiens
  misc_RNA (1)...(19): siRNA sense strand
cagcaaucaugucagugaa

SEQ ID NO: 961232 - RNA, 19 nt, Homo sapiens
  misc_RNA (1)...(19): siRNA sense strand
ucuaugagaaugaggauga

SEQ ID NO: 961233 - RNA, 19 nt, Homo sapiens
  misc_RNA (1)...(19): siRNA sense strand
ggaccugccaccucaguuc

SEQ ID NO: 961234 - RNA, 19 nt, Homo sapiens
  misc_RNA (1)...(19): siRNA sense strand
aaggcuggcuggaucaaga

SEQ ID NO: 961235 - RNA, 19 nt, Homo sapiens
  misc_RNA (1)...(19): siRNA sense strand
uccaaaggaugcaacaaca

SEQ ID NO: 961236 - RNA, 19 nt, Homo sapiens
  misc_RNA (1)...(19): siRNA sense strand
ccaagaucuuaucagagaa

SEQ ID NO: 961237 - RNA, 19 nt, Homo sapiens
  misc_RNA (1)...(19): siRNA sense strand
gaagguggccucggaacag

SEQ ID NO: 961238 - RNA, 19 nt, Homo sapiens
  misc_RNA (1)...(19): siRNA sense strand
cagugcaggucucagugaa

SEQ ID NO: 961239 - RNA, 19 nt, Homo sapiens
  misc_RNA (1)...(19): siRNA sense strand
agacggagaaacuguugaa

SEQ ID NO: 961240 - RNA, 19 nt, Homo sapiens
  misc_RNA (1)...(19): siRNA sense strand
caccugggcuaagggagaa

SEQ ID NO: 961241 - RNA, 19 nt, Homo sapiens
  misc_RNA (1)...(19): siRNA sense strand
ggaggaggagggugugaag

SEQ ID NO: 961242 - RNA, 19 nt, Homo sapiens
  misc_RNA (1)...(19): siRNA sense strand
ccucggaacagacggagaa

SEQ ID NO: 961243 - RNA, 19 nt, Homo sapiens
  misc_RNA (1)...(19): siRNA sense strand
cguccugccugacaaacug

SEQ ID NO: 961244 - RNA, 19 nt, Homo sapiens
  misc_RNA (1)...(19): siRNA sense strand
aaaacaaggcuuucgauga

SEQ ID NO: 961245 - RNA, 19 nt, Homo sapiens
  misc_RNA (1)...(19): siRNA sense strand
ugaaggaagccggugagaa

SEQ ID NO: 961246 - RNA, 19 nt, Homo sapiens
  misc_RNA (1)...(19): siRNA sense strand
uaagggagaagcggaagga

SEQ ID NO: 961247 - RNA, 19 nt, Homo sapiens
  misc_RNA (1)...(19): siRNA sense strand
ccagggaacggcuauaucg

SEQ ID NO: 961248 - RNA, 19 nt, Homo sapiens
  misc_RNA (1)...(19): siRNA sense strand
agguaaagguggacaagag

SEQ ID NO: 961249 - RNA, 19 nt, Homo sapiens
  misc_RNA (1)...(19): siRNA sense strand
ugaggaugaucagaagugu

SEQ ID NO: 961250 - RNA, 19 nt, Homo sapiens
  misc_RNA (1)...(19): siRNA sense strand
gagguaaagguggacaaga

SEQ ID NO: 961251 - RNA, 19 nt, Homo sapiens
  misc_RNA (1)...(19): siRNA sense strand
ucagcgacaucaaauucca

SEQ ID NO: 961252 - RNA, 19 nt, Homo sapiens
  misc_RNA (1)...(19): siRNA sense strand
gagaaugaggaugaucaga

SEQ ID NO: 961253 - RNA, 19 nt, Homo sapiens
  misc_RNA (1)...(19): siRNA sense strand
cgagaguccaccugaagga

SEQ ID NO: 961254 - RNA, 19 nt, Homo sapiens
  misc_RNA (1)...(19): siRNA sense strand
gcccagggaacggcuauau

SEQ ID NO: 961255 - RNA, 19 nt, Homo sapiens
  misc_RNA (1)...(19): siRNA sense strand
gugacccucuacaggagaa

SEQ ID NO: 961256 - RNA, 19 nt, Homo sapiens
  misc_RNA (1)...(19): siRNA sense strand
ggaacagacggagaaacug

SEQ ID NO: 961257 - RNA, 19 nt, Homo sapiens
  misc_RNA (1)...(19): siRNA sense strand
gugaauggcauggaugaca

SEQ ID NO: 961258 - RNA, 19 nt, Homo sapiens
  misc_RNA (1)...(19): siRNA sense strand
cggaacagacggagaaacu

SEQ ID NO: 961259 - RNA, 19 nt, Homo sapiens
  misc_RNA (1)...(19): siRNA sense strand
ccaaaggaugcaacaacau

SEQ ID NO: 961260 - RNA, 19 nt, Homo sapiens
  misc_RNA (1)...(19): siRNA sense strand
aaucaaggcucaacucuua

SEQ ID NO: 961261 - RNA, 19 nt, Homo sapiens
  misc_RNA (1)...(19): siRNA sense strand
gagaagaccuugagucaug

SEQ ID NO: 961262 - RNA, 19 nt, Homo sapiens
  misc_RNA (1)...(19): siRNA sense strand
gagaaacccuauaaaugua

SEQ ID NO: 961263 - RNA, 19 nt, Homo sapiens
  misc_RNA (1)...(19): siRNA sense strand
aaacgggucucacaucuua

SEQ ID NO: 961264 - RNA, 19 nt, Homo sapiens
  misc_RNA (1)...(19): siRNA sense strand
gaucucacaucuuaaagua

SEQ ID NO: 961265 - RNA, 19 nt, Homo sapiens
  misc_RNA (1)...(19): siRNA sense strand
gcaggaaacucuaugaaug

SEQ ID NO: 961266 - RNA, 19 nt, Homo sapiens
  misc_RNA (1)...(19): siRNA sense strand
aaucggaucucacaucuua

SEQ ID NO: 961267 - RNA, 19 nt, Homo sapiens
  misc_RNA (1)...(19): siRNA sense strand
gagaaacccuaccaaugua

SEQ ID NO: 961268 - RNA, 19 nt, Homo sapiens
  misc_RNA (1)...(19): siRNA sense strand
aaauauggcucacgacuaa

SEQ ID NO: 961269 - RNA, 19 nt, Homo sapiens
  misc_RNA (1)...(19): siRNA sense strand
gagaaggccuuuagucgaa

SEQ ID NO: 961270 - RNA, 19 nt, Homo sapiens
  misc_RNA (1)...(19): siRNA sense strand
uggaaagccuuacaaguua

SEQ ID NO: 961271 - RNA, 19 nt, Homo sapiens
  misc_RNA (1)...(19): siRNA sense strand
gagaaacccuaucagugua

SEQ ID NO: 961272 - RNA, 19 nt, Homo sapiens
  misc_RNA (1)...(19): siRNA sense strand
caaagcagcauguuuauga

SEQ ID NO: 961273 - RNA, 19 nt, Homo sapiens
  misc_RNA (1)...(19): siRNA sense strand
ggaaaggccuucaauucug

SEQ ID NO: 961274 - RNA, 19 nt, Homo sapiens
  misc_RNA (1)...(19): siRNA sense strand
caucagacaugaagaaaug

SEQ ID NO: 961275 - RNA, 19 nt, Homo sapiens
  misc_RNA (1)...(19): siRNA sense strand
gggaaggccuuuaaauaug

SEQ ID NO: 961276 - RNA, 19 nt, Homo sapiens
  misc_RNA (1)...(19): siRNA sense strand
gagaaacacaugugaauau

SEQ ID NO: 961277 - RNA, 19 nt, Homo sapiens
  misc_RNA (1)...(19): siRNA sense strand
gagaaugcauaauagagaa

SEQ ID NO: 961278 - RNA, 19 nt, Homo sapiens
  misc_RNA (1)...(19): siRNA sense strand
gaaaccguaugaauguaaa

SEQ ID NO: 961279 - RNA, 19 nt, Homo sapiens
  misc_RNA (1)...(19): siRNA sense strand
gauaugauaccaaggaauu

SEQ ID NO: 961280 - RNA, 19 nt, Homo sapiens
  misc_RNA (1)...(19): siRNA sense strand
ccucagagaaugcauaaua

SEQ ID NO: 961281 - RNA, 19 nt, Homo sapiens
  misc_RNA (1)...(19): siRNA sense strand
gcucacaacucaagcaaca

SEQ ID NO: 961282 - RNA, 19 nt, Homo sapiens
  misc_RNA (1)...(19): siRNA sense strand
ugagaaacccuauaaaugu

SEQ ID NO: 961283 - RNA, 19 nt, Homo sapiens
  misc_RNA (1)...(19): siRNA sense strand
gagagaaacccuaccaaug

SEQ ID NO: 961284 - RNA, 19 nt, Homo sapiens
  misc_RNA (1)...(19): siRNA sense strand
ggaaagccuuacaaguuau

SEQ ID NO: 961285 - RNA, 19 nt, Homo sapiens
  misc_RNA (1)...(19): siRNA sense strand
ggaaggccuuuaaauaugg

SEQ ID NO: 961286 - RNA, 19 nt, Homo sapiens
  misc_RNA (1)...(19): siRNA sense strand
guacagagacgugauguug

SEQ ID NO: 961287 - RNA, 19 nt, Homo sapiens
  misc_RNA (1)...(19): siRNA sense strand
caucagagaauuuauguug

SEQ ID NO: 961288 - RNA, 19 nt, Homo sapiens
  misc_RNA (1)...(19): siRNA sense strand
gaaacucuaugaauguaag

SEQ ID NO: 961289 - RNA, 19 nt, Homo sapiens
  misc_RNA (1)...(19): siRNA sense strand
gagaaaccguaugaaugua

SEQ ID NO: 961290 - RNA, 19 nt, Homo sapiens
  misc_RNA (1)...(19): siRNA sense strand
gaaaccauaugaauguaag

SEQ ID NO: 961291 - RNA, 19 nt, Homo sapiens
  misc_RNA (1)...(19): siRNA sense strand
guaagaaaccauaugaaug

SEQ ID NO: 961292 - RNA, 19 nt, Homo sapiens
  misc_RNA (1)...(19): siRNA sense strand
gugggaaggccuuuaaaua

SEQ ID NO: 961293 - RNA, 19 nt, Homo sapiens
  misc_RNA (1)...(19): siRNA sense strand
ggucucacaucuuacugua

SEQ ID NO: 961294 - RNA, 19 nt, Homo sapiens
  misc_RNA (1)...(19): siRNA sense strand
gaacaucagcgaacucaca

SEQ ID NO: 961295 - RNA, 19 nt, Homo sapiens
  misc_RNA (1)...(19): siRNA sense strand
cgacaucagagaauucaua

SEQ ID NO: 961296 - RNA, 19 nt, Homo sapiens
  misc_RNA (1)...(19): siRNA sense strand
gagauaauggaaagccuua

SEQ ID NO: 961297 - RNA, 19 nt, Homo sapiens
  misc_RNA (1)...(19): siRNA sense strand
gaaaagacuucuggcaaaa

SEQ ID NO: 961298 - RNA, 19 nt, Homo sapiens
  misc_RNA (1)...(19): siRNA sense strand
gguaagaaaccauaugaau

SEQ ID NO: 961299 - RNA, 19 nt, Homo sapiens
  misc_RNA (1)...(19): siRNA sense strand
guuauggucuugaguguuc

SEQ ID NO: 961300 - RNA, 19 nt, Homo sapiens
  misc_RNA (1)...(19): siRNA sense strand
gcaagcaaccauaugaaug

SEQ ID NO: 961301 - RNA, 19 nt, Homo sapiens
  misc_RNA (1)...(19): siRNA sense strand
gcucacaguugauugaaca

SEQ ID NO: 961302 - RNA, 19 nt, Homo sapiens
  misc_RNA (1)...(19): siRNA sense strand
agucgaagcucacaguuga

SEQ ID NO: 961303 - RNA, 19 nt, Homo sapiens
  misc_RNA (1)...(19): siRNA sense strand
guucaaguuuccaagauga

SEQ ID NO: 961304 - RNA, 19 nt, Homo sapiens
  misc_RNA (1)...(19): siRNA sense strand
gaauuuauguuggcaagca

SEQ ID NO: 961305 - RNA, 19 nt, Homo sapiens
  misc_RNA (1)...(19): siRNA sense strand
cgagaaacccuaucagugu

SEQ ID NO: 961306 - RNA, 19 nt, Homo sapiens
  misc_RNA (1)...(19): siRNA sense strand
cuaaugagaaacccuauaa

SEQ ID NO: 961307 - RNA, 19 nt, Homo sapiens
  misc_RNA (1)...(19): siRNA sense strand
gaagcucacaguugauuga

SEQ ID NO: 961308 - RNA, 19 nt, Homo sapiens
  misc_RNA (1)...(19): siRNA sense strand
caagcaacaucagagaauu

SEQ ID NO: 961309 - RNA, 19 nt, Homo sapiens
  misc_RNA (1)...(19): siRNA sense strand
gcaaagagcccuggauggu

SEQ ID NO: 961310 - RNA, 19 nt, Homo sapiens
  misc_RNA (1)...(19): siRNA sense strand
guucagggauguggccaua

SEQ ID NO: 961311 - RNA, 19 nt, Homo sapiens
  misc_RNA (1)...(19): siRNA sense strand
caacaucagagaguucaua

SEQ ID NO: 961312 - RNA, 19 nt, Homo sapiens
  misc_RNA (1)...(19): siRNA sense strand
cagcaugcaucccuuacuu

SEQ ID NO: 961313 - RNA, 19 nt, Homo sapiens
  misc_RNA (1)...(19): siRNA sense strand
ugagaaaccguaugaaugu

SEQ ID NO: 961314 - RNA, 19 nt, Homo sapiens
  misc_RNA (1)...(19): siRNA sense strand
gaccuugagucaugauuca

SEQ ID NO: 961315 - RNA, 19 nt, Homo sapiens
  misc_RNA (1)...(19): siRNA sense strand
gaauauaaggaaugugaga

SEQ ID NO: 961316 - RNA, 19 nt, Homo sapiens
  misc_RNA (1)...(19): siRNA sense strand
gaaaagccauaugaaugua

SEQ ID NO: 961317 - RNA, 19 nt, Homo sapiens
  misc_RNA (1)...(19): siRNA sense strand
ggagagaaacccuaccaau

SEQ ID NO: 961318 - RNA, 19 nt, Homo sapiens
  misc_RNA (1)...(19): siRNA sense strand
ggaaauccagacagacauu

SEQ ID NO: 961319 - RNA, 19 nt, Homo sapiens
  misc_RNA (1)...(19): siRNA sense strand
agagaaacccuaccaaugu

SEQ ID NO: 961320 - RNA, 19 nt, Homo sapiens
  misc_RNA (1)...(19): siRNA sense strand
augaagaaaugcccacuuu

SEQ ID NO: 961321 - RNA, 19 nt, Homo sapiens
  misc_RNA (1)...(19): siRNA sense strand
ggaggccuguguccaguau

SEQ ID NO: 961322 - RNA, 19 nt, Homo sapiens
  misc_RNA (1)...(19): siRNA sense strand
gaagaaaugcccacuuuug

SEQ ID NO: 961323 - RNA, 19 nt, Homo sapiens
  misc_RNA (1)...(19): siRNA sense strand
gaaacccuaugagugcaaa

SEQ ID NO: 961324 - RNA, 19 nt, Homo sapiens
  misc_RNA (1)...(19): siRNA sense strand
gcauguuuaugaagucgaa

SEQ ID NO: 961325 - RNA, 19 nt, Homo sapiens
  misc_RNA (1)...(19): siRNA sense strand
ucagagggauuuguacaga

SEQ ID NO: 961326 - RNA, 19 nt, Homo sapiens
  misc_RNA (1)...(19): siRNA sense strand
gggaaaaccuuuagucauc

SEQ ID NO: 961327 - RNA, 19 nt, Homo sapiens
  misc_RNA (1)...(19): siRNA sense strand
guggaaaggccuucaauuc

SEQ ID NO: 961328 - RNA, 19 nt, Homo sapiens
  misc_RNA (1)...(19): siRNA sense strand
acagagacgugauguugga

SEQ ID NO: 961329 - RNA, 19 nt, Homo sapiens
  misc_RNA (1)...(19): siRNA sense strand
gugagaaaccguaugaaug

SEQ ID NO: 961330 - RNA, 19 nt, Homo sapiens
  misc_RNA (1)...(19): siRNA sense strand
gcucacgacuaauucaaca

SEQ ID NO: 961331 - RNA, 19 nt, Homo sapiens
  misc_RNA (1)...(19): siRNA sense strand
ugggaaggccuuuaaauau

SEQ ID NO: 961332 - RNA, 19 nt, Homo sapiens
  misc_RNA (1)...(19): siRNA sense strand
acagggaaauccagacaga

SEQ ID NO: 961333 - RNA, 19 nt, Homo sapiens
  misc_RNA (1)...(19): siRNA sense strand
caauguaagguauguggua

SEQ ID NO: 961334 - RNA, 19 nt, Homo sapiens
  misc_RNA (1)...(19): siRNA sense strand
gacagacauuuccaucaga

SEQ ID NO: 961335 - RNA, 19 nt, Homo sapiens
  misc_RNA (1)...(19): siRNA sense strand
uaaauauggcucacgacua

SEQ ID NO: 961336 - RNA, 19 nt, Homo sapiens
  misc_RNA (1)...(19): siRNA sense strand
cauaauagagaaacacaug

SEQ ID NO: 961337 - RNA, 19 nt, Homo sapiens
  misc_RNA (1)...(19): siRNA sense strand
ccauaugaauguaaggaau

SEQ ID NO: 961338 - RNA, 19 nt, Homo sapiens
  misc_RNA (1)...(19): siRNA sense strand
ccauaugaauguaaggaau

SEQ ID NO: 961339 - RNA, 19 nt, Homo sapiens
  misc_RNA (1)...(19): siRNA sense strand
gaauguaaagauugugaga

SEQ ID NO: 961340 - RNA, 19 nt, Homo sapiens
  misc_RNA (1)...(19): siRNA sense strand
ucaaacgggucucacaucu

SEQ ID NO: 961341 - RNA, 19 nt, Homo sapiens
  misc_RNA (1)...(19): siRNA sense strand
ucaaggcucaacucuuaua

SEQ ID NO: 961342 - RNA, 19 nt, Homo sapiens
  misc_RNA (1)...(19): siRNA sense strand
ucucacaucuuaaaguaca

SEQ ID NO: 961343 - RNA, 19 nt, Homo sapiens
  misc_RNA (1)...(19): siRNA sense strand
uuccaaagcagcauguuua

SEQ ID NO: 961344 - RNA, 19 nt, Homo sapiens
  misc_RNA (1)...(19): siRNA sense strand
uauaaggaaugugagaaga

SEQ ID NO: 961345 - RNA, 19 nt, Homo sapiens
  misc_RNA (1)...(19): siRNA sense strand
ggaaacucuaugaauguaa

SEQ ID NO: 961346 - RNA, 19 nt, Homo sapiens
  misc_RNA (1)...(19): siRNA sense strand
ccguaugaauguaaagauu

SEQ ID NO: 961347 - RNA, 19 nt, Homo sapiens
  misc_RNA (1)...(19): siRNA sense strand
ggugagaaaccguaugaau

SEQ ID NO: 961348 - RNA, 19 nt, Homo sapiens
  misc_RNA (1)...(19): siRNA sense strand
ccagauaugauaccaagga

SEQ ID NO: 961349 - RNA, 19 nt, Homo sapiens
  misc_RNA (1)...(19): siRNA sense strand
caucagcaguuaccccuua

SEQ ID NO: 961350 - RNA, 19 nt, Homo sapiens
  misc_RNA (1)...(19): siRNA sense strand
caacaucagagaauucaca

SEQ ID NO: 961351 - RNA, 19 nt, Homo sapiens
  misc_RNA (1)...(19): siRNA sense strand
caucagagaguucauacug

SEQ ID NO: 961352 - RNA, 19 nt, Homo sapiens
  misc_RNA (1)...(19): siRNA sense strand
aaagcagcauguuuaugaa

SEQ ID NO: 961353 - RNA, 19 nt, Homo sapiens
  misc_RNA (1)...(19): siRNA sense strand
gaaacccuauaaauguaag

SEQ ID NO: 961354 - RNA, 19 nt, Homo sapiens
  misc_RNA (1)...(19): siRNA sense strand
gugagaagaccuugaguca

SEQ ID NO: 961355 - RNA, 19 nt, Homo sapiens
  misc_RNA (1)...(19): siRNA sense strand
ucucacaucuuacuguaca

SEQ ID NO: 961356 - RNA, 19 nt, Homo sapiens
  misc_RNA (1)...(19): siRNA sense strand
ggauguggccauagucuuc

SEQ ID NO: 961357 - RNA, 19 nt, Homo sapiens
  misc_RNA (1)...(19): siRNA sense strand
gaauguaaggaauguggaa

SEQ ID NO: 961358 - RNA, 19 nt, Homo sapiens
  misc_RNA (1)...(19): siRNA sense strand
uauacgacaucagagaauu

SEQ ID NO: 961359 - RNA, 19 nt, Homo sapiens
  misc_RNA (1)...(19): siRNA sense strand
caaccucagagaaugcaua

SEQ ID NO: 961360 - RNA, 19 nt, Homo sapiens
  misc_RNA (1)...(19): siRNA sense strand
ggagcucucuuuauauuaa

SEQ ID NO: 961361 - RNA, 19 nt, Homo sapiens
  misc_RNA (1)...(19): siRNA sense strand
guugggagcucucuuuaua

SEQ ID NO: 961362 - RNA, 19 nt, Homo sapiens
  misc_RNA (1)...(19): siRNA sense strand
ggaauaaaccuuuugcuua

SEQ ID NO: 961363 - RNA, 19 nt, Homo sapiens
  misc_RNA (1)...(19): siRNA sense strand
gaacccaguuauucuucua

SEQ ID NO: 961364 - RNA, 19 nt, Homo sapiens
  misc_RNA (1)...(19): siRNA sense strand
caauucaucucuuucgaaa

SEQ ID NO: 961365 - RNA, 19 nt, Homo sapiens
  misc_RNA (1)...(19): siRNA sense strand
ccaaguagauauggaacua

SEQ ID NO: 961366 - RNA, 19 nt, Homo sapiens
  misc_RNA (1)...(19): siRNA sense strand
ggaagauuauuaguuggua

SEQ ID NO: 961367 - RNA, 19 nt, Homo sapiens
  misc_RNA (1)...(19): siRNA sense strand
gcauuugcucuuuguauua

SEQ ID NO: 961368 - RNA, 19 nt, Homo sapiens
  misc_RNA (1)...(19): siRNA sense strand
gauacacacgggaagauua

SEQ ID NO: 961369 - RNA, 19 nt, Homo sapiens
  misc_RNA (1)...(19): siRNA sense strand
uaaaggguacugaugauuu

SEQ ID NO: 961370 - RNA, 19 nt, Homo sapiens
  misc_RNA (1)...(19): siRNA sense strand
uguacuggcuuccugcuua

SEQ ID NO: 961371 - RNA, 19 nt, Homo sapiens
  misc_RNA (1)...(19): siRNA sense strand
caaacaaggccuuaugguu

SEQ ID NO: 961372 - RNA, 19 nt, Homo sapiens
  misc_RNA (1)...(19): siRNA sense strand
agucgaagcuuguguggaa

SEQ ID NO: 961373 - RNA, 19 nt, Homo sapiens
  misc_RNA (1)...(19): siRNA sense strand
guacagugggaaagucuua

SEQ ID NO: 961374 - RNA, 19 nt, Homo sapiens
  misc_RNA (1)...(19): siRNA sense strand
aaaggguacugaugauuug

SEQ ID NO: 961375 - RNA, 19 nt, Homo sapiens
  misc_RNA (1)...(19): siRNA sense strand
ugggagcucucuuuauauu

SEQ ID NO: 961376 - RNA, 19 nt, Homo sapiens
  misc_RNA (1)...(19): siRNA sense strand
cgaagcuuguguggaauua

SEQ ID NO: 961377 - RNA, 19 nt, Homo sapiens
  misc_RNA (1)...(19): siRNA sense strand
uuacgggaauuuagacuug

SEQ ID NO: 961378 - RNA, 19 nt, Homo sapiens
  misc_RNA (1)...(19): siRNA sense strand
gaucagugcauguaagaau

SEQ ID NO: 961379 - RNA, 19 nt, Homo sapiens
  misc_RNA (1)...(19): siRNA sense strand
gaacagcccgagauacaca

SEQ ID NO: 961380 - RNA, 19 nt, Homo sapiens
  misc_RNA (1)...(19): siRNA sense strand
ggacugguuuuacaaauau

SEQ ID NO: 961381 - RNA, 19 nt, Homo sapiens
  misc_RNA (1)...(19): siRNA sense strand
uaccuuagauggaguuuua

SEQ ID NO: 961382 - RNA, 19 nt, Homo sapiens
  misc_RNA (1)...(19): siRNA sense strand
gcuauugccuugaugacau

SEQ ID NO: 961383 - RNA, 19 nt, Homo sapiens
  misc_RNA (1)...(19): siRNA sense strand
auacugcucuuugguguaa

SEQ ID NO: 961384 - RNA, 19 nt, Homo sapiens
  misc_RNA (1)...(19): siRNA sense strand
uggagcaacucaaggauug

SEQ ID NO: 961385 - RNA, 19 nt, Homo sapiens
  misc_RNA (1)...(19): siRNA sense strand
acgggaagauuauuaguug

SEQ ID NO: 961386 - RNA, 19 nt, Homo sapiens
  misc_RNA (1)...(19): siRNA sense strand
uagaaguccuggcuguauu

SEQ ID NO: 961387 - RNA, 19 nt, Homo sapiens
  misc_RNA (1)...(19): siRNA sense strand
cagccaauguccuaaacuu

SEQ ID NO: 961388 - RNA, 19 nt, Homo sapiens
  misc_RNA (1)...(19): siRNA sense strand
gaugacauuuggcacuaug

SEQ ID NO: 961389 - RNA, 19 nt, Homo sapiens
  misc_RNA (1)...(19): siRNA sense strand
acacacgggaagauuauua

SEQ ID NO: 961390 - RNA, 19 nt, Homo sapiens
  misc_RNA (1)...(19): siRNA sense strand
guacuggcuuccugcuuau

SEQ ID NO: 961391 - RNA, 19 nt, Homo sapiens
  misc_RNA (1)...(19): siRNA sense strand
aagcuuguguggaauuauu

SEQ ID NO: 961392 - RNA, 19 nt, Homo sapiens
  misc_RNA (1)...(19): siRNA sense strand
gagcauguugcagaucuua

SEQ ID NO: 961393 - RNA, 19 nt, Homo sapiens
  misc_RNA (1)...(19): siRNA sense strand
uacaucaacuccagcuaaa

SEQ ID NO: 961394 - RNA, 19 nt, Homo sapiens
  misc_RNA (1)...(19): siRNA sense strand
uggacaaacucaucagaga

SEQ ID NO: 961395 - RNA, 19 nt, Homo sapiens
  misc_RNA (1)...(19): siRNA sense strand
gcucuuugguguaauaaac

SEQ ID NO: 961396 - RNA, 19 nt, Homo sapiens
  misc_RNA (1)...(19): siRNA sense strand
acucuagugucuacucuaa

SEQ ID NO: 961397 - RNA, 19 nt, Homo sapiens
  misc_RNA (1)...(19): siRNA sense strand
guaagaauucgacgagaug

SEQ ID NO: 961398 - RNA, 19 nt, Homo sapiens
  misc_RNA (1)...(19): siRNA sense strand
gaucuuagucgaagcuugu

SEQ ID NO: 961399 - RNA, 19 nt, Homo sapiens
  misc_RNA (1)...(19): siRNA sense strand
auacuuaccugaccauuuu

SEQ ID NO: 961400 - RNA, 19 nt, Homo sapiens
  misc_RNA (1)...(19): siRNA sense strand
uaguccaccuccagaauuu

SEQ ID NO: 961401 - RNA, 19 nt, Homo sapiens
  misc_RNA (1)...(19): siRNA sense strand
gcaaguuguuacgggaauu

SEQ ID NO: 961402 - RNA, 19 nt, Homo sapiens
  misc_RNA (1)...(19): siRNA sense strand
cauuuggguuugaaagauu

SEQ ID NO: 961403 - RNA, 19 nt, Homo sapiens
  misc_RNA (1)...(19): siRNA sense strand
ggaauuggagcaacucaag

SEQ ID NO: 961404 - RNA, 19 nt, Homo sapiens
  misc_RNA (1)...(19): siRNA sense strand
uuucaaggaugacuggauu

SEQ ID NO: 961405 - RNA, 19 nt, Homo sapiens
  misc_RNA (1)...(19): siRNA sense strand
uggugcaguucuacuaaua

SEQ ID NO: 961406 - RNA, 19 nt, Homo sapiens
  misc_RNA (1)...(19): siRNA sense strand
uaauagaauuggacaacca

SEQ ID NO: 961407 - RNA, 19 nt, Homo sapiens
  misc_RNA (1)...(19): siRNA sense strand
cgaagguccuggaagauac

SEQ ID NO: 961408 - RNA, 19 nt, Homo sapiens
  misc_RNA (1)...(19): siRNA sense strand
ucaagagcauguugcagau

SEQ ID NO: 961409 - RNA, 19 nt, Homo sapiens
  misc_RNA (1)...(19): siRNA sense strand
guauuugccuccacagucu

SEQ ID NO: 961410 - RNA, 19 nt, Homo sapiens
  misc_RNA (1)...(19): siRNA sense strand
uuacaucaacuccagcuaa

SEQ ID NO: 961411 - RNA, 19 nt, Homo sapiens
  misc_RNA (1)...(19): siRNA sense strand
gaugauuugaacccaguua

SEQ ID NO: 961412 - RNA, 19 nt, Homo sapiens
  misc_RNA (1)...(19): siRNA sense strand
ggcacuauguaucccauga

SEQ ID NO: 961413 - RNA, 19 nt, Homo sapiens
  misc_RNA (1)...(19): siRNA sense strand
ucacgaugcuuucuauucg

SEQ ID NO: 961414 - RNA, 19 nt, Homo sapiens
  misc_RNA (1)...(19): siRNA sense strand
aaaccuagcccugucuauu

SEQ ID NO: 961415 - RNA, 19 nt, Homo sapiens
  misc_RNA (1)...(19): siRNA sense strand
gacaauucaucucuuucga

SEQ ID NO: 961416 - RNA, 19 nt, Homo sapiens
  misc_RNA (1)...(19): siRNA sense strand
guaguccaccuccagaauu

SEQ ID NO: 961417 - RNA, 19 nt, Homo sapiens
  misc_RNA (1)...(19): siRNA sense strand
ucgacgagaugccaaugaa

SEQ ID NO: 961418 - RNA, 19 nt, Homo sapiens
  misc_RNA (1)...(19): siRNA sense strand
agacacugccucugcuaua

SEQ ID NO: 961419 - RNA, 19 nt, Homo sapiens
  misc_RNA (1)...(19): siRNA sense strand
ccacagucuuggcacaguu

SEQ ID NO: 961420 - RNA, 19 nt, Homo sapiens
  misc_RNA (1)...(19): siRNA sense strand
gggagcucucuuuauauua

SEQ ID NO: 961421 - RNA, 19 nt, Homo sapiens
  misc_RNA (1)...(19): siRNA sense strand
cagcaugcuuaaucaagga

SEQ ID NO: 961422 - RNA, 19 nt, Homo sapiens
  misc_RNA (1)...(19): siRNA sense strand
ccgaagguccuggaagaua

SEQ ID NO: 961423 - RNA, 19 nt, Homo sapiens
  misc_RNA (1)...(19): siRNA sense strand
guaaucccaaugccucuuu

SEQ ID NO: 961424 - RNA, 19 nt, Homo sapiens
  misc_RNA (1)...(19): siRNA sense strand
gacacugccucugcuauag

SEQ ID NO: 961425 - RNA, 19 nt, Homo sapiens
  misc_RNA (1)...(19): siRNA sense strand
ccaguuauucuucuaaaca

SEQ ID NO: 961426 - RNA, 19 nt, Homo sapiens
  misc_RNA (1)...(19): siRNA sense strand
ggaaaccuagcccugucua

SEQ ID NO: 961427 - RNA, 19 nt, Homo sapiens
  misc_RNA (1)...(19): siRNA sense strand
uguaagaauucgacgagau

SEQ ID NO: 961428 - RNA, 19 nt, Homo sapiens
  misc_RNA (1)...(19): siRNA sense strand
gagaugccaaugaacaaau

SEQ ID NO: 961429 - RNA, 19 nt, Homo sapiens
  misc_RNA (1)...(19): siRNA sense strand
acacaaacaaggccuuaug

SEQ ID NO: 961430 - RNA, 19 nt, Homo sapiens
  misc_RNA (1)...(19): siRNA sense strand
aaaugguucuugcucaugu

SEQ ID NO: 961431 - RNA, 19 nt, Homo sapiens
  misc_RNA (1)...(19): siRNA sense strand
ggacaauucaucucuuucg

SEQ ID NO: 961432 - RNA, 19 nt, Homo sapiens
  misc_RNA (1)...(19): siRNA sense strand
gacgagaugccaaugaaca

SEQ ID NO: 961433 - RNA, 19 nt, Homo sapiens
  misc_RNA (1)...(19): siRNA sense strand
acaaaugguucuugcucau

SEQ ID NO: 961434 - RNA, 19 nt, Homo sapiens
  misc_RNA (1)...(19): siRNA sense strand
aguacgagcuggcuucaag

SEQ ID NO: 961435 - RNA, 19 nt, Homo sapiens
  misc_RNA (1)...(19): siRNA sense strand
gagcuggcuucaagagcau

SEQ ID NO: 961436 - RNA, 19 nt, Homo sapiens
  misc_RNA (1)...(19): siRNA sense strand
gaaaccuagcccugucuau

SEQ ID NO: 961437 - RNA, 19 nt, Homo sapiens
  misc_RNA (1)...(19): siRNA sense strand
uauacuuaccugaccauuu

SEQ ID NO: 961438 - RNA, 19 nt, Homo sapiens
  misc_RNA (1)...(19): siRNA sense strand
cuuuaacugccuauacuua

SEQ ID NO: 961439 - RNA, 19 nt, Homo sapiens
  misc_RNA (1)...(19): siRNA sense strand
ucauuuggguuugaaagau

SEQ ID NO: 961440 - RNA, 19 nt, Homo sapiens
  misc_RNA (1)...(19): siRNA sense strand
cuuauguggugcaguucua

SEQ ID NO: 961441 - RNA, 19 nt, Homo sapiens
  misc_RNA (1)...(19): siRNA sense strand
ccuccagaauuuucauuua

SEQ ID NO: 961442 - RNA, 19 nt, Homo sapiens
  misc_RNA (1)...(19): siRNA sense strand
ugucuacucuaacuguuca

SEQ ID NO: 961443 - RNA, 19 nt, Homo sapiens
  misc_RNA (1)...(19): siRNA sense strand
gauacugcucuuuggugua

SEQ ID NO: 961444 - RNA, 19 nt, Homo sapiens
  misc_RNA (1)...(19): siRNA sense strand
caaguuguuacgggaauuu

SEQ ID NO: 961445 - RNA, 19 nt, Homo sapiens
  misc_RNA (1)...(19): siRNA sense strand
caaacucaucagagaggua

SEQ ID NO: 961446 - RNA, 19 nt, Homo sapiens
  misc_RNA (1)...(19): siRNA sense strand
cuauugccuugaugacauu

SEQ ID NO: 961447 - RNA, 19 nt, Homo sapiens
  misc_RNA (1)...(19): siRNA sense strand
cuauagcuauugccuugau

SEQ ID NO: 961448 - RNA, 19 nt, Homo sapiens
  misc_RNA (1)...(19): siRNA sense strand
ggggacaauucaucucuuu

SEQ ID NO: 961449 - RNA, 19 nt, Homo sapiens
  misc_RNA (1)...(19): siRNA sense strand
agaaguccuggcuguauuu

SEQ ID NO: 961450 - RNA, 19 nt, Homo sapiens
  misc_RNA (1)...(19): siRNA sense strand
acacacaaacaaggccuua

SEQ ID NO: 961451 - RNA, 19 nt, Homo sapiens
  misc_RNA (1)...(19): siRNA sense strand
cuucuaaacacacaaacaa

SEQ ID NO: 961452 - RNA, 19 nt, Homo sapiens
  misc_RNA (1)...(19): siRNA sense strand
cuauguaucccaugagugu

SEQ ID NO: 961453 - RNA, 19 nt, Homo sapiens
  misc_RNA (1)...(19): siRNA sense strand
ggcaaguuguuacgggaau

SEQ ID NO: 961454 - RNA, 19 nt, Homo sapiens
  misc_RNA (1)...(19): siRNA sense strand
ggaauuuagacuuguagca

SEQ ID NO: 961455 - RNA, 19 nt, Homo sapiens
  misc_RNA (1)...(19): siRNA sense strand
acaguugggagcucucuuu

SEQ ID NO: 961456 - RNA, 19 nt, Homo sapiens
  misc_RNA (1)...(19): siRNA sense strand
uggaacagcccgagauaca

SEQ ID NO: 961457 - RNA, 19 nt, Homo sapiens
  misc_RNA (1)...(19): siRNA sense strand
caaguagauauggaacuaa

SEQ ID NO: 961458 - RNA, 19 nt, Homo sapiens
  misc_RNA (1)...(19): siRNA sense strand
aaaugugaacccaguuauu

SEQ ID NO: 961459 - RNA, 19 nt, Homo sapiens
  misc_RNA (1)...(19): siRNA sense strand
guuucaaccuguucacgau

SEQ ID NO: 961460 - RNA, 19 nt, Homo sapiens
  misc_RNA (1)...(19): siRNA sense strand
ggagaaaccuuaugaaugu

SEQ ID NO: 961461 - RNA, 19 nt, Homo sapiens
  misc_RNA (1)...(19): siRNA sense strand
gaagaagacugccggagua

SEQ ID NO: 961462 - RNA, 19 nt, Homo sapiens
  misc_RNA (1)...(19): siRNA sense strand
gagaaacccuauaaaugua

SEQ ID NO: 961463 - RNA, 19 nt, Homo sapiens
  misc_RNA (1)...(19): siRNA sense strand
gagaaacccuauaaaugua

SEQ ID NO: 961464 - RNA, 19 nt, Homo sapiens
  misc_RNA (1)...(19): siRNA sense strand
gagaagcccuauaaaugua

SEQ ID NO: 961465 - RNA, 19 nt, Homo sapiens
  misc_RNA (1)...(19): siRNA sense strand
ggagauagaccuuauaaau

SEQ ID NO: 961466 - RNA, 19 nt, Homo sapiens
  misc_RNA (1)...(19): siRNA sense strand
gagagaagcccuauaaaug

SEQ ID NO: 961467 - RNA, 19 nt, Homo sapiens
  misc_RNA (1)...(19): siRNA sense strand
gagaaacccuauaagugua

SEQ ID NO: 961468 - RNA, 19 nt, Homo sapiens
  misc_RNA (1)...(19): siRNA sense strand
ugagaaaccucuugaaugu

SEQ ID NO: 961469 - RNA, 19 nt, Homo sapiens
  misc_RNA (1)...(19): siRNA sense strand
uaaagaagguagucaaugu

SEQ ID NO: 961470 - RNA, 19 nt, Homo sapiens
  misc_RNA (1)...(19): siRNA sense strand
gagaagccauauaaaugua

SEQ ID NO: 961471 - RNA, 19 nt, Homo sapiens
  misc_RNA (1)...(19): siRNA sense strand
gauacgagcuauuugagaa

SEQ ID NO: 961472 - RNA, 19 nt, Homo sapiens
  misc_RNA (1)...(19): siRNA sense strand
ucaagaaccuggcaucuau

SEQ ID NO: 961473 - RNA, 19 nt, Homo sapiens
  misc_RNA (1)...(19): siRNA sense strand
gagagaaacccuauaaaug

SEQ ID NO: 961474 - RNA, 19 nt, Homo sapiens
  misc_RNA (1)...(19): siRNA sense strand
agaaaccucuugaauguaa

SEQ ID NO: 961475 - RNA, 19 nt, Homo sapiens
  misc_RNA (1)...(19): siRNA sense strand
gagagaaacccuauaaaug

SEQ ID NO: 961476 - RNA, 19 nt, Homo sapiens
  misc_RNA (1)...(19): siRNA sense strand
gguaaagccuucagauguu

SEQ ID NO: 961477 - RNA, 19 nt, Homo sapiens
  misc_RNA (1)...(19): siRNA sense strand
caacggagauagaccuuau

SEQ ID NO: 961478 - RNA, 19 nt, Homo sapiens
  misc_RNA (1)...(19): siRNA sense strand
gagaaacccuaugaaugua

SEQ ID NO: 961479 - RNA, 19 nt, Homo sapiens
  misc_RNA (1)...(19): siRNA sense strand
gggaaagccuucaguuguu

SEQ ID NO: 961480 - RNA, 19 nt, Homo sapiens
  misc_RNA (1)...(19): siRNA sense strand
ggagagaaacccuauaaau

SEQ ID NO: 961481 - RNA, 19 nt, Homo sapiens
  misc_RNA (1)...(19): siRNA sense strand
ggagagaaacccuauaaau

SEQ ID NO: 961482 - RNA, 19 nt, Homo sapiens
  misc_RNA (1)...(19): siRNA sense strand
gagaaacccuaugcaugua

SEQ ID NO: 961483 - RNA, 19 nt, Homo sapiens
  misc_RNA (1)...(19): siRNA sense strand
gagaaacccuacgaaugua

SEQ ID NO: 961484 - RNA, 19 nt, Homo sapiens
  misc_RNA (1)...(19): siRNA sense strand
gagauagaccuuauaaaug

SEQ ID NO: 961485 - RNA, 19 nt, Homo sapiens
  misc_RNA (1)...(19): siRNA sense strand
gcgggaaggccuuuauuua

SEQ ID NO: 961486 - RNA, 19 nt, Homo sapiens
  misc_RNA (1)...(19): siRNA sense strand
gaaacccuaugaauguaaa

SEQ ID NO: 961487 - RNA, 19 nt, Homo sapiens
  misc_RNA (1)...(19): siRNA sense strand
ggagagaagcccuauaaau

SEQ ID NO: 961488 - RNA, 19 nt, Homo sapiens
  misc_RNA (1)...(19): siRNA sense strand
gggaaggccuuuauuuauc

SEQ ID NO: 961489 - RNA, 19 nt, Homo sapiens
  misc_RNA (1)...(19): siRNA sense strand
gcucuuaguuguuccaguu

SEQ ID NO: 961490 - RNA, 19 nt, Homo sapiens
  misc_RNA (1)...(19): siRNA sense strand
gagagaaacccuaugaaug

SEQ ID NO: 961491 - RNA, 19 nt, Homo sapiens
  misc_RNA (1)...(19): siRNA sense strand
gagagaaacccuauaagug

SEQ ID NO: 961492 - RNA, 19 nt, Homo sapiens
  misc_RNA (1)...(19): siRNA sense strand
uaacacacaugauaacaca

SEQ ID NO: 961493 - RNA, 19 nt, Homo sapiens
  misc_RNA (1)...(19): siRNA sense strand
ggacacaugagaaugcaua

SEQ ID NO: 961494 - RNA, 19 nt, Homo sapiens
  misc_RNA (1)...(19): siRNA sense strand
gagagaaacccuacgaaug

SEQ ID NO: 961495 - RNA, 19 nt, Homo sapiens
  misc_RNA (1)...(19): siRNA sense strand
gggaagacccgaauguuga

SEQ ID NO: 961496 - RNA, 19 nt, Homo sapiens
  misc_RNA (1)...(19): siRNA sense strand
ggagagaaacccuaugaau

SEQ ID NO: 961497 - RNA, 19 nt, Homo sapiens
  misc_RNA (1)...(19): siRNA sense strand
ggagagaaacccuauaagu

SEQ ID NO: 961498 - RNA, 19 nt, Homo sapiens
  misc_RNA (1)...(19): siRNA sense strand
gaaaagcucuuaguuguuc

SEQ ID NO: 961499 - RNA, 19 nt, Homo sapiens
  misc_RNA (1)...(19): siRNA sense strand
caauuauccucuagauuug

SEQ ID NO: 961500 - RNA, 19 nt, Homo sapiens
  misc_RNA (1)...(19): siRNA sense strand
gaaaagcccuaugaaugua

SEQ ID NO: 961501 - RNA, 19 nt, Homo sapiens
  misc_RNA (1)...(19): siRNA sense strand
gggagaaaccuuaugaaug

SEQ ID NO: 961502 - RNA, 19 nt, Homo sapiens
  misc_RNA (1)...(19): siRNA sense strand
agagaaacccuauaaaugu

SEQ ID NO: 961503 - RNA, 19 nt, Homo sapiens
  misc_RNA (1)...(19): siRNA sense strand
ggaaaagccuucagugugu

SEQ ID NO: 961504 - RNA, 19 nt, Homo sapiens
  misc_RNA (1)...(19): siRNA sense strand
agagaaacccuauaaaugu

SEQ ID NO: 961505 - RNA, 19 nt, Homo sapiens
  misc_RNA (1)...(19): siRNA sense strand
ggaaagccuucaguuguuc

SEQ ID NO: 961506 - RNA, 19 nt, Homo sapiens
  misc_RNA (1)...(19): siRNA sense strand
uaaagaaugugggaaaucu

SEQ ID NO: 961507 - RNA, 19 nt, Homo sapiens
  misc_RNA (1)...(19): siRNA sense strand
gagaaaccuuaugaaugua

SEQ ID NO: 961508 - RNA, 19 nt, Homo sapiens
  misc_RNA (1)...(19): siRNA sense strand
gagacucugugaagguaaa

SEQ ID NO: 961509 - RNA, 19 nt, Homo sapiens
  misc_RNA (1)...(19): siRNA sense strand
agagaaacccuaugaaugu

SEQ ID NO: 961510 - RNA, 19 nt, Homo sapiens
  misc_RNA (1)...(19): siRNA sense strand
cgaaaucuaagaagccaua

SEQ ID NO: 961511 - RNA, 19 nt, Homo sapiens
  misc_RNA (1)...(19): siRNA sense strand
agauagaccuuauaaaugc

SEQ ID NO: 961512 - RNA, 19 nt, Homo sapiens
  misc_RNA (1)...(19): siRNA sense strand
gagaaaagcccuaugaaug

SEQ ID NO: 961513 - RNA, 19 nt, Homo sapiens
  misc_RNA (1)...(19): siRNA sense strand
ggagagaaacccuacgaau

SEQ ID NO: 961514 - RNA, 19 nt, Homo sapiens
  misc_RNA (1)...(19): siRNA sense strand
gaauguaaacaauguggaa

SEQ ID NO: 961515 - RNA, 19 nt, Homo sapiens
  misc_RNA (1)...(19): siRNA sense strand
agagaaacccuacgaaugu

SEQ ID NO: 961516 - RNA, 19 nt, Homo sapiens
  misc_RNA (1)...(19): siRNA sense strand
acgaguacaugaaagaauu

SEQ ID NO: 961517 - RNA, 19 nt, Homo sapiens
  misc_RNA (1)...(19): siRNA sense strand
gaagcccuauaaauguaaa

SEQ ID NO: 961518 - RNA, 19 nt, Homo sapiens
  misc_RNA (1)...(19): siRNA sense strand
gguagucaaugugcagaaa

SEQ ID NO: 961519 - RNA, 19 nt, Homo sapiens
  misc_RNA (1)...(19): siRNA sense strand
gaauguaagcaauguggaa

SEQ ID NO: 961520 - RNA, 19 nt, Homo sapiens
  misc_RNA (1)...(19): siRNA sense strand
gaauguaagcaauguggaa

SEQ ID NO: 961521 - RNA, 19 nt, Homo sapiens
  misc_RNA (1)...(19): siRNA sense strand
guaaagccuucagauguuc

SEQ ID NO: 961522 - RNA, 19 nt, Homo sapiens
  misc_RNA (1)...(19): siRNA sense strand
cuucacaguuccuuucaaa

SEQ ID NO: 961523 - RNA, 19 nt, Homo sapiens
  misc_RNA (1)...(19): siRNA sense strand
agagaaacccuauaagugu

SEQ ID NO: 961524 - RNA, 19 nt, Homo sapiens
  misc_RNA (1)...(19): siRNA sense strand
gaacucacacuggagagaa

SEQ ID NO: 961525 - RNA, 19 nt, Homo sapiens
  misc_RNA (1)...(19): siRNA sense strand
gccuuuaguuguucuaguu

SEQ ID NO: 961526 - RNA, 19 nt, Homo sapiens
  misc_RNA (1)...(19): siRNA sense strand
gaacucacacuggagagaa

SEQ ID NO: 961527 - RNA, 19 nt, Homo sapiens
  misc_RNA (1)...(19): siRNA sense strand
ccaccuccauucaaauuca

SEQ ID NO: 961528 - RNA, 19 nt, Homo sapiens
  misc_RNA (1)...(19): siRNA sense strand
ccauaugaguguacuaucu

SEQ ID NO: 961529 - RNA, 19 nt, Homo sapiens
  misc_RNA (1)...(19): siRNA sense strand
ugagaaugcacaaucgaua

SEQ ID NO: 961530 - RNA, 19 nt, Homo sapiens
  misc_RNA (1)...(19): siRNA sense strand
ggaaggccuuuauuuaucc

SEQ ID NO: 961531 - RNA, 19 nt, Homo sapiens
  misc_RNA (1)...(19): siRNA sense strand
gaaacccuacgaauguaaa

SEQ ID NO: 961532 - RNA, 19 nt, Homo sapiens
  misc_RNA (1)...(19): siRNA sense strand
guucuaacacacaugauaa

SEQ ID NO: 961533 - RNA, 19 nt, Homo sapiens
  misc_RNA (1)...(19): siRNA sense strand
ucucaucccuuacuagaca

SEQ ID NO: 961534 - RNA, 19 nt, Homo sapiens
  misc_RNA (1)...(19): siRNA sense strand
gaaacccuaugcauguaag

SEQ ID NO: 961535 - RNA, 19 nt, Homo sapiens
  misc_RNA (1)...(19): siRNA sense strand
agagaaacccuaugcaugu

SEQ ID NO: 961536 - RNA, 19 nt, Homo sapiens
  misc_RNA (1)...(19): siRNA sense strand
ggagagaaacccuaugcau

SEQ ID NO: 961537 - RNA, 19 nt, Homo sapiens
  misc_RNA (1)...(19): siRNA sense strand
ggaagacccgaauguugaa

SEQ ID NO: 961538 - RNA, 19 nt, Homo sapiens
  misc_RNA (1)...(19): siRNA sense strand
ugagaagccauauaaaugu

SEQ ID NO: 961539 - RNA, 19 nt, Homo sapiens
  misc_RNA (1)...(19): siRNA sense strand
cgggaaggccuuuauuuau

SEQ ID NO: 961540 - RNA, 19 nt, Homo sapiens
  misc_RNA (1)...(19): siRNA sense strand
gaaacccuauaaguguaaa

SEQ ID NO: 961541 - RNA, 19 nt, Homo sapiens
  misc_RNA (1)...(19): siRNA sense strand
agagaagcccuauaaaugu

SEQ ID NO: 961542 - RNA, 19 nt, Homo sapiens
  misc_RNA (1)...(19): siRNA sense strand
augcgucucucaucccuua

SEQ ID NO: 961543 - RNA, 19 nt, Homo sapiens
  misc_RNA (1)...(19): siRNA sense strand
gagaaaccucuugaaugua

SEQ ID NO: 961544 - RNA, 19 nt, Homo sapiens
  misc_RNA (1)...(19): siRNA sense strand
agaaucaguuacuuucgaa

SEQ ID NO: 961545 - RNA, 19 nt, Homo sapiens
  misc_RNA (1)...(19): siRNA sense strand
uagaaucaguuacuuucga

SEQ ID NO: 961546 - RNA, 19 nt, Homo sapiens
  misc_RNA (1)...(19): siRNA sense strand
ccaguucgcuucgaguuca

SEQ ID NO: 961547 - RNA, 19 nt, Homo sapiens
  misc_RNA (1)...(19): siRNA sense strand
gaagccauauaaauguaag

SEQ ID NO: 961548 - RNA, 19 nt, Homo sapiens
  misc_RNA (1)...(19): siRNA sense strand
guaaagaagguagucaaug

SEQ ID NO: 961549 - RNA, 19 nt, Homo sapiens
  misc_RNA (1)...(19): siRNA sense strand
gcaggaaacauucaagaac

SEQ ID NO: 961550 - RNA, 19 nt, Homo sapiens
  misc_RNA (1)...(19): siRNA sense strand
caaagacauacaagaauuc

SEQ ID NO: 961551 - RNA, 19 nt, Homo sapiens
  misc_RNA (1)...(19): siRNA sense strand
gaagacugccggaguaaaa

SEQ ID NO: 961552 - RNA, 19 nt, Homo sapiens
  misc_RNA (1)...(19): siRNA sense strand
aaaccaaggacgaaaucua

SEQ ID NO: 961553 - RNA, 19 nt, Homo sapiens
  misc_RNA (1)...(19): siRNA sense strand
caagaaccuggcaucuaua

SEQ ID NO: 961554 - RNA, 19 nt, Homo sapiens
  misc_RNA (1)...(19): siRNA sense strand
gagaugugaugcaggaaac

SEQ ID NO: 961555 - RNA, 19 nt, Homo sapiens
  misc_RNA (1)...(19): siRNA sense strand
aaccaaggacgaaaucuaa

SEQ ID NO: 961556 - RNA, 19 nt, Homo sapiens
  misc_RNA (1)...(19): siRNA sense strand
gacucacacuggagagaaa

SEQ ID NO: 961557 - RNA, 19 nt, Homo sapiens
  misc_RNA (1)...(19): siRNA sense strand
caaggacgaaaucuaagaa

SEQ ID NO: 961558 - RNA, 19 nt, Homo sapiens
  misc_RNA (1)...(19): siRNA sense strand
gagaaugcacaaucgauag

SEQ ID NO: 961559 - RNA, 19 nt, Homo sapiens
  misc_RNA (1)...(19): siRNA sense strand
gaacacaugaaagaacuca

SEQ ID NO: 961560 - RNA, 19 nt, Homo sapiens
  misc_RNA (1)...(19): siRNA sense strand
gcccacagguuuccagaug

SEQ ID NO: 961561 - RNA, 19 nt, Homo sapiens
  misc_RNA (1)...(19): siRNA sense strand
ccaaagcaauaucuauguc

SEQ ID NO: 961562 - RNA, 19 nt, Homo sapiens
  misc_RNA (1)...(19): siRNA sense strand
caacguugacuacuucuuc

SEQ ID NO: 961563 - RNA, 19 nt, Homo sapiens
  misc_RNA (1)...(19): siRNA sense strand
ccaaagacaagcucugugu

SEQ ID NO: 961564 - RNA, 19 nt, Homo sapiens
  misc_RNA (1)...(19): siRNA sense strand
gccagucagcccuguauaa

SEQ ID NO: 961565 - RNA, 19 nt, Homo sapiens
  misc_RNA (1)...(19): siRNA sense strand
guccaacguugacuacuuc

SEQ ID NO: 961566 - RNA, 19 nt, Homo sapiens
  misc_RNA (1)...(19): siRNA sense strand
caagacggccagagcuuug

SEQ ID NO: 961567 - RNA, 19 nt, Homo sapiens
  misc_RNA (1)...(19): siRNA sense strand
gagcugcuguccuuugacu

SEQ ID NO: 961568 - RNA, 19 nt, Homo sapiens
  misc_RNA (1)...(19): siRNA sense strand
ccaagacggccagagcuuu

SEQ ID NO: 961569 - RNA, 19 nt, Homo sapiens
  misc_RNA (1)...(19): siRNA sense strand
uguccaacguugacuacuu

SEQ ID NO: 961570 - RNA, 19 nt, Homo sapiens
  misc_RNA (1)...(19): siRNA sense strand
cagcaguggugggaacuca

SEQ ID NO: 961571 - RNA, 19 nt, Homo sapiens
  misc_RNA (1)...(19): siRNA sense strand
cauucugucuggcaagaga

SEQ ID NO: 961572 - RNA, 19 nt, Homo sapiens
  misc_RNA (1)...(19): siRNA sense strand
gacuacagcgugccugaga

SEQ ID NO: 961573 - RNA, 19 nt, Homo sapiens
  misc_RNA (1)...(19): siRNA sense strand
caagcucugugucauccau

SEQ ID NO: 961574 - RNA, 19 nt, Homo sapiens
  misc_RNA (1)...(19): siRNA sense strand
gacuacuucuucaacuuca

SEQ ID NO: 961575 - RNA, 19 nt, Homo sapiens
  misc_RNA (1)...(19): siRNA sense strand
ugacuacuucuucaacuuc

SEQ ID NO: 961576 - RNA, 19 nt, Homo sapiens
  misc_RNA (1)...(19): siRNA sense strand
agucagcccuguauaagcu

SEQ ID NO: 961577 - RNA, 19 nt, Homo sapiens
  misc_RNA (1)...(19): siRNA sense strand
caagguggccgaggucaag

SEQ ID NO: 961578 - RNA, 19 nt, Homo sapiens
  misc_RNA (1)...(19): siRNA sense strand
cgacggccaagaagggaaa

SEQ ID NO: 961579 - RNA, 19 nt, Homo sapiens
  misc_RNA (1)...(19): siRNA sense strand
ggaacucagccgaugacau

SEQ ID NO: 961580 - RNA, 19 nt, Homo sapiens
  misc_RNA (1)...(19): siRNA sense strand
ccagucagcccuguauaag

SEQ ID NO: 961581 - RNA, 19 nt, Homo sapiens
  misc_RNA (1)...(19): siRNA sense strand
cagcagcccuugccagaua

SEQ ID NO: 961582 - RNA, 19 nt, Homo sapiens
  misc_RNA (1)...(19): siRNA sense strand
ucacccggcucuucacuuu

SEQ ID NO: 961583 - RNA, 19 nt, Homo sapiens
  misc_RNA (1)...(19): siRNA sense strand
gggcaaagccugcucuuca

SEQ ID NO: 961584 - RNA, 19 nt, Homo sapiens
  misc_RNA (1)...(19): siRNA sense strand
ggccaucgcugcagaagca

SEQ ID NO: 961585 - RNA, 19 nt, Homo sapiens
  misc_RNA (1)...(19): siRNA sense strand
ccacggccaugcucaacuu

SEQ ID NO: 961586 - RNA, 19 nt, Homo sapiens
  misc_RNA (1)...(19): siRNA sense strand
gagcccaccaguucuacua

SEQ ID NO: 961587 - RNA, 19 nt, Homo sapiens
  misc_RNA (1)...(19): siRNA sense strand
ggcaaagccugcucuucau

SEQ ID NO: 961588 - RNA, 19 nt, Homo sapiens
  misc_RNA (1)...(19): siRNA sense strand
agaaacgucccaccuccua

SEQ ID NO: 961589 - RNA, 19 nt, Homo sapiens
  misc_RNA (1)...(19): siRNA sense strand
gcaaagccugcucuucauc

SEQ ID NO: 961590 - RNA, 19 nt, Homo sapiens
  misc_RNA (1)...(19): siRNA sense strand
gcccaccgauggcucaagu

SEQ ID NO: 961591 - RNA, 19 nt, Homo sapiens
  misc_RNA (1)...(19): siRNA sense strand
caaggugggcaucgucuuc

SEQ ID NO: 961592 - RNA, 19 nt, Homo sapiens
  misc_RNA (1)...(19): siRNA sense strand
gcuccugggaaggguauua

SEQ ID NO: 961593 - RNA, 19 nt, Homo sapiens
  misc_RNA (1)...(19): siRNA sense strand
guauuaccaccacuucuca

SEQ ID NO: 961594 - RNA, 19 nt, Homo sapiens
  misc_RNA (1)...(19): siRNA sense strand
gcauguggaguacgagcuu

SEQ ID NO: 961595 - RNA, 19 nt, Homo sapiens
  misc_RNA (1)...(19): siRNA sense strand
guacgagcuuuucaagaug

SEQ ID NO: 961596 - RNA, 19 nt, Homo sapiens
  misc_RNA (1)...(19): siRNA sense strand
cauguggaguacgagcuuu

SEQ ID NO: 961597 - RNA, 19 nt, Homo sapiens
  misc_RNA (1)...(19): siRNA sense strand
ggaaucgacugcaucauga

SEQ ID NO: 961598 - RNA, 19 nt, Homo sapiens
  misc_RNA (1)...(19): siRNA sense strand
gugaaaugcugaacacuuu

SEQ ID NO: 961599 - RNA, 19 nt, Homo sapiens
  misc_RNA (1)...(19): siRNA sense strand
gaaagugucccagucauga

SEQ ID NO: 961600 - RNA, 19 nt, Homo sapiens
  misc_RNA (1)...(19): siRNA sense strand
cagaagagcauauucgaaa

SEQ ID NO: 961601 - RNA, 19 nt, Homo sapiens
  misc_RNA (1)...(19): siRNA sense strand
ggaaacggauaggcuucua

SEQ ID NO: 961602 - RNA, 19 nt, Homo sapiens
  misc_RNA (1)...(19): siRNA sense strand
gauaagacacacauccaaa

SEQ ID NO: 961603 - RNA, 19 nt, Homo sapiens
  misc_RNA (1)...(19): siRNA sense strand
uaaagaaagagaccucaaa

SEQ ID NO: 961604 - RNA, 19 nt, Homo sapiens
  misc_RNA (1)...(19): siRNA sense strand
ccauuaagauccuggacaa

SEQ ID NO: 961605 - RNA, 19 nt, Homo sapiens
  misc_RNA (1)...(19): siRNA sense strand
gcauuuacguggauaucug

SEQ ID NO: 961606 - RNA, 19 nt, Homo sapiens
  misc_RNA (1)...(19): siRNA sense strand
gaaauaaccaagggagaga

SEQ ID NO: 961607 - RNA, 19 nt, Homo sapiens
  misc_RNA (1)...(19): siRNA sense strand
aagaaaagguggccauuaa

SEQ ID NO: 961608 - RNA, 19 nt, Homo sapiens
  misc_RNA (1)...(19): siRNA sense strand
uaagacacacauccaaauu

SEQ ID NO: 961609 - RNA, 19 nt, Homo sapiens
  misc_RNA (1)...(19): siRNA sense strand
uuagaacauuugggcauua

SEQ ID NO: 961610 - RNA, 19 nt, Homo sapiens
  misc_RNA (1)...(19): siRNA sense strand
ccagcacucucaaggaaga

SEQ ID NO: 961611 - RNA, 19 nt, Homo sapiens
  misc_RNA (1)...(19): siRNA sense strand
gcgcgacaguguagaaagu

SEQ ID NO: 961612 - RNA, 19 nt, Homo sapiens
  misc_RNA (1)...(19): siRNA sense strand
gaaaccguggccaaacuaa

SEQ ID NO: 961613 - RNA, 19 nt, Homo sapiens
  misc_RNA (1)...(19): siRNA sense strand
gcacaugcaugaaaaccaa

SEQ ID NO: 961614 - RNA, 19 nt, Homo sapiens
  misc_RNA (1)...(19): siRNA sense strand
aaagcaagcucaucuucuc

SEQ ID NO: 961615 - RNA, 19 nt, Homo sapiens
  misc_RNA (1)...(19): siRNA sense strand
ggaaagugucccagucaug

SEQ ID NO: 961616 - RNA, 19 nt, Homo sapiens
  misc_RNA (1)...(19): siRNA sense strand
uuacauagaguccaaagga

SEQ ID NO: 961617 - RNA, 19 nt, Homo sapiens
  misc_RNA (1)...(19): siRNA sense strand
caacuggaucccaaacauu

SEQ ID NO: 961618 - RNA, 19 nt, Homo sapiens
  misc_RNA (1)...(19): siRNA sense strand
gcuacuaucccgagaaauc

SEQ ID NO: 961619 - RNA, 19 nt, Homo sapiens
  misc_RNA (1)...(19): siRNA sense strand
guagaaaguggcugucaga

SEQ ID NO: 961620 - RNA, 19 nt, Homo sapiens
  misc_RNA (1)...(19): siRNA sense strand
ccaacuggaucccaaacau

SEQ ID NO: 961621 - RNA, 19 nt, Homo sapiens
  misc_RNA (1)...(19): siRNA sense strand
cuacaccuuuggaaccuuu

SEQ ID NO: 961622 - RNA, 19 nt, Homo sapiens
  misc_RNA (1)...(19): siRNA sense strand
gaaagcaagcucaucuucu

SEQ ID NO: 961623 - RNA, 19 nt, Homo sapiens
  misc_RNA (1)...(19): siRNA sense strand
gugaagcacaugcaugaaa

SEQ ID NO: 961624 - RNA, 19 nt, Homo sapiens
  misc_RNA (1)...(19): siRNA sense strand
aaccagcacucucaaggaa

SEQ ID NO: 961625 - RNA, 19 nt, Homo sapiens
  misc_RNA (1)...(19): siRNA sense strand
ggauaggcuucuaccgaau

SEQ ID NO: 961626 - RNA, 19 nt, Homo sapiens
  misc_RNA (1)...(19): siRNA sense strand
agacacacauccaaauuuu

SEQ ID NO: 961627 - RNA, 19 nt, Homo sapiens
  misc_RNA (1)...(19): siRNA sense strand
acaggggucuauagaauua

SEQ ID NO: 961628 - RNA, 19 nt, Homo sapiens
  misc_RNA (1)...(19): siRNA sense strand
ucauagagaucugaaagca

SEQ ID NO: 961629 - RNA, 19 nt, Homo sapiens
  misc_RNA (1)...(19): siRNA sense strand
gauaggcuucuaccgaauu

SEQ ID NO: 961630 - RNA, 19 nt, Homo sapiens
  misc_RNA (1)...(19): siRNA sense strand
gauugugucugccgugaag

SEQ ID NO: 961631 - RNA, 19 nt, Homo sapiens
  misc_RNA (1)...(19): siRNA sense strand
gccauacccuacaccuuug

SEQ ID NO: 961632 - RNA, 19 nt, Homo sapiens
  misc_RNA (1)...(19): siRNA sense strand
gaaaagguggccauuaaga

SEQ ID NO: 961633 - RNA, 19 nt, Homo sapiens
  misc_RNA (1)...(19): siRNA sense strand
gcuaccagacccuaaagaa

SEQ ID NO: 961634 - RNA, 19 nt, Homo sapiens
  misc_RNA (1)...(19): siRNA sense strand
ggugaaaugcugaacacuu

SEQ ID NO: 961635 - RNA, 19 nt, Homo sapiens
  misc_RNA (1)...(19): siRNA sense strand
gugugaaggugggcgauuu

SEQ ID NO: 961636 - RNA, 19 nt, Homo sapiens
  misc_RNA (1)...(19): siRNA sense strand
cagaaaccguggccaaacu

SEQ ID NO: 961637 - RNA, 19 nt, Homo sapiens
  misc_RNA (1)...(19): siRNA sense strand
agaagagcauauucgaaau

SEQ ID NO: 961638 - RNA, 19 nt, Homo sapiens
  misc_RNA (1)...(19): siRNA sense strand
gaaacugacacaggacaug

SEQ ID NO: 961639 - RNA, 19 nt, Homo sapiens
  misc_RNA (1)...(19): siRNA sense strand
ugccauacccuacaccuuu

SEQ ID NO: 961640 - RNA, 19 nt, Homo sapiens
  misc_RNA (1)...(19): siRNA sense strand
agaccaaguuagaccagaa

SEQ ID NO: 961641 - RNA, 19 nt, Homo sapiens
  misc_RNA (1)...(19): siRNA sense strand
cuaccagacccuaaagaaa

SEQ ID NO: 961642 - RNA, 19 nt, Homo sapiens
  misc_RNA (1)...(19): siRNA sense strand
gaugcucgcagcucaauca

SEQ ID NO: 961643 - RNA, 19 nt, Homo sapiens
  misc_RNA (1)...(19): siRNA sense strand
ccaacaucauccgccuuua

SEQ ID NO: 961644 - RNA, 19 nt, Homo sapiens
  misc_RNA (1)...(19): siRNA sense strand
caucauccgccuuuacgaa

SEQ ID NO: 961645 - RNA, 19 nt, Homo sapiens
  misc_RNA (1)...(19): siRNA sense strand
gaugcuaccagacccuaaa

SEQ ID NO: 961646 - RNA, 19 nt, Homo sapiens
  misc_RNA (1)...(19): siRNA sense strand
uacauagaguccaaaggaa

SEQ ID NO: 961647 - RNA, 19 nt, Homo sapiens
  misc_RNA (1)...(19): siRNA sense strand
gcugacgcccuucgagaaa

SEQ ID NO: 961648 - RNA, 19 nt, Homo sapiens
  misc_RNA (1)...(19): siRNA sense strand
ccagaaagcaagcucaucu

SEQ ID NO: 961649 - RNA, 19 nt, Homo sapiens
  misc_RNA (1)...(19): siRNA sense strand
gaaagcagaaaauguauuc

SEQ ID NO: 961650 - RNA, 19 nt, Homo sapiens
  misc_RNA (1)...(19): siRNA sense strand
ucacaggggucuauagaau

SEQ ID NO: 961651 - RNA, 19 nt, Homo sapiens
  misc_RNA (1)...(19): siRNA sense strand
gaacauuugggcauuacag

SEQ ID NO: 961652 - RNA, 19 nt, Homo sapiens
  misc_RNA (1)...(19): siRNA sense strand
aagacacacauccaaauuu

SEQ ID NO: 961653 - RNA, 19 nt, Homo sapiens
  misc_RNA (1)...(19): siRNA sense strand
ggaaaucggaaguggaaac

SEQ ID NO: 961654 - RNA, 19 nt, Homo sapiens
  misc_RNA (1)...(19): siRNA sense strand
cggaaucgacugcaucaug

SEQ ID NO: 961655 - RNA, 19 nt, Homo sapiens
  misc_RNA (1)...(19): siRNA sense strand
caacaucauccgccuuuac

SEQ ID NO: 961656 - RNA, 19 nt, Homo sapiens
  misc_RNA (1)...(19): siRNA sense strand
gaccaaguuagaccagaaa

SEQ ID NO: 961657 - RNA, 19 nt, Homo sapiens
  misc_RNA (1)...(19): siRNA sense strand
uaccagacccuaaagaaag

SEQ ID NO: 961658 - RNA, 19 nt, Homo sapiens
  misc_RNA (1)...(19): siRNA sense strand
cauagaguccaaaggaaga

SEQ ID NO: 961659 - RNA, 19 nt, Homo sapiens
  misc_RNA (1)...(19): siRNA sense strand
ccacggagagguacggaau

SEQ ID NO: 961660 - RNA, 19 nt, Homo sapiens
  misc_RNA (1)...(19): siRNA sense strand
gcacuacaucggcauuuac

SEQ ID NO: 961661 - RNA, 19 nt, Homo sapiens
  misc_RNA (1)...(19): siRNA sense strand
ugaagcacaugcaugaaaa

SEQ ID NO: 961662 - RNA, 19 nt, Homo sapiens
  misc_RNA (1)...(19): siRNA sense strand
aggcuacuaucccgagaaa

SEQ ID NO: 961663 - RNA, 19 nt, Homo sapiens
  misc_RNA (1)...(19): siRNA sense strand
aaagguggccauuaagauc

SEQ ID NO: 961664 - RNA, 19 nt, Homo sapiens
  misc_RNA (1)...(19): siRNA sense strand
ggacaagaccaaguuagac

SEQ ID NO: 961665 - RNA, 19 nt, Homo sapiens
  misc_RNA (1)...(19): siRNA sense strand
guggggagcucuucggaaa

SEQ ID NO: 961666 - RNA, 19 nt, Homo sapiens
  misc_RNA (1)...(19): siRNA sense strand
gauucacucccuaaccaaa

SEQ ID NO: 961667 - RNA, 19 nt, Homo sapiens
  misc_RNA (1)...(19): siRNA sense strand
gagcacuacaucggcauuu

SEQ ID NO: 961668 - RNA, 19 nt, Homo sapiens
  misc_RNA (1)...(19): siRNA sense strand
gaagugguggagacccuau

SEQ ID NO: 961669 - RNA, 19 nt, Homo sapiens
  misc_RNA (1)...(19): siRNA sense strand
gaaaaugaggucaaaagca

SEQ ID NO: 961670 - RNA, 19 nt, Homo sapiens
  misc_RNA (1)...(19): siRNA sense strand
gaaucgacugcaucaugaa

SEQ ID NO: 961671 - RNA, 19 nt, Homo sapiens
  misc_RNA (1)...(19): siRNA sense strand
gcagaaaccguggccaaac

SEQ ID NO: 961672 - RNA, 19 nt, Homo sapiens
  misc_RNA (1)...(19): siRNA sense strand
agaaagcaagcucaucuuc

SEQ ID NO: 961673 - RNA, 19 nt, Homo sapiens
  misc_RNA (1)...(19): siRNA sense strand
ggaaaccagcacucucaag

SEQ ID NO: 961674 - RNA, 19 nt, Homo sapiens
  misc_RNA (1)...(19): siRNA sense strand
caucggcauuuacguggau

SEQ ID NO: 961675 - RNA, 19 nt, Homo sapiens
  misc_RNA (1)...(19): siRNA sense strand
agcacuacaucggcauuua

SEQ ID NO: 961676 - RNA, 19 nt, Homo sapiens
  misc_RNA (1)...(19): siRNA sense strand
ccgugaagcacaugcauga

SEQ ID NO: 961677 - RNA, 19 nt, Homo sapiens
  misc_RNA (1)...(19): siRNA sense strand
gaaaucggaaguggaaacu

SEQ ID NO: 961678 - RNA, 19 nt, Homo sapiens
  misc_RNA (1)...(19): siRNA sense strand
accagacccuaaagaaaga

SEQ ID NO: 961679 - RNA, 19 nt, Homo sapiens
  misc_RNA (1)...(19): siRNA sense strand
gcugucagaccgagaguag

SEQ ID NO: 961680 - RNA, 19 nt, Homo sapiens
  misc_RNA (1)...(19): siRNA sense strand
aacuggaucccaaacauuu

SEQ ID NO: 961681 - RNA, 19 nt, Homo sapiens
  misc_RNA (1)...(19): siRNA sense strand
ggcagaaaccguggccaaa

SEQ ID NO: 961682 - RNA, 19 nt, Homo sapiens
  misc_RNA (1)...(19): siRNA sense strand
agaagaaaaugaggucaaa

SEQ ID NO: 961683 - RNA, 19 nt, Homo sapiens
  misc_RNA (1)...(19): siRNA sense strand
uuuagaacauuugggcauu

SEQ ID NO: 961684 - RNA, 19 nt, Homo sapiens
  misc_RNA (1)...(19): siRNA sense strand
cauccgccuuuacgaagug

SEQ ID NO: 961685 - RNA, 19 nt, Homo sapiens
  misc_RNA (1)...(19): siRNA sense strand
gagaugcucgcagcucaau

SEQ ID NO: 961686 - RNA, 19 nt, Homo sapiens
  misc_RNA (1)...(19): siRNA sense strand
gcauuacagaagagcauau

SEQ ID NO: 961687 - RNA, 19 nt, Homo sapiens
  misc_RNA (1)...(19): siRNA sense strand
uggacaagaccaaguuaga

SEQ ID NO: 961688 - RNA, 19 nt, Homo sapiens
  misc_RNA (1)...(19): siRNA sense strand
aaacauuugucggaaacca

SEQ ID NO: 961689 - RNA, 19 nt, Homo sapiens
  misc_RNA (1)...(19): siRNA sense strand
agaaaccguggccaaacua

SEQ ID NO: 961690 - RNA, 19 nt, Homo sapiens
  misc_RNA (1)...(19): siRNA sense strand
cccaacaucauccgccuuu

SEQ ID NO: 961691 - RNA, 19 nt, Homo sapiens
  misc_RNA (1)...(19): siRNA sense strand
uuaagauccuggacaagac

SEQ ID NO: 961692 - RNA, 19 nt, Homo sapiens
  misc_RNA (1)...(19): siRNA sense strand
aaaccagcacucucaagga

SEQ ID NO: 961693 - RNA, 19 nt, Homo sapiens
  misc_RNA (1)...(19): siRNA sense strand
gguacggaaucgacugcau

SEQ ID NO: 961694 - RNA, 19 nt, Homo sapiens
  misc_RNA (1)...(19): siRNA sense strand
ggauucagcacaguaagca

SEQ ID NO: 961695 - RNA, 19 nt, Homo sapiens
  misc_RNA (1)...(19): siRNA sense strand
gcacuuggugauggaguau

SEQ ID NO: 961696 - RNA, 19 nt, Homo sapiens
  misc_RNA (1)...(19): siRNA sense strand
gaaacggauaggcuucuac

SEQ ID NO: 961697 - RNA, 19 nt, Homo sapiens
  misc_RNA (1)...(19): siRNA sense strand
cgauagggcugaucaguug

SEQ ID NO: 961698 - RNA, 19 nt, Homo sapiens
  misc_RNA (1)...(19): siRNA sense strand
gaauggcacccgaaccuua

SEQ ID NO: 961699 - RNA, 19 nt, Homo sapiens
  misc_RNA (1)...(19): siRNA sense strand
gaaaaugccugguggaaug

SEQ ID NO: 961700 - RNA, 19 nt, Homo sapiens
  misc_RNA (1)...(19): siRNA sense strand
ggaaucagcccaacgauca

SEQ ID NO: 961701 - RNA, 19 nt, Homo sapiens
  misc_RNA (1)...(19): siRNA sense strand
ccaaugaucuccuuuacca

SEQ ID NO: 961702 - RNA, 19 nt, Homo sapiens
  misc_RNA (1)...(19): siRNA sense strand
caauugugcuuacggcuaa

SEQ ID NO: 961703 - RNA, 19 nt, Homo sapiens
  misc_RNA (1)...(19): siRNA sense strand
acaaagggaguaucuguua

SEQ ID NO: 961704 - RNA, 19 nt, Homo sapiens
  misc_RNA (1)...(19): siRNA sense strand
gcuaagaugaugguaaaua

SEQ ID NO: 961705 - RNA, 19 nt, Homo sapiens
  misc_RNA (1)...(19): siRNA sense strand
ggucaagaauacccacauu

SEQ ID NO: 961706 - RNA, 19 nt, Homo sapiens
  misc_RNA (1)...(19): siRNA sense strand
ugauggaucugaaauggaa

SEQ ID NO: 961707 - RNA, 19 nt, Homo sapiens
  misc_RNA (1)...(19): siRNA sense strand
ggaaaggacuaugucaaag

SEQ ID NO: 961708 - RNA, 19 nt, Homo sapiens
  misc_RNA (1)...(19): siRNA sense strand
gaaagagacagguguaugg

SEQ ID NO: 961709 - RNA, 19 nt, Homo sapiens
  misc_RNA (1)...(19): siRNA sense strand
ggagaaagagacaggugua

SEQ ID NO: 961710 - RNA, 19 nt, Homo sapiens
  misc_RNA (1)...(19): siRNA sense strand
gcugaagcgugcucacaaa

SEQ ID NO: 961711 - RNA, 19 nt, Homo sapiens
  misc_RNA (1)...(19): siRNA sense strand
gaugguaaauacagugugu

SEQ ID NO: 961712 - RNA, 19 nt, Homo sapiens
  misc_RNA (1)...(19): siRNA sense strand
uuucugaauuggaggauua

SEQ ID NO: 961713 - RNA, 19 nt, Homo sapiens
  misc_RNA (1)...(19): siRNA sense strand
guaguggcauucucauuuc

SEQ ID NO: 961714 - RNA, 19 nt, Homo sapiens
  misc_RNA (1)...(19): siRNA sense strand
gauuaucuuuccuaugaga

SEQ ID NO: 961715 - RNA, 19 nt, Homo sapiens
  misc_RNA (1)...(19): siRNA sense strand
guaggguuguugaagauga

SEQ ID NO: 961716 - RNA, 19 nt, Homo sapiens
  misc_RNA (1)...(19): siRNA sense strand
ugaggcagaugcuaagaug

SEQ ID NO: 961717 - RNA, 19 nt, Homo sapiens
  misc_RNA (1)...(19): siRNA sense strand
gaguaucuguuaggagaaa

SEQ ID NO: 961718 - RNA, 19 nt, Homo sapiens
  misc_RNA (1)...(19): siRNA sense strand
gaaaguucaagauuugguu

SEQ ID NO: 961719 - RNA, 19 nt, Homo sapiens
  misc_RNA (1)...(19): siRNA sense strand
cuaagaugaugguaaauac

SEQ ID NO: 961720 - RNA, 19 nt, Homo sapiens
  misc_RNA (1)...(19): siRNA sense strand
uguugaagaugaggaauaa

SEQ ID NO: 961721 - RNA, 19 nt, Homo sapiens
  misc_RNA (1)...(19): siRNA sense strand
caaagggaguaucuguuag

SEQ ID NO: 961722 - RNA, 19 nt, Homo sapiens
  misc_RNA (1)...(19): siRNA sense strand
gaauuggaggauuaucuuu

SEQ ID NO: 961723 - RNA, 19 nt, Homo sapiens
  misc_RNA (1)...(19): siRNA sense strand
gacagcagguucagcaucu

SEQ ID NO: 961724 - RNA, 19 nt, Homo sapiens
  misc_RNA (1)...(19): siRNA sense strand
ggacuacaacguugcuguu

SEQ ID NO: 961725 - RNA, 19 nt, Homo sapiens
  misc_RNA (1)...(19): siRNA sense strand
gaaaggacuaugucaaagg

SEQ ID NO: 961726 - RNA, 19 nt, Homo sapiens
  misc_RNA (1)...(19): siRNA sense strand
aaagagaggguaccagaga

SEQ ID NO: 961727 - RNA, 19 nt, Homo sapiens
  misc_RNA (1)...(19): siRNA sense strand
ccacaaagggaguaucugu

SEQ ID NO: 961728 - RNA, 19 nt, Homo sapiens
  misc_RNA (1)...(19): siRNA sense strand
gaaauacauggaacuugga

SEQ ID NO: 961729 - RNA, 19 nt, Homo sapiens
  misc_RNA (1)...(19): siRNA sense strand
aaacgucgagguucuaaga

SEQ ID NO: 961730 - RNA, 19 nt, Homo sapiens
  misc_RNA (1)...(19): siRNA sense strand
augcuaagaugaugguaaa

SEQ ID NO: 961731 - RNA, 19 nt, Homo sapiens
  misc_RNA (1)...(19): siRNA sense strand
ucagaaggacuacaacguu

SEQ ID NO: 961732 - RNA, 19 nt, Homo sapiens
  misc_RNA (1)...(19): siRNA sense strand
cgaauccaaugaucuccuu

SEQ ID NO: 961733 - RNA, 19 nt, Homo sapiens
  misc_RNA (1)...(19): siRNA sense strand
uggaaaggacuaugucaaa

SEQ ID NO: 961734 - RNA, 19 nt, Homo sapiens
  misc_RNA (1)...(19): siRNA sense strand
uguaguggcauucucauuu

SEQ ID NO: 961735 - RNA, 19 nt, Homo sapiens
  misc_RNA (1)...(19): siRNA sense strand
ccucauugauggaucugaa

SEQ ID NO: 961736 - RNA, 19 nt, Homo sapiens
  misc_RNA (1)...(19): siRNA sense strand
cgggaacgaugccaauugu

SEQ ID NO: 961737 - RNA, 19 nt, Homo sapiens
  misc_RNA (1)...(19): siRNA sense strand
gggcugaucaguuggucua

SEQ ID NO: 961738 - RNA, 19 nt, Homo sapiens
  misc_RNA (1)...(19): siRNA sense strand
gaugcuaagaugaugguaa

SEQ ID NO: 961739 - RNA, 19 nt, Homo sapiens
  misc_RNA (1)...(19): siRNA sense strand
ggcaagaaacgucgagguu

SEQ ID NO: 961740 - RNA, 19 nt, Homo sapiens
  misc_RNA (1)...(19): siRNA sense strand
ggguaggguuguugaagau

SEQ ID NO: 961741 - RNA, 19 nt, Homo sapiens
  misc_RNA (1)...(19): siRNA sense strand
ccacuguguucaugaugga

SEQ ID NO: 961742 - RNA, 19 nt, Homo sapiens
  misc_RNA (1)...(19): siRNA sense strand
aaaauaugcugcuuugguu

SEQ ID NO: 961743 - RNA, 19 nt, Homo sapiens
  misc_RNA (1)...(19): siRNA sense strand
ggacuaugacuaugcucuu

SEQ ID NO: 961744 - RNA, 19 nt, Homo sapiens
  misc_RNA (1)...(19): siRNA sense strand
gaaaauaugcugcuuuggu

SEQ ID NO: 961745 - RNA, 19 nt, Homo sapiens
  misc_RNA (1)...(19): siRNA sense strand
gcgaagggugggagaagaa

SEQ ID NO: 961746 - RNA, 19 nt, Homo sapiens
  misc_RNA (1)...(19): siRNA sense strand
gcccaacgaucaagaaaau

SEQ ID NO: 961747 - RNA, 19 nt, Homo sapiens
  misc_RNA (1)...(19): siRNA sense strand
caucgaaugccagaaagaa

SEQ ID NO: 961748 - RNA, 19 nt, Homo sapiens
  misc_RNA (1)...(19): siRNA sense strand
ucgcaucacuccccuaaaa

SEQ ID NO: 961749 - RNA, 19 nt, Homo sapiens
  misc_RNA (1)...(19): siRNA sense strand
gagaaagagacagguguau

SEQ ID NO: 961750 - RNA, 19 nt, Homo sapiens
  misc_RNA (1)...(19): siRNA sense strand
ucccagccuuucugaauug

SEQ ID NO: 961751 - RNA, 19 nt, Homo sapiens
  misc_RNA (1)...(19): siRNA sense strand
caacucccagccuuucuga

SEQ ID NO: 961752 - RNA, 19 nt, Homo sapiens
  misc_RNA (1)...(19): siRNA sense strand
ucaguuggucuaucgguuu

SEQ ID NO: 961753 - RNA, 19 nt, Homo sapiens
  misc_RNA (1)...(19): siRNA sense strand
uaacugcugcccacugugu

SEQ ID NO: 961754 - RNA, 19 nt, Homo sapiens
  misc_RNA (1)...(19): siRNA sense strand
ugaauuggaggauuaucuu

SEQ ID NO: 961755 - RNA, 19 nt, Homo sapiens
  misc_RNA (1)...(19): siRNA sense strand
caaaauaucaccacaaagg

SEQ ID NO: 961756 - RNA, 19 nt, Homo sapiens
  misc_RNA (1)...(19): siRNA sense strand
gcaucacuccccuaaaaua

SEQ ID NO: 961757 - RNA, 19 nt, Homo sapiens
  misc_RNA (1)...(19): siRNA sense strand
aauccaaugaucuccuuua

SEQ ID NO: 961758 - RNA, 19 nt, Homo sapiens
  misc_RNA (1)...(19): siRNA sense strand
ccacuucucaggauuugau

SEQ ID NO: 961759 - RNA, 19 nt, Homo sapiens
  misc_RNA (1)...(19): siRNA sense strand
gacuaugacuaugcucuuc

SEQ ID NO: 961760 - RNA, 19 nt, Homo sapiens
  misc_RNA (1)...(19): siRNA sense strand
ucuaacugcugcccacugu

SEQ ID NO: 961761 - RNA, 19 nt, Homo sapiens
  misc_RNA (1)...(19): siRNA sense strand
uacaguguguggcaucgaa

SEQ ID NO: 961762 - RNA, 19 nt, Homo sapiens
  misc_RNA (1)...(19): siRNA sense strand
ucucaggauuugauaacga

SEQ ID NO: 961763 - RNA, 19 nt, Homo sapiens
  misc_RNA (1)...(19): siRNA sense strand
gauuuuauguggcacuuga

SEQ ID NO: 961764 - RNA, 19 nt, Homo sapiens
  misc_RNA (1)...(19): siRNA sense strand
acgcuaccuuggacuauga

SEQ ID NO: 961765 - RNA, 19 nt, Homo sapiens
  misc_RNA (1)...(19): siRNA sense strand
gacgcuaccuuggacuaug

SEQ ID NO: 961766 - RNA, 19 nt, Homo sapiens
  misc_RNA (1)...(19): siRNA sense strand
uaaccaauuucccuuucag

SEQ ID NO: 961767 - RNA, 19 nt, Homo sapiens
  misc_RNA (1)...(19): siRNA sense strand
gagaauggcacccgaaccu

SEQ ID NO: 961768 - RNA, 19 nt, Homo sapiens
  misc_RNA (1)...(19): siRNA sense strand
augaucuccuuuaccaaua

SEQ ID NO: 961769 - RNA, 19 nt, Homo sapiens
  misc_RNA (1)...(19): siRNA sense strand
cauuugaggcagaugcuaa

SEQ ID NO: 961770 - RNA, 19 nt, Homo sapiens
  misc_RNA (1)...(19): siRNA sense strand
gaagggugggagaagaaga

SEQ ID NO: 961771 - RNA, 19 nt, Homo sapiens
  misc_RNA (1)...(19): siRNA sense strand
ccagaaagaacucccaacu

SEQ ID NO: 961772 - RNA, 19 nt, Homo sapiens
  misc_RNA (1)...(19): siRNA sense strand
uaccuuggacuaugacuau

SEQ ID NO: 961773 - RNA, 19 nt, Homo sapiens
  misc_RNA (1)...(19): siRNA sense strand
gggaggccuuccuuucagu

SEQ ID NO: 961774 - RNA, 19 nt, Homo sapiens
  misc_RNA (1)...(19): siRNA sense strand
gauggaaaggacuauguca

SEQ ID NO: 961775 - RNA, 19 nt, Homo sapiens
  misc_RNA (1)...(19): siRNA sense strand
aggguaggguuguugaaga

SEQ ID NO: 961776 - RNA, 19 nt, Homo sapiens
  misc_RNA (1)...(19): siRNA sense strand
cgacgaauccaaugaucuc

SEQ ID NO: 961777 - RNA, 19 nt, Homo sapiens
  misc_RNA (1)...(19): siRNA sense strand
ggcagaugcuaagaugaug

SEQ ID NO: 961778 - RNA, 19 nt, Homo sapiens
  misc_RNA (1)...(19): siRNA sense strand
ggacgcuaccuuggacuau

SEQ ID NO: 961779 - RNA, 19 nt, Homo sapiens
  misc_RNA (1)...(19): siRNA sense strand
uuaaccaauuucccuuuca

SEQ ID NO: 961780 - RNA, 19 nt, Homo sapiens
  misc_RNA (1)...(19): siRNA sense strand
gaaucagcccaacgaucaa

SEQ ID NO: 961781 - RNA, 19 nt, Homo sapiens
  misc_RNA (1)...(19): siRNA sense strand
gcugaucaguuggucuauc

SEQ ID NO: 961782 - RNA, 19 nt, Homo sapiens
  misc_RNA (1)...(19): siRNA sense strand
uuauguggcacuugagaaa

SEQ ID NO: 961783 - RNA, 19 nt, Homo sapiens
  misc_RNA (1)...(19): siRNA sense strand
cucccagccuuucugaauu

SEQ ID NO: 961784 - RNA, 19 nt, Homo sapiens
  misc_RNA (1)...(19): siRNA sense strand
aaucauugcggucuacuca

SEQ ID NO: 961785 - RNA, 19 nt, Homo sapiens
  misc_RNA (1)...(19): siRNA sense strand
aaugaucuccuuuaccaau

SEQ ID NO: 961786 - RNA, 19 nt, Homo sapiens
  misc_RNA (1)...(19): siRNA sense strand
cuuaaccaauuucccuuuc

SEQ ID NO: 961787 - RNA, 19 nt, Homo sapiens
  misc_RNA (1)...(19): siRNA sense strand
aauggcacccgaaccuuaa

SEQ ID NO: 961788 - RNA, 19 nt, Homo sapiens
  misc_RNA (1)...(19): siRNA sense strand
agaaagagacagguguaug

SEQ ID NO: 961789 - RNA, 19 nt, Homo sapiens
  misc_RNA (1)...(19): siRNA sense strand
agauuugccucuggauuca

SEQ ID NO: 961790 - RNA, 19 nt, Homo sapiens
  misc_RNA (1)...(19): siRNA sense strand
gggucuaucugcgucugaa

SEQ ID NO: 961791 - RNA, 19 nt, Homo sapiens
  misc_RNA (1)...(19): siRNA sense strand
gcuaaggguaggguuguug

SEQ ID NO: 961792 - RNA, 19 nt, Homo sapiens
  misc_RNA (1)...(19): siRNA sense strand
aagaggagcaggagagaag

SEQ ID NO: 961793 - RNA, 19 nt, Homo sapiens
  misc_RNA (1)...(19): siRNA sense strand
gggacgcuaccuuggacua

SEQ ID NO: 961794 - RNA, 19 nt, Homo sapiens
  misc_RNA (1)...(19): siRNA sense strand
gagcaggagagaagcuagu

SEQ ID NO: 961795 - RNA, 19 nt, Homo sapiens
  misc_RNA (1)...(19): siRNA sense strand
uaugcugcuuugguugaua

SEQ ID NO: 961796 - RNA, 19 nt, Homo sapiens
  misc_RNA (1)...(19): siRNA sense strand
cagaaagaacucccaacuc

SEQ ID NO: 961797 - RNA, 19 nt, Homo sapiens
  misc_RNA (1)...(19): siRNA sense strand
uaaagagccuuggaauaua

SEQ ID NO: 961798 - RNA, 19 nt, Homo sapiens
  misc_RNA (1)...(19): siRNA sense strand
guaaugaaguuaaccaaug

SEQ ID NO: 961799 - RNA, 19 nt, Homo sapiens
  misc_RNA (1)...(19): siRNA sense strand
cuacaaaugugaagaaugu

SEQ ID NO: 961800 - RNA, 19 nt, Homo sapiens
  misc_RNA (1)...(19): siRNA sense strand
gagagaaacccuacaaaug

SEQ ID NO: 961801 - RNA, 19 nt, Homo sapiens
  misc_RNA (1)...(19): siRNA sense strand
gagagaaacccuacaaaug

SEQ ID NO: 961802 - RNA, 19 nt, Homo sapiens
  misc_RNA (1)...(19): siRNA sense strand
aaagagccuuggaauauaa

SEQ ID NO: 961803 - RNA, 19 nt, Homo sapiens
  misc_RNA (1)...(19): siRNA sense strand
ccaguuauguguucucauu

SEQ ID NO: 961804 - RNA, 19 nt, Homo sapiens
  misc_RNA (1)...(19): siRNA sense strand
gagaggaacccuacaaaug

SEQ ID NO: 961805 - RNA, 19 nt, Homo sapiens
  misc_RNA (1)...(19): siRNA sense strand
gaaguuaaccaauguuugu

SEQ ID NO: 961806 - RNA, 19 nt, Homo sapiens
  misc_RNA (1)...(19): siRNA sense strand
auucagagauguagucaua

SEQ ID NO: 961807 - RNA, 19 nt, Homo sapiens
  misc_RNA (1)...(19): siRNA sense strand
aaagagaaaugagauggua

SEQ ID NO: 961808 - RNA, 19 nt, Homo sapiens
  misc_RNA (1)...(19): siRNA sense strand
gagaaacccuacaaaugug

SEQ ID NO: 961809 - RNA, 19 nt, Homo sapiens
  misc_RNA (1)...(19): siRNA sense strand
gagaugugauguuagagaa

SEQ ID NO: 961810 - RNA, 19 nt, Homo sapiens
  misc_RNA (1)...(19): siRNA sense strand
gagauguagucauagaauu

SEQ ID NO: 961811 - RNA, 19 nt, Homo sapiens
  misc_RNA (1)...(19): siRNA sense strand
gagagaaacccuacagaug

SEQ ID NO: 961812 - RNA, 19 nt, Homo sapiens
  misc_RNA (1)...(19): siRNA sense strand
gagaaacccuacacaugug

SEQ ID NO: 961813 - RNA, 19 nt, Homo sapiens
  misc_RNA (1)...(19): siRNA sense strand
gagagaaacccuacacaug

SEQ ID NO: 961814 - RNA, 19 nt, Homo sapiens
  misc_RNA (1)...(19): siRNA sense strand
gagaaacccuacagaugug

SEQ ID NO: 961815 - RNA, 19 nt, Homo sapiens
  misc_RNA (1)...(19): siRNA sense strand
ccucaacucuuaauacuca

SEQ ID NO: 961816 - RNA, 19 nt, Homo sapiens
  misc_RNA (1)...(19): siRNA sense strand
caaagucuucggcaaauuu

SEQ ID NO: 961817 - RNA, 19 nt, Homo sapiens
  misc_RNA (1)...(19): siRNA sense strand
ggagagaaacccuacaaau

SEQ ID NO: 961818 - RNA, 19 nt, Homo sapiens
  misc_RNA (1)...(19): siRNA sense strand
ggagagaaacccuacaaau

SEQ ID NO: 961819 - RNA, 19 nt, Homo sapiens
  misc_RNA (1)...(19): siRNA sense strand
agacauaagacaagacaua

SEQ ID NO: 961820 - RNA, 19 nt, Homo sapiens
  misc_RNA (1)...(19): siRNA sense strand
ccucaacccuuacuaaaca

SEQ ID NO: 961821 - RNA, 19 nt, Homo sapiens
  misc_RNA (1)...(19): siRNA sense strand
ccucaacccuuaagaaaca

SEQ ID NO: 961822 - RNA, 19 nt, Homo sapiens
  misc_RNA (1)...(19): siRNA sense strand
aaguggacaugacaauuua

SEQ ID NO: 961823 - RNA, 19 nt, Homo sapiens
  misc_RNA (1)...(19): siRNA sense strand
gagagaaaccauacacaug

SEQ ID NO: 961824 - RNA, 19 nt, Homo sapiens
  misc_RNA (1)...(19): siRNA sense strand
gaaaugggacuguugacau

SEQ ID NO: 961825 - RNA, 19 nt, Homo sapiens
  misc_RNA (1)...(19): siRNA sense strand
gaggaacccuacaaaugug

SEQ ID NO: 961826 - RNA, 19 nt, Homo sapiens
  misc_RNA (1)...(19): siRNA sense strand
gagaaaccauacacaugug

SEQ ID NO: 961827 - RNA, 19 nt, Homo sapiens
  misc_RNA (1)...(19): siRNA sense strand
gaauguggccaagccuuua

SEQ ID NO: 961828 - RNA, 19 nt, Homo sapiens
  misc_RNA (1)...(19): siRNA sense strand
cuacagaugugaggaaugu

SEQ ID NO: 961829 - RNA, 19 nt, Homo sapiens
  misc_RNA (1)...(19): siRNA sense strand
ucagagauguagucauaga

SEQ ID NO: 961830 - RNA, 19 nt, Homo sapiens
  misc_RNA (1)...(19): siRNA sense strand
auaaagagccuuggaauau

SEQ ID NO: 961831 - RNA, 19 nt, Homo sapiens
  misc_RNA (1)...(19): siRNA sense strand
cagcagaauuuauauagag

SEQ ID NO: 961832 - RNA, 19 nt, Homo sapiens
  misc_RNA (1)...(19): siRNA sense strand
agagaaacccuacaaaugu

SEQ ID NO: 961833 - RNA, 19 nt, Homo sapiens
  misc_RNA (1)...(19): siRNA sense strand
agagaaacccuacaaaugu

SEQ ID NO: 961834 - RNA, 19 nt, Homo sapiens
  misc_RNA (1)...(19): siRNA sense strand
gagaauucauacuggagaa

SEQ ID NO: 961835 - RNA, 19 nt, Homo sapiens
  misc_RNA (1)...(19): siRNA sense strand
aaaguggacaugacaauuu

SEQ ID NO: 961836 - RNA, 19 nt, Homo sapiens
  misc_RNA (1)...(19): siRNA sense strand
gacaagacauacuggaaag

SEQ ID NO: 961837 - RNA, 19 nt, Homo sapiens
  misc_RNA (1)...(19): siRNA sense strand
ggagagaaacccuacagau

SEQ ID NO: 961838 - RNA, 19 nt, Homo sapiens
  misc_RNA (1)...(19): siRNA sense strand
auagagaugugauguuaga

SEQ ID NO: 961839 - RNA, 19 nt, Homo sapiens
  misc_RNA (1)...(19): siRNA sense strand
gcucuucaacccuuucuaa

SEQ ID NO: 961840 - RNA, 19 nt, Homo sapiens
  misc_RNA (1)...(19): siRNA sense strand
ucauaaaugugucaaaguc

SEQ ID NO: 961841 - RNA, 19 nt, Homo sapiens
  misc_RNA (1)...(19): siRNA sense strand
caauagacauaagacaaga

SEQ ID NO: 961842 - RNA, 19 nt, Homo sapiens
  misc_RNA (1)...(19): siRNA sense strand
cuucaacccuuucuaaaca

SEQ ID NO: 961843 - RNA, 19 nt, Homo sapiens
  misc_RNA (1)...(19): siRNA sense strand
aaaaggagguuguaaugaa

SEQ ID NO: 961844 - RNA, 19 nt, Homo sapiens
  misc_RNA (1)...(19): siRNA sense strand
aauaaagagccuuggaaua

SEQ ID NO: 961845 - RNA, 19 nt, Homo sapiens
  misc_RNA (1)...(19): siRNA sense strand
ggagaggaacccuacaaau

SEQ ID NO: 961846 - RNA, 19 nt, Homo sapiens
  misc_RNA (1)...(19): siRNA sense strand
ggagagaaaccauacacau

SEQ ID NO: 961847 - RNA, 19 nt, Homo sapiens
  misc_RNA (1)...(19): siRNA sense strand
gcucagcagaauuuauaua

SEQ ID NO: 961848 - RNA, 19 nt, Homo sapiens
  misc_RNA (1)...(19): siRNA sense strand
ggacaugacaauuuacaag

SEQ ID NO: 961849 - RNA, 19 nt, Homo sapiens
  misc_RNA (1)...(19): siRNA sense strand
cuacaucaacaucagauaa

SEQ ID NO: 961850 - RNA, 19 nt, Homo sapiens
  misc_RNA (1)...(19): siRNA sense strand
cauaaaagauucacuccaa

SEQ ID NO: 961851 - RNA, 19 nt, Homo sapiens
  misc_RNA (1)...(19): siRNA sense strand
ugaagaaugugacaaagcu

SEQ ID NO: 961852 - RNA, 19 nt, Homo sapiens
  misc_RNA (1)...(19): siRNA sense strand
ucaacccuuucuaaacaua

SEQ ID NO: 961853 - RNA, 19 nt, Homo sapiens
  misc_RNA (1)...(19): siRNA sense strand
cgccagagcuaggcauaaa

SEQ ID NO: 961854 - RNA, 19 nt, Homo sapiens
  misc_RNA (1)...(19): siRNA sense strand
agagaaacccuacacaugu

SEQ ID NO: 961855 - RNA, 19 nt, Homo sapiens
  misc_RNA (1)...(19): siRNA sense strand
ggagagaaacccuacacau

SEQ ID NO: 961856 - RNA, 19 nt, Homo sapiens
  misc_RNA (1)...(19): siRNA sense strand
agagaaacccuacagaugu

SEQ ID NO: 961857 - RNA, 19 nt, Homo sapiens
  misc_RNA (1)...(19): siRNA sense strand
caagacauacuggaaagaa

SEQ ID NO: 961858 - RNA, 19 nt, Homo sapiens
  misc_RNA (1)...(19): siRNA sense strand
cauaagaggauucauacug

SEQ ID NO: 961859 - RNA, 19 nt, Homo sapiens
  misc_RNA (1)...(19): siRNA sense strand
ucacuuaccacaagagaau

SEQ ID NO: 961860 - RNA, 19 nt, Homo sapiens
  misc_RNA (1)...(19): siRNA sense strand
uugcaugguuucacaacua

SEQ ID NO: 961861 - RNA, 19 nt, Homo sapiens
  misc_RNA (1)...(19): siRNA sense strand
agaggaacccuacaaaugu

SEQ ID NO: 961862 - RNA, 19 nt, Homo sapiens
  misc_RNA (1)...(19): siRNA sense strand
ccucaacacuugcuaacca

SEQ ID NO: 961863 - RNA, 19 nt, Homo sapiens
  misc_RNA (1)...(19): siRNA sense strand
ggaucacgcucagcagaau

SEQ ID NO: 961864 - RNA, 19 nt, Homo sapiens
  misc_RNA (1)...(19): siRNA sense strand
gauguuagagaacuacaga

SEQ ID NO: 961865 - RNA, 19 nt, Homo sapiens
  misc_RNA (1)...(19): siRNA sense strand
gagguuguaaugaaguuaa

SEQ ID NO: 961866 - RNA, 19 nt, Homo sapiens
  misc_RNA (1)...(19): siRNA sense strand
acucauaagaggauucaua

SEQ ID NO: 961867 - RNA, 19 nt, Homo sapiens
  misc_RNA (1)...(19): siRNA sense strand
agacaagacauacuggaaa

SEQ ID NO: 961868 - RNA, 19 nt, Homo sapiens
  misc_RNA (1)...(19): siRNA sense strand
cgagaaaugggacuguuga

SEQ ID NO: 961869 - RNA, 19 nt, Homo sapiens
  misc_RNA (1)...(19): siRNA sense strand
gaaaccauacacaugugaa

SEQ ID NO: 961870 - RNA, 19 nt, Homo sapiens
  misc_RNA (1)...(19): siRNA sense strand
ucaaagucuucggcaaauu

SEQ ID NO: 961871 - RNA, 19 nt, Homo sapiens
  misc_RNA (1)...(19): siRNA sense strand
guaauaccaagaagauaug

SEQ ID NO: 961872 - RNA, 19 nt, Homo sapiens
  misc_RNA (1)...(19): siRNA sense strand
ccaaacacccaguuaugug

SEQ ID NO: 961873 - RNA, 19 nt, Homo sapiens
  misc_RNA (1)...(19): siRNA sense strand
ccucaucccucacuuacca

SEQ ID NO: 961874 - RNA, 19 nt, Homo sapiens
  misc_RNA (1)...(19): siRNA sense strand
agagaaaccauacacaugu

SEQ ID NO: 961875 - RNA, 19 nt, Homo sapiens
  misc_RNA (1)...(19): siRNA sense strand
acgcucagcagaauuuaua

SEQ ID NO: 961876 - RNA, 19 nt, Homo sapiens
  misc_RNA (1)...(19): siRNA sense strand
aaaggagguuguaaugaag

SEQ ID NO: 961877 - RNA, 19 nt, Homo sapiens
  misc_RNA (1)...(19): siRNA sense strand
aaccaauguuugucaacua

SEQ ID NO: 961878 - RNA, 19 nt, Homo sapiens
  misc_RNA (1)...(19): siRNA sense strand
gccuucuccucaacucuua

SEQ ID NO: 961879 - RNA, 19 nt, Homo sapiens
  misc_RNA (1)...(19): siRNA sense strand
gguccucaacccuuacuaa

SEQ ID NO: 961880 - RNA, 19 nt, Homo sapiens
  misc_RNA (1)...(19): siRNA sense strand
aagacauacuggaaagaaa

SEQ ID NO: 961881 - RNA, 19 nt, Homo sapiens
  misc_RNA (1)...(19): siRNA sense strand
guuauguguucucauuuca

SEQ ID NO: 961882 - RNA, 19 nt, Homo sapiens
  misc_RNA (1)...(19): siRNA sense strand
guucucauuucacccaaga

SEQ ID NO: 961883 - RNA, 19 nt, Homo sapiens
  misc_RNA (1)...(19): siRNA sense strand
gaugugauguuagagaacu

SEQ ID NO: 961884 - RNA, 19 nt, Homo sapiens
  misc_RNA (1)...(19): siRNA sense strand
gauucauacuggagaggaa

SEQ ID NO: 961885 - RNA, 19 nt, Homo sapiens
  misc_RNA (1)...(19): siRNA sense strand
cauaggagaauucauacug

SEQ ID NO: 961886 - RNA, 19 nt, Homo sapiens
  misc_RNA (1)...(19): siRNA sense strand
gaucaccugucuggagcaa

SEQ ID NO: 961887 - RNA, 19 nt, Homo sapiens
  misc_RNA (1)...(19): siRNA sense strand
gucaaagucuucggcaaau

SEQ ID NO: 961888 - RNA, 19 nt, Homo sapiens
  misc_RNA (1)...(19): siRNA sense strand
guuaaccaauguuugucaa

SEQ ID NO: 961889 - RNA, 19 nt, Homo sapiens
  misc_RNA (1)...(19): siRNA sense strand
gagcuaggcauaaaagauu

SEQ ID NO: 961890 - RNA, 19 nt, Homo sapiens
  misc_RNA (1)...(19): siRNA sense strand
gaauucauacuggagagaa

SEQ ID NO: 961891 - RNA, 19 nt, Homo sapiens
  misc_RNA (1)...(19): siRNA sense strand
uaccacaagagaauucaua

SEQ ID NO: 961892 - RNA, 19 nt, Homo sapiens
  misc_RNA (1)...(19): siRNA sense strand
gaauucauacuggagagaa

SEQ ID NO: 961893 - RNA, 19 nt, Homo sapiens
  misc_RNA (1)...(19): siRNA sense strand
gaauucauacuggagagaa

SEQ ID NO: 961894 - RNA, 19 nt, Homo sapiens
  misc_RNA (1)...(19): siRNA sense strand
cauaagacaagacauacug

SEQ ID NO: 961895 - RNA, 19 nt, Homo sapiens
  misc_RNA (1)...(19): siRNA sense strand
ccaauagacauaagacaag

SEQ ID NO: 961896 - RNA, 19 nt, Homo sapiens
  misc_RNA (1)...(19): siRNA sense strand
cacaagagaauucauacug

SEQ ID NO: 961897 - RNA, 19 nt, Homo sapiens
  misc_RNA (1)...(19): siRNA sense strand
agacaaagcugaagcauuu

SEQ ID NO: 961898 - RNA, 19 nt, Homo sapiens
  misc_RNA (1)...(19): siRNA sense strand
gaaacaagaucuucaccua

SEQ ID NO: 961899 - RNA, 19 nt, Homo sapiens
  misc_RNA (1)...(19): siRNA sense strand
gaacauucaucuuagacaa

SEQ ID NO: 961900 - RNA, 19 nt, Homo sapiens
  misc_RNA (1)...(19): siRNA sense strand
caaagagccuggagaaagu

SEQ ID NO: 961901 - RNA, 19 nt, Homo sapiens
  misc_RNA (1)...(19): siRNA sense strand
ggaguuguuugauuucuau

SEQ ID NO: 961902 - RNA, 19 nt, Homo sapiens
  misc_RNA (1)...(19): siRNA sense strand
gauggcagcuuaaccuuca

SEQ ID NO: 961903 - RNA, 19 nt, Homo sapiens
  misc_RNA (1)...(19): siRNA sense strand
gcugaagcauuugucaaua

SEQ ID NO: 961904 - RNA, 19 nt, Homo sapiens
  misc_RNA (1)...(19): siRNA sense strand
gcacagcuggauucccuua

SEQ ID NO: 961905 - RNA, 19 nt, Homo sapiens
  misc_RNA (1)...(19): siRNA sense strand
gaaaguucuuguggaauuc

SEQ ID NO: 961906 - RNA, 19 nt, Homo sapiens
  misc_RNA (1)...(19): siRNA sense strand
auaacaagcuagagacuau

SEQ ID NO: 961907 - RNA, 19 nt, Homo sapiens
  misc_RNA (1)...(19): siRNA sense strand
ucaccuaguucuugaaaca

SEQ ID NO: 961908 - RNA, 19 nt, Homo sapiens
  misc_RNA (1)...(19): siRNA sense strand
gaacaggcaguguaucaca

SEQ ID NO: 961909 - RNA, 19 nt, Homo sapiens
  misc_RNA (1)...(19): siRNA sense strand
gaucuucaccuaguucuug

SEQ ID NO: 961910 - RNA, 19 nt, Homo sapiens
  misc_RNA (1)...(19): siRNA sense strand
gcuagagacuauacaagca

SEQ ID NO: 961911 - RNA, 19 nt, Homo sapiens
  misc_RNA (1)...(19): siRNA sense strand
uagagaacauucaucuuag

SEQ ID NO: 961912 - RNA, 19 nt, Homo sapiens
  misc_RNA (1)...(19): siRNA sense strand
ugcaauagauacaggaaga

SEQ ID NO: 961913 - RNA, 19 nt, Homo sapiens
  misc_RNA (1)...(19): siRNA sense strand
gcaauuagagaacauucau

SEQ ID NO: 961914 - RNA, 19 nt, Homo sapiens
  misc_RNA (1)...(19): siRNA sense strand
ucaaagagccuggagaaag

SEQ ID NO: 961915 - RNA, 19 nt, Homo sapiens
  misc_RNA (1)...(19): siRNA sense strand
ggagugaacaaugaagauu

SEQ ID NO: 961916 - RNA, 19 nt, Homo sapiens
  misc_RNA (1)...(19): siRNA sense strand
ccuaguucuugaaacaaua

SEQ ID NO: 961917 - RNA, 19 nt, Homo sapiens
  misc_RNA (1)...(19): siRNA sense strand
agagaacauucaucuuaga

SEQ ID NO: 961918 - RNA, 19 nt, Homo sapiens
  misc_RNA (1)...(19): siRNA sense strand
aacaagaucuucaccuagu

SEQ ID NO: 961919 - RNA, 19 nt, Homo sapiens
  misc_RNA (1)...(19): siRNA sense strand
gaaaaguuccggcagagaa

SEQ ID NO: 961920 - RNA, 19 nt, Homo sapiens
  misc_RNA (1)...(19): siRNA sense strand
caauagauacaggaagauu

SEQ ID NO: 961921 - RNA, 19 nt, Homo sapiens
  misc_RNA (1)...(19): siRNA sense strand
uagaacaggcaguguauca

SEQ ID NO: 961922 - RNA, 19 nt, Homo sapiens
  misc_RNA (1)...(19): siRNA sense strand
cagcagcaauuagagaaca

SEQ ID NO: 961923 - RNA, 19 nt, Homo sapiens
  misc_RNA (1)...(19): siRNA sense strand
acaagaucuucaccuaguu

SEQ ID NO: 961924 - RNA, 19 nt, Homo sapiens
  misc_RNA (1)...(19): siRNA sense strand
caagcuagagacuauacaa

SEQ ID NO: 961925 - RNA, 19 nt, Homo sapiens
  misc_RNA (1)...(19): siRNA sense strand
uaacaagcuagagacuaua

SEQ ID NO: 961926 - RNA, 19 nt, Homo sapiens
  misc_RNA (1)...(19): siRNA sense strand
gcuggauucccuuacauga

SEQ ID NO: 961927 - RNA, 19 nt, Homo sapiens
  misc_RNA (1)...(19): siRNA sense strand
ucacucggauucuucaaaa

SEQ ID NO: 961928 - RNA, 19 nt, Homo sapiens
  misc_RNA (1)...(19): siRNA sense strand
gagugaacaaugaagauuc

SEQ ID NO: 961929 - RNA, 19 nt, Homo sapiens
  misc_RNA (1)...(19): siRNA sense strand
agaaacaguugaaaaguuc

SEQ ID NO: 961930 - RNA, 19 nt, Homo sapiens
  misc_RNA (1)...(19): siRNA sense strand
aaacuaaaaucuccucaag

SEQ ID NO: 961931 - RNA, 19 nt, Homo sapiens
  misc_RNA (1)...(19): siRNA sense strand
caagaucuucaccuaguuc

SEQ ID NO: 961932 - RNA, 19 nt, Homo sapiens
  misc_RNA (1)...(19): siRNA sense strand
cugaagcauuugucaauac

SEQ ID NO: 961933 - RNA, 19 nt, Homo sapiens
  misc_RNA (1)...(19): siRNA sense strand
uauaacaagcuagagacua

SEQ ID NO: 961934 - RNA, 19 nt, Homo sapiens
  misc_RNA (1)...(19): siRNA sense strand
cagcuggauucccuuacau

SEQ ID NO: 961935 - RNA, 19 nt, Homo sapiens
  misc_RNA (1)...(19): siRNA sense strand
caaggaguuguuugauuuc

SEQ ID NO: 961936 - RNA, 19 nt, Homo sapiens
  misc_RNA (1)...(19): siRNA sense strand
acagcuggauucccuuaca

SEQ ID NO: 961937 - RNA, 19 nt, Homo sapiens
  misc_RNA (1)...(19): siRNA sense strand
aggaguuguuugauuucua

SEQ ID NO: 961938 - RNA, 19 nt, Homo sapiens
  misc_RNA (1)...(19): siRNA sense strand
gcagcaauuagagaacauu

SEQ ID NO: 961939 - RNA, 19 nt, Homo sapiens
  misc_RNA (1)...(19): siRNA sense strand
uagagaaacaagaucuuca

SEQ ID NO: 961940 - RNA, 19 nt, Homo sapiens
  misc_RNA (1)...(19): siRNA sense strand
auagauacaggaagauuuc

SEQ ID NO: 961941 - RNA, 19 nt, Homo sapiens
  misc_RNA (1)...(19): siRNA sense strand
gcaauagauacaggaagau

SEQ ID NO: 961942 - RNA, 19 nt, Homo sapiens
  misc_RNA (1)...(19): siRNA sense strand
gcagcuuaaccuucagaug

SEQ ID NO: 961943 - RNA, 19 nt, Homo sapiens
  misc_RNA (1)...(19): siRNA sense strand
caugaagaaagcaguguca

SEQ ID NO: 961944 - RNA, 19 nt, Homo sapiens
  misc_RNA (1)...(19): siRNA sense strand
uacaagcacagcuggauuc

SEQ ID NO: 961945 - RNA, 19 nt, Homo sapiens
  misc_RNA (1)...(19): siRNA sense strand
ugaaggcugagagcaguuu

SEQ ID NO: 961946 - RNA, 19 nt, Homo sapiens
  misc_RNA (1)...(19): siRNA sense strand
aagacaaagcugaagcauu

SEQ ID NO: 961947 - RNA, 19 nt, Homo sapiens
  misc_RNA (1)...(19): siRNA sense strand
gagaacauucaucuuagac

SEQ ID NO: 961948 - RNA, 19 nt, Homo sapiens
  misc_RNA (1)...(19): siRNA sense strand
aacaggcaguguaucacaa

SEQ ID NO: 961949 - RNA, 19 nt, Homo sapiens
  misc_RNA (1)...(19): siRNA sense strand
gagccuauguggagaagua

SEQ ID NO: 961950 - RNA, 19 nt, Homo sapiens
  misc_RNA (1)...(19): siRNA sense strand
gugcauacauggaggaaga

SEQ ID NO: 961951 - RNA, 19 nt, Homo sapiens
  misc_RNA (1)...(19): siRNA sense strand
gggcagggcuggaauucga

SEQ ID NO: 961952 - RNA, 19 nt, Homo sapiens
  misc_RNA (1)...(19): siRNA sense strand
ggacagcccggucagcaaa

SEQ ID NO: 961953 - RNA, 19 nt, Homo sapiens
  misc_RNA (1)...(19): siRNA sense strand
gcagagccauccagcagau

SEQ ID NO: 961954 - RNA, 19 nt, Homo sapiens
  misc_RNA (1)...(19): siRNA sense strand
ccacagcgcuuugaugacu

SEQ ID NO: 961955 - RNA, 19 nt, Homo sapiens
  misc_RNA (1)...(19): siRNA sense strand
ccauugacaucuccaagug

SEQ ID NO: 961956 - RNA, 19 nt, Homo sapiens
  misc_RNA (1)...(19): siRNA sense strand
gcuacugcuucguguacua

SEQ ID NO: 961957 - RNA, 19 nt, Homo sapiens
  misc_RNA (1)...(19): siRNA sense strand
gugaugagccuguccaagu

SEQ ID NO: 961958 - RNA, 19 nt, Homo sapiens
  misc_RNA (1)...(19): siRNA sense strand
ucagcaaacugcaggucaa

SEQ ID NO: 961959 - RNA, 19 nt, Homo sapiens
  misc_RNA (1)...(19): siRNA sense strand
ugaugagccuguccaagug

SEQ ID NO: 961960 - RNA, 19 nt, Homo sapiens
  misc_RNA (1)...(19): siRNA sense strand
guggagaaguacaaguuca

SEQ ID NO: 961961 - RNA, 19 nt, Homo sapiens
  misc_RNA (1)...(19): siRNA sense strand
acagcgcuuugaugacuuu

SEQ ID NO: 961962 - RNA, 19 nt, Homo sapiens
  misc_RNA (1)...(19): siRNA sense strand
gcgcuuugaugacuuucuc

SEQ ID NO: 961963 - RNA, 19 nt, Homo sapiens
  misc_RNA (1)...(19): siRNA sense strand
gcaaacugcaggucaagcu

SEQ ID NO: 961964 - RNA, 19 nt, Homo sapiens
  misc_RNA (1)...(19): siRNA sense strand
agccagaugucacgcaugu

SEQ ID NO: 961965 - RNA, 19 nt, Homo sapiens
  misc_RNA (1)...(19): siRNA sense strand
ggccagcgccauugacauc

SEQ ID NO: 961966 - RNA, 19 nt, Homo sapiens
  misc_RNA (1)...(19): siRNA sense strand
ccagaugucacgcauguac

SEQ ID NO: 961967 - RNA, 19 nt, Homo sapiens
  misc_RNA (1)...(19): siRNA sense strand
ccggugcccucaaguccuu

SEQ ID NO: 961968 - RNA, 19 nt, Homo sapiens
  misc_RNA (1)...(19): siRNA sense strand
uccgcuggcugcagauuga

SEQ ID NO: 961969 - RNA, 19 nt, Homo sapiens
  misc_RNA (1)...(19): siRNA sense strand
gguccgcaacgacuacuau

SEQ ID NO: 961970 - RNA, 19 nt, Homo sapiens
  misc_RNA (1)...(19): siRNA sense strand
ggagacccacagcgcuuug

SEQ ID NO: 961971 - RNA, 19 nt, Homo sapiens
  misc_RNA (1)...(19): siRNA sense strand
acccacagcgcuuugauga

SEQ ID NO: 961972 - RNA, 19 nt, Homo sapiens
  misc_RNA (1)...(19): siRNA sense strand
agauugagguccgcaacga

SEQ ID NO: 961973 - RNA, 19 nt, Homo sapiens
  misc_RNA (1)...(19): siRNA sense strand
cgcaggagguggugaugag

SEQ ID NO: 961974 - RNA, 19 nt, Homo sapiens
  misc_RNA (1)...(19): siRNA sense strand
ugccucaccuucaucaucu

SEQ ID NO: 961975 - RNA, 19 nt, Homo sapiens
  misc_RNA (1)...(19): siRNA sense strand
cacccggagugcauacaug

SEQ ID NO: 961976 - RNA, 19 nt, Homo sapiens
  misc_RNA (1)...(19): siRNA sense strand
gcacugcacuuggcuguga

SEQ ID NO: 961977 - RNA, 19 nt, Homo sapiens
  misc_RNA (1)...(19): siRNA sense strand
acauggaccugcagaauga

SEQ ID NO: 961978 - RNA, 19 nt, Homo sapiens
  misc_RNA (1)...(19): siRNA sense strand
gcacuuggcugugauucau

SEQ ID NO: 961979 - RNA, 19 nt, Homo sapiens
  misc_RNA (1)...(19): siRNA sense strand
caugaacccuuccuggauu

SEQ ID NO: 961980 - RNA, 19 nt, Homo sapiens
  misc_RNA (1)...(19): siRNA sense strand
gagacgagggcgaugaaua

SEQ ID NO: 961981 - RNA, 19 nt, Homo sapiens
  misc_RNA (1)...(19): siRNA sense strand
gagcugaccuugacaaacc

SEQ ID NO: 961982 - RNA, 19 nt, Homo sapiens
  misc_RNA (1)...(19): siRNA sense strand
acaaagauguggagauggu

SEQ ID NO: 961983 - RNA, 19 nt, Homo sapiens
  misc_RNA (1)...(19): siRNA sense strand
ggacacggcacugcacuug

SEQ ID NO: 961984 - RNA, 19 nt, Homo sapiens
  misc_RNA (1)...(19): siRNA sense strand
gcaugaacccuuccuggau

SEQ ID NO: 961985 - RNA, 19 nt, Homo sapiens
  misc_RNA (1)...(19): siRNA sense strand
guacauggaccugcagaau

SEQ ID NO: 961986 - RNA, 19 nt, Homo sapiens
  misc_RNA (1)...(19): siRNA sense strand
gaaggaagaagaggagagu

SEQ ID NO: 961987 - RNA, 19 nt, Homo sapiens
  misc_RNA (1)...(19): siRNA sense strand
cgaugaauacgacgacauu

SEQ ID NO: 961988 - RNA, 19 nt, Homo sapiens
  misc_RNA (1)...(19): siRNA sense strand
ugaauacgacgacauugug

SEQ ID NO: 961989 - RNA, 19 nt, Homo sapiens
  misc_RNA (1)...(19): siRNA sense strand
cacagcagccgcagccaaa

SEQ ID NO: 961990 - RNA, 19 nt, Homo sapiens
  misc_RNA (1)...(19): siRNA sense strand
cgagggcgaggacgagaaa

SEQ ID NO: 961991 - RNA, 19 nt, Homo sapiens
  misc_RNA (1)...(19): siRNA sense strand
gccguuauccacaaagaug

SEQ ID NO: 961992 - RNA, 19 nt, Homo sapiens
  misc_RNA (1)...(19): siRNA sense strand
agacgagggcgaugaauac

SEQ ID NO: 961993 - RNA, 19 nt, Homo sapiens
  misc_RNA (1)...(19): siRNA sense strand
ggaccugcagaaugaccua

SEQ ID NO: 961994 - RNA, 19 nt, Homo sapiens
  misc_RNA (1)...(19): siRNA sense strand
agagugaggaggacuggaa

SEQ ID NO: 961995 - RNA, 19 nt, Homo sapiens
  misc_RNA (1)...(19): siRNA sense strand
aggaagaagaggagaguga

SEQ ID NO: 961996 - RNA, 19 nt, Homo sapiens
  misc_RNA (1)...(19): siRNA sense strand
gcuggaggcugaaaacuac

SEQ ID NO: 961997 - RNA, 19 nt, Homo sapiens
  misc_RNA (1)...(19): siRNA sense strand
uacauggaccugcagaaug

SEQ ID NO: 961998 - RNA, 19 nt, Homo sapiens
  misc_RNA (1)...(19): siRNA sense strand
ccgaugugcuggagcuucu

SEQ ID NO: 961999 - RNA, 19 nt, Homo sapiens
  misc_RNA (1)...(19): siRNA sense strand
cgacuuggagaaggaagaa

SEQ ID NO: 962000 - RNA, 19 nt, Homo sapiens
  misc_RNA (1)...(19): siRNA sense strand
guaccccgauuccgacuug

SEQ ID NO: 962001 - RNA, 19 nt, Homo sapiens
  misc_RNA (1)...(19): siRNA sense strand
gaagaggaagcuauuauua

SEQ ID NO: 962002 - RNA, 19 nt, Homo sapiens
  misc_RNA (1)...(19): siRNA sense strand
ggaaacagaugugucagaa

SEQ ID NO: 962003 - RNA, 19 nt, Homo sapiens
  misc_RNA (1)...(19): siRNA sense strand
gcaagucucucuaaguugu

SEQ ID NO: 962004 - RNA, 19 nt, Homo sapiens
  misc_RNA (1)...(19): siRNA sense strand
ggauggccuugaagucuua

SEQ ID NO: 962005 - RNA, 19 nt, Homo sapiens
  misc_RNA (1)...(19): siRNA sense strand
uaagauugcucccaaagug

SEQ ID NO: 962006 - RNA, 19 nt, Homo sapiens
  misc_RNA (1)...(19): siRNA sense strand
ggacucuccuuaccauuug

SEQ ID NO: 962007 - RNA, 19 nt, Homo sapiens
  misc_RNA (1)...(19): siRNA sense strand
aaacagaugugucagaagu

SEQ ID NO: 962008 - RNA, 19 nt, Homo sapiens
  misc_RNA (1)...(19): siRNA sense strand
aaauacagcugugaccaua

SEQ ID NO: 962009 - RNA, 19 nt, Homo sapiens
  misc_RNA (1)...(19): siRNA sense strand
gauagcagccaucaagaaa

SEQ ID NO: 962010 - RNA, 19 nt, Homo sapiens
  misc_RNA (1)...(19): siRNA sense strand
gaacagacugaucaacuga

SEQ ID NO: 962011 - RNA, 19 nt, Homo sapiens
  misc_RNA (1)...(19): siRNA sense strand
cagaacacacgacuuauaa

SEQ ID NO: 962012 - RNA, 19 nt, Homo sapiens
  misc_RNA (1)...(19): siRNA sense strand
ucacaggaauagaaucuga

SEQ ID NO: 962013 - RNA, 19 nt, Homo sapiens
  misc_RNA (1)...(19): siRNA sense strand
caagagaaggcuaugcaua

SEQ ID NO: 962014 - RNA, 19 nt, Homo sapiens
  misc_RNA (1)...(19): siRNA sense strand
gcagaugacccucaagaga

SEQ ID NO: 962015 - RNA, 19 nt, Homo sapiens
  misc_RNA (1)...(19): siRNA sense strand
ggagauagcagccaucaag

SEQ ID NO: 962016 - RNA, 19 nt, Homo sapiens
  misc_RNA (1)...(19): siRNA sense strand
gaaaagggauggugaaaac

SEQ ID NO: 962017 - RNA, 19 nt, Homo sapiens
  misc_RNA (1)...(19): siRNA sense strand
cugaucaacugaagacuaa

SEQ ID NO: 962018 - RNA, 19 nt, Homo sapiens
  misc_RNA (1)...(19): siRNA sense strand
gauaggcaaugauuacagu

SEQ ID NO: 962019 - RNA, 19 nt, Homo sapiens
  misc_RNA (1)...(19): siRNA sense strand
cuuaagaggucaaggcauu

SEQ ID NO: 962020 - RNA, 19 nt, Homo sapiens
  misc_RNA (1)...(19): siRNA sense strand
gagauaaacccacucuugu

SEQ ID NO: 962021 - RNA, 19 nt, Homo sapiens
  misc_RNA (1)...(19): siRNA sense strand
gcacugcagcucuucauau

SEQ ID NO: 962022 - RNA, 19 nt, Homo sapiens
  misc_RNA (1)...(19): siRNA sense strand
ugaaagaacagacugauca

SEQ ID NO: 962023 - RNA, 19 nt, Homo sapiens
  misc_RNA (1)...(19): siRNA sense strand
gcaggaggauuugccuuau

SEQ ID NO: 962024 - RNA, 19 nt, Homo sapiens
  misc_RNA (1)...(19): siRNA sense strand
gaacuucucacaggaauag

SEQ ID NO: 962025 - RNA, 19 nt, Homo sapiens
  misc_RNA (1)...(19): siRNA sense strand
ucagaacacacgacuuaua

SEQ ID NO: 962026 - RNA, 19 nt, Homo sapiens
  misc_RNA (1)...(19): siRNA sense strand
aggcaagucucucuaaguu

SEQ ID NO: 962027 - RNA, 19 nt, Homo sapiens
  misc_RNA (1)...(19): siRNA sense strand
gaucucaaaugccgacagu

SEQ ID NO: 962028 - RNA, 19 nt, Homo sapiens
  misc_RNA (1)...(19): siRNA sense strand
gaaagaacagacugaucaa

SEQ ID NO: 962029 - RNA, 19 nt, Homo sapiens
  misc_RNA (1)...(19): siRNA sense strand
uuucagaacacacgacuua

SEQ ID NO: 962030 - RNA, 19 nt, Homo sapiens
  misc_RNA (1)...(19): siRNA sense strand
gccaaggucaaguucauua

SEQ ID NO: 962031 - RNA, 19 nt, Homo sapiens
  misc_RNA (1)...(19): siRNA sense strand
ccugauuucucuaagauug

SEQ ID NO: 962032 - RNA, 19 nt, Homo sapiens
  misc_RNA (1)...(19): siRNA sense strand
cucaaguucuucuuacaua

SEQ ID NO: 962033 - RNA, 19 nt, Homo sapiens
  misc_RNA (1)...(19): siRNA sense strand
ucaccaaccucucagaaag

SEQ ID NO: 962034 - RNA, 19 nt, Homo sapiens
  misc_RNA (1)...(19): siRNA sense strand
cagaugacccucaagagaa

SEQ ID NO: 962035 - RNA, 19 nt, Homo sapiens
  misc_RNA (1)...(19): siRNA sense strand
aaaccacgccugagucaaa

SEQ ID NO: 962036 - RNA, 19 nt, Homo sapiens
  misc_RNA (1)...(19): siRNA sense strand
ugaaaaugcugccaacaaa

SEQ ID NO: 962037 - RNA, 19 nt, Homo sapiens
  misc_RNA (1)...(19): siRNA sense strand
cuuauaagcaggaggauuu

SEQ ID NO: 962038 - RNA, 19 nt, Homo sapiens
  misc_RNA (1)...(19): siRNA sense strand
gugaaacccucccagagau

SEQ ID NO: 962039 - RNA, 19 nt, Homo sapiens
  misc_RNA (1)...(19): siRNA sense strand
ggaccucucucagauuaag

SEQ ID NO: 962040 - RNA, 19 nt, Homo sapiens
  misc_RNA (1)...(19): siRNA sense strand
gccuugaagucuuaaauca

SEQ ID NO: 962041 - RNA, 19 nt, Homo sapiens
  misc_RNA (1)...(19): siRNA sense strand
guacauauccaccaagaac

SEQ ID NO: 962042 - RNA, 19 nt, Homo sapiens
  misc_RNA (1)...(19): siRNA sense strand
cauaguacauauccaccaa

SEQ ID NO: 962043 - RNA, 19 nt, Homo sapiens
  misc_RNA (1)...(19): siRNA sense strand
ucucaaaugccgacaguuu

SEQ ID NO: 962044 - RNA, 19 nt, Homo sapiens
  misc_RNA (1)...(19): siRNA sense strand
cacugcagcucuucauauu

SEQ ID NO: 962045 - RNA, 19 nt, Homo sapiens
  misc_RNA (1)...(19): siRNA sense strand
gaaauacagcugugaccau

SEQ ID NO: 962046 - RNA, 19 nt, Homo sapiens
  misc_RNA (1)...(19): siRNA sense strand
agucaagcauuucugauau

SEQ ID NO: 962047 - RNA, 19 nt, Homo sapiens
  misc_RNA (1)...(19): siRNA sense strand
gaagacuaaaguacaagaa

SEQ ID NO: 962048 - RNA, 19 nt, Homo sapiens
  misc_RNA (1)...(19): siRNA sense strand
gaacacacgacuuauaagc

SEQ ID NO: 962049 - RNA, 19 nt, Homo sapiens
  misc_RNA (1)...(19): siRNA sense strand
uaaacccacucuugugcaa

SEQ ID NO: 962050 - RNA, 19 nt, Homo sapiens
  misc_RNA (1)...(19): siRNA sense strand
caggcaacacguucaaaua

SEQ ID NO: 962051 - RNA, 19 nt, Homo sapiens
  misc_RNA (1)...(19): siRNA sense strand
ggggaccucucucagauua

SEQ ID NO: 962052 - RNA, 19 nt, Homo sapiens
  misc_RNA (1)...(19): siRNA sense strand
uaagauaggcaaugauuac

SEQ ID NO: 962053 - RNA, 19 nt, Homo sapiens
  misc_RNA (1)...(19): siRNA sense strand
gucaagcauuucugauauu

SEQ ID NO: 962054 - RNA, 19 nt, Homo sapiens
  misc_RNA (1)...(19): siRNA sense strand
aggagacgcuucuaaguca

SEQ ID NO: 962055 - RNA, 19 nt, Homo sapiens
  misc_RNA (1)...(19): siRNA sense strand
ugaagaggaagcuauuauu

SEQ ID NO: 962056 - RNA, 19 nt, Homo sapiens
  misc_RNA (1)...(19): siRNA sense strand
agauuaagauaggcaauga

SEQ ID NO: 962057 - RNA, 19 nt, Homo sapiens
  misc_RNA (1)...(19): siRNA sense strand
aggaggauuugccuuauga

SEQ ID NO: 962058 - RNA, 19 nt, Homo sapiens
  misc_RNA (1)...(19): siRNA sense strand
cauagcagaugacccucaa

SEQ ID NO: 962059 - RNA, 19 nt, Homo sapiens
  misc_RNA (1)...(19): siRNA sense strand
caacugaagacuaaaguac

SEQ ID NO: 962060 - RNA, 19 nt, Homo sapiens
  misc_RNA (1)...(19): siRNA sense strand
agugagacuuguggaaaua

SEQ ID NO: 962061 - RNA, 19 nt, Homo sapiens
  misc_RNA (1)...(19): siRNA sense strand
caaauacggccaaggucaa

SEQ ID NO: 962062 - RNA, 19 nt, Homo sapiens
  misc_RNA (1)...(19): siRNA sense strand
gaacaaaccccaggacuca

SEQ ID NO: 962063 - RNA, 19 nt, Homo sapiens
  misc_RNA (1)...(19): siRNA sense strand
caaauucaggcaacacguu

SEQ ID NO: 962064 - RNA, 19 nt, Homo sapiens
  misc_RNA (1)...(19): siRNA sense strand
agaacagacugaucaacug

SEQ ID NO: 962065 - RNA, 19 nt, Homo sapiens
  misc_RNA (1)...(19): siRNA sense strand
gucagaaguugaaagaaca

SEQ ID NO: 962066 - RNA, 19 nt, Homo sapiens
  misc_RNA (1)...(19): siRNA sense strand
auuaccagcucccugauuu

SEQ ID NO: 962067 - RNA, 19 nt, Homo sapiens
  misc_RNA (1)...(19): siRNA sense strand
ggagacgcuucuaagucaa

SEQ ID NO: 962068 - RNA, 19 nt, Homo sapiens
  misc_RNA (1)...(19): siRNA sense strand
acagaugugucagaaguug

SEQ ID NO: 962069 - RNA, 19 nt, Homo sapiens
  misc_RNA (1)...(19): siRNA sense strand
ucccagagaucucaaaugc

SEQ ID NO: 962070 - RNA, 19 nt, Homo sapiens
  misc_RNA (1)...(19): siRNA sense strand
ugucagaaguugaaagaac

SEQ ID NO: 962071 - RNA, 19 nt, Homo sapiens
  misc_RNA (1)...(19): siRNA sense strand
gcaagauagucuagaaacc

SEQ ID NO: 962072 - RNA, 19 nt, Homo sapiens
  misc_RNA (1)...(19): siRNA sense strand
caggaggauuugccuuaug

SEQ ID NO: 962073 - RNA, 19 nt, Homo sapiens
  misc_RNA (1)...(19): siRNA sense strand
aauagaaucugaggcaagu

SEQ ID NO: 962074 - RNA, 19 nt, Homo sapiens
  misc_RNA (1)...(19): siRNA sense strand
uaguacauauccaccaaga

SEQ ID NO: 962075 - RNA, 19 nt, Homo sapiens
  misc_RNA (1)...(19): siRNA sense strand
gagauagcagccaucaaga

SEQ ID NO: 962076 - RNA, 19 nt, Homo sapiens
  misc_RNA (1)...(19): siRNA sense strand
acugaagacuaaaguacaa

SEQ ID NO: 962077 - RNA, 19 nt, Homo sapiens
  misc_RNA (1)...(19): siRNA sense strand
ugugcaagauagucuagaa

SEQ ID NO: 962078 - RNA, 19 nt, Homo sapiens
  misc_RNA (1)...(19): siRNA sense strand
cagaaacagcagacugaaa

SEQ ID NO: 962079 - RNA, 19 nt, Homo sapiens
  misc_RNA (1)...(19): siRNA sense strand
ccaaggguccaggugauaa

SEQ ID NO: 962080 - RNA, 19 nt, Homo sapiens
  misc_RNA (1)...(19): siRNA sense strand
gaaaaugcugccaacaaaa

SEQ ID NO: 962081 - RNA, 19 nt, Homo sapiens
  misc_RNA (1)...(19): siRNA sense strand
gggaaacagaugugucaga

SEQ ID NO: 962082 - RNA, 19 nt, Homo sapiens
  misc_RNA (1)...(19): siRNA sense strand
uagugagacuuguggaaau

SEQ ID NO: 962083 - RNA, 19 nt, Homo sapiens
  misc_RNA (1)...(19): siRNA sense strand
ccagcucccugauuucucu

SEQ ID NO: 962084 - RNA, 19 nt, Homo sapiens
  misc_RNA (1)...(19): siRNA sense strand
ggguccaggugauaaacaa

SEQ ID NO: 962085 - RNA, 19 nt, Homo sapiens
  misc_RNA (1)...(19): siRNA sense strand
ggcaaugauuacaguuuua

SEQ ID NO: 962086 - RNA, 19 nt, Homo sapiens
  misc_RNA (1)...(19): siRNA sense strand
aagucaagcauuucugaua

SEQ ID NO: 962087 - RNA, 19 nt, Homo sapiens
  misc_RNA (1)...(19): siRNA sense strand
gaucaacugaagacuaaag

SEQ ID NO: 962088 - RNA, 19 nt, Homo sapiens
  misc_RNA (1)...(19): siRNA sense strand
cagaaaggcacuuccucaa

SEQ ID NO: 962089 - RNA, 19 nt, Homo sapiens
  misc_RNA (1)...(19): siRNA sense strand
gaggauuugccuuaugaug

SEQ ID NO: 962090 - RNA, 19 nt, Homo sapiens
  misc_RNA (1)...(19): siRNA sense strand
caaggguccaggugauaaa

SEQ ID NO: 962091 - RNA, 19 nt, Homo sapiens
  misc_RNA (1)...(19): siRNA sense strand
cuaagucaagcauuucuga

SEQ ID NO: 962092 - RNA, 19 nt, Homo sapiens
  misc_RNA (1)...(19): siRNA sense strand
caagauagucuagaaacca

SEQ ID NO: 962093 - RNA, 19 nt, Homo sapiens
  misc_RNA (1)...(19): siRNA sense strand
cgagaaagagaaacaaugc

SEQ ID NO: 962094 - RNA, 19 nt, Homo sapiens
  misc_RNA (1)...(19): siRNA sense strand
guucaaauacggccaaggu

SEQ ID NO: 962095 - RNA, 19 nt, Homo sapiens
  misc_RNA (1)...(19): siRNA sense strand
ugugaaacccucccagaga

SEQ ID NO: 962096 - RNA, 19 nt, Homo sapiens
  misc_RNA (1)...(19): siRNA sense strand
uagcagaugacccucaaga

SEQ ID NO: 962097 - RNA, 19 nt, Homo sapiens
  misc_RNA (1)...(19): siRNA sense strand
gaaguugaaagaacagacu

SEQ ID NO: 962098 - RNA, 19 nt, Homo sapiens
  misc_RNA (1)...(19): siRNA sense strand
gaggcaagucucucuaagu

SEQ ID NO: 962099 - RNA, 19 nt, Homo sapiens
  misc_RNA (1)...(19): siRNA sense strand
gagcagaaagggaaaauca

SEQ ID NO: 962100 - RNA, 19 nt, Homo sapiens
  misc_RNA (1)...(19): siRNA sense strand
ucucucagauuaagauagg

SEQ ID NO: 962101 - RNA, 19 nt, Homo sapiens
  misc_RNA (1)...(19): siRNA sense strand
cuacacaguugaacaauua

SEQ ID NO: 962102 - RNA, 19 nt, Homo sapiens
  misc_RNA (1)...(19): siRNA sense strand
caaauguucuggaugauga

SEQ ID NO: 962103 - RNA, 19 nt, Homo sapiens
  misc_RNA (1)...(19): siRNA sense strand
gaaaagcuuugaagaauga

SEQ ID NO: 962104 - RNA, 19 nt, Homo sapiens
  misc_RNA (1)...(19): siRNA sense strand
caacauugaugaugaaacu

SEQ ID NO: 962105 - RNA, 19 nt, Homo sapiens
  misc_RNA (1)...(19): siRNA sense strand
guacaauaguugaugucua

SEQ ID NO: 962106 - RNA, 19 nt, Homo sapiens
  misc_RNA (1)...(19): siRNA sense strand
cagcugugguuauauugua

SEQ ID NO: 962107 - RNA, 19 nt, Homo sapiens
  misc_RNA (1)...(19): siRNA sense strand
cagcaacuguaaucucaaa

SEQ ID NO: 962108 - RNA, 19 nt, Homo sapiens
  misc_RNA (1)...(19): siRNA sense strand
guugaugucuacacaguug

SEQ ID NO: 962109 - RNA, 19 nt, Homo sapiens
  misc_RNA (1)...(19): siRNA sense strand
ggacuuuaaaucugucuuu

SEQ ID NO: 962110 - RNA, 19 nt, Homo sapiens
  misc_RNA (1)...(19): siRNA sense strand
gcacguucguucuaucaca

SEQ ID NO: 962111 - RNA, 19 nt, Homo sapiens
  misc_RNA (1)...(19): siRNA sense strand
gggaaaagcuuugaagaau

SEQ ID NO: 962112 - RNA, 19 nt, Homo sapiens
  misc_RNA (1)...(19): siRNA sense strand
guaaaugaagcaucuaaca

SEQ ID NO: 962113 - RNA, 19 nt, Homo sapiens
  misc_RNA (1)...(19): siRNA sense strand
uacaauaguugaugucuac

SEQ ID NO: 962114 - RNA, 19 nt, Homo sapiens
  misc_RNA (1)...(19): siRNA sense strand
ggaaaagcuuugaagaaug

SEQ ID NO: 962115 - RNA, 19 nt, Homo sapiens
  misc_RNA (1)...(19): siRNA sense strand
aaaugaagcaucuaacaug

SEQ ID NO: 962116 - RNA, 19 nt, Homo sapiens
  misc_RNA (1)...(19): siRNA sense strand
ucuaacaugugcacaacuu

SEQ ID NO: 962117 - RNA, 19 nt, Homo sapiens
  misc_RNA (1)...(19): siRNA sense strand
aagcuaacauucugcugaa

SEQ ID NO: 962118 - RNA, 19 nt, Homo sapiens
  misc_RNA (1)...(19): siRNA sense strand
aggaguggauugaaaauua

SEQ ID NO: 962119 - RNA, 19 nt, Homo sapiens
  misc_RNA (1)...(19): siRNA sense strand
aaaucugucuuucucaguu

SEQ ID NO: 962120 - RNA, 19 nt, Homo sapiens
  misc_RNA (1)...(19): siRNA sense strand
ccagauauaccagaagcua

SEQ ID NO: 962121 - RNA, 19 nt, Homo sapiens
  misc_RNA (1)...(19): siRNA sense strand
aaugaagcaucuaacaugu

SEQ ID NO: 962122 - RNA, 19 nt, Homo sapiens
  misc_RNA (1)...(19): siRNA sense strand
uaauccagauauaccagaa

SEQ ID NO: 962123 - RNA, 19 nt, Homo sapiens
  misc_RNA (1)...(19): siRNA sense strand
gagcaaggaguggauugaa

SEQ ID NO: 962124 - RNA, 19 nt, Homo sapiens
  misc_RNA (1)...(19): siRNA sense strand
ucuacacaguugaacaauu

SEQ ID NO: 962125 - RNA, 19 nt, Homo sapiens
  misc_RNA (1)...(19): siRNA sense strand
cuucauuccuguagucuca

SEQ ID NO: 962126 - RNA, 19 nt, Homo sapiens
  misc_RNA (1)...(19): siRNA sense strand
cauccuuuaugccuacauu

SEQ ID NO: 962127 - RNA, 19 nt, Homo sapiens
  misc_RNA (1)...(19): siRNA sense strand
gaaaagcugauccuuccua

SEQ ID NO: 962128 - RNA, 19 nt, Homo sapiens
  misc_RNA (1)...(19): siRNA sense strand
aaucugucuuucucaguuu

SEQ ID NO: 962129 - RNA, 19 nt, Homo sapiens
  misc_RNA (1)...(19): siRNA sense strand
gcaaggaguggauugaaaa

SEQ ID NO: 962130 - RNA, 19 nt, Homo sapiens
  misc_RNA (1)...(19): siRNA sense strand
gggcugcacguucguucua

SEQ ID NO: 962131 - RNA, 19 nt, Homo sapiens
  misc_RNA (1)...(19): siRNA sense strand
uguucuggaugaugaaauu

SEQ ID NO: 962132 - RNA, 19 nt, Homo sapiens
  misc_RNA (1)...(19): siRNA sense strand
agcaaggaguggauugaaa

SEQ ID NO: 962133 - RNA, 19 nt, Homo sapiens
  misc_RNA (1)...(19): siRNA sense strand
gcaucuaacaugugcacaa

SEQ ID NO: 962134 - RNA, 19 nt, Homo sapiens
  misc_RNA (1)...(19): siRNA sense strand
aagcugauccuuccuaugg

SEQ ID NO: 962135 - RNA, 19 nt, Homo sapiens
  misc_RNA (1)...(19): siRNA sense strand
aauaguugaugucuacaca

SEQ ID NO: 962136 - RNA, 19 nt, Homo sapiens
  misc_RNA (1)...(19): siRNA sense strand
gacuuuaaaucugucuuuc

SEQ ID NO: 962137 - RNA, 19 nt, Homo sapiens
  misc_RNA (1)...(19): siRNA sense strand
guaguucgaaauagauguu

SEQ ID NO: 962138 - RNA, 19 nt, Homo sapiens
  misc_RNA (1)...(19): siRNA sense strand
gauguuccagcugugguua

SEQ ID NO: 962139 - RNA, 19 nt, Homo sapiens
  misc_RNA (1)...(19): siRNA sense strand
cagauauaccagaagcuaa

SEQ ID NO: 962140 - RNA, 19 nt, Homo sapiens
  misc_RNA (1)...(19): siRNA sense strand
caacuaauccagauauacc

SEQ ID NO: 962141 - RNA, 19 nt, Homo sapiens
  misc_RNA (1)...(19): siRNA sense strand
acacaggcacccuucauuc

SEQ ID NO: 962142 - RNA, 19 nt, Homo sapiens
  misc_RNA (1)...(19): siRNA sense strand
uuccagcugugguuauauu

SEQ ID NO: 962143 - RNA, 19 nt, Homo sapiens
  misc_RNA (1)...(19): siRNA sense strand
caaaaguaguucgaaauag

SEQ ID NO: 962144 - RNA, 19 nt, Homo sapiens
  misc_RNA (1)...(19): siRNA sense strand
cuacugaggcaagcagaaa

SEQ ID NO: 962145 - RNA, 19 nt, Homo sapiens
  misc_RNA (1)...(19): siRNA sense strand
gaugaugaaauugacaguu

SEQ ID NO: 962146 - RNA, 19 nt, Homo sapiens
  misc_RNA (1)...(19): siRNA sense strand
caucuaacaugugcacaac

SEQ ID NO: 962147 - RNA, 19 nt, Homo sapiens
  misc_RNA (1)...(19): siRNA sense strand
uguuccagcugugguuaua

SEQ ID NO: 962148 - RNA, 19 nt, Homo sapiens
  misc_RNA (1)...(19): siRNA sense strand
uaguugaugucuacacagu

SEQ ID NO: 962149 - RNA, 19 nt, Homo sapiens
  misc_RNA (1)...(19): siRNA sense strand
cuuuaaaucugucuuucuc

SEQ ID NO: 962150 - RNA, 19 nt, Homo sapiens
  misc_RNA (1)...(19): siRNA sense strand
uuaguguacucucgugcaa

SEQ ID NO: 962151 - RNA, 19 nt, Homo sapiens
  misc_RNA (1)...(19): siRNA sense strand
ggaguggauugaaaauuag

SEQ ID NO: 962152 - RNA, 19 nt, Homo sapiens
  misc_RNA (1)...(19): siRNA sense strand
uauaccagaagcuaacauu

SEQ ID NO: 962153 - RNA, 19 nt, Homo sapiens
  misc_RNA (1)...(19): siRNA sense strand
aaaacuccuuggacuuuaa

SEQ ID NO: 962154 - RNA, 19 nt, Homo sapiens
  misc_RNA (1)...(19): siRNA sense strand
guuuccaugugcugauuga

SEQ ID NO: 962155 - RNA, 19 nt, Homo sapiens
  misc_RNA (1)...(19): siRNA sense strand
ccuuggacuuuaaaucugu

SEQ ID NO: 962156 - RNA, 19 nt, Homo sapiens
  misc_RNA (1)...(19): siRNA sense strand
gccuacauuuccacacuca

SEQ ID NO: 962157 - RNA, 19 nt, Homo sapiens
  misc_RNA (1)...(19): siRNA sense strand
caguuuccaugugcugauu

SEQ ID NO: 962158 - RNA, 19 nt, Homo sapiens
  misc_RNA (1)...(19): siRNA sense strand
gcugauugaucugacugau

SEQ ID NO: 962159 - RNA, 19 nt, Homo sapiens
  misc_RNA (1)...(19): siRNA sense strand
cacacaggcacccuucauu

SEQ ID NO: 962160 - RNA, 19 nt, Homo sapiens
  misc_RNA (1)...(19): siRNA sense strand
cuuccuauggcauccuuua

SEQ ID NO: 962161 - RNA, 19 nt, Homo sapiens
  misc_RNA (1)...(19): siRNA sense strand
uccaugugcugauugaucu

SEQ ID NO: 962162 - RNA, 19 nt, Homo sapiens
  misc_RNA (1)...(19): siRNA sense strand
aaacuccuuggacuuuaaa

SEQ ID NO: 962163 - RNA, 19 nt, Homo sapiens
  misc_RNA (1)...(19): siRNA sense strand
ugucuacacaguugaacaa

SEQ ID NO: 962164 - RNA, 19 nt, Homo sapiens
  misc_RNA (1)...(19): siRNA sense strand
gaagaugacugaagaguau

SEQ ID NO: 962165 - RNA, 19 nt, Homo sapiens
  misc_RNA (1)...(19): siRNA sense strand
gaagggagcuguucugaug

SEQ ID NO: 962166 - RNA, 19 nt, Homo sapiens
  misc_RNA (1)...(19): siRNA sense strand
gaagaagucugaauaugug

SEQ ID NO: 962167 - RNA, 19 nt, Homo sapiens
  misc_RNA (1)...(19): siRNA sense strand
ggacaaggcacaagaagaa

SEQ ID NO: 962168 - RNA, 19 nt, Homo sapiens
  misc_RNA (1)...(19): siRNA sense strand
ucaagaagaugacugaaga

SEQ ID NO: 962169 - RNA, 19 nt, Homo sapiens
  misc_RNA (1)...(19): siRNA sense strand
acaagaagaagucugaaua

SEQ ID NO: 962170 - RNA, 19 nt, Homo sapiens
  misc_RNA (1)...(19): siRNA sense strand
caagaagaagucugaauau

SEQ ID NO: 962171 - RNA, 19 nt, Homo sapiens
  misc_RNA (1)...(19): siRNA sense strand
ccaagaauguggugaucga

SEQ ID NO: 962172 - RNA, 19 nt, Homo sapiens
  misc_RNA (1)...(19): siRNA sense strand
gacgagaacauagaaguuu

SEQ ID NO: 962173 - RNA, 19 nt, Homo sapiens
  misc_RNA (1)...(19): siRNA sense strand
agaagaagucugaauaugu

SEQ ID NO: 962174 - RNA, 19 nt, Homo sapiens
  misc_RNA (1)...(19): siRNA sense strand
gcagugacgagaacauaga

SEQ ID NO: 962175 - RNA, 19 nt, Homo sapiens
  misc_RNA (1)...(19): siRNA sense strand
aagaagaagucugaauaug

SEQ ID NO: 962176 - RNA, 19 nt, Homo sapiens
  misc_RNA (1)...(19): siRNA sense strand
gggaaucgagcauauggaa

SEQ ID NO: 962177 - RNA, 19 nt, Homo sapiens
  misc_RNA (1)...(19): siRNA sense strand
gauccagacaucucaagaa

SEQ ID NO: 962178 - RNA, 19 nt, Homo sapiens
  misc_RNA (1)...(19): siRNA sense strand
cgacagccaugggcacaga

SEQ ID NO: 962179 - RNA, 19 nt, Homo sapiens
  misc_RNA (1)...(19): siRNA sense strand
ucaaaucugugugggaauc

SEQ ID NO: 962180 - RNA, 19 nt, Homo sapiens
  misc_RNA (1)...(19): siRNA sense strand
agaagaugacugaagagua

SEQ ID NO: 962181 - RNA, 19 nt, Homo sapiens
  misc_RNA (1)...(19): siRNA sense strand
ggaaucgagcauauggaaa

SEQ ID NO: 962182 - RNA, 19 nt, Homo sapiens
  misc_RNA (1)...(19): siRNA sense strand
gaaucgagcauauggaaaa

SEQ ID NO: 962183 - RNA, 19 nt, Homo sapiens
  misc_RNA (1)...(19): siRNA sense strand
gaugagaggauccagacau

SEQ ID NO: 962184 - RNA, 19 nt, Homo sapiens
  misc_RNA (1)...(19): siRNA sense strand
ccaccgugauuccuuccaa

SEQ ID NO: 962185 - RNA, 19 nt, Homo sapiens
  misc_RNA (1)...(19): siRNA sense strand
ugacgagaacauagaaguu

SEQ ID NO: 962186 - RNA, 19 nt, Homo sapiens
  misc_RNA (1)...(19): siRNA sense strand
ggcacaagaagaagucuga

SEQ ID NO: 962187 - RNA, 19 nt, Homo sapiens
  misc_RNA (1)...(19): siRNA sense strand
ccaccaacagcgccuuuga

SEQ ID NO: 962188 - RNA, 19 nt, Homo sapiens
  misc_RNA (1)...(19): siRNA sense strand
gaucgagucggaccuguac

SEQ ID NO: 962189 - RNA, 19 nt, Homo sapiens
  misc_RNA (1)...(19): siRNA sense strand
gugugggaaucgagcauau

SEQ ID NO: 962190 - RNA, 19 nt, Homo sapiens
  misc_RNA (1)...(19): siRNA sense strand
gcacaagaagaagucugaa

SEQ ID NO: 962191 - RNA, 19 nt, Homo sapiens
  misc_RNA (1)...(19): siRNA sense strand
ggauccagacaucucaaga

SEQ ID NO: 962192 - RNA, 19 nt, Homo sapiens
  misc_RNA (1)...(19): siRNA sense strand
ggggauuucugaacccaaa

SEQ ID NO: 962193 - RNA, 19 nt, Homo sapiens
  misc_RNA (1)...(19): siRNA sense strand
cagcugcagugacgagaac

SEQ ID NO: 962194 - RNA, 19 nt, Homo sapiens
  misc_RNA (1)...(19): siRNA sense strand
caaaacaucaaaucugugu

SEQ ID NO: 962195 - RNA, 19 nt, Homo sapiens
  misc_RNA (1)...(19): siRNA sense strand
caaggcacaagaagaaguc

SEQ ID NO: 962196 - RNA, 19 nt, Homo sapiens
  misc_RNA (1)...(19): siRNA sense strand
ggaaggagcuguuugacaa

SEQ ID NO: 962197 - RNA, 19 nt, Homo sapiens
  misc_RNA (1)...(19): siRNA sense strand
caacaaacaccacuucuua

SEQ ID NO: 962198 - RNA, 19 nt, Homo sapiens
  misc_RNA (1)...(19): siRNA sense strand
aaacaccacuucuuacaca

SEQ ID NO: 962199 - RNA, 19 nt, Homo sapiens
  misc_RNA (1)...(19): siRNA sense strand
acucugggcuggguuauug

SEQ ID NO: 962200 - RNA, 19 nt, Homo sapiens
  misc_RNA (1)...(19): siRNA sense strand
uggcuugccuuggcucuuu

SEQ ID NO: 962201 - RNA, 19 nt, Homo sapiens
  misc_RNA (1)...(19): siRNA sense strand
ccaacaaacaccacuucuu

SEQ ID NO: 962202 - RNA, 19 nt, Homo sapiens
  misc_RNA (1)...(19): siRNA sense strand
gggaaggagcuguuugaca

SEQ ID NO: 962203 - RNA, 19 nt, Homo sapiens
  misc_RNA (1)...(19): siRNA sense strand
acaaacaccacuucuuaca

SEQ ID NO: 962204 - RNA, 19 nt, Homo sapiens
  misc_RNA (1)...(19): siRNA sense strand
gcuggguuauugcuagcuu

SEQ ID NO: 962205 - RNA, 19 nt, Homo sapiens
  misc_RNA (1)...(19): siRNA sense strand
gaaggagcuguuugacaag

SEQ ID NO: 962206 - RNA, 19 nt, Homo sapiens
  misc_RNA (1)...(19): siRNA sense strand
ugacaaggccaacaaacac

SEQ ID NO: 962207 - RNA, 19 nt, Homo sapiens
  misc_RNA (1)...(19): siRNA sense strand
ggccaacaaacaccacuuc

SEQ ID NO: 962208 - RNA, 19 nt, Homo sapiens
  misc_RNA (1)...(19): siRNA sense strand
gaggaaggcuaaguuuaua

SEQ ID NO: 962209 - RNA, 19 nt, Homo sapiens
  misc_RNA (1)...(19): siRNA sense strand
ggaaggcuaaguuuauaua

SEQ ID NO: 962210 - RNA, 19 nt, Homo sapiens
  misc_RNA (1)...(19): siRNA sense strand
gguggaaucuguggucaaa

SEQ ID NO: 962211 - RNA, 19 nt, Homo sapiens
  misc_RNA (1)...(19): siRNA sense strand
gcagaggaaggcuaaguuu

SEQ ID NO: 962212 - RNA, 19 nt, Homo sapiens
  misc_RNA (1)...(19): siRNA sense strand
gaaagaggccaucguguac

SEQ ID NO: 962213 - RNA, 19 nt, Homo sapiens
  misc_RNA (1)...(19): siRNA sense strand
auacaaaugucaagugugu

SEQ ID NO: 962214 - RNA, 19 nt, Homo sapiens
  misc_RNA (1)...(19): siRNA sense strand
gaggugauguuccaaagca

SEQ ID NO: 962215 - RNA, 19 nt, Homo sapiens
  misc_RNA (1)...(19): siRNA sense strand
agaaagaggccaucgugua

SEQ ID NO: 962216 - RNA, 19 nt, Homo sapiens
  misc_RNA (1)...(19): siRNA sense strand
caaagcagaggaaggcuaa

SEQ ID NO: 962217 - RNA, 19 nt, Homo sapiens
  misc_RNA (1)...(19): siRNA sense strand
cagaggaaggcuaaguuua

SEQ ID NO: 962218 - RNA, 19 nt, Homo sapiens
  misc_RNA (1)...(19): siRNA sense strand
cugggacacuuccuguuua

SEQ ID NO: 962219 - RNA, 19 nt, Homo sapiens
  misc_RNA (1)...(19): siRNA sense strand
cuacguagcagucauguca

SEQ ID NO: 962220 - RNA, 19 nt, Homo sapiens
  misc_RNA (1)...(19): siRNA sense strand
agaggaaggcuaaguuuau

SEQ ID NO: 962221 - RNA, 19 nt, Homo sapiens
  misc_RNA (1)...(19): siRNA sense strand
aagaggccaucguguacua

SEQ ID NO: 962222 - RNA, 19 nt, Homo sapiens
  misc_RNA (1)...(19): siRNA sense strand
caagaggugauguuccaaa

SEQ ID NO: 962223 - RNA, 19 nt, Homo sapiens
  misc_RNA (1)...(19): siRNA sense strand
ucaaguguguauagugcaa

SEQ ID NO: 962224 - RNA, 19 nt, Homo sapiens
  misc_RNA (1)...(19): siRNA sense strand
acaaaugucaaguguguau

SEQ ID NO: 962225 - RNA, 19 nt, Homo sapiens
  misc_RNA (1)...(19): siRNA sense strand
gaagacauguaccccugaa

SEQ ID NO: 962226 - RNA, 19 nt, Homo sapiens
  misc_RNA (1)...(19): siRNA sense strand
ggccaucguguacuacgua

SEQ ID NO: 962227 - RNA, 19 nt, Homo sapiens
  misc_RNA (1)...(19): siRNA sense strand
guacuacguagcagucaug

SEQ ID NO: 962228 - RNA, 19 nt, Homo sapiens
  misc_RNA (1)...(19): siRNA sense strand
caaaugucaaguguguaua

SEQ ID NO: 962229 - RNA, 19 nt, Homo sapiens
  misc_RNA (1)...(19): siRNA sense strand
cccugaagauagagaaaga

SEQ ID NO: 962230 - RNA, 19 nt, Homo sapiens
  misc_RNA (1)...(19): siRNA sense strand
gagcugcccggaagacauc

SEQ ID NO: 962231 - RNA, 19 nt, Homo sapiens
  misc_RNA (1)...(19): siRNA sense strand
ccaagacgcaagaccacuu

SEQ ID NO: 962232 - RNA, 19 nt, Homo sapiens
  misc_RNA (1)...(19): siRNA sense strand
gcagcgugcaucagcaaga

SEQ ID NO: 962233 - RNA, 19 nt, Homo sapiens
  misc_RNA (1)...(19): siRNA sense strand
ucaaggcccagucccaaga

SEQ ID NO: 962234 - RNA, 19 nt, Homo sapiens
  misc_RNA (1)...(19): siRNA sense strand
cagcgugcaucagcaagau

SEQ ID NO: 962235 - RNA, 19 nt, Homo sapiens
  misc_RNA (1)...(19): siRNA sense strand
acaucuaccuggccagaag

SEQ ID NO: 962236 - RNA, 19 nt, Homo sapiens
  misc_RNA (1)...(19): siRNA sense strand
aagaggugauguuccaaag

SEQ ID NO: 962237 - RNA, 19 nt, Homo sapiens
  misc_RNA (1)...(19): siRNA sense strand
acugggacacuuccuguuu

SEQ ID NO: 962238 - RNA, 19 nt, Homo sapiens
  misc_RNA (1)...(19): siRNA sense strand
ccuguccuguccucacuug

SEQ ID NO: 962239 - RNA, 19 nt, Homo sapiens
  misc_RNA (1)...(19): siRNA sense strand
agcaagaggugauguucca

SEQ ID NO: 962240 - RNA, 19 nt, Homo sapiens
  misc_RNA (1)...(19): siRNA sense strand
gcagggagagacuggguaa

SEQ ID NO: 962241 - RNA, 19 nt, Homo sapiens
  misc_RNA (1)...(19): siRNA sense strand
caacagggccauggaggaa

SEQ ID NO: 962242 - RNA, 19 nt, Homo sapiens
  misc_RNA (1)...(19): siRNA sense strand
ccacugacuucgcagagau

SEQ ID NO: 962243 - RNA, 19 nt, Homo sapiens
  misc_RNA (1)...(19): siRNA sense strand
ggucgccgguacacacuga

SEQ ID NO: 962244 - RNA, 19 nt, Homo sapiens
  misc_RNA (1)...(19): siRNA sense strand
ggacuucauccaguacauu

SEQ ID NO: 962245 - RNA, 19 nt, Homo sapiens
  misc_RNA (1)...(19): siRNA sense strand
aggaggacuucauccagua

SEQ ID NO: 962246 - RNA, 19 nt, Homo sapiens
  misc_RNA (1)...(19): siRNA sense strand
gcacgcuggugguguuguc

SEQ ID NO: 962247 - RNA, 19 nt, Homo sapiens
  misc_RNA (1)...(19): siRNA sense strand
cagguaccguucugcaguu

SEQ ID NO: 962248 - RNA, 19 nt, Homo sapiens
  misc_RNA (1)...(19): siRNA sense strand
agaagaccaccaccaccua

SEQ ID NO: 962249 - RNA, 19 nt, Homo sapiens
  misc_RNA (1)...(19): siRNA sense strand
gacuucauccaguacauug

SEQ ID NO: 962250 - RNA, 19 nt, Homo sapiens
  misc_RNA (1)...(19): siRNA sense strand
gccacugacuucgcagaga

SEQ ID NO: 962251 - RNA, 19 nt, Homo sapiens
  misc_RNA (1)...(19): siRNA sense strand
ggagggaagcagggagaga

SEQ ID NO: 962252 - RNA, 19 nt, Homo sapiens
  misc_RNA (1)...(19): siRNA sense strand
gcaauagcccagaagauaa

SEQ ID NO: 962253 - RNA, 19 nt, Homo sapiens
  misc_RNA (1)...(19): siRNA sense strand
aguuugagauggacauuua

SEQ ID NO: 962254 - RNA, 19 nt, Homo sapiens
  misc_RNA (1)...(19): siRNA sense strand
caagggaucugcccaccau

SEQ ID NO: 962255 - RNA, 19 nt, Homo sapiens
  misc_RNA (1)...(19): siRNA sense strand
cgcaauagcccagaagaua

SEQ ID NO: 962256 - RNA, 19 nt, Homo sapiens
  misc_RNA (1)...(19): siRNA sense strand
gaagagucacaguuugaga

SEQ ID NO: 962257 - RNA, 19 nt, Homo sapiens
  misc_RNA (1)...(19): siRNA sense strand
ggagguaccaggaucaucu

SEQ ID NO: 962258 - RNA, 19 nt, Homo sapiens
  misc_RNA (1)...(19): siRNA sense strand
cagagccaccugcgcaaua

SEQ ID NO: 962259 - RNA, 19 nt, Homo sapiens
  misc_RNA (1)...(19): siRNA sense strand
caccagcccuuccagugau

SEQ ID NO: 962260 - RNA, 19 nt, Homo sapiens
  misc_RNA (1)...(19): siRNA sense strand
agucacaguuugagaugga

SEQ ID NO: 962261 - RNA, 19 nt, Homo sapiens
  misc_RNA (1)...(19): siRNA sense strand
caauagcccagaagauaag

SEQ ID NO: 962262 - RNA, 19 nt, Homo sapiens
  misc_RNA (1)...(19): siRNA sense strand
gagguaccaggaucaucua

SEQ ID NO: 962263 - RNA, 19 nt, Homo sapiens
  misc_RNA (1)...(19): siRNA sense strand
gcgcaauagcccagaagau

SEQ ID NO: 962264 - RNA, 19 nt, Homo sapiens
  misc_RNA (1)...(19): siRNA sense strand
gcaaguaccuguaauugaa

SEQ ID NO: 962265 - RNA, 19 nt, Homo sapiens
  misc_RNA (1)...(19): siRNA sense strand
ugucauacccaucuaauua

SEQ ID NO: 962266 - RNA, 19 nt, Homo sapiens
  misc_RNA (1)...(19): siRNA sense strand
ccaugaagccuaacaagua

SEQ ID NO: 962267 - RNA, 19 nt, Homo sapiens
  misc_RNA (1)...(19): siRNA sense strand
caugaagccuaacaaguau

SEQ ID NO: 962268 - RNA, 19 nt, Homo sapiens
  misc_RNA (1)...(19): siRNA sense strand
ggaauucgcccuccucucu

SEQ ID NO: 962269 - RNA, 19 nt, Homo sapiens
  misc_RNA (1)...(19): siRNA sense strand
gcucauguuugacccaguu

SEQ ID NO: 962270 - RNA, 19 nt, Homo sapiens
  misc_RNA (1)...(19): siRNA sense strand
gcacacagaagaacacaca

SEQ ID NO: 962271 - RNA, 19 nt, Homo sapiens
  misc_RNA (1)...(19): siRNA sense strand
cacagaggacagauuauua

SEQ ID NO: 962272 - RNA, 19 nt, Homo sapiens
  misc_RNA (1)...(19): siRNA sense strand
ccacagaggacagauuauu

SEQ ID NO: 962273 - RNA, 19 nt, Homo sapiens
  misc_RNA (1)...(19): siRNA sense strand
gaaguuugcucggucugau

SEQ ID NO: 962274 - RNA, 19 nt, Homo sapiens
  misc_RNA (1)...(19): siRNA sense strand
auacuggaaucaaaccuuu

SEQ ID NO: 962275 - RNA, 19 nt, Homo sapiens
  misc_RNA (1)...(19): siRNA sense strand
gaugaacuaacaagacauu

SEQ ID NO: 962276 - RNA, 19 nt, Homo sapiens
  misc_RNA (1)...(19): siRNA sense strand
gaaccacagaggacagauu

SEQ ID NO: 962277 - RNA, 19 nt, Homo sapiens
  misc_RNA (1)...(19): siRNA sense strand
gaaagcacacagaagaaca

SEQ ID NO: 962278 - RNA, 19 nt, Homo sapiens
  misc_RNA (1)...(19): siRNA sense strand
aauagaaccugggaucgaa

SEQ ID NO: 962279 - RNA, 19 nt, Homo sapiens
  misc_RNA (1)...(19): siRNA sense strand
uaugauggaugcaacaaag

SEQ ID NO: 962280 - RNA, 19 nt, Homo sapiens
  misc_RNA (1)...(19): siRNA sense strand
ccacaccauugccugagaa

SEQ ID NO: 962281 - RNA, 19 nt, Homo sapiens
  misc_RNA (1)...(19): siRNA sense strand
cagaugugauuaugaugga

SEQ ID NO: 962282 - RNA, 19 nt, Homo sapiens
  misc_RNA (1)...(19): siRNA sense strand
gacagauuauuauccugaa

SEQ ID NO: 962283 - RNA, 19 nt, Homo sapiens
  misc_RNA (1)...(19): siRNA sense strand
caaaggaagcggaggauac

SEQ ID NO: 962284 - RNA, 19 nt, Homo sapiens
  misc_RNA (1)...(19): siRNA sense strand
gaacuaacaagacauuucc

SEQ ID NO: 962285 - RNA, 19 nt, Homo sapiens
  misc_RNA (1)...(19): siRNA sense strand
aaccacagaggacagauua

SEQ ID NO: 962286 - RNA, 19 nt, Homo sapiens
  misc_RNA (1)...(19): siRNA sense strand
uaaaagcucccacuugaaa

SEQ ID NO: 962287 - RNA, 19 nt, Homo sapiens
  misc_RNA (1)...(19): siRNA sense strand
caccauugccugagaaguu

SEQ ID NO: 962288 - RNA, 19 nt, Homo sapiens
  misc_RNA (1)...(19): siRNA sense strand
caagcauuguugcaagaga

SEQ ID NO: 962289 - RNA, 19 nt, Homo sapiens
  misc_RNA (1)...(19): siRNA sense strand
gaagggugcacauggaagu

SEQ ID NO: 962290 - RNA, 19 nt, Homo sapiens
  misc_RNA (1)...(19): siRNA sense strand
gaaucacccuucggucauc

SEQ ID NO: 962291 - RNA, 19 nt, Homo sapiens
  misc_RNA (1)...(19): siRNA sense strand
acagaggacagauuauuau

SEQ ID NO: 962292 - RNA, 19 nt, Homo sapiens
  misc_RNA (1)...(19): siRNA sense strand
acuaaaagcucccacuuga

SEQ ID NO: 962293 - RNA, 19 nt, Homo sapiens
  misc_RNA (1)...(19): siRNA sense strand
gagaagccuauaucacaga

SEQ ID NO: 962294 - RNA, 19 nt, Homo sapiens
  misc_RNA (1)...(19): siRNA sense strand
caucuugcccuccauagga

SEQ ID NO: 962295 - RNA, 19 nt, Homo sapiens
  misc_RNA (1)...(19): siRNA sense strand
cugaugaacuaacaagaca

SEQ ID NO: 962296 - RNA, 19 nt, Homo sapiens
  misc_RNA (1)...(19): siRNA sense strand
aagcauuguugcaagagaa

SEQ ID NO: 962297 - RNA, 19 nt, Homo sapiens
  misc_RNA (1)...(19): siRNA sense strand
caucuacuccacaccauug

SEQ ID NO: 962298 - RNA, 19 nt, Homo sapiens
  misc_RNA (1)...(19): siRNA sense strand
gcaugcaaguaccuguaau

SEQ ID NO: 962299 - RNA, 19 nt, Homo sapiens
  misc_RNA (1)...(19): siRNA sense strand
uaggaaacgccacaugcua

SEQ ID NO: 962300 - RNA, 19 nt, Homo sapiens
  misc_RNA (1)...(19): siRNA sense strand
cggaggagauggaaaauuc

SEQ ID NO: 962301 - RNA, 19 nt, Homo sapiens
  misc_RNA (1)...(19): siRNA sense strand
cuugaaagcacacagaaga

SEQ ID NO: 962302 - RNA, 19 nt, Homo sapiens
  misc_RNA (1)...(19): siRNA sense strand
gguugagcaugccuucuuc

SEQ ID NO: 962303 - RNA, 19 nt, Homo sapiens
  misc_RNA (1)...(19): siRNA sense strand
ggaaacgccacaugcuagu

SEQ ID NO: 962304 - RNA, 19 nt, Homo sapiens
  misc_RNA (1)...(19): siRNA sense strand
gggugcacauggaaguuug

SEQ ID NO: 962305 - RNA, 19 nt, Homo sapiens
  misc_RNA (1)...(19): siRNA sense strand
auacccaucuaauuacaug

SEQ ID NO: 962306 - RNA, 19 nt, Homo sapiens
  misc_RNA (1)...(19): siRNA sense strand
ggaaguuugcucggucuga

SEQ ID NO: 962307 - RNA, 19 nt, Homo sapiens
  misc_RNA (1)...(19): siRNA sense strand
gaccaucuugcccuccaua

SEQ ID NO: 962308 - RNA, 19 nt, Homo sapiens
  misc_RNA (1)...(19): siRNA sense strand
ggccauggacccugucuca

SEQ ID NO: 962309 - RNA, 19 nt, Homo sapiens
  misc_RNA (1)...(19): siRNA sense strand
agaagccuauaucacagaa

SEQ ID NO: 962310 - RNA, 19 nt, Homo sapiens
  misc_RNA (1)...(19): siRNA sense strand
ugaacuaacaagacauuuc

SEQ ID NO: 962311 - RNA, 19 nt, Homo sapiens
  misc_RNA (1)...(19): siRNA sense strand
aaucauaugagaagccuau

SEQ ID NO: 962312 - RNA, 19 nt, Homo sapiens
  misc_RNA (1)...(19): siRNA sense strand
ucauacccaucuaauuaca

SEQ ID NO: 962313 - RNA, 19 nt, Homo sapiens
  misc_RNA (1)...(19): siRNA sense strand
gggaagggugcacauggaa

SEQ ID NO: 962314 - RNA, 19 nt, Homo sapiens
  misc_RNA (1)...(19): siRNA sense strand
ccacuugaaagcacacaga

SEQ ID NO: 962315 - RNA, 19 nt, Homo sapiens
  misc_RNA (1)...(19): siRNA sense strand
cagauuauuauccugaaga

SEQ ID NO: 962316 - RNA, 19 nt, Homo sapiens
  misc_RNA (1)...(19): siRNA sense strand
caugcaaguaccuguaauu

SEQ ID NO: 962317 - RNA, 19 nt, Homo sapiens
  misc_RNA (1)...(19): siRNA sense strand
ugggaagggugcacaugga

SEQ ID NO: 962318 - RNA, 19 nt, Homo sapiens
  misc_RNA (1)...(19): siRNA sense strand
ucaaaggaagcggaggaua

SEQ ID NO: 962319 - RNA, 19 nt, Homo sapiens
  misc_RNA (1)...(19): siRNA sense strand
ggguugagcaugccuucuu

SEQ ID NO: 962320 - RNA, 19 nt, Homo sapiens
  misc_RNA (1)...(19): siRNA sense strand
gaaaacauacuggaaucaa

SEQ ID NO: 962321 - RNA, 19 nt, Homo sapiens
  misc_RNA (1)...(19): siRNA sense strand
uagcaugcaaguaccugua

SEQ ID NO: 962322 - RNA, 19 nt, Homo sapiens
  misc_RNA (1)...(19): siRNA sense strand
gaaaauuccaguaguagca

SEQ ID NO: 962323 - RNA, 19 nt, Homo sapiens
  misc_RNA (1)...(19): siRNA sense strand
caaguaccuguaauugaau

SEQ ID NO: 962324 - RNA, 19 nt, Homo sapiens
  misc_RNA (1)...(19): siRNA sense strand
aaacauacuggaaucaaac

SEQ ID NO: 962325 - RNA, 19 nt, Homo sapiens
  misc_RNA (1)...(19): siRNA sense strand
ucagugucauacccaucua

SEQ ID NO: 962326 - RNA, 19 nt, Homo sapiens
  misc_RNA (1)...(19): siRNA sense strand
gcccuccucucugaaguuc

SEQ ID NO: 962327 - RNA, 19 nt, Homo sapiens
  misc_RNA (1)...(19): siRNA sense strand
ccauggacccugucucagu

SEQ ID NO: 962328 - RNA, 19 nt, Homo sapiens
  misc_RNA (1)...(19): siRNA sense strand
gaacacacacaggagaaaa

SEQ ID NO: 962329 - RNA, 19 nt, Homo sapiens
  misc_RNA (1)...(19): siRNA sense strand
gaccuuuaccuguggaauc

SEQ ID NO: 962330 - RNA, 19 nt, Homo sapiens
  misc_RNA (1)...(19): siRNA sense strand
augagaagccuauaucaca

SEQ ID NO: 962331 - RNA, 19 nt, Homo sapiens
  misc_RNA (1)...(19): siRNA sense strand
gauggaugcaacaaagugu

SEQ ID NO: 962332 - RNA, 19 nt, Homo sapiens
  misc_RNA (1)...(19): siRNA sense strand
aaaggaagcggaggauaca

SEQ ID NO: 962333 - RNA, 19 nt, Homo sapiens
  misc_RNA (1)...(19): siRNA sense strand
ugcaaguaccuguaauuga

SEQ ID NO: 962334 - RNA, 19 nt, Homo sapiens
  misc_RNA (1)...(19): siRNA sense strand
gaagcggaggauacacaga

SEQ ID NO: 962335 - RNA, 19 nt, Homo sapiens
  misc_RNA (1)...(19): siRNA sense strand
aauucgcccuccucucuga

SEQ ID NO: 962336 - RNA, 19 nt, Homo sapiens
  misc_RNA (1)...(19): siRNA sense strand
caucuaauuacauggaauc

SEQ ID NO: 962337 - RNA, 19 nt, Homo sapiens
  misc_RNA (1)...(19): siRNA sense strand
aguaguagcaugcaaguac

SEQ ID NO: 962338 - RNA, 19 nt, Homo sapiens
  misc_RNA (1)...(19): siRNA sense strand
gaccauagcugagaacuaa

SEQ ID NO: 962339 - RNA, 19 nt, Homo sapiens
  misc_RNA (1)...(19): siRNA sense strand
gagauaaacuuccugaaug

SEQ ID NO: 962340 - RNA, 19 nt, Homo sapiens
  misc_RNA (1)...(19): siRNA sense strand
gcaaugaugucacggauau

SEQ ID NO: 962341 - RNA, 19 nt, Homo sapiens
  misc_RNA (1)...(19): siRNA sense strand
ucacggauauuucagauga

SEQ ID NO: 962342 - RNA, 19 nt, Homo sapiens
  misc_RNA (1)...(19): siRNA sense strand
aagaagcaguggauaaaua

SEQ ID NO: 962343 - RNA, 19 nt, Homo sapiens
  misc_RNA (1)...(19): siRNA sense strand
gggccacgcugaucaauga

SEQ ID NO: 962344 - RNA, 19 nt, Homo sapiens
  misc_RNA (1)...(19): siRNA sense strand
agaaggugcuuguuaauga

SEQ ID NO: 962345 - RNA, 19 nt, Homo sapiens
  misc_RNA (1)...(19): siRNA sense strand
gauaagaagcaguggauaa

SEQ ID NO: 962346 - RNA, 19 nt, Homo sapiens
  misc_RNA (1)...(19): siRNA sense strand
ggagauaaacuuccugaau

SEQ ID NO: 962347 - RNA, 19 nt, Homo sapiens
  misc_RNA (1)...(19): siRNA sense strand
agaaggagauggaguauac

SEQ ID NO: 962348 - RNA, 19 nt, Homo sapiens
  misc_RNA (1)...(19): siRNA sense strand
aaauaaggcuguuggagau

SEQ ID NO: 962349 - RNA, 19 nt, Homo sapiens
  misc_RNA (1)...(19): siRNA sense strand
gaacgaacacaccuucugu

SEQ ID NO: 962350 - RNA, 19 nt, Homo sapiens
  misc_RNA (1)...(19): siRNA sense strand
gauggaguauacaccuuaa

SEQ ID NO: 962351 - RNA, 19 nt, Homo sapiens
  misc_RNA (1)...(19): siRNA sense strand
gcacuguacucaggcaaug

SEQ ID NO: 962352 - RNA, 19 nt, Homo sapiens
  misc_RNA (1)...(19): siRNA sense strand
gcugaucaaugaacaaugg

SEQ ID NO: 962353 - RNA, 19 nt, Homo sapiens
  misc_RNA (1)...(19): siRNA sense strand
ucaucaaacucaaacagaa

SEQ ID NO: 962354 - RNA, 19 nt, Homo sapiens
  misc_RNA (1)...(19): siRNA sense strand
guacgcggcugggauccua

SEQ ID NO: 962355 - RNA, 19 nt, Homo sapiens
  misc_RNA (1)...(19): siRNA sense strand
gcugugcuguggcugagua

SEQ ID NO: 962356 - RNA, 19 nt, Homo sapiens
  misc_RNA (1)...(19): siRNA sense strand
uaaacuuccugaaugugaa

SEQ ID NO: 962357 - RNA, 19 nt, Homo sapiens
  misc_RNA (1)...(19): siRNA sense strand
gagauggaguauacaccuu

SEQ ID NO: 962358 - RNA, 19 nt, Homo sapiens
  misc_RNA (1)...(19): siRNA sense strand
agauaaacuuccugaaugu

SEQ ID NO: 962359 - RNA, 19 nt, Homo sapiens
  misc_RNA (1)...(19): siRNA sense strand
agaagcaguggauaaauaa

SEQ ID NO: 962360 - RNA, 19 nt, Homo sapiens
  misc_RNA (1)...(19): siRNA sense strand
acgauugcauaacgcauua

SEQ ID NO: 962361 - RNA, 19 nt, Homo sapiens
  misc_RNA (1)...(19): siRNA sense strand
gcugggauccuaagcuuug

SEQ ID NO: 962362 - RNA, 19 nt, Homo sapiens
  misc_RNA (1)...(19): siRNA sense strand
gcagugccuuugccguuca

SEQ ID NO: 962363 - RNA, 19 nt, Homo sapiens
  misc_RNA (1)...(19): siRNA sense strand
gauugcaaauggcuaugug

SEQ ID NO: 962364 - RNA, 19 nt, Homo sapiens
  misc_RNA (1)...(19): siRNA sense strand
gcacaugccccaaauggaa

SEQ ID NO: 962365 - RNA, 19 nt, Homo sapiens
  misc_RNA (1)...(19): siRNA sense strand
uaaggcuguuggagauaaa

SEQ ID NO: 962366 - RNA, 19 nt, Homo sapiens
  misc_RNA (1)...(19): siRNA sense strand
cacagaaggagauggagua

SEQ ID NO: 962367 - RNA, 19 nt, Homo sapiens
  misc_RNA (1)...(19): siRNA sense strand
uaaacuuacugaccaucug

SEQ ID NO: 962368 - RNA, 19 nt, Homo sapiens
  misc_RNA (1)...(19): siRNA sense strand
auaaggcuguuggagauaa

SEQ ID NO: 962369 - RNA, 19 nt, Homo sapiens
  misc_RNA (1)...(19): siRNA sense strand
gauccuaagcuuugauaag

SEQ ID NO: 962370 - RNA, 19 nt, Homo sapiens
  misc_RNA (1)...(19): siRNA sense strand
agaagaccauagcugagaa

SEQ ID NO: 962371 - RNA, 19 nt, Homo sapiens
  misc_RNA (1)...(19): siRNA sense strand
caaagaauuaugcagaagu

SEQ ID NO: 962372 - RNA, 19 nt, Homo sapiens
  misc_RNA (1)...(19): siRNA sense strand
auccuaagcuuugauaaga

SEQ ID NO: 962373 - RNA, 19 nt, Homo sapiens
  misc_RNA (1)...(19): siRNA sense strand
auaagaagcaguggauaaa

SEQ ID NO: 962374 - RNA, 19 nt, Homo sapiens
  misc_RNA (1)...(19): siRNA sense strand
gaguaugguguguauguga

SEQ ID NO: 962375 - RNA, 19 nt, Homo sapiens
  misc_RNA (1)...(19): siRNA sense strand
gggauccuaagcuuugaua

SEQ ID NO: 962376 - RNA, 19 nt, Homo sapiens
  misc_RNA (1)...(19): siRNA sense strand
gccuguggcugaccaauac

SEQ ID NO: 962377 - RNA, 19 nt, Homo sapiens
  misc_RNA (1)...(19): siRNA sense strand
ccacgcugaucaaugaaca

SEQ ID NO: 962378 - RNA, 19 nt, Homo sapiens
  misc_RNA (1)...(19): siRNA sense strand
cugaccaucugaaguaugu

SEQ ID NO: 962379 - RNA, 19 nt, Homo sapiens
  misc_RNA (1)...(19): siRNA sense strand
cagaagaccauagcugaga

SEQ ID NO: 962380 - RNA, 19 nt, Homo sapiens
  misc_RNA (1)...(19): siRNA sense strand
cggcugggauccuaagcuu

SEQ ID NO: 962381 - RNA, 19 nt, Homo sapiens
  misc_RNA (1)...(19): siRNA sense strand
ucaaagaauuaugcagaag

SEQ ID NO: 962382 - RNA, 19 nt, Homo sapiens
  misc_RNA (1)...(19): siRNA sense strand
agauggaguauacaccuua

SEQ ID NO: 962383 - RNA, 19 nt, Homo sapiens
  misc_RNA (1)...(19): siRNA sense strand
gcaccgaagagcccuguag

SEQ ID NO: 962384 - RNA, 19 nt, Homo sapiens
  misc_RNA (1)...(19): siRNA sense strand
aaguagggcguguggguua

SEQ ID NO: 962385 - RNA, 19 nt, Homo sapiens
  misc_RNA (1)...(19): siRNA sense strand
ucaaacagaaggugcuugu

SEQ ID NO: 962386 - RNA, 19 nt, Homo sapiens
  misc_RNA (1)...(19): siRNA sense strand
gcgcacagaaggagaugga

SEQ ID NO: 962387 - RNA, 19 nt, Homo sapiens
  misc_RNA (1)...(19): siRNA sense strand
aaugaugucacggauauuu

SEQ ID NO: 962388 - RNA, 19 nt, Homo sapiens
  misc_RNA (1)...(19): siRNA sense strand
cagaaggugcuuguuaaug

SEQ ID NO: 962389 - RNA, 19 nt, Homo sapiens
  misc_RNA (1)...(19): siRNA sense strand
gauaaauaaggcuguugga

SEQ ID NO: 962390 - RNA, 19 nt, Homo sapiens
  misc_RNA (1)...(19): siRNA sense strand
gcuaccaguguaagaacua

SEQ ID NO: 962391 - RNA, 19 nt, Homo sapiens
  misc_RNA (1)...(19): siRNA sense strand
gaccugggagcugucauuu

SEQ ID NO: 962392 - RNA, 19 nt, Homo sapiens
  misc_RNA (1)...(19): siRNA sense strand
aaacuuacugaccaucuga

SEQ ID NO: 962393 - RNA, 19 nt, Homo sapiens
  misc_RNA (1)...(19): siRNA sense strand
ccugggagcugucauuucc

SEQ ID NO: 962394 - RNA, 19 nt, Homo sapiens
  misc_RNA (1)...(19): siRNA sense strand
ggcugaguaugguguguau

SEQ ID NO: 962395 - RNA, 19 nt, Homo sapiens
  misc_RNA (1)...(19): siRNA sense strand
uaagaagcaguggauaaau

SEQ ID NO: 962396 - RNA, 19 nt, Homo sapiens
  misc_RNA (1)...(19): siRNA sense strand
uggaggaggacaccuggua

SEQ ID NO: 962397 - RNA, 19 nt, Homo sapiens
  misc_RNA (1)...(19): siRNA sense strand
ugaaugugaagcaguaugu

SEQ ID NO: 962398 - RNA, 19 nt, Homo sapiens
  misc_RNA (1)...(19): siRNA sense strand
uccugaaugugaagcagua

SEQ ID NO: 962399 - RNA, 19 nt, Homo sapiens
  misc_RNA (1)...(19): siRNA sense strand
auaaacuuccugaauguga

SEQ ID NO: 962400 - RNA, 19 nt, Homo sapiens
  misc_RNA (1)...(19): siRNA sense strand
guggauaaauaaggcuguu

SEQ ID NO: 962401 - RNA, 19 nt, Homo sapiens
  misc_RNA (1)...(19): siRNA sense strand
gauaaacuuccugaaugug

SEQ ID NO: 962402 - RNA, 19 nt, Homo sapiens
  misc_RNA (1)...(19): siRNA sense strand
gcguguggguuacgugucu

SEQ ID NO: 962403 - RNA, 19 nt, Homo sapiens
  misc_RNA (1)...(19): siRNA sense strand
guacucaggcaaugauguc

SEQ ID NO: 962404 - RNA, 19 nt, Homo sapiens
  misc_RNA (1)...(19): siRNA sense strand
caacagcgaaagacauugc

SEQ ID NO: 962405 - RNA, 19 nt, Homo sapiens
  misc_RNA (1)...(19): siRNA sense strand
ggcaaugaugucacggaua

SEQ ID NO: 962406 - RNA, 19 nt, Homo sapiens
  misc_RNA (1)...(19): siRNA sense strand
uuguagagauugagaaggu

SEQ ID NO: 962407 - RNA, 19 nt, Homo sapiens
  misc_RNA (1)...(19): siRNA sense strand
aguaugguguguaugugaa

SEQ ID NO: 962408 - RNA, 19 nt, Homo sapiens
  misc_RNA (1)...(19): siRNA sense strand
cuauguggagcacuuguuu

SEQ ID NO: 962409 - RNA, 19 nt, Homo sapiens
  misc_RNA (1)...(19): siRNA sense strand
cagaaggagauggaguaua

SEQ ID NO: 962410 - RNA, 19 nt, Homo sapiens
  misc_RNA (1)...(19): siRNA sense strand
gugacaacuuuaaacuuac

SEQ ID NO: 962411 - RNA, 19 nt, Homo sapiens
  misc_RNA (1)...(19): siRNA sense strand
gggugcagcccauacugaa

SEQ ID NO: 962412 - RNA, 19 nt, Homo sapiens
  misc_RNA (1)...(19): siRNA sense strand
ugucacggauauuucagau

SEQ ID NO: 962413 - RNA, 19 nt, Homo sapiens
  misc_RNA (1)...(19): siRNA sense strand
gaccaucugaaguauguca

SEQ ID NO: 962414 - RNA, 19 nt, Homo sapiens
  misc_RNA (1)...(19): siRNA sense strand
caucaaacucaaacagaag

SEQ ID NO: 962415 - RNA, 19 nt, Homo sapiens
  misc_RNA (1)...(19): siRNA sense strand
ugagauugcaaauggcuau

SEQ ID NO: 962416 - RNA, 19 nt, Homo sapiens
  misc_RNA (1)...(19): siRNA sense strand
ugcaacagcgaaagacauu

SEQ ID NO: 962417 - RNA, 19 nt, Homo sapiens
  misc_RNA (1)...(19): siRNA sense strand
gcuauguggagcacuuguu

SEQ ID NO: 962418 - RNA, 19 nt, Homo sapiens
  misc_RNA (1)...(19): siRNA sense strand
gcuguuggagauaaacuuc

SEQ ID NO: 962419 - RNA, 19 nt, Homo sapiens
  misc_RNA (1)...(19): siRNA sense strand
ugaguaugguguguaugug

SEQ ID NO: 962420 - RNA, 19 nt, Homo sapiens
  misc_RNA (1)...(19): siRNA sense strand
caaggcaacacauacauuu

SEQ ID NO: 962421 - RNA, 19 nt, Homo sapiens
  misc_RNA (1)...(19): siRNA sense strand
gcaaggcaacacauacauu

SEQ ID NO: 962422 - RNA, 19 nt, Homo sapiens
  misc_RNA (1)...(19): siRNA sense strand
gaagauugcagugauggaa

SEQ ID NO: 962423 - RNA, 19 nt, Homo sapiens
  misc_RNA (1)...(19): siRNA sense strand
ggaagacuguauggaagga

SEQ ID NO: 962424 - RNA, 19 nt, Homo sapiens
  misc_RNA (1)...(19): siRNA sense strand
guauauacuuuggucuaug

SEQ ID NO: 962425 - RNA, 19 nt, Homo sapiens
  misc_RNA (1)...(19): siRNA sense strand
gagguugccuggccacacu

SEQ ID NO: 962426 - RNA, 19 nt, Homo sapiens
  misc_RNA (1)...(19): siRNA sense strand
uggucuauguauucuguua

SEQ ID NO: 962427 - RNA, 19 nt, Homo sapiens
  misc_RNA (1)...(19): siRNA sense strand
guugaagauugcagugaug

SEQ ID NO: 962428 - RNA, 19 nt, Homo sapiens
  misc_RNA (1)...(19): siRNA sense strand
gauggaagugucucaguca

SEQ ID NO: 962429 - RNA, 19 nt, Homo sapiens
  misc_RNA (1)...(19): siRNA sense strand
ccuggaagacuguauggaa

SEQ ID NO: 962430 - RNA, 19 nt, Homo sapiens
  misc_RNA (1)...(19): siRNA sense strand
gggacacauuugccuuugu

SEQ ID NO: 962431 - RNA, 19 nt, Homo sapiens
  misc_RNA (1)...(19): siRNA sense strand
ggcaacacauacauuuggu

SEQ ID NO: 962432 - RNA, 19 nt, Homo sapiens
  misc_RNA (1)...(19): siRNA sense strand
gugcaaggcaacacauaca

SEQ ID NO: 962433 - RNA, 19 nt, Homo sapiens
  misc_RNA (1)...(19): siRNA sense strand
ggauguggcuuuccucaua

SEQ ID NO: 962434 - RNA, 19 nt, Homo sapiens
  misc_RNA (1)...(19): siRNA sense strand
ggaagugacuauuugguuu

SEQ ID NO: 962435 - RNA, 19 nt, Homo sapiens
  misc_RNA (1)...(19): siRNA sense strand
gaaacacccuaucuaagaa

SEQ ID NO: 962436 - RNA, 19 nt, Homo sapiens
  misc_RNA (1)...(19): siRNA sense strand
gaccaacucuuuagacaaa

SEQ ID NO: 962437 - RNA, 19 nt, Homo sapiens
  misc_RNA (1)...(19): siRNA sense strand
gagagaauauucgaaauga

SEQ ID NO: 962438 - RNA, 19 nt, Homo sapiens
  misc_RNA (1)...(19): siRNA sense strand
uaaccucagugcuugauua

SEQ ID NO: 962439 - RNA, 19 nt, Homo sapiens
  misc_RNA (1)...(19): siRNA sense strand
gaagugacuauuugguuua

SEQ ID NO: 962440 - RNA, 19 nt, Homo sapiens
  misc_RNA (1)...(19): siRNA sense strand
gacgugccaucaacaaaua

SEQ ID NO: 962441 - RNA, 19 nt, Homo sapiens
  misc_RNA (1)...(19): siRNA sense strand
gagaauacauaaaccagau

SEQ ID NO: 962442 - RNA, 19 nt, Homo sapiens
  misc_RNA (1)...(19): siRNA sense strand
caauggaagugacuauuug

SEQ ID NO: 962443 - RNA, 19 nt, Homo sapiens
  misc_RNA (1)...(19): siRNA sense strand
gaggaugccuguagacuca

SEQ ID NO: 962444 - RNA, 19 nt, Homo sapiens
  misc_RNA (1)...(19): siRNA sense strand
ggagaaagauggguacagu

SEQ ID NO: 962445 - RNA, 19 nt, Homo sapiens
  misc_RNA (1)...(19): siRNA sense strand
caagccauuuguccauuua

SEQ ID NO: 962446 - RNA, 19 nt, Homo sapiens
  misc_RNA (1)...(19): siRNA sense strand
ccuguagacucaucaauuu

SEQ ID NO: 962447 - RNA, 19 nt, Homo sapiens
  misc_RNA (1)...(19): siRNA sense strand
ccagaaacacccuaucuaa

SEQ ID NO: 962448 - RNA, 19 nt, Homo sapiens
  misc_RNA (1)...(19): siRNA sense strand
cauagaugcuucccaaaga

SEQ ID NO: 962449 - RNA, 19 nt, Homo sapiens
  misc_RNA (1)...(19): siRNA sense strand
ggauguagucuuccucaua

SEQ ID NO: 962450 - RNA, 19 nt, Homo sapiens
  misc_RNA (1)...(19): siRNA sense strand
gauguagucuuccucauag

SEQ ID NO: 962451 - RNA, 19 nt, Homo sapiens
  misc_RNA (1)...(19): siRNA sense strand
gauuggaacuauaucauca

SEQ ID NO: 962452 - RNA, 19 nt, Homo sapiens
  misc_RNA (1)...(19): siRNA sense strand
ccacugaccuccaccuuag

SEQ ID NO: 962453 - RNA, 19 nt, Homo sapiens
  misc_RNA (1)...(19): siRNA sense strand
gcucagugauugacaacuu

SEQ ID NO: 962454 - RNA, 19 nt, Homo sapiens
  misc_RNA (1)...(19): siRNA sense strand
gaagugaugaguuuaagga

SEQ ID NO: 962455 - RNA, 19 nt, Homo sapiens
  misc_RNA (1)...(19): siRNA sense strand
uagcaaaggaugaguuuaa

SEQ ID NO: 962456 - RNA, 19 nt, Homo sapiens
  misc_RNA (1)...(19): siRNA sense strand
gagaauauucgaaaugaug

SEQ ID NO: 962457 - RNA, 19 nt, Homo sapiens
  misc_RNA (1)...(19): siRNA sense strand
gaaaguuccaggagaaaga

SEQ ID NO: 962458 - RNA, 19 nt, Homo sapiens
  misc_RNA (1)...(19): siRNA sense strand
ucucugggcucuacacgua

SEQ ID NO: 962459 - RNA, 19 nt, Homo sapiens
  misc_RNA (1)...(19): siRNA sense strand
gaggagagaauauucgaaa

SEQ ID NO: 962460 - RNA, 19 nt, Homo sapiens
  misc_RNA (1)...(19): siRNA sense strand
gagaccaacucuuuagaca

SEQ ID NO: 962461 - RNA, 19 nt, Homo sapiens
  misc_RNA (1)...(19): siRNA sense strand
acaaauaucccaccgaaga

SEQ ID NO: 962462 - RNA, 19 nt, Homo sapiens
  misc_RNA (1)...(19): siRNA sense strand
gugauaggauugcuuuguu

SEQ ID NO: 962463 - RNA, 19 nt, Homo sapiens
  misc_RNA (1)...(19): siRNA sense strand
ccucagugcuugauuacuu

SEQ ID NO: 962464 - RNA, 19 nt, Homo sapiens
  misc_RNA (1)...(19): siRNA sense strand
gaugguuuccaauuuguua

SEQ ID NO: 962465 - RNA, 19 nt, Homo sapiens
  misc_RNA (1)...(19): siRNA sense strand
ggagagaauauucgaaaug

SEQ ID NO: 962466 - RNA, 19 nt, Homo sapiens
  misc_RNA (1)...(19): siRNA sense strand
agaaacacccuaucuaaga

SEQ ID NO: 962467 - RNA, 19 nt, Homo sapiens
  misc_RNA (1)...(19): siRNA sense strand
gaaagauggguacaguaaa

SEQ ID NO: 962468 - RNA, 19 nt, Homo sapiens
  misc_RNA (1)...(19): siRNA sense strand
ucaaggcuacuccauauuu

SEQ ID NO: 962469 - RNA, 19 nt, Homo sapiens
  misc_RNA (1)...(19): siRNA sense strand
ugucaaggcuacuccauau

SEQ ID NO: 962470 - RNA, 19 nt, Homo sapiens
  misc_RNA (1)...(19): siRNA sense strand
ucaaggcuacgucauauuu

SEQ ID NO: 962471 - RNA, 19 nt, Homo sapiens
  misc_RNA (1)...(19): siRNA sense strand
agaaagauggguacaguaa

SEQ ID NO: 962472 - RNA, 19 nt, Homo sapiens
  misc_RNA (1)...(19): siRNA sense strand
caaggcuacuccauauuug

SEQ ID NO: 962473 - RNA, 19 nt, Homo sapiens
  misc_RNA (1)...(19): siRNA sense strand
aguaggaagugaugaguuu

SEQ ID NO: 962474 - RNA, 19 nt, Homo sapiens
  misc_RNA (1)...(19): siRNA sense strand
gcuauaugccuaacacuga

SEQ ID NO: 962475 - RNA, 19 nt, Homo sapiens
  misc_RNA (1)...(19): siRNA sense strand
ggauugcuuuguugagcua

SEQ ID NO: 962476 - RNA, 19 nt, Homo sapiens
  misc_RNA (1)...(19): siRNA sense strand
acaaccaacuccuaaugaa

SEQ ID NO: 962477 - RNA, 19 nt, Homo sapiens
  misc_RNA (1)...(19): siRNA sense strand
agagaacgguggcacagaa

SEQ ID NO: 962478 - RNA, 19 nt, Homo sapiens
  misc_RNA (1)...(19): siRNA sense strand
cuucauuggccaagaauua

SEQ ID NO: 962479 - RNA, 19 nt, Homo sapiens
  misc_RNA (1)...(19): siRNA sense strand
ucaagccauuuguccauuu

SEQ ID NO: 962480 - RNA, 19 nt, Homo sapiens
  misc_RNA (1)...(19): siRNA sense strand
gauacagcuugggagaaua

SEQ ID NO: 962481 - RNA, 19 nt, Homo sapiens
  misc_RNA (1)...(19): siRNA sense strand
gugaugaguuuaaggaagu

SEQ ID NO: 962482 - RNA, 19 nt, Homo sapiens
  misc_RNA (1)...(19): siRNA sense strand
aaugaugguuuccaauuug

SEQ ID NO: 962483 - RNA, 19 nt, Homo sapiens
  misc_RNA (1)...(19): siRNA sense strand
gagaaagauggguacagua

SEQ ID NO: 962484 - RNA, 19 nt, Homo sapiens
  misc_RNA (1)...(19): siRNA sense strand
caagccagauuggaacuau

SEQ ID NO: 962485 - RNA, 19 nt, Homo sapiens
  misc_RNA (1)...(19): siRNA sense strand
ugaaacaucaucuccaaga

SEQ ID NO: 962486 - RNA, 19 nt, Homo sapiens
  misc_RNA (1)...(19): siRNA sense strand
agaaccagaucauacuuau

SEQ ID NO: 962487 - RNA, 19 nt, Homo sapiens
  misc_RNA (1)...(19): siRNA sense strand
gaagaaccagaucauacuu

SEQ ID NO: 962488 - RNA, 19 nt, Homo sapiens
  misc_RNA (1)...(19): siRNA sense strand
gcagaaauugcaagucuca

SEQ ID NO: 962489 - RNA, 19 nt, Homo sapiens
  misc_RNA (1)...(19): siRNA sense strand
cagcuugggagaauacaua

SEQ ID NO: 962490 - RNA, 19 nt, Homo sapiens
  misc_RNA (1)...(19): siRNA sense strand
gacaaccaacuccuaauga

SEQ ID NO: 962491 - RNA, 19 nt, Homo sapiens
  misc_RNA (1)...(19): siRNA sense strand
agaaucacauccagacuuc

SEQ ID NO: 962492 - RNA, 19 nt, Homo sapiens
  misc_RNA (1)...(19): siRNA sense strand
gcucuacacguaaggauga

SEQ ID NO: 962493 - RNA, 19 nt, Homo sapiens
  misc_RNA (1)...(19): siRNA sense strand
gaacccacaagccagauug

SEQ ID NO: 962494 - RNA, 19 nt, Homo sapiens
  misc_RNA (1)...(19): siRNA sense strand
ugauacagcuugggagaau

SEQ ID NO: 962495 - RNA, 19 nt, Homo sapiens
  misc_RNA (1)...(19): siRNA sense strand
aaagaagaaccagaucaua

SEQ ID NO: 962496 - RNA, 19 nt, Homo sapiens
  misc_RNA (1)...(19): siRNA sense strand
acaauggaagugacuauuu

SEQ ID NO: 962497 - RNA, 19 nt, Homo sapiens
  misc_RNA (1)...(19): siRNA sense strand
ccaauuuguuacugagcua

SEQ ID NO: 962498 - RNA, 19 nt, Homo sapiens
  misc_RNA (1)...(19): siRNA sense strand
ggaauauagcaaaggauga

SEQ ID NO: 962499 - RNA, 19 nt, Homo sapiens
  misc_RNA (1)...(19): siRNA sense strand
ugauaggauugcuuuguug

SEQ ID NO: 962500 - RNA, 19 nt, Homo sapiens
  misc_RNA (1)...(19): siRNA sense strand
ucaaguuugucaagccauu

SEQ ID NO: 962501 - RNA, 19 nt, Homo sapiens
  misc_RNA (1)...(19): siRNA sense strand
gaaacaucaucuccaagac

SEQ ID NO: 962502 - RNA, 19 nt, Homo sapiens
  misc_RNA (1)...(19): siRNA sense strand
caguauacaccaaaugaaa

SEQ ID NO: 962503 - RNA, 19 nt, Homo sapiens
  misc_RNA (1)...(19): siRNA sense strand
ggaauuugauuugguuacu

SEQ ID NO: 962504 - RNA, 19 nt, Homo sapiens
  misc_RNA (1)...(19): siRNA sense strand
aaagauggguacaguaaaa

SEQ ID NO: 962505 - RNA, 19 nt, Homo sapiens
  misc_RNA (1)...(19): siRNA sense strand
gauaggauugcuuuguuga

SEQ ID NO: 962506 - RNA, 19 nt, Homo sapiens
  misc_RNA (1)...(19): siRNA sense strand
cauccagacuuccuuccaa

SEQ ID NO: 962507 - RNA, 19 nt, Homo sapiens
  misc_RNA (1)...(19): siRNA sense strand
cuaaacacaaugacaaaga

SEQ ID NO: 962508 - RNA, 19 nt, Homo sapiens
  misc_RNA (1)...(19): siRNA sense strand
gauguggcuuuccucauag

SEQ ID NO: 962509 - RNA, 19 nt, Homo sapiens
  misc_RNA (1)...(19): siRNA sense strand
ugucaaggcuacgucauau

SEQ ID NO: 962510 - RNA, 19 nt, Homo sapiens
  misc_RNA (1)...(19): siRNA sense strand
ccagaucugaauuauauug

SEQ ID NO: 962511 - RNA, 19 nt, Homo sapiens
  misc_RNA (1)...(19): siRNA sense strand
gauaugaaagccacaugug

SEQ ID NO: 962512 - RNA, 19 nt, Homo sapiens
  misc_RNA (1)...(19): siRNA sense strand
caaagaguaggaagugaug

SEQ ID NO: 962513 - RNA, 19 nt, Homo sapiens
  misc_RNA (1)...(19): siRNA sense strand
gagaaucaccuuuuguaaa

SEQ ID NO: 962514 - RNA, 19 nt, Homo sapiens
  misc_RNA (1)...(19): siRNA sense strand
gagagaaucaccuuuugua

SEQ ID NO: 962515 - RNA, 19 nt, Homo sapiens
  misc_RNA (1)...(19): siRNA sense strand
aaauggagaagcaacaauu

SEQ ID NO: 962516 - RNA, 19 nt, Homo sapiens
  misc_RNA (1)...(19): siRNA sense strand
uaugaaagccacauguguu

SEQ ID NO: 962517 - RNA, 19 nt, Homo sapiens
  misc_RNA (1)...(19): siRNA sense strand
caauuuaggaggagagaau

SEQ ID NO: 962518 - RNA, 19 nt, Homo sapiens
  misc_RNA (1)...(19): siRNA sense strand
ugacaaccaacuccuaaug

SEQ ID NO: 962519 - RNA, 19 nt, Homo sapiens
  misc_RNA (1)...(19): siRNA sense strand
agaaaacacuguauuaugg

SEQ ID NO: 962520 - RNA, 19 nt, Homo sapiens
  misc_RNA (1)...(19): siRNA sense strand
aaacacaaggucaucuuug

SEQ ID NO: 962521 - RNA, 19 nt, Homo sapiens
  misc_RNA (1)...(19): siRNA sense strand
ggucaucuuuguggucuca

SEQ ID NO: 962522 - RNA, 19 nt, Homo sapiens
  misc_RNA (1)...(19): siRNA sense strand
gaaagccacauguguuaac

SEQ ID NO: 962523 - RNA, 19 nt, Homo sapiens
  misc_RNA (1)...(19): siRNA sense strand
ccuggaauuugauuugguu

SEQ ID NO: 962524 - RNA, 19 nt, Homo sapiens
  misc_RNA (1)...(19): siRNA sense strand
gcuacccacuugaucaaca

SEQ ID NO: 962525 - RNA, 19 nt, Homo sapiens
  misc_RNA (1)...(19): siRNA sense strand
gagaacgguggcacagaaa

SEQ ID NO: 962526 - RNA, 19 nt, Homo sapiens
  misc_RNA (1)...(19): siRNA sense strand
gaauauagcaaaggaugag

SEQ ID NO: 962527 - RNA, 19 nt, Homo sapiens
  misc_RNA (1)...(19): siRNA sense strand
cuauaugccuaacacugaa

SEQ ID NO: 962528 - RNA, 19 nt, Homo sapiens
  misc_RNA (1)...(19): siRNA sense strand
aagaaccagaucauacuua

SEQ ID NO: 962529 - RNA, 19 nt, Homo sapiens
  misc_RNA (1)...(19): siRNA sense strand
uaugacaaccaacuccuaa

SEQ ID NO: 962530 - RNA, 19 nt, Homo sapiens
  misc_RNA (1)...(19): siRNA sense strand
augaaagccacauguguua

SEQ ID NO: 962531 - RNA, 19 nt, Homo sapiens
  misc_RNA (1)...(19): siRNA sense strand
uuggugagcucagugauug

SEQ ID NO: 962532 - RNA, 19 nt, Homo sapiens
  misc_RNA (1)...(19): siRNA sense strand
gccuugcaguggacaauug

SEQ ID NO: 962533 - RNA, 19 nt, Homo sapiens
  misc_RNA (1)...(19): siRNA sense strand
gaaugaagcuggcugagau

SEQ ID NO: 962534 - RNA, 19 nt, Homo sapiens
  misc_RNA (1)...(19): siRNA sense strand
gaucgugucugaugucauu

SEQ ID NO: 962535 - RNA, 19 nt, Homo sapiens
  misc_RNA (1)...(19): siRNA sense strand
ggacugacuucgagacauu

SEQ ID NO: 962536 - RNA, 19 nt, Homo sapiens
  misc_RNA (1)...(19): siRNA sense strand
gcaagcagcugaagaaucg

SEQ ID NO: 962537 - RNA, 19 nt, Homo sapiens
  misc_RNA (1)...(19): siRNA sense strand
gcucuaaucuguuuguguu

SEQ ID NO: 962538 - RNA, 19 nt, Homo sapiens
  misc_RNA (1)...(19): siRNA sense strand
gaauuggagugguggagua

SEQ ID NO: 962539 - RNA, 19 nt, Homo sapiens
  misc_RNA (1)...(19): siRNA sense strand
gaaggcaucucagugaaga

SEQ ID NO: 962540 - RNA, 19 nt, Homo sapiens
  misc_RNA (1)...(19): siRNA sense strand
ggcagaagcucuccaggaa

SEQ ID NO: 962541 - RNA, 19 nt, Homo sapiens
  misc_RNA (1)...(19): siRNA sense strand
caaagagaccuaugggauu

SEQ ID NO: 962542 - RNA, 19 nt, Homo sapiens
  misc_RNA (1)...(19): siRNA sense strand
ggaauuucaucauguccaa

SEQ ID NO: 962543 - RNA, 19 nt, Homo sapiens
  misc_RNA (1)...(19): siRNA sense strand
aaagagaccuaugggauug

SEQ ID NO: 962544 - RNA, 19 nt, Homo sapiens
  misc_RNA (1)...(19): siRNA sense strand
gaucagggugccuuucuuu

SEQ ID NO: 962545 - RNA, 19 nt, Homo sapiens
  misc_RNA (1)...(19): siRNA sense strand
ggaaaucucacguccacuu

SEQ ID NO: 962546 - RNA, 19 nt, Homo sapiens
  misc_RNA (1)...(19): siRNA sense strand
agacagagguggagcucaa

SEQ ID NO: 962547 - RNA, 19 nt, Homo sapiens
  misc_RNA (1)...(19): siRNA sense strand
gaagcuggcugagaucaag

SEQ ID NO: 962548 - RNA, 19 nt, Homo sapiens
  misc_RNA (1)...(19): siRNA sense strand
cagagacgcuguugaaacu

SEQ ID NO: 962549 - RNA, 19 nt, Homo sapiens
  misc_RNA (1)...(19): siRNA sense strand
gaaccacgaagaaugcauu

SEQ ID NO: 962550 - RNA, 19 nt, Homo sapiens
  misc_RNA (1)...(19): siRNA sense strand
ggucgugacucccgcucua

SEQ ID NO: 962551 - RNA, 19 nt, Homo sapiens
  misc_RNA (1)...(19): siRNA sense strand
gggagguggucuacuuuau

SEQ ID NO: 962552 - RNA, 19 nt, Homo sapiens
  misc_RNA (1)...(19): siRNA sense strand
gcacacagacugcguucga

SEQ ID NO: 962553 - RNA, 19 nt, Homo sapiens
  misc_RNA (1)...(19): siRNA sense strand
acagacagcuggaguggau

SEQ ID NO: 962554 - RNA, 19 nt, Homo sapiens
  misc_RNA (1)...(19): siRNA sense strand
gaucucggaggagcaauua

SEQ ID NO: 962555 - RNA, 19 nt, Homo sapiens
  misc_RNA (1)...(19): siRNA sense strand
ggaaacagggugucuuugg

SEQ ID NO: 962556 - RNA, 19 nt, Homo sapiens
  misc_RNA (1)...(19): siRNA sense strand
gggacuaugagauucuuua

SEQ ID NO: 962557 - RNA, 19 nt, Homo sapiens
  misc_RNA (1)...(19): siRNA sense strand
ggaaugaagcuggcugaga

SEQ ID NO: 962558 - RNA, 19 nt, Homo sapiens
  misc_RNA (1)...(19): siRNA sense strand
acuaugagauucuuuacug

SEQ ID NO: 962559 - RNA, 19 nt, Homo sapiens
  misc_RNA (1)...(19): siRNA sense strand
gagagaucgugucugaugu

SEQ ID NO: 962560 - RNA, 19 nt, Homo sapiens
  misc_RNA (1)...(19): siRNA sense strand
gagaucaagaguacaaaug

SEQ ID NO: 962561 - RNA, 19 nt, Homo sapiens
  misc_RNA (1)...(19): siRNA sense strand
ucuauaguguuuccaguga

SEQ ID NO: 962562 - RNA, 19 nt, Homo sapiens
  misc_RNA (1)...(19): siRNA sense strand
aacgugaucuacaucuaua

SEQ ID NO: 962563 - RNA, 19 nt, Homo sapiens
  misc_RNA (1)...(19): siRNA sense strand
caacgugaucuacaucuau

SEQ ID NO: 962564 - RNA, 19 nt, Homo sapiens
  misc_RNA (1)...(19): siRNA sense strand
cagcuggaguggauaagga

SEQ ID NO: 962565 - RNA, 19 nt, Homo sapiens
  misc_RNA (1)...(19): siRNA sense strand
gcacccagacggagacaga

SEQ ID NO: 962566 - RNA, 19 nt, Homo sapiens
  misc_RNA (1)...(19): siRNA sense strand
cugaagggcuuggcucuga

SEQ ID NO: 962567 - RNA, 19 nt, Homo sapiens
  misc_RNA (1)...(19): siRNA sense strand
gagguggucuacuuuaucg

SEQ ID NO: 962568 - RNA, 19 nt, Homo sapiens
  misc_RNA (1)...(19): siRNA sense strand
ggaucagggugccuuucuu

SEQ ID NO: 962569 - RNA, 19 nt, Homo sapiens
  misc_RNA (1)...(19): siRNA sense strand
caaggacgccagcaucuuc

SEQ ID NO: 962570 - RNA, 19 nt, Homo sapiens
  misc_RNA (1)...(19): siRNA sense strand
gaucaagaguacaaaugac

SEQ ID NO: 962571 - RNA, 19 nt, Homo sapiens
  misc_RNA (1)...(19): siRNA sense strand
uggcugagaucaagaguac

SEQ ID NO: 962572 - RNA, 19 nt, Homo sapiens
  misc_RNA (1)...(19): siRNA sense strand
gguuguaccuggccauugg

SEQ ID NO: 962573 - RNA, 19 nt, Homo sapiens
  misc_RNA (1)...(19): siRNA sense strand
cagggugccuuucuuugug

SEQ ID NO: 962574 - RNA, 19 nt, Homo sapiens
  misc_RNA (1)...(19): siRNA sense strand
gguccaaggaugggaauuu

SEQ ID NO: 962575 - RNA, 19 nt, Homo sapiens
  misc_RNA (1)...(19): siRNA sense strand
acaacgugaucuacaucua

SEQ ID NO: 962576 - RNA, 19 nt, Homo sapiens
  misc_RNA (1)...(19): siRNA sense strand
guuuaucccuugcuuugug

SEQ ID NO: 962577 - RNA, 19 nt, Homo sapiens
  misc_RNA (1)...(19): siRNA sense strand
gcugagaucaagaguacaa

SEQ ID NO: 962578 - RNA, 19 nt, Homo sapiens
  misc_RNA (1)...(19): siRNA sense strand
cagagacccucagccuuga

SEQ ID NO: 962579 - RNA, 19 nt, Homo sapiens
  misc_RNA (1)...(19): siRNA sense strand
gaaaucucacguccacuuc

SEQ ID NO: 962580 - RNA, 19 nt, Homo sapiens
  misc_RNA (1)...(19): siRNA sense strand
agagagaucgugucugaug

SEQ ID NO: 962581 - RNA, 19 nt, Homo sapiens
  misc_RNA (1)...(19): siRNA sense strand
ugaucuacaucuauagugu

SEQ ID NO: 962582 - RNA, 19 nt, Homo sapiens
  misc_RNA (1)...(19): siRNA sense strand
ggagguggucuacuuuauc

SEQ ID NO: 962583 - RNA, 19 nt, Homo sapiens
  misc_RNA (1)...(19): siRNA sense strand
gcugaagaaucgcuaugag

SEQ ID NO: 962584 - RNA, 19 nt, Homo sapiens
  misc_RNA (1)...(19): siRNA sense strand
uauaguguuuccagugaug

SEQ ID NO: 962585 - RNA, 19 nt, Homo sapiens
  misc_RNA (1)...(19): siRNA sense strand
gagaucgugucugauguca

SEQ ID NO: 962586 - RNA, 19 nt, Homo sapiens
  misc_RNA (1)...(19): siRNA sense strand
gagccuagcgggacccaau

SEQ ID NO: 962587 - RNA, 19 nt, Homo sapiens
  misc_RNA (1)...(19): siRNA sense strand
gaucuacaucuauaguguu

SEQ ID NO: 962588 - RNA, 19 nt, Homo sapiens
  misc_RNA (1)...(19): siRNA sense strand
guccaaggaugggaauuuc

SEQ ID NO: 962589 - RNA, 19 nt, Homo sapiens
  misc_RNA (1)...(19): siRNA sense strand
gcaaggacgccagcaucuu

SEQ ID NO: 962590 - RNA, 19 nt, Homo sapiens
  misc_RNA (1)...(19): siRNA sense strand
acucagagacgcuguugaa

SEQ ID NO: 962591 - RNA, 19 nt, Homo sapiens
  misc_RNA (1)...(19): siRNA sense strand
uggaaggcaucucagugaa

SEQ ID NO: 962592 - RNA, 19 nt, Homo sapiens
  misc_RNA (1)...(19): siRNA sense strand
gcacacaccccucccagaa

SEQ ID NO: 962593 - RNA, 19 nt, Homo sapiens
  misc_RNA (1)...(19): siRNA sense strand
gccauugguucccaugaca

SEQ ID NO: 962594 - RNA, 19 nt, Homo sapiens
  misc_RNA (1)...(19): siRNA sense strand
ccggaaacagggugucuuu

SEQ ID NO: 962595 - RNA, 19 nt, Homo sapiens
  misc_RNA (1)...(19): siRNA sense strand
gcucaugaagguucuaucu

SEQ ID NO: 962596 - RNA, 19 nt, Homo sapiens
  misc_RNA (1)...(19): siRNA sense strand
cagggugucuuugggaaau

SEQ ID NO: 962597 - RNA, 19 nt, Homo sapiens
  misc_RNA (1)...(19): siRNA sense strand
ggacucagagacgcuguug

SEQ ID NO: 962598 - RNA, 19 nt, Homo sapiens
  misc_RNA (1)...(19): siRNA sense strand
ccuccucccucgacguuug

SEQ ID NO: 962599 - RNA, 19 nt, Homo sapiens
  misc_RNA (1)...(19): siRNA sense strand
ggaaggcaucucagugaag

SEQ ID NO: 962600 - RNA, 19 nt, Homo sapiens
  misc_RNA (1)...(19): siRNA sense strand
agaucaagaguacaaauga

SEQ ID NO: 962601 - RNA, 19 nt, Homo sapiens
  misc_RNA (1)...(19): siRNA sense strand
gaguggauaaggauggaaa

SEQ ID NO: 962602 - RNA, 19 nt, Homo sapiens
  misc_RNA (1)...(19): siRNA sense strand
gcggagcccuucagauucc

SEQ ID NO: 962603 - RNA, 19 nt, Homo sapiens
  misc_RNA (1)...(19): siRNA sense strand
caauuuggaaggcaucuca

SEQ ID NO: 962604 - RNA, 19 nt, Homo sapiens
  misc_RNA (1)...(19): siRNA sense strand
agacagcuggaguggauaa

SEQ ID NO: 962605 - RNA, 19 nt, Homo sapiens
  misc_RNA (1)...(19): siRNA sense strand
uguugaaacugcaggagau

SEQ ID NO: 962606 - RNA, 19 nt, Homo sapiens
  misc_RNA (1)...(19): siRNA sense strand
cauucccgaucgcgcauuu

SEQ ID NO: 962607 - RNA, 19 nt, Homo sapiens
  misc_RNA (1)...(19): siRNA sense strand
ccagugauggugccaaauc

SEQ ID NO: 962608 - RNA, 19 nt, Homo sapiens
  misc_RNA (1)...(19): siRNA sense strand
ggaucucggaggagcaauu

SEQ ID NO: 962609 - RNA, 19 nt, Homo sapiens
  misc_RNA (1)...(19): siRNA sense strand
acacagagaccagagagau

SEQ ID NO: 962610 - RNA, 19 nt, Homo sapiens
  misc_RNA (1)...(19): siRNA sense strand
agguggagcucaagucauc

SEQ ID NO: 962611 - RNA, 19 nt, Homo sapiens
  misc_RNA (1)...(19): siRNA sense strand
gacucccgcucuaaucugu

SEQ ID NO: 962612 - RNA, 19 nt, Homo sapiens
  misc_RNA (1)...(19): siRNA sense strand
ucagggugccuuucuuugu

SEQ ID NO: 962613 - RNA, 19 nt, Homo sapiens
  misc_RNA (1)...(19): siRNA sense strand
ggacuaugagauucuuuac

SEQ ID NO: 962614 - RNA, 19 nt, Homo sapiens
  misc_RNA (1)...(19): siRNA sense strand
gaccagagagaucgugucu

SEQ ID NO: 962615 - RNA, 19 nt, Homo sapiens
  misc_RNA (1)...(19): siRNA sense strand
caucgucaccagugggaaa

SEQ ID NO: 962616 - RNA, 19 nt, Homo sapiens
  misc_RNA (1)...(19): siRNA sense strand
ccugugugguggugcugua

SEQ ID NO: 962617 - RNA, 19 nt, Homo sapiens
  misc_RNA (1)...(19): siRNA sense strand
cuucaucacucaucuugac

SEQ ID NO: 962618 - RNA, 19 nt, Homo sapiens
  misc_RNA (1)...(19): siRNA sense strand
ugccaaauccagccgcuuu

SEQ ID NO: 962619 - RNA, 19 nt, Homo sapiens
  misc_RNA (1)...(19): siRNA sense strand
aaaggcagcccuggcagaa

SEQ ID NO: 962620 - RNA, 19 nt, Homo sapiens
  misc_RNA (1)...(19): siRNA sense strand
ggaggugguugguuuugga

SEQ ID NO: 962621 - RNA, 19 nt, Homo sapiens
  misc_RNA (1)...(19): siRNA sense strand
ccaaggaugggaauuucau

SEQ ID NO: 962622 - RNA, 19 nt, Homo sapiens
  misc_RNA (1)...(19): siRNA sense strand
ucagagacgcuguugaaac

SEQ ID NO: 962623 - RNA, 19 nt, Homo sapiens
  misc_RNA (1)...(19): siRNA sense strand
cuacaucuauaguguuucc

SEQ ID NO: 962624 - RNA, 19 nt, Homo sapiens
  misc_RNA (1)...(19): siRNA sense strand
aaguuuaucccuugcuuug

SEQ ID NO: 962625 - RNA, 19 nt, Homo sapiens
  misc_RNA (1)...(19): siRNA sense strand
uagcgggacccaaucugaa

SEQ ID NO: 962626 - RNA, 19 nt, Homo sapiens
  misc_RNA (1)...(19): siRNA sense strand
gguucuaucuucgccuugu

SEQ ID NO: 962627 - RNA, 19 nt, Homo sapiens
  misc_RNA (1)...(19): siRNA sense strand
gaaacugcaggagauugga

SEQ ID NO: 962628 - RNA, 19 nt, Homo sapiens
  misc_RNA (1)...(19): siRNA sense strand
uaauuccaaugagcacaug

SEQ ID NO: 962629 - RNA, 19 nt, Homo sapiens
  misc_RNA (1)...(19): siRNA sense strand
gggaaugggcuaccuacac

SEQ ID NO: 962630 - RNA, 19 nt, Homo sapiens
  misc_RNA (1)...(19): siRNA sense strand
cugaagaaucgcuaugaga

SEQ ID NO: 962631 - RNA, 19 nt, Homo sapiens
  misc_RNA (1)...(19): siRNA sense strand
ccacgaagaaugcauugcu

SEQ ID NO: 962632 - RNA, 19 nt, Homo sapiens
  misc_RNA (1)...(19): siRNA sense strand
ggacgggacagugcugagu

SEQ ID NO: 962633 - RNA, 19 nt, Homo sapiens
  misc_RNA (1)...(19): siRNA sense strand
ccacgcagguguaccauga

SEQ ID NO: 962634 - RNA, 19 nt, Homo sapiens
  misc_RNA (1)...(19): siRNA sense strand
cggcugcgcuucaccaagu

SEQ ID NO: 962635 - RNA, 19 nt, Homo sapiens
  misc_RNA (1)...(19): siRNA sense strand
gcgagggcaugcaccugaa

SEQ ID NO: 962636 - RNA, 19 nt, Homo sapiens
  misc_RNA (1)...(19): siRNA sense strand
ggaaggccaccagcuauca

SEQ ID NO: 962637 - RNA, 19 nt, Homo sapiens
  misc_RNA (1)...(19): siRNA sense strand
gagcucgaguggcacaucu

SEQ ID NO: 962638 - RNA, 19 nt, Homo sapiens
  misc_RNA (1)...(19): siRNA sense strand
acgagggccuggacgacua

SEQ ID NO: 962639 - RNA, 19 nt, Homo sapiens
  misc_RNA (1)...(19): siRNA sense strand
acacggugcuggcgcugau

SEQ ID NO: 962640 - RNA, 19 nt, Homo sapiens
  misc_RNA (1)...(19): siRNA sense strand
gcuccgauggcuaccugua

SEQ ID NO: 962641 - RNA, 19 nt, Homo sapiens
  misc_RNA (1)...(19): siRNA sense strand
ugggcagggugcucucuga

SEQ ID NO: 962642 - RNA, 19 nt, Homo sapiens
  misc_RNA (1)...(19): siRNA sense strand
gaagugauauugccauuga

SEQ ID NO: 962643 - RNA, 19 nt, Homo sapiens
  misc_RNA (1)...(19): siRNA sense strand
ggacuuaaaugaaauugag

SEQ ID NO: 962644 - RNA, 19 nt, Homo sapiens
  misc_RNA (1)...(19): siRNA sense strand
gcuacuacauguacauuga

SEQ ID NO: 962645 - RNA, 19 nt, Homo sapiens
  misc_RNA (1)...(19): siRNA sense strand
gaagauacaacucaacaau

SEQ ID NO: 962646 - RNA, 19 nt, Homo sapiens
  misc_RNA (1)...(19): siRNA sense strand
gagaaacucccacuuccua

SEQ ID NO: 962647 - RNA, 19 nt, Homo sapiens
  misc_RNA (1)...(19): siRNA sense strand
aagcugaaaucaccuuuaa

SEQ ID NO: 962648 - RNA, 19 nt, Homo sapiens
  misc_RNA (1)...(19): siRNA sense strand
uacgagcacugauugaaua

SEQ ID NO: 962649 - RNA, 19 nt, Homo sapiens
  misc_RNA (1)...(19): siRNA sense strand
cgaggaguaucaauaagaa

SEQ ID NO: 962650 - RNA, 19 nt, Homo sapiens
  misc_RNA (1)...(19): siRNA sense strand
caacaaucaucaggauauu

SEQ ID NO: 962651 - RNA, 19 nt, Homo sapiens
  misc_RNA (1)...(19): siRNA sense strand
gcugaaaucaccuuuaaga

SEQ ID NO: 962652 - RNA, 19 nt, Homo sapiens
  misc_RNA (1)...(19): siRNA sense strand
agauacaacucaacaauca

SEQ ID NO: 962653 - RNA, 19 nt, Homo sapiens
  misc_RNA (1)...(19): siRNA sense strand
ucugaggacuuaaaugaaa

SEQ ID NO: 962654 - RNA, 19 nt, Homo sapiens
  misc_RNA (1)...(19): siRNA sense strand
gcugaguguuuaucugaaa

SEQ ID NO: 962655 - RNA, 19 nt, Homo sapiens
  misc_RNA (1)...(19): siRNA sense strand
ggaagaagacagugaagag

SEQ ID NO: 962656 - RNA, 19 nt, Homo sapiens
  misc_RNA (1)...(19): siRNA sense strand
cugcucaucuucagagaaa

SEQ ID NO: 962657 - RNA, 19 nt, Homo sapiens
  misc_RNA (1)...(19): siRNA sense strand
gauauucugaggacuuaaa

SEQ ID NO: 962658 - RNA, 19 nt, Homo sapiens
  misc_RNA (1)...(19): siRNA sense strand
ugaaaucaccuuuaagaag

SEQ ID NO: 962659 - RNA, 19 nt, Homo sapiens
  misc_RNA (1)...(19): siRNA sense strand
gagaggcaacaccagauaa

SEQ ID NO: 962660 - RNA, 19 nt, Homo sapiens
  misc_RNA (1)...(19): siRNA sense strand
cgagcaagaugaauguaca

SEQ ID NO: 962661 - RNA, 19 nt, Homo sapiens
  misc_RNA (1)...(19): siRNA sense strand
guggagaaauggaagauac

SEQ ID NO: 962662 - RNA, 19 nt, Homo sapiens
  misc_RNA (1)...(19): siRNA sense strand
guacauuuacucaggagaa

SEQ ID NO: 962663 - RNA, 19 nt, Homo sapiens
  misc_RNA (1)...(19): siRNA sense strand
ucaacaaucaucaggauau

SEQ ID NO: 962664 - RNA, 19 nt, Homo sapiens
  misc_RNA (1)...(19): siRNA sense strand
gaguaucaauaagaaguga

SEQ ID NO: 962665 - RNA, 19 nt, Homo sapiens
  misc_RNA (1)...(19): siRNA sense strand
ggaugacauuacaauacaa

SEQ ID NO: 962666 - RNA, 19 nt, Homo sapiens
  misc_RNA (1)...(19): siRNA sense strand
gagcacugauugaauacag

SEQ ID NO: 962667 - RNA, 19 nt, Homo sapiens
  misc_RNA (1)...(19): siRNA sense strand
uggaugacauuacaauaca

SEQ ID NO: 962668 - RNA, 19 nt, Homo sapiens
  misc_RNA (1)...(19): siRNA sense strand
caagcugaaaucaccuuua

SEQ ID NO: 962669 - RNA, 19 nt, Homo sapiens
  misc_RNA (1)...(19): siRNA sense strand
ugccauugaugauguuaaa

SEQ ID NO: 962670 - RNA, 19 nt, Homo sapiens
  misc_RNA (1)...(19): siRNA sense strand
ugaagccauucgaggagua

SEQ ID NO: 962671 - RNA, 19 nt, Homo sapiens
  misc_RNA (1)...(19): siRNA sense strand
gaagaagacagugaagagu

SEQ ID NO: 962672 - RNA, 19 nt, Homo sapiens
  misc_RNA (1)...(19): siRNA sense strand
ccaaagggagaucacacua

SEQ ID NO: 962673 - RNA, 19 nt, Homo sapiens
  misc_RNA (1)...(19): siRNA sense strand
aggauauucugaggacuua

SEQ ID NO: 962674 - RNA, 19 nt, Homo sapiens
  misc_RNA (1)...(19): siRNA sense strand
aggcaacaccagauaauuu

SEQ ID NO: 962675 - RNA, 19 nt, Homo sapiens
  misc_RNA (1)...(19): siRNA sense strand
aaagggagaucacacuacu

SEQ ID NO: 962676 - RNA, 19 nt, Homo sapiens
  misc_RNA (1)...(19): siRNA sense strand
aaacacugcuugaccuuuu

SEQ ID NO: 962677 - RNA, 19 nt, Homo sapiens
  misc_RNA (1)...(19): siRNA sense strand
ugagaggcaacaccagaua

SEQ ID NO: 962678 - RNA, 19 nt, Homo sapiens
  misc_RNA (1)...(19): siRNA sense strand
ggaagauacaacucaacaa

SEQ ID NO: 962679 - RNA, 19 nt, Homo sapiens
  misc_RNA (1)...(19): siRNA sense strand
gaaacucccacuuccuaca

SEQ ID NO: 962680 - RNA, 19 nt, Homo sapiens
  misc_RNA (1)...(19): siRNA sense strand
aagaagugauauugccauu

SEQ ID NO: 962681 - RNA, 19 nt, Homo sapiens
  misc_RNA (1)...(19): siRNA sense strand
gauauugccauugaugaug

SEQ ID NO: 962682 - RNA, 19 nt, Homo sapiens
  misc_RNA (1)...(19): siRNA sense strand
ggagaaauggaagauacaa

SEQ ID NO: 962683 - RNA, 19 nt, Homo sapiens
  misc_RNA (1)...(19): siRNA sense strand
gaggcaacaccagauaauu

SEQ ID NO: 962684 - RNA, 19 nt, Homo sapiens
  misc_RNA (1)...(19): siRNA sense strand
uugggaagcugcucaucuu

SEQ ID NO: 962685 - RNA, 19 nt, Homo sapiens
  misc_RNA (1)...(19): siRNA sense strand
gaaauggaagauacaacuc

SEQ ID NO: 962686 - RNA, 19 nt, Homo sapiens
  misc_RNA (1)...(19): siRNA sense strand
aaaggaagaagacagugaa

SEQ ID NO: 962687 - RNA, 19 nt, Homo sapiens
  misc_RNA (1)...(19): siRNA sense strand
cauucgaggaguaucaaua

SEQ ID NO: 962688 - RNA, 19 nt, Homo sapiens
  misc_RNA (1)...(19): siRNA sense strand
agaguguacuuucgagcaa

SEQ ID NO: 962689 - RNA, 19 nt, Homo sapiens
  misc_RNA (1)...(19): siRNA sense strand
gcuacgagcacugauugaa

SEQ ID NO: 962690 - RNA, 19 nt, Homo sapiens
  misc_RNA (1)...(19): siRNA sense strand
gaggugaacagagcauuuc

SEQ ID NO: 962691 - RNA, 19 nt, Homo sapiens
  misc_RNA (1)...(19): siRNA sense strand
guacuuucgagcaagauga

SEQ ID NO: 962692 - RNA, 19 nt, Homo sapiens
  misc_RNA (1)...(19): siRNA sense strand
uacauuuacucaggagaaa

SEQ ID NO: 962693 - RNA, 19 nt, Homo sapiens
  misc_RNA (1)...(19): siRNA sense strand
aauggaagauacaacucaa

SEQ ID NO: 962694 - RNA, 19 nt, Homo sapiens
  misc_RNA (1)...(19): siRNA sense strand
gcaagcugaaaucaccuuu

SEQ ID NO: 962695 - RNA, 19 nt, Homo sapiens
  misc_RNA (1)...(19): siRNA sense strand
ggaguaucaauaagaagug

SEQ ID NO: 962696 - RNA, 19 nt, Homo sapiens
  misc_RNA (1)...(19): siRNA sense strand
acucaacaaucaucaggau

SEQ ID NO: 962697 - RNA, 19 nt, Homo sapiens
  misc_RNA (1)...(19): siRNA sense strand
acauugaggccucccauau

SEQ ID NO: 962698 - RNA, 19 nt, Homo sapiens
  misc_RNA (1)...(19): siRNA sense strand
auucugaggacuuaaauga

SEQ ID NO: 962699 - RNA, 19 nt, Homo sapiens
  misc_RNA (1)...(19): siRNA sense strand
caaagggagaucacacuac

SEQ ID NO: 962700 - RNA, 19 nt, Homo sapiens
  misc_RNA (1)...(19): siRNA sense strand
ucgaggaguaucaauaaga

SEQ ID NO: 962701 - RNA, 19 nt, Homo sapiens
  misc_RNA (1)...(19): siRNA sense strand
gagcauuuccuggcuacga

SEQ ID NO: 962702 - RNA, 19 nt, Homo sapiens
  misc_RNA (1)...(19): siRNA sense strand
cauugaggccucccauaug

SEQ ID NO: 962703 - RNA, 19 nt, Homo sapiens
  misc_RNA (1)...(19): siRNA sense strand
gugauauugccauugauga

SEQ ID NO: 962704 - RNA, 19 nt, Homo sapiens
  misc_RNA (1)...(19): siRNA sense strand
auucgaggaguaucaauaa

SEQ ID NO: 962705 - RNA, 19 nt, Homo sapiens
  misc_RNA (1)...(19): siRNA sense strand
cuacgagcacugauugaau

SEQ ID NO: 962706 - RNA, 19 nt, Homo sapiens
  misc_RNA (1)...(19): siRNA sense strand
gaagaggugaacagagcau

SEQ ID NO: 962707 - RNA, 19 nt, Homo sapiens
  misc_RNA (1)...(19): siRNA sense strand
caggauauucugaggacuu

SEQ ID NO: 962708 - RNA, 19 nt, Homo sapiens
  misc_RNA (1)...(19): siRNA sense strand
agaagcccaugccuaccaa

SEQ ID NO: 962709 - RNA, 19 nt, Homo sapiens
  misc_RNA (1)...(19): siRNA sense strand
gaggagaagaggugaacag

SEQ ID NO: 962710 - RNA, 19 nt, Homo sapiens
  misc_RNA (1)...(19): siRNA sense strand
cugaggacuuaaaugaaau

SEQ ID NO: 962711 - RNA, 19 nt, Homo sapiens
  misc_RNA (1)...(19): siRNA sense strand
aaauggaagauacaacuca

SEQ ID NO: 962712 - RNA, 19 nt, Homo sapiens
  misc_RNA (1)...(19): siRNA sense strand
agaggugaacagagcauuu

SEQ ID NO: 962713 - RNA, 19 nt, Homo sapiens
  misc_RNA (1)...(19): siRNA sense strand
acaaucaucaggauauucu

SEQ ID NO: 962714 - RNA, 19 nt, Homo sapiens
  misc_RNA (1)...(19): siRNA sense strand
agaaauggaagauacaacu

SEQ ID NO: 962715 - RNA, 19 nt, Homo sapiens
  misc_RNA (1)...(19): siRNA sense strand
gaagccauucgaggaguau

SEQ ID NO: 962716 - RNA, 19 nt, Homo sapiens
  misc_RNA (1)...(19): siRNA sense strand
ggcaacaccagauaauuuu

SEQ ID NO: 962717 - RNA, 19 nt, Homo sapiens
  misc_RNA (1)...(19): siRNA sense strand
ccuggaugacauuacaaua

SEQ ID NO: 962718 - RNA, 19 nt, Homo sapiens
  misc_RNA (1)...(19): siRNA sense strand
cugcugaguguuuaucuga

SEQ ID NO: 962719 - RNA, 19 nt, Homo sapiens
  misc_RNA (1)...(19): siRNA sense strand
cugaaaucaccuuuaagaa

SEQ ID NO: 962720 - RNA, 19 nt, Homo sapiens
  misc_RNA (1)...(19): siRNA sense strand
auauugccauugaugaugu

SEQ ID NO: 962721 - RNA, 19 nt, Homo sapiens
  misc_RNA (1)...(19): siRNA sense strand
ugaagaagcuaaugaagaa

SEQ ID NO: 962722 - RNA, 19 nt, Homo sapiens
  misc_RNA (1)...(19): siRNA sense strand
gauggaaauugacucguuu

SEQ ID NO: 962723 - RNA, 19 nt, Homo sapiens
  misc_RNA (1)...(19): siRNA sense strand
gggaugggcugauggaaau

SEQ ID NO: 962724 - RNA, 19 nt, Homo sapiens
  misc_RNA (1)...(19): siRNA sense strand
gaaccugacauuucgagaa

SEQ ID NO: 962725 - RNA, 19 nt, Homo sapiens
  misc_RNA (1)...(19): siRNA sense strand
gcaaacuaauccucuucuu

SEQ ID NO: 962726 - RNA, 19 nt, Homo sapiens
  misc_RNA (1)...(19): siRNA sense strand
gaucccaguuuauccuuug

SEQ ID NO: 962727 - RNA, 19 nt, Homo sapiens
  misc_RNA (1)...(19): siRNA sense strand
ggagaagaacugccagguu

SEQ ID NO: 962728 - RNA, 19 nt, Homo sapiens
  misc_RNA (1)...(19): siRNA sense strand
caaacuaauccucuucuug

SEQ ID NO: 962729 - RNA, 19 nt, Homo sapiens
  misc_RNA (1)...(19): siRNA sense strand
gugaagaagcuaaugaaga

SEQ ID NO: 962730 - RNA, 19 nt, Homo sapiens
  misc_RNA (1)...(19): siRNA sense strand
ugauggaaauugacucguu

SEQ ID NO: 962731 - RNA, 19 nt, Homo sapiens
  misc_RNA (1)...(19): siRNA sense strand
ccacuucuaugccauggau

SEQ ID NO: 962732 - RNA, 19 nt, Homo sapiens
  misc_RNA (1)...(19): siRNA sense strand
caguuuauccuuugagauu

SEQ ID NO: 962733 - RNA, 19 nt, Homo sapiens
  misc_RNA (1)...(19): siRNA sense strand
augaagaaguggucuguga

SEQ ID NO: 962734 - RNA, 19 nt, Homo sapiens
  misc_RNA (1)...(19): siRNA sense strand
ccuuugagauucagcagaa

SEQ ID NO: 962735 - RNA, 19 nt, Homo sapiens
  misc_RNA (1)...(19): siRNA sense strand
ggauuucaaccacuucuau

SEQ ID NO: 962736 - RNA, 19 nt, Homo sapiens
  misc_RNA (1)...(19): siRNA sense strand
gaccaaacccaagcuauca

SEQ ID NO: 962737 - RNA, 19 nt, Homo sapiens
  misc_RNA (1)...(19): siRNA sense strand
ucaaacgccucgccaggau

SEQ ID NO: 962738 - RNA, 19 nt, Homo sapiens
  misc_RNA (1)...(19): siRNA sense strand
ggaucuccuuggugaagaa

SEQ ID NO: 962739 - RNA, 19 nt, Homo sapiens
  misc_RNA (1)...(19): siRNA sense strand
guucauaggcuggcacuga

SEQ ID NO: 962740 - RNA, 19 nt, Homo sapiens
  misc_RNA (1)...(19): siRNA sense strand
acaagugugcgcaaacuaa

SEQ ID NO: 962741 - RNA, 19 nt, Homo sapiens
  misc_RNA (1)...(19): siRNA sense strand
gcugggauccgcuacuuug

SEQ ID NO: 962742 - RNA, 19 nt, Homo sapiens
  misc_RNA (1)...(19): siRNA sense strand
ggucugggaugggcugaug

SEQ ID NO: 962743 - RNA, 19 nt, Homo sapiens
  misc_RNA (1)...(19): siRNA sense strand
ggagaucuacuucauccau

SEQ ID NO: 962744 - RNA, 19 nt, Homo sapiens
  misc_RNA (1)...(19): siRNA sense strand
caggaggccuuuggaaaca

SEQ ID NO: 962745 - RNA, 19 nt, Homo sapiens
  misc_RNA (1)...(19): siRNA sense strand
gaacucugugggagaagaa

SEQ ID NO: 962746 - RNA, 19 nt, Homo sapiens
  misc_RNA (1)...(19): siRNA sense strand
ccaaacccaagcuaucaaa

SEQ ID NO: 962747 - RNA, 19 nt, Homo sapiens
  misc_RNA (1)...(19): siRNA sense strand
caucggaggucugcaaugc

SEQ ID NO: 962748 - RNA, 19 nt, Homo sapiens
  misc_RNA (1)...(19): siRNA sense strand
gaagaaguggucugugacu

SEQ ID NO: 962749 - RNA, 19 nt, Homo sapiens
  misc_RNA (1)...(19): siRNA sense strand
ccugcaguguggaaaguuu

SEQ ID NO: 962750 - RNA, 19 nt, Homo sapiens
  misc_RNA (1)...(19): siRNA sense strand
ggaggccuuuggaaacaag

SEQ ID NO: 962751 - RNA, 19 nt, Homo sapiens
  misc_RNA (1)...(19): siRNA sense strand
cgaacucugugggagaaga

SEQ ID NO: 962752 - RNA, 19 nt, Homo sapiens
  misc_RNA (1)...(19): siRNA sense strand
guuuauccuuugagauuca

SEQ ID NO: 962753 - RNA, 19 nt, Homo sapiens
  misc_RNA (1)...(19): siRNA sense strand
gcuacuggguggaugaaaa

SEQ ID NO: 962754 - RNA, 19 nt, Homo sapiens
  misc_RNA (1)...(19): siRNA sense strand
caagugugcgcaaacuaau

SEQ ID NO: 962755 - RNA, 19 nt, Homo sapiens
  misc_RNA (1)...(19): siRNA sense strand
ugagacccaucacaaaugc

SEQ ID NO: 962756 - RNA, 19 nt, Homo sapiens
  misc_RNA (1)...(19): siRNA sense strand
gcaaucccaggcucacaug

SEQ ID NO: 962757 - RNA, 19 nt, Homo sapiens
  misc_RNA (1)...(19): siRNA sense strand
gcgugugucuuccaaacca

SEQ ID NO: 962758 - RNA, 19 nt, Homo sapiens
  misc_RNA (1)...(19): siRNA sense strand
ugaccaaacccaagcuauc

SEQ ID NO: 962759 - RNA, 19 nt, Homo sapiens
  misc_RNA (1)...(19): siRNA sense strand
agaagcuaaugaagaagug

SEQ ID NO: 962760 - RNA, 19 nt, Homo sapiens
  misc_RNA (1)...(19): siRNA sense strand
ccaggaggccuuuggaaac

SEQ ID NO: 962761 - RNA, 19 nt, Homo sapiens
  misc_RNA (1)...(19): siRNA sense strand
caucaucggaggucugcaa

SEQ ID NO: 962762 - RNA, 19 nt, Homo sapiens
  misc_RNA (1)...(19): siRNA sense strand
aagcugggauccgcuacuu

SEQ ID NO: 962763 - RNA, 19 nt, Homo sapiens
  misc_RNA (1)...(19): siRNA sense strand
ugaucccaguuuauccuuu

SEQ ID NO: 962764 - RNA, 19 nt, Homo sapiens
  misc_RNA (1)...(19): siRNA sense strand
gcgcaaacuaauccucuuc

SEQ ID NO: 962765 - RNA, 19 nt, Homo sapiens
  misc_RNA (1)...(19): siRNA sense strand
gauuucaaccacuucuaug

SEQ ID NO: 962766 - RNA, 19 nt, Homo sapiens
  misc_RNA (1)...(19): siRNA sense strand
gaugggcugauggaaauug

SEQ ID NO: 962767 - RNA, 19 nt, Homo sapiens
  misc_RNA (1)...(19): siRNA sense strand
agaaguggucugugacuca

SEQ ID NO: 962768 - RNA, 19 nt, Homo sapiens
  misc_RNA (1)...(19): siRNA sense strand
ccacugucccuucuacaag

SEQ ID NO: 962769 - RNA, 19 nt, Homo sapiens
  misc_RNA (1)...(19): siRNA sense strand
gaccaggagaucuacuuca

SEQ ID NO: 962770 - RNA, 19 nt, Homo sapiens
  misc_RNA (1)...(19): siRNA sense strand
cuaccacugucccuucuac

SEQ ID NO: 962771 - RNA, 19 nt, Homo sapiens
  misc_RNA (1)...(19): siRNA sense strand
gccagguucuuauuuucua

SEQ ID NO: 962772 - RNA, 19 nt, Homo sapiens
  misc_RNA (1)...(19): siRNA sense strand
ucacaaaugccugguucug

SEQ ID NO: 962773 - RNA, 19 nt, Homo sapiens
  misc_RNA (1)...(19): siRNA sense strand
cccaguuuauccuuugaga

SEQ ID NO: 962774 - RNA, 19 nt, Homo sapiens
  misc_RNA (1)...(19): siRNA sense strand
aucccaggcucacaugauu

SEQ ID NO: 962775 - RNA, 19 nt, Homo sapiens
  misc_RNA (1)...(19): siRNA sense strand
gaacaugccuguauuaagg

SEQ ID NO: 962776 - RNA, 19 nt, Homo sapiens
  misc_RNA (1)...(19): siRNA sense strand
guccagaucuccacucuua

SEQ ID NO: 962777 - RNA, 19 nt, Homo sapiens
  misc_RNA (1)...(19): siRNA sense strand
gcagaaagguccuggaauc

SEQ ID NO: 962778 - RNA, 19 nt, Homo sapiens
  misc_RNA (1)...(19): siRNA sense strand
caagagaacuacauagaag

SEQ ID NO: 962779 - RNA, 19 nt, Homo sapiens
  misc_RNA (1)...(19): siRNA sense strand
agaagaggcugcagcaauu

SEQ ID NO: 962780 - RNA, 19 nt, Homo sapiens
  misc_RNA (1)...(19): siRNA sense strand
aagaagaaaugcaagauga

SEQ ID NO: 962781 - RNA, 19 nt, Homo sapiens
  misc_RNA (1)...(19): siRNA sense strand
ggagaacaugccuguauua

SEQ ID NO: 962782 - RNA, 19 nt, Homo sapiens
  misc_RNA (1)...(19): siRNA sense strand
gcaaagguucagagaauuu

SEQ ID NO: 962783 - RNA, 19 nt, Homo sapiens
  misc_RNA (1)...(19): siRNA sense strand
gagaauuuauugaccaguu

SEQ ID NO: 962784 - RNA, 19 nt, Homo sapiens
  misc_RNA (1)...(19): siRNA sense strand
ugaaaugcaugcaaagguu

SEQ ID NO: 962785 - RNA, 19 nt, Homo sapiens
  misc_RNA (1)...(19): siRNA sense strand
gccaaaaucugguuaauga

SEQ ID NO: 962786 - RNA, 19 nt, Homo sapiens
  misc_RNA (1)...(19): siRNA sense strand
gcagcugaaugccaagauu

SEQ ID NO: 962787 - RNA, 19 nt, Homo sapiens
  misc_RNA (1)...(19): siRNA sense strand
ccgacaagauucagaagaa

SEQ ID NO: 962788 - RNA, 19 nt, Homo sapiens
  misc_RNA (1)...(19): siRNA sense strand
gaggagaacaugccuguau

SEQ ID NO: 962789 - RNA, 19 nt, Homo sapiens
  misc_RNA (1)...(19): siRNA sense strand
gaagaauccaagagaacua

SEQ ID NO: 962790 - RNA, 19 nt, Homo sapiens
  misc_RNA (1)...(19): siRNA sense strand
gagaacaugccuguauuaa

SEQ ID NO: 962791 - RNA, 19 nt, Homo sapiens
  misc_RNA (1)...(19): siRNA sense strand
cccgagaggucauauuuga

SEQ ID NO: 962792 - RNA, 19 nt, Homo sapiens
  misc_RNA (1)...(19): siRNA sense strand
caaagguucagagaauuua

SEQ ID NO: 962793 - RNA, 19 nt, Homo sapiens
  misc_RNA (1)...(19): siRNA sense strand
ggucauauuugaggauguu

SEQ ID NO: 962794 - RNA, 19 nt, Homo sapiens
  misc_RNA (1)...(19): siRNA sense strand
gccaacagccuucauacaa

SEQ ID NO: 962795 - RNA, 19 nt, Homo sapiens
  misc_RNA (1)...(19): siRNA sense strand
gaagaugcaugccaaaauc

SEQ ID NO: 962796 - RNA, 19 nt, Homo sapiens
  misc_RNA (1)...(19): siRNA sense strand
gaccaugaguauuccauca

SEQ ID NO: 962797 - RNA, 19 nt, Homo sapiens
  misc_RNA (1)...(19): siRNA sense strand
ugaacuuccugagcacuua

SEQ ID NO: 962798 - RNA, 19 nt, Homo sapiens
  misc_RNA (1)...(19): siRNA sense strand
ccaagagaacuacauagaa

SEQ ID NO: 962799 - RNA, 19 nt, Homo sapiens
  misc_RNA (1)...(19): siRNA sense strand
caagcaaaaugaagacuuu

SEQ ID NO: 962800 - RNA, 19 nt, Homo sapiens
  misc_RNA (1)...(19): siRNA sense strand
ccaacagccuucauacaag

SEQ ID NO: 962801 - RNA, 19 nt, Homo sapiens
  misc_RNA (1)...(19): siRNA sense strand
caagccaacagccuucaua

SEQ ID NO: 962802 - RNA, 19 nt, Homo sapiens
  misc_RNA (1)...(19): siRNA sense strand
ucaucgacaucuuggagua

SEQ ID NO: 962803 - RNA, 19 nt, Homo sapiens
  misc_RNA (1)...(19): siRNA sense strand
aaacccagcgucccuauga

SEQ ID NO: 962804 - RNA, 19 nt, Homo sapiens
  misc_RNA (1)...(19): siRNA sense strand
gccgaagaauccaagagaa

SEQ ID NO: 962805 - RNA, 19 nt, Homo sapiens
  misc_RNA (1)...(19): siRNA sense strand
augcaaagguucagagaau

SEQ ID NO: 962806 - RNA, 19 nt, Homo sapiens
  misc_RNA (1)...(19): siRNA sense strand
gcaauugaaaucugagcuu

SEQ ID NO: 962807 - RNA, 19 nt, Homo sapiens
  misc_RNA (1)...(19): siRNA sense strand
aaaugaagacuuugacuag

SEQ ID NO: 962808 - RNA, 19 nt, Homo sapiens
  misc_RNA (1)...(19): siRNA sense strand
cuacagaagaugugggaaa

SEQ ID NO: 962809 - RNA, 19 nt, Homo sapiens
  misc_RNA (1)...(19): siRNA sense strand
gcgcagaaagguccuggaa

SEQ ID NO: 962810 - RNA, 19 nt, Homo sapiens
  misc_RNA (1)...(19): siRNA sense strand
gaaaagaagaaaugcaaga

SEQ ID NO: 962811 - RNA, 19 nt, Homo sapiens
  misc_RNA (1)...(19): siRNA sense strand
gaagaggcugcagcaauug

SEQ ID NO: 962812 - RNA, 19 nt, Homo sapiens
  misc_RNA (1)...(19): siRNA sense strand
gaccaucaucgacaucuug

SEQ ID NO: 962813 - RNA, 19 nt, Homo sapiens
  misc_RNA (1)...(19): siRNA sense strand
gacaagauucagaagaaga

SEQ ID NO: 962814 - RNA, 19 nt, Homo sapiens
  misc_RNA (1)...(19): siRNA sense strand
ccagaucuccacucuuaug

SEQ ID NO: 962815 - RNA, 19 nt, Homo sapiens
  misc_RNA (1)...(19): siRNA sense strand
aggagaacaugccuguauu

SEQ ID NO: 962816 - RNA, 19 nt, Homo sapiens
  misc_RNA (1)...(19): siRNA sense strand
gaaaccaagccaucuacuc

SEQ ID NO: 962817 - RNA, 19 nt, Homo sapiens
  misc_RNA (1)...(19): siRNA sense strand
cuacauagaaggcggaagu

SEQ ID NO: 962818 - RNA, 19 nt, Homo sapiens
  misc_RNA (1)...(19): siRNA sense strand
gaauuuauugaccaguuug

SEQ ID NO: 962819 - RNA, 19 nt, Homo sapiens
  misc_RNA (1)...(19): siRNA sense strand
cgacaagauucagaagaag

SEQ ID NO: 962820 - RNA, 19 nt, Homo sapiens
  misc_RNA (1)...(19): siRNA sense strand
agaaaugcaagaugagcua

SEQ ID NO: 962821 - RNA, 19 nt, Homo sapiens
  misc_RNA (1)...(19): siRNA sense strand
aaaccaagccaucuacucu

SEQ ID NO: 962822 - RNA, 19 nt, Homo sapiens
  misc_RNA (1)...(19): siRNA sense strand
gaggcucuccuacagaaga

SEQ ID NO: 962823 - RNA, 19 nt, Homo sapiens
  misc_RNA (1)...(19): siRNA sense strand
ggaaacccagcgucccuau

SEQ ID NO: 962824 - RNA, 19 nt, Homo sapiens
  misc_RNA (1)...(19): siRNA sense strand
aaagaagaaaugcaagaug

SEQ ID NO: 962825 - RNA, 19 nt, Homo sapiens
  misc_RNA (1)...(19): siRNA sense strand
caggaaaccaagccaucua

SEQ ID NO: 962826 - RNA, 19 nt, Homo sapiens
  misc_RNA (1)...(19): siRNA sense strand
ucggugagaugcgcagaaa

SEQ ID NO: 962827 - RNA, 19 nt, Homo sapiens
  misc_RNA (1)...(19): siRNA sense strand
aauccaagagaacuacaua

SEQ ID NO: 962828 - RNA, 19 nt, Homo sapiens
  misc_RNA (1)...(19): siRNA sense strand
ccaugaguauuccaucaag

SEQ ID NO: 962829 - RNA, 19 nt, Homo sapiens
  misc_RNA (1)...(19): siRNA sense strand
gaaaugcaagaugagcuau

SEQ ID NO: 962830 - RNA, 19 nt, Homo sapiens
  misc_RNA (1)...(19): siRNA sense strand
aagaagaggcugcagcaau

SEQ ID NO: 962831 - RNA, 19 nt, Homo sapiens
  misc_RNA (1)...(19): siRNA sense strand
acaagauucagaagaagaa

SEQ ID NO: 962832 - RNA, 19 nt, Homo sapiens
  misc_RNA (1)...(19): siRNA sense strand
aguuccagguuccggauua

SEQ ID NO: 962833 - RNA, 19 nt, Homo sapiens
  misc_RNA (1)...(19): siRNA sense strand
ggaguacucaaacaagaag

SEQ ID NO: 962834 - RNA, 19 nt, Homo sapiens
  misc_RNA (1)...(19): siRNA sense strand
ugaaugccaagauugagaa

SEQ ID NO: 962835 - RNA, 19 nt, Homo sapiens
  misc_RNA (1)...(19): siRNA sense strand
ggugagaugcgcagaaagg

SEQ ID NO: 962836 - RNA, 19 nt, Homo sapiens
  misc_RNA (1)...(19): siRNA sense strand
aguauuccaucaagucugu

SEQ ID NO: 962837 - RNA, 19 nt, Homo sapiens
  misc_RNA (1)...(19): siRNA sense strand
cagcugaaugccaagauug

SEQ ID NO: 962838 - RNA, 19 nt, Homo sapiens
  misc_RNA (1)...(19): siRNA sense strand
aagagccacuacccuucua

SEQ ID NO: 962839 - RNA, 19 nt, Homo sapiens
  misc_RNA (1)...(19): siRNA sense strand
ugcaaagguucagagaauu

SEQ ID NO: 962840 - RNA, 19 nt, Homo sapiens
  misc_RNA (1)...(19): siRNA sense strand
gcaugcaaagguucagaga

SEQ ID NO: 962841 - RNA, 19 nt, Homo sapiens
  misc_RNA (1)...(19): siRNA sense strand
uuccugaaaugcaugcaaa

SEQ ID NO: 962842 - RNA, 19 nt, Homo sapiens
  misc_RNA (1)...(19): siRNA sense strand
uacagaagaugugggaaag

SEQ ID NO: 962843 - RNA, 19 nt, Homo sapiens
  misc_RNA (1)...(19): siRNA sense strand
gaaacccagcgucccuaug

SEQ ID NO: 962844 - RNA, 19 nt, Homo sapiens
  misc_RNA (1)...(19): siRNA sense strand
uccaagagaacuacauaga

SEQ ID NO: 962845 - RNA, 19 nt, Homo sapiens
  misc_RNA (1)...(19): siRNA sense strand
guucagagaauuuauugac

SEQ ID NO: 962846 - RNA, 19 nt, Homo sapiens
  misc_RNA (1)...(19): siRNA sense strand
gcaggaaaccaagccaucu

SEQ ID NO: 962847 - RNA, 19 nt, Homo sapiens
  misc_RNA (1)...(19): siRNA sense strand
ugcagcaauugaaaucuga

SEQ ID NO: 962848 - RNA, 19 nt, Homo sapiens
  misc_RNA (1)...(19): siRNA sense strand
uuggaguacucaaacaaga

SEQ ID NO: 962849 - RNA, 19 nt, Homo sapiens
  misc_RNA (1)...(19): siRNA sense strand
cgaccaucaucgacaucuu

SEQ ID NO: 962850 - RNA, 19 nt, Homo sapiens
  misc_RNA (1)...(19): siRNA sense strand
ggaagaugcaugccaaaau

SEQ ID NO: 962851 - RNA, 19 nt, Homo sapiens
  misc_RNA (1)...(19): siRNA sense strand
guuggacccugggaagaug

SEQ ID NO: 962852 - RNA, 19 nt, Homo sapiens
  misc_RNA (1)...(19): siRNA sense strand
uggaugaccucggugagau

SEQ ID NO: 962853 - RNA, 19 nt, Homo sapiens
  misc_RNA (1)...(19): siRNA sense strand
ugagaagacccaggaggaa

SEQ ID NO: 962854 - RNA, 19 nt, Homo sapiens
  misc_RNA (1)...(19): siRNA sense strand
gggaagaaaagaagaaaug

SEQ ID NO: 962855 - RNA, 19 nt, Homo sapiens
  misc_RNA (1)...(19): siRNA sense strand
gagcuccgaagccgugaga

SEQ ID NO: 962856 - RNA, 19 nt, Homo sapiens
  misc_RNA (1)...(19): siRNA sense strand
cugcagcaauugaaaucug

SEQ ID NO: 962857 - RNA, 19 nt, Homo sapiens
  misc_RNA (1)...(19): siRNA sense strand
gaggcugcagcaauugaaa

SEQ ID NO: 962858 - RNA, 19 nt, Homo sapiens
  misc_RNA (1)...(19): siRNA sense strand
gaagacccaggaggaagug

SEQ ID NO: 962859 - RNA, 19 nt, Homo sapiens
  misc_RNA (1)...(19): siRNA sense strand
agauucagaagaagaagaa

SEQ ID NO: 962860 - RNA, 19 nt, Homo sapiens
  misc_RNA (1)...(19): siRNA sense strand
gcaggcagagcagcugaau

SEQ ID NO: 962861 - RNA, 19 nt, Homo sapiens
  misc_RNA (1)...(19): siRNA sense strand
caugaguauuccaucaagu

SEQ ID NO: 962862 - RNA, 19 nt, Homo sapiens
  misc_RNA (1)...(19): siRNA sense strand
guuccagguuccggauuau

SEQ ID NO: 962863 - RNA, 19 nt, Homo sapiens
  misc_RNA (1)...(19): siRNA sense strand
gaacaggccuauucucuag

SEQ ID NO: 962864 - RNA, 19 nt, Homo sapiens
  misc_RNA (1)...(19): siRNA sense strand
gggagaagauguuugaguu

SEQ ID NO: 962865 - RNA, 19 nt, Homo sapiens
  misc_RNA (1)...(19): siRNA sense strand
gaacauuacccugaacuuu

SEQ ID NO: 962866 - RNA, 19 nt, Homo sapiens
  misc_RNA (1)...(19): siRNA sense strand
gcacuuaacuaugguuuua

SEQ ID NO: 962867 - RNA, 19 nt, Homo sapiens
  misc_RNA (1)...(19): siRNA sense strand
gaaaucacacguuuguuga

SEQ ID NO: 962868 - RNA, 19 nt, Homo sapiens
  misc_RNA (1)...(19): siRNA sense strand
ggaugacauuuaucaguuu

SEQ ID NO: 962869 - RNA, 19 nt, Homo sapiens
  misc_RNA (1)...(19): siRNA sense strand
ccacauauacugccauuga

SEQ ID NO: 962870 - RNA, 19 nt, Homo sapiens
  misc_RNA (1)...(19): siRNA sense strand
gaucaaggcuccugguuuu

SEQ ID NO: 962871 - RNA, 19 nt, Homo sapiens
  misc_RNA (1)...(19): siRNA sense strand
ggagaaaucacacguuugu

SEQ ID NO: 962872 - RNA, 19 nt, Homo sapiens
  misc_RNA (1)...(19): siRNA sense strand
gcuuauggaugacauuuau

SEQ ID NO: 962873 - RNA, 19 nt, Homo sapiens
  misc_RNA (1)...(19): siRNA sense strand
ggaagacccagcccuauga

SEQ ID NO: 962874 - RNA, 19 nt, Homo sapiens
  misc_RNA (1)...(19): siRNA sense strand
caucauagguacccaagau

SEQ ID NO: 962875 - RNA, 19 nt, Homo sapiens
  misc_RNA (1)...(19): siRNA sense strand
ggacacauguuggcagaug

SEQ ID NO: 962876 - RNA, 19 nt, Homo sapiens
  misc_RNA (1)...(19): siRNA sense strand
gaagaaagggagaagaugu

SEQ ID NO: 962877 - RNA, 19 nt, Homo sapiens
  misc_RNA (1)...(19): siRNA sense strand
ugaagaacauuacccugaa

SEQ ID NO: 962878 - RNA, 19 nt, Homo sapiens
  misc_RNA (1)...(19): siRNA sense strand
ggaaugggcacagcaguuu

SEQ ID NO: 962879 - RNA, 19 nt, Homo sapiens
  misc_RNA (1)...(19): siRNA sense strand
gaagaagcacuuaacuaug

SEQ ID NO: 962880 - RNA, 19 nt, Homo sapiens
  misc_RNA (1)...(19): siRNA sense strand
caaagugucuccaccuaag

SEQ ID NO: 962881 - RNA, 19 nt, Homo sapiens
  misc_RNA (1)...(19): siRNA sense strand
ggguguaccuggugucuga

SEQ ID NO: 962882 - RNA, 19 nt, Homo sapiens
  misc_RNA (1)...(19): siRNA sense strand
gaaugcaugcugcuuauau

SEQ ID NO: 962883 - RNA, 19 nt, Homo sapiens
  misc_RNA (1)...(19): siRNA sense strand
caagguugaugaugccaaa

SEQ ID NO: 962884 - RNA, 19 nt, Homo sapiens
  misc_RNA (1)...(19): siRNA sense strand
agaagaagcacuuaacuau

SEQ ID NO: 962885 - RNA, 19 nt, Homo sapiens
  misc_RNA (1)...(19): siRNA sense strand
aauaggaucuggcgaaauc

SEQ ID NO: 962886 - RNA, 19 nt, Homo sapiens
  misc_RNA (1)...(19): siRNA sense strand
ggaguccgauugccgauuc

SEQ ID NO: 962887 - RNA, 19 nt, Homo sapiens
  misc_RNA (1)...(19): siRNA sense strand
aagaagcacuuaacuaugg

SEQ ID NO: 962888 - RNA, 19 nt, Homo sapiens
  misc_RNA (1)...(19): siRNA sense strand
guggagaaguugcuaaaca

SEQ ID NO: 962889 - RNA, 19 nt, Homo sapiens
  misc_RNA (1)...(19): siRNA sense strand
gaagauguuugaguucuac

SEQ ID NO: 962890 - RNA, 19 nt, Homo sapiens
  misc_RNA (1)...(19): siRNA sense strand
gccaaagugucuccaccua

SEQ ID NO: 962891 - RNA, 19 nt, Homo sapiens
  misc_RNA (1)...(19): siRNA sense strand
gcacagugucuaaacaaga

SEQ ID NO: 962892 - RNA, 19 nt, Homo sapiens
  misc_RNA (1)...(19): siRNA sense strand
cagaagaagcacuuaacua

SEQ ID NO: 962893 - RNA, 19 nt, Homo sapiens
  misc_RNA (1)...(19): siRNA sense strand
uggaugacauuuaucaguu

SEQ ID NO: 962894 - RNA, 19 nt, Homo sapiens
  misc_RNA (1)...(19): siRNA sense strand
guaacgaacaggccuauuc

SEQ ID NO: 962895 - RNA, 19 nt, Homo sapiens
  misc_RNA (1)...(19): siRNA sense strand
gaagcucauugaauacaag

SEQ ID NO: 962896 - RNA, 19 nt, Homo sapiens
  misc_RNA (1)...(19): siRNA sense strand
agaaaucacacguuuguug

SEQ ID NO: 962897 - RNA, 19 nt, Homo sapiens
  misc_RNA (1)...(19): siRNA sense strand
aaagggagaagauguuuga

SEQ ID NO: 962898 - RNA, 19 nt, Homo sapiens
  misc_RNA (1)...(19): siRNA sense strand
gaagaacauuacccugaac

SEQ ID NO: 962899 - RNA, 19 nt, Homo sapiens
  misc_RNA (1)...(19): siRNA sense strand
gauauuguauuuggagaag

SEQ ID NO: 962900 - RNA, 19 nt, Homo sapiens
  misc_RNA (1)...(19): siRNA sense strand
cgaacaggccuauucucua

SEQ ID NO: 962901 - RNA, 19 nt, Homo sapiens
  misc_RNA (1)...(19): siRNA sense strand
ggcgaaaucggacaauuga

SEQ ID NO: 962902 - RNA, 19 nt, Homo sapiens
  misc_RNA (1)...(19): siRNA sense strand
gaaagggagaagauguuug

SEQ ID NO: 962903 - RNA, 19 nt, Homo sapiens
  misc_RNA (1)...(19): siRNA sense strand
uuggagaaaucacacguuu

SEQ ID NO: 962904 - RNA, 19 nt, Homo sapiens
  misc_RNA (1)...(19): siRNA sense strand
cgccagucccugagaauua

SEQ ID NO: 962905 - RNA, 19 nt, Homo sapiens
  misc_RNA (1)...(19): siRNA sense strand
cgaggggacugcuaugaua

SEQ ID NO: 962906 - RNA, 19 nt, Homo sapiens
  misc_RNA (1)...(19): siRNA sense strand
ccgaaugcaugcugcuuau

SEQ ID NO: 962907 - RNA, 19 nt, Homo sapiens
  misc_RNA (1)...(19): siRNA sense strand
gccagucccugagaauuau

SEQ ID NO: 962908 - RNA, 19 nt, Homo sapiens
  misc_RNA (1)...(19): siRNA sense strand
acaauaggaucuggcgaaa

SEQ ID NO: 962909 - RNA, 19 nt, Homo sapiens
  misc_RNA (1)...(19): siRNA sense strand
gacuauguguccaugaugu

SEQ ID NO: 962910 - RNA, 19 nt, Homo sapiens
  misc_RNA (1)...(19): siRNA sense strand
ccaaagugucuccaccuaa

SEQ ID NO: 962911 - RNA, 19 nt, Homo sapiens
  misc_RNA (1)...(19): siRNA sense strand
cgagugcuguuuggagaaa

SEQ ID NO: 962912 - RNA, 19 nt, Homo sapiens
  misc_RNA (1)...(19): siRNA sense strand
cgaaaucggacaauugaca

SEQ ID NO: 962913 - RNA, 19 nt, Homo sapiens
  misc_RNA (1)...(19): siRNA sense strand
gcagccagauguggaaugg

SEQ ID NO: 962914 - RNA, 19 nt, Homo sapiens
  misc_RNA (1)...(19): siRNA sense strand
ccuuaucgaugcaagauca

SEQ ID NO: 962915 - RNA, 19 nt, Homo sapiens
  misc_RNA (1)...(19): siRNA sense strand
cacagugucuaaacaagau

SEQ ID NO: 962916 - RNA, 19 nt, Homo sapiens
  misc_RNA (1)...(19): siRNA sense strand
ggagaagauguuugaguuc

SEQ ID NO: 962917 - RNA, 19 nt, Homo sapiens
  misc_RNA (1)...(19): siRNA sense strand
gguuguaacagcagaagaa

SEQ ID NO: 962918 - RNA, 19 nt, Homo sapiens
  misc_RNA (1)...(19): siRNA sense strand
gaaaucggacaauugacau

SEQ ID NO: 962919 - RNA, 19 nt, Homo sapiens
  misc_RNA (1)...(19): siRNA sense strand
ugaguuugauguuccuguu

SEQ ID NO: 962920 - RNA, 19 nt, Homo sapiens
  misc_RNA (1)...(19): siRNA sense strand
cauagguacccaagauauu

SEQ ID NO: 962921 - RNA, 19 nt, Homo sapiens
  misc_RNA (1)...(19): siRNA sense strand
gcuguuauguacccaagca

SEQ ID NO: 962922 - RNA, 19 nt, Homo sapiens
  misc_RNA (1)...(19): siRNA sense strand
uggagaaguugcuaaacau

SEQ ID NO: 962923 - RNA, 19 nt, Homo sapiens
  misc_RNA (1)...(19): siRNA sense strand
cagcagaagaagcacuuaa

SEQ ID NO: 962924 - RNA, 19 nt, Homo sapiens
  misc_RNA (1)...(19): siRNA sense strand
gagaagcucauugaauaca

SEQ ID NO: 962925 - RNA, 19 nt, Homo sapiens
  misc_RNA (1)...(19): siRNA sense strand
cccuugggcuuauggauga

SEQ ID NO: 962926 - RNA, 19 nt, Homo sapiens
  misc_RNA (1)...(19): siRNA sense strand
ucaggcccuuccauacuuu

SEQ ID NO: 962927 - RNA, 19 nt, Homo sapiens
  misc_RNA (1)...(19): siRNA sense strand
uagacuauguguccaugau

SEQ ID NO: 962928 - RNA, 19 nt, Homo sapiens
  misc_RNA (1)...(19): siRNA sense strand
gcagaagaagcacuuaacu

SEQ ID NO: 962929 - RNA, 19 nt, Homo sapiens
  misc_RNA (1)...(19): siRNA sense strand
uugaugaguuggaggaguu

SEQ ID NO: 962930 - RNA, 19 nt, Homo sapiens
  misc_RNA (1)...(19): siRNA sense strand
gcaccgaggcacugagaag

SEQ ID NO: 962931 - RNA, 19 nt, Homo sapiens
  misc_RNA (1)...(19): siRNA sense strand
acugagggcuaccaaguuc

SEQ ID NO: 962932 - RNA, 19 nt, Homo sapiens
  misc_RNA (1)...(19): siRNA sense strand
gguugaugaugccaaagug

SEQ ID NO: 962933 - RNA, 19 nt, Homo sapiens
  misc_RNA (1)...(19): siRNA sense strand
uggaggaguugcugaccaa

SEQ ID NO: 962934 - RNA, 19 nt, Homo sapiens
  misc_RNA (1)...(19): siRNA sense strand
ggagaaguugcuaaacauc

SEQ ID NO: 962935 - RNA, 19 nt, Homo sapiens
  misc_RNA (1)...(19): siRNA sense strand
acgaccagguugaguuuga

SEQ ID NO: 962936 - RNA, 19 nt, Homo sapiens
  misc_RNA (1)...(19): siRNA sense strand
aacauuacccugaacuuug

SEQ ID NO: 962937 - RNA, 19 nt, Homo sapiens
  misc_RNA (1)...(19): siRNA sense strand
uaacgaacaggccuauucu

SEQ ID NO: 962938 - RNA, 19 nt, Homo sapiens
  misc_RNA (1)...(19): siRNA sense strand
guacccaagauauuguauu

SEQ ID NO: 962939 - RNA, 19 nt, Homo sapiens
  misc_RNA (1)...(19): siRNA sense strand
cauguuggcagaugucguu

SEQ ID NO: 962940 - RNA, 19 nt, Homo sapiens
  misc_RNA (1)...(19): siRNA sense strand
agaagcucauugaauacaa

SEQ ID NO: 962941 - RNA, 19 nt, Homo sapiens
  misc_RNA (1)...(19): siRNA sense strand
acauuacccugaacuuugg

SEQ ID NO: 962942 - RNA, 19 nt, Homo sapiens
  misc_RNA (1)...(19): siRNA sense strand
ucauagguacccaagauau

SEQ ID NO: 962943 - RNA, 19 nt, Homo sapiens
  misc_RNA (1)...(19): siRNA sense strand
gagaauuaucgcacagugu

SEQ ID NO: 962944 - RNA, 19 nt, Homo sapiens
  misc_RNA (1)...(19): siRNA sense strand
gacccagcccuaugauguu

SEQ ID NO: 962945 - RNA, 19 nt, Homo sapiens
  misc_RNA (1)...(19): siRNA sense strand
gaaugggcacagcaguuug

SEQ ID NO: 962946 - RNA, 19 nt, Homo sapiens
  misc_RNA (1)...(19): siRNA sense strand
agaaagggagaagauguuu

SEQ ID NO: 962947 - RNA, 19 nt, Homo sapiens
  misc_RNA (1)...(19): siRNA sense strand
agacccagcccuaugaugu

SEQ ID NO: 962948 - RNA, 19 nt, Homo sapiens
  misc_RNA (1)...(19): siRNA sense strand
gaagacccagcccuaugau

SEQ ID NO: 962949 - RNA, 19 nt, Homo sapiens
  misc_RNA (1)...(19): siRNA sense strand
gggcuuauggaugacauuu

SEQ ID NO: 962950 - RNA, 19 nt, Homo sapiens
  misc_RNA (1)...(19): siRNA sense strand
gggagauggugcggaagug

SEQ ID NO: 962951 - RNA, 19 nt, Homo sapiens
  misc_RNA (1)...(19): siRNA sense strand
cagguugaguuugauguuc

SEQ ID NO: 962952 - RNA, 19 nt, Homo sapiens
  misc_RNA (1)...(19): siRNA sense strand
uuacgaccagguugaguuu

SEQ ID NO: 962953 - RNA, 19 nt, Homo sapiens
  misc_RNA (1)...(19): siRNA sense strand
aagaaagggagaagauguu

SEQ ID NO: 962954 - RNA, 19 nt, Homo sapiens
  misc_RNA (1)...(19): siRNA sense strand
ucacacguuuguugaacca

SEQ ID NO: 962955 - RNA, 19 nt, Homo sapiens
  misc_RNA (1)...(19): siRNA sense strand
uguaacagcagaagaagca

SEQ ID NO: 962956 - RNA, 19 nt, Homo sapiens
  misc_RNA (1)...(19): siRNA sense strand
uggcgaaaucggacaauug

SEQ ID NO: 962957 - RNA, 19 nt, Homo sapiens
  misc_RNA (1)...(19): siRNA sense strand
cgaaugcaugcugcuuaua

SEQ ID NO: 962958 - RNA, 19 nt, Homo sapiens
  misc_RNA (1)...(19): siRNA sense strand
gacuagugauggaauugag

SEQ ID NO: 962959 - RNA, 19 nt, Homo sapiens
  misc_RNA (1)...(19): siRNA sense strand
ggaauugaguggggagaug

SEQ ID NO: 962960 - RNA, 19 nt, Homo sapiens
  misc_RNA (1)...(19): siRNA sense strand
cgacuagugauggaauuga

SEQ ID NO: 962961 - RNA, 19 nt, Homo sapiens
  misc_RNA (1)...(19): siRNA sense strand
aagaaacagcccacuggaa

SEQ ID NO: 962962 - RNA, 19 nt, Homo sapiens
  misc_RNA (1)...(19): siRNA sense strand
acccagcccuaugauguuu

SEQ ID NO: 962963 - RNA, 19 nt, Homo sapiens
  misc_RNA (1)...(19): siRNA sense strand
ggaagauggugaagcugua

SEQ ID NO: 962964 - RNA, 19 nt, Homo sapiens
  misc_RNA (1)...(19): siRNA sense strand
gacaggcucuccagaagca

SEQ ID NO: 962965 - RNA, 19 nt, Homo sapiens
  misc_RNA (1)...(19): siRNA sense strand
gcgacaggcucuccagaag

SEQ ID NO: 962966 - RNA, 19 nt, Homo sapiens
  misc_RNA (1)...(19): siRNA sense strand
agcaagcccugcaggagaa

SEQ ID NO: 962967 - RNA, 19 nt, Homo sapiens
  misc_RNA (1)...(19): siRNA sense strand
aggagaugauggcccagaa

SEQ ID NO: 962968 - RNA, 19 nt, Homo sapiens
  misc_RNA (1)...(19): siRNA sense strand
ccacagagcugcugaagaa

SEQ ID NO: 962969 - RNA, 19 nt, Homo sapiens
  misc_RNA (1)...(19): siRNA sense strand
agaaggaaauggagaaaua

SEQ ID NO: 962970 - RNA, 19 nt, Homo sapiens
  misc_RNA (1)...(19): siRNA sense strand
gacauggccuucuguaaga

SEQ ID NO: 962971 - RNA, 19 nt, Homo sapiens
  misc_RNA (1)...(19): siRNA sense strand
gggagaaacucagccuuaa

SEQ ID NO: 962972 - RNA, 19 nt, Homo sapiens
  misc_RNA (1)...(19): siRNA sense strand
gccuuaaucuggaucauaa

SEQ ID NO: 962973 - RNA, 19 nt, Homo sapiens
  misc_RNA (1)...(19): siRNA sense strand
ggaacagccuacuccguuu

SEQ ID NO: 962974 - RNA, 19 nt, Homo sapiens
  misc_RNA (1)...(19): siRNA sense strand
acaagggccuggacuauga

SEQ ID NO: 962975 - RNA, 19 nt, Homo sapiens
  misc_RNA (1)...(19): siRNA sense strand
ggaaguacaaggaugauga

SEQ ID NO: 962976 - RNA, 19 nt, Homo sapiens
  misc_RNA (1)...(19): siRNA sense strand
uguaagagcuuucgagaca

SEQ ID NO: 962977 - RNA, 19 nt, Homo sapiens
  misc_RNA (1)...(19): siRNA sense strand
acaacgaggucuuccauga

SEQ ID NO: 962978 - RNA, 19 nt, Homo sapiens
  misc_RNA (1)...(19): siRNA sense strand
ggacauggccuucuguaag

SEQ ID NO: 962979 - RNA, 19 nt, Homo sapiens
  misc_RNA (1)...(19): siRNA sense strand
ucaacuaccugggaaacua

SEQ ID NO: 962980 - RNA, 19 nt, Homo sapiens
  misc_RNA (1)...(19): siRNA sense strand
uggcagagauggagcacua

SEQ ID NO: 962981 - RNA, 19 nt, Homo sapiens
  misc_RNA (1)...(19): siRNA sense strand
cagagaagcugcuggugau

SEQ ID NO: 962982 - RNA, 19 nt, Homo sapiens
  misc_RNA (1)...(19): siRNA sense strand
gcaaucagcaugaauuugg

SEQ ID NO: 962983 - RNA, 19 nt, Homo sapiens
  misc_RNA (1)...(19): siRNA sense strand
ucauaagucucggaucuuu

SEQ ID NO: 962984 - RNA, 19 nt, Homo sapiens
  misc_RNA (1)...(19): siRNA sense strand
gagcaaucagcaugaauuu

SEQ ID NO: 962985 - RNA, 19 nt, Homo sapiens
  misc_RNA (1)...(19): siRNA sense strand
gagaaacucagccuuaauc

SEQ ID NO: 962986 - RNA, 19 nt, Homo sapiens
  misc_RNA (1)...(19): siRNA sense strand
cagaacaaaugugugauga

SEQ ID NO: 962987 - RNA, 19 nt, Homo sapiens
  misc_RNA (1)...(19): siRNA sense strand
caacggggcuuuagaugaa

SEQ ID NO: 962988 - RNA, 19 nt, Homo sapiens
  misc_RNA (1)...(19): siRNA sense strand
ugauguggcucgaacaguu

SEQ ID NO: 962989 - RNA, 19 nt, Homo sapiens
  misc_RNA (1)...(19): siRNA sense strand
gacagaagguccggugguu

SEQ ID NO: 962990 - RNA, 19 nt, Homo sapiens
  misc_RNA (1)...(19): siRNA sense strand
cagagcugcugaagaaguu

SEQ ID NO: 962991 - RNA, 19 nt, Homo sapiens
  misc_RNA (1)...(19): siRNA sense strand
cagaagguccggugguuaa

SEQ ID NO: 962992 - RNA, 19 nt, Homo sapiens
  misc_RNA (1)...(19): siRNA sense strand
ccacugcugucagaacaaa

SEQ ID NO: 962993 - RNA, 19 nt, Homo sapiens
  misc_RNA (1)...(19): siRNA sense strand
uaaagaaggaaauggagaa

SEQ ID NO: 962994 - RNA, 19 nt, Homo sapiens
  misc_RNA (1)...(19): siRNA sense strand
ggaaggagcaguacaucca

SEQ ID NO: 962995 - RNA, 19 nt, Homo sapiens
  misc_RNA (1)...(19): siRNA sense strand
ggauagcuacgacgugauu

SEQ ID NO: 962996 - RNA, 19 nt, Homo sapiens
  misc_RNA (1)...(19): siRNA sense strand
ggcuuuagaugaagugguu

SEQ ID NO: 962997 - RNA, 19 nt, Homo sapiens
  misc_RNA (1)...(19): siRNA sense strand
ccucaauucugguggauuc

SEQ ID NO: 962998 - RNA, 19 nt, Homo sapiens
  misc_RNA (1)...(19): siRNA sense strand
caacgaggucuuccaugaa

SEQ ID NO: 962999 - RNA, 19 nt, Homo sapiens
  misc_RNA (1)...(19): siRNA sense strand
gcccggacguguacugguu

SEQ ID NO: 963000 - RNA, 19 nt, Homo sapiens
  misc_RNA (1)...(19): siRNA sense strand
gaaacuacguccccaaugg

SEQ ID NO: 963001 - RNA, 19 nt, Homo sapiens
  misc_RNA (1)...(19): siRNA sense strand
gggcggugaugaacuuugu

SEQ ID NO: 963002 - RNA, 19 nt, Homo sapiens
  misc_RNA (1)...(19): siRNA sense strand
gcacaacaacgaggucuuc

SEQ ID NO: 963003 - RNA, 19 nt, Homo sapiens
  misc_RNA (1)...(19): siRNA sense strand
gaagaaguucguccagagu

SEQ ID NO: 963004 - RNA, 19 nt, Homo sapiens
  misc_RNA (1)...(19): siRNA sense strand
uaagagcuuucgagacaag

SEQ ID NO: 963005 - RNA, 19 nt, Homo sapiens
  misc_RNA (1)...(19): siRNA sense strand
gaagugguuuuaaaguuug

SEQ ID NO: 963006 - RNA, 19 nt, Homo sapiens
  misc_RNA (1)...(19): siRNA sense strand
ggagaaacucagccuuaau

SEQ ID NO: 963007 - RNA, 19 nt, Homo sapiens
  misc_RNA (1)...(19): siRNA sense strand
gaacagccuacuccguuuc

SEQ ID NO: 963008 - RNA, 19 nt, Homo sapiens
  misc_RNA (1)...(19): siRNA sense strand
ccaccaccauccaccaaau

SEQ ID NO: 963009 - RNA, 19 nt, Homo sapiens
  misc_RNA (1)...(19): siRNA sense strand
gaccacuucucagcuguga

SEQ ID NO: 963010 - RNA, 19 nt, Homo sapiens
  misc_RNA (1)...(19): siRNA sense strand
gaaacggucccacuaagcu

SEQ ID NO: 963011 - RNA, 19 nt, Homo sapiens
  misc_RNA (1)...(19): siRNA sense strand
gaaacucagccuuaaucug

SEQ ID NO: 963012 - RNA, 19 nt, Homo sapiens
  misc_RNA (1)...(19): siRNA sense strand
gagugugaguucuacuuca

SEQ ID NO: 963013 - RNA, 19 nt, Homo sapiens
  misc_RNA (1)...(19): siRNA sense strand
caacaacgaggucuuccau

SEQ ID NO: 963014 - RNA, 19 nt, Homo sapiens
  misc_RNA (1)...(19): siRNA sense strand
ccacaagggccuggacuau

SEQ ID NO: 963015 - RNA, 19 nt, Homo sapiens
  misc_RNA (1)...(19): siRNA sense strand
ggugaugaacuuugugguu

SEQ ID NO: 963016 - RNA, 19 nt, Homo sapiens
  misc_RNA (1)...(19): siRNA sense strand
ugagcaaucagcaugaauu

SEQ ID NO: 963017 - RNA, 19 nt, Homo sapiens
  misc_RNA (1)...(19): siRNA sense strand
gggcacacgcuacaucaug

SEQ ID NO: 963018 - RNA, 19 nt, Homo sapiens
  misc_RNA (1)...(19): siRNA sense strand
ugucagaacaaauguguga

SEQ ID NO: 963019 - RNA, 19 nt, Homo sapiens
  misc_RNA (1)...(19): siRNA sense strand
uaaucuggaucauaagucu

SEQ ID NO: 963020 - RNA, 19 nt, Homo sapiens
  misc_RNA (1)...(19): siRNA sense strand
gcuggaggcuacgagaaug

SEQ ID NO: 963021 - RNA, 19 nt, Homo sapiens
  misc_RNA (1)...(19): siRNA sense strand
agggagaaacucagccuua

SEQ ID NO: 963022 - RNA, 19 nt, Homo sapiens
  misc_RNA (1)...(19): siRNA sense strand
gguuaaagaaggaaaugga

SEQ ID NO: 963023 - RNA, 19 nt, Homo sapiens
  misc_RNA (1)...(19): siRNA sense strand
guaagagcuuucgagacaa

SEQ ID NO: 963024 - RNA, 19 nt, Homo sapiens
  misc_RNA (1)...(19): siRNA sense strand
gacccugcguauccucauu

SEQ ID NO: 963025 - RNA, 19 nt, Homo sapiens
  misc_RNA (1)...(19): siRNA sense strand
cauggaaacggucccacua

SEQ ID NO: 963026 - RNA, 19 nt, Homo sapiens
  misc_RNA (1)...(19): siRNA sense strand
gaaggaaauggagaaauac

SEQ ID NO: 963027 - RNA, 19 nt, Homo sapiens
  misc_RNA (1)...(19): siRNA sense strand
gagaagcugcuggugauca

SEQ ID NO: 963028 - RNA, 19 nt, Homo sapiens
  misc_RNA (1)...(19): siRNA sense strand
gcgaguggguguguggaau

SEQ ID NO: 963029 - RNA, 19 nt, Homo sapiens
  misc_RNA (1)...(19): siRNA sense strand
aagguccggugguuaaaga

SEQ ID NO: 963030 - RNA, 19 nt, Homo sapiens
  misc_RNA (1)...(19): siRNA sense strand
gagggaggcuguggcuucu

SEQ ID NO: 963031 - RNA, 19 nt, Homo sapiens
  misc_RNA (1)...(19): siRNA sense strand
gcgcuacgacugugugauc

SEQ ID NO: 963032 - RNA, 19 nt, Homo sapiens
  misc_RNA (1)...(19): siRNA sense strand
ucauguuuguggauagcua

SEQ ID NO: 963033 - RNA, 19 nt, Homo sapiens
  misc_RNA (1)...(19): siRNA sense strand
gauguggcucgaacaguug

SEQ ID NO: 963034 - RNA, 19 nt, Homo sapiens
  misc_RNA (1)...(19): siRNA sense strand
gaguggguguguggaaugu

SEQ ID NO: 963035 - RNA, 19 nt, Homo sapiens
  misc_RNA (1)...(19): siRNA sense strand
gaucaucauguuuguggau

SEQ ID NO: 963036 - RNA, 19 nt, Homo sapiens
  misc_RNA (1)...(19): siRNA sense strand
caauucugguggauucauc

SEQ ID NO: 963037 - RNA, 19 nt, Homo sapiens
  misc_RNA (1)...(19): siRNA sense strand
agucucggaucuuucagaa

SEQ ID NO: 963038 - RNA, 19 nt, Homo sapiens
  misc_RNA (1)...(19): siRNA sense strand
uggaaacggucccacuaag

SEQ ID NO: 963039 - RNA, 19 nt, Homo sapiens
  misc_RNA (1)...(19): siRNA sense strand
ggaaacggucccacuaagc

SEQ ID NO: 963040 - RNA, 19 nt, Homo sapiens
  misc_RNA (1)...(19): siRNA sense strand
ucagaacaaaugugugaug

SEQ ID NO: 963041 - RNA, 19 nt, Homo sapiens
  misc_RNA (1)...(19): siRNA sense strand
ugacacagacccggacaug

SEQ ID NO: 963042 - RNA, 19 nt, Homo sapiens
  misc_RNA (1)...(19): siRNA sense strand
gugauacccugcggaugga

SEQ ID NO: 963043 - RNA, 19 nt, Homo sapiens
  misc_RNA (1)...(19): siRNA sense strand
gcuccaggaccacuucuca

SEQ ID NO: 963044 - RNA, 19 nt, Homo sapiens
  misc_RNA (1)...(19): siRNA sense strand
gcugucagaacaaaugugu

SEQ ID NO: 963045 - RNA, 19 nt, Homo sapiens
  misc_RNA (1)...(19): siRNA sense strand
agcaguacauccacgagaa

SEQ ID NO: 963046 - RNA, 19 nt, Homo sapiens
  misc_RNA (1)...(19): siRNA sense strand
ggccuucuguaagagcuuu

SEQ ID NO: 963047 - RNA, 19 nt, Homo sapiens
  misc_RNA (1)...(19): siRNA sense strand
ggcaagcugugguccaacu

SEQ ID NO: 963048 - RNA, 19 nt, Homo sapiens
  misc_RNA (1)...(19): siRNA sense strand
ucauugaggagaacaggaa

SEQ ID NO: 963049 - RNA, 19 nt, Homo sapiens
  misc_RNA (1)...(19): siRNA sense strand
guacauccacgagaacuac

SEQ ID NO: 963050 - RNA, 19 nt, Homo sapiens
  misc_RNA (1)...(19): siRNA sense strand
caccuucacccucaacguu

SEQ ID NO: 963051 - RNA, 19 nt, Homo sapiens
  misc_RNA (1)...(19): siRNA sense strand
acagaagguccggugguua

SEQ ID NO: 963052 - RNA, 19 nt, Homo sapiens
  misc_RNA (1)...(19): siRNA sense strand
gcucugcggaguucuucaa

SEQ ID NO: 963053 - RNA, 19 nt, Homo sapiens
  misc_RNA (1)...(19): siRNA sense strand
gcuacaucaugguguccuu

SEQ ID NO: 963054 - RNA, 19 nt, Homo sapiens
  misc_RNA (1)...(19): siRNA sense strand
aaagaaggaaauggagaaa

SEQ ID NO: 963055 - RNA, 19 nt, Homo sapiens
  misc_RNA (1)...(19): siRNA sense strand
gaaguacaaggaugaugac

SEQ ID NO: 963056 - RNA, 19 nt, Homo sapiens
  misc_RNA (1)...(19): siRNA sense strand
gaagguccggugguuaaag

SEQ ID NO: 963057 - RNA, 19 nt, Homo sapiens
  misc_RNA (1)...(19): siRNA sense strand
gccaguggaaguacaagga

SEQ ID NO: 963058 - RNA, 19 nt, Homo sapiens
  misc_RNA (1)...(19): siRNA sense strand
ggguguuucuggccguguu

SEQ ID NO: 963059 - RNA, 19 nt, Homo sapiens
  misc_RNA (1)...(19): siRNA sense strand
gguucccacugcugucaga

SEQ ID NO: 963060 - RNA, 19 nt, Homo sapiens
  misc_RNA (1)...(19): siRNA sense strand
guggguguguggaauguac

SEQ ID NO: 963061 - RNA, 19 nt, Homo sapiens
  misc_RNA (1)...(19): siRNA sense strand
auaagucucggaucuuuca

SEQ ID NO: 963062 - RNA, 19 nt, Homo sapiens
  misc_RNA (1)...(19): siRNA sense strand
gaaccucaacggggcuuua

SEQ ID NO: 963063 - RNA, 19 nt, Homo sapiens
  misc_RNA (1)...(19): siRNA sense strand
cgaaaucacugcagaaaua

SEQ ID NO: 963064 - RNA, 19 nt, Homo sapiens
  misc_RNA (1)...(19): siRNA sense strand
gcccagagccuuucaaaua

SEQ ID NO: 963065 - RNA, 19 nt, Homo sapiens
  misc_RNA (1)...(19): siRNA sense strand
cgucaaagguucagaaauu

SEQ ID NO: 963066 - RNA, 19 nt, Homo sapiens
  misc_RNA (1)...(19): siRNA sense strand
guacuuaccacaauugaua

SEQ ID NO: 963067 - RNA, 19 nt, Homo sapiens
  misc_RNA (1)...(19): siRNA sense strand
uaagacaucugcuauuguu

SEQ ID NO: 963068 - RNA, 19 nt, Homo sapiens
  misc_RNA (1)...(19): siRNA sense strand
gaaccagugugacucauau

SEQ ID NO: 963069 - RNA, 19 nt, Homo sapiens
  misc_RNA (1)...(19): siRNA sense strand
caggagagcuugaggagaa

SEQ ID NO: 963070 - RNA, 19 nt, Homo sapiens
  misc_RNA (1)...(19): siRNA sense strand
gaacucuuccugcuuauuu

SEQ ID NO: 963071 - RNA, 19 nt, Homo sapiens
  misc_RNA (1)...(19): siRNA sense strand
cauaagaacucuguccuuu

SEQ ID NO: 963072 - RNA, 19 nt, Homo sapiens
  misc_RNA (1)...(19): siRNA sense strand
gaucacacccugucuauug

SEQ ID NO: 963073 - RNA, 19 nt, Homo sapiens
  misc_RNA (1)...(19): siRNA sense strand
ggaggaaccuaauccaaau

SEQ ID NO: 963074 - RNA, 19 nt, Homo sapiens
  misc_RNA (1)...(19): siRNA sense strand
gaagagaagauugaugaua

SEQ ID NO: 963075 - RNA, 19 nt, Homo sapiens
  misc_RNA (1)...(19): siRNA sense strand
ccaaagagguagcaaguca

SEQ ID NO: 963076 - RNA, 19 nt, Homo sapiens
  misc_RNA (1)...(19): siRNA sense strand
gaugcaaugucuuuagaaa

SEQ ID NO: 963077 - RNA, 19 nt, Homo sapiens
  misc_RNA (1)...(19): siRNA sense strand
gcuuugaggugcucgguua

SEQ ID NO: 963078 - RNA, 19 nt, Homo sapiens
  misc_RNA (1)...(19): siRNA sense strand
cauaagacaucugcuauug

SEQ ID NO: 963079 - RNA, 19 nt, Homo sapiens
  misc_RNA (1)...(19): siRNA sense strand
aaacacgggcaauauauua

SEQ ID NO: 963080 - RNA, 19 nt, Homo sapiens
  misc_RNA (1)...(19): siRNA sense strand
ccagaaaggugucagaaca

SEQ ID NO: 963081 - RNA, 19 nt, Homo sapiens
  misc_RNA (1)...(19): siRNA sense strand
caacuuaccagauuuccua

SEQ ID NO: 963082 - RNA, 19 nt, Homo sapiens
  misc_RNA (1)...(19): siRNA sense strand
agacacagauuacugauuc

SEQ ID NO: 963083 - RNA, 19 nt, Homo sapiens
  misc_RNA (1)...(19): siRNA sense strand
cuucagaucuuaccaguug

SEQ ID NO: 963084 - RNA, 19 nt, Homo sapiens
  misc_RNA (1)...(19): siRNA sense strand
gaccugagcacacaaauug

SEQ ID NO: 963085 - RNA, 19 nt, Homo sapiens
  misc_RNA (1)...(19): siRNA sense strand
gcauggccguuuccuauga

SEQ ID NO: 963086 - RNA, 19 nt, Homo sapiens
  misc_RNA (1)...(19): siRNA sense strand
gaaauauucgcgacugaaa

SEQ ID NO: 963087 - RNA, 19 nt, Homo sapiens
  misc_RNA (1)...(19): siRNA sense strand
ugagacugcucguuacuaa

SEQ ID NO: 963088 - RNA, 19 nt, Homo sapiens
  misc_RNA (1)...(19): siRNA sense strand
ucaaucacaucaggaauuu

SEQ ID NO: 963089 - RNA, 19 nt, Homo sapiens
  misc_RNA (1)...(19): siRNA sense strand
caaauuuggugaauaugug

SEQ ID NO: 963090 - RNA, 19 nt, Homo sapiens
  misc_RNA (1)...(19): siRNA sense strand
gguagcaagucaaagcuuu

SEQ ID NO: 963091 - RNA, 19 nt, Homo sapiens
  misc_RNA (1)...(19): siRNA sense strand
gcuacuugguguuuauuaa

SEQ ID NO: 963092 - RNA, 19 nt, Homo sapiens
  misc_RNA (1)...(19): siRNA sense strand
agucaaagcuuuccuuaca

SEQ ID NO: 963093 - RNA, 19 nt, Homo sapiens
  misc_RNA (1)...(19): siRNA sense strand
ccaaguaucuggcaaccau

SEQ ID NO: 963094 - RNA, 19 nt, Homo sapiens
  misc_RNA (1)...(19): siRNA sense strand
ggaaaaggcuggagaaguc

SEQ ID NO: 963095 - RNA, 19 nt, Homo sapiens
  misc_RNA (1)...(19): siRNA sense strand
aagaucaacuuaccagauu

SEQ ID NO: 963096 - RNA, 19 nt, Homo sapiens
  misc_RNA (1)...(19): siRNA sense strand
gaaagcuaaucgacaagau

SEQ ID NO: 963097 - RNA, 19 nt, Homo sapiens
  misc_RNA (1)...(19): siRNA sense strand
acagggagcuagaagacua

SEQ ID NO: 963098 - RNA, 19 nt, Homo sapiens
  misc_RNA (1)...(19): siRNA sense strand
caaauacucucagccacaa

SEQ ID NO: 963099 - RNA, 19 nt, Homo sapiens
  misc_RNA (1)...(19): siRNA sense strand
gacugaaauucuuggcuua

SEQ ID NO: 963100 - RNA, 19 nt, Homo sapiens
  misc_RNA (1)...(19): siRNA sense strand
ccagagccuuucaaauauu

SEQ ID NO: 963101 - RNA, 19 nt, Homo sapiens
  misc_RNA (1)...(19): siRNA sense strand
ggacaagaaaggagaguau

SEQ ID NO: 963102 - RNA, 19 nt, Homo sapiens
  misc_RNA (1)...(19): siRNA sense strand
uaagagaccugagcacaca

SEQ ID NO: 963103 - RNA, 19 nt, Homo sapiens
  misc_RNA (1)...(19): siRNA sense strand
auucuuggcuuaaccauuu

SEQ ID NO: 963104 - RNA, 19 nt, Homo sapiens
  misc_RNA (1)...(19): siRNA sense strand
cagacaggcucuugauaga

SEQ ID NO: 963105 - RNA, 19 nt, Homo sapiens
  misc_RNA (1)...(19): siRNA sense strand
ggacagcaaugagccuaga

SEQ ID NO: 963106 - RNA, 19 nt, Homo sapiens
  misc_RNA (1)...(19): siRNA sense strand
ugaucaaaguguggaauua

SEQ ID NO: 963107 - RNA, 19 nt, Homo sapiens
  misc_RNA (1)...(19): siRNA sense strand
gaggguaucacgguacuua

SEQ ID NO: 963108 - RNA, 19 nt, Homo sapiens
  misc_RNA (1)...(19): siRNA sense strand
gaacugggacaagaaagaa

SEQ ID NO: 963109 - RNA, 19 nt, Homo sapiens
  misc_RNA (1)...(19): siRNA sense strand
acacugcgaucaucuacaa

SEQ ID NO: 963110 - RNA, 19 nt, Homo sapiens
  misc_RNA (1)...(19): siRNA sense strand
gcgaucaucuacaaugugu

SEQ ID NO: 963111 - RNA, 19 nt, Homo sapiens
  misc_RNA (1)...(19): siRNA sense strand
aaauuugccuugaagaaga

SEQ ID NO: 963112 - RNA, 19 nt, Homo sapiens
  misc_RNA (1)...(19): siRNA sense strand
gucaaagguucagaaauuu

SEQ ID NO: 963113 - RNA, 19 nt, Homo sapiens
  misc_RNA (1)...(19): siRNA sense strand
cuacaaagaccaccuggaa

SEQ ID NO: 963114 - RNA, 19 nt, Homo sapiens
  misc_RNA (1)...(19): siRNA sense strand
ggaagaaaccacaguagag

SEQ ID NO: 963115 - RNA, 19 nt, Homo sapiens
  misc_RNA (1)...(19): siRNA sense strand
guucagaaauuugccuuga

SEQ ID NO: 963116 - RNA, 19 nt, Homo sapiens
  misc_RNA (1)...(19): siRNA sense strand
ccacauaagacaucugcua

SEQ ID NO: 963117 - RNA, 19 nt, Homo sapiens
  misc_RNA (1)...(19): siRNA sense strand
gcccaaggaugccauuugu

SEQ ID NO: 963118 - RNA, 19 nt, Homo sapiens
  misc_RNA (1)...(19): siRNA sense strand
cagaugagcuuuuaagaga

SEQ ID NO: 963119 - RNA, 19 nt, Homo sapiens
  misc_RNA (1)...(19): siRNA sense strand
ucaaagcuuuccuuacaau

SEQ ID NO: 963120 - RNA, 19 nt, Homo sapiens
  misc_RNA (1)...(19): siRNA sense strand
caagucaaagcuuuccuua

SEQ ID NO: 963121 - RNA, 19 nt, Homo sapiens
  misc_RNA (1)...(19): siRNA sense strand
ccuccugacugcacuuuaa

SEQ ID NO: 963122 - RNA, 19 nt, Homo sapiens
  misc_RNA (1)...(19): siRNA sense strand
guguaucccuugaccauga

SEQ ID NO: 963123 - RNA, 19 nt, Homo sapiens
  misc_RNA (1)...(19): siRNA sense strand
aggaggagauguuggauug

SEQ ID NO: 963124 - RNA, 19 nt, Homo sapiens
  misc_RNA (1)...(19): siRNA sense strand
ccaccugcauggucuggua

SEQ ID NO: 963125 - RNA, 19 nt, Homo sapiens
  misc_RNA (1)...(19): siRNA sense strand
cccagagccuuucaaauau

SEQ ID NO: 963126 - RNA, 19 nt, Homo sapiens
  misc_RNA (1)...(19): siRNA sense strand
cagcaacuccuccuacuga

SEQ ID NO: 963127 - RNA, 19 nt, Homo sapiens
  misc_RNA (1)...(19): siRNA sense strand
agagaguucuucuguaugu

SEQ ID NO: 963128 - RNA, 19 nt, Homo sapiens
  misc_RNA (1)...(19): siRNA sense strand
cagcguccaugauccguuu

SEQ ID NO: 963129 - RNA, 19 nt, Homo sapiens
  misc_RNA (1)...(19): siRNA sense strand
gcuuaaccauuucagaaga

SEQ ID NO: 963130 - RNA, 19 nt, Homo sapiens
  misc_RNA (1)...(19): siRNA sense strand
gaaauuugccuugaagaag

SEQ ID NO: 963131 - RNA, 19 nt, Homo sapiens
  misc_RNA (1)...(19): siRNA sense strand
caacaguggcuacaaagug

SEQ ID NO: 963132 - RNA, 19 nt, Homo sapiens
  misc_RNA (1)...(19): siRNA sense strand
ucccaugacucccaguaua

SEQ ID NO: 963133 - RNA, 19 nt, Homo sapiens
  misc_RNA (1)...(19): siRNA sense strand
gaagucacagcguccauga

SEQ ID NO: 963134 - RNA, 19 nt, Homo sapiens
  misc_RNA (1)...(19): siRNA sense strand
gaucaaaguguggaauuau

SEQ ID NO: 963135 - RNA, 19 nt, Homo sapiens
  misc_RNA (1)...(19): siRNA sense strand
ugaagggaauggcaucaug

SEQ ID NO: 963136 - RNA, 19 nt, Homo sapiens
  misc_RNA (1)...(19): siRNA sense strand
cagacugccuggugauuau

SEQ ID NO: 963137 - RNA, 19 nt, Homo sapiens
  misc_RNA (1)...(19): siRNA sense strand
caacaggaaucaaaagaug

SEQ ID NO: 963138 - RNA, 19 nt, Homo sapiens
  misc_RNA (1)...(19): siRNA sense strand
caugagagcaauuggcuuu

SEQ ID NO: 963139 - RNA, 19 nt, Homo sapiens
  misc_RNA (1)...(19): siRNA sense strand
guugggacuucagaucuua

SEQ ID NO: 963140 - RNA, 19 nt, Homo sapiens
  misc_RNA (1)...(19): siRNA sense strand
acacaaguccucccaguga

SEQ ID NO: 963141 - RNA, 19 nt, Homo sapiens
  misc_RNA (1)...(19): siRNA sense strand
ggacagacaggcucuugau

SEQ ID NO: 963142 - RNA, 19 nt, Homo sapiens
  misc_RNA (1)...(19): siRNA sense strand
gaggaaaggcagagaguuc

SEQ ID NO: 963143 - RNA, 19 nt, Homo sapiens
  misc_RNA (1)...(19): siRNA sense strand
agaaacagaugagcuuuua

SEQ ID NO: 963144 - RNA, 19 nt, Homo sapiens
  misc_RNA (1)...(19): siRNA sense strand
ggaagaaacugaggaaaag

SEQ ID NO: 963145 - RNA, 19 nt, Homo sapiens
  misc_RNA (1)...(19): siRNA sense strand
gaaaucacugcagaaauau

SEQ ID NO: 963146 - RNA, 19 nt, Homo sapiens
  misc_RNA (1)...(19): siRNA sense strand
uugcuuugcuucacuguuu

SEQ ID NO: 963147 - RNA, 19 nt, Homo sapiens
  misc_RNA (1)...(19): siRNA sense strand
ggguuuaccuggacagcaa

SEQ ID NO: 963148 - RNA, 19 nt, Homo sapiens
  misc_RNA (1)...(19): siRNA sense strand
gagaaacagaaaugaaaga

SEQ ID NO: 963149 - RNA, 19 nt, Homo sapiens
  misc_RNA (1)...(19): siRNA sense strand
gaggacauucuguuucaaa

SEQ ID NO: 963150 - RNA, 19 nt, Homo sapiens
  misc_RNA (1)...(19): siRNA sense strand
ucagaaauuugccuugaag

SEQ ID NO: 963151 - RNA, 19 nt, Homo sapiens
  misc_RNA (1)...(19): siRNA sense strand
gauagaguaugaucuucuc

SEQ ID NO: 963152 - RNA, 19 nt, Homo sapiens
  misc_RNA (1)...(19): siRNA sense strand
cacaauugauagcuacauu

SEQ ID NO: 963153 - RNA, 19 nt, Homo sapiens
  misc_RNA (1)...(19): siRNA sense strand
gaacaaucaauaccaccuu

SEQ ID NO: 963154 - RNA, 19 nt, Homo sapiens
  misc_RNA (1)...(19): siRNA sense strand
gaucaucuacaauguguuc

SEQ ID NO: 963155 - RNA, 19 nt, Homo sapiens
  misc_RNA (1)...(19): siRNA sense strand
gggaggaggaggagaaaga

SEQ ID NO: 963156 - RNA, 19 nt, Homo sapiens
  misc_RNA (1)...(19): siRNA sense strand
ggagauguuggauugcuuu

SEQ ID NO: 963157 - RNA, 19 nt, Homo sapiens
  misc_RNA (1)...(19): siRNA sense strand
uauggcaacugcugauaga

SEQ ID NO: 963158 - RNA, 19 nt, Homo sapiens
  misc_RNA (1)...(19): siRNA sense strand
gaaaauggagaaacagaaa

SEQ ID NO: 963159 - RNA, 19 nt, Homo sapiens
  misc_RNA (1)...(19): siRNA sense strand
cauucgaagucuccuguuu

SEQ ID NO: 963160 - RNA, 19 nt, Homo sapiens
  misc_RNA (1)...(19): siRNA sense strand
cagaaauauucgcgacuga

SEQ ID NO: 963161 - RNA, 19 nt, Homo sapiens
  misc_RNA (1)...(19): siRNA sense strand
cuggaaagcuaaucgacaa

SEQ ID NO: 963162 - RNA, 19 nt, Homo sapiens
  misc_RNA (1)...(19): siRNA sense strand
aacaguggcuacaaaguga

SEQ ID NO: 963163 - RNA, 19 nt, Homo sapiens
  misc_RNA (1)...(19): siRNA sense strand
gaaagaagguuugcaguau

SEQ ID NO: 963164 - RNA, 19 nt, Homo sapiens
  misc_RNA (1)...(19): siRNA sense strand
ucacaaagaugaagacuug

SEQ ID NO: 963165 - RNA, 19 nt, Homo sapiens
  misc_RNA (1)...(19): siRNA sense strand
ggcaagagcuaaauuuauu

SEQ ID NO: 963166 - RNA, 19 nt, Homo sapiens
  misc_RNA (1)...(19): siRNA sense strand
gaugaagacuuguggauau

SEQ ID NO: 963167 - RNA, 19 nt, Homo sapiens
  misc_RNA (1)...(19): siRNA sense strand
uuaacuggcugcacauaua

SEQ ID NO: 963168 - RNA, 19 nt, Homo sapiens
  misc_RNA (1)...(19): siRNA sense strand
gcacauauaccuuaauaac

SEQ ID NO: 963169 - RNA, 19 nt, Homo sapiens
  misc_RNA (1)...(19): siRNA sense strand
cugcacauauaccuuaaua

SEQ ID NO: 963170 - RNA, 19 nt, Homo sapiens
  misc_RNA (1)...(19): siRNA sense strand
ugaaagaagguuugcagua

SEQ ID NO: 963171 - RNA, 19 nt, Homo sapiens
  misc_RNA (1)...(19): siRNA sense strand
gaagacuuguggauaugga

SEQ ID NO: 963172 - RNA, 19 nt, Homo sapiens
  misc_RNA (1)...(19): siRNA sense strand
gcuggaaauuauauuggaa

SEQ ID NO: 963173 - RNA, 19 nt, Homo sapiens
  misc_RNA (1)...(19): siRNA sense strand
gagcggaaaccugaaagaa

SEQ ID NO: 963174 - RNA, 19 nt, Homo sapiens
  misc_RNA (1)...(19): siRNA sense strand
aaagaagguuugcaguauc

SEQ ID NO: 963175 - RNA, 19 nt, Homo sapiens
  misc_RNA (1)...(19): siRNA sense strand
caaguaauccugccaucau

SEQ ID NO: 963176 - RNA, 19 nt, Homo sapiens
  misc_RNA (1)...(19): siRNA sense strand
gugaugagccagcuaaauc

SEQ ID NO: 963177 - RNA, 19 nt, Homo sapiens
  misc_RNA (1)...(19): siRNA sense strand
gggauucgcagaggcauuu

SEQ ID NO: 963178 - RNA, 19 nt, Homo sapiens
  misc_RNA (1)...(19): siRNA sense strand
gcaaucacaaagaugaaga

SEQ ID NO: 963179 - RNA, 19 nt, Homo sapiens
  misc_RNA (1)...(19): siRNA sense strand
gcugcaaucacaaagauga

SEQ ID NO: 963180 - RNA, 19 nt, Homo sapiens
  misc_RNA (1)...(19): siRNA sense strand
caaaggcauucugcgaugu

SEQ ID NO: 963181 - RNA, 19 nt, Homo sapiens
  misc_RNA (1)...(19): siRNA sense strand
gccuagaucuuuugguuaa

SEQ ID NO: 963182 - RNA, 19 nt, Homo sapiens
  misc_RNA (1)...(19): siRNA sense strand
cgauguugcucuccaugga

SEQ ID NO: 963183 - RNA, 19 nt, Homo sapiens
  misc_RNA (1)...(19): siRNA sense strand
uggcugcacauauaccuua

SEQ ID NO: 963184 - RNA, 19 nt, Homo sapiens
  misc_RNA (1)...(19): siRNA sense strand
uaaccaggauucgggaaca

SEQ ID NO: 963185 - RNA, 19 nt, Homo sapiens
  misc_RNA (1)...(19): siRNA sense strand
uggcaagagcuaaauuuau

SEQ ID NO: 963186 - RNA, 19 nt, Homo sapiens
  misc_RNA (1)...(19): siRNA sense strand
ugccugcccucagugguua

SEQ ID NO: 963187 - RNA, 19 nt, Homo sapiens
  misc_RNA (1)...(19): siRNA sense strand
gcccucagugguuaacuuu

SEQ ID NO: 963188 - RNA, 19 nt, Homo sapiens
  misc_RNA (1)...(19): siRNA sense strand
agaugaagacuuguggaua

SEQ ID NO: 963189 - RNA, 19 nt, Homo sapiens
  misc_RNA (1)...(19): siRNA sense strand
uuggcaagagcuaaauuua

SEQ ID NO: 963190 - RNA, 19 nt, Homo sapiens
  misc_RNA (1)...(19): siRNA sense strand
gguuugcaguauccucaga

SEQ ID NO: 963191 - RNA, 19 nt, Homo sapiens
  misc_RNA (1)...(19): siRNA sense strand
ggcugcacauauaccuuaa

SEQ ID NO: 963192 - RNA, 19 nt, Homo sapiens
  misc_RNA (1)...(19): siRNA sense strand
gcugcuggaaauuauauug

SEQ ID NO: 963193 - RNA, 19 nt, Homo sapiens
  misc_RNA (1)...(19): siRNA sense strand
guuaacuggcugcacauau

SEQ ID NO: 963194 - RNA, 19 nt, Homo sapiens
  misc_RNA (1)...(19): siRNA sense strand
agauuugccugcccucagu

SEQ ID NO: 963195 - RNA, 19 nt, Homo sapiens
  misc_RNA (1)...(19): siRNA sense strand
ccaaguaauccugccauca

SEQ ID NO: 963196 - RNA, 19 nt, Homo sapiens
  misc_RNA (1)...(19): siRNA sense strand
cugccaagcuguguucuac

SEQ ID NO: 963197 - RNA, 19 nt, Homo sapiens
  misc_RNA (1)...(19): siRNA sense strand
uaacuggcugcacauauac

SEQ ID NO: 963198 - RNA, 19 nt, Homo sapiens
  misc_RNA (1)...(19): siRNA sense strand
ucacagagcucccagcaua

SEQ ID NO: 963199 - RNA, 19 nt, Homo sapiens
  misc_RNA (1)...(19): siRNA sense strand
ucaagcagcuccuguauga

SEQ ID NO: 963200 - RNA, 19 nt, Homo sapiens
  misc_RNA (1)...(19): siRNA sense strand
cagagucacugcucauuaa

SEQ ID NO: 963201 - RNA, 19 nt, Homo sapiens
  misc_RNA (1)...(19): siRNA sense strand
cagcgacacugugagauua

SEQ ID NO: 963202 - RNA, 19 nt, Homo sapiens
  misc_RNA (1)...(19): siRNA sense strand
acaacuguguggauauuua

SEQ ID NO: 963203 - RNA, 19 nt, Homo sapiens
  misc_RNA (1)...(19): siRNA sense strand
uuacaaccaugccaaguuu

SEQ ID NO: 963204 - RNA, 19 nt, Homo sapiens
  misc_RNA (1)...(19): siRNA sense strand
gauggcaccugcauagaga

SEQ ID NO: 963205 - RNA, 19 nt, Homo sapiens
  misc_RNA (1)...(19): siRNA sense strand
ccagcaagccgacaaauga

SEQ ID NO: 963206 - RNA, 19 nt, Homo sapiens
  misc_RNA (1)...(19): siRNA sense strand
cgacaacuguguggauauu

SEQ ID NO: 963207 - RNA, 19 nt, Homo sapiens
  misc_RNA (1)...(19): siRNA sense strand
cacaaagugcuguuauuua

SEQ ID NO: 963208 - RNA, 19 nt, Homo sapiens
  misc_RNA (1)...(19): siRNA sense strand
acaaagugcuguuauuuac

SEQ ID NO: 963209 - RNA, 19 nt, Homo sapiens
  misc_RNA (1)...(19): siRNA sense strand
agagauugguuaugugaaa

SEQ ID NO: 963210 - RNA, 19 nt, Homo sapiens
  misc_RNA (1)...(19): siRNA sense strand
ucacaaagugcuguuauuu

SEQ ID NO: 963211 - RNA, 19 nt, Homo sapiens
  misc_RNA (1)...(19): siRNA sense strand
gguagaaggaagaccauuu

SEQ ID NO: 963212 - RNA, 19 nt, Homo sapiens
  misc_RNA (1)...(19): siRNA sense strand
ccagagucacugcucauua

SEQ ID NO: 963213 - RNA, 19 nt, Homo sapiens
  misc_RNA (1)...(19): siRNA sense strand
gagcuucugucugcugcua

SEQ ID NO: 963214 - RNA, 19 nt, Homo sapiens
  misc_RNA (1)...(19): siRNA sense strand
uuccaaagguuccguggua

SEQ ID NO: 963215 - RNA, 19 nt, Homo sapiens
  misc_RNA (1)...(19): siRNA sense strand
gcagcgacacugugagauu

SEQ ID NO: 963216 - RNA, 19 nt, Homo sapiens
  misc_RNA (1)...(19): siRNA sense strand
cgaaggcuacuuucucaaa

SEQ ID NO: 963217 - RNA, 19 nt, Homo sapiens
  misc_RNA (1)...(19): siRNA sense strand
gaaggaagaccauuuuaug

SEQ ID NO: 963218 - RNA, 19 nt, Homo sapiens
  misc_RNA (1)...(19): siRNA sense strand
ugugaaauacuccaucuuu

SEQ ID NO: 963219 - RNA, 19 nt, Homo sapiens
  misc_RNA (1)...(19): siRNA sense strand
caaagguuccgugguauga

SEQ ID NO: 963220 - RNA, 19 nt, Homo sapiens
  misc_RNA (1)...(19): siRNA sense strand
gaaggcuacuuucucaaaa

SEQ ID NO: 963221 - RNA, 19 nt, Homo sapiens
  misc_RNA (1)...(19): siRNA sense strand
gagauugguuaugugaaau

SEQ ID NO: 963222 - RNA, 19 nt, Homo sapiens
  misc_RNA (1)...(19): siRNA sense strand
ggacguuggccaucagaau

SEQ ID NO: 963223 - RNA, 19 nt, Homo sapiens
  misc_RNA (1)...(19): siRNA sense strand
ccacuugucgucuuccaaa

SEQ ID NO: 963224 - RNA, 19 nt, Homo sapiens
  misc_RNA (1)...(19): siRNA sense strand
gacguuggccaucagaauu

SEQ ID NO: 963225 - RNA, 19 nt, Homo sapiens
  misc_RNA (1)...(19): siRNA sense strand
gaucauggagcuucugucu

SEQ ID NO: 963226 - RNA, 19 nt, Homo sapiens
  misc_RNA (1)...(19): siRNA sense strand
gcaccugcauagagauugg

SEQ ID NO: 963227 - RNA, 19 nt, Homo sapiens
  misc_RNA (1)...(19): siRNA sense strand
gaauucaguccauccacuu

SEQ ID NO: 963228 - RNA, 19 nt, Homo sapiens
  misc_RNA (1)...(19): siRNA sense strand
ucugucugcugcuaaguuu

SEQ ID NO: 963229 - RNA, 19 nt, Homo sapiens
  misc_RNA (1)...(19): siRNA sense strand
cagaggacguuggccauca

SEQ ID NO: 963230 - RNA, 19 nt, Homo sapiens
  misc_RNA (1)...(19): siRNA sense strand
caucaauaccgacaacugu

SEQ ID NO: 963231 - RNA, 19 nt, Homo sapiens
  misc_RNA (1)...(19): siRNA sense strand
gcucacaaagugcuguuau

SEQ ID NO: 963232 - RNA, 19 nt, Homo sapiens
  misc_RNA (1)...(19): siRNA sense strand
ggaugugcuccaggacuua

SEQ ID NO: 963233 - RNA, 19 nt, Homo sapiens
  misc_RNA (1)...(19): siRNA sense strand
caaaugauggcaccugcau

SEQ ID NO: 963234 - RNA, 19 nt, Homo sapiens
  misc_RNA (1)...(19): siRNA sense strand
ugcgaaggcuacuuucuca

SEQ ID NO: 963235 - RNA, 19 nt, Homo sapiens
  misc_RNA (1)...(19): siRNA sense strand
guagaaggaagaccauuuu

SEQ ID NO: 963236 - RNA, 19 nt, Homo sapiens
  misc_RNA (1)...(19): siRNA sense strand
uaugugaaauacuccaucu

SEQ ID NO: 963237 - RNA, 19 nt, Homo sapiens
  misc_RNA (1)...(19): siRNA sense strand
caaagugcuguuauuuaca

SEQ ID NO: 963238 - RNA, 19 nt, Homo sapiens
  misc_RNA (1)...(19): siRNA sense strand
cucacaaagugcuguuauu

SEQ ID NO: 963239 - RNA, 19 nt, Homo sapiens
  misc_RNA (1)...(19): siRNA sense strand
gcaucaauaccgacaacug

SEQ ID NO: 963240 - RNA, 19 nt, Homo sapiens
  misc_RNA (1)...(19): siRNA sense strand
acagagcucccagcauauu

SEQ ID NO: 963241 - RNA, 19 nt, Homo sapiens
  misc_RNA (1)...(19): siRNA sense strand
ccaaagguuccgugguaug

SEQ ID NO: 963242 - RNA, 19 nt, Homo sapiens
  misc_RNA (1)...(19): siRNA sense strand
guguggauauuuacaacca

SEQ ID NO: 963243 - RNA, 19 nt, Homo sapiens
  misc_RNA (1)...(19): siRNA sense strand
aagcagcuccuguaugaca

SEQ ID NO: 963244 - RNA, 19 nt, Homo sapiens
  misc_RNA (1)...(19): siRNA sense strand
cauucaagcagcuccugua

SEQ ID NO: 963245 - RNA, 19 nt, Homo sapiens
  misc_RNA (1)...(19): siRNA sense strand
gcagcuccuguaugacaaa

SEQ ID NO: 963246 - RNA, 19 nt, Homo sapiens
  misc_RNA (1)...(19): siRNA sense strand
auagagauugguuauguga

SEQ ID NO: 963247 - RNA, 19 nt, Homo sapiens
  misc_RNA (1)...(19): siRNA sense strand
aggaugugcuccaggacuu

SEQ ID NO: 963248 - RNA, 19 nt, Homo sapiens
  misc_RNA (1)...(19): siRNA sense strand
accgacaacuguguggaua

SEQ ID NO: 963249 - RNA, 19 nt, Homo sapiens
  misc_RNA (1)...(19): siRNA sense strand
gauugguuaugugaaauac

SEQ ID NO: 963250 - RNA, 19 nt, Homo sapiens
  misc_RNA (1)...(19): siRNA sense strand
ugaagggaccggccaggau

SEQ ID NO: 963251 - RNA, 19 nt, Homo sapiens
  misc_RNA (1)...(19): siRNA sense strand
aaugauggcaccugcauag

SEQ ID NO: 963252 - RNA, 19 nt, Homo sapiens
  misc_RNA (1)...(19): siRNA sense strand
ucuuucagcugguuaugca

SEQ ID NO: 963253 - RNA, 19 nt, Homo sapiens
  misc_RNA (1)...(19): siRNA sense strand
gacaacuguguggauauuu

SEQ ID NO: 963254 - RNA, 19 nt, Homo sapiens
  misc_RNA (1)...(19): siRNA sense strand
ucaauaccgacaacugugu

SEQ ID NO: 963255 - RNA, 19 nt, Homo sapiens
  misc_RNA (1)...(19): siRNA sense strand
gcgacacugugagauuauc

SEQ ID NO: 963256 - RNA, 19 nt, Homo sapiens
  misc_RNA (1)...(19): siRNA sense strand
aagcacuccucuccagcaa

SEQ ID NO: 963257 - RNA, 19 nt, Homo sapiens
  misc_RNA (1)...(19): siRNA sense strand
gagaucauggagcuucugu

SEQ ID NO: 963258 - RNA, 19 nt, Homo sapiens
  misc_RNA (1)...(19): siRNA sense strand
caacuguguggauauuuac

SEQ ID NO: 963259 - RNA, 19 nt, Homo sapiens
  misc_RNA (1)...(19): siRNA sense strand
gaaauugguuggguucauu

SEQ ID NO: 963260 - RNA, 19 nt, Homo sapiens
  misc_RNA (1)...(19): siRNA sense strand
cagcaaacauccauaucua

SEQ ID NO: 963261 - RNA, 19 nt, Homo sapiens
  misc_RNA (1)...(19): siRNA sense strand
gaaaggguuugauguguuc

SEQ ID NO: 963262 - RNA, 19 nt, Homo sapiens
  misc_RNA (1)...(19): siRNA sense strand
ggaagaugaugacaacaug

SEQ ID NO: 963263 - RNA, 19 nt, Homo sapiens
  misc_RNA (1)...(19): siRNA sense strand
gcagaaauaugaccaugca

SEQ ID NO: 963264 - RNA, 19 nt, Homo sapiens
  misc_RNA (1)...(19): siRNA sense strand
gacaacauguuccgauuug

SEQ ID NO: 963265 - RNA, 19 nt, Homo sapiens
  misc_RNA (1)...(19): siRNA sense strand
caagaggguugcuccaguu

SEQ ID NO: 963266 - RNA, 19 nt, Homo sapiens
  misc_RNA (1)...(19): siRNA sense strand
gcagagaggauccaggaaa

SEQ ID NO: 963267 - RNA, 19 nt, Homo sapiens
  misc_RNA (1)...(19): siRNA sense strand
caaaggacauuccaguagu

SEQ ID NO: 963268 - RNA, 19 nt, Homo sapiens
  misc_RNA (1)...(19): siRNA sense strand
caaugacacuggagccaaa

SEQ ID NO: 963269 - RNA, 19 nt, Homo sapiens
  misc_RNA (1)...(19): siRNA sense strand
acggcaaccugcaguauua

SEQ ID NO: 963270 - RNA, 19 nt, Homo sapiens
  misc_RNA (1)...(19): siRNA sense strand
ccagguacuugaagcaauu

SEQ ID NO: 963271 - RNA, 19 nt, Homo sapiens
  misc_RNA (1)...(19): siRNA sense strand
agaagaagaugguagagau

SEQ ID NO: 963272 - RNA, 19 nt, Homo sapiens
  misc_RNA (1)...(19): siRNA sense strand
agaacuauguggaagauga

SEQ ID NO: 963273 - RNA, 19 nt, Homo sapiens
  misc_RNA (1)...(19): siRNA sense strand
acggagaggugacagauuu

SEQ ID NO: 963274 - RNA, 19 nt, Homo sapiens
  misc_RNA (1)...(19): siRNA sense strand
ugaaaggguuugauguguu

SEQ ID NO: 963275 - RNA, 19 nt, Homo sapiens
  misc_RNA (1)...(19): siRNA sense strand
ggaagcugauugaagugaa

SEQ ID NO: 963276 - RNA, 19 nt, Homo sapiens
  misc_RNA (1)...(19): siRNA sense strand
caccugagcagaaauauga

SEQ ID NO: 963277 - RNA, 19 nt, Homo sapiens
  misc_RNA (1)...(19): siRNA sense strand
caugagcacugcagcgauu

SEQ ID NO: 963278 - RNA, 19 nt, Homo sapiens
  misc_RNA (1)...(19): siRNA sense strand
ugacagauuuccugagcuu

SEQ ID NO: 963279 - RNA, 19 nt, Homo sapiens
  misc_RNA (1)...(19): siRNA sense strand
acaagaagcugcguuccaa

SEQ ID NO: 963280 - RNA, 19 nt, Homo sapiens
  misc_RNA (1)...(19): siRNA sense strand
agaauaucaucgacacuuu

SEQ ID NO: 963281 - RNA, 19 nt, Homo sapiens
  misc_RNA (1)...(19): siRNA sense strand
ggucucaagucggaaauug

SEQ ID NO: 963282 - RNA, 19 nt, Homo sapiens
  misc_RNA (1)...(19): siRNA sense strand
cagagaggauccaggaaau

SEQ ID NO: 963283 - RNA, 19 nt, Homo sapiens
  misc_RNA (1)...(19): siRNA sense strand
uggagaagcucaaguuugg

SEQ ID NO: 963284 - RNA, 19 nt, Homo sapiens
  misc_RNA (1)...(19): siRNA sense strand
gaaugagaacuauguggaa

SEQ ID NO: 963285 - RNA, 19 nt, Homo sapiens
  misc_RNA (1)...(19): siRNA sense strand
cacggaagcugauugaagu

SEQ ID NO: 963286 - RNA, 19 nt, Homo sapiens
  misc_RNA (1)...(19): siRNA sense strand
gaagcucaaguuuggcaua

SEQ ID NO: 963287 - RNA, 19 nt, Homo sapiens
  misc_RNA (1)...(19): siRNA sense strand
ggaaauugguuggguucau

SEQ ID NO: 963288 - RNA, 19 nt, Homo sapiens
  misc_RNA (1)...(19): siRNA sense strand
gagaauaucaucgacacuu

SEQ ID NO: 963289 - RNA, 19 nt, Homo sapiens
  misc_RNA (1)...(19): siRNA sense strand
uguacacccuccugaauga

SEQ ID NO: 963290 - RNA, 19 nt, Homo sapiens
  misc_RNA (1)...(19): siRNA sense strand
gaagcugauugaagugaag

SEQ ID NO: 963291 - RNA, 19 nt, Homo sapiens
  misc_RNA (1)...(19): siRNA sense strand
ccacaagagucucaaagcu

SEQ ID NO: 963292 - RNA, 19 nt, Homo sapiens
  misc_RNA (1)...(19): siRNA sense strand
gaucagccugugaagauga

SEQ ID NO: 963293 - RNA, 19 nt, Homo sapiens
  misc_RNA (1)...(19): siRNA sense strand
gaggguugcuccaguucug

SEQ ID NO: 963294 - RNA, 19 nt, Homo sapiens
  misc_RNA (1)...(19): siRNA sense strand
gagaagaagaugguagaga

SEQ ID NO: 963295 - RNA, 19 nt, Homo sapiens
  misc_RNA (1)...(19): siRNA sense strand
ggaaauacagaaggccauu

SEQ ID NO: 963296 - RNA, 19 nt, Homo sapiens
  misc_RNA (1)...(19): siRNA sense strand
ugacaacauguuccgauuu

SEQ ID NO: 963297 - RNA, 19 nt, Homo sapiens
  misc_RNA (1)...(19): siRNA sense strand
gaauaucaucgacacuuuc

SEQ ID NO: 963298 - RNA, 19 nt, Homo sapiens
  misc_RNA (1)...(19): siRNA sense strand
gccagagacucccaagaca

SEQ ID NO: 963299 - RNA, 19 nt, Homo sapiens
  misc_RNA (1)...(19): siRNA sense strand
caacauguuccgauuugau

SEQ ID NO: 963300 - RNA, 19 nt, Homo sapiens
  misc_RNA (1)...(19): siRNA sense strand
ucaaugcacuggaucucau

SEQ ID NO: 963301 - RNA, 19 nt, Homo sapiens
  misc_RNA (1)...(19): siRNA sense strand
gaagcaauuucaccuuacg

SEQ ID NO: 963302 - RNA, 19 nt, Homo sapiens
  misc_RNA (1)...(19): siRNA sense strand
gaagaagaugguagagauc

SEQ ID NO: 963303 - RNA, 19 nt, Homo sapiens
  misc_RNA (1)...(19): siRNA sense strand
gaugguagagaucaacuuc

SEQ ID NO: 963304 - RNA, 19 nt, Homo sapiens
  misc_RNA (1)...(19): siRNA sense strand
gcagcgauugcgagaauga

SEQ ID NO: 963305 - RNA, 19 nt, Homo sapiens
  misc_RNA (1)...(19): siRNA sense strand
gggcugcgaccaauggaaa

SEQ ID NO: 963306 - RNA, 19 nt, Homo sapiens
  misc_RNA (1)...(19): siRNA sense strand
gaaauacagaaggccauug

SEQ ID NO: 963307 - RNA, 19 nt, Homo sapiens
  misc_RNA (1)...(19): siRNA sense strand
gcaguauuaccuuuacaau

SEQ ID NO: 963308 - RNA, 19 nt, Homo sapiens
  misc_RNA (1)...(19): siRNA sense strand
cugcagcgauugcgagaau

SEQ ID NO: 963309 - RNA, 19 nt, Homo sapiens
  misc_RNA (1)...(19): siRNA sense strand
aaaggacauuccaguagug

SEQ ID NO: 963310 - RNA, 19 nt, Homo sapiens
  misc_RNA (1)...(19): siRNA sense strand
ggaucagccugugaagaug

SEQ ID NO: 963311 - RNA, 19 nt, Homo sapiens
  misc_RNA (1)...(19): siRNA sense strand
ugagaacuauguggaagau

SEQ ID NO: 963312 - RNA, 19 nt, Homo sapiens
  misc_RNA (1)...(19): siRNA sense strand
agaaggccauugagcuguu

SEQ ID NO: 963313 - RNA, 19 nt, Homo sapiens
  misc_RNA (1)...(19): siRNA sense strand
gaagaugaugacaacaugu

SEQ ID NO: 963314 - RNA, 19 nt, Homo sapiens
  misc_RNA (1)...(19): siRNA sense strand
gggcgaucguggugugcua

SEQ ID NO: 963315 - RNA, 19 nt, Homo sapiens
  misc_RNA (1)...(19): siRNA sense strand
gagaggauccaggaaauac

SEQ ID NO: 963316 - RNA, 19 nt, Homo sapiens
  misc_RNA (1)...(19): siRNA sense strand
ggacggcaaccugcaguau

SEQ ID NO: 963317 - RNA, 19 nt, Homo sapiens
  misc_RNA (1)...(19): siRNA sense strand
gaacuauguggaagaugau

SEQ ID NO: 963318 - RNA, 19 nt, Homo sapiens
  misc_RNA (1)...(19): siRNA sense strand
gaaggccauugagcuguuc

SEQ ID NO: 963319 - RNA, 19 nt, Homo sapiens
  misc_RNA (1)...(19): siRNA sense strand
aaauacagaaggccauuga

SEQ ID NO: 963320 - RNA, 19 nt, Homo sapiens
  misc_RNA (1)...(19): siRNA sense strand
caagcgaagcuaccaguuc

SEQ ID NO: 963321 - RNA, 19 nt, Homo sapiens
  misc_RNA (1)...(19): siRNA sense strand
acaaaggacauuccaguag

SEQ ID NO: 963322 - RNA, 19 nt, Homo sapiens
  misc_RNA (1)...(19): siRNA sense strand
ccacggaagcugauugaag

SEQ ID NO: 963323 - RNA, 19 nt, Homo sapiens
  misc_RNA (1)...(19): siRNA sense strand
cagagaagaagaugguaga

SEQ ID NO: 963324 - RNA, 19 nt, Homo sapiens
  misc_RNA (1)...(19): siRNA sense strand
gaacgggaacggccaugag

SEQ ID NO: 963325 - RNA, 19 nt, Homo sapiens
  misc_RNA (1)...(19): siRNA sense strand
aagcgaagcuaccaguucu

SEQ ID NO: 963326 - RNA, 19 nt, Homo sapiens
  misc_RNA (1)...(19): siRNA sense strand
acacuuucgugguggagaa

SEQ ID NO: 963327 - RNA, 19 nt, Homo sapiens
  misc_RNA (1)...(19): siRNA sense strand
guauuaccuuuacaauugg

SEQ ID NO: 963328 - RNA, 19 nt, Homo sapiens
  misc_RNA (1)...(19): siRNA sense strand
gcaagcgaagcuaccaguu

SEQ ID NO: 963329 - RNA, 19 nt, Homo sapiens
  misc_RNA (1)...(19): siRNA sense strand
gacggcaaccugcaguauu

SEQ ID NO: 963330 - RNA, 19 nt, Homo sapiens
  misc_RNA (1)...(19): siRNA sense strand
aaauugguuggguucauua

SEQ ID NO: 963331 - RNA, 19 nt, Homo sapiens
  misc_RNA (1)...(19): siRNA sense strand
cagauuuccugagcuuuua

SEQ ID NO: 963332 - RNA, 19 nt, Homo sapiens
  misc_RNA (1)...(19): siRNA sense strand
gggcaucuuccaagcaguu

SEQ ID NO: 963333 - RNA, 19 nt, Homo sapiens
  misc_RNA (1)...(19): siRNA sense strand
agaagaugguagagaucaa

SEQ ID NO: 963334 - RNA, 19 nt, Homo sapiens
  misc_RNA (1)...(19): siRNA sense strand
uguggaagaugaugacaac

SEQ ID NO: 963335 - RNA, 19 nt, Homo sapiens
  misc_RNA (1)...(19): siRNA sense strand
aacaaaggacauuccagua

SEQ ID NO: 963336 - RNA, 19 nt, Homo sapiens
  misc_RNA (1)...(19): siRNA sense strand
acacagagaagaagauggu

SEQ ID NO: 963337 - RNA, 19 nt, Homo sapiens
  misc_RNA (1)...(19): siRNA sense strand
ccagcaaacauccauaucu

SEQ ID NO: 963338 - RNA, 19 nt, Homo sapiens
  misc_RNA (1)...(19): siRNA sense strand
gagccugacaaggacaaua

SEQ ID NO: 963339 - RNA, 19 nt, Homo sapiens
  misc_RNA (1)...(19): siRNA sense strand
uuggacuggugcuacaaua

SEQ ID NO: 963340 - RNA, 19 nt, Homo sapiens
  misc_RNA (1)...(19): siRNA sense strand
gaagguuggacuggugcua

SEQ ID NO: 963341 - RNA, 19 nt, Homo sapiens
  misc_RNA (1)...(19): siRNA sense strand
ggaacgggaacggccauga

SEQ ID NO: 963342 - RNA, 19 nt, Homo sapiens
  misc_RNA (1)...(19): siRNA sense strand
agagaggauccaggaaaua

SEQ ID NO: 963343 - RNA, 19 nt, Homo sapiens
  misc_RNA (1)...(19): siRNA sense strand
gcgagaaugaggaggacaa

SEQ ID NO: 963344 - RNA, 19 nt, Homo sapiens
  misc_RNA (1)...(19): siRNA sense strand
aaccugcaguauuaccuuu

SEQ ID NO: 963345 - RNA, 19 nt, Homo sapiens
  misc_RNA (1)...(19): siRNA sense strand
acgcugcccuccaccauca

SEQ ID NO: 963346 - RNA, 19 nt, Homo sapiens
  misc_RNA (1)...(19): siRNA sense strand
ugauugaagugaaguucuc

SEQ ID NO: 963347 - RNA, 19 nt, Homo sapiens
  misc_RNA (1)...(19): siRNA sense strand
ucuaugacacagagaagaa

SEQ ID NO: 963348 - RNA, 19 nt, Homo sapiens
  misc_RNA (1)...(19): siRNA sense strand
agagaucaacuuccugugu

SEQ ID NO: 963349 - RNA, 19 nt, Homo sapiens
  misc_RNA (1)...(19): siRNA sense strand
gagagugagacagcaguga

SEQ ID NO: 963350 - RNA, 19 nt, Homo sapiens
  misc_RNA (1)...(19): siRNA sense strand
aaugaaaggguuugaugug

SEQ ID NO: 963351 - RNA, 19 nt, Homo sapiens
  misc_RNA (1)...(19): siRNA sense strand
caaacggagaggugacaga

SEQ ID NO: 963352 - RNA, 19 nt, Homo sapiens
  misc_RNA (1)...(19): siRNA sense strand
gcaucuuccaagcaguuua

SEQ ID NO: 963353 - RNA, 19 nt, Homo sapiens
  misc_RNA (1)...(19): siRNA sense strand
aagaugaugacaacauguu

SEQ ID NO: 963354 - RNA, 19 nt, Homo sapiens
  misc_RNA (1)...(19): siRNA sense strand
ccguggagccugacaagga

SEQ ID NO: 963355 - RNA, 19 nt, Homo sapiens
  misc_RNA (1)...(19): siRNA sense strand
caaccugcaguauuaccuu

SEQ ID NO: 963356 - RNA, 19 nt, Homo sapiens
  misc_RNA (1)...(19): siRNA sense strand
cagauucagcccaggauca

SEQ ID NO: 963357 - RNA, 19 nt, Homo sapiens
  misc_RNA (1)...(19): siRNA sense strand
aagaagcugcguuccaaga

SEQ ID NO: 963358 - RNA, 19 nt, Homo sapiens
  misc_RNA (1)...(19): siRNA sense strand
gaagaugguagagaucaac

SEQ ID NO: 963359 - RNA, 19 nt, Homo sapiens
  misc_RNA (1)...(19): siRNA sense strand
cagaauggcugugugaaga

SEQ ID NO: 963360 - RNA, 19 nt, Homo sapiens
  misc_RNA (1)...(19): siRNA sense strand
ggacacaggcaccgagaaa

SEQ ID NO: 963361 - RNA, 19 nt, Homo sapiens
  misc_RNA (1)...(19): siRNA sense strand
ucaagugccugcuggagaa

SEQ ID NO: 963362 - RNA, 19 nt, Homo sapiens
  misc_RNA (1)...(19): siRNA sense strand
ugacaucacccucaucauu

SEQ ID NO: 963363 - RNA, 19 nt, Homo sapiens
  misc_RNA (1)...(19): siRNA sense strand
gaagccacauucaaacagu

SEQ ID NO: 963364 - RNA, 19 nt, Homo sapiens
  misc_RNA (1)...(19): siRNA sense strand
guaagauccuggagaugga

SEQ ID NO: 963365 - RNA, 19 nt, Homo sapiens
  misc_RNA (1)...(19): siRNA sense strand
ggcauuguguuccucauug

SEQ ID NO: 963366 - RNA, 19 nt, Homo sapiens
  misc_RNA (1)...(19): siRNA sense strand
gacaucacccucaucauug

SEQ ID NO: 963367 - RNA, 19 nt, Homo sapiens
  misc_RNA (1)...(19): siRNA sense strand
cgaggucguuuacaaguca

SEQ ID NO: 963368 - RNA, 19 nt, Homo sapiens
  misc_RNA (1)...(19): siRNA sense strand
caccagcgauggcaugaau

SEQ ID NO: 963369 - RNA, 19 nt, Homo sapiens
  misc_RNA (1)...(19): siRNA sense strand
ggaauggacuccucauccu

SEQ ID NO: 963370 - RNA, 19 nt, Homo sapiens
  misc_RNA (1)...(19): siRNA sense strand
caccacaggaaauuaguua

SEQ ID NO: 963371 - RNA, 19 nt, Homo sapiens
  misc_RNA (1)...(19): siRNA sense strand
caacuacgagcuggacuuu

SEQ ID NO: 963372 - RNA, 19 nt, Homo sapiens
  misc_RNA (1)...(19): siRNA sense strand
cagaucaucaccaucagua

SEQ ID NO: 963373 - RNA, 19 nt, Homo sapiens
  misc_RNA (1)...(19): siRNA sense strand
ugaggaugcugaagaugau

SEQ ID NO: 963374 - RNA, 19 nt, Homo sapiens
  misc_RNA (1)...(19): siRNA sense strand
cacaggaaauuaguuacuu

SEQ ID NO: 963375 - RNA, 19 nt, Homo sapiens
  misc_RNA (1)...(19): siRNA sense strand
gaucaucaccaucaguauc

SEQ ID NO: 963376 - RNA, 19 nt, Homo sapiens
  misc_RNA (1)...(19): siRNA sense strand
ggccagaucaucaccauca

SEQ ID NO: 963377 - RNA, 19 nt, Homo sapiens
  misc_RNA (1)...(19): siRNA sense strand
aaacaguaccgcaccaaga

SEQ ID NO: 963378 - RNA, 19 nt, Homo sapiens
  misc_RNA (1)...(19): siRNA sense strand
ugaugaggaugcugaagau

SEQ ID NO: 963379 - RNA, 19 nt, Homo sapiens
  misc_RNA (1)...(19): siRNA sense strand
gcucccaugugcagaacuu

SEQ ID NO: 963380 - RNA, 19 nt, Homo sapiens
  misc_RNA (1)...(19): siRNA sense strand
aguagaagccacauucaaa

SEQ ID NO: 963381 - RNA, 19 nt, Homo sapiens
  misc_RNA (1)...(19): siRNA sense strand
gaccucauccggaacaugu

SEQ ID NO: 963382 - RNA, 19 nt, Homo sapiens
  misc_RNA (1)...(19): siRNA sense strand
gaauggcugugugaagagu

SEQ ID NO: 963383 - RNA, 19 nt, Homo sapiens
  misc_RNA (1)...(19): siRNA sense strand
ucgcccaggucaacaacua

SEQ ID NO: 963384 - RNA, 19 nt, Homo sapiens
  misc_RNA (1)...(19): siRNA sense strand
guucccagccaaccuagua

SEQ ID NO: 963385 - RNA, 19 nt, Homo sapiens
  misc_RNA (1)...(19): siRNA sense strand
cggguaagauccuggagau

SEQ ID NO: 963386 - RNA, 19 nt, Homo sapiens
  misc_RNA (1)...(19): siRNA sense strand
gcagaauggcugugugaag

SEQ ID NO: 963387 - RNA, 19 nt, Homo sapiens
  misc_RNA (1)...(19): siRNA sense strand
acaggaaauuaguuacuuc

SEQ ID NO: 963388 - RNA, 19 nt, Homo sapiens
  misc_RNA (1)...(19): siRNA sense strand
ccauauaugucggaaggau

SEQ ID NO: 963389 - RNA, 19 nt, Homo sapiens
  misc_RNA (1)...(19): siRNA sense strand
gaccguuuccgcaccauga

SEQ ID NO: 963390 - RNA, 19 nt, Homo sapiens
  misc_RNA (1)...(19): siRNA sense strand
acuacgagcuggacuuugg

SEQ ID NO: 963391 - RNA, 19 nt, Homo sapiens
  misc_RNA (1)...(19): siRNA sense strand
aagccacauucaaacagua

SEQ ID NO: 963392 - RNA, 19 nt, Homo sapiens
  misc_RNA (1)...(19): siRNA sense strand
cgcccgaggucguuuacaa

SEQ ID NO: 963393 - RNA, 19 nt, Homo sapiens
  misc_RNA (1)...(19): siRNA sense strand
ccacacugcccaucaccuu

SEQ ID NO: 963394 - RNA, 19 nt, Homo sapiens
  misc_RNA (1)...(19): siRNA sense strand
ccuaguagaagccacauuc

SEQ ID NO: 963395 - RNA, 19 nt, Homo sapiens
  misc_RNA (1)...(19): siRNA sense strand
acugggcucuggaccguuu

SEQ ID NO: 963396 - RNA, 19 nt, Homo sapiens
  misc_RNA (1)...(19): siRNA sense strand
ggcgguggcugugugguau

SEQ ID NO: 963397 - RNA, 19 nt, Homo sapiens
  misc_RNA (1)...(19): siRNA sense strand
guagaagccacauucaaac

SEQ ID NO: 963398 - RNA, 19 nt, Homo sapiens
  misc_RNA (1)...(19): siRNA sense strand
auauaugucggaaggauuu

SEQ ID NO: 963399 - RNA, 19 nt, Homo sapiens
  misc_RNA (1)...(19): siRNA sense strand
gggcaucgucuucuucucu

SEQ ID NO: 963400 - RNA, 19 nt, Homo sapiens
  misc_RNA (1)...(19): siRNA sense strand
gugcuccacgggcucuuua

SEQ ID NO: 963401 - RNA, 19 nt, Homo sapiens
  misc_RNA (1)...(19): siRNA sense strand
cguuuccgcaccaugauua

SEQ ID NO: 963402 - RNA, 19 nt, Homo sapiens
  misc_RNA (1)...(19): siRNA sense strand
ggacuuuggccagaucauc

SEQ ID NO: 963403 - RNA, 19 nt, Homo sapiens
  misc_RNA (1)...(19): siRNA sense strand
ccacugcaccauccagauc

SEQ ID NO: 963404 - RNA, 19 nt, Homo sapiens
  misc_RNA (1)...(19): siRNA sense strand
cuccucggcuucuucuuga

SEQ ID NO: 963405 - RNA, 19 nt, Homo sapiens
  misc_RNA (1)...(19): siRNA sense strand
gcauuguguuccucauugc

SEQ ID NO: 963406 - RNA, 19 nt, Homo sapiens
  misc_RNA (1)...(19): siRNA sense strand
caucgugggcaucuucaug

SEQ ID NO: 963407 - RNA, 19 nt, Homo sapiens
  misc_RNA (1)...(19): siRNA sense strand
ggugccgcaugccaucuug

SEQ ID NO: 963408 - RNA, 19 nt, Homo sapiens
  misc_RNA (1)...(19): siRNA sense strand
ggacugcccaccgaugaca

SEQ ID NO: 963409 - RNA, 19 nt, Homo sapiens
  misc_RNA (1)...(19): siRNA sense strand
gacuuuggccagaucauca

SEQ ID NO: 963410 - RNA, 19 nt, Homo sapiens
  misc_RNA (1)...(19): siRNA sense strand
ccaagaagaaucccaucgu

SEQ ID NO: 963411 - RNA, 19 nt, Homo sapiens
  misc_RNA (1)...(19): siRNA sense strand
cauguucccagccaaccua

SEQ ID NO: 963412 - RNA, 19 nt, Homo sapiens
  misc_RNA (1)...(19): siRNA sense strand
cgguggcugugugguauuu

SEQ ID NO: 963413 - RNA, 19 nt, Homo sapiens
  misc_RNA (1)...(19): siRNA sense strand
ccacaggaaauuaguuacu

SEQ ID NO: 963414 - RNA, 19 nt, Homo sapiens
  misc_RNA (1)...(19): siRNA sense strand
uagaagccacauucaaaca

SEQ ID NO: 963415 - RNA, 19 nt, Homo sapiens
  misc_RNA (1)...(19): siRNA sense strand
ccagcgauggcaugaaugu

SEQ ID NO: 963416 - RNA, 19 nt, Homo sapiens
  misc_RNA (1)...(19): siRNA sense strand
cauauaugucggaaggauu

SEQ ID NO: 963417 - RNA, 19 nt, Homo sapiens
  misc_RNA (1)...(19): siRNA sense strand
gguggucuccagcuugaug

SEQ ID NO: 963418 - RNA, 19 nt, Homo sapiens
  misc_RNA (1)...(19): siRNA sense strand
gcaaaucucuguuguucua

SEQ ID NO: 963419 - RNA, 19 nt, Homo sapiens
  misc_RNA (1)...(19): siRNA sense strand
gaacuaaugagcagacaua

SEQ ID NO: 963420 - RNA, 19 nt, Homo sapiens
  misc_RNA (1)...(19): siRNA sense strand
ggaaagagguugcugaaac

SEQ ID NO: 963421 - RNA, 19 nt, Homo sapiens
  misc_RNA (1)...(19): siRNA sense strand
gcugugagauuuacucuga

SEQ ID NO: 963422 - RNA, 19 nt, Homo sapiens
  misc_RNA (1)...(19): siRNA sense strand
gaagagcuccuacggauug

SEQ ID NO: 963423 - RNA, 19 nt, Homo sapiens
  misc_RNA (1)...(19): siRNA sense strand
gaccacaccuaucgaguuu

SEQ ID NO: 963424 - RNA, 19 nt, Homo sapiens
  misc_RNA (1)...(19): siRNA sense strand
aaagagagaaguccuauuu

SEQ ID NO: 963425 - RNA, 19 nt, Homo sapiens
  misc_RNA (1)...(19): siRNA sense strand
gcagaaagcaggcaaaucu

SEQ ID NO: 963426 - RNA, 19 nt, Homo sapiens
  misc_RNA (1)...(19): siRNA sense strand
gcaguacacuaccaacaga

SEQ ID NO: 963427 - RNA, 19 nt, Homo sapiens
  misc_RNA (1)...(19): siRNA sense strand
ggacaucauuucuggaaca

SEQ ID NO: 963428 - RNA, 19 nt, Homo sapiens
  misc_RNA (1)...(19): siRNA sense strand
caaaaucuguuuccacuuu

SEQ ID NO: 963429 - RNA, 19 nt, Homo sapiens
  misc_RNA (1)...(19): siRNA sense strand
gggcaguuauggacacuuu

SEQ ID NO: 963430 - RNA, 19 nt, Homo sapiens
  misc_RNA (1)...(19): siRNA sense strand
gagcagacauaacaucuac

SEQ ID NO: 963431 - RNA, 19 nt, Homo sapiens
  misc_RNA (1)...(19): siRNA sense strand
gcaggugguacuagaaaua

SEQ ID NO: 963432 - RNA, 19 nt, Homo sapiens
  misc_RNA (1)...(19): siRNA sense strand
ucaguaugaucguuucuuu

SEQ ID NO: 963433 - RNA, 19 nt, Homo sapiens
  misc_RNA (1)...(19): siRNA sense strand
gagaacugcugcaaagauc

SEQ ID NO: 963434 - RNA, 19 nt, Homo sapiens
  misc_RNA (1)...(19): siRNA sense strand
ucagagaacugcugcaaag

SEQ ID NO: 963435 - RNA, 19 nt, Homo sapiens
  misc_RNA (1)...(19): siRNA sense strand
agaagucugugaugaacua

SEQ ID NO: 963436 - RNA, 19 nt, Homo sapiens
  misc_RNA (1)...(19): siRNA sense strand
gcagaugacuauucagacu

SEQ ID NO: 963437 - RNA, 19 nt, Homo sapiens
  misc_RNA (1)...(19): siRNA sense strand
ugagacagaugcuaaugga

SEQ ID NO: 963438 - RNA, 19 nt, Homo sapiens
  misc_RNA (1)...(19): siRNA sense strand
ccagggcacugcaagcaaa

SEQ ID NO: 963439 - RNA, 19 nt, Homo sapiens
  misc_RNA (1)...(19): siRNA sense strand
ccaagauuguggcauuuga

SEQ ID NO: 963440 - RNA, 19 nt, Homo sapiens
  misc_RNA (1)...(19): siRNA sense strand
gcaggcaaaucucuguugu

SEQ ID NO: 963441 - RNA, 19 nt, Homo sapiens
  misc_RNA (1)...(19): siRNA sense strand
gaacuacuuccuugagaau

SEQ ID NO: 963442 - RNA, 19 nt, Homo sapiens
  misc_RNA (1)...(19): siRNA sense strand
gaacuuccaggacaucaug

SEQ ID NO: 963443 - RNA, 19 nt, Homo sapiens
  misc_RNA (1)...(19): siRNA sense strand
caucauuucuggaacacuu

SEQ ID NO: 963444 - RNA, 19 nt, Homo sapiens
  misc_RNA (1)...(19): siRNA sense strand
uggaagagcugugugaugu

SEQ ID NO: 963445 - RNA, 19 nt, Homo sapiens
  misc_RNA (1)...(19): siRNA sense strand
gggauggagucaugccaaa

SEQ ID NO: 963446 - RNA, 19 nt, Homo sapiens
  misc_RNA (1)...(19): siRNA sense strand
cuaaugagcagacauaaca

SEQ ID NO: 963447 - RNA, 19 nt, Homo sapiens
  misc_RNA (1)...(19): siRNA sense strand
cagcacgaguucucugauu

SEQ ID NO: 963448 - RNA, 19 nt, Homo sapiens
  misc_RNA (1)...(19): siRNA sense strand
gcacgaguucucugauuga

SEQ ID NO: 963449 - RNA, 19 nt, Homo sapiens
  misc_RNA (1)...(19): siRNA sense strand
uaugaucguuucuuugaga

SEQ ID NO: 963450 - RNA, 19 nt, Homo sapiens
  misc_RNA (1)...(19): siRNA sense strand
ccaacagacuccugaugga

SEQ ID NO: 963451 - RNA, 19 nt, Homo sapiens
  misc_RNA (1)...(19): siRNA sense strand
cauggcagaugacuauuca

SEQ ID NO: 963452 - RNA, 19 nt, Homo sapiens
  misc_RNA (1)...(19): siRNA sense strand
gaggaaagagguugcugaa

SEQ ID NO: 963453 - RNA, 19 nt, Homo sapiens
  misc_RNA (1)...(19): siRNA sense strand
ugaacuacuuccuugagaa

SEQ ID NO: 963454 - RNA, 19 nt, Homo sapiens
  misc_RNA (1)...(19): siRNA sense strand
gaacuaguaaauuccaugu

SEQ ID NO: 963455 - RNA, 19 nt, Homo sapiens
  misc_RNA (1)...(19): siRNA sense strand
gcaguuauggacacuuuga

SEQ ID NO: 963456 - RNA, 19 nt, Homo sapiens
  misc_RNA (1)...(19): siRNA sense strand
gaaagagagaaguccuauu

SEQ ID NO: 963457 - RNA, 19 nt, Homo sapiens
  misc_RNA (1)...(19): siRNA sense strand
ggaucgggauggagucaug

SEQ ID NO: 963458 - RNA, 19 nt, Homo sapiens
  misc_RNA (1)...(19): siRNA sense strand
ggugguacuagaaauauuu

SEQ ID NO: 963459 - RNA, 19 nt, Homo sapiens
  misc_RNA (1)...(19): siRNA sense strand
cagaaagagugucucaucu

SEQ ID NO: 963460 - RNA, 19 nt, Homo sapiens
  misc_RNA (1)...(19): siRNA sense strand
ugauguggcccaugaguuu

SEQ ID NO: 963461 - RNA, 19 nt, Homo sapiens
  misc_RNA (1)...(19): siRNA sense strand
gugcaguaaugacuaccua

SEQ ID NO: 963462 - RNA, 19 nt, Homo sapiens
  misc_RNA (1)...(19): siRNA sense strand
gcugcuggcuucaucuuca

SEQ ID NO: 963463 - RNA, 19 nt, Homo sapiens
  misc_RNA (1)...(19): siRNA sense strand
aggcaaaucucuguuguuc

SEQ ID NO: 963464 - RNA, 19 nt, Homo sapiens
  misc_RNA (1)...(19): siRNA sense strand
gcaagcaaaugcccuuucc

SEQ ID NO: 963465 - RNA, 19 nt, Homo sapiens
  misc_RNA (1)...(19): siRNA sense strand
ugaaugccgugaggaaaga

SEQ ID NO: 963466 - RNA, 19 nt, Homo sapiens
  misc_RNA (1)...(19): siRNA sense strand
ccagaaagagugucucauc

SEQ ID NO: 963467 - RNA, 19 nt, Homo sapiens
  misc_RNA (1)...(19): siRNA sense strand
gaugaugaacuacuuccuu

SEQ ID NO: 963468 - RNA, 19 nt, Homo sapiens
  misc_RNA (1)...(19): siRNA sense strand
gaaacagccgagugccaaa

SEQ ID NO: 963469 - RNA, 19 nt, Homo sapiens
  misc_RNA (1)...(19): siRNA sense strand
aguaaugacuaccuaggaa

SEQ ID NO: 963470 - RNA, 19 nt, Homo sapiens
  misc_RNA (1)...(19): siRNA sense strand
caacgucaaacucaugaga

SEQ ID NO: 963471 - RNA, 19 nt, Homo sapiens
  misc_RNA (1)...(19): siRNA sense strand
guggacugcugaagaacuu

SEQ ID NO: 963472 - RNA, 19 nt, Homo sapiens
  misc_RNA (1)...(19): siRNA sense strand
cagacucccucaucaccaa

SEQ ID NO: 963473 - RNA, 19 nt, Homo sapiens
  misc_RNA (1)...(19): siRNA sense strand
ggaggccacugcauuuuga

SEQ ID NO: 963474 - RNA, 19 nt, Homo sapiens
  misc_RNA (1)...(19): siRNA sense strand
ugugugauguggcccauga

SEQ ID NO: 963475 - RNA, 19 nt, Homo sapiens
  misc_RNA (1)...(19): siRNA sense strand
gagauuuacucugauucug

SEQ ID NO: 963476 - RNA, 19 nt, Homo sapiens
  misc_RNA (1)...(19): siRNA sense strand
gggcaggugguacuagaaa

SEQ ID NO: 963477 - RNA, 19 nt, Homo sapiens
  misc_RNA (1)...(19): siRNA sense strand
uauggacacuuugaaacaa

SEQ ID NO: 963478 - RNA, 19 nt, Homo sapiens
  misc_RNA (1)...(19): siRNA sense strand
gaacugaagccucauuccu

SEQ ID NO: 963479 - RNA, 19 nt, Homo sapiens
  misc_RNA (1)...(19): siRNA sense strand
gcccaaaacugccccaaga

SEQ ID NO: 963480 - RNA, 19 nt, Homo sapiens
  misc_RNA (1)...(19): siRNA sense strand
ugugagauuuacucugauu

SEQ ID NO: 963481 - RNA, 19 nt, Homo sapiens
  misc_RNA (1)...(19): siRNA sense strand
gaugccaggcugugagauu

SEQ ID NO: 963482 - RNA, 19 nt, Homo sapiens
  misc_RNA (1)...(19): siRNA sense strand
gaacugcugcaaagaucug

SEQ ID NO: 963483 - RNA, 19 nt, Homo sapiens
  misc_RNA (1)...(19): siRNA sense strand
guacaucuuccgccacaau

SEQ ID NO: 963484 - RNA, 19 nt, Homo sapiens
  misc_RNA (1)...(19): siRNA sense strand
aguaugaucguuucuuuga

SEQ ID NO: 963485 - RNA, 19 nt, Homo sapiens
  misc_RNA (1)...(19): siRNA sense strand
caaucaccuucguggauga

SEQ ID NO: 963486 - RNA, 19 nt, Homo sapiens
  misc_RNA (1)...(19): siRNA sense strand
ucaggaggaugugcaggaa

SEQ ID NO: 963487 - RNA, 19 nt, Homo sapiens
  misc_RNA (1)...(19): siRNA sense strand
agaaucugcuagucacaug

SEQ ID NO: 963488 - RNA, 19 nt, Homo sapiens
  misc_RNA (1)...(19): siRNA sense strand
agucugugaugaacuaaug

SEQ ID NO: 963489 - RNA, 19 nt, Homo sapiens
  misc_RNA (1)...(19): siRNA sense strand
ucagucuggugcaguaaug

SEQ ID NO: 963490 - RNA, 19 nt, Homo sapiens
  misc_RNA (1)...(19): siRNA sense strand
gugucagucuggugcagua

SEQ ID NO: 963491 - RNA, 19 nt, Homo sapiens
  misc_RNA (1)...(19): siRNA sense strand
gcaccagcgcaacgucaaa

SEQ ID NO: 963492 - RNA, 19 nt, Homo sapiens
  misc_RNA (1)...(19): siRNA sense strand
gaggaugugcaggaaauga

SEQ ID NO: 963493 - RNA, 19 nt, Homo sapiens
  misc_RNA (1)...(19): siRNA sense strand
gaagugaugagugaaagag

SEQ ID NO: 963494 - RNA, 19 nt, Homo sapiens
  misc_RNA (1)...(19): siRNA sense strand
aaagaaugaccacaccuau

SEQ ID NO: 963495 - RNA, 19 nt, Homo sapiens
  misc_RNA (1)...(19): siRNA sense strand
aggaggaugugcaggaaau

SEQ ID NO: 963496 - RNA, 19 nt, Homo sapiens
  misc_RNA (1)...(19): siRNA sense strand
caagauuguggcauuugaa

SEQ ID NO: 963497 - RNA, 19 nt, Homo sapiens
  misc_RNA (1)...(19): siRNA sense strand
ugaccacaccuaucgaguu

SEQ ID NO: 963498 - RNA, 19 nt, Homo sapiens
  misc_RNA (1)...(19): siRNA sense strand
gaccagaaagagugucuca

SEQ ID NO: 963499 - RNA, 19 nt, Homo sapiens
  misc_RNA (1)...(19): siRNA sense strand
guucgccgcugcccauucu

SEQ ID NO: 963500 - RNA, 19 nt, Homo sapiens
  misc_RNA (1)...(19): siRNA sense strand
guacacuaccaacagauca

SEQ ID NO: 963501 - RNA, 19 nt, Homo sapiens
  misc_RNA (1)...(19): siRNA sense strand
caacagacuccugauggau

SEQ ID NO: 963502 - RNA, 19 nt, Homo sapiens
  misc_RNA (1)...(19): siRNA sense strand
caaaacugccccaagauga

SEQ ID NO: 963503 - RNA, 19 nt, Homo sapiens
  misc_RNA (1)...(19): siRNA sense strand
gugaaagagagaaguccua

SEQ ID NO: 963504 - RNA, 19 nt, Homo sapiens
  misc_RNA (1)...(19): siRNA sense strand
gcagacauaacaucuacgu

SEQ ID NO: 963505 - RNA, 19 nt, Homo sapiens
  misc_RNA (1)...(19): siRNA sense strand
gcgcaacgucaaacucaug

SEQ ID NO: 963506 - RNA, 19 nt, Homo sapiens
  misc_RNA (1)...(19): siRNA sense strand
acagccgagugccaaagua

SEQ ID NO: 963507 - RNA, 19 nt, Homo sapiens
  misc_RNA (1)...(19): siRNA sense strand
guaaugacuaccuaggaau

SEQ ID NO: 963508 - RNA, 19 nt, Homo sapiens
  misc_RNA (1)...(19): siRNA sense strand
aaaugaaugccgugaggaa

SEQ ID NO: 963509 - RNA, 19 nt, Homo sapiens
  misc_RNA (1)...(19): siRNA sense strand
ugaaagagagaaguccuau

SEQ ID NO: 963510 - RNA, 19 nt, Homo sapiens
  misc_RNA (1)...(19): siRNA sense strand
gaugaacuacuuccuugag

SEQ ID NO: 963511 - RNA, 19 nt, Homo sapiens
  misc_RNA (1)...(19): siRNA sense strand
gcccaugaguuuggagcaa

SEQ ID NO: 963512 - RNA, 19 nt, Homo sapiens
  misc_RNA (1)...(19): siRNA sense strand
gauuguggcauuugaaacu

SEQ ID NO: 963513 - RNA, 19 nt, Homo sapiens
  misc_RNA (1)...(19): siRNA sense strand
aaagcaaagaccagaaaga

SEQ ID NO: 963514 - RNA, 19 nt, Homo sapiens
  misc_RNA (1)...(19): siRNA sense strand
cagugugguuagugugaaa

SEQ ID NO: 963515 - RNA, 19 nt, Homo sapiens
  misc_RNA (1)...(19): siRNA sense strand
gucaaacucaugagacaga

SEQ ID NO: 963516 - RNA, 19 nt, Homo sapiens
  misc_RNA (1)...(19): siRNA sense strand
cccagaugaugaacuacuu

SEQ ID NO: 963517 - RNA, 19 nt, Homo sapiens
  misc_RNA (1)...(19): siRNA sense strand
uaacaucuacgugcaagca

SEQ ID NO: 963518 - RNA, 19 nt, Homo sapiens
  misc_RNA (1)...(19): siRNA sense strand
gaagaagguugaauuugga

SEQ ID NO: 963519 - RNA, 19 nt, Homo sapiens
  misc_RNA (1)...(19): siRNA sense strand
ccacaaauaugaagaccuu

SEQ ID NO: 963520 - RNA, 19 nt, Homo sapiens
  misc_RNA (1)...(19): siRNA sense strand
ggagggcaccaaucaguua

SEQ ID NO: 963521 - RNA, 19 nt, Homo sapiens
  misc_RNA (1)...(19): siRNA sense strand
ugaagaagguugaauuugg

SEQ ID NO: 963522 - RNA, 19 nt, Homo sapiens
  misc_RNA (1)...(19): siRNA sense strand
agccguagcucuuccaaua

SEQ ID NO: 963523 - RNA, 19 nt, Homo sapiens
  misc_RNA (1)...(19): siRNA sense strand
cugacacacuuaacauuua

SEQ ID NO: 963524 - RNA, 19 nt, Homo sapiens
  misc_RNA (1)...(19): siRNA sense strand
gaacugacacacuuaacau

SEQ ID NO: 963525 - RNA, 19 nt, Homo sapiens
  misc_RNA (1)...(19): siRNA sense strand
ccaucaaggucuaugacua

SEQ ID NO: 963526 - RNA, 19 nt, Homo sapiens
  misc_RNA (1)...(19): siRNA sense strand
gaacaggcaacaauucagu

SEQ ID NO: 963527 - RNA, 19 nt, Homo sapiens
  misc_RNA (1)...(19): siRNA sense strand
ggugaagaagguugaauuu

SEQ ID NO: 963528 - RNA, 19 nt, Homo sapiens
  misc_RNA (1)...(19): siRNA sense strand
cagcaaccaucaaggucua

SEQ ID NO: 963529 - RNA, 19 nt, Homo sapiens
  misc_RNA (1)...(19): siRNA sense strand
ucacuauucacaccaguua

SEQ ID NO: 963530 - RNA, 19 nt, Homo sapiens
  misc_RNA (1)...(19): siRNA sense strand
caaggucuaugacuacuac

SEQ ID NO: 963531 - RNA, 19 nt, Homo sapiens
  misc_RNA (1)...(19): siRNA sense strand
guguugagauacaauauuc

SEQ ID NO: 963532 - RNA, 19 nt, Homo sapiens
  misc_RNA (1)...(19): siRNA sense strand
ugcagacgguguugagaua

SEQ ID NO: 963533 - RNA, 19 nt, Homo sapiens
  misc_RNA (1)...(19): siRNA sense strand
ggaacugacacacuuaaca

SEQ ID NO: 963534 - RNA, 19 nt, Homo sapiens
  misc_RNA (1)...(19): siRNA sense strand
aggcaacaauucaguauuc

SEQ ID NO: 963535 - RNA, 19 nt, Homo sapiens
  misc_RNA (1)...(19): siRNA sense strand
gaugaacaggcaacaauuc

SEQ ID NO: 963536 - RNA, 19 nt, Homo sapiens
  misc_RNA (1)...(19): siRNA sense strand
gaugugagcaaccgacuuc

SEQ ID NO: 963537 - RNA, 19 nt, Homo sapiens
  misc_RNA (1)...(19): siRNA sense strand
caaccgacuucaccucgau

SEQ ID NO: 963538 - RNA, 19 nt, Homo sapiens
  misc_RNA (1)...(19): siRNA sense strand
ggccagggcugugucuaug

SEQ ID NO: 963539 - RNA, 19 nt, Homo sapiens
  misc_RNA (1)...(19): siRNA sense strand
gaaaccagcaaccaucaag

SEQ ID NO: 963540 - RNA, 19 nt, Homo sapiens
  misc_RNA (1)...(19): siRNA sense strand
gaugcuaucuggguucagu

SEQ ID NO: 963541 - RNA, 19 nt, Homo sapiens
  misc_RNA (1)...(19): siRNA sense strand
ucaguuacuucuccagcaa

SEQ ID NO: 963542 - RNA, 19 nt, Homo sapiens
  misc_RNA (1)...(19): siRNA sense strand
caaauaugaagaccuuuag

SEQ ID NO: 963543 - RNA, 19 nt, Homo sapiens
  misc_RNA (1)...(19): siRNA sense strand
cagaugaacaggcaacaau

SEQ ID NO: 963544 - RNA, 19 nt, Homo sapiens
  misc_RNA (1)...(19): siRNA sense strand
ggucuaugacuacuaccua

SEQ ID NO: 963545 - RNA, 19 nt, Homo sapiens
  misc_RNA (1)...(19): siRNA sense strand
gcaccaaucaguuacuucu

SEQ ID NO: 963546 - RNA, 19 nt, Homo sapiens
  misc_RNA (1)...(19): siRNA sense strand
ccguagcucuuccaauaug

SEQ ID NO: 963547 - RNA, 19 nt, Homo sapiens
  misc_RNA (1)...(19): siRNA sense strand
acuacuaccuaccagauga

SEQ ID NO: 963548 - RNA, 19 nt, Homo sapiens
  misc_RNA (1)...(19): siRNA sense strand
gggcaccaaucaguuacuu

SEQ ID NO: 963549 - RNA, 19 nt, Homo sapiens
  misc_RNA (1)...(19): siRNA sense strand
ugacacacuuaacauuuac

SEQ ID NO: 963550 - RNA, 19 nt, Homo sapiens
  misc_RNA (1)...(19): siRNA sense strand
gauccuugacucucacuau

SEQ ID NO: 963551 - RNA, 19 nt, Homo sapiens
  misc_RNA (1)...(19): siRNA sense strand
ccagggcugugucuaugug

SEQ ID NO: 963552 - RNA, 19 nt, Homo sapiens
  misc_RNA (1)...(19): siRNA sense strand
ccucgauccuugacucuca

SEQ ID NO: 963553 - RNA, 19 nt, Homo sapiens
  misc_RNA (1)...(19): siRNA sense strand
ccuugacucucacuauuca

SEQ ID NO: 963554 - RNA, 19 nt, Homo sapiens
  misc_RNA (1)...(19): siRNA sense strand
gguguugagauacaauauu

SEQ ID NO: 963555 - RNA, 19 nt, Homo sapiens
  misc_RNA (1)...(19): siRNA sense strand
caaccaucaaggucuauga

SEQ ID NO: 963556 - RNA, 19 nt, Homo sapiens
  misc_RNA (1)...(19): siRNA sense strand
cacuuaacauuuacuugga

SEQ ID NO: 963557 - RNA, 19 nt, Homo sapiens
  misc_RNA (1)...(19): siRNA sense strand
gugaagaagguugaauuug

SEQ ID NO: 963558 - RNA, 19 nt, Homo sapiens
  misc_RNA (1)...(19): siRNA sense strand
ggaaauaggaaaagcuaga

SEQ ID NO: 963559 - RNA, 19 nt, Homo sapiens
  misc_RNA (1)...(19): siRNA sense strand
ccauggagggcaccaauca

SEQ ID NO: 963560 - RNA, 19 nt, Homo sapiens
  misc_RNA (1)...(19): siRNA sense strand
acacucagacuuacaccuu

SEQ ID NO: 963561 - RNA, 19 nt, Homo sapiens
  misc_RNA (1)...(19): siRNA sense strand
acugacacacuuaacauuu

SEQ ID NO: 963562 - RNA, 19 nt, Homo sapiens
  misc_RNA (1)...(19): siRNA sense strand
caucaaggucuaugacuac

SEQ ID NO: 963563 - RNA, 19 nt, Homo sapiens
  misc_RNA (1)...(19): siRNA sense strand
acuuacaccuucaccauca

SEQ ID NO: 963564 - RNA, 19 nt, Homo sapiens
  misc_RNA (1)...(19): siRNA sense strand
gaagguugaauuuggaacu

SEQ ID NO: 963565 - RNA, 19 nt, Homo sapiens
  misc_RNA (1)...(19): siRNA sense strand
cagacgguguugagauaca

SEQ ID NO: 963566 - RNA, 19 nt, Homo sapiens
  misc_RNA (1)...(19): siRNA sense strand
guauucugaucccugugaa

SEQ ID NO: 963567 - RNA, 19 nt, Homo sapiens
  misc_RNA (1)...(19): siRNA sense strand
gcucuuccaauauggcuau

SEQ ID NO: 963568 - RNA, 19 nt, Homo sapiens
  misc_RNA (1)...(19): siRNA sense strand
gcaacaauucaguauucug

SEQ ID NO: 963569 - RNA, 19 nt, Homo sapiens
  misc_RNA (1)...(19): siRNA sense strand
cgacuucaccucgauccuu

SEQ ID NO: 963570 - RNA, 19 nt, Homo sapiens
  misc_RNA (1)...(19): siRNA sense strand
ugacuacuaccuaccagau

SEQ ID NO: 963571 - RNA, 19 nt, Homo sapiens
  misc_RNA (1)...(19): siRNA sense strand
aauauucucccucccacaa

SEQ ID NO: 963572 - RNA, 19 nt, Homo sapiens
  misc_RNA (1)...(19): siRNA sense strand
uauucucccucccacaaau

SEQ ID NO: 963573 - RNA, 19 nt, Homo sapiens
  misc_RNA (1)...(19): siRNA sense strand
ggcaacaauucaguauucu

SEQ ID NO: 963574 - RNA, 19 nt, Homo sapiens
  misc_RNA (1)...(19): siRNA sense strand
auccuugacucucacuauu

SEQ ID NO: 963575 - RNA, 19 nt, Homo sapiens
  misc_RNA (1)...(19): siRNA sense strand
agacgguguugagauacaa

SEQ ID NO: 963576 - RNA, 19 nt, Homo sapiens
  misc_RNA (1)...(19): siRNA sense strand
agaugaacaggcaacaauu

SEQ ID NO: 963577 - RNA, 19 nt, Homo sapiens
  misc_RNA (1)...(19): siRNA sense strand
agacuuacaccuucaccau

SEQ ID NO: 963578 - RNA, 19 nt, Homo sapiens
  misc_RNA (1)...(19): siRNA sense strand
gugcagacgguguugagau

SEQ ID NO: 963579 - RNA, 19 nt, Homo sapiens
  misc_RNA (1)...(19): siRNA sense strand
caaggacgcuguacagauu

SEQ ID NO: 963580 - RNA, 19 nt, Homo sapiens
  misc_RNA (1)...(19): siRNA sense strand
gcaaagguguccuagaaau

SEQ ID NO: 963581 - RNA, 19 nt, Homo sapiens
  misc_RNA (1)...(19): siRNA sense strand
gcacugggcugcagaugga

SEQ ID NO: 963582 - RNA, 19 nt, Homo sapiens
  misc_RNA (1)...(19): siRNA sense strand
gaguguagucuccuuauua

SEQ ID NO: 963583 - RNA, 19 nt, Homo sapiens
  misc_RNA (1)...(19): siRNA sense strand
gcacacuuaugguaucauu

SEQ ID NO: 963584 - RNA, 19 nt, Homo sapiens
  misc_RNA (1)...(19): siRNA sense strand
cggcaaagguguccuagaa

SEQ ID NO: 963585 - RNA, 19 nt, Homo sapiens
  misc_RNA (1)...(19): siRNA sense strand
gaugguugcugcccagaaa

SEQ ID NO: 963586 - RNA, 19 nt, Homo sapiens
  misc_RNA (1)...(19): siRNA sense strand
acaccuagauguugugaaa

SEQ ID NO: 963587 - RNA, 19 nt, Homo sapiens
  misc_RNA (1)...(19): siRNA sense strand
ugaaauaucuccgaagaca

SEQ ID NO: 963588 - RNA, 19 nt, Homo sapiens
  misc_RNA (1)...(19): siRNA sense strand
gugauugaguggaugauaa

SEQ ID NO: 963589 - RNA, 19 nt, Homo sapiens
  misc_RNA (1)...(19): siRNA sense strand
ccagagagcccauaaguag

SEQ ID NO: 963590 - RNA, 19 nt, Homo sapiens
  misc_RNA (1)...(19): siRNA sense strand
guacagauuucgccugaag

SEQ ID NO: 963591 - RNA, 19 nt, Homo sapiens
  misc_RNA (1)...(19): siRNA sense strand
gguggccucucuucuaauu

SEQ ID NO: 963592 - RNA, 19 nt, Homo sapiens
  misc_RNA (1)...(19): siRNA sense strand
ucaguuacuucuugacaaa

SEQ ID NO: 963593 - RNA, 19 nt, Homo sapiens
  misc_RNA (1)...(19): siRNA sense strand
ucacagcauugaauuauac

SEQ ID NO: 963594 - RNA, 19 nt, Homo sapiens
  misc_RNA (1)...(19): siRNA sense strand
gcagugugauugaguggau

SEQ ID NO: 963595 - RNA, 19 nt, Homo sapiens
  misc_RNA (1)...(19): siRNA sense strand
ggauacaccaggcuuguga

SEQ ID NO: 963596 - RNA, 19 nt, Homo sapiens
  misc_RNA (1)...(19): siRNA sense strand
ugugaaauaucuccgaaga

SEQ ID NO: 963597 - RNA, 19 nt, Homo sapiens
  misc_RNA (1)...(19): siRNA sense strand
accuagauguugugaaaua

SEQ ID NO: 963598 - RNA, 19 nt, Homo sapiens
  misc_RNA (1)...(19): siRNA sense strand
gggccaaugugaaugugaa

SEQ ID NO: 963599 - RNA, 19 nt, Homo sapiens
  misc_RNA (1)...(19): siRNA sense strand
uuaguucaguuacuucuug

SEQ ID NO: 963600 - RNA, 19 nt, Homo sapiens
  misc_RNA (1)...(19): siRNA sense strand
uaugguggcuguguuaaau

SEQ ID NO: 963601 - RNA, 19 nt, Homo sapiens
  misc_RNA (1)...(19): siRNA sense strand
gagcagugguucagguucu

SEQ ID NO: 963602 - RNA, 19 nt, Homo sapiens
  misc_RNA (1)...(19): siRNA sense strand
cuagaaauggccagaguuu

SEQ ID NO: 963603 - RNA, 19 nt, Homo sapiens
  misc_RNA (1)...(19): siRNA sense strand
guacagcccacucgucuca

SEQ ID NO: 963604 - RNA, 19 nt, Homo sapiens
  misc_RNA (1)...(19): siRNA sense strand
ugugaaugaugaagauuug

SEQ ID NO: 963605 - RNA, 19 nt, Homo sapiens
  misc_RNA (1)...(19): siRNA sense strand
caucacagcauugaauuau

SEQ ID NO: 963606 - RNA, 19 nt, Homo sapiens
  misc_RNA (1)...(19): siRNA sense strand
agguugauguucccaauaa

SEQ ID NO: 963607 - RNA, 19 nt, Homo sapiens
  misc_RNA (1)...(19): siRNA sense strand
gaagcauguuguugaaggu

SEQ ID NO: 963608 - RNA, 19 nt, Homo sapiens
  misc_RNA (1)...(19): siRNA sense strand
caaagguguccuagaaaug

SEQ ID NO: 963609 - RNA, 19 nt, Homo sapiens
  misc_RNA (1)...(19): siRNA sense strand
uggccucucuucuaauuga

SEQ ID NO: 963610 - RNA, 19 nt, Homo sapiens
  misc_RNA (1)...(19): siRNA sense strand
uaagguugauguucccaau

SEQ ID NO: 963611 - RNA, 19 nt, Homo sapiens
  misc_RNA (1)...(19): siRNA sense strand
gaaccaaggacgcuguaca

SEQ ID NO: 963612 - RNA, 19 nt, Homo sapiens
  misc_RNA (1)...(19): siRNA sense strand
gaaagccaaacgccaagga

SEQ ID NO: 963613 - RNA, 19 nt, Homo sapiens
  misc_RNA (1)...(19): siRNA sense strand
uguagucuccuuauuagaa

SEQ ID NO: 963614 - RNA, 19 nt, Homo sapiens
  misc_RNA (1)...(19): siRNA sense strand
agaguuaguucaguuacuu

SEQ ID NO: 963615 - RNA, 19 nt, Homo sapiens
  misc_RNA (1)...(19): siRNA sense strand
ugguggcuguguuaaauaa

SEQ ID NO: 963616 - RNA, 19 nt, Homo sapiens
  misc_RNA (1)...(19): siRNA sense strand
aggguggccucucuucuaa

SEQ ID NO: 963617 - RNA, 19 nt, Homo sapiens
  misc_RNA (1)...(19): siRNA sense strand
aaauaucuccgaagacaug

SEQ ID NO: 963618 - RNA, 19 nt, Homo sapiens
  misc_RNA (1)...(19): siRNA sense strand
cuucaaggaggccguguua

SEQ ID NO: 963619 - RNA, 19 nt, Homo sapiens
  misc_RNA (1)...(19): siRNA sense strand
gaaucaugccacccucaaa

SEQ ID NO: 963620 - RNA, 19 nt, Homo sapiens
  misc_RNA (1)...(19): siRNA sense strand
guagucuccuuauuagaag

SEQ ID NO: 963621 - RNA, 19 nt, Homo sapiens
  misc_RNA (1)...(19): siRNA sense strand
gugaaggacagaaauggaa

SEQ ID NO: 963622 - RNA, 19 nt, Homo sapiens
  misc_RNA (1)...(19): siRNA sense strand
uugaguggaugauaaagga

SEQ ID NO: 963623 - RNA, 19 nt, Homo sapiens
  misc_RNA (1)...(19): siRNA sense strand
gaaugugaaggacagaaau

SEQ ID NO: 963624 - RNA, 19 nt, Homo sapiens
  misc_RNA (1)...(19): siRNA sense strand
gagagcccauaaguaguga

SEQ ID NO: 963625 - RNA, 19 nt, Homo sapiens
  misc_RNA (1)...(19): siRNA sense strand
ucucugcggugucgggaaa

SEQ ID NO: 963626 - RNA, 19 nt, Homo sapiens
  misc_RNA (1)...(19): siRNA sense strand
ucaaggaggccguguuaag

SEQ ID NO: 963627 - RNA, 19 nt, Homo sapiens
  misc_RNA (1)...(19): siRNA sense strand
ccaaggacgcuguacagau

SEQ ID NO: 963628 - RNA, 19 nt, Homo sapiens
  misc_RNA (1)...(19): siRNA sense strand
agaguguagucuccuuauu

SEQ ID NO: 963629 - RNA, 19 nt, Homo sapiens
  misc_RNA (1)...(19): siRNA sense strand
gacagaguguagucuccuu

SEQ ID NO: 963630 - RNA, 19 nt, Homo sapiens
  misc_RNA (1)...(19): siRNA sense strand
aagauuugcugguccgaau

SEQ ID NO: 963631 - RNA, 19 nt, Homo sapiens
  misc_RNA (1)...(19): siRNA sense strand
gaaggucuggaaccaagga

SEQ ID NO: 963632 - RNA, 19 nt, Homo sapiens
  misc_RNA (1)...(19): siRNA sense strand
aaaggauggcugugaggua

SEQ ID NO: 963633 - RNA, 19 nt, Homo sapiens
  misc_RNA (1)...(19): siRNA sense strand
gauguucccaauaaguuug

SEQ ID NO: 963634 - RNA, 19 nt, Homo sapiens
  misc_RNA (1)...(19): siRNA sense strand
gguucagguucucgauuga

SEQ ID NO: 963635 - RNA, 19 nt, Homo sapiens
  misc_RNA (1)...(19): siRNA sense strand
gaggccguguuaagguuga

SEQ ID NO: 963636 - RNA, 19 nt, Homo sapiens
  misc_RNA (1)...(19): siRNA sense strand
aagcagaggccaaagaagu

SEQ ID NO: 963637 - RNA, 19 nt, Homo sapiens
  misc_RNA (1)...(19): siRNA sense strand
ggcaaagguguccuagaaa

SEQ ID NO: 963638 - RNA, 19 nt, Homo sapiens
  misc_RNA (1)...(19): siRNA sense strand
ucaucacagcauugaauua

SEQ ID NO: 963639 - RNA, 19 nt, Homo sapiens
  misc_RNA (1)...(19): siRNA sense strand
ggaaagacgccccuuaugg

SEQ ID NO: 963640 - RNA, 19 nt, Homo sapiens
  misc_RNA (1)...(19): siRNA sense strand
ugaaugugaaggacagaaa

SEQ ID NO: 963641 - RNA, 19 nt, Homo sapiens
  misc_RNA (1)...(19): siRNA sense strand
gucuaaugcuggcgugcua

SEQ ID NO: 963642 - RNA, 19 nt, Homo sapiens
  misc_RNA (1)...(19): siRNA sense strand
gaagaagaccccaaaaugc

SEQ ID NO: 963643 - RNA, 19 nt, Homo sapiens
  misc_RNA (1)...(19): siRNA sense strand
agacgugaaucugaagaau

SEQ ID NO: 963644 - RNA, 19 nt, Homo sapiens
  misc_RNA (1)...(19): siRNA sense strand
cagugugaaugaugaagau

SEQ ID NO: 963645 - RNA, 19 nt, Homo sapiens
  misc_RNA (1)...(19): siRNA sense strand
aguguagucuccuuauuag

SEQ ID NO: 963646 - RNA, 19 nt, Homo sapiens
  misc_RNA (1)...(19): siRNA sense strand
gaaagacgccccuuauggu

SEQ ID NO: 963647 - RNA, 19 nt, Homo sapiens
  misc_RNA (1)...(19): siRNA sense strand
ccuagauguugugaaauau

SEQ ID NO: 963648 - RNA, 19 nt, Homo sapiens
  misc_RNA (1)...(19): siRNA sense strand
aacgaagcauguuguugaa

SEQ ID NO: 963649 - RNA, 19 nt, Homo sapiens
  misc_RNA (1)...(19): siRNA sense strand
gaagaguuaguucaguuac

SEQ ID NO: 963650 - RNA, 19 nt, Homo sapiens
  misc_RNA (1)...(19): siRNA sense strand
guggcuguguuaaauaauc

SEQ ID NO: 963651 - RNA, 19 nt, Homo sapiens
  misc_RNA (1)...(19): siRNA sense strand
ugaaggacagaaauggaaa

SEQ ID NO: 963652 - RNA, 19 nt, Homo sapiens
  misc_RNA (1)...(19): siRNA sense strand
ccaaugugaaugugaagga

SEQ ID NO: 963653 - RNA, 19 nt, Homo sapiens
  misc_RNA (1)...(19): siRNA sense strand
ugguucagguucucgauug

SEQ ID NO: 963654 - RNA, 19 nt, Homo sapiens
  misc_RNA (1)...(19): siRNA sense strand
ugauugaguggaugauaaa

SEQ ID NO: 963655 - RNA, 19 nt, Homo sapiens
  misc_RNA (1)...(19): siRNA sense strand
gugugaaugaugaagauuu

SEQ ID NO: 963656 - RNA, 19 nt, Homo sapiens
  misc_RNA (1)...(19): siRNA sense strand
gggcagaugcaaguguaaa

SEQ ID NO: 963657 - RNA, 19 nt, Homo sapiens
  misc_RNA (1)...(19): siRNA sense strand
gaaauaucuccgaagacau

SEQ ID NO: 963658 - RNA, 19 nt, Homo sapiens
  misc_RNA (1)...(19): siRNA sense strand
gcaaggacagucuaaugcu

SEQ ID NO: 963659 - RNA, 19 nt, Homo sapiens
  misc_RNA (1)...(19): siRNA sense strand
gaaguggcaaggacagucu

SEQ ID NO: 963660 - RNA, 19 nt, Homo sapiens
  misc_RNA (1)...(19): siRNA sense strand
acgugaaucugaagaaugg

SEQ ID NO: 963661 - RNA, 19 nt, Homo sapiens
  misc_RNA (1)...(19): siRNA sense strand
gacgugaaucugaagaaug

SEQ ID NO: 963662 - RNA, 19 nt, Homo sapiens
  misc_RNA (1)...(19): siRNA sense strand
acaccaggcuugugaaaau

SEQ ID NO: 963663 - RNA, 19 nt, Homo sapiens
  misc_RNA (1)...(19): siRNA sense strand
ugacucaucacagcauuga

SEQ ID NO: 963664 - RNA, 19 nt, Homo sapiens
  misc_RNA (1)...(19): siRNA sense strand
caaggaggccguguuaagg

SEQ ID NO: 963665 - RNA, 19 nt, Homo sapiens
  misc_RNA (1)...(19): siRNA sense strand
ggauggaccccacucauga

SEQ ID NO: 963666 - RNA, 19 nt, Homo sapiens
  misc_RNA (1)...(19): siRNA sense strand
ugauaaaggauggcuguga

SEQ ID NO: 963667 - RNA, 19 nt, Homo sapiens
  misc_RNA (1)...(19): siRNA sense strand
agagagcccauaaguagug

SEQ ID NO: 963668 - RNA, 19 nt, Homo sapiens
  misc_RNA (1)...(19): siRNA sense strand
gaaggacagaaauggaaag

SEQ ID NO: 963669 - RNA, 19 nt, Homo sapiens
  misc_RNA (1)...(19): siRNA sense strand
ggacaccuagauguuguga

SEQ ID NO: 963670 - RNA, 19 nt, Homo sapiens
  misc_RNA (1)...(19): siRNA sense strand
cgggacaccuagauguugu

SEQ ID NO: 963671 - RNA, 19 nt, Homo sapiens
  misc_RNA (1)...(19): siRNA sense strand
gggcugucagugugaauga

SEQ ID NO: 963672 - RNA, 19 nt, Homo sapiens
  misc_RNA (1)...(19): siRNA sense strand
ccuuaugguggcuguguua

SEQ ID NO: 963673 - RNA, 19 nt, Homo sapiens
  misc_RNA (1)...(19): siRNA sense strand
uggcaaggacagucuaaug

SEQ ID NO: 963674 - RNA, 19 nt, Homo sapiens
  misc_RNA (1)...(19): siRNA sense strand
gcgggacaccuagauguug

SEQ ID NO: 963675 - RNA, 19 nt, Homo sapiens
  misc_RNA (1)...(19): siRNA sense strand
acagaguguagucuccuua

SEQ ID NO: 963676 - RNA, 19 nt, Homo sapiens
  misc_RNA (1)...(19): siRNA sense strand
aaaaugcacacuuauggua

SEQ ID NO: 963677 - RNA, 19 nt, Homo sapiens
  misc_RNA (1)...(19): siRNA sense strand
uggcuguguuaaauaauca

SEQ ID NO: 963678 - RNA, 19 nt, Homo sapiens
  misc_RNA (1)...(19): siRNA sense strand
ugacagacagaguguaguc

SEQ ID NO: 963679 - RNA, 19 nt, Homo sapiens
  misc_RNA (1)...(19): siRNA sense strand
gcaaagaaaugccuuguau

SEQ ID NO: 963680 - RNA, 19 nt, Homo sapiens
  misc_RNA (1)...(19): siRNA sense strand
gaaacaagaugaauggauu

SEQ ID NO: 963681 - RNA, 19 nt, Homo sapiens
  misc_RNA (1)...(19): siRNA sense strand
gcauaucgcuuacguucua

SEQ ID NO: 963682 - RNA, 19 nt, Homo sapiens
  misc_RNA (1)...(19): siRNA sense strand
ggacuuaaauugcgacuuc

SEQ ID NO: 963683 - RNA, 19 nt, Homo sapiens
  misc_RNA (1)...(19): siRNA sense strand
ggagaaauuugaaggugua

SEQ ID NO: 963684 - RNA, 19 nt, Homo sapiens
  misc_RNA (1)...(19): siRNA sense strand
gaaacuaccaugaaaugua

SEQ ID NO: 963685 - RNA, 19 nt, Homo sapiens
  misc_RNA (1)...(19): siRNA sense strand
ggauuaaguuugaugauga

SEQ ID NO: 963686 - RNA, 19 nt, Homo sapiens
  misc_RNA (1)...(19): siRNA sense strand
gaggaacgcuaaaggauga

SEQ ID NO: 963687 - RNA, 19 nt, Homo sapiens
  misc_RNA (1)...(19): siRNA sense strand
cgagaaaggugaacaagga

SEQ ID NO: 963688 - RNA, 19 nt, Homo sapiens
  misc_RNA (1)...(19): siRNA sense strand
agaaaugccuuguauauca

SEQ ID NO: 963689 - RNA, 19 nt, Homo sapiens
  misc_RNA (1)...(19): siRNA sense strand
ggaaugacucuacuaauga

SEQ ID NO: 963690 - RNA, 19 nt, Homo sapiens
  misc_RNA (1)...(19): siRNA sense strand
gaaaugccuuguauaucaa

SEQ ID NO: 963691 - RNA, 19 nt, Homo sapiens
  misc_RNA (1)...(19): siRNA sense strand
gaacaaggacaguaucuuc

SEQ ID NO: 963692 - RNA, 19 nt, Homo sapiens
  misc_RNA (1)...(19): siRNA sense strand
caccagaacuucaagagaa

SEQ ID NO: 963693 - RNA, 19 nt, Homo sapiens
  misc_RNA (1)...(19): siRNA sense strand
caagaugaauggauuaagu

SEQ ID NO: 963694 - RNA, 19 nt, Homo sapiens
  misc_RNA (1)...(19): siRNA sense strand
gaagaaaucaccaaacagu

SEQ ID NO: 963695 - RNA, 19 nt, Homo sapiens
  misc_RNA (1)...(19): siRNA sense strand
guucuucgguguugaguuu

SEQ ID NO: 963696 - RNA, 19 nt, Homo sapiens
  misc_RNA (1)...(19): siRNA sense strand
gaagaagucaccaaaggaa

SEQ ID NO: 963697 - RNA, 19 nt, Homo sapiens
  misc_RNA (1)...(19): siRNA sense strand
ccaaaguucuuaaggaugu

SEQ ID NO: 963698 - RNA, 19 nt, Homo sapiens
  misc_RNA (1)...(19): siRNA sense strand
gaaaaucaacuucagcuua

SEQ ID NO: 963699 - RNA, 19 nt, Homo sapiens
  misc_RNA (1)...(19): siRNA sense strand
agaggaaagugaacaguaa

SEQ ID NO: 963700 - RNA, 19 nt, Homo sapiens
  misc_RNA (1)...(19): siRNA sense strand
uagaagacaugacagaaga

SEQ ID NO: 963701 - RNA, 19 nt, Homo sapiens
  misc_RNA (1)...(19): siRNA sense strand
ggauauguaugaacugugu

SEQ ID NO: 963702 - RNA, 19 nt, Homo sapiens
  misc_RNA (1)...(19): siRNA sense strand
gaaauuugaagguguagaa

SEQ ID NO: 963703 - RNA, 19 nt, Homo sapiens
  misc_RNA (1)...(19): siRNA sense strand
acucaaagaugcccuuaaa

SEQ ID NO: 963704 - RNA, 19 nt, Homo sapiens
  misc_RNA (1)...(19): siRNA sense strand
gcuaaaggaugaugauugg

SEQ ID NO: 963705 - RNA, 19 nt, Homo sapiens
  misc_RNA (1)...(19): siRNA sense strand
ggaguuaccauguggauug

SEQ ID NO: 963706 - RNA, 19 nt, Homo sapiens
  misc_RNA (1)...(19): siRNA sense strand
gacagaaaguuauggugaa

SEQ ID NO: 963707 - RNA, 19 nt, Homo sapiens
  misc_RNA (1)...(19): siRNA sense strand
ucgcagaguugaaauaaug

SEQ ID NO: 963708 - RNA, 19 nt, Homo sapiens
  misc_RNA (1)...(19): siRNA sense strand
gagacuggcauaucgcuua

SEQ ID NO: 963709 - RNA, 19 nt, Homo sapiens
  misc_RNA (1)...(19): siRNA sense strand
gaucaguucuucgguguug

SEQ ID NO: 963710 - RNA, 19 nt, Homo sapiens
  misc_RNA (1)...(19): siRNA sense strand
gcaggugccuugagagcuu

SEQ ID NO: 963711 - RNA, 19 nt, Homo sapiens
  misc_RNA (1)...(19): siRNA sense strand
agaugaaccuccaauggua

SEQ ID NO: 963712 - RNA, 19 nt, Homo sapiens
  misc_RNA (1)...(19): siRNA sense strand
gauaaaacuucuuccagua

SEQ ID NO: 963713 - RNA, 19 nt, Homo sapiens
  misc_RNA (1)...(19): siRNA sense strand
gaagguguagaauugaaua

SEQ ID NO: 963714 - RNA, 19 nt, Homo sapiens
  misc_RNA (1)...(19): siRNA sense strand
gaaugacucuacuaaugau

SEQ ID NO: 963715 - RNA, 19 nt, Homo sapiens
  misc_RNA (1)...(19): siRNA sense strand
ccagaaagaaguuaaguau

SEQ ID NO: 963716 - RNA, 19 nt, Homo sapiens
  misc_RNA (1)...(19): siRNA sense strand
gagaaggaaucugugaaug

SEQ ID NO: 963717 - RNA, 19 nt, Homo sapiens
  misc_RNA (1)...(19): siRNA sense strand
caugacagaagaacaguua

SEQ ID NO: 963718 - RNA, 19 nt, Homo sapiens
  misc_RNA (1)...(19): siRNA sense strand
caaagaaaugccuuguaua

SEQ ID NO: 963719 - RNA, 19 nt, Homo sapiens
  misc_RNA (1)...(19): siRNA sense strand
gcuaaugaauguuggauac

SEQ ID NO: 963720 - RNA, 19 nt, Homo sapiens
  misc_RNA (1)...(19): siRNA sense strand
gaagaacaguuagcaucug

SEQ ID NO: 963721 - RNA, 19 nt, Homo sapiens
  misc_RNA (1)...(19): siRNA sense strand
ucaacaggaugcuaaugaa

SEQ ID NO: 963722 - RNA, 19 nt, Homo sapiens
  misc_RNA (1)...(19): siRNA sense strand
gaagaacccucagccaaaa

SEQ ID NO: 963723 - RNA, 19 nt, Homo sapiens
  misc_RNA (1)...(19): siRNA sense strand
gaguugaaauaauggaaga

SEQ ID NO: 963724 - RNA, 19 nt, Homo sapiens
  misc_RNA (1)...(19): siRNA sense strand
gacaaagucagcaucguaa

SEQ ID NO: 963725 - RNA, 19 nt, Homo sapiens
  misc_RNA (1)...(19): siRNA sense strand
caaauucaaggaucuagaa

SEQ ID NO: 963726 - RNA, 19 nt, Homo sapiens
  misc_RNA (1)...(19): siRNA sense strand
gaauguuggauacaaauga

SEQ ID NO: 963727 - RNA, 19 nt, Homo sapiens
  misc_RNA (1)...(19): siRNA sense strand
uuacaugaaugccacaguu

SEQ ID NO: 963728 - RNA, 19 nt, Homo sapiens
  misc_RNA (1)...(19): siRNA sense strand
aaacuaccaugaaauguac

SEQ ID NO: 963729 - RNA, 19 nt, Homo sapiens
  misc_RNA (1)...(19): siRNA sense strand
gaacucaaagaugcccuua

SEQ ID NO: 963730 - RNA, 19 nt, Homo sapiens
  misc_RNA (1)...(19): siRNA sense strand
cagggaaggucuaguucuu

SEQ ID NO: 963731 - RNA, 19 nt, Homo sapiens
  misc_RNA (1)...(19): siRNA sense strand
gcucuacuccguuacugua

SEQ ID NO: 963732 - RNA, 19 nt, Homo sapiens
  misc_RNA (1)...(19): siRNA sense strand
caugaaauguacagaaucu

SEQ ID NO: 963733 - RNA, 19 nt, Homo sapiens
  misc_RNA (1)...(19): siRNA sense strand
guaugcaggugccuugaga

SEQ ID NO: 963734 - RNA, 19 nt, Homo sapiens
  misc_RNA (1)...(19): siRNA sense strand
ggggaaacaucaaaauaaa

SEQ ID NO: 963735 - RNA, 19 nt, Homo sapiens
  misc_RNA (1)...(19): siRNA sense strand
gaaauaauggaagaggaaa

SEQ ID NO: 963736 - RNA, 19 nt, Homo sapiens
  misc_RNA (1)...(19): siRNA sense strand
ggaugauucuguuaaagag

SEQ ID NO: 963737 - RNA, 19 nt, Homo sapiens
  misc_RNA (1)...(19): siRNA sense strand
agaggaugauucuguuaaa

SEQ ID NO: 963738 - RNA, 19 nt, Homo sapiens
  misc_RNA (1)...(19): siRNA sense strand
ggaaacaagaugaauggau

SEQ ID NO: 963739 - RNA, 19 nt, Homo sapiens
  misc_RNA (1)...(19): siRNA sense strand
ugacuuacaagcaguacua

SEQ ID NO: 963740 - RNA, 19 nt, Homo sapiens
  misc_RNA (1)...(19): siRNA sense strand
gugaaucagcagccaaaua

SEQ ID NO: 963741 - RNA, 19 nt, Homo sapiens
  misc_RNA (1)...(19): siRNA sense strand
aggaagaaaucaccaaaca

SEQ ID NO: 963742 - RNA, 19 nt, Homo sapiens
  misc_RNA (1)...(19): siRNA sense strand
agaagaacccucagccaaa

SEQ ID NO: 963743 - RNA, 19 nt, Homo sapiens
  misc_RNA (1)...(19): siRNA sense strand
cugcagcccuuagagauuu

SEQ ID NO: 963744 - RNA, 19 nt, Homo sapiens
  misc_RNA (1)...(19): siRNA sense strand
ccaaacagucuccaacguu

SEQ ID NO: 963745 - RNA, 19 nt, Homo sapiens
  misc_RNA (1)...(19): siRNA sense strand
gaagaagaagucaccaaag

SEQ ID NO: 963746 - RNA, 19 nt, Homo sapiens
  misc_RNA (1)...(19): siRNA sense strand
acagaaaguuauggugaaa

SEQ ID NO: 963747 - RNA, 19 nt, Homo sapiens
  misc_RNA (1)...(19): siRNA sense strand
gcucagcuguuugcguuga

SEQ ID NO: 963748 - RNA, 19 nt, Homo sapiens
  misc_RNA (1)...(19): siRNA sense strand
aagaagaagucaccaaagg

SEQ ID NO: 963749 - RNA, 19 nt, Homo sapiens
  misc_RNA (1)...(19): siRNA sense strand
auucaaggcucagcuguuu

SEQ ID NO: 963750 - RNA, 19 nt, Homo sapiens
  misc_RNA (1)...(19): siRNA sense strand
ugacaaaccuugguaacac

SEQ ID NO: 963751 - RNA, 19 nt, Homo sapiens
  misc_RNA (1)...(19): siRNA sense strand
ccucuuauguuggauaugu

SEQ ID NO: 963752 - RNA, 19 nt, Homo sapiens
  misc_RNA (1)...(19): siRNA sense strand
ucaaucaggaagucaagua

SEQ ID NO: 963753 - RNA, 19 nt, Homo sapiens
  misc_RNA (1)...(19): siRNA sense strand
acaggaugcuaaugaaugu

SEQ ID NO: 963754 - RNA, 19 nt, Homo sapiens
  misc_RNA (1)...(19): siRNA sense strand
gaaaggaggaacgcuaaag

SEQ ID NO: 963755 - RNA, 19 nt, Homo sapiens
  misc_RNA (1)...(19): siRNA sense strand
gaguauugcaacagaaauu

SEQ ID NO: 963756 - RNA, 19 nt, Homo sapiens
  misc_RNA (1)...(19): siRNA sense strand
acaguucaguguauucguu

SEQ ID NO: 963757 - RNA, 19 nt, Homo sapiens
  misc_RNA (1)...(19): siRNA sense strand
ugaaauaauggaagaggaa

SEQ ID NO: 963758 - RNA, 19 nt, Homo sapiens
  misc_RNA (1)...(19): siRNA sense strand
ucgcuuacguucuacucua

SEQ ID NO: 963759 - RNA, 19 nt, Homo sapiens
  misc_RNA (1)...(19): siRNA sense strand
ucuccaacguugcaaagaa

SEQ ID NO: 963760 - RNA, 19 nt, Homo sapiens
  misc_RNA (1)...(19): siRNA sense strand
agaagaagaagucaccaaa

SEQ ID NO: 963761 - RNA, 19 nt, Homo sapiens
  misc_RNA (1)...(19): siRNA sense strand
gagauuuguuugauuccau

SEQ ID NO: 963762 - RNA, 19 nt, Homo sapiens
  misc_RNA (1)...(19): siRNA sense strand
gaacgcuaaaggaugauga

SEQ ID NO: 963763 - RNA, 19 nt, Homo sapiens
  misc_RNA (1)...(19): siRNA sense strand
uggauacuaugacuuacaa

SEQ ID NO: 963764 - RNA, 19 nt, Homo sapiens
  misc_RNA (1)...(19): siRNA sense strand
ugaaucagcagccaaauac

SEQ ID NO: 963765 - RNA, 19 nt, Homo sapiens
  misc_RNA (1)...(19): siRNA sense strand
gaggaugauucuguuaaag

SEQ ID NO: 963766 - RNA, 19 nt, Homo sapiens
  misc_RNA (1)...(19): siRNA sense strand
gugaaaggaggaacgcuaa

SEQ ID NO: 963767 - RNA, 19 nt, Homo sapiens
  misc_RNA (1)...(19): siRNA sense strand
gaguuaccauguggauuga

SEQ ID NO: 963768 - RNA, 19 nt, Homo sapiens
  misc_RNA (1)...(19): siRNA sense strand
gaugaauggauuaaguuug

SEQ ID NO: 963769 - RNA, 19 nt, Homo sapiens
  misc_RNA (1)...(19): siRNA sense strand
gggaaaggagaaauuugaa

SEQ ID NO: 963770 - RNA, 19 nt, Homo sapiens
  misc_RNA (1)...(19): siRNA sense strand
gugaaugccaaaguucuua

SEQ ID NO: 963771 - RNA, 19 nt, Homo sapiens
  misc_RNA (1)...(19): siRNA sense strand
ccuuguauaucaaaucuuc

SEQ ID NO: 963772 - RNA, 19 nt, Homo sapiens
  misc_RNA (1)...(19): siRNA sense strand
uccaguauuccaccuauua

SEQ ID NO: 963773 - RNA, 19 nt, Homo sapiens
  misc_RNA (1)...(19): siRNA sense strand
ggauugacaaaccuuggua

SEQ ID NO: 963774 - RNA, 19 nt, Homo sapiens
  misc_RNA (1)...(19): siRNA sense strand
caggaagucaaguaucuuu

SEQ ID NO: 963775 - RNA, 19 nt, Homo sapiens
  misc_RNA (1)...(19): siRNA sense strand
gguggagacuggcauaucg

SEQ ID NO: 963776 - RNA, 19 nt, Homo sapiens
  misc_RNA (1)...(19): siRNA sense strand
caucguaacaccagaagau

SEQ ID NO: 963777 - RNA, 19 nt, Homo sapiens
  misc_RNA (1)...(19): siRNA sense strand
gaaaaggaaacaagaugaa

SEQ ID NO: 963778 - RNA, 19 nt, Homo sapiens
  misc_RNA (1)...(19): siRNA sense strand
aaagagaaggaaucuguga

SEQ ID NO: 963779 - RNA, 19 nt, Homo sapiens
  misc_RNA (1)...(19): siRNA sense strand
aggaagaacuguuguauuu

SEQ ID NO: 963780 - RNA, 19 nt, Homo sapiens
  misc_RNA (1)...(19): siRNA sense strand
caaagaaccuaucgugaug

SEQ ID NO: 963781 - RNA, 19 nt, Homo sapiens
  misc_RNA (1)...(19): siRNA sense strand
ggucacggcuauucucaua

SEQ ID NO: 963782 - RNA, 19 nt, Homo sapiens
  misc_RNA (1)...(19): siRNA sense strand
aaacccggcugaugaaaua

SEQ ID NO: 963783 - RNA, 19 nt, Homo sapiens
  misc_RNA (1)...(19): siRNA sense strand
gaagagggcugugaagauc

SEQ ID NO: 963784 - RNA, 19 nt, Homo sapiens
  misc_RNA (1)...(19): siRNA sense strand
ucacggcuauucucauaua

SEQ ID NO: 963785 - RNA, 19 nt, Homo sapiens
  misc_RNA (1)...(19): siRNA sense strand
ugaagaggcuugcagaaga

SEQ ID NO: 963786 - RNA, 19 nt, Homo sapiens
  misc_RNA (1)...(19): siRNA sense strand
cagcuugguuguccuguua

SEQ ID NO: 963787 - RNA, 19 nt, Homo sapiens
  misc_RNA (1)...(19): siRNA sense strand
gcaacucacuccucagaga

SEQ ID NO: 963788 - RNA, 19 nt, Homo sapiens
  misc_RNA (1)...(19): siRNA sense strand
gaaugugcuugauaagauu

SEQ ID NO: 963789 - RNA, 19 nt, Homo sapiens
  misc_RNA (1)...(19): siRNA sense strand
ucaccaauguuguuccuaa

SEQ ID NO: 963790 - RNA, 19 nt, Homo sapiens
  misc_RNA (1)...(19): siRNA sense strand
uaucaaguguggcauuauu

SEQ ID NO: 963791 - RNA, 19 nt, Homo sapiens
  misc_RNA (1)...(19): siRNA sense strand
gaauaugaucucuuuggua

SEQ ID NO: 963792 - RNA, 19 nt, Homo sapiens
  misc_RNA (1)...(19): siRNA sense strand
gcacaugacauacauacga

SEQ ID NO: 963793 - RNA, 19 nt, Homo sapiens
  misc_RNA (1)...(19): siRNA sense strand
gaagaggcuugcagaagag

SEQ ID NO: 963794 - RNA, 19 nt, Homo sapiens
  misc_RNA (1)...(19): siRNA sense strand
cugagaaugugcuugauaa

SEQ ID NO: 963795 - RNA, 19 nt, Homo sapiens
  misc_RNA (1)...(19): siRNA sense strand
ggaauaugaucucuuuggu

SEQ ID NO: 963796 - RNA, 19 nt, Homo sapiens
  misc_RNA (1)...(19): siRNA sense strand
gacagaagccauaaaggaa

SEQ ID NO: 963797 - RNA, 19 nt, Homo sapiens
  misc_RNA (1)...(19): siRNA sense strand
agaaugugcuugauaagau

SEQ ID NO: 963798 - RNA, 19 nt, Homo sapiens
  misc_RNA (1)...(19): siRNA sense strand
uaacugagaaugugcuuga

SEQ ID NO: 963799 - RNA, 19 nt, Homo sapiens
  misc_RNA (1)...(19): siRNA sense strand
ccgauguccuuaugaauga

SEQ ID NO: 963800 - RNA, 19 nt, Homo sapiens
  misc_RNA (1)...(19): siRNA sense strand
ggaagagggcugugaagau

SEQ ID NO: 963801 - RNA, 19 nt, Homo sapiens
  misc_RNA (1)...(19): siRNA sense strand
ugacugagagugaaagaaa

SEQ ID NO: 963802 - RNA, 19 nt, Homo sapiens
  misc_RNA (1)...(19): siRNA sense strand
aaacgccuauucccauaaa

SEQ ID NO: 963803 - RNA, 19 nt, Homo sapiens
  misc_RNA (1)...(19): siRNA sense strand
ugacaugccugaugauaac

SEQ ID NO: 963804 - RNA, 19 nt, Homo sapiens
  misc_RNA (1)...(19): siRNA sense strand
gcugcuacuuggaauauga

SEQ ID NO: 963805 - RNA, 19 nt, Homo sapiens
  misc_RNA (1)...(19): siRNA sense strand
ccaaagaaccuaucgugau

SEQ ID NO: 963806 - RNA, 19 nt, Homo sapiens
  misc_RNA (1)...(19): siRNA sense strand
gaagcuauuuccaaagaac

SEQ ID NO: 963807 - RNA, 19 nt, Homo sapiens
  misc_RNA (1)...(19): siRNA sense strand
caacucggcccagauauug

SEQ ID NO: 963808 - RNA, 19 nt, Homo sapiens
  misc_RNA (1)...(19): siRNA sense strand
cuuggaauaugaucucuuu

SEQ ID NO: 963809 - RNA, 19 nt, Homo sapiens
  misc_RNA (1)...(19): siRNA sense strand
gaauucugguagcacauga

SEQ ID NO: 963810 - RNA, 19 nt, Homo sapiens
  misc_RNA (1)...(19): siRNA sense strand
gagaaugugcuugauaaga

SEQ ID NO: 963811 - RNA, 19 nt, Homo sapiens
  misc_RNA (1)...(19): siRNA sense strand
ggagacagaagccauaaag

SEQ ID NO: 963812 - RNA, 19 nt, Homo sapiens
  misc_RNA (1)...(19): siRNA sense strand
ccuaagcaauggcuaacuu

SEQ ID NO: 963813 - RNA, 19 nt, Homo sapiens
  misc_RNA (1)...(19): siRNA sense strand
uaaaggaagaacuguugua

SEQ ID NO: 963814 - RNA, 19 nt, Homo sapiens
  misc_RNA (1)...(19): siRNA sense strand
cauaaaggaagaacuguug

SEQ ID NO: 963815 - RNA, 19 nt, Homo sapiens
  misc_RNA (1)...(19): siRNA sense strand
cagaagccauaaaggaaga

SEQ ID NO: 963816 - RNA, 19 nt, Homo sapiens
  misc_RNA (1)...(19): siRNA sense strand
gaagagacuggcguccaua

SEQ ID NO: 963817 - RNA, 19 nt, Homo sapiens
  misc_RNA (1)...(19): siRNA sense strand
gauauugacaugccugaug

SEQ ID NO: 963818 - RNA, 19 nt, Homo sapiens
  misc_RNA (1)...(19): siRNA sense strand
gggcaccauuucagauuau

SEQ ID NO: 963819 - RNA, 19 nt, Homo sapiens
  misc_RNA (1)...(19): siRNA sense strand
ucaauuaaaucaggagaca

SEQ ID NO: 963820 - RNA, 19 nt, Homo sapiens
  misc_RNA (1)...(19): siRNA sense strand
gcuccuggccuuugacuga

SEQ ID NO: 963821 - RNA, 19 nt, Homo sapiens
  misc_RNA (1)...(19): siRNA sense strand
gaaccuaucgugaugaaaa

SEQ ID NO: 963822 - RNA, 19 nt, Homo sapiens
  misc_RNA (1)...(19): siRNA sense strand
gagacuggcguccauauca

SEQ ID NO: 963823 - RNA, 19 nt, Homo sapiens
  misc_RNA (1)...(19): siRNA sense strand
agacagaagccauaaagga

SEQ ID NO: 963824 - RNA, 19 nt, Homo sapiens
  misc_RNA (1)...(19): siRNA sense strand
uggagcagcuuaccgaugu

SEQ ID NO: 963825 - RNA, 19 nt, Homo sapiens
  misc_RNA (1)...(19): siRNA sense strand
gguagcacaugacauacau

SEQ ID NO: 963826 - RNA, 19 nt, Homo sapiens
  misc_RNA (1)...(19): siRNA sense strand
ucugguagcacaugacaua

SEQ ID NO: 963827 - RNA, 19 nt, Homo sapiens
  misc_RNA (1)...(19): siRNA sense strand
gccguacccugacccauga

SEQ ID NO: 963828 - RNA, 19 nt, Homo sapiens
  misc_RNA (1)...(19): siRNA sense strand
aaacacaaccacugggauu

SEQ ID NO: 963829 - RNA, 19 nt, Homo sapiens
  misc_RNA (1)...(19): siRNA sense strand
uagagaacccuaagcaaug

SEQ ID NO: 963830 - RNA, 19 nt, Homo sapiens
  misc_RNA (1)...(19): siRNA sense strand
uuaccgauguccuuaugaa

SEQ ID NO: 963831 - RNA, 19 nt, Homo sapiens
  misc_RNA (1)...(19): siRNA sense strand
cacaugacauacauacgaa

SEQ ID NO: 963832 - RNA, 19 nt, Homo sapiens
  misc_RNA (1)...(19): siRNA sense strand
ugagaggcauaacugagaa

SEQ ID NO: 963833 - RNA, 19 nt, Homo sapiens
  misc_RNA (1)...(19): siRNA sense strand
cauauacucaccaauguug

SEQ ID NO: 963834 - RNA, 19 nt, Homo sapiens
  misc_RNA (1)...(19): siRNA sense strand
gcuuaccgauguccuuaug

SEQ ID NO: 963835 - RNA, 19 nt, Homo sapiens
  misc_RNA (1)...(19): siRNA sense strand
aguaucaaguguggcauua

SEQ ID NO: 963836 - RNA, 19 nt, Homo sapiens
  misc_RNA (1)...(19): siRNA sense strand
gauggaaccaguaucaagu

SEQ ID NO: 963837 - RNA, 19 nt, Homo sapiens
  misc_RNA (1)...(19): siRNA sense strand
uggcauuauuggagaaauu

SEQ ID NO: 963838 - RNA, 19 nt, Homo sapiens
  misc_RNA (1)...(19): siRNA sense strand
ccaacucggcccagauauu

SEQ ID NO: 963839 - RNA, 19 nt, Homo sapiens
  misc_RNA (1)...(19): siRNA sense strand
caccaauguuguuccuaaa

SEQ ID NO: 963840 - RNA, 19 nt, Homo sapiens
  misc_RNA (1)...(19): siRNA sense strand
auauugacaugccugauga

SEQ ID NO: 963841 - RNA, 19 nt, Homo sapiens
  misc_RNA (1)...(19): siRNA sense strand
gagcugauggaaccaguau

SEQ ID NO: 963842 - RNA, 19 nt, Homo sapiens
  misc_RNA (1)...(19): siRNA sense strand
gcaauggcuaacuuucaaa

SEQ ID NO: 963843 - RNA, 19 nt, Homo sapiens
  misc_RNA (1)...(19): siRNA sense strand
cagauuauccgaauauugc

SEQ ID NO: 963844 - RNA, 19 nt, Homo sapiens
  misc_RNA (1)...(19): siRNA sense strand
aagaaccuaucgugaugaa

SEQ ID NO: 963845 - RNA, 19 nt, Homo sapiens
  misc_RNA (1)...(19): siRNA sense strand
cauuucagauuauccgaau

SEQ ID NO: 963846 - RNA, 19 nt, Homo sapiens
  misc_RNA (1)...(19): siRNA sense strand
uaauagagaacccuaagca

SEQ ID NO: 963847 - RNA, 19 nt, Homo sapiens
  misc_RNA (1)...(19): siRNA sense strand
aggcauaacugagaaugug

SEQ ID NO: 963848 - RNA, 19 nt, Homo sapiens
  misc_RNA (1)...(19): siRNA sense strand
ucucauauacucaccaaug

SEQ ID NO: 963849 - RNA, 19 nt, Homo sapiens
  misc_RNA (1)...(19): siRNA sense strand
ucaggagacagaagccaua

SEQ ID NO: 963850 - RNA, 19 nt, Homo sapiens
  misc_RNA (1)...(19): siRNA sense strand
uaccaacucggcccagaua

SEQ ID NO: 963851 - RNA, 19 nt, Homo sapiens
  misc_RNA (1)...(19): siRNA sense strand
uaugaucucuuugguacug

SEQ ID NO: 963852 - RNA, 19 nt, Homo sapiens
  misc_RNA (1)...(19): siRNA sense strand
gcagacaucuccaaaacag

SEQ ID NO: 963853 - RNA, 19 nt, Homo sapiens
  misc_RNA (1)...(19): siRNA sense strand
gagacacacagacguugaa

SEQ ID NO: 963854 - RNA, 19 nt, Homo sapiens
  misc_RNA (1)...(19): siRNA sense strand
ucucuuugguacugaacua

SEQ ID NO: 963855 - RNA, 19 nt, Homo sapiens
  misc_RNA (1)...(19): siRNA sense strand
agggcaccauuucagauua

SEQ ID NO: 963856 - RNA, 19 nt, Homo sapiens
  misc_RNA (1)...(19): siRNA sense strand
cagcuuaccgauguccuua

SEQ ID NO: 963857 - RNA, 19 nt, Homo sapiens
  misc_RNA (1)...(19): siRNA sense strand
agaagagacuggcguccau

SEQ ID NO: 963858 - RNA, 19 nt, Homo sapiens
  misc_RNA (1)...(19): siRNA sense strand
aaaggaagaacuguuguau

SEQ ID NO: 963859 - RNA, 19 nt, Homo sapiens
  misc_RNA (1)...(19): siRNA sense strand
agcaauggcuaacuuucaa

SEQ ID NO: 963860 - RNA, 19 nt, Homo sapiens
  misc_RNA (1)...(19): siRNA sense strand
acacacagacguugaagag

SEQ ID NO: 963861 - RNA, 19 nt, Homo sapiens
  misc_RNA (1)...(19): siRNA sense strand
ucagauuauccgaauauug

SEQ ID NO: 963862 - RNA, 19 nt, Homo sapiens
  misc_RNA (1)...(19): siRNA sense strand
gagcuccagggcaccauuu

SEQ ID NO: 963863 - RNA, 19 nt, Homo sapiens
  misc_RNA (1)...(19): siRNA sense strand
gcuugguuguccuguuauu

SEQ ID NO: 963864 - RNA, 19 nt, Homo sapiens
  misc_RNA (1)...(19): siRNA sense strand
gacuggcguccauaucaua

SEQ ID NO: 963865 - RNA, 19 nt, Homo sapiens
  misc_RNA (1)...(19): siRNA sense strand
auauggaggucacggcuau

SEQ ID NO: 963866 - RNA, 19 nt, Homo sapiens
  misc_RNA (1)...(19): siRNA sense strand
auagagaacccuaagcaau

SEQ ID NO: 963867 - RNA, 19 nt, Homo sapiens
  misc_RNA (1)...(19): siRNA sense strand
ccaaaacagucaugucaca

SEQ ID NO: 963868 - RNA, 19 nt, Homo sapiens
  misc_RNA (1)...(19): siRNA sense strand
auggcuaacuuucaaauag

SEQ ID NO: 963869 - RNA, 19 nt, Homo sapiens
  misc_RNA (1)...(19): siRNA sense strand
caugccugaugauaacaaa

SEQ ID NO: 963870 - RNA, 19 nt, Homo sapiens
  misc_RNA (1)...(19): siRNA sense strand
cuaagcaauggcuaacuuu

SEQ ID NO: 963871 - RNA, 19 nt, Homo sapiens
  misc_RNA (1)...(19): siRNA sense strand
gggcugugaagaucgaauu

SEQ ID NO: 963872 - RNA, 19 nt, Homo sapiens
  misc_RNA (1)...(19): siRNA sense strand
cagggcaccauuucagauu

SEQ ID NO: 963873 - RNA, 19 nt, Homo sapiens
  misc_RNA (1)...(19): siRNA sense strand
agagaacccuaagcaaugg

SEQ ID NO: 963874 - RNA, 19 nt, Homo sapiens
  misc_RNA (1)...(19): siRNA sense strand
gcgcagacaucuccaaaac

SEQ ID NO: 963875 - RNA, 19 nt, Homo sapiens
  misc_RNA (1)...(19): siRNA sense strand
ggccuuugacugagaguga

SEQ ID NO: 963876 - RNA, 19 nt, Homo sapiens
  misc_RNA (1)...(19): siRNA sense strand
cggcuauucucauauacuc

SEQ ID NO: 963877 - RNA, 19 nt, Homo sapiens
  misc_RNA (1)...(19): siRNA sense strand
ccauaaaggaagaacuguu

SEQ ID NO: 963878 - RNA, 19 nt, Homo sapiens
  misc_RNA (1)...(19): siRNA sense strand
gacugagagugaaagaaag

SEQ ID NO: 963879 - RNA, 19 nt, Homo sapiens
  misc_RNA (1)...(19): siRNA sense strand
gcaacaagauccugagaaa

SEQ ID NO: 963880 - RNA, 19 nt, Homo sapiens
  misc_RNA (1)...(19): siRNA sense strand
gauuacagcaugugaauua

SEQ ID NO: 963881 - RNA, 19 nt, Homo sapiens
  misc_RNA (1)...(19): siRNA sense strand
gaacucagaugcuguuaca

SEQ ID NO: 963882 - RNA, 19 nt, Homo sapiens
  misc_RNA (1)...(19): siRNA sense strand
ccugaaagcuuuacagaaa

SEQ ID NO: 963883 - RNA, 19 nt, Homo sapiens
  misc_RNA (1)...(19): siRNA sense strand
gaacacugguaacuauaaa

SEQ ID NO: 963884 - RNA, 19 nt, Homo sapiens
  misc_RNA (1)...(19): siRNA sense strand
ggacugagccagaauguga

SEQ ID NO: 963885 - RNA, 19 nt, Homo sapiens
  misc_RNA (1)...(19): siRNA sense strand
ucaaacagaugaaagaaga

SEQ ID NO: 963886 - RNA, 19 nt, Homo sapiens
  misc_RNA (1)...(19): siRNA sense strand
gaagaggauuugacaacuu

SEQ ID NO: 963887 - RNA, 19 nt, Homo sapiens
  misc_RNA (1)...(19): siRNA sense strand
gaacacaaguugaaucacu

SEQ ID NO: 963888 - RNA, 19 nt, Homo sapiens
  misc_RNA (1)...(19): siRNA sense strand
gaagaacgccugaaagcuu

SEQ ID NO: 963889 - RNA, 19 nt, Homo sapiens
  misc_RNA (1)...(19): siRNA sense strand
gguauaaugugaagucaga

SEQ ID NO: 963890 - RNA, 19 nt, Homo sapiens
  misc_RNA (1)...(19): siRNA sense strand
gaagucagauauuuacagu

SEQ ID NO: 963891 - RNA, 19 nt, Homo sapiens
  misc_RNA (1)...(19): siRNA sense strand
aaaccaguauccaucaaua

SEQ ID NO: 963892 - RNA, 19 nt, Homo sapiens
  misc_RNA (1)...(19): siRNA sense strand
ggaaugagugaaacuuuaa

SEQ ID NO: 963893 - RNA, 19 nt, Homo sapiens
  misc_RNA (1)...(19): siRNA sense strand
caggaacacugguaacuau

SEQ ID NO: 963894 - RNA, 19 nt, Homo sapiens
  misc_RNA (1)...(19): siRNA sense strand
gaagaaagccaggauucaa

SEQ ID NO: 963895 - RNA, 19 nt, Homo sapiens
  misc_RNA (1)...(19): siRNA sense strand
uaacaagccaucaauauca

SEQ ID NO: 963896 - RNA, 19 nt, Homo sapiens
  misc_RNA (1)...(19): siRNA sense strand
caacuugacuucuguccau

SEQ ID NO: 963897 - RNA, 19 nt, Homo sapiens
  misc_RNA (1)...(19): siRNA sense strand
ccaccaacguuucucacua

SEQ ID NO: 963898 - RNA, 19 nt, Homo sapiens
  misc_RNA (1)...(19): siRNA sense strand
caguggaacucacacagua

SEQ ID NO: 963899 - RNA, 19 nt, Homo sapiens
  misc_RNA (1)...(19): siRNA sense strand
caaaauggcuguauucaca

SEQ ID NO: 963900 - RNA, 19 nt, Homo sapiens
  misc_RNA (1)...(19): siRNA sense strand
ggaacacugguaacuauaa

SEQ ID NO: 963901 - RNA, 19 nt, Homo sapiens
  misc_RNA (1)...(19): siRNA sense strand
aggaaugagugaaacuuua

SEQ ID NO: 963902 - RNA, 19 nt, Homo sapiens
  misc_RNA (1)...(19): siRNA sense strand
gaacucacacaguaaauag

SEQ ID NO: 963903 - RNA, 19 nt, Homo sapiens
  misc_RNA (1)...(19): siRNA sense strand
ggaacucacacaguaaaua

SEQ ID NO: 963904 - RNA, 19 nt, Homo sapiens
  misc_RNA (1)...(19): siRNA sense strand
uggguuauuucuccauuua

SEQ ID NO: 963905 - RNA, 19 nt, Homo sapiens
  misc_RNA (1)...(19): siRNA sense strand
caaucagaauccagaauga

SEQ ID NO: 963906 - RNA, 19 nt, Homo sapiens
  misc_RNA (1)...(19): siRNA sense strand
ucagauauuuacaguguug

SEQ ID NO: 963907 - RNA, 19 nt, Homo sapiens
  misc_RNA (1)...(19): siRNA sense strand
gaacuacugagacaggauu

SEQ ID NO: 963908 - RNA, 19 nt, Homo sapiens
  misc_RNA (1)...(19): siRNA sense strand
aguaaauagugaccgauua

SEQ ID NO: 963909 - RNA, 19 nt, Homo sapiens
  misc_RNA (1)...(19): siRNA sense strand
uguauucacaggaguauua

SEQ ID NO: 963910 - RNA, 19 nt, Homo sapiens
  misc_RNA (1)...(19): siRNA sense strand
gaaagaagaaagccaggau

SEQ ID NO: 963911 - RNA, 19 nt, Homo sapiens
  misc_RNA (1)...(19): siRNA sense strand
ccuuauagcccauuggaua

SEQ ID NO: 963912 - RNA, 19 nt, Homo sapiens
  misc_RNA (1)...(19): siRNA sense strand
ggauuuacauggguauaau

SEQ ID NO: 963913 - RNA, 19 nt, Homo sapiens
  misc_RNA (1)...(19): siRNA sense strand
acuaugagcuccaaguaga

SEQ ID NO: 963914 - RNA, 19 nt, Homo sapiens
  misc_RNA (1)...(19): siRNA sense strand
gcagcuggcuuuggguuau

SEQ ID NO: 963915 - RNA, 19 nt, Homo sapiens
  misc_RNA (1)...(19): siRNA sense strand
aagaacgccugaaagcuuu

SEQ ID NO: 963916 - RNA, 19 nt, Homo sapiens
  misc_RNA (1)...(19): siRNA sense strand
ccagugaaguacuauguuc

SEQ ID NO: 963917 - RNA, 19 nt, Homo sapiens
  misc_RNA (1)...(19): siRNA sense strand
caccaacguuucucacuau

SEQ ID NO: 963918 - RNA, 19 nt, Homo sapiens
  misc_RNA (1)...(19): siRNA sense strand
gguuauuucuccauuuaug

SEQ ID NO: 963919 - RNA, 19 nt, Homo sapiens
  misc_RNA (1)...(19): siRNA sense strand
ggaagaggauuugacaacu

SEQ ID NO: 963920 - RNA, 19 nt, Homo sapiens
  misc_RNA (1)...(19): siRNA sense strand
agucagauauuuacagugu

SEQ ID NO: 963921 - RNA, 19 nt, Homo sapiens
  misc_RNA (1)...(19): siRNA sense strand
aagaggauuugacaacuug

SEQ ID NO: 963922 - RNA, 19 nt, Homo sapiens
  misc_RNA (1)...(19): siRNA sense strand
agaaagccaggauucaaua

SEQ ID NO: 963923 - RNA, 19 nt, Homo sapiens
  misc_RNA (1)...(19): siRNA sense strand
caaugaagaacgccugaaa

SEQ ID NO: 963924 - RNA, 19 nt, Homo sapiens
  misc_RNA (1)...(19): siRNA sense strand
ugagaggguugaacuaucu

SEQ ID NO: 963925 - RNA, 19 nt, Homo sapiens
  misc_RNA (1)...(19): siRNA sense strand
gguguagacucugggauug

SEQ ID NO: 963926 - RNA, 19 nt, Homo sapiens
  misc_RNA (1)...(19): siRNA sense strand
ccaaguagaaauaggaaga

SEQ ID NO: 963927 - RNA, 19 nt, Homo sapiens
  misc_RNA (1)...(19): siRNA sense strand
gaaggaaugagugaaacuu

SEQ ID NO: 963928 - RNA, 19 nt, Homo sapiens
  misc_RNA (1)...(19): siRNA sense strand
ugaacuaucugcaccaaaa

SEQ ID NO: 963929 - RNA, 19 nt, Homo sapiens
  misc_RNA (1)...(19): siRNA sense strand
gaaaccaguauccaucaau

SEQ ID NO: 963930 - RNA, 19 nt, Homo sapiens
  misc_RNA (1)...(19): siRNA sense strand
guccagaacuacugagaca

SEQ ID NO: 963931 - RNA, 19 nt, Homo sapiens
  misc_RNA (1)...(19): siRNA sense strand
gcaccaaaauggcuguauu

SEQ ID NO: 963932 - RNA, 19 nt, Homo sapiens
  misc_RNA (1)...(19): siRNA sense strand
uagagccagugaaguacua

SEQ ID NO: 963933 - RNA, 19 nt, Homo sapiens
  misc_RNA (1)...(19): siRNA sense strand
aucauugccuccaguguua

SEQ ID NO: 963934 - RNA, 19 nt, Homo sapiens
  misc_RNA (1)...(19): siRNA sense strand
gcaguuuauugucccaugu

SEQ ID NO: 963935 - RNA, 19 nt, Homo sapiens
  misc_RNA (1)...(19): siRNA sense strand
gccaucagcaagcaguuua

SEQ ID NO: 963936 - RNA, 19 nt, Homo sapiens
  misc_RNA (1)...(19): siRNA sense strand
ggagaaagugugcuugucu

SEQ ID NO: 963937 - RNA, 19 nt, Homo sapiens
  misc_RNA (1)...(19): siRNA sense strand
ucacuaugagcuccaagua

SEQ ID NO: 963938 - RNA, 19 nt, Homo sapiens
  misc_RNA (1)...(19): siRNA sense strand
uuacaaaucuggaaaacug

SEQ ID NO: 963939 - RNA, 19 nt, Homo sapiens
  misc_RNA (1)...(19): siRNA sense strand
guagaaauaggaagaggau

SEQ ID NO: 963940 - RNA, 19 nt, Homo sapiens
  misc_RNA (1)...(19): siRNA sense strand
gugagaggguugaacuauc

SEQ ID NO: 963941 - RNA, 19 nt, Homo sapiens
  misc_RNA (1)...(19): siRNA sense strand
aagccaggauucaauacuu

SEQ ID NO: 963942 - RNA, 19 nt, Homo sapiens
  misc_RNA (1)...(19): siRNA sense strand
ccagccauauccucauuuc

SEQ ID NO: 963943 - RNA, 19 nt, Homo sapiens
  misc_RNA (1)...(19): siRNA sense strand
ugaaaccaguauccaucaa

SEQ ID NO: 963944 - RNA, 19 nt, Homo sapiens
  misc_RNA (1)...(19): siRNA sense strand
ucacguccauccacuagag

SEQ ID NO: 963945 - RNA, 19 nt, Homo sapiens
  misc_RNA (1)...(19): siRNA sense strand
ucaaucagaauccagaaug

SEQ ID NO: 963946 - RNA, 19 nt, Homo sapiens
  misc_RNA (1)...(19): siRNA sense strand
caagaacacaaguugaauc

SEQ ID NO: 963947 - RNA, 19 nt, Homo sapiens
  misc_RNA (1)...(19): siRNA sense strand
gggauuacagcaugugaau

SEQ ID NO: 963948 - RNA, 19 nt, Homo sapiens
  misc_RNA (1)...(19): siRNA sense strand
uucaauacuuucacuguug

SEQ ID NO: 963949 - RNA, 19 nt, Homo sapiens
  misc_RNA (1)...(19): siRNA sense strand
ucagcaagcaguuuauugu

SEQ ID NO: 963950 - RNA, 19 nt, Homo sapiens
  misc_RNA (1)...(19): siRNA sense strand
ggaaaacugcaaugaagaa

SEQ ID NO: 963951 - RNA, 19 nt, Homo sapiens
  misc_RNA (1)...(19): siRNA sense strand
agccaggauucaauacuuu

SEQ ID NO: 963952 - RNA, 19 nt, Homo sapiens
  misc_RNA (1)...(19): siRNA sense strand
gagaaaaggccaucagcaa

SEQ ID NO: 963953 - RNA, 19 nt, Homo sapiens
  misc_RNA (1)...(19): siRNA sense strand
caucugcauaguuugguua

SEQ ID NO: 963954 - RNA, 19 nt, Homo sapiens
  misc_RNA (1)...(19): siRNA sense strand
aagcauggacagaggcaua

SEQ ID NO: 963955 - RNA, 19 nt, Homo sapiens
  misc_RNA (1)...(19): siRNA sense strand
uaucauugccuccaguguu

SEQ ID NO: 963956 - RNA, 19 nt, Homo sapiens
  misc_RNA (1)...(19): siRNA sense strand
ugagcuccaaguagaaaua

SEQ ID NO: 963957 - RNA, 19 nt, Homo sapiens
  misc_RNA (1)...(19): siRNA sense strand
cccauuggauaucaguauu

SEQ ID NO: 963958 - RNA, 19 nt, Homo sapiens
  misc_RNA (1)...(19): siRNA sense strand
gauuugacaacuugacuuc

SEQ ID NO: 963959 - RNA, 19 nt, Homo sapiens
  misc_RNA (1)...(19): siRNA sense strand
gaaagccaggauucaauac

SEQ ID NO: 963960 - RNA, 19 nt, Homo sapiens
  misc_RNA (1)...(19): siRNA sense strand
guggcugaguccagaacua

SEQ ID NO: 963961 - RNA, 19 nt, Homo sapiens
  misc_RNA (1)...(19): siRNA sense strand
uauuuacaguguugggauu

SEQ ID NO: 963962 - RNA, 19 nt, Homo sapiens
  misc_RNA (1)...(19): siRNA sense strand
gauucaauacuuucacugu

SEQ ID NO: 963963 - RNA, 19 nt, Homo sapiens
  misc_RNA (1)...(19): siRNA sense strand
ccugaaggaaugagugaaa

SEQ ID NO: 963964 - RNA, 19 nt, Homo sapiens
  misc_RNA (1)...(19): siRNA sense strand
gcuccaaguagaaauagga

SEQ ID NO: 963965 - RNA, 19 nt, Homo sapiens
  misc_RNA (1)...(19): siRNA sense strand
aaagaagaaagccaggauu

SEQ ID NO: 963966 - RNA, 19 nt, Homo sapiens
  misc_RNA (1)...(19): siRNA sense strand
ccauuggauaucaguauuu

SEQ ID NO: 963967 - RNA, 19 nt, Homo sapiens
  misc_RNA (1)...(19): siRNA sense strand
cagcuggcuuuggguuauu

SEQ ID NO: 963968 - RNA, 19 nt, Homo sapiens
  misc_RNA (1)...(19): siRNA sense strand
gaaugugauuuuccugaug

SEQ ID NO: 963969 - RNA, 19 nt, Homo sapiens
  misc_RNA (1)...(19): siRNA sense strand
gauugcuucugcacuucaa

SEQ ID NO: 963970 - RNA, 19 nt, Homo sapiens
  misc_RNA (1)...(19): siRNA sense strand
guggaacucacacaguaaa

SEQ ID NO: 963971 - RNA, 19 nt, Homo sapiens
  misc_RNA (1)...(19): siRNA sense strand
uauuaaagccagccauauc

SEQ ID NO: 963972 - RNA, 19 nt, Homo sapiens
  misc_RNA (1)...(19): siRNA sense strand
guauuaaagccagccauau

SEQ ID NO: 963973 - RNA, 19 nt, Homo sapiens
  misc_RNA (1)...(19): siRNA sense strand
ggccuaugguucagcaagu

SEQ ID NO: 963974 - RNA, 19 nt, Homo sapiens
  misc_RNA (1)...(19): siRNA sense strand
aagaagaaagccaggauuc

SEQ ID NO: 963975 - RNA, 19 nt, Homo sapiens
  misc_RNA (1)...(19): siRNA sense strand
aagaacacaaguugaauca

SEQ ID NO: 963976 - RNA, 19 nt, Homo sapiens
  misc_RNA (1)...(19): siRNA sense strand
uauagcccauuggauauca

SEQ ID NO: 963977 - RNA, 19 nt, Homo sapiens
  misc_RNA (1)...(19): siRNA sense strand
aagaaagccaggauucaau

SEQ ID NO: 963978 - RNA, 19 nt, Homo sapiens
  misc_RNA (1)...(19): siRNA sense strand
gcccauuggauaucaguau

SEQ ID NO: 963979 - RNA, 19 nt, Homo sapiens
  misc_RNA (1)...(19): siRNA sense strand
gaacugaggcuggagauuu

SEQ ID NO: 963980 - RNA, 19 nt, Homo sapiens
  misc_RNA (1)...(19): siRNA sense strand
ggaaggagccauccaugug

SEQ ID NO: 963981 - RNA, 19 nt, Homo sapiens
  misc_RNA (1)...(19): siRNA sense strand
ccacugagccacaggauau

SEQ ID NO: 963982 - RNA, 19 nt, Homo sapiens
  misc_RNA (1)...(19): siRNA sense strand
acaaggaucugacgacaca

SEQ ID NO: 963983 - RNA, 19 nt, Homo sapiens
  misc_RNA (1)...(19): siRNA sense strand
cgagcgggauggagugaaa

SEQ ID NO: 963984 - RNA, 19 nt, Homo sapiens
  misc_RNA (1)...(19): siRNA sense strand
gaucuuggcucugcguaag

SEQ ID NO: 963985 - RNA, 19 nt, Homo sapiens
  misc_RNA (1)...(19): siRNA sense strand
gucaggagcuggccaugga

SEQ ID NO: 963986 - RNA, 19 nt, Homo sapiens
  misc_RNA (1)...(19): siRNA sense strand
cagccaaccuggagagcuu

SEQ ID NO: 963987 - RNA, 19 nt, Homo sapiens
  misc_RNA (1)...(19): siRNA sense strand
ccacagcggcucagaguca

SEQ ID NO: 963988 - RNA, 19 nt, Homo sapiens
  misc_RNA (1)...(19): siRNA sense strand
cacaggauaugguggucua

SEQ ID NO: 963989 - RNA, 19 nt, Homo sapiens
  misc_RNA (1)...(19): siRNA sense strand
ccauggagaaggacacuuu

SEQ ID NO: 963990 - RNA, 19 nt, Homo sapiens
  misc_RNA (1)...(19): siRNA sense strand
gaaggaaggagccauccau

SEQ ID NO: 963991 - RNA, 19 nt, Homo sapiens
  misc_RNA (1)...(19): siRNA sense strand
ggagaaggacacuuugaag

SEQ ID NO: 963992 - RNA, 19 nt, Homo sapiens
  misc_RNA (1)...(19): siRNA sense strand
caagccugcugcccugcua

SEQ ID NO: 963993 - RNA, 19 nt, Homo sapiens
  misc_RNA (1)...(19): siRNA sense strand
aggauaugguggucuauga

SEQ ID NO: 963994 - RNA, 19 nt, Homo sapiens
  misc_RNA (1)...(19): siRNA sense strand
uaagcuacguccucaaugc

SEQ ID NO: 963995 - RNA, 19 nt, Homo sapiens
  misc_RNA (1)...(19): siRNA sense strand
uggaggaccugaagacucu

SEQ ID NO: 963996 - RNA, 19 nt, Homo sapiens
  misc_RNA (1)...(19): siRNA sense strand
uggcugagauggagacucu

SEQ ID NO: 963997 - RNA, 19 nt, Homo sapiens
  misc_RNA (1)...(19): siRNA sense strand
ugaagcggcagcucuuuga

SEQ ID NO: 963998 - RNA, 19 nt, Homo sapiens
  misc_RNA (1)...(19): siRNA sense strand
gacgacacagaauggaaua

SEQ ID NO: 963999 - RNA, 19 nt, Homo sapiens
  misc_RNA (1)...(19): siRNA sense strand
uaccugggcucgcagaaag

SEQ ID NO: 964000 - RNA, 19 nt, Homo sapiens
  misc_RNA (1)...(19): siRNA sense strand
agaaaacccuccagagaga

SEQ ID NO: 964001 - RNA, 19 nt, Homo sapiens
  misc_RNA (1)...(19): siRNA sense strand
ggaaguggcaacugcugau

SEQ ID NO: 964002 - RNA, 19 nt, Homo sapiens
  misc_RNA (1)...(19): siRNA sense strand
gauugcugccugucaacua

SEQ ID NO: 964003 - RNA, 19 nt, Homo sapiens
  misc_RNA (1)...(19): siRNA sense strand
gcagugggaggaagucauc

SEQ ID NO: 964004 - RNA, 19 nt, Homo sapiens
  misc_RNA (1)...(19): siRNA sense strand
cauccugccucaccucuac

SEQ ID NO: 964005 - RNA, 19 nt, Homo sapiens
  misc_RNA (1)...(19): siRNA sense strand
ccuggugccugugaugaaa

SEQ ID NO: 964006 - RNA, 19 nt, Homo sapiens
  misc_RNA (1)...(19): siRNA sense strand
gaugcacgccuccaaacau

SEQ ID NO: 964007 - RNA, 19 nt, Homo sapiens
  misc_RNA (1)...(19): siRNA sense strand
caacugcugaucucuccaa

SEQ ID NO: 964008 - RNA, 19 nt, Homo sapiens
  misc_RNA (1)...(19): siRNA sense strand
gggcccagcugagaagagu

SEQ ID NO: 964009 - RNA, 19 nt, Homo sapiens
  misc_RNA (1)...(19): siRNA sense strand
cuuggacacuuuccugguu

SEQ ID NO: 964010 - RNA, 19 nt, Homo sapiens
  misc_RNA (1)...(19): siRNA sense strand
augcacgccuccaaacauu

SEQ ID NO: 964011 - RNA, 19 nt, Homo sapiens
  misc_RNA (1)...(19): siRNA sense strand
cuggaagaauacagaguga

SEQ ID NO: 964012 - RNA, 19 nt, Homo sapiens
  misc_RNA (1)...(19): siRNA sense strand
gacacagaauggaauaagc

SEQ ID NO: 964013 - RNA, 19 nt, Homo sapiens
  misc_RNA (1)...(19): siRNA sense strand
ggaugcacgccuccaaaca

SEQ ID NO: 964014 - RNA, 19 nt, Homo sapiens
  misc_RNA (1)...(19): siRNA sense strand
ccagaaaacccuccagaga

SEQ ID NO: 964015 - RNA, 19 nt, Homo sapiens
  misc_RNA (1)...(19): siRNA sense strand
ugaucucccugucccucua

SEQ ID NO: 964016 - RNA, 19 nt, Homo sapiens
  misc_RNA (1)...(19): siRNA sense strand
gaagaggaggaugcagaga

SEQ ID NO: 964017 - RNA, 19 nt, Homo sapiens
  misc_RNA (1)...(19): siRNA sense strand
caugagaccagugaggaaa

SEQ ID NO: 964018 - RNA, 19 nt, Homo sapiens
  misc_RNA (1)...(19): siRNA sense strand
uggaggagcagcugaguca

SEQ ID NO: 964019 - RNA, 19 nt, Homo sapiens
  misc_RNA (1)...(19): siRNA sense strand
ugagcgcacucgcgaugug

SEQ ID NO: 964020 - RNA, 19 nt, Homo sapiens
  misc_RNA (1)...(19): siRNA sense strand
gagccuggaggaacagaau

SEQ ID NO: 964021 - RNA, 19 nt, Homo sapiens
  misc_RNA (1)...(19): siRNA sense strand
ugacgacacagaauggaau

SEQ ID NO: 964022 - RNA, 19 nt, Homo sapiens
  misc_RNA (1)...(19): siRNA sense strand
uggagaaggacacuuugaa

SEQ ID NO: 964023 - RNA, 19 nt, Homo sapiens
  misc_RNA (1)...(19): siRNA sense strand
gcagcucuuugagugugaa

SEQ ID NO: 964024 - RNA, 19 nt, Homo sapiens
  misc_RNA (1)...(19): siRNA sense strand
cgaggccauucgacaggaa

SEQ ID NO: 964025 - RNA, 19 nt, Homo sapiens
  misc_RNA (1)...(19): siRNA sense strand
aauaagcuacguccucaau

SEQ ID NO: 964026 - RNA, 19 nt, Homo sapiens
  misc_RNA (1)...(19): siRNA sense strand
aacugaggcuggagauuuc

SEQ ID NO: 964027 - RNA, 19 nt, Homo sapiens
  misc_RNA (1)...(19): siRNA sense strand
cuguggacuuggacacuuu

SEQ ID NO: 964028 - RNA, 19 nt, Homo sapiens
  misc_RNA (1)...(19): siRNA sense strand
ggaacugaggcuggagauu

SEQ ID NO: 964029 - RNA, 19 nt, Homo sapiens
  misc_RNA (1)...(19): siRNA sense strand
cgacacagaauggaauaag

SEQ ID NO: 964030 - RNA, 19 nt, Homo sapiens
  misc_RNA (1)...(19): siRNA sense strand
gacccuggaagaauacaga

SEQ ID NO: 964031 - RNA, 19 nt, Homo sapiens
  misc_RNA (1)...(19): siRNA sense strand
caggaugcacgccuccaaa

SEQ ID NO: 964032 - RNA, 19 nt, Homo sapiens
  misc_RNA (1)...(19): siRNA sense strand
gaauaagcuacguccucaa

SEQ ID NO: 964033 - RNA, 19 nt, Homo sapiens
  misc_RNA (1)...(19): siRNA sense strand
cagcaacugccaucuggau

SEQ ID NO: 964034 - RNA, 19 nt, Homo sapiens
  misc_RNA (1)...(19): siRNA sense strand
acacuuuccugguugucau

SEQ ID NO: 964035 - RNA, 19 nt, Homo sapiens
  misc_RNA (1)...(19): siRNA sense strand
cagcaacuccacguucgaa

SEQ ID NO: 964036 - RNA, 19 nt, Homo sapiens
  misc_RNA (1)...(19): siRNA sense strand
gagccauccaugugguuga

SEQ ID NO: 964037 - RNA, 19 nt, Homo sapiens
  misc_RNA (1)...(19): siRNA sense strand
gggaagaguucacuuauga

SEQ ID NO: 964038 - RNA, 19 nt, Homo sapiens
  misc_RNA (1)...(19): siRNA sense strand
gaggauaggucagaucauu

SEQ ID NO: 964039 - RNA, 19 nt, Homo sapiens
  misc_RNA (1)...(19): siRNA sense strand
ucacaaagcuuccagaacu

SEQ ID NO: 964040 - RNA, 19 nt, Homo sapiens
  misc_RNA (1)...(19): siRNA sense strand
gcaggugucuacagaagaa

SEQ ID NO: 964041 - RNA, 19 nt, Homo sapiens
  misc_RNA (1)...(19): siRNA sense strand
uacaauagguguggaauuu

SEQ ID NO: 964042 - RNA, 19 nt, Homo sapiens
  misc_RNA (1)...(19): siRNA sense strand
guaacaagauugacauaag

SEQ ID NO: 964043 - RNA, 19 nt, Homo sapiens
  misc_RNA (1)...(19): siRNA sense strand
ggaaguggauggacauuuu

SEQ ID NO: 964044 - RNA, 19 nt, Homo sapiens
  misc_RNA (1)...(19): siRNA sense strand
gcaggaaaaucaucacuuu

SEQ ID NO: 964045 - RNA, 19 nt, Homo sapiens
  misc_RNA (1)...(19): siRNA sense strand
ugaaagagccugagagcuu

SEQ ID NO: 964046 - RNA, 19 nt, Homo sapiens
  misc_RNA (1)...(19): siRNA sense strand
uaaaguaauucuccuugga

SEQ ID NO: 964047 - RNA, 19 nt, Homo sapiens
  misc_RNA (1)...(19): siRNA sense strand
uuaaguaacuggaagaaag

SEQ ID NO: 964048 - RNA, 19 nt, Homo sapiens
  misc_RNA (1)...(19): siRNA sense strand
ggaagcgguucgaagaguu

SEQ ID NO: 964049 - RNA, 19 nt, Homo sapiens
  misc_RNA (1)...(19): siRNA sense strand
uagcucaucuugcuguuga

SEQ ID NO: 964050 - RNA, 19 nt, Homo sapiens
  misc_RNA (1)...(19): siRNA sense strand
ggauaggucagaucauuug

SEQ ID NO: 964051 - RNA, 19 nt, Homo sapiens
  misc_RNA (1)...(19): siRNA sense strand
caacggcgacuauccuuau

SEQ ID NO: 964052 - RNA, 19 nt, Homo sapiens
  misc_RNA (1)...(19): siRNA sense strand
uaacaagauugacauaagc

SEQ ID NO: 964053 - RNA, 19 nt, Homo sapiens
  misc_RNA (1)...(19): siRNA sense strand
guaacuggaagaaagaauu

SEQ ID NO: 964054 - RNA, 19 nt, Homo sapiens
  misc_RNA (1)...(19): siRNA sense strand
ucugacugcugccugcuua

SEQ ID NO: 964055 - RNA, 19 nt, Homo sapiens
  misc_RNA (1)...(19): siRNA sense strand
gauucuggguaacaagauu

SEQ ID NO: 964056 - RNA, 19 nt, Homo sapiens
  misc_RNA (1)...(19): siRNA sense strand
ccugagagcuuuccuuuug

SEQ ID NO: 964057 - RNA, 19 nt, Homo sapiens
  misc_RNA (1)...(19): siRNA sense strand
guugggaagaguucacuua

SEQ ID NO: 964058 - RNA, 19 nt, Homo sapiens
  misc_RNA (1)...(19): siRNA sense strand
cagucaaucuucaccgaaa

SEQ ID NO: 964059 - RNA, 19 nt, Homo sapiens
  misc_RNA (1)...(19): siRNA sense strand
gagcuuuccuuuugugauu

SEQ ID NO: 964060 - RNA, 19 nt, Homo sapiens
  misc_RNA (1)...(19): siRNA sense strand
ugaggaagcgguucgaaga

SEQ ID NO: 964061 - RNA, 19 nt, Homo sapiens
  misc_RNA (1)...(19): siRNA sense strand
caaaagaugccacaaaugu

SEQ ID NO: 964062 - RNA, 19 nt, Homo sapiens
  misc_RNA (1)...(19): siRNA sense strand
gguaacaagauugacauaa

SEQ ID NO: 964063 - RNA, 19 nt, Homo sapiens
  misc_RNA (1)...(19): siRNA sense strand
acaaagcuuccagaacuua

SEQ ID NO: 964064 - RNA, 19 nt, Homo sapiens
  misc_RNA (1)...(19): siRNA sense strand
ggcagcagccuuugaggaa

SEQ ID NO: 964065 - RNA, 19 nt, Homo sapiens
  misc_RNA (1)...(19): siRNA sense strand
uaaguaacuggaagaaaga

SEQ ID NO: 964066 - RNA, 19 nt, Homo sapiens
  misc_RNA (1)...(19): siRNA sense strand
cacaaagcuuccagaacuu

SEQ ID NO: 964067 - RNA, 19 nt, Homo sapiens
  misc_RNA (1)...(19): siRNA sense strand
caaagcuuccagaacuuaa

SEQ ID NO: 964068 - RNA, 19 nt, Homo sapiens
  misc_RNA (1)...(19): siRNA sense strand
gcucuuccauacaauaggu

SEQ ID NO: 964069 - RNA, 19 nt, Homo sapiens
  misc_RNA (1)...(19): siRNA sense strand
ccuuggagaugguggaguu

SEQ ID NO: 964070 - RNA, 19 nt, Homo sapiens
  misc_RNA (1)...(19): siRNA sense strand
uuccagaacuuaaguaacu

SEQ ID NO: 964071 - RNA, 19 nt, Homo sapiens
  misc_RNA (1)...(19): siRNA sense strand
uaacuggaagaaagaauuc

SEQ ID NO: 964072 - RNA, 19 nt, Homo sapiens
  misc_RNA (1)...(19): siRNA sense strand
acccagcucuuccauacaa

SEQ ID NO: 964073 - RNA, 19 nt, Homo sapiens
  misc_RNA (1)...(19): siRNA sense strand
gcccaagccuagcucaucu

SEQ ID NO: 964074 - RNA, 19 nt, Homo sapiens
  misc_RNA (1)...(19): siRNA sense strand
cgacuauccuuauuuugaa

SEQ ID NO: 964075 - RNA, 19 nt, Homo sapiens
  misc_RNA (1)...(19): siRNA sense strand
ugggaagaguucacuuaug

SEQ ID NO: 964076 - RNA, 19 nt, Homo sapiens
  misc_RNA (1)...(19): siRNA sense strand
gauacccagcucuuccaua

SEQ ID NO: 964077 - RNA, 19 nt, Homo sapiens
  misc_RNA (1)...(19): siRNA sense strand
auacccagcucuuccauac

SEQ ID NO: 964078 - RNA, 19 nt, Homo sapiens
  misc_RNA (1)...(19): siRNA sense strand
aaauguggcagcagccuuu

SEQ ID NO: 964079 - RNA, 19 nt, Homo sapiens
  misc_RNA (1)...(19): siRNA sense strand
ugaaacaagugcaaaagau

SEQ ID NO: 964080 - RNA, 19 nt, Homo sapiens
  misc_RNA (1)...(19): siRNA sense strand
acugcugccugcuuacuuu

SEQ ID NO: 964081 - RNA, 19 nt, Homo sapiens
  misc_RNA (1)...(19): siRNA sense strand
cagacacagucaaucuuca

SEQ ID NO: 964082 - RNA, 19 nt, Homo sapiens
  misc_RNA (1)...(19): siRNA sense strand
uagugucgaugauucacaa

SEQ ID NO: 964083 - RNA, 19 nt, Homo sapiens
  misc_RNA (1)...(19): siRNA sense strand
gaagcgguucgaagaguuc

SEQ ID NO: 964084 - RNA, 19 nt, Homo sapiens
  misc_RNA (1)...(19): siRNA sense strand
ggacaacggcgacuauccu

SEQ ID NO: 964085 - RNA, 19 nt, Homo sapiens
  misc_RNA (1)...(19): siRNA sense strand
cggcaggugucuacagaag

SEQ ID NO: 964086 - RNA, 19 nt, Homo sapiens
  misc_RNA (1)...(19): siRNA sense strand
ccagcucuuccauacaaua

SEQ ID NO: 964087 - RNA, 19 nt, Homo sapiens
  misc_RNA (1)...(19): siRNA sense strand
ucacuuaugaacagauaug

SEQ ID NO: 964088 - RNA, 19 nt, Homo sapiens
  misc_RNA (1)...(19): siRNA sense strand
gacagacacagucaaucuu

SEQ ID NO: 964089 - RNA, 19 nt, Homo sapiens
  misc_RNA (1)...(19): siRNA sense strand
agacagacacagucaaucu

SEQ ID NO: 964090 - RNA, 19 nt, Homo sapiens
  misc_RNA (1)...(19): siRNA sense strand
gaacggcaggugucuacag

SEQ ID NO: 964091 - RNA, 19 nt, Homo sapiens
  misc_RNA (1)...(19): siRNA sense strand
ggguaacaagauugacaua

SEQ ID NO: 964092 - RNA, 19 nt, Homo sapiens
  misc_RNA (1)...(19): siRNA sense strand
gcgacuauccuuauuuuga

SEQ ID NO: 964093 - RNA, 19 nt, Homo sapiens
  misc_RNA (1)...(19): siRNA sense strand
ucagacagacacagucaau

SEQ ID NO: 964094 - RNA, 19 nt, Homo sapiens
  misc_RNA (1)...(19): siRNA sense strand
gaaacaagugcaaaagaug

SEQ ID NO: 964095 - RNA, 19 nt, Homo sapiens
  misc_RNA (1)...(19): siRNA sense strand
gaugugaaagagccugaga

SEQ ID NO: 964096 - RNA, 19 nt, Homo sapiens
  misc_RNA (1)...(19): siRNA sense strand
aagccuagcucaucuugcu

SEQ ID NO: 964097 - RNA, 19 nt, Homo sapiens
  misc_RNA (1)...(19): siRNA sense strand
uuuguuaccaugcagauuu

SEQ ID NO: 964098 - RNA, 19 nt, Homo sapiens
  misc_RNA (1)...(19): siRNA sense strand
gcuuccagaacuuaaguaa

SEQ ID NO: 964099 - RNA, 19 nt, Homo sapiens
  misc_RNA (1)...(19): siRNA sense strand
gcagggacaacggcgacua

SEQ ID NO: 964100 - RNA, 19 nt, Homo sapiens
  misc_RNA (1)...(19): siRNA sense strand
cuggaagaaagaauucaua

SEQ ID NO: 964101 - RNA, 19 nt, Homo sapiens
  misc_RNA (1)...(19): siRNA sense strand
gauaggucagaucauuuga

SEQ ID NO: 964102 - RNA, 19 nt, Homo sapiens
  misc_RNA (1)...(19): siRNA sense strand
gcgaacggcaggugucuac

SEQ ID NO: 964103 - RNA, 19 nt, Homo sapiens
  misc_RNA (1)...(19): siRNA sense strand
acaacggcgacuauccuua

SEQ ID NO: 964104 - RNA, 19 nt, Homo sapiens
  misc_RNA (1)...(19): siRNA sense strand
cggcgacuauccuuauuuu

SEQ ID NO: 964105 - RNA, 19 nt, Homo sapiens
  misc_RNA (1)...(19): siRNA sense strand
aacggcaggugucuacaga

SEQ ID NO: 964106 - RNA, 19 nt, Homo sapiens
  misc_RNA (1)...(19): siRNA sense strand
gcaaaagaugccacaaaug

SEQ ID NO: 964107 - RNA, 19 nt, Homo sapiens
  misc_RNA (1)...(19): siRNA sense strand
gacaacggcgacuauccuu

SEQ ID NO: 964108 - RNA, 19 nt, Homo sapiens
  misc_RNA (1)...(19): siRNA sense strand
guggauggacauuuuguua

SEQ ID NO: 964109 - RNA, 19 nt, Homo sapiens
  misc_RNA (1)...(19): siRNA sense strand
cggcaggucaggagcgauu

SEQ ID NO: 964110 - RNA, 19 nt, Homo sapiens
  misc_RNA (1)...(19): siRNA sense strand
ugcaaaagaugccacaaau

SEQ ID NO: 964111 - RNA, 19 nt, Homo sapiens
  misc_RNA (1)...(19): siRNA sense strand
gcagaugacuuagaaauua

SEQ ID NO: 964112 - RNA, 19 nt, Homo sapiens
  misc_RNA (1)...(19): siRNA sense strand
gcagguagaucuccauuug

SEQ ID NO: 964113 - RNA, 19 nt, Homo sapiens
  misc_RNA (1)...(19): siRNA sense strand
gaacugcuguuucuucuuc

SEQ ID NO: 964114 - RNA, 19 nt, Homo sapiens
  misc_RNA (1)...(19): siRNA sense strand
ccaagaagauuccaaccuu

SEQ ID NO: 964115 - RNA, 19 nt, Homo sapiens
  misc_RNA (1)...(19): siRNA sense strand
ucaaagacagagacaauua

SEQ ID NO: 964116 - RNA, 19 nt, Homo sapiens
  misc_RNA (1)...(19): siRNA sense strand
gaaaguaaccaaucugaca

SEQ ID NO: 964117 - RNA, 19 nt, Homo sapiens
  misc_RNA (1)...(19): siRNA sense strand
caaagucacugcuggacaa

SEQ ID NO: 964118 - RNA, 19 nt, Homo sapiens
  misc_RNA (1)...(19): siRNA sense strand
ucaaguaaaugguacauca

SEQ ID NO: 964119 - RNA, 19 nt, Homo sapiens
  misc_RNA (1)...(19): siRNA sense strand
caaccaacaucaacuguca

SEQ ID NO: 964120 - RNA, 19 nt, Homo sapiens
  misc_RNA (1)...(19): siRNA sense strand
uucaauagcugccauacua

SEQ ID NO: 964121 - RNA, 19 nt, Homo sapiens
  misc_RNA (1)...(19): siRNA sense strand
ucacagguauuggcuaauu

SEQ ID NO: 964122 - RNA, 19 nt, Homo sapiens
  misc_RNA (1)...(19): siRNA sense strand
gacaaccacuugccuacaa

SEQ ID NO: 964123 - RNA, 19 nt, Homo sapiens
  misc_RNA (1)...(19): siRNA sense strand
uaucuccucuuccaaauga

SEQ ID NO: 964124 - RNA, 19 nt, Homo sapiens
  misc_RNA (1)...(19): siRNA sense strand
caaacaaccaacaccaaua

SEQ ID NO: 964125 - RNA, 19 nt, Homo sapiens
  misc_RNA (1)...(19): siRNA sense strand
guacaucaaucauuucacu

SEQ ID NO: 964126 - RNA, 19 nt, Homo sapiens
  misc_RNA (1)...(19): siRNA sense strand
gguauuggcuaauucucaa

SEQ ID NO: 964127 - RNA, 19 nt, Homo sapiens
  misc_RNA (1)...(19): siRNA sense strand
gucuauaccucuucugaaa

SEQ ID NO: 964128 - RNA, 19 nt, Homo sapiens
  misc_RNA (1)...(19): siRNA sense strand
caacagagaagcagucaca

SEQ ID NO: 964129 - RNA, 19 nt, Homo sapiens
  misc_RNA (1)...(19): siRNA sense strand
ccaaaugauucuacuaguc

SEQ ID NO: 964130 - RNA, 19 nt, Homo sapiens
  misc_RNA (1)...(19): siRNA sense strand
cagagacaauuacaacaga

SEQ ID NO: 964131 - RNA, 19 nt, Homo sapiens
  misc_RNA (1)...(19): siRNA sense strand
guugguagcuauaaucauc

SEQ ID NO: 964132 - RNA, 19 nt, Homo sapiens
  misc_RNA (1)...(19): siRNA sense strand
gcagucacagccuaccuua

SEQ ID NO: 964133 - RNA, 19 nt, Homo sapiens
  misc_RNA (1)...(19): siRNA sense strand
gaagauagugcugaugguu

SEQ ID NO: 964134 - RNA, 19 nt, Homo sapiens
  misc_RNA (1)...(19): siRNA sense strand
ugucacagguauuggcuaa

SEQ ID NO: 964135 - RNA, 19 nt, Homo sapiens
  misc_RNA (1)...(19): siRNA sense strand
acaauuguaucuccucuuc

SEQ ID NO: 964136 - RNA, 19 nt, Homo sapiens
  misc_RNA (1)...(19): siRNA sense strand
guccagaucccuucuagaa

SEQ ID NO: 964137 - RNA, 19 nt, Homo sapiens
  misc_RNA (1)...(19): siRNA sense strand
guggacaccugaacaauac

SEQ ID NO: 964138 - RNA, 19 nt, Homo sapiens
  misc_RNA (1)...(19): siRNA sense strand
ugucaggaguucucuauuc

SEQ ID NO: 964139 - RNA, 19 nt, Homo sapiens
  misc_RNA (1)...(19): siRNA sense strand
ccagaucccuucuagaaaa

SEQ ID NO: 964140 - RNA, 19 nt, Homo sapiens
  misc_RNA (1)...(19): siRNA sense strand
aaugguacaucagaagaua

SEQ ID NO: 964141 - RNA, 19 nt, Homo sapiens
  misc_RNA (1)...(19): siRNA sense strand
ccugacauuuguauggaua

SEQ ID NO: 964142 - RNA, 19 nt, Homo sapiens
  misc_RNA (1)...(19): siRNA sense strand
caauaucaccugccaaagu

SEQ ID NO: 964143 - RNA, 19 nt, Homo sapiens
  misc_RNA (1)...(19): siRNA sense strand
uuuagcagaugacuuagaa

SEQ ID NO: 964144 - RNA, 19 nt, Homo sapiens
  misc_RNA (1)...(19): siRNA sense strand
gcuauaaucaucauuguac

SEQ ID NO: 964145 - RNA, 19 nt, Homo sapiens
  misc_RNA (1)...(19): siRNA sense strand
cauacuaauugguguacuu

SEQ ID NO: 964146 - RNA, 19 nt, Homo sapiens
  misc_RNA (1)...(19): siRNA sense strand
ggacaggaaaguaaccaau

SEQ ID NO: 964147 - RNA, 19 nt, Homo sapiens
  misc_RNA (1)...(19): siRNA sense strand
gaagauuccaaccuugaga

SEQ ID NO: 964148 - RNA, 19 nt, Homo sapiens
  misc_RNA (1)...(19): siRNA sense strand
ugacaaacccacaaugaca

SEQ ID NO: 964149 - RNA, 19 nt, Homo sapiens
  misc_RNA (1)...(19): siRNA sense strand
cagccuaccuuauucacau

SEQ ID NO: 964150 - RNA, 19 nt, Homo sapiens
  misc_RNA (1)...(19): siRNA sense strand
caaaugauucuacuagucu

SEQ ID NO: 964151 - RNA, 19 nt, Homo sapiens
  misc_RNA (1)...(19): siRNA sense strand
caacaccuccucccagcaa

SEQ ID NO: 964152 - RNA, 19 nt, Homo sapiens
  misc_RNA (1)...(19): siRNA sense strand
ggagaaaccccugacauuu

SEQ ID NO: 964153 - RNA, 19 nt, Homo sapiens
  misc_RNA (1)...(19): siRNA sense strand
agucacagccuaccuuauu

SEQ ID NO: 964154 - RNA, 19 nt, Homo sapiens
  misc_RNA (1)...(19): siRNA sense strand
caccaggauuuaucuuaga

SEQ ID NO: 964155 - RNA, 19 nt, Homo sapiens
  misc_RNA (1)...(19): siRNA sense strand
guacuucugacuucuaugu

SEQ ID NO: 964156 - RNA, 19 nt, Homo sapiens
  misc_RNA (1)...(19): siRNA sense strand
aauaucaccugccaaaguc

SEQ ID NO: 964157 - RNA, 19 nt, Homo sapiens
  misc_RNA (1)...(19): siRNA sense strand
gaaauauccacaaaacgua

SEQ ID NO: 964158 - RNA, 19 nt, Homo sapiens
  misc_RNA (1)...(19): siRNA sense strand
gaucaaaauugggcaggua

SEQ ID NO: 964159 - RNA, 19 nt, Homo sapiens
  misc_RNA (1)...(19): siRNA sense strand
guagcuauaaucaucauug

SEQ ID NO: 964160 - RNA, 19 nt, Homo sapiens
  misc_RNA (1)...(19): siRNA sense strand
cauaauccauccacacaac

SEQ ID NO: 964161 - RNA, 19 nt, Homo sapiens
  misc_RNA (1)...(19): siRNA sense strand
aaacaaccaacaccaauag

SEQ ID NO: 964162 - RNA, 19 nt, Homo sapiens
  misc_RNA (1)...(19): siRNA sense strand
caacaccagcugucuauac

SEQ ID NO: 964163 - RNA, 19 nt, Homo sapiens
  misc_RNA (1)...(19): siRNA sense strand
ucccaacucugaucaagau

SEQ ID NO: 964164 - RNA, 19 nt, Homo sapiens
  misc_RNA (1)...(19): siRNA sense strand
gacaaacccacaaugacaa

SEQ ID NO: 964165 - RNA, 19 nt, Homo sapiens
  misc_RNA (1)...(19): siRNA sense strand
uggaaggacaggaaaguaa

SEQ ID NO: 964166 - RNA, 19 nt, Homo sapiens
  misc_RNA (1)...(19): siRNA sense strand
ccaaacaaccaacaccaau

SEQ ID NO: 964167 - RNA, 19 nt, Homo sapiens
  misc_RNA (1)...(19): siRNA sense strand
acaccaggauuuaucuuag

SEQ ID NO: 964168 - RNA, 19 nt, Homo sapiens
  misc_RNA (1)...(19): siRNA sense strand
uaaaugguacaucagaaga

SEQ ID NO: 964169 - RNA, 19 nt, Homo sapiens
  misc_RNA (1)...(19): siRNA sense strand
gaucccaaauauuucaucu

SEQ ID NO: 964170 - RNA, 19 nt, Homo sapiens
  misc_RNA (1)...(19): siRNA sense strand
gagaaaccccugacauuug

SEQ ID NO: 964171 - RNA, 19 nt, Homo sapiens
  misc_RNA (1)...(19): siRNA sense strand
ccacacaaccaccaaaguc

SEQ ID NO: 964172 - RNA, 19 nt, Homo sapiens
  misc_RNA (1)...(19): siRNA sense strand
ccgcuugacucacuuaacu

SEQ ID NO: 964173 - RNA, 19 nt, Homo sapiens
  misc_RNA (1)...(19): siRNA sense strand
uggacugucucaaucaaga

SEQ ID NO: 964174 - RNA, 19 nt, Homo sapiens
  misc_RNA (1)...(19): siRNA sense strand
agauagugcugaugguuca

SEQ ID NO: 964175 - RNA, 19 nt, Homo sapiens
  misc_RNA (1)...(19): siRNA sense strand
guaaaugguacaucagaag

SEQ ID NO: 964176 - RNA, 19 nt, Homo sapiens
  misc_RNA (1)...(19): siRNA sense strand
uggaaaugcuuaaggaaac

SEQ ID NO: 964177 - RNA, 19 nt, Homo sapiens
  misc_RNA (1)...(19): siRNA sense strand
ggaguacaccaggauuuau

SEQ ID NO: 964178 - RNA, 19 nt, Homo sapiens
  misc_RNA (1)...(19): siRNA sense strand
uguggacaccugaacaaua

SEQ ID NO: 964179 - RNA, 19 nt, Homo sapiens
  misc_RNA (1)...(19): siRNA sense strand
ucucuggacugucucaauc

SEQ ID NO: 964180 - RNA, 19 nt, Homo sapiens
  misc_RNA (1)...(19): siRNA sense strand
acaggaaaguaaccaaucu

SEQ ID NO: 964181 - RNA, 19 nt, Homo sapiens
  misc_RNA (1)...(19): siRNA sense strand
ggauuuggaaggacaggaa

SEQ ID NO: 964182 - RNA, 19 nt, Homo sapiens
  misc_RNA (1)...(19): siRNA sense strand
guacuuuggaaaugcuuaa

SEQ ID NO: 964183 - RNA, 19 nt, Homo sapiens
  misc_RNA (1)...(19): siRNA sense strand
ggucaaccaacacaauuca

SEQ ID NO: 964184 - RNA, 19 nt, Homo sapiens
  misc_RNA (1)...(19): siRNA sense strand
gauccagugucaggaguuc

SEQ ID NO: 964185 - RNA, 19 nt, Homo sapiens
  misc_RNA (1)...(19): siRNA sense strand
ucaagacuguggagaucau

SEQ ID NO: 964186 - RNA, 19 nt, Homo sapiens
  misc_RNA (1)...(19): siRNA sense strand
aaucaagacuguggagauc

SEQ ID NO: 964187 - RNA, 19 nt, Homo sapiens
  misc_RNA (1)...(19): siRNA sense strand
uagcagaugacuuagaaau

SEQ ID NO: 964188 - RNA, 19 nt, Homo sapiens
  misc_RNA (1)...(19): siRNA sense strand
caucaaucauuucacuuac

SEQ ID NO: 964189 - RNA, 19 nt, Homo sapiens
  misc_RNA (1)...(19): siRNA sense strand
ucaucaaugucacagguau

SEQ ID NO: 964190 - RNA, 19 nt, Homo sapiens
  misc_RNA (1)...(19): siRNA sense strand
acacaacagggaauccuuu

SEQ ID NO: 964191 - RNA, 19 nt, Homo sapiens
  misc_RNA (1)...(19): siRNA sense strand
uacaccaggauuuaucuua

SEQ ID NO: 964192 - RNA, 19 nt, Homo sapiens
  misc_RNA (1)...(19): siRNA sense strand
ucaauagcugccauacuaa

SEQ ID NO: 964193 - RNA, 19 nt, Homo sapiens
  misc_RNA (1)...(19): siRNA sense strand
cuaauugguguacuucuga

SEQ ID NO: 964194 - RNA, 19 nt, Homo sapiens
  misc_RNA (1)...(19): siRNA sense strand
aaucaucauuguacuuugg

SEQ ID NO: 964195 - RNA, 19 nt, Homo sapiens
  misc_RNA (1)...(19): siRNA sense strand
gagacaauuacaacagaga

SEQ ID NO: 964196 - RNA, 19 nt, Homo sapiens
  misc_RNA (1)...(19): siRNA sense strand
guauggauaacaucagaga

SEQ ID NO: 964197 - RNA, 19 nt, Homo sapiens
  misc_RNA (1)...(19): siRNA sense strand
caaagacagagacaauuac

SEQ ID NO: 964198 - RNA, 19 nt, Homo sapiens
  misc_RNA (1)...(19): siRNA sense strand
caauagcugccauacuaau

SEQ ID NO: 964199 - RNA, 19 nt, Homo sapiens
  misc_RNA (1)...(19): siRNA sense strand
aagaagauuccaaccuuga

SEQ ID NO: 964200 - RNA, 19 nt, Homo sapiens
  misc_RNA (1)...(19): siRNA sense strand
gacaggaaaguaaccaauc

SEQ ID NO: 964201 - RNA, 19 nt, Homo sapiens
  misc_RNA (1)...(19): siRNA sense strand
ggaaggacaggaaaguaac

SEQ ID NO: 964202 - RNA, 19 nt, Homo sapiens
  misc_RNA (1)...(19): siRNA sense strand
aguaaaugguacaucagaa

SEQ ID NO: 964203 - RNA, 19 nt, Homo sapiens
  misc_RNA (1)...(19): siRNA sense strand
ccacaaaacguacaucaau

SEQ ID NO: 964204 - RNA, 19 nt, Homo sapiens
  misc_RNA (1)...(19): siRNA sense strand
agacagagacaauuacaac

SEQ ID NO: 964205 - RNA, 19 nt, Homo sapiens
  misc_RNA (1)...(19): siRNA sense strand
guguacuucugacuucuau

SEQ ID NO: 964206 - RNA, 19 nt, Homo sapiens
  misc_RNA (1)...(19): siRNA sense strand
gaguacaccaggauuuauc

SEQ ID NO: 964207 - RNA, 19 nt, Homo sapiens
  misc_RNA (1)...(19): siRNA sense strand
caaucaagacuguggagau

SEQ ID NO: 964208 - RNA, 19 nt, Homo sapiens
  misc_RNA (1)...(19): siRNA sense strand
ucugacaaacccacaauga

SEQ ID NO: 964209 - RNA, 19 nt, Homo sapiens
  misc_RNA (1)...(19): siRNA sense strand
aaaguaaccaaucugacaa

SEQ ID NO: 964210 - RNA, 19 nt, Homo sapiens
  misc_RNA (1)...(19): siRNA sense strand
gucacagccuaccuuauuc

SEQ ID NO: 964211 - RNA, 19 nt, Homo sapiens
  misc_RNA (1)...(19): siRNA sense strand
gcagaucgauuugaauaua

SEQ ID NO: 964212 - RNA, 19 nt, Homo sapiens
  misc_RNA (1)...(19): siRNA sense strand
gaagaaggauggauaugga

SEQ ID NO: 964213 - RNA, 19 nt, Homo sapiens
  misc_RNA (1)...(19): siRNA sense strand
gaauauaaccugccgcuuu

SEQ ID NO: 964214 - RNA, 19 nt, Homo sapiens
  misc_RNA (1)...(19): siRNA sense strand
gcugguacgucuucaaaua

SEQ ID NO: 964215 - RNA, 19 nt, Homo sapiens
  misc_RNA (1)...(19): siRNA sense strand
caaggaaccugcagaaugu

SEQ ID NO: 964216 - RNA, 19 nt, Homo sapiens
  misc_RNA (1)...(19): siRNA sense strand
gaaauggcaccacugcuua

SEQ ID NO: 964217 - RNA, 19 nt, Homo sapiens
  misc_RNA (1)...(19): siRNA sense strand
ugaagaagauuguacauca

SEQ ID NO: 964218 - RNA, 19 nt, Homo sapiens
  misc_RNA (1)...(19): siRNA sense strand
gaagagacccaaaucauuc

SEQ ID NO: 964219 - RNA, 19 nt, Homo sapiens
  misc_RNA (1)...(19): siRNA sense strand
gacaggaccucuuucaaug

SEQ ID NO: 964220 - RNA, 19 nt, Homo sapiens
  misc_RNA (1)...(19): siRNA sense strand
ccacaaggaugacugaugu

SEQ ID NO: 964221 - RNA, 19 nt, Homo sapiens
  misc_RNA (1)...(19): siRNA sense strand
ggaagaagauaaagaccau

SEQ ID NO: 964222 - RNA, 19 nt, Homo sapiens
  misc_RNA (1)...(19): siRNA sense strand
cagaauggcugaucaucuu

SEQ ID NO: 964223 - RNA, 19 nt, Homo sapiens
  misc_RNA (1)...(19): siRNA sense strand
cuacuuuacuggaagguua

SEQ ID NO: 964224 - RNA, 19 nt, Homo sapiens
  misc_RNA (1)...(19): siRNA sense strand
gaacgaauccugaagacau

SEQ ID NO: 964225 - RNA, 19 nt, Homo sapiens
  misc_RNA (1)...(19): siRNA sense strand
ggacaggaccucuuucaau

SEQ ID NO: 964226 - RNA, 19 nt, Homo sapiens
  misc_RNA (1)...(19): siRNA sense strand
uaaugucaaucguuccuua

SEQ ID NO: 964227 - RNA, 19 nt, Homo sapiens
  misc_RNA (1)...(19): siRNA sense strand
gcaggaagaaggauggaua

SEQ ID NO: 964228 - RNA, 19 nt, Homo sapiens
  misc_RNA (1)...(19): siRNA sense strand
gcgcagaucgauuugaaua

SEQ ID NO: 964229 - RNA, 19 nt, Homo sapiens
  misc_RNA (1)...(19): siRNA sense strand
ugacaacgcagcagaguaa

SEQ ID NO: 964230 - RNA, 19 nt, Homo sapiens
  misc_RNA (1)...(19): siRNA sense strand
gaucaacaguggcaaugga

SEQ ID NO: 964231 - RNA, 19 nt, Homo sapiens
  misc_RNA (1)...(19): siRNA sense strand
ucacagaccugcccaaugc

SEQ ID NO: 964232 - RNA, 19 nt, Homo sapiens
  misc_RNA (1)...(19): siRNA sense strand
gaacagugguuuggcaaca

SEQ ID NO: 964233 - RNA, 19 nt, Homo sapiens
  misc_RNA (1)...(19): siRNA sense strand
ugacugauguagacagaaa

SEQ ID NO: 964234 - RNA, 19 nt, Homo sapiens
  misc_RNA (1)...(19): siRNA sense strand
ugaaucagauggacacuca

SEQ ID NO: 964235 - RNA, 19 nt, Homo sapiens
  misc_RNA (1)...(19): siRNA sense strand
gaagaagagacccaaauca

SEQ ID NO: 964236 - RNA, 19 nt, Homo sapiens
  misc_RNA (1)...(19): siRNA sense strand
ccagugaccucagcuaaga

SEQ ID NO: 964237 - RNA, 19 nt, Homo sapiens
  misc_RNA (1)...(19): siRNA sense strand
ccaacaacuucuacucuga

SEQ ID NO: 964238 - RNA, 19 nt, Homo sapiens
  misc_RNA (1)...(19): siRNA sense strand
acucugacaucaagcaaua

SEQ ID NO: 964239 - RNA, 19 nt, Homo sapiens
  misc_RNA (1)...(19): siRNA sense strand
aauauaaccugccgcuuug

SEQ ID NO: 964240 - RNA, 19 nt, Homo sapiens
  misc_RNA (1)...(19): siRNA sense strand
cagcaagucucaggaaaug

SEQ ID NO: 964241 - RNA, 19 nt, Homo sapiens
  misc_RNA (1)...(19): siRNA sense strand
gauaaagaccauccaacaa

SEQ ID NO: 964242 - RNA, 19 nt, Homo sapiens
  misc_RNA (1)...(19): siRNA sense strand
gaagacagucccuggauca

SEQ ID NO: 964243 - RNA, 19 nt, Homo sapiens
  misc_RNA (1)...(19): siRNA sense strand
gaacaaggagucgucagaa

SEQ ID NO: 964244 - RNA, 19 nt, Homo sapiens
  misc_RNA (1)...(19): siRNA sense strand
cacaaccucugguccuaua

SEQ ID NO: 964245 - RNA, 19 nt, Homo sapiens
  misc_RNA (1)...(19): siRNA sense strand
gaaaggagcagcacuucag

SEQ ID NO: 964246 - RNA, 19 nt, Homo sapiens
  misc_RNA (1)...(19): siRNA sense strand
uaugacagcugaugagaca

SEQ ID NO: 964247 - RNA, 19 nt, Homo sapiens
  misc_RNA (1)...(19): siRNA sense strand
gaagagaccccacauucua

SEQ ID NO: 964248 - RNA, 19 nt, Homo sapiens
  misc_RNA (1)...(19): siRNA sense strand
ucugaaggcucaacuacuu

SEQ ID NO: 964249 - RNA, 19 nt, Homo sapiens
  misc_RNA (1)...(19): siRNA sense strand
gcagucaacagucgaagaa

SEQ ID NO: 964250 - RNA, 19 nt, Homo sapiens
  misc_RNA (1)...(19): siRNA sense strand
gaagaagauuguacaucag

SEQ ID NO: 964251 - RNA, 19 nt, Homo sapiens
  misc_RNA (1)...(19): siRNA sense strand
ggaagaagagacccaaauc

SEQ ID NO: 964252 - RNA, 19 nt, Homo sapiens
  misc_RNA (1)...(19): siRNA sense strand
caauaggaaugaugucaca

SEQ ID NO: 964253 - RNA, 19 nt, Homo sapiens
  misc_RNA (1)...(19): siRNA sense strand
gaagauaaagaccauccaa

SEQ ID NO: 964254 - RNA, 19 nt, Homo sapiens
  misc_RNA (1)...(19): siRNA sense strand
gaugacugauguagacaga

SEQ ID NO: 964255 - RNA, 19 nt, Homo sapiens
  misc_RNA (1)...(19): siRNA sense strand
gcaagaagccugggauugg

SEQ ID NO: 964256 - RNA, 19 nt, Homo sapiens
  misc_RNA (1)...(19): siRNA sense strand
ccagaaaggagaauacaga

SEQ ID NO: 964257 - RNA, 19 nt, Homo sapiens
  misc_RNA (1)...(19): siRNA sense strand
ucaagaagguggagcaaac

SEQ ID NO: 964258 - RNA, 19 nt, Homo sapiens
  misc_RNA (1)...(19): siRNA sense strand
agaaacagcuacccagaag

SEQ ID NO: 964259 - RNA, 19 nt, Homo sapiens
  misc_RNA (1)...(19): siRNA sense strand
ggaccaauuaccauaacua

SEQ ID NO: 964260 - RNA, 19 nt, Homo sapiens
  misc_RNA (1)...(19): siRNA sense strand
gaacccaagccauucaaau

SEQ ID NO: 964261 - RNA, 19 nt, Homo sapiens
  misc_RNA (1)...(19): siRNA sense strand
gauuccaacucuaauguca

SEQ ID NO: 964262 - RNA, 19 nt, Homo sapiens
  misc_RNA (1)...(19): siRNA sense strand
ugucacagguggaagaaga

SEQ ID NO: 964263 - RNA, 19 nt, Homo sapiens
  misc_RNA (1)...(19): siRNA sense strand
ggaccucuuucaaugacaa

SEQ ID NO: 964264 - RNA, 19 nt, Homo sapiens
  misc_RNA (1)...(19): siRNA sense strand
ugagggauaucgccaaaca

SEQ ID NO: 964265 - RNA, 19 nt, Homo sapiens
  misc_RNA (1)...(19): siRNA sense strand
uucaggagguuacaucuuu

SEQ ID NO: 964266 - RNA, 19 nt, Homo sapiens
  misc_RNA (1)...(19): siRNA sense strand
gaaggugugggcagaagaa

SEQ ID NO: 964267 - RNA, 19 nt, Homo sapiens
  misc_RNA (1)...(19): siRNA sense strand
gagcuucucuacaucacau

SEQ ID NO: 964268 - RNA, 19 nt, Homo sapiens
  misc_RNA (1)...(19): siRNA sense strand
caacgcagcagaguaauuc

SEQ ID NO: 964269 - RNA, 19 nt, Homo sapiens
  misc_RNA (1)...(19): siRNA sense strand
gggacgaggucaucaagca

SEQ ID NO: 964270 - RNA, 19 nt, Homo sapiens
  misc_RNA (1)...(19): siRNA sense strand
caacugagacagcaaccaa

SEQ ID NO: 964271 - RNA, 19 nt, Homo sapiens
  misc_RNA (1)...(19): siRNA sense strand
gagacagacaccucaguuu

SEQ ID NO: 964272 - RNA, 19 nt, Homo sapiens
  misc_RNA (1)...(19): siRNA sense strand
gaagguggagcaaacacaa

SEQ ID NO: 964273 - RNA, 19 nt, Homo sapiens
  misc_RNA (1)...(19): siRNA sense strand
agaagagacccaaaucauu

SEQ ID NO: 964274 - RNA, 19 nt, Homo sapiens
  misc_RNA (1)...(19): siRNA sense strand
caucagagucaaagaauca

SEQ ID NO: 964275 - RNA, 19 nt, Homo sapiens
  misc_RNA (1)...(19): siRNA sense strand
caugagggauaucgccaaa

SEQ ID NO: 964276 - RNA, 19 nt, Homo sapiens
  misc_RNA (1)...(19): siRNA sense strand
acagauggcaugagggaua

SEQ ID NO: 964277 - RNA, 19 nt, Homo sapiens
  misc_RNA (1)...(19): siRNA sense strand
ccagcaacccuacugauga

SEQ ID NO: 964278 - RNA, 19 nt, Homo sapiens
  misc_RNA (1)...(19): siRNA sense strand
acaaggaaccugcagaaug

SEQ ID NO: 964279 - RNA, 19 nt, Homo sapiens
  misc_RNA (1)...(19): siRNA sense strand
ugaaggcucaacuacuuua

SEQ ID NO: 964280 - RNA, 19 nt, Homo sapiens
  misc_RNA (1)...(19): siRNA sense strand
ggaagaaggauggauaugg

SEQ ID NO: 964281 - RNA, 19 nt, Homo sapiens
  misc_RNA (1)...(19): siRNA sense strand
gcucauaccagccauccaa

SEQ ID NO: 964282 - RNA, 19 nt, Homo sapiens
  misc_RNA (1)...(19): siRNA sense strand
gaagauuguacaucaguca

SEQ ID NO: 964283 - RNA, 19 nt, Homo sapiens
  misc_RNA (1)...(19): siRNA sense strand
uaaagaccauccaacaacu

SEQ ID NO: 964284 - RNA, 19 nt, Homo sapiens
  misc_RNA (1)...(19): siRNA sense strand
gacaggacaggaccucuuu

SEQ ID NO: 964285 - RNA, 19 nt, Homo sapiens
  misc_RNA (1)...(19): siRNA sense strand
gcaaauccaaacacagguu

SEQ ID NO: 964286 - RNA, 19 nt, Homo sapiens
  misc_RNA (1)...(19): siRNA sense strand
gcugggagccaaaugaaga

SEQ ID NO: 964287 - RNA, 19 nt, Homo sapiens
  misc_RNA (1)...(19): siRNA sense strand
cagcaacccuacugaugau

SEQ ID NO: 964288 - RNA, 19 nt, Homo sapiens
  misc_RNA (1)...(19): siRNA sense strand
agaaucaucuucacacaac

SEQ ID NO: 964289 - RNA, 19 nt, Homo sapiens
  misc_RNA (1)...(19): siRNA sense strand
caccacugcuuaugaagga

SEQ ID NO: 964290 - RNA, 19 nt, Homo sapiens
  misc_RNA (1)...(19): siRNA sense strand
ucacacaacaacacaaaug

SEQ ID NO: 964291 - RNA, 19 nt, Homo sapiens
  misc_RNA (1)...(19): siRNA sense strand
caucuuggcaucccucuug

SEQ ID NO: 964292 - RNA, 19 nt, Homo sapiens
  misc_RNA (1)...(19): siRNA sense strand
gagauuccaacucuaaugu

SEQ ID NO: 964293 - RNA, 19 nt, Homo sapiens
  misc_RNA (1)...(19): siRNA sense strand
caugaaggcuuggaagaag

SEQ ID NO: 964294 - RNA, 19 nt, Homo sapiens
  misc_RNA (1)...(19): siRNA sense strand
ggacaggacaggaccucuu

SEQ ID NO: 964295 - RNA, 19 nt, Homo sapiens
  misc_RNA (1)...(19): siRNA sense strand
gcauugaugaugaugaaga

SEQ ID NO: 964296 - RNA, 19 nt, Homo sapiens
  misc_RNA (1)...(19): siRNA sense strand
caagaagccugggauuggu

SEQ ID NO: 964297 - RNA, 19 nt, Homo sapiens
  misc_RNA (1)...(19): siRNA sense strand
aacaaggagucgucagaaa

SEQ ID NO: 964298 - RNA, 19 nt, Homo sapiens
  misc_RNA (1)...(19): siRNA sense strand
gccagcaagucucaggaaa

SEQ ID NO: 964299 - RNA, 19 nt, Homo sapiens
  misc_RNA (1)...(19): siRNA sense strand
ggccuuggcuuugauucuu

SEQ ID NO: 964300 - RNA, 19 nt, Homo sapiens
  misc_RNA (1)...(19): siRNA sense strand
ggagauuccaacucuaaug

SEQ ID NO: 964301 - RNA, 19 nt, Homo sapiens
  misc_RNA (1)...(19): siRNA sense strand
caacuucuacucugacauc

SEQ ID NO: 964302 - RNA, 19 nt, Homo sapiens
  misc_RNA (1)...(19): siRNA sense strand
caaggaaggacaacaccaa

SEQ ID NO: 964303 - RNA, 19 nt, Homo sapiens
  misc_RNA (1)...(19): siRNA sense strand
agagaagacucccauucga

SEQ ID NO: 964304 - RNA, 19 nt, Homo sapiens
  misc_RNA (1)...(19): siRNA sense strand
aaacagcuacccagaagga

SEQ ID NO: 964305 - RNA, 19 nt, Homo sapiens
  misc_RNA (1)...(19): siRNA sense strand
gaccaauuaccauaacuau

SEQ ID NO: 964306 - RNA, 19 nt, Homo sapiens
  misc_RNA (1)...(19): siRNA sense strand
uggcgcagaucgauuugaa

SEQ ID NO: 964307 - RNA, 19 nt, Homo sapiens
  misc_RNA (1)...(19): siRNA sense strand
uggcaccacugcuuaugaa

SEQ ID NO: 964308 - RNA, 19 nt, Homo sapiens
  misc_RNA (1)...(19): siRNA sense strand
gcaacccuacugaugauga

SEQ ID NO: 964309 - RNA, 19 nt, Homo sapiens
  misc_RNA (1)...(19): siRNA sense strand
ccaggcaacuccuaguagu

SEQ ID NO: 964310 - RNA, 19 nt, Homo sapiens
  misc_RNA (1)...(19): siRNA sense strand
ugucaaucguuccuuauca

SEQ ID NO: 964311 - RNA, 19 nt, Homo sapiens
  misc_RNA (1)...(19): siRNA sense strand
ccaagacggucauugaguu

SEQ ID NO: 964312 - RNA, 19 nt, Homo sapiens
  misc_RNA (1)...(19): siRNA sense strand
cgaggaggacuuucacuua

SEQ ID NO: 964313 - RNA, 19 nt, Homo sapiens
  misc_RNA (1)...(19): siRNA sense strand
gaggaggacuuucacuuag

SEQ ID NO: 964314 - RNA, 19 nt, Homo sapiens
  misc_RNA (1)...(19): siRNA sense strand
ucaccacgcucaacuccua

SEQ ID NO: 964315 - RNA, 19 nt, Homo sapiens
  misc_RNA (1)...(19): siRNA sense strand
ggaauggucgcccacauga

SEQ ID NO: 964316 - RNA, 19 nt, Homo sapiens
  misc_RNA (1)...(19): siRNA sense strand
gcacaagcgcaaggucuuu

SEQ ID NO: 964317 - RNA, 19 nt, Homo sapiens
  misc_RNA (1)...(19): siRNA sense strand
gggagaggauggagaagag

SEQ ID NO: 964318 - RNA, 19 nt, Homo sapiens
  misc_RNA (1)...(19): siRNA sense strand
acaccaagacggucauuga

SEQ ID NO: 964319 - RNA, 19 nt, Homo sapiens
  misc_RNA (1)...(19): siRNA sense strand
ggaggacuuucacuuagac

SEQ ID NO: 964320 - RNA, 19 nt, Homo sapiens
  misc_RNA (1)...(19): siRNA sense strand
ggagcgaggaggacuuuca

SEQ ID NO: 964321 - RNA, 19 nt, Homo sapiens
  misc_RNA (1)...(19): siRNA sense strand
gcgaggaggacuuucacuu

SEQ ID NO: 964322 - RNA, 19 nt, Homo sapiens
  misc_RNA (1)...(19): siRNA sense strand
gggaauggucgcccacaug

SEQ ID NO: 964323 - RNA, 19 nt, Homo sapiens
  misc_RNA (1)...(19): siRNA sense strand
acccugaggccaucaagua

SEQ ID NO: 964324 - RNA, 19 nt, Homo sapiens
  misc_RNA (1)...(19): siRNA sense strand
aggaggacuuucacuuaga

SEQ ID NO: 964325 - RNA, 19 nt, Homo sapiens
  misc_RNA (1)...(19): siRNA sense strand
cugaggccaucaaguacuu

SEQ ID NO: 964326 - RNA, 19 nt, Homo sapiens
  misc_RNA (1)...(19): siRNA sense strand
caagacggucauugaguuc

SEQ ID NO: 964327 - RNA, 19 nt, Homo sapiens
  misc_RNA (1)...(19): siRNA sense strand
aauggucgcccacaugaug

SEQ ID NO: 964328 - RNA, 19 nt, Homo sapiens
  misc_RNA (1)...(19): siRNA sense strand
ucgacgggcucaagcucaa

SEQ ID NO: 964329 - RNA, 19 nt, Homo sapiens
  misc_RNA (1)...(19): siRNA sense strand
ucauugaguuccggcacaa

SEQ ID NO: 964330 - RNA, 19 nt, Homo sapiens
  misc_RNA (1)...(19): siRNA sense strand
gcucuuccacuccagcaau

SEQ ID NO: 964331 - RNA, 19 nt, Homo sapiens
  misc_RNA (1)...(19): siRNA sense strand
gaacagagcuugaagauuu

SEQ ID NO: 964332 - RNA, 19 nt, Homo sapiens
  misc_RNA (1)...(19): siRNA sense strand
ggaaagaccuauucucaug

SEQ ID NO: 964333 - RNA, 19 nt, Homo sapiens
  misc_RNA (1)...(19): siRNA sense strand
gaagggcucuuucagaauc

SEQ ID NO: 964334 - RNA, 19 nt, Homo sapiens
  misc_RNA (1)...(19): siRNA sense strand
cgagucagauguccaaaug

SEQ ID NO: 964335 - RNA, 19 nt, Homo sapiens
  misc_RNA (1)...(19): siRNA sense strand
aaauagcacuggagacuga

SEQ ID NO: 964336 - RNA, 19 nt, Homo sapiens
  misc_RNA (1)...(19): siRNA sense strand
gaacugucaugggaacauu

SEQ ID NO: 964337 - RNA, 19 nt, Homo sapiens
  misc_RNA (1)...(19): siRNA sense strand
acaauaaggugaccagcaa

SEQ ID NO: 964338 - RNA, 19 nt, Homo sapiens
  misc_RNA (1)...(19): siRNA sense strand
gaaccauugugcaaauugu

SEQ ID NO: 964339 - RNA, 19 nt, Homo sapiens
  misc_RNA (1)...(19): siRNA sense strand
gaagaaacgaugccugugu

SEQ ID NO: 964340 - RNA, 19 nt, Homo sapiens
  misc_RNA (1)...(19): siRNA sense strand
aagaaacgaugccugugua

SEQ ID NO: 964341 - RNA, 19 nt, Homo sapiens
  misc_RNA (1)...(19): siRNA sense strand
aaacgaugccuguguauga

SEQ ID NO: 964342 - RNA, 19 nt, Homo sapiens
  misc_RNA (1)...(19): siRNA sense strand
cauauugcauguuucaaga

SEQ ID NO: 964343 - RNA, 19 nt, Homo sapiens
  misc_RNA (1)...(19): siRNA sense strand
gaagauuuagucaagguuu

SEQ ID NO: 964344 - RNA, 19 nt, Homo sapiens
  misc_RNA (1)...(19): siRNA sense strand
caagguguguccagguaaa

SEQ ID NO: 964345 - RNA, 19 nt, Homo sapiens
  misc_RNA (1)...(19): siRNA sense strand
cagaggagauggagaacug

SEQ ID NO: 964346 - RNA, 19 nt, Homo sapiens
  misc_RNA (1)...(19): siRNA sense strand
gcaagcaucaggaaccauu

SEQ ID NO: 964347 - RNA, 19 nt, Homo sapiens
  misc_RNA (1)...(19): siRNA sense strand
acacaagcauggacaagug

SEQ ID NO: 964348 - RNA, 19 nt, Homo sapiens
  misc_RNA (1)...(19): siRNA sense strand
caagcaagaguguaagaaa

SEQ ID NO: 964349 - RNA, 19 nt, Homo sapiens
  misc_RNA (1)...(19): siRNA sense strand
guacagagugggugagaga

SEQ ID NO: 964350 - RNA, 19 nt, Homo sapiens
  misc_RNA (1)...(19): siRNA sense strand
cuccagcacuuccauauug

SEQ ID NO: 964351 - RNA, 19 nt, Homo sapiens
  misc_RNA (1)...(19): siRNA sense strand
caacagagaagcaagacau

SEQ ID NO: 964352 - RNA, 19 nt, Homo sapiens
  misc_RNA (1)...(19): siRNA sense strand
agucagauguccaaauguu

SEQ ID NO: 964353 - RNA, 19 nt, Homo sapiens
  misc_RNA (1)...(19): siRNA sense strand
gcucagaucagccagaugu

SEQ ID NO: 964354 - RNA, 19 nt, Homo sapiens
  misc_RNA (1)...(19): siRNA sense strand
ucaccaagcaagaguguaa

SEQ ID NO: 964355 - RNA, 19 nt, Homo sapiens
  misc_RNA (1)...(19): siRNA sense strand
gaaaaugggaggcaugaaa

SEQ ID NO: 964356 - RNA, 19 nt, Homo sapiens
  misc_RNA (1)...(19): siRNA sense strand
ggaggucugucccgcuuuc

SEQ ID NO: 964357 - RNA, 19 nt, Homo sapiens
  misc_RNA (1)...(19): siRNA sense strand
caaaacagagcaaguaaaa

SEQ ID NO: 964358 - RNA, 19 nt, Homo sapiens
  misc_RNA (1)...(19): siRNA sense strand
aacagagcuugaagauuua

SEQ ID NO: 964359 - RNA, 19 nt, Homo sapiens
  misc_RNA (1)...(19): siRNA sense strand
ggaacauucugauggugau

SEQ ID NO: 964360 - RNA, 19 nt, Homo sapiens
  misc_RNA (1)...(19): siRNA sense strand
auccuuaccuggaaccuua

SEQ ID NO: 964361 - RNA, 19 nt, Homo sapiens
  misc_RNA (1)...(19): siRNA sense strand
caggaaccauugugcaaau

SEQ ID NO: 964362 - RNA, 19 nt, Homo sapiens
  misc_RNA (1)...(19): siRNA sense strand
gcuauguacuuguaauguc

SEQ ID NO: 964363 - RNA, 19 nt, Homo sapiens
  misc_RNA (1)...(19): siRNA sense strand
gcagaacagagcuugaaga

SEQ ID NO: 964364 - RNA, 19 nt, Homo sapiens
  misc_RNA (1)...(19): siRNA sense strand
ccaccgcucucacuaugau

SEQ ID NO: 964365 - RNA, 19 nt, Homo sapiens
  misc_RNA (1)...(19): siRNA sense strand
gaaggagaagcucagauca

SEQ ID NO: 964366 - RNA, 19 nt, Homo sapiens
  misc_RNA (1)...(19): siRNA sense strand
ggacaaguguguguuucca

SEQ ID NO: 964367 - RNA, 19 nt, Homo sapiens
  misc_RNA (1)...(19): siRNA sense strand
gcucagagaaugggaaugu

SEQ ID NO: 964368 - RNA, 19 nt, Homo sapiens
  misc_RNA (1)...(19): siRNA sense strand
ggaaccauugugcaaauug

SEQ ID NO: 964369 - RNA, 19 nt, Homo sapiens
  misc_RNA (1)...(19): siRNA sense strand
gagggaaacguguauugug

SEQ ID NO: 964370 - RNA, 19 nt, Homo sapiens
  misc_RNA (1)...(19): siRNA sense strand
acaaguguguguuuccaau

SEQ ID NO: 964371 - RNA, 19 nt, Homo sapiens
  misc_RNA (1)...(19): siRNA sense strand
ggagcuuccucacuucaag

SEQ ID NO: 964372 - RNA, 19 nt, Homo sapiens
  misc_RNA (1)...(19): siRNA sense strand
gaaacgaugccuguguaug

SEQ ID NO: 964373 - RNA, 19 nt, Homo sapiens
  misc_RNA (1)...(19): siRNA sense strand
ugugugcuauguacuugua

SEQ ID NO: 964374 - RNA, 19 nt, Homo sapiens
  misc_RNA (1)...(19): siRNA sense strand
gaacauucugauggugaua

SEQ ID NO: 964375 - RNA, 19 nt, Homo sapiens
  misc_RNA (1)...(19): siRNA sense strand
uaccaccgcucucacuaug

SEQ ID NO: 964376 - RNA, 19 nt, Homo sapiens
  misc_RNA (1)...(19): siRNA sense strand
cgaaggagaagcucagauc

SEQ ID NO: 964377 - RNA, 19 nt, Homo sapiens
  misc_RNA (1)...(19): siRNA sense strand
gcaagguguguccagguaa

SEQ ID NO: 964378 - RNA, 19 nt, Homo sapiens
  misc_RNA (1)...(19): siRNA sense strand
ugcaagguguguccaggua

SEQ ID NO: 964379 - RNA, 19 nt, Homo sapiens
  misc_RNA (1)...(19): siRNA sense strand
ccaauggaaagaccuauuc

SEQ ID NO: 964380 - RNA, 19 nt, Homo sapiens
  misc_RNA (1)...(19): siRNA sense strand
gagaaugggaaugugcuuu

SEQ ID NO: 964381 - RNA, 19 nt, Homo sapiens
  misc_RNA (1)...(19): siRNA sense strand
cuauguacuuguaauguca

SEQ ID NO: 964382 - RNA, 19 nt, Homo sapiens
  misc_RNA (1)...(19): siRNA sense strand
ggagggaaacguguauugu

SEQ ID NO: 964383 - RNA, 19 nt, Homo sapiens
  misc_RNA (1)...(19): siRNA sense strand
aaaugggaggcaugaaaua

SEQ ID NO: 964384 - RNA, 19 nt, Homo sapiens
  misc_RNA (1)...(19): siRNA sense strand
cagaacagagcuugaagau

SEQ ID NO: 964385 - RNA, 19 nt, Homo sapiens
  misc_RNA (1)...(19): siRNA sense strand
ugggacaacuuaccaacau

SEQ ID NO: 964386 - RNA, 19 nt, Homo sapiens
  misc_RNA (1)...(19): siRNA sense strand
gggacaacuuaccaacaug

SEQ ID NO: 964387 - RNA, 19 nt, Homo sapiens
  misc_RNA (1)...(19): siRNA sense strand
guaaugucaccaagcaaga

SEQ ID NO: 964388 - RNA, 19 nt, Homo sapiens
  misc_RNA (1)...(19): siRNA sense strand
gugcauauuccucaucugu

SEQ ID NO: 964389 - RNA, 19 nt, Homo sapiens
  misc_RNA (1)...(19): siRNA sense strand
guacuuguaaugucaccaa

SEQ ID NO: 964390 - RNA, 19 nt, Homo sapiens
  misc_RNA (1)...(19): siRNA sense strand
uaacaaacacaagcaugga

SEQ ID NO: 964391 - RNA, 19 nt, Homo sapiens
  misc_RNA (1)...(19): siRNA sense strand
ggggagcucuuauggauuc

SEQ ID NO: 964392 - RNA, 19 nt, Homo sapiens
  misc_RNA (1)...(19): siRNA sense strand
gaggauguuugaggagcuu

SEQ ID NO: 964393 - RNA, 19 nt, Homo sapiens
  misc_RNA (1)...(19): siRNA sense strand
agguagagguccacguuug

SEQ ID NO: 964394 - RNA, 19 nt, Homo sapiens
  misc_RNA (1)...(19): siRNA sense strand
gaaugggaaugugcuuugc

SEQ ID NO: 964395 - RNA, 19 nt, Homo sapiens
  misc_RNA (1)...(19): siRNA sense strand
cagaucagccagauguguu

SEQ ID NO: 964396 - RNA, 19 nt, Homo sapiens
  misc_RNA (1)...(19): siRNA sense strand
ucagguagagguccacguu

SEQ ID NO: 964397 - RNA, 19 nt, Homo sapiens
  misc_RNA (1)...(19): siRNA sense strand
gaacuuccaggccaaagcu

SEQ ID NO: 964398 - RNA, 19 nt, Homo sapiens
  misc_RNA (1)...(19): siRNA sense strand
ucagauguccaaauguuca

SEQ ID NO: 964399 - RNA, 19 nt, Homo sapiens
  misc_RNA (1)...(19): siRNA sense strand
gagcuugaagauuuaguca

SEQ ID NO: 964400 - RNA, 19 nt, Homo sapiens
  misc_RNA (1)...(19): siRNA sense strand
gacaauaaaggcuacuucu

SEQ ID NO: 964401 - RNA, 19 nt, Homo sapiens
  misc_RNA (1)...(19): siRNA sense strand
aguacaaugggacaacuua

SEQ ID NO: 964402 - RNA, 19 nt, Homo sapiens
  misc_RNA (1)...(19): siRNA sense strand
ggcaugaaauacaucuuuu

SEQ ID NO: 964403 - RNA, 19 nt, Homo sapiens
  misc_RNA (1)...(19): siRNA sense strand
gaaaauccacugccccaau

SEQ ID NO: 964404 - RNA, 19 nt, Homo sapiens
  misc_RNA (1)...(19): siRNA sense strand
aaacagagcaaguaaaaca

SEQ ID NO: 964405 - RNA, 19 nt, Homo sapiens
  misc_RNA (1)...(19): siRNA sense strand
gcaaccugccaacagagaa

SEQ ID NO: 964406 - RNA, 19 nt, Homo sapiens
  misc_RNA (1)...(19): siRNA sense strand
agaaugggaaugugcuuug

SEQ ID NO: 964407 - RNA, 19 nt, Homo sapiens
  misc_RNA (1)...(19): siRNA sense strand
aggcaugaaauacaucuuu

SEQ ID NO: 964408 - RNA, 19 nt, Homo sapiens
  misc_RNA (1)...(19): siRNA sense strand
gcauguuucaagacaagaa

SEQ ID NO: 964409 - RNA, 19 nt, Homo sapiens
  misc_RNA (1)...(19): siRNA sense strand
aagcaagaguguaagaaaa

SEQ ID NO: 964410 - RNA, 19 nt, Homo sapiens
  misc_RNA (1)...(19): siRNA sense strand
cauggacaaguguguguuu

SEQ ID NO: 964411 - RNA, 19 nt, Homo sapiens
  misc_RNA (1)...(19): siRNA sense strand
ucuuauggauucccagcaa

SEQ ID NO: 964412 - RNA, 19 nt, Homo sapiens
  misc_RNA (1)...(19): siRNA sense strand
gcaaaacagagcaaguaaa

SEQ ID NO: 964413 - RNA, 19 nt, Homo sapiens
  misc_RNA (1)...(19): siRNA sense strand
ucgcugcccagacuccuua

SEQ ID NO: 964414 - RNA, 19 nt, Homo sapiens
  misc_RNA (1)...(19): siRNA sense strand
ucaagucguguaugcagaa

SEQ ID NO: 964415 - RNA, 19 nt, Homo sapiens
  misc_RNA (1)...(19): siRNA sense strand
agccagauguguucaaguc

SEQ ID NO: 964416 - RNA, 19 nt, Homo sapiens
  misc_RNA (1)...(19): siRNA sense strand
gagugugugcuauguacuu

SEQ ID NO: 964417 - RNA, 19 nt, Homo sapiens
  misc_RNA (1)...(19): siRNA sense strand
guucggagggaaacgugua

SEQ ID NO: 964418 - RNA, 19 nt, Homo sapiens
  misc_RNA (1)...(19): siRNA sense strand
cagaaucggcaacccaauc

SEQ ID NO: 964419 - RNA, 19 nt, Homo sapiens
  misc_RNA (1)...(19): siRNA sense strand
ccaagcaagaguguaagaa

SEQ ID NO: 964420 - RNA, 19 nt, Homo sapiens
  misc_RNA (1)...(19): siRNA sense strand
acccaaaccuccgggcauu

SEQ ID NO: 964421 - RNA, 19 nt, Homo sapiens
  misc_RNA (1)...(19): siRNA sense strand
caaacacaagcauggacaa

SEQ ID NO: 964422 - RNA, 19 nt, Homo sapiens
  misc_RNA (1)...(19): siRNA sense strand
ucaggaaccauugugcaaa

SEQ ID NO: 964423 - RNA, 19 nt, Homo sapiens
  misc_RNA (1)...(19): siRNA sense strand
ugggaggcaugaaauacau

SEQ ID NO: 964424 - RNA, 19 nt, Homo sapiens
  misc_RNA (1)...(19): siRNA sense strand
cuuauggguugguuuacug

SEQ ID NO: 964425 - RNA, 19 nt, Homo sapiens
  misc_RNA (1)...(19): siRNA sense strand
ucuccaagaggauguuuga

SEQ ID NO: 964426 - RNA, 19 nt, Homo sapiens
  misc_RNA (1)...(19): siRNA sense strand
ugacaauaaaggcuacuuc

SEQ ID NO: 964427 - RNA, 19 nt, Homo sapiens
  misc_RNA (1)...(19): siRNA sense strand
gagauggagaacugucaug

SEQ ID NO: 964428 - RNA, 19 nt, Homo sapiens
  misc_RNA (1)...(19): siRNA sense strand
ucguuguuguucuuucuuu

SEQ ID NO: 964429 - RNA, 19 nt, Homo sapiens
  misc_RNA (1)...(19): siRNA sense strand
guguaugagucuguauuca

SEQ ID NO: 964430 - RNA, 19 nt, Homo sapiens
  misc_RNA (1)...(19): siRNA sense strand
uccagcacuuccauauuga

SEQ ID NO: 964431 - RNA, 19 nt, Homo sapiens
  misc_RNA (1)...(19): siRNA sense strand
ggaaacagauccauacuuu

SEQ ID NO: 964432 - RNA, 19 nt, Homo sapiens
  misc_RNA (1)...(19): siRNA sense strand
ggaaagugcugaucaaucu

SEQ ID NO: 964433 - RNA, 19 nt, Homo sapiens
  misc_RNA (1)...(19): siRNA sense strand
gcacucaaauaucuucuga

SEQ ID NO: 964434 - RNA, 19 nt, Homo sapiens
  misc_RNA (1)...(19): siRNA sense strand
caaagaaggccaagaaaga

SEQ ID NO: 964435 - RNA, 19 nt, Homo sapiens
  misc_RNA (1)...(19): siRNA sense strand
gcacgucucuucuucuugu

SEQ ID NO: 964436 - RNA, 19 nt, Homo sapiens
  misc_RNA (1)...(19): siRNA sense strand
gaaacagauccauacuuua

SEQ ID NO: 964437 - RNA, 19 nt, Homo sapiens
  misc_RNA (1)...(19): siRNA sense strand
caagagaccaugaccguaa

SEQ ID NO: 964438 - RNA, 19 nt, Homo sapiens
  misc_RNA (1)...(19): siRNA sense strand
guacagcaauacaugaguu

SEQ ID NO: 964439 - RNA, 19 nt, Homo sapiens
  misc_RNA (1)...(19): siRNA sense strand
gauccauacuuuauaccua

SEQ ID NO: 964440 - RNA, 19 nt, Homo sapiens
  misc_RNA (1)...(19): siRNA sense strand
gaucugccauuccaacaug

SEQ ID NO: 964441 - RNA, 19 nt, Homo sapiens
  misc_RNA (1)...(19): siRNA sense strand
gccaaucacuguccugguu

SEQ ID NO: 964442 - RNA, 19 nt, Homo sapiens
  misc_RNA (1)...(19): siRNA sense strand
gaaaacacccacaacauaa

SEQ ID NO: 964443 - RNA, 19 nt, Homo sapiens
  misc_RNA (1)...(19): siRNA sense strand
ucagugcacuuaaggucua

SEQ ID NO: 964444 - RNA, 19 nt, Homo sapiens
  misc_RNA (1)...(19): siRNA sense strand
caugggagaugaugaugga

SEQ ID NO: 964445 - RNA, 19 nt, Homo sapiens
  misc_RNA (1)...(19): siRNA sense strand
ugacagagacucaaagaag

SEQ ID NO: 964446 - RNA, 19 nt, Homo sapiens
  misc_RNA (1)...(19): siRNA sense strand
ccagaucucuauagcaaag

SEQ ID NO: 964447 - RNA, 19 nt, Homo sapiens
  misc_RNA (1)...(19): siRNA sense strand
cuacagguaucuaagcaau

SEQ ID NO: 964448 - RNA, 19 nt, Homo sapiens
  misc_RNA (1)...(19): siRNA sense strand
aacccaagguguuguguuu

SEQ ID NO: 964449 - RNA, 19 nt, Homo sapiens
  misc_RNA (1)...(19): siRNA sense strand
ugaggaaagugcugaucaa

SEQ ID NO: 964450 - RNA, 19 nt, Homo sapiens
  misc_RNA (1)...(19): siRNA sense strand
gcacuuaaggucuacagau

SEQ ID NO: 964451 - RNA, 19 nt, Homo sapiens
  misc_RNA (1)...(19): siRNA sense strand
ucccagaucucuauagcaa

SEQ ID NO: 964452 - RNA, 19 nt, Homo sapiens
  misc_RNA (1)...(19): siRNA sense strand
cgaaaacacccacaacaua

SEQ ID NO: 964453 - RNA, 19 nt, Homo sapiens
  misc_RNA (1)...(19): siRNA sense strand
gaugaggaguuuauuucuc

SEQ ID NO: 964454 - RNA, 19 nt, Homo sapiens
  misc_RNA (1)...(19): siRNA sense strand
uagaugaaauuggacaaga

SEQ ID NO: 964455 - RNA, 19 nt, Homo sapiens
  misc_RNA (1)...(19): siRNA sense strand
acucugaccauuccucuua

SEQ ID NO: 964456 - RNA, 19 nt, Homo sapiens
  misc_RNA (1)...(19): siRNA sense strand
caccauccaugcuaaagga

SEQ ID NO: 964457 - RNA, 19 nt, Homo sapiens
  misc_RNA (1)...(19): siRNA sense strand
gaagcugcccaccagauug

SEQ ID NO: 964458 - RNA, 19 nt, Homo sapiens
  misc_RNA (1)...(19): siRNA sense strand
gcagcuggcccuggaguuu

SEQ ID NO: 964459 - RNA, 19 nt, Homo sapiens
  misc_RNA (1)...(19): siRNA sense strand
acauaaagauuggacucua

SEQ ID NO: 964460 - RNA, 19 nt, Homo sapiens
  misc_RNA (1)...(19): siRNA sense strand
caacaccaauugcaaucca

SEQ ID NO: 964461 - RNA, 19 nt, Homo sapiens
  misc_RNA (1)...(19): siRNA sense strand
cuacagaugaggaguuuau

SEQ ID NO: 964462 - RNA, 19 nt, Homo sapiens
  misc_RNA (1)...(19): siRNA sense strand
cccaagguguuguguuuga

SEQ ID NO: 964463 - RNA, 19 nt, Homo sapiens
  misc_RNA (1)...(19): siRNA sense strand
gaugaaauuggacaagaga

SEQ ID NO: 964464 - RNA, 19 nt, Homo sapiens
  misc_RNA (1)...(19): siRNA sense strand
cagaugaggaguuuauuuc

SEQ ID NO: 964465 - RNA, 19 nt, Homo sapiens
  misc_RNA (1)...(19): siRNA sense strand
caugaguucuuccucuaga

SEQ ID NO: 964466 - RNA, 19 nt, Homo sapiens
  misc_RNA (1)...(19): siRNA sense strand
uacaugaguucuuccucua

SEQ ID NO: 964467 - RNA, 19 nt, Homo sapiens
  misc_RNA (1)...(19): siRNA sense strand
cauaaagauuggacucuac

SEQ ID NO: 964468 - RNA, 19 nt, Homo sapiens
  misc_RNA (1)...(19): siRNA sense strand
caggagauuugaccagcaa

SEQ ID NO: 964469 - RNA, 19 nt, Homo sapiens
  misc_RNA (1)...(19): siRNA sense strand
gcagugccuuucugugagu

SEQ ID NO: 964470 - RNA, 19 nt, Homo sapiens
  misc_RNA (1)...(19): siRNA sense strand
caaaagagggugacuaugu

SEQ ID NO: 964471 - RNA, 19 nt, Homo sapiens
  misc_RNA (1)...(19): siRNA sense strand
ggaaucagagugccuggau

SEQ ID NO: 964472 - RNA, 19 nt, Homo sapiens
  misc_RNA (1)...(19): siRNA sense strand
cacuuaaggucuacagaug

SEQ ID NO: 964473 - RNA, 19 nt, Homo sapiens
  misc_RNA (1)...(19): siRNA sense strand
ugucauguuucucuuugaa

SEQ ID NO: 964474 - RNA, 19 nt, Homo sapiens
  misc_RNA (1)...(19): siRNA sense strand
gggucuagcacucaaauau

SEQ ID NO: 964475 - RNA, 19 nt, Homo sapiens
  misc_RNA (1)...(19): siRNA sense strand
ccucuugcaucgucaccua

SEQ ID NO: 964476 - RNA, 19 nt, Homo sapiens
  misc_RNA (1)...(19): siRNA sense strand
acagauccauacuuuauac

SEQ ID NO: 964477 - RNA, 19 nt, Homo sapiens
  misc_RNA (1)...(19): siRNA sense strand
gaccguaacccuccucgau

SEQ ID NO: 964478 - RNA, 19 nt, Homo sapiens
  misc_RNA (1)...(19): siRNA sense strand
ccgcacgucucuucuucuu

SEQ ID NO: 964479 - RNA, 19 nt, Homo sapiens
  misc_RNA (1)...(19): siRNA sense strand
ccagggaggaaauugguuu

SEQ ID NO: 964480 - RNA, 19 nt, Homo sapiens
  misc_RNA (1)...(19): siRNA sense strand
ggaucaagaagcaguuguu

SEQ ID NO: 964481 - RNA, 19 nt, Homo sapiens
  misc_RNA (1)...(19): siRNA sense strand
gggaaacagauccauacuu

SEQ ID NO: 964482 - RNA, 19 nt, Homo sapiens
  misc_RNA (1)...(19): siRNA sense strand
ucuucuagcuacugaauuc

SEQ ID NO: 964483 - RNA, 19 nt, Homo sapiens
  misc_RNA (1)...(19): siRNA sense strand
aaaagagggugacuauguu

SEQ ID NO: 964484 - RNA, 19 nt, Homo sapiens
  misc_RNA (1)...(19): siRNA sense strand
gaacccaagguguuguguu

SEQ ID NO: 964485 - RNA, 19 nt, Homo sapiens
  misc_RNA (1)...(19): siRNA sense strand
cggacucuguacagcaaua

SEQ ID NO: 964486 - RNA, 19 nt, Homo sapiens
  misc_RNA (1)...(19): siRNA sense strand
acucaaagaaggccaagaa

SEQ ID NO: 964487 - RNA, 19 nt, Homo sapiens
  misc_RNA (1)...(19): siRNA sense strand
acagaugaggaguuuauuu

SEQ ID NO: 964488 - RNA, 19 nt, Homo sapiens
  misc_RNA (1)...(19): siRNA sense strand
gaaggccaagaaagagaaa

SEQ ID NO: 964489 - RNA, 19 nt, Homo sapiens
  misc_RNA (1)...(19): siRNA sense strand
ccacaacauaacauaaaga

SEQ ID NO: 964490 - RNA, 19 nt, Homo sapiens
  misc_RNA (1)...(19): siRNA sense strand
acucaaauaucuucugacu

SEQ ID NO: 964491 - RNA, 19 nt, Homo sapiens
  misc_RNA (1)...(19): siRNA sense strand
gucuagcacucaaauaucu

SEQ ID NO: 964492 - RNA, 19 nt, Homo sapiens
  misc_RNA (1)...(19): siRNA sense strand
gucuacagaugaggaguuu

SEQ ID NO: 964493 - RNA, 19 nt, Homo sapiens
  misc_RNA (1)...(19): siRNA sense strand
ucaaagaaggccaagaaag

SEQ ID NO: 964494 - RNA, 19 nt, Homo sapiens
  misc_RNA (1)...(19): siRNA sense strand
ccaagguguuguguuugaa

SEQ ID NO: 964495 - RNA, 19 nt, Homo sapiens
  misc_RNA (1)...(19): siRNA sense strand
uuucagaccugggugguau

SEQ ID NO: 964496 - RNA, 19 nt, Homo sapiens
  misc_RNA (1)...(19): siRNA sense strand
gaagccacagggaaucaga

SEQ ID NO: 964497 - RNA, 19 nt, Homo sapiens
  misc_RNA (1)...(19): siRNA sense strand
gggaggaaauugguuuagg

SEQ ID NO: 964498 - RNA, 19 nt, Homo sapiens
  misc_RNA (1)...(19): siRNA sense strand
acagguaucuaagcaaugg

SEQ ID NO: 964499 - RNA, 19 nt, Homo sapiens
  misc_RNA (1)...(19): siRNA sense strand
gcugacagagacucaaaga

SEQ ID NO: 964500 - RNA, 19 nt, Homo sapiens
  misc_RNA (1)...(19): siRNA sense strand
gccgagaacccaagguguu

SEQ ID NO: 964501 - RNA, 19 nt, Homo sapiens
  misc_RNA (1)...(19): siRNA sense strand
gcaccgcacgucucuucuu

SEQ ID NO: 964502 - RNA, 19 nt, Homo sapiens
  misc_RNA (1)...(19): siRNA sense strand
gaucaagaagcaguuguuc

SEQ ID NO: 964503 - RNA, 19 nt, Homo sapiens
  misc_RNA (1)...(19): siRNA sense strand
aauuacagcccaccucuug

SEQ ID NO: 964504 - RNA, 19 nt, Homo sapiens
  misc_RNA (1)...(19): siRNA sense strand
auacacaccauccaugcua

SEQ ID NO: 964505 - RNA, 19 nt, Homo sapiens
  misc_RNA (1)...(19): siRNA sense strand
cagguggugcccauuguaa

SEQ ID NO: 964506 - RNA, 19 nt, Homo sapiens
  misc_RNA (1)...(19): siRNA sense strand
ccacagcucccacccugau

SEQ ID NO: 964507 - RNA, 19 nt, Homo sapiens
  misc_RNA (1)...(19): siRNA sense strand
caccgcacgucucuucuuc

SEQ ID NO: 964508 - RNA, 19 nt, Homo sapiens
  misc_RNA (1)...(19): siRNA sense strand
uacacaccauccaugcuaa

SEQ ID NO: 964509 - RNA, 19 nt, Homo sapiens
  misc_RNA (1)...(19): siRNA sense strand
ucugucauguuucucuuug

SEQ ID NO: 964510 - RNA, 19 nt, Homo sapiens
  misc_RNA (1)...(19): siRNA sense strand
ggucuagcacucaaauauc

SEQ ID NO: 964511 - RNA, 19 nt, Homo sapiens
  misc_RNA (1)...(19): siRNA sense strand
cagggaggaaauugguuua

SEQ ID NO: 964512 - RNA, 19 nt, Homo sapiens
  misc_RNA (1)...(19): siRNA sense strand
gaggaaagugcugaucaau

SEQ ID NO: 964513 - RNA, 19 nt, Homo sapiens
  misc_RNA (1)...(19): siRNA sense strand
agacaacaccaauugcaau

SEQ ID NO: 964514 - RNA, 19 nt, Homo sapiens
  misc_RNA (1)...(19): siRNA sense strand
gacaacaccaauugcaauc

SEQ ID NO: 964515 - RNA, 19 nt, Homo sapiens
  misc_RNA (1)...(19): siRNA sense strand
gaggaguuuauuucucaaa

SEQ ID NO: 964516 - RNA, 19 nt, Homo sapiens
  misc_RNA (1)...(19): siRNA sense strand
acacccacaacauaacaua

SEQ ID NO: 964517 - RNA, 19 nt, Homo sapiens
  misc_RNA (1)...(19): siRNA sense strand
cagauuguccagcucauuc

SEQ ID NO: 964518 - RNA, 19 nt, Homo sapiens
  misc_RNA (1)...(19): siRNA sense strand
gccagguggugcccauugu

SEQ ID NO: 964519 - RNA, 19 nt, Homo sapiens
  misc_RNA (1)...(19): siRNA sense strand
gggccuggcagauguguuc

SEQ ID NO: 964520 - RNA, 19 nt, Homo sapiens
  misc_RNA (1)...(19): siRNA sense strand
agaagcugcccaccagauu

SEQ ID NO: 964521 - RNA, 19 nt, Homo sapiens
  misc_RNA (1)...(19): siRNA sense strand
gagauuugaccagcaagug

SEQ ID NO: 964522 - RNA, 19 nt, Homo sapiens
  misc_RNA (1)...(19): siRNA sense strand
ggucuacagaugaggaguu

SEQ ID NO: 964523 - RNA, 19 nt, Homo sapiens
  misc_RNA (1)...(19): siRNA sense strand
agcaauacaugaguucuuc

SEQ ID NO: 964524 - RNA, 19 nt, Homo sapiens
  misc_RNA (1)...(19): siRNA sense strand
ccagguggugcccauugua

SEQ ID NO: 964525 - RNA, 19 nt, Homo sapiens
  misc_RNA (1)...(19): siRNA sense strand
auauccacgucaucccuua

SEQ ID NO: 964526 - RNA, 19 nt, Homo sapiens
  misc_RNA (1)...(19): siRNA sense strand
aaacacccacaacauaaca

SEQ ID NO: 964527 - RNA, 19 nt, Homo sapiens
  misc_RNA (1)...(19): siRNA sense strand
aaagagggugacuauguug

SEQ ID NO: 964528 - RNA, 19 nt, Homo sapiens
  misc_RNA (1)...(19): siRNA sense strand
aaagcagccuucccaccau

SEQ ID NO: 964529 - RNA, 19 nt, Homo sapiens
  misc_RNA (1)...(19): siRNA sense strand
cagcaauacaugaguucuu

SEQ ID NO: 964530 - RNA, 19 nt, Homo sapiens
  misc_RNA (1)...(19): siRNA sense strand
guuguucccagaucucuau

SEQ ID NO: 964531 - RNA, 19 nt, Homo sapiens
  misc_RNA (1)...(19): siRNA sense strand
caaagacgcugcuggagaa

SEQ ID NO: 964532 - RNA, 19 nt, Homo sapiens
  misc_RNA (1)...(19): siRNA sense strand
gggcucaacuucuauggua

SEQ ID NO: 964533 - RNA, 19 nt, Homo sapiens
  misc_RNA (1)...(19): siRNA sense strand
ggacuggacuuacgaugau

SEQ ID NO: 964534 - RNA, 19 nt, Homo sapiens
  misc_RNA (1)...(19): siRNA sense strand
ggaggcacgucgucuucua

SEQ ID NO: 964535 - RNA, 19 nt, Homo sapiens
  misc_RNA (1)...(19): siRNA sense strand
cagauaagccggugcaaga

SEQ ID NO: 964536 - RNA, 19 nt, Homo sapiens
  misc_RNA (1)...(19): siRNA sense strand
ggagcaaguucacacagau

SEQ ID NO: 964537 - RNA, 19 nt, Homo sapiens
  misc_RNA (1)...(19): siRNA sense strand
gcaaagaaccagcauuucg

SEQ ID NO: 964538 - RNA, 19 nt, Homo sapiens
  misc_RNA (1)...(19): siRNA sense strand
gggagcaaguucacacaga

SEQ ID NO: 964539 - RNA, 19 nt, Homo sapiens
  misc_RNA (1)...(19): siRNA sense strand
ccaagggccugcacauagu

SEQ ID NO: 964540 - RNA, 19 nt, Homo sapiens
  misc_RNA (1)...(19): siRNA sense strand
cagagcacuucuucgagua

SEQ ID NO: 964541 - RNA, 19 nt, Homo sapiens
  misc_RNA (1)...(19): siRNA sense strand
acacuacccugucaaaguc

SEQ ID NO: 964542 - RNA, 19 nt, Homo sapiens
  misc_RNA (1)...(19): siRNA sense strand
caaagaaccagcauuucga

SEQ ID NO: 964543 - RNA, 19 nt, Homo sapiens
  misc_RNA (1)...(19): siRNA sense strand
uggcaaagaaccagcauuu

SEQ ID NO: 964544 - RNA, 19 nt, Homo sapiens
  misc_RNA (1)...(19): siRNA sense strand
agacagugaggaugagaua

SEQ ID NO: 964545 - RNA, 19 nt, Homo sapiens
  misc_RNA (1)...(19): siRNA sense strand
gcuacgaugucaccaaggu

SEQ ID NO: 964546 - RNA, 19 nt, Homo sapiens
  misc_RNA (1)...(19): siRNA sense strand
gccaagggccugcacauag

SEQ ID NO: 964547 - RNA, 19 nt, Homo sapiens
  misc_RNA (1)...(19): siRNA sense strand
gggauguacugggcuaugu

SEQ ID NO: 964548 - RNA, 19 nt, Homo sapiens
  misc_RNA (1)...(19): siRNA sense strand
gcaucagccuggcccuaau

SEQ ID NO: 964549 - RNA, 19 nt, Homo sapiens
  misc_RNA (1)...(19): siRNA sense strand
ccagguacauccagacacu

SEQ ID NO: 964550 - RNA, 19 nt, Homo sapiens
  misc_RNA (1)...(19): siRNA sense strand
uagaggagcugagcaagac

SEQ ID NO: 964551 - RNA, 19 nt, Homo sapiens
  misc_RNA (1)...(19): siRNA sense strand
ugccucggcuccuguuuga

SEQ ID NO: 964552 - RNA, 19 nt, Homo sapiens
  misc_RNA (1)...(19): siRNA sense strand
ccucagagcacuucuucga

SEQ ID NO: 964553 - RNA, 19 nt, Homo sapiens
  misc_RNA (1)...(19): siRNA sense strand
gaugguuucagccucauga

SEQ ID NO: 964554 - RNA, 19 nt, Homo sapiens
  misc_RNA (1)...(19): siRNA sense strand
gguggugacggaccucaaa

SEQ ID NO: 964555 - RNA, 19 nt, Homo sapiens
  misc_RNA (1)...(19): siRNA sense strand
aagagucaguuuucagaua

SEQ ID NO: 964556 - RNA, 19 nt, Homo sapiens
  misc_RNA (1)...(19): siRNA sense strand
gagcacuucuucgaguaca

SEQ ID NO: 964557 - RNA, 19 nt, Homo sapiens
  misc_RNA (1)...(19): siRNA sense strand
gcucaacuucuaugguaug

SEQ ID NO: 964558 - RNA, 19 nt, Homo sapiens
  misc_RNA (1)...(19): siRNA sense strand
guuucagccucaugaccua

SEQ ID NO: 964559 - RNA, 19 nt, Homo sapiens
  misc_RNA (1)...(19): siRNA sense strand
acagugaggaugagauaga

SEQ ID NO: 964560 - RNA, 19 nt, Homo sapiens
  misc_RNA (1)...(19): siRNA sense strand
ggagaagagucaguuuuca

SEQ ID NO: 964561 - RNA, 19 nt, Homo sapiens
  misc_RNA (1)...(19): siRNA sense strand
ucacgcacaaggaguuuga

SEQ ID NO: 964562 - RNA, 19 nt, Homo sapiens
  misc_RNA (1)...(19): siRNA sense strand
cugagagugugguucuuga

SEQ ID NO: 964563 - RNA, 19 nt, Homo sapiens
  misc_RNA (1)...(19): siRNA sense strand
agagucaguuuucagauaa

SEQ ID NO: 964564 - RNA, 19 nt, Homo sapiens
  misc_RNA (1)...(19): siRNA sense strand
gcagcccuguucacacuac

SEQ ID NO: 964565 - RNA, 19 nt, Homo sapiens
  misc_RNA (1)...(19): siRNA sense strand
ccacaugcucacccacuug

SEQ ID NO: 964566 - RNA, 19 nt, Homo sapiens
  misc_RNA (1)...(19): siRNA sense strand
caaguucacacagaucuca

SEQ ID NO: 964567 - RNA, 19 nt, Homo sapiens
  misc_RNA (1)...(19): siRNA sense strand
gucaaagucagaugccaaa

SEQ ID NO: 964568 - RNA, 19 nt, Homo sapiens
  misc_RNA (1)...(19): siRNA sense strand
gcugagagugugguucuug

SEQ ID NO: 964569 - RNA, 19 nt, Homo sapiens
  misc_RNA (1)...(19): siRNA sense strand
gaccuacgacuacucuaca

SEQ ID NO: 964570 - RNA, 19 nt, Homo sapiens
  misc_RNA (1)...(19): siRNA sense strand
gagugugguucuugagcau

SEQ ID NO: 964571 - RNA, 19 nt, Homo sapiens
  misc_RNA (1)...(19): siRNA sense strand
gauguacugggcuauguca

SEQ ID NO: 964572 - RNA, 19 nt, Homo sapiens
  misc_RNA (1)...(19): siRNA sense strand
agacgcugcuggagaagag

SEQ ID NO: 964573 - RNA, 19 nt, Homo sapiens
  misc_RNA (1)...(19): siRNA sense strand
ccucaugaccuacgacuac

SEQ ID NO: 964574 - RNA, 19 nt, Homo sapiens
  misc_RNA (1)...(19): siRNA sense strand
gagcaaguucacacagauc

SEQ ID NO: 964575 - RNA, 19 nt, Homo sapiens
  misc_RNA (1)...(19): siRNA sense strand
cacacuacccugucaaagu

SEQ ID NO: 964576 - RNA, 19 nt, Homo sapiens
  misc_RNA (1)...(19): siRNA sense strand
ccgaccagcugggcauguu

SEQ ID NO: 964577 - RNA, 19 nt, Homo sapiens
  misc_RNA (1)...(19): siRNA sense strand
gcuaugucacuccauggaa

SEQ ID NO: 964578 - RNA, 19 nt, Homo sapiens
  misc_RNA (1)...(19): siRNA sense strand
agacguggccgugagaugu

SEQ ID NO: 964579 - RNA, 19 nt, Homo sapiens
  misc_RNA (1)...(19): siRNA sense strand
guacauccagacacugaag

SEQ ID NO: 964580 - RNA, 19 nt, Homo sapiens
  misc_RNA (1)...(19): siRNA sense strand
gcuggagaagagucaguuu

SEQ ID NO: 964581 - RNA, 19 nt, Homo sapiens
  misc_RNA (1)...(19): siRNA sense strand
ugauuuccggaacgucuua

SEQ ID NO: 964582 - RNA, 19 nt, Homo sapiens
  misc_RNA (1)...(19): siRNA sense strand
cugcagcccuguucacacu

SEQ ID NO: 964583 - RNA, 19 nt, Homo sapiens
  misc_RNA (1)...(19): siRNA sense strand
gagacguggccgugagaug

SEQ ID NO: 964584 - RNA, 19 nt, Homo sapiens
  misc_RNA (1)...(19): siRNA sense strand
gcauguucacgcacaagga

SEQ ID NO: 964585 - RNA, 19 nt, Homo sapiens
  misc_RNA (1)...(19): siRNA sense strand
aaagaaccagcauuucgau

SEQ ID NO: 964586 - RNA, 19 nt, Homo sapiens
  misc_RNA (1)...(19): siRNA sense strand
gacguggccgugagauguu

SEQ ID NO: 964587 - RNA, 19 nt, Homo sapiens
  misc_RNA (1)...(19): siRNA sense strand
gagcacauauguagaauua

SEQ ID NO: 964588 - RNA, 19 nt, Homo sapiens
  misc_RNA (1)...(19): siRNA sense strand
ccaaagaacuggaauuuaa

SEQ ID NO: 964589 - RNA, 19 nt, Homo sapiens
  misc_RNA (1)...(19): siRNA sense strand
gaaauuaaguggacugaaa

SEQ ID NO: 964590 - RNA, 19 nt, Homo sapiens
  misc_RNA (1)...(19): siRNA sense strand
gaccaaggaugcucuauua

SEQ ID NO: 964591 - RNA, 19 nt, Homo sapiens
  misc_RNA (1)...(19): siRNA sense strand
gaacucagcaagaauauua

SEQ ID NO: 964592 - RNA, 19 nt, Homo sapiens
  misc_RNA (1)...(19): siRNA sense strand
gcaaagacacaaaucauua

SEQ ID NO: 964593 - RNA, 19 nt, Homo sapiens
  misc_RNA (1)...(19): siRNA sense strand
gaaacuaacuucaacaaag

SEQ ID NO: 964594 - RNA, 19 nt, Homo sapiens
  misc_RNA (1)...(19): siRNA sense strand
gaaaguaaaugaagcaaag

SEQ ID NO: 964595 - RNA, 19 nt, Homo sapiens
  misc_RNA (1)...(19): siRNA sense strand
caaagaugcucaugaagaa

SEQ ID NO: 964596 - RNA, 19 nt, Homo sapiens
  misc_RNA (1)...(19): siRNA sense strand
ugacagaauuugaagcuua

SEQ ID NO: 964597 - RNA, 19 nt, Homo sapiens
  misc_RNA (1)...(19): siRNA sense strand
gcccaugacuuagaaauua

SEQ ID NO: 964598 - RNA, 19 nt, Homo sapiens
  misc_RNA (1)...(19): siRNA sense strand
gcucagaacucaaccauca

SEQ ID NO: 964599 - RNA, 19 nt, Homo sapiens
  misc_RNA (1)...(19): siRNA sense strand
gaaagagaccagaucauaa

SEQ ID NO: 964600 - RNA, 19 nt, Homo sapiens
  misc_RNA (1)...(19): siRNA sense strand
gcaagaauauuaugaaagg

SEQ ID NO: 964601 - RNA, 19 nt, Homo sapiens
  misc_RNA (1)...(19): siRNA sense strand
aaaggaagcugaucuuaga

SEQ ID NO: 964602 - RNA, 19 nt, Homo sapiens
  misc_RNA (1)...(19): siRNA sense strand
ccucaaagcuagucauauu

SEQ ID NO: 964603 - RNA, 19 nt, Homo sapiens
  misc_RNA (1)...(19): siRNA sense strand
gagagucaaugagagauua

SEQ ID NO: 964604 - RNA, 19 nt, Homo sapiens
  misc_RNA (1)...(19): siRNA sense strand
acaaagaaguggaaaguga

SEQ ID NO: 964605 - RNA, 19 nt, Homo sapiens
  misc_RNA (1)...(19): siRNA sense strand
caaggaugcucuauuaaau

SEQ ID NO: 964606 - RNA, 19 nt, Homo sapiens
  misc_RNA (1)...(19): siRNA sense strand
gauaagaagucagcaaugu

SEQ ID NO: 964607 - RNA, 19 nt, Homo sapiens
  misc_RNA (1)...(19): siRNA sense strand
guugaaagaucgagagaaa

SEQ ID NO: 964608 - RNA, 19 nt, Homo sapiens
  misc_RNA (1)...(19): siRNA sense strand
gaaggcaaguugaauaaag

SEQ ID NO: 964609 - RNA, 19 nt, Homo sapiens
  misc_RNA (1)...(19): siRNA sense strand
gagaccagaucauaaagaa

SEQ ID NO: 964610 - RNA, 19 nt, Homo sapiens
  misc_RNA (1)...(19): siRNA sense strand
gcacagaguugaggacaug

SEQ ID NO: 964611 - RNA, 19 nt, Homo sapiens
  misc_RNA (1)...(19): siRNA sense strand
aaagagaacucagcaagaa

SEQ ID NO: 964612 - RNA, 19 nt, Homo sapiens
  misc_RNA (1)...(19): siRNA sense strand
gagcuugacuugacuaaag

SEQ ID NO: 964613 - RNA, 19 nt, Homo sapiens
  misc_RNA (1)...(19): siRNA sense strand
gaacggaagaaacuaauug

SEQ ID NO: 964614 - RNA, 19 nt, Homo sapiens
  misc_RNA (1)...(19): siRNA sense strand
ggaauuagagagaagcaua

SEQ ID NO: 964615 - RNA, 19 nt, Homo sapiens
  misc_RNA (1)...(19): siRNA sense strand
aggaaaggcuucagaauga

SEQ ID NO: 964616 - RNA, 19 nt, Homo sapiens
  misc_RNA (1)...(19): siRNA sense strand
ggagaaauggcccuauuaa

SEQ ID NO: 964617 - RNA, 19 nt, Homo sapiens
  misc_RNA (1)...(19): siRNA sense strand
ggaugaagcuggaagucuu

SEQ ID NO: 964618 - RNA, 19 nt, Homo sapiens
  misc_RNA (1)...(19): siRNA sense strand
ggaagaacaacauaacaaa

SEQ ID NO: 964619 - RNA, 19 nt, Homo sapiens
  misc_RNA (1)...(19): siRNA sense strand
caaaugacccaggaaguua

SEQ ID NO: 964620 - RNA, 19 nt, Homo sapiens
  misc_RNA (1)...(19): siRNA sense strand
ccucaaagaugcucaugaa

SEQ ID NO: 964621 - RNA, 19 nt, Homo sapiens
  misc_RNA (1)...(19): siRNA sense strand
gcagaaggacuuauugcua

SEQ ID NO: 964622 - RNA, 19 nt, Homo sapiens
  misc_RNA (1)...(19): siRNA sense strand
gaagacaaguugaauacag

SEQ ID NO: 964623 - RNA, 19 nt, Homo sapiens
  misc_RNA (1)...(19): siRNA sense strand
gcuagcagcugccagagaa

SEQ ID NO: 964624 - RNA, 19 nt, Homo sapiens
  misc_RNA (1)...(19): siRNA sense strand
gagauuagaaggaaauuug

SEQ ID NO: 964625 - RNA, 19 nt, Homo sapiens
  misc_RNA (1)...(19): siRNA sense strand
gaaauggcccuauuaagca

SEQ ID NO: 964626 - RNA, 19 nt, Homo sapiens
  misc_RNA (1)...(19): siRNA sense strand
ggaggugacucaauuaaac

SEQ ID NO: 964627 - RNA, 19 nt, Homo sapiens
  misc_RNA (1)...(19): siRNA sense strand
gcauaaucaucaucaagaa

SEQ ID NO: 964628 - RNA, 19 nt, Homo sapiens
  misc_RNA (1)...(19): siRNA sense strand
aacgugagcuugauacuuu

SEQ ID NO: 964629 - RNA, 19 nt, Homo sapiens
  misc_RNA (1)...(19): siRNA sense strand
ucacaucucugaauuggau

SEQ ID NO: 964630 - RNA, 19 nt, Homo sapiens
  misc_RNA (1)...(19): siRNA sense strand
gaacucaaccaucaacaug

SEQ ID NO: 964631 - RNA, 19 nt, Homo sapiens
  misc_RNA (1)...(19): siRNA sense strand
uaaaggaaguacuggaaga

SEQ ID NO: 964632 - RNA, 19 nt, Homo sapiens
  misc_RNA (1)...(19): siRNA sense strand
uaaacgaggcccauucuaa

SEQ ID NO: 964633 - RNA, 19 nt, Homo sapiens
  misc_RNA (1)...(19): siRNA sense strand
gagcuagaccuuagaagaa

SEQ ID NO: 964634 - RNA, 19 nt, Homo sapiens
  misc_RNA (1)...(19): siRNA sense strand
ccaggaaguuacaauuaaa

SEQ ID NO: 964635 - RNA, 19 nt, Homo sapiens
  misc_RNA (1)...(19): siRNA sense strand
gcaacagcaugaagaaaca

SEQ ID NO: 964636 - RNA, 19 nt, Homo sapiens
  misc_RNA (1)...(19): siRNA sense strand
caagaggaauuaagacaca

SEQ ID NO: 964637 - RNA, 19 nt, Homo sapiens
  misc_RNA (1)...(19): siRNA sense strand
guaaggagcacauauguag

SEQ ID NO: 964638 - RNA, 19 nt, Homo sapiens
  misc_RNA (1)...(19): siRNA sense strand
gaacuggagaagaaaguaa

SEQ ID NO: 964639 - RNA, 19 nt, Homo sapiens
  misc_RNA (1)...(19): siRNA sense strand
uaauaagacuaacgagcua

SEQ ID NO: 964640 - RNA, 19 nt, Homo sapiens
  misc_RNA (1)...(19): siRNA sense strand
aagaggaggugacucaauu

SEQ ID NO: 964641 - RNA, 19 nt, Homo sapiens
  misc_RNA (1)...(19): siRNA sense strand
gaucuuguccucaaagcua

SEQ ID NO: 964642 - RNA, 19 nt, Homo sapiens
  misc_RNA (1)...(19): siRNA sense strand
cuaaagggcccaagacauu

SEQ ID NO: 964643 - RNA, 19 nt, Homo sapiens
  misc_RNA (1)...(19): siRNA sense strand
agaaagagaccagaucaua

SEQ ID NO: 964644 - RNA, 19 nt, Homo sapiens
  misc_RNA (1)...(19): siRNA sense strand
uaagugcccuaaccaaaga

SEQ ID NO: 964645 - RNA, 19 nt, Homo sapiens
  misc_RNA (1)...(19): siRNA sense strand
ucagcaaugucucaacuuu

SEQ ID NO: 964646 - RNA, 19 nt, Homo sapiens
  misc_RNA (1)...(19): siRNA sense strand
cacagugccucaguaaaua

SEQ ID NO: 964647 - RNA, 19 nt, Homo sapiens
  misc_RNA (1)...(19): siRNA sense strand
ggaauuagucaaucgagaa

SEQ ID NO: 964648 - RNA, 19 nt, Homo sapiens
  misc_RNA (1)...(19): siRNA sense strand
aaagagaccagaucauaaa

SEQ ID NO: 964649 - RNA, 19 nt, Homo sapiens
  misc_RNA (1)...(19): siRNA sense strand
caagaacgacagcggcuua

SEQ ID NO: 964650 - RNA, 19 nt, Homo sapiens
  misc_RNA (1)...(19): siRNA sense strand
ccaaggaugcucuauuaaa

SEQ ID NO: 964651 - RNA, 19 nt, Homo sapiens
  misc_RNA (1)...(19): siRNA sense strand
guaaauaaaggccaggaaa

SEQ ID NO: 964652 - RNA, 19 nt, Homo sapiens
  misc_RNA (1)...(19): siRNA sense strand
caagaguguucuaaacuuc

SEQ ID NO: 964653 - RNA, 19 nt, Homo sapiens
  misc_RNA (1)...(19): siRNA sense strand
gcagcaggcuuugacagaa

SEQ ID NO: 964654 - RNA, 19 nt, Homo sapiens
  misc_RNA (1)...(19): siRNA sense strand
gcaccuucaugagaauaua

SEQ ID NO: 964655 - RNA, 19 nt, Homo sapiens
  misc_RNA (1)...(19): siRNA sense strand
cccaggaaguuacaauuaa

SEQ ID NO: 964656 - RNA, 19 nt, Homo sapiens
  misc_RNA (1)...(19): siRNA sense strand
gggagaaauggcccuauua

SEQ ID NO: 964657 - RNA, 19 nt, Homo sapiens
  misc_RNA (1)...(19): siRNA sense strand
gaagagauuagaaggaaau

SEQ ID NO: 964658 - RNA, 19 nt, Homo sapiens
  misc_RNA (1)...(19): siRNA sense strand
gacagaauuugaagcuuau

SEQ ID NO: 964659 - RNA, 19 nt, Homo sapiens
  misc_RNA (1)...(19): siRNA sense strand
uacaagagcuauugaaguc

SEQ ID NO: 964660 - RNA, 19 nt, Homo sapiens
  misc_RNA (1)...(19): siRNA sense strand
uaacucaaguccuacuguu

SEQ ID NO: 964661 - RNA, 19 nt, Homo sapiens
  misc_RNA (1)...(19): siRNA sense strand
cuaacgagcuacucaagga

SEQ ID NO: 964662 - RNA, 19 nt, Homo sapiens
  misc_RNA (1)...(19): siRNA sense strand
gaauauaagugcccuaacc

SEQ ID NO: 964663 - RNA, 19 nt, Homo sapiens
  misc_RNA (1)...(19): siRNA sense strand
caacaaauucuugcugaaa

SEQ ID NO: 964664 - RNA, 19 nt, Homo sapiens
  misc_RNA (1)...(19): siRNA sense strand
gcacauguccuugcauuuc

SEQ ID NO: 964665 - RNA, 19 nt, Homo sapiens
  misc_RNA (1)...(19): siRNA sense strand
ggagcaacaucagcaaaga

SEQ ID NO: 964666 - RNA, 19 nt, Homo sapiens
  misc_RNA (1)...(19): siRNA sense strand
gacagcggcuuacgcaaga

SEQ ID NO: 964667 - RNA, 19 nt, Homo sapiens
  misc_RNA (1)...(19): siRNA sense strand
cagaggaacuacacagaau

SEQ ID NO: 964668 - RNA, 19 nt, Homo sapiens
  misc_RNA (1)...(19): siRNA sense strand
gaucacagugccucaguaa

SEQ ID NO: 964669 - RNA, 19 nt, Homo sapiens
  misc_RNA (1)...(19): siRNA sense strand
ggagauacaagagcuauug

SEQ ID NO: 964670 - RNA, 19 nt, Homo sapiens
  misc_RNA (1)...(19): siRNA sense strand
guguuuaacucaaguccua

SEQ ID NO: 964671 - RNA, 19 nt, Homo sapiens
  misc_RNA (1)...(19): siRNA sense strand
gaauacgaagugaaucuaa

SEQ ID NO: 964672 - RNA, 19 nt, Homo sapiens
  misc_RNA (1)...(19): siRNA sense strand
ucaaagaugcucaugaaga

SEQ ID NO: 964673 - RNA, 19 nt, Homo sapiens
  misc_RNA (1)...(19): siRNA sense strand
gcacaaagaaguggaaagu

SEQ ID NO: 964674 - RNA, 19 nt, Homo sapiens
  misc_RNA (1)...(19): siRNA sense strand
ggagcuagaccuuagaaga

SEQ ID NO: 964675 - RNA, 19 nt, Homo sapiens
  misc_RNA (1)...(19): siRNA sense strand
gaccaugucuagagaaguc

SEQ ID NO: 964676 - RNA, 19 nt, Homo sapiens
  misc_RNA (1)...(19): siRNA sense strand
cagaggagcuagaccuuag

SEQ ID NO: 964677 - RNA, 19 nt, Homo sapiens
  misc_RNA (1)...(19): siRNA sense strand
gaauacagccaaucaagag

SEQ ID NO: 964678 - RNA, 19 nt, Homo sapiens
  misc_RNA (1)...(19): siRNA sense strand
gcagaggaacuacacagaa

SEQ ID NO: 964679 - RNA, 19 nt, Homo sapiens
  misc_RNA (1)...(19): siRNA sense strand
ggagaagaaaguaaaugaa

SEQ ID NO: 964680 - RNA, 19 nt, Homo sapiens
  misc_RNA (1)...(19): siRNA sense strand
cagaagauauacagaugau

SEQ ID NO: 964681 - RNA, 19 nt, Homo sapiens
  misc_RNA (1)...(19): siRNA sense strand
aacaauugcugccaugaaa

SEQ ID NO: 964682 - RNA, 19 nt, Homo sapiens
  misc_RNA (1)...(19): siRNA sense strand
agaaugagcuugacuugac

SEQ ID NO: 964683 - RNA, 19 nt, Homo sapiens
  misc_RNA (1)...(19): siRNA sense strand
gaagaaaguaaaugaagca

SEQ ID NO: 964684 - RNA, 19 nt, Homo sapiens
  misc_RNA (1)...(19): siRNA sense strand
gagaauauaagugcccuaa

SEQ ID NO: 964685 - RNA, 19 nt, Homo sapiens
  misc_RNA (1)...(19): siRNA sense strand
cagauaagguugcaugaac

SEQ ID NO: 964686 - RNA, 19 nt, Homo sapiens
  misc_RNA (1)...(19): siRNA sense strand
gaagugaaucuaaccaaca

SEQ ID NO: 964687 - RNA, 19 nt, Homo sapiens
  misc_RNA (1)...(19): siRNA sense strand
caacaucgcccacaucuuc

SEQ ID NO: 964688 - RNA, 19 nt, Homo sapiens
  misc_RNA (1)...(19): siRNA sense strand
ggaauacugugaguucaug

SEQ ID NO: 964689 - RNA, 19 nt, Homo sapiens
  misc_RNA (1)...(19): siRNA sense strand
gcacauggacugcgagauc

SEQ ID NO: 964690 - RNA, 19 nt, Homo sapiens
  misc_RNA (1)...(19): siRNA sense strand
ucuguggucuuucaaauga

SEQ ID NO: 964691 - RNA, 19 nt, Homo sapiens
  misc_RNA (1)...(19): siRNA sense strand
gcacggcuauuuccaugag

SEQ ID NO: 964692 - RNA, 19 nt, Homo sapiens
  misc_RNA (1)...(19): siRNA sense strand
ugaagcacuuugccuuuga

SEQ ID NO: 964693 - RNA, 19 nt, Homo sapiens
  misc_RNA (1)...(19): siRNA sense strand
gugaagcacuuugccuuug

SEQ ID NO: 964694 - RNA, 19 nt, Homo sapiens
  misc_RNA (1)...(19): siRNA sense strand
gcaagcgcaucgccuccaa

SEQ ID NO: 964695 - RNA, 19 nt, Homo sapiens
  misc_RNA (1)...(19): siRNA sense strand
gcugcuguguccagaauga

SEQ ID NO: 964696 - RNA, 19 nt, Homo sapiens
  misc_RNA (1)...(19): siRNA sense strand
ccucgugucuguggucuuu

SEQ ID NO: 964697 - RNA, 19 nt, Homo sapiens
  misc_RNA (1)...(19): siRNA sense strand
gaagcacuuugccuuugau

SEQ ID NO: 964698 - RNA, 19 nt, Homo sapiens
  misc_RNA (1)...(19): siRNA sense strand
ggaggaggauguggucgau

SEQ ID NO: 964699 - RNA, 19 nt, Homo sapiens
  misc_RNA (1)...(19): siRNA sense strand
ggugaagcacuuugccuuu

SEQ ID NO: 964700 - RNA, 19 nt, Homo sapiens
  misc_RNA (1)...(19): siRNA sense strand
cggagacuuuggccacuuu

SEQ ID NO: 964701 - RNA, 19 nt, Homo sapiens
  misc_RNA (1)...(19): siRNA sense strand
aaaucccucugaaggagua

SEQ ID NO: 964702 - RNA, 19 nt, Homo sapiens
  misc_RNA (1)...(19): siRNA sense strand
gcaccaagggcagcuguga

SEQ ID NO: 964703 - RNA, 19 nt, Homo sapiens
  misc_RNA (1)...(19): siRNA sense strand
ggaacaaagguguguacga

SEQ ID NO: 964704 - RNA, 19 nt, Homo sapiens
  misc_RNA (1)...(19): siRNA sense strand
ccuccaaggugaagcacuu

SEQ ID NO: 964705 - RNA, 19 nt, Homo sapiens
  misc_RNA (1)...(19): siRNA sense strand
ugagggaccuggagaagcu

SEQ ID NO: 964706 - RNA, 19 nt, Homo sapiens
  misc_RNA (1)...(19): siRNA sense strand
ugagcuccaugccugauga

SEQ ID NO: 964707 - RNA, 19 nt, Homo sapiens
  misc_RNA (1)...(19): siRNA sense strand
gcucccaggugcacugcuu

SEQ ID NO: 964708 - RNA, 19 nt, Homo sapiens
  misc_RNA (1)...(19): siRNA sense strand
ggacugcucggagacuuug

SEQ ID NO: 964709 - RNA, 19 nt, Homo sapiens
  misc_RNA (1)...(19): siRNA sense strand
ccucgccagugccaucuuu

SEQ ID NO: 964710 - RNA, 19 nt, Homo sapiens
  misc_RNA (1)...(19): siRNA sense strand
gcuggugauuugcacguau

SEQ ID NO: 964711 - RNA, 19 nt, Homo sapiens
  misc_RNA (1)...(19): siRNA sense strand
ggaaggacgggcagaucga

SEQ ID NO: 964712 - RNA, 19 nt, Homo sapiens
  misc_RNA (1)...(19): siRNA sense strand
caugccugaugaugucuuu

SEQ ID NO: 964713 - RNA, 19 nt, Homo sapiens
  misc_RNA (1)...(19): siRNA sense strand
uguacgagagcgugaagua

SEQ ID NO: 964714 - RNA, 19 nt, Homo sapiens
  misc_RNA (1)...(19): siRNA sense strand
ugucuguggucuuucaaau

SEQ ID NO: 964715 - RNA, 19 nt, Homo sapiens
  misc_RNA (1)...(19): siRNA sense strand
guucaugcacggcuauuuc

SEQ ID NO: 964716 - RNA, 19 nt, Homo sapiens
  misc_RNA (1)...(19): siRNA sense strand
cacauggacugcgagauca

SEQ ID NO: 964717 - RNA, 19 nt, Homo sapiens
  misc_RNA (1)...(19): siRNA sense strand
gagaucaccacccgggaau

SEQ ID NO: 964718 - RNA, 19 nt, Homo sapiens
  misc_RNA (1)...(19): siRNA sense strand
gacaacaucgcccacaucu

SEQ ID NO: 964719 - RNA, 19 nt, Homo sapiens
  misc_RNA (1)...(19): siRNA sense strand
ccagcucgauugaccugau

SEQ ID NO: 964720 - RNA, 19 nt, Homo sapiens
  misc_RNA (1)...(19): siRNA sense strand
acccugaggucccagauca

SEQ ID NO: 964721 - RNA, 19 nt, Homo sapiens
  misc_RNA (1)...(19): siRNA sense strand
gaucaccacccgggaauac

SEQ ID NO: 964722 - RNA, 19 nt, Homo sapiens
  misc_RNA (1)...(19): siRNA sense strand
aagggcagcugugagauca

SEQ ID NO: 964723 - RNA, 19 nt, Homo sapiens
  misc_RNA (1)...(19): siRNA sense strand
gggugcaaaucccucugaa

SEQ ID NO: 964724 - RNA, 19 nt, Homo sapiens
  misc_RNA (1)...(19): siRNA sense strand
ugcuguggcuguacaucua

SEQ ID NO: 964725 - RNA, 19 nt, Homo sapiens
  misc_RNA (1)...(19): siRNA sense strand
ccaucgugcucuuccuguu

SEQ ID NO: 964726 - RNA, 19 nt, Homo sapiens
  misc_RNA (1)...(19): siRNA sense strand
gcuccaugccugaugaugu

SEQ ID NO: 964727 - RNA, 19 nt, Homo sapiens
  misc_RNA (1)...(19): siRNA sense strand
ggucccagaucaguucuac

SEQ ID NO: 964728 - RNA, 19 nt, Homo sapiens
  misc_RNA (1)...(19): siRNA sense strand
cauccucaguggcaucaca

SEQ ID NO: 964729 - RNA, 19 nt, Homo sapiens
  misc_RNA (1)...(19): siRNA sense strand
caagggcagcugugagauc

SEQ ID NO: 964730 - RNA, 19 nt, Homo sapiens
  misc_RNA (1)...(19): siRNA sense strand
cgacaacaucgcccacauc

SEQ ID NO: 964731 - RNA, 19 nt, Homo sapiens
  misc_RNA (1)...(19): siRNA sense strand
caucuucggcuuccucagu

SEQ ID NO: 964732 - RNA, 19 nt, Homo sapiens
  misc_RNA (1)...(19): siRNA sense strand
gaccuucguccaugucauc

SEQ ID NO: 964733 - RNA, 19 nt, Homo sapiens
  misc_RNA (1)...(19): siRNA sense strand
gugccaucuuucucccaua

SEQ ID NO: 964734 - RNA, 19 nt, Homo sapiens
  misc_RNA (1)...(19): siRNA sense strand
caucgcacccgugggcuuu

SEQ ID NO: 964735 - RNA, 19 nt, Homo sapiens
  misc_RNA (1)...(19): siRNA sense strand
ggcccuacuucaccuacug

SEQ ID NO: 964736 - RNA, 19 nt, Homo sapiens
  misc_RNA (1)...(19): siRNA sense strand
cuggcugucucucuuccua

SEQ ID NO: 964737 - RNA, 19 nt, Homo sapiens
  misc_RNA (1)...(19): siRNA sense strand
ugaggucccagaucaguuc

SEQ ID NO: 964738 - RNA, 19 nt, Homo sapiens
  misc_RNA (1)...(19): siRNA sense strand
cuucguccaugucaucauc

SEQ ID NO: 964739 - RNA, 19 nt, Homo sapiens
  misc_RNA (1)...(19): siRNA sense strand
gggaauacugugaguucau

SEQ ID NO: 964740 - RNA, 19 nt, Homo sapiens
  misc_RNA (1)...(19): siRNA sense strand
gcacaaacauggagagaua

SEQ ID NO: 964741 - RNA, 19 nt, Homo sapiens
  misc_RNA (1)...(19): siRNA sense strand
gaacagaaccuauaauugu

SEQ ID NO: 964742 - RNA, 19 nt, Homo sapiens
  misc_RNA (1)...(19): siRNA sense strand
gaaugaagcugcugaugaa

SEQ ID NO: 964743 - RNA, 19 nt, Homo sapiens
  misc_RNA (1)...(19): siRNA sense strand
cgacuacacuguucacuua

SEQ ID NO: 964744 - RNA, 19 nt, Homo sapiens
  misc_RNA (1)...(19): siRNA sense strand
gauguuagcuuucuugaug

SEQ ID NO: 964745 - RNA, 19 nt, Homo sapiens
  misc_RNA (1)...(19): siRNA sense strand
gaacuaugaucgaguaaug

SEQ ID NO: 964746 - RNA, 19 nt, Homo sapiens
  misc_RNA (1)...(19): siRNA sense strand
gaggacaggugaacuauga

SEQ ID NO: 964747 - RNA, 19 nt, Homo sapiens
  misc_RNA (1)...(19): siRNA sense strand
gcauaucgauguuagcuuu

SEQ ID NO: 964748 - RNA, 19 nt, Homo sapiens
  misc_RNA (1)...(19): siRNA sense strand
ggaaguggaaucuaucuua

SEQ ID NO: 964749 - RNA, 19 nt, Homo sapiens
  misc_RNA (1)...(19): siRNA sense strand
ggaaguaauucgaacagaa

SEQ ID NO: 964750 - RNA, 19 nt, Homo sapiens
  misc_RNA (1)...(19): siRNA sense strand
uagcauaacuucuaucaga

SEQ ID NO: 964751 - RNA, 19 nt, Homo sapiens
  misc_RNA (1)...(19): siRNA sense strand
gagaaggacugccuguuug

SEQ ID NO: 964752 - RNA, 19 nt, Homo sapiens
  misc_RNA (1)...(19): siRNA sense strand
gacauuaacuguugcuuau

SEQ ID NO: 964753 - RNA, 19 nt, Homo sapiens
  misc_RNA (1)...(19): siRNA sense strand
ugaagcugcugaugaaaua

SEQ ID NO: 964754 - RNA, 19 nt, Homo sapiens
  misc_RNA (1)...(19): siRNA sense strand
guugaugucuuucagauuu

SEQ ID NO: 964755 - RNA, 19 nt, Homo sapiens
  misc_RNA (1)...(19): siRNA sense strand
ggaggaagauucugaaggu

SEQ ID NO: 964756 - RNA, 19 nt, Homo sapiens
  misc_RNA (1)...(19): siRNA sense strand
aaagaacuaugaucgagua

SEQ ID NO: 964757 - RNA, 19 nt, Homo sapiens
  misc_RNA (1)...(19): siRNA sense strand
gcaauuaaaucgcacaaac

SEQ ID NO: 964758 - RNA, 19 nt, Homo sapiens
  misc_RNA (1)...(19): siRNA sense strand
aaagagauccuccgaguaa

SEQ ID NO: 964759 - RNA, 19 nt, Homo sapiens
  misc_RNA (1)...(19): siRNA sense strand
gcggaucccuguauuaaau

SEQ ID NO: 964760 - RNA, 19 nt, Homo sapiens
  misc_RNA (1)...(19): siRNA sense strand
gaaucaagacagaauagua

SEQ ID NO: 964761 - RNA, 19 nt, Homo sapiens
  misc_RNA (1)...(19): siRNA sense strand
gaaguggaaucuaucuuag

SEQ ID NO: 964762 - RNA, 19 nt, Homo sapiens
  misc_RNA (1)...(19): siRNA sense strand
ggaagcaccuuugcauuuc

SEQ ID NO: 964763 - RNA, 19 nt, Homo sapiens
  misc_RNA (1)...(19): siRNA sense strand
gaggaaugccuaacucuaa

SEQ ID NO: 964764 - RNA, 19 nt, Homo sapiens
  misc_RNA (1)...(19): siRNA sense strand
ugacaaugauuccgaagaa

SEQ ID NO: 964765 - RNA, 19 nt, Homo sapiens
  misc_RNA (1)...(19): siRNA sense strand
caucugaccugcacaaaca

SEQ ID NO: 964766 - RNA, 19 nt, Homo sapiens
  misc_RNA (1)...(19): siRNA sense strand
caaaauggcccuaugcuua

SEQ ID NO: 964767 - RNA, 19 nt, Homo sapiens
  misc_RNA (1)...(19): siRNA sense strand
ccacaucaguuccuucuuc

SEQ ID NO: 964768 - RNA, 19 nt, Homo sapiens
  misc_RNA (1)...(19): siRNA sense strand
ucaagaagcaaauggauaa

SEQ ID NO: 964769 - RNA, 19 nt, Homo sapiens
  misc_RNA (1)...(19): siRNA sense strand
caccauaucuggaaaucaa

SEQ ID NO: 964770 - RNA, 19 nt, Homo sapiens
  misc_RNA (1)...(19): siRNA sense strand
ccucagggcuuauugguau

SEQ ID NO: 964771 - RNA, 19 nt, Homo sapiens
  misc_RNA (1)...(19): siRNA sense strand
gcucaucccuuacugcaau

SEQ ID NO: 964772 - RNA, 19 nt, Homo sapiens
  misc_RNA (1)...(19): siRNA sense strand
aauccaaacugaaaucuga

SEQ ID NO: 964773 - RNA, 19 nt, Homo sapiens
  misc_RNA (1)...(19): siRNA sense strand
guauggaaguggaaucuau

SEQ ID NO: 964774 - RNA, 19 nt, Homo sapiens
  misc_RNA (1)...(19): siRNA sense strand
ggcaggaggcucucucuua

SEQ ID NO: 964775 - RNA, 19 nt, Homo sapiens
  misc_RNA (1)...(19): siRNA sense strand
gaagaauuauauggacuga

SEQ ID NO: 964776 - RNA, 19 nt, Homo sapiens
  misc_RNA (1)...(19): siRNA sense strand
guaaugaaagcacuggaua

SEQ ID NO: 964777 - RNA, 19 nt, Homo sapiens
  misc_RNA (1)...(19): siRNA sense strand
gcaggaggcucucucuuac

SEQ ID NO: 964778 - RNA, 19 nt, Homo sapiens
  misc_RNA (1)...(19): siRNA sense strand
auacauaugugucaaguuc

SEQ ID NO: 964779 - RNA, 19 nt, Homo sapiens
  misc_RNA (1)...(19): siRNA sense strand
aaacugagcuuuucaagga

SEQ ID NO: 964780 - RNA, 19 nt, Homo sapiens
  misc_RNA (1)...(19): siRNA sense strand
ucaaacugcuacugguuaa

SEQ ID NO: 964781 - RNA, 19 nt, Homo sapiens
  misc_RNA (1)...(19): siRNA sense strand
gcaaagccguaacuuaaaa

SEQ ID NO: 964782 - RNA, 19 nt, Homo sapiens
  misc_RNA (1)...(19): siRNA sense strand
ucaagcauaucauuugguu

SEQ ID NO: 964783 - RNA, 19 nt, Homo sapiens
  misc_RNA (1)...(19): siRNA sense strand
uuucauggcucacacauug

SEQ ID NO: 964784 - RNA, 19 nt, Homo sapiens
  misc_RNA (1)...(19): siRNA sense strand
gaaagcacuggauagcaua

SEQ ID NO: 964785 - RNA, 19 nt, Homo sapiens
  misc_RNA (1)...(19): siRNA sense strand
gaccaugucugcacacgau

SEQ ID NO: 964786 - RNA, 19 nt, Homo sapiens
  misc_RNA (1)...(19): siRNA sense strand
gaaucuaucuuaguccaau

SEQ ID NO: 964787 - RNA, 19 nt, Homo sapiens
  misc_RNA (1)...(19): siRNA sense strand
gcaauggguuauaucaagu

SEQ ID NO: 964788 - RNA, 19 nt, Homo sapiens
  misc_RNA (1)...(19): siRNA sense strand
gagcacaacacaaacuuga

SEQ ID NO: 964789 - RNA, 19 nt, Homo sapiens
  misc_RNA (1)...(19): siRNA sense strand
cugcaaagccguaacuuaa

SEQ ID NO: 964790 - RNA, 19 nt, Homo sapiens
  misc_RNA (1)...(19): siRNA sense strand
ucucuuaccucagggcuua

SEQ ID NO: 964791 - RNA, 19 nt, Homo sapiens
  misc_RNA (1)...(19): siRNA sense strand
gaugaagaugugcuaguua

SEQ ID NO: 964792 - RNA, 19 nt, Homo sapiens
  misc_RNA (1)...(19): siRNA sense strand
cuacuaguauccaugugua

SEQ ID NO: 964793 - RNA, 19 nt, Homo sapiens
  misc_RNA (1)...(19): siRNA sense strand
gagcucaggugguagaucu

SEQ ID NO: 964794 - RNA, 19 nt, Homo sapiens
  misc_RNA (1)...(19): siRNA sense strand
caauugaguuugcugaaca

SEQ ID NO: 964795 - RNA, 19 nt, Homo sapiens
  misc_RNA (1)...(19): siRNA sense strand
ugaaagcacuggauagcau

SEQ ID NO: 964796 - RNA, 19 nt, Homo sapiens
  misc_RNA (1)...(19): siRNA sense strand
gagccaauaccaguaauuu

SEQ ID NO: 964797 - RNA, 19 nt, Homo sapiens
  misc_RNA (1)...(19): siRNA sense strand
gaaggaggcauucacaaag

SEQ ID NO: 964798 - RNA, 19 nt, Homo sapiens
  misc_RNA (1)...(19): siRNA sense strand
gaagcaccuuugcauuuca

SEQ ID NO: 964799 - RNA, 19 nt, Homo sapiens
  misc_RNA (1)...(19): siRNA sense strand
gccaaagaauccaauuuua

SEQ ID NO: 964800 - RNA, 19 nt, Homo sapiens
  misc_RNA (1)...(19): siRNA sense strand
gccauauccuucuguggua

SEQ ID NO: 964801 - RNA, 19 nt, Homo sapiens
  misc_RNA (1)...(19): siRNA sense strand
ugacauuaacuguugcuua

SEQ ID NO: 964802 - RNA, 19 nt, Homo sapiens
  misc_RNA (1)...(19): siRNA sense strand
acacagcaguggaaacaga

SEQ ID NO: 964803 - RNA, 19 nt, Homo sapiens
  misc_RNA (1)...(19): siRNA sense strand
acucagggaugaacaagaa

SEQ ID NO: 964804 - RNA, 19 nt, Homo sapiens
  misc_RNA (1)...(19): siRNA sense strand
cuaaugauccucagauguu

SEQ ID NO: 964805 - RNA, 19 nt, Homo sapiens
  misc_RNA (1)...(19): siRNA sense strand
ugagaaggacugccuguuu

SEQ ID NO: 964806 - RNA, 19 nt, Homo sapiens
  misc_RNA (1)...(19): siRNA sense strand
ucucagaauggaagaauua

SEQ ID NO: 964807 - RNA, 19 nt, Homo sapiens
  misc_RNA (1)...(19): siRNA sense strand
caagacugaugaugugugu

SEQ ID NO: 964808 - RNA, 19 nt, Homo sapiens
  misc_RNA (1)...(19): siRNA sense strand
ccaguuaacaggcaauuga

SEQ ID NO: 964809 - RNA, 19 nt, Homo sapiens
  misc_RNA (1)...(19): siRNA sense strand
ugaaugaagcugcugauga

SEQ ID NO: 964810 - RNA, 19 nt, Homo sapiens
  misc_RNA (1)...(19): siRNA sense strand
gaacgggagcugugugugu

SEQ ID NO: 964811 - RNA, 19 nt, Homo sapiens
  misc_RNA (1)...(19): siRNA sense strand
gcaguuagagagauauaug

SEQ ID NO: 964812 - RNA, 19 nt, Homo sapiens
  misc_RNA (1)...(19): siRNA sense strand
gaagugaucaccucaucug

SEQ ID NO: 964813 - RNA, 19 nt, Homo sapiens
  misc_RNA (1)...(19): siRNA sense strand
ggacagcaaucccaauucc

SEQ ID NO: 964814 - RNA, 19 nt, Homo sapiens
  misc_RNA (1)...(19): siRNA sense strand
agaagcaaauggauaaaca

SEQ ID NO: 964815 - RNA, 19 nt, Homo sapiens
  misc_RNA (1)...(19): siRNA sense strand
aauauugugugguuuguga

SEQ ID NO: 964816 - RNA, 19 nt, Homo sapiens
  misc_RNA (1)...(19): siRNA sense strand
acuggaagcugauuuguca

SEQ ID NO: 964817 - RNA, 19 nt, Homo sapiens
  misc_RNA (1)...(19): siRNA sense strand
aacaggcaauugaaguuua

SEQ ID NO: 964818 - RNA, 19 nt, Homo sapiens
  misc_RNA (1)...(19): siRNA sense strand
aagcaaauccaaacugaaa

SEQ ID NO: 964819 - RNA, 19 nt, Homo sapiens
  misc_RNA (1)...(19): siRNA sense strand
ugaugaagaugugcuaguu

SEQ ID NO: 964820 - RNA, 19 nt, Homo sapiens
  misc_RNA (1)...(19): siRNA sense strand
cuucucagcuugcuccaaa

SEQ ID NO: 964821 - RNA, 19 nt, Homo sapiens
  misc_RNA (1)...(19): siRNA sense strand
gcacaagcacccacaacug

SEQ ID NO: 964822 - RNA, 19 nt, Homo sapiens
  misc_RNA (1)...(19): siRNA sense strand
caaagagauccuccgagua

SEQ ID NO: 964823 - RNA, 19 nt, Homo sapiens
  misc_RNA (1)...(19): siRNA sense strand
agugggagaugcaaauauu

SEQ ID NO: 964824 - RNA, 19 nt, Homo sapiens
  misc_RNA (1)...(19): siRNA sense strand
gcagcuccauggugcaaug

SEQ ID NO: 964825 - RNA, 19 nt, Homo sapiens
  misc_RNA (1)...(19): siRNA sense strand
uggaagcaccuuugcauuu

SEQ ID NO: 964826 - RNA, 19 nt, Homo sapiens
  misc_RNA (1)...(19): siRNA sense strand
cagcggaucccuguauuaa

SEQ ID NO: 964827 - RNA, 19 nt, Homo sapiens
  misc_RNA (1)...(19): siRNA sense strand
gagcgaauucagaaggaua

SEQ ID NO: 964828 - RNA, 19 nt, Homo sapiens
  misc_RNA (1)...(19): siRNA sense strand
gcuaugacagcaauuaaau

SEQ ID NO: 964829 - RNA, 19 nt, Homo sapiens
  misc_RNA (1)...(19): siRNA sense strand
uaacuguugcuuauccaua

SEQ ID NO: 964830 - RNA, 19 nt, Homo sapiens
  misc_RNA (1)...(19): siRNA sense strand
ccacauguguuucaaaaug

SEQ ID NO: 964831 - RNA, 19 nt, Homo sapiens
  misc_RNA (1)...(19): siRNA sense strand
gcaaauccaaacugaaauc

SEQ ID NO: 964832 - RNA, 19 nt, Homo sapiens
  misc_RNA (1)...(19): siRNA sense strand
cgaacagaaccuauaauug

SEQ ID NO: 964833 - RNA, 19 nt, Homo sapiens
  misc_RNA (1)...(19): siRNA sense strand
ggaggaaucaagacagaau

SEQ ID NO: 964834 - RNA, 19 nt, Homo sapiens
  misc_RNA (1)...(19): siRNA sense strand
cauaucauuugguuacuca

SEQ ID NO: 964835 - RNA, 19 nt, Homo sapiens
  misc_RNA (1)...(19): siRNA sense strand
ggcaagagcgaauucagaa

SEQ ID NO: 964836 - RNA, 19 nt, Homo sapiens
  misc_RNA (1)...(19): siRNA sense strand
uaacaggcaauugaaguuu

SEQ ID NO: 964837 - RNA, 19 nt, Homo sapiens
  misc_RNA (1)...(19): siRNA sense strand
gcacaacacaaacuugaag

SEQ ID NO: 964838 - RNA, 19 nt, Homo sapiens
  misc_RNA (1)...(19): siRNA sense strand
caguuucucucagggaaua

SEQ ID NO: 964839 - RNA, 19 nt, Homo sapiens
  misc_RNA (1)...(19): siRNA sense strand
gaaaucaagaagcaaaugg

SEQ ID NO: 964840 - RNA, 19 nt, Homo sapiens
  misc_RNA (1)...(19): siRNA sense strand
ucaagugccugcaauguga

SEQ ID NO: 964841 - RNA, 19 nt, Homo sapiens
  misc_RNA (1)...(19): siRNA sense strand
ggagucagguggugugaug

SEQ ID NO: 964842 - RNA, 19 nt, Homo sapiens
  misc_RNA (1)...(19): siRNA sense strand
gagcuuugcugacccuuca

SEQ ID NO: 964843 - RNA, 19 nt, Homo sapiens
  misc_RNA (1)...(19): siRNA sense strand
ucacgcagcucaguuccua

SEQ ID NO: 964844 - RNA, 19 nt, Homo sapiens
  misc_RNA (1)...(19): siRNA sense strand
augaagaggugaagccaua

SEQ ID NO: 964845 - RNA, 19 nt, Homo sapiens
  misc_RNA (1)...(19): siRNA sense strand
aaacacagccgcacucaca

SEQ ID NO: 964846 - RNA, 19 nt, Homo sapiens
  misc_RNA (1)...(19): siRNA sense strand
guaccaagacauuuccaaa

SEQ ID NO: 964847 - RNA, 19 nt, Homo sapiens
  misc_RNA (1)...(19): siRNA sense strand
ugaggaggcugacgagaag

SEQ ID NO: 964848 - RNA, 19 nt, Homo sapiens
  misc_RNA (1)...(19): siRNA sense strand
acaagugccuguccuguac

SEQ ID NO: 964849 - RNA, 19 nt, Homo sapiens
  misc_RNA (1)...(19): siRNA sense strand
cauguggaaugccaagaug

SEQ ID NO: 964850 - RNA, 19 nt, Homo sapiens
  misc_RNA (1)...(19): siRNA sense strand
gugaggaggcugacgagaa

SEQ ID NO: 964851 - RNA, 19 nt, Homo sapiens
  misc_RNA (1)...(19): siRNA sense strand
gagcggacccaucgaagca

SEQ ID NO: 964852 - RNA, 19 nt, Homo sapiens
  misc_RNA (1)...(19): siRNA sense strand
ucaaggaccuccgcaacca

SEQ ID NO: 964853 - RNA, 19 nt, Homo sapiens
  misc_RNA (1)...(19): siRNA sense strand
gcaagcaccggcguacuca

SEQ ID NO: 964854 - RNA, 19 nt, Homo sapiens
  misc_RNA (1)...(19): siRNA sense strand
ccugguggcuuugcuagga

SEQ ID NO: 964855 - RNA, 19 nt, Homo sapiens
  misc_RNA (1)...(19): siRNA sense strand
gcaaacacagccgcacuca

SEQ ID NO: 964856 - RNA, 19 nt, Homo sapiens
  misc_RNA (1)...(19): siRNA sense strand
ucuccaagcucaagaucca

SEQ ID NO: 964857 - RNA, 19 nt, Homo sapiens
  misc_RNA (1)...(19): siRNA sense strand
gugccagccucacgaagca

SEQ ID NO: 964858 - RNA, 19 nt, Homo sapiens
  misc_RNA (1)...(19): siRNA sense strand
uaacgcaugugggaaaucc

SEQ ID NO: 964859 - RNA, 19 nt, Homo sapiens
  misc_RNA (1)...(19): siRNA sense strand
gcaugugggaaauccuuug

SEQ ID NO: 964860 - RNA, 19 nt, Homo sapiens
  misc_RNA (1)...(19): siRNA sense strand
cgacugcggcaagagcuuu

SEQ ID NO: 964861 - RNA, 19 nt, Homo sapiens
  misc_RNA (1)...(19): siRNA sense strand
ggacccaucgaagcaguga

SEQ ID NO: 964862 - RNA, 19 nt, Homo sapiens
  misc_RNA (1)...(19): siRNA sense strand
gaagccaaagccagagaca

SEQ ID NO: 964863 - RNA, 19 nt, Homo sapiens
  misc_RNA (1)...(19): siRNA sense strand
agccaaagccagagacaga

SEQ ID NO: 964864 - RNA, 19 nt, Homo sapiens
  misc_RNA (1)...(19): siRNA sense strand
agccagagacagaagcuaa

SEQ ID NO: 964865 - RNA, 19 nt, Homo sapiens
  misc_RNA (1)...(19): siRNA sense strand
gccagccucacgaagcaua

SEQ ID NO: 964866 - RNA, 19 nt, Homo sapiens
  misc_RNA (1)...(19): siRNA sense strand
ccauaccacugcgagaagu

SEQ ID NO: 964867 - RNA, 19 nt, Homo sapiens
  misc_RNA (1)...(19): siRNA sense strand
gacgguggagcauguggaa

SEQ ID NO: 964868 - RNA, 19 nt, Homo sapiens
  misc_RNA (1)...(19): siRNA sense strand
guucaagugccugcaaugu

SEQ ID NO: 964869 - RNA, 19 nt, Homo sapiens
  misc_RNA (1)...(19): siRNA sense strand
gaagaaagguggcaaauac

SEQ ID NO: 964870 - RNA, 19 nt, Homo sapiens
  misc_RNA (1)...(19): siRNA sense strand
gaagaacacccuccucauu

SEQ ID NO: 964871 - RNA, 19 nt, Homo sapiens
  misc_RNA (1)...(19): siRNA sense strand
caaauacaguguucaguuc

SEQ ID NO: 964872 - RNA, 19 nt, Homo sapiens
  misc_RNA (1)...(19): siRNA sense strand
gcaaauacaguguucaguu

SEQ ID NO: 964873 - RNA, 19 nt, Homo sapiens
  misc_RNA (1)...(19): siRNA sense strand
gaccaucagugccuuuauu

SEQ ID NO: 964874 - RNA, 19 nt, Homo sapiens
  misc_RNA (1)...(19): siRNA sense strand
guugggaaaucaucucuaa

SEQ ID NO: 964875 - RNA, 19 nt, Homo sapiens
  misc_RNA (1)...(19): siRNA sense strand
ucacaacuaugacaucuca

SEQ ID NO: 964876 - RNA, 19 nt, Homo sapiens
  misc_RNA (1)...(19): siRNA sense strand
acacacaccuguacucuuc

SEQ ID NO: 964877 - RNA, 19 nt, Homo sapiens
  misc_RNA (1)...(19): siRNA sense strand
cgacguguaugguguauuc

SEQ ID NO: 964878 - RNA, 19 nt, Homo sapiens
  misc_RNA (1)...(19): siRNA sense strand
gggaauuccucuaugacaa

SEQ ID NO: 964879 - RNA, 19 nt, Homo sapiens
  misc_RNA (1)...(19): siRNA sense strand
uaugguguauuccaguuua

SEQ ID NO: 964880 - RNA, 19 nt, Homo sapiens
  misc_RNA (1)...(19): siRNA sense strand
gaagaagaaagguggcaaa

SEQ ID NO: 964881 - RNA, 19 nt, Homo sapiens
  misc_RNA (1)...(19): siRNA sense strand
gggaaaucaucucuaaauc

SEQ ID NO: 964882 - RNA, 19 nt, Homo sapiens
  misc_RNA (1)...(19): siRNA sense strand
gcucucaaauggcaaaugg

SEQ ID NO: 964883 - RNA, 19 nt, Homo sapiens
  misc_RNA (1)...(19): siRNA sense strand
caaguugcccgacguguau

SEQ ID NO: 964884 - RNA, 19 nt, Homo sapiens
  misc_RNA (1)...(19): siRNA sense strand
ggaauuccucuaugacaau

SEQ ID NO: 964885 - RNA, 19 nt, Homo sapiens
  misc_RNA (1)...(19): siRNA sense strand
gacaggcaacuaugaacua

SEQ ID NO: 964886 - RNA, 19 nt, Homo sapiens
  misc_RNA (1)...(19): siRNA sense strand
ccagagguauucccagaca

SEQ ID NO: 964887 - RNA, 19 nt, Homo sapiens
  misc_RNA (1)...(19): siRNA sense strand
cgacauuggugacccucuu

SEQ ID NO: 964888 - RNA, 19 nt, Homo sapiens
  misc_RNA (1)...(19): siRNA sense strand
acauucagcuggaguuugu

SEQ ID NO: 964889 - RNA, 19 nt, Homo sapiens
  misc_RNA (1)...(19): siRNA sense strand
acaagccuaucacccagua

SEQ ID NO: 964890 - RNA, 19 nt, Homo sapiens
  misc_RNA (1)...(19): siRNA sense strand
ggagaaaacggcugucauu

SEQ ID NO: 964891 - RNA, 19 nt, Homo sapiens
  misc_RNA (1)...(19): siRNA sense strand
agaagaaagguggcaaaua

SEQ ID NO: 964892 - RNA, 19 nt, Homo sapiens
  misc_RNA (1)...(19): siRNA sense strand
ucauugaccaucacaacua

SEQ ID NO: 964893 - RNA, 19 nt, Homo sapiens
  misc_RNA (1)...(19): siRNA sense strand
gaaagguggcaaauacagu

SEQ ID NO: 964894 - RNA, 19 nt, Homo sapiens
  misc_RNA (1)...(19): siRNA sense strand
aagaacacccuccucauug

SEQ ID NO: 964895 - RNA, 19 nt, Homo sapiens
  misc_RNA (1)...(19): siRNA sense strand
ucaaguugcccgacgugua

SEQ ID NO: 964896 - RNA, 19 nt, Homo sapiens
  misc_RNA (1)...(19): siRNA sense strand
ggaaaucaucucuaaaucc

SEQ ID NO: 964897 - RNA, 19 nt, Homo sapiens
  misc_RNA (1)...(19): siRNA sense strand
gaauuccucuaugacaauc

SEQ ID NO: 964898 - RNA, 19 nt, Homo sapiens
  misc_RNA (1)...(19): siRNA sense strand
cauugaccaucacaacuau

SEQ ID NO: 964899 - RNA, 19 nt, Homo sapiens
  misc_RNA (1)...(19): siRNA sense strand
gagaccaucagugccuuua

SEQ ID NO: 964900 - RNA, 19 nt, Homo sapiens
  misc_RNA (1)...(19): siRNA sense strand
ccagacaggcaacuaugaa

SEQ ID NO: 964901 - RNA, 19 nt, Homo sapiens
  misc_RNA (1)...(19): siRNA sense strand
caucacaacuaugacaucu

SEQ ID NO: 964902 - RNA, 19 nt, Homo sapiens
  misc_RNA (1)...(19): siRNA sense strand
gguggcaaauacaguguuc

SEQ ID NO: 964903 - RNA, 19 nt, Homo sapiens
  misc_RNA (1)...(19): siRNA sense strand
uccagcagcucucaaaugg

SEQ ID NO: 964904 - RNA, 19 nt, Homo sapiens
  misc_RNA (1)...(19): siRNA sense strand
ggaagaacacccuccucau

SEQ ID NO: 964905 - RNA, 19 nt, Homo sapiens
  misc_RNA (1)...(19): siRNA sense strand
ugggaaaucaucucuaaau

SEQ ID NO: 964906 - RNA, 19 nt, Homo sapiens
  misc_RNA (1)...(19): siRNA sense strand
gcagugagugcgggauuga

SEQ ID NO: 964907 - RNA, 19 nt, Homo sapiens
  misc_RNA (1)...(19): siRNA sense strand
ugaaggagaaggagaaguc

SEQ ID NO: 964908 - RNA, 19 nt, Homo sapiens
  misc_RNA (1)...(19): siRNA sense strand
gcuggaguuuguccgcauu

SEQ ID NO: 964909 - RNA, 19 nt, Homo sapiens
  misc_RNA (1)...(19): siRNA sense strand
cccaaugccuacacuguca

SEQ ID NO: 964910 - RNA, 19 nt, Homo sapiens
  misc_RNA (1)...(19): siRNA sense strand
gcaggaggaggaagaugga

SEQ ID NO: 964911 - RNA, 19 nt, Homo sapiens
  misc_RNA (1)...(19): siRNA sense strand
cuaaaucccauccucuuuc

SEQ ID NO: 964912 - RNA, 19 nt, Homo sapiens
  misc_RNA (1)...(19): siRNA sense strand
uaaaucccauccucuuucg

SEQ ID NO: 964913 - RNA, 19 nt, Homo sapiens
  misc_RNA (1)...(19): siRNA sense strand
guacucuuccacucaggua

SEQ ID NO: 964914 - RNA, 19 nt, Homo sapiens
  misc_RNA (1)...(19): siRNA sense strand
gaugguggccgauccugau

SEQ ID NO: 964915 - RNA, 19 nt, Homo sapiens
  misc_RNA (1)...(19): siRNA sense strand
gcggcucccucgacuucuu

SEQ ID NO: 964916 - RNA, 19 nt, Homo sapiens
  misc_RNA (1)...(19): siRNA sense strand
caacucagcagugcagaag

SEQ ID NO: 964917 - RNA, 19 nt, Homo sapiens
  misc_RNA (1)...(19): siRNA sense strand
uucgagagcugggcaguga

SEQ ID NO: 964918 - RNA, 19 nt, Homo sapiens
  misc_RNA (1)...(19): siRNA sense strand
gaguuuguccgcauugauc

SEQ ID NO: 964919 - RNA, 19 nt, Homo sapiens
  misc_RNA (1)...(19): siRNA sense strand
ucuaaaucccauccucuuu

SEQ ID NO: 964920 - RNA, 19 nt, Homo sapiens
  misc_RNA (1)...(19): siRNA sense strand
acacugagaaccugcugaa

SEQ ID NO: 964921 - RNA, 19 nt, Homo sapiens
  misc_RNA (1)...(19): siRNA sense strand
ggagaccaucagugccuuu

SEQ ID NO: 964922 - RNA, 19 nt, Homo sapiens
  misc_RNA (1)...(19): siRNA sense strand
uguaugguguauuccaguu

SEQ ID NO: 964923 - RNA, 19 nt, Homo sapiens
  misc_RNA (1)...(19): siRNA sense strand
gcagcucucaaauggcaaa

SEQ ID NO: 964924 - RNA, 19 nt, Homo sapiens
  misc_RNA (1)...(19): siRNA sense strand
gggccugugucccaucauc

SEQ ID NO: 964925 - RNA, 19 nt, Homo sapiens
  misc_RNA (1)...(19): siRNA sense strand
ccuuagugcugcuggacaa

SEQ ID NO: 964926 - RNA, 19 nt, Homo sapiens
  misc_RNA (1)...(19): siRNA sense strand
gaccaucacaacuaugaca

SEQ ID NO: 964927 - RNA, 19 nt, Homo sapiens
  misc_RNA (1)...(19): siRNA sense strand
ggcagugagugcgggauug

SEQ ID NO: 964928 - RNA, 19 nt, Homo sapiens
  misc_RNA (1)...(19): siRNA sense strand
ugagugcgggauugaguuu

SEQ ID NO: 964929 - RNA, 19 nt, Homo sapiens
  misc_RNA (1)...(19): siRNA sense strand
cauucaagaccgcugauga

SEQ ID NO: 964930 - RNA, 19 nt, Homo sapiens
  misc_RNA (1)...(19): siRNA sense strand
aaccaucguugggaaauca

SEQ ID NO: 964931 - RNA, 19 nt, Homo sapiens
  misc_RNA (1)...(19): siRNA sense strand
aauacaguguucaguucaa

SEQ ID NO: 964932 - RNA, 19 nt, Homo sapiens
  misc_RNA (1)...(19): siRNA sense strand
agaacacccuccucauugc

SEQ ID NO: 964933 - RNA, 19 nt, Homo sapiens
  misc_RNA (1)...(19): siRNA sense strand
caacguggagaccaucagu

SEQ ID NO: 964934 - RNA, 19 nt, Homo sapiens
  misc_RNA (1)...(19): siRNA sense strand
agugcgggauugaguuuga

SEQ ID NO: 964935 - RNA, 19 nt, Homo sapiens
  misc_RNA (1)...(19): siRNA sense strand
caucagugccuuuauugac

SEQ ID NO: 964936 - RNA, 19 nt, Homo sapiens
  misc_RNA (1)...(19): siRNA sense strand
acaggcaacuaugaacuag

SEQ ID NO: 964937 - RNA, 19 nt, Homo sapiens
  misc_RNA (1)...(19): siRNA sense strand
acaacuaugacaucucaga

SEQ ID NO: 964938 - RNA, 19 nt, Homo sapiens
  misc_RNA (1)...(19): siRNA sense strand
gggcagugagugcgggauu

SEQ ID NO: 964939 - RNA, 19 nt, Homo sapiens
  misc_RNA (1)...(19): siRNA sense strand
uggaggcagugugcuggua

SEQ ID NO: 964940 - RNA, 19 nt, Homo sapiens
  misc_RNA (1)...(19): siRNA sense strand
agaaaacggcugucauuga

SEQ ID NO: 964941 - RNA, 19 nt, Homo sapiens
  misc_RNA (1)...(19): siRNA sense strand
guaugguguauuccaguuu

SEQ ID NO: 964942 - RNA, 19 nt, Homo sapiens
  misc_RNA (1)...(19): siRNA sense strand
ggaguuuguccgcauugau

SEQ ID NO: 964943 - RNA, 19 nt, Homo sapiens
  misc_RNA (1)...(19): siRNA sense strand
gguggccgauccugauaac

SEQ ID NO: 964944 - RNA, 19 nt, Homo sapiens
  misc_RNA (1)...(19): siRNA sense strand
acaugaaggagaaggagaa

SEQ ID NO: 964945 - RNA, 19 nt, Homo sapiens
  misc_RNA (1)...(19): siRNA sense strand
ugacauucagcuggaguuu

SEQ ID NO: 964946 - RNA, 19 nt, Homo sapiens
  misc_RNA (1)...(19): siRNA sense strand
gggcuuugagcucacauuc

SEQ ID NO: 964947 - RNA, 19 nt, Homo sapiens
  misc_RNA (1)...(19): siRNA sense strand
gauccagcagcucucaaau

SEQ ID NO: 964948 - RNA, 19 nt, Homo sapiens
  misc_RNA (1)...(19): siRNA sense strand
ugauccagcagcucucaaa

SEQ ID NO: 964949 - RNA, 19 nt, Homo sapiens
  misc_RNA (1)...(19): siRNA sense strand
gaacacccuccucauugcu

SEQ ID NO: 964950 - RNA, 19 nt, Homo sapiens
  misc_RNA (1)...(19): siRNA sense strand
gacaggauguuucgcauua

SEQ ID NO: 964951 - RNA, 19 nt, Homo sapiens
  misc_RNA (1)...(19): siRNA sense strand
gcaaguggcuggaugguau

SEQ ID NO: 964952 - RNA, 19 nt, Homo sapiens
  misc_RNA (1)...(19): siRNA sense strand
caucagaucuugccuaaag

SEQ ID NO: 964953 - RNA, 19 nt, Homo sapiens
  misc_RNA (1)...(19): siRNA sense strand
cugagaaccuuuauaauga

SEQ ID NO: 964954 - RNA, 19 nt, Homo sapiens
  misc_RNA (1)...(19): siRNA sense strand
aaugcgagaugauacaaua

SEQ ID NO: 964955 - RNA, 19 nt, Homo sapiens
  misc_RNA (1)...(19): siRNA sense strand
ggaugaagauguaaaagaa

SEQ ID NO: 964956 - RNA, 19 nt, Homo sapiens
  misc_RNA (1)...(19): siRNA sense strand
uuacaaugcugcaggauuc

SEQ ID NO: 964957 - RNA, 19 nt, Homo sapiens
  misc_RNA (1)...(19): siRNA sense strand
auacgaggaugaagaugua

SEQ ID NO: 964958 - RNA, 19 nt, Homo sapiens
  misc_RNA (1)...(19): siRNA sense strand
gagaagaaugggcaaagaa

SEQ ID NO: 964959 - RNA, 19 nt, Homo sapiens
  misc_RNA (1)...(19): siRNA sense strand
ccugagaaccuuuauaaug

SEQ ID NO: 964960 - RNA, 19 nt, Homo sapiens
  misc_RNA (1)...(19): siRNA sense strand
aaagagcaguggaccaaau

SEQ ID NO: 964961 - RNA, 19 nt, Homo sapiens
  misc_RNA (1)...(19): siRNA sense strand
gaacuugaagcaucagauc

SEQ ID NO: 964962 - RNA, 19 nt, Homo sapiens
  misc_RNA (1)...(19): siRNA sense strand
gcaguggaccaaauaugaa

SEQ ID NO: 964963 - RNA, 19 nt, Homo sapiens
  misc_RNA (1)...(19): siRNA sense strand
gcaggccguuucagcauca

SEQ ID NO: 964964 - RNA, 19 nt, Homo sapiens
  misc_RNA (1)...(19): siRNA sense strand
gagaugauacaauauacga

SEQ ID NO: 964965 - RNA, 19 nt, Homo sapiens
  misc_RNA (1)...(19): siRNA sense strand
aagaaugggcaaagaagua

SEQ ID NO: 964966 - RNA, 19 nt, Homo sapiens
  misc_RNA (1)...(19): siRNA sense strand
caauauacgaggaugaaga

SEQ ID NO: 964967 - RNA, 19 nt, Homo sapiens
  misc_RNA (1)...(19): siRNA sense strand
gcgagaugauacaauauac

SEQ ID NO: 964968 - RNA, 19 nt, Homo sapiens
  misc_RNA (1)...(19): siRNA sense strand
gaagaaugggcaaagaagu

SEQ ID NO: 964969 - RNA, 19 nt, Homo sapiens
  misc_RNA (1)...(19): siRNA sense strand
gagaaccuuuauaaugaca

SEQ ID NO: 964970 - RNA, 19 nt, Homo sapiens
  misc_RNA (1)...(19): siRNA sense strand
agagaagaaugggcaaaga

SEQ ID NO: 964971 - RNA, 19 nt, Homo sapiens
  misc_RNA (1)...(19): siRNA sense strand
gagcaguggaccaaauaug

SEQ ID NO: 964972 - RNA, 19 nt, Homo sapiens
  misc_RNA (1)...(19): siRNA sense strand
gcugcaggauucaauaaac

SEQ ID NO: 964973 - RNA, 19 nt, Homo sapiens
  misc_RNA (1)...(19): siRNA sense strand
agcaucagaucuugccuaa

SEQ ID NO: 964974 - RNA, 19 nt, Homo sapiens
  misc_RNA (1)...(19): siRNA sense strand
cuaaagagcaguggaccaa

SEQ ID NO: 964975 - RNA, 19 nt, Homo sapiens
  misc_RNA (1)...(19): siRNA sense strand
aaaagaagccauaagaaga

SEQ ID NO: 964976 - RNA, 19 nt, Homo sapiens
  misc_RNA (1)...(19): siRNA sense strand
aagagcaguggaccaaaua

SEQ ID NO: 964977 - RNA, 19 nt, Homo sapiens
  misc_RNA (1)...(19): siRNA sense strand
uauaaugacaggauguuuc

SEQ ID NO: 964978 - RNA, 19 nt, Homo sapiens
  misc_RNA (1)...(19): siRNA sense strand
agaaugggcaaagaaguaa

SEQ ID NO: 964979 - RNA, 19 nt, Homo sapiens
  misc_RNA (1)...(19): siRNA sense strand
cgaaaaugguauuacaaug

SEQ ID NO: 964980 - RNA, 19 nt, Homo sapiens
  misc_RNA (1)...(19): siRNA sense strand
uuccugagaaccuuuauaa

SEQ ID NO: 964981 - RNA, 19 nt, Homo sapiens
  misc_RNA (1)...(19): siRNA sense strand
caggauguuucgcauuaag

SEQ ID NO: 964982 - RNA, 19 nt, Homo sapiens
  misc_RNA (1)...(19): siRNA sense strand
ugcgagaugauacaauaua

SEQ ID NO: 964983 - RNA, 19 nt, Homo sapiens
  misc_RNA (1)...(19): siRNA sense strand
gaaaaugguauuacaaugc

SEQ ID NO: 964984 - RNA, 19 nt, Homo sapiens
  misc_RNA (1)...(19): siRNA sense strand
acaggauguuucgcauuaa

SEQ ID NO: 964985 - RNA, 19 nt, Homo sapiens
  misc_RNA (1)...(19): siRNA sense strand
guaaaagaagccauaagaa

SEQ ID NO: 964986 - RNA, 19 nt, Homo sapiens
  misc_RNA (1)...(19): siRNA sense strand
uaaaagaagccauaagaag

SEQ ID NO: 964987 - RNA, 19 nt, Homo sapiens
  misc_RNA (1)...(19): siRNA sense strand
ugagaaccuuuauaaugac

SEQ ID NO: 964988 - RNA, 19 nt, Homo sapiens
  misc_RNA (1)...(19): siRNA sense strand
ugacaggauguuucgcauu

SEQ ID NO: 964989 - RNA, 19 nt, Homo sapiens
  misc_RNA (1)...(19): siRNA sense strand
ccuugaaccguaucugaaa

SEQ ID NO: 964990 - RNA, 19 nt, Homo sapiens
  misc_RNA (1)...(19): siRNA sense strand
uacaauauacgaggaugaa

SEQ ID NO: 964991 - RNA, 19 nt, Homo sapiens
  misc_RNA (1)...(19): siRNA sense strand
cuugaagcaucagaucuug

SEQ ID NO: 964992 - RNA, 19 nt, Homo sapiens
  misc_RNA (1)...(19): siRNA sense strand
aaagaagccauaagaagac

SEQ ID NO: 964993 - RNA, 19 nt, Homo sapiens
  misc_RNA (1)...(19): siRNA sense strand
uauacgaggaugaagaugu

SEQ ID NO: 964994 - RNA, 19 nt, Homo sapiens
  misc_RNA (1)...(19): siRNA sense strand
agcaguggaccaaauauga

SEQ ID NO: 964995 - RNA, 19 nt, Homo sapiens
  misc_RNA (1)...(19): siRNA sense strand
uaccuugaaccguaucuga

SEQ ID NO: 964996 - RNA, 19 nt, Homo sapiens
  misc_RNA (1)...(19): siRNA sense strand
aaagagguuauucgggaaa

SEQ ID NO: 964997 - RNA, 19 nt, Homo sapiens
  misc_RNA (1)...(19): siRNA sense strand
aauauacgaggaugaagau

SEQ ID NO: 964998 - RNA, 19 nt, Homo sapiens
  misc_RNA (1)...(19): siRNA sense strand
ggcaaguggcuggauggua

SEQ ID NO: 964999 - RNA, 19 nt, Homo sapiens
  misc_RNA (1)...(19): siRNA sense strand
uaaagagcaguggaccaaa

SEQ ID NO: 965000 - RNA, 19 nt, Homo sapiens
  misc_RNA (1)...(19): siRNA sense strand
caagucagcuauagaguug

SEQ ID NO: 965001 - RNA, 19 nt, Homo sapiens
  misc_RNA (1)...(19): siRNA sense strand
ggaggugucuggagcuaaa

SEQ ID NO: 965002 - RNA, 19 nt, Homo sapiens
  misc_RNA (1)...(19): siRNA sense strand
ggauguaacucaggauuau

SEQ ID NO: 965003 - RNA, 19 nt, Homo sapiens
  misc_RNA (1)...(19): siRNA sense strand
gcacacggccagugacuuu

SEQ ID NO: 965004 - RNA, 19 nt, Homo sapiens
  misc_RNA (1)...(19): siRNA sense strand
aaacacaucugcccuugau

SEQ ID NO: 965005 - RNA, 19 nt, Homo sapiens
  misc_RNA (1)...(19): siRNA sense strand
cauggaagcuuggcaguau

SEQ ID NO: 965006 - RNA, 19 nt, Homo sapiens
  misc_RNA (1)...(19): siRNA sense strand
caagaacuauuagccauca

SEQ ID NO: 965007 - RNA, 19 nt, Homo sapiens
  misc_RNA (1)...(19): siRNA sense strand
gaacgagccaagucagcua

SEQ ID NO: 965008 - RNA, 19 nt, Homo sapiens
  misc_RNA (1)...(19): siRNA sense strand
ggcagagaaugaacaagaa

SEQ ID NO: 965009 - RNA, 19 nt, Homo sapiens
  misc_RNA (1)...(19): siRNA sense strand
caucugcccuugauaugga

SEQ ID NO: 965010 - RNA, 19 nt, Homo sapiens
  misc_RNA (1)...(19): siRNA sense strand
ugggaucucucuugucuga

SEQ ID NO: 965011 - RNA, 19 nt, Homo sapiens
  misc_RNA (1)...(19): siRNA sense strand
cccaagaauucaucucuga

SEQ ID NO: 965012 - RNA, 19 nt, Homo sapiens
  misc_RNA (1)...(19): siRNA sense strand
gaggugccaugucggagaa

SEQ ID NO: 965013 - RNA, 19 nt, Homo sapiens
  misc_RNA (1)...(19): siRNA sense strand
ugacuggucccaagaauuc

SEQ ID NO: 965014 - RNA, 19 nt, Homo sapiens
  misc_RNA (1)...(19): siRNA sense strand
ccgcugggcugaggaauau

SEQ ID NO: 965015 - RNA, 19 nt, Homo sapiens
  misc_RNA (1)...(19): siRNA sense strand
gggagaaccugagggaaca

SEQ ID NO: 965016 - RNA, 19 nt, Homo sapiens
  misc_RNA (1)...(19): siRNA sense strand
ucgcugguaugaugaauau

SEQ ID NO: 965017 - RNA, 19 nt, Homo sapiens
  misc_RNA (1)...(19): siRNA sense strand
auucugaguuccugaaauu

SEQ ID NO: 965018 - RNA, 19 nt, Homo sapiens
  misc_RNA (1)...(19): siRNA sense strand
caaaguggaugaccccaaa

SEQ ID NO: 965019 - RNA, 19 nt, Homo sapiens
  misc_RNA (1)...(19): siRNA sense strand
cgucagcuaccuaugauaa

SEQ ID NO: 965020 - RNA, 19 nt, Homo sapiens
  misc_RNA (1)...(19): siRNA sense strand
gaaauucgugcggcagauu

SEQ ID NO: 965021 - RNA, 19 nt, Homo sapiens
  misc_RNA (1)...(19): siRNA sense strand
caaaugcugugcugcuuuu

SEQ ID NO: 965022 - RNA, 19 nt, Homo sapiens
  misc_RNA (1)...(19): siRNA sense strand
gacuuggccuugucugaga

SEQ ID NO: 965023 - RNA, 19 nt, Homo sapiens
  misc_RNA (1)...(19): siRNA sense strand
caagaccaguaaacacauc

SEQ ID NO: 965024 - RNA, 19 nt, Homo sapiens
  misc_RNA (1)...(19): siRNA sense strand
ccaagucagcuauagaguu

SEQ ID NO: 965025 - RNA, 19 nt, Homo sapiens
  misc_RNA (1)...(19): siRNA sense strand
gcagcaggguacaucagau

SEQ ID NO: 965026 - RNA, 19 nt, Homo sapiens
  misc_RNA (1)...(19): siRNA sense strand
acacaucugcccuugauau

SEQ ID NO: 965027 - RNA, 19 nt, Homo sapiens
  misc_RNA (1)...(19): siRNA sense strand
gagaaugaacaagaacuau

SEQ ID NO: 965028 - RNA, 19 nt, Homo sapiens
  misc_RNA (1)...(19): siRNA sense strand
gugaucacccucagccuuu

SEQ ID NO: 965029 - RNA, 19 nt, Homo sapiens
  misc_RNA (1)...(19): siRNA sense strand
gauaagggguaccaguuug

SEQ ID NO: 965030 - RNA, 19 nt, Homo sapiens
  misc_RNA (1)...(19): siRNA sense strand
gagaugcuguggauguaac

SEQ ID NO: 965031 - RNA, 19 nt, Homo sapiens
  misc_RNA (1)...(19): siRNA sense strand
gaucuguccacccuccuaa

SEQ ID NO: 965032 - RNA, 19 nt, Homo sapiens
  misc_RNA (1)...(19): siRNA sense strand
gggaggcuguggagcacuu

SEQ ID NO: 965033 - RNA, 19 nt, Homo sapiens
  misc_RNA (1)...(19): siRNA sense strand
acagugggcagcagaguuu

SEQ ID NO: 965034 - RNA, 19 nt, Homo sapiens
  misc_RNA (1)...(19): siRNA sense strand
ugaggaauauuuggagcaa

SEQ ID NO: 965035 - RNA, 19 nt, Homo sapiens
  misc_RNA (1)...(19): siRNA sense strand
gauguaacucaggauuaua

SEQ ID NO: 965036 - RNA, 19 nt, Homo sapiens
  misc_RNA (1)...(19): siRNA sense strand
ccagagugaagaagcagua

SEQ ID NO: 965037 - RNA, 19 nt, Homo sapiens
  misc_RNA (1)...(19): siRNA sense strand
aaaccagagugaagaagca

SEQ ID NO: 965038 - RNA, 19 nt, Homo sapiens
  misc_RNA (1)...(19): siRNA sense strand
ccaauggaaaccagaguga

SEQ ID NO: 965039 - RNA, 19 nt, Homo sapiens
  misc_RNA (1)...(19): siRNA sense strand
ccugggaucucucuugucu

SEQ ID NO: 965040 - RNA, 19 nt, Homo sapiens
  misc_RNA (1)...(19): siRNA sense strand
uuacgucagcuaccuauga

SEQ ID NO: 965041 - RNA, 19 nt, Homo sapiens
  misc_RNA (1)...(19): siRNA sense strand
gcugggcugaggaauauuu

SEQ ID NO: 965042 - RNA, 19 nt, Homo sapiens
  misc_RNA (1)...(19): siRNA sense strand
uggagaugcuguggaugua

SEQ ID NO: 965043 - RNA, 19 nt, Homo sapiens
  misc_RNA (1)...(19): siRNA sense strand
uguccacccuccuaacuau

SEQ ID NO: 965044 - RNA, 19 nt, Homo sapiens
  misc_RNA (1)...(19): siRNA sense strand
ggaucucucuugucugacu

SEQ ID NO: 965045 - RNA, 19 nt, Homo sapiens
  misc_RNA (1)...(19): siRNA sense strand
gcaggauccuaagcacaug

SEQ ID NO: 965046 - RNA, 19 nt, Homo sapiens
  misc_RNA (1)...(19): siRNA sense strand
ccaaaugcugugcugcuuu

SEQ ID NO: 965047 - RNA, 19 nt, Homo sapiens
  misc_RNA (1)...(19): siRNA sense strand
gccaaaugcugugcugcuu

SEQ ID NO: 965048 - RNA, 19 nt, Homo sapiens
  misc_RNA (1)...(19): siRNA sense strand
ggagaugcuguggauguaa

SEQ ID NO: 965049 - RNA, 19 nt, Homo sapiens
  misc_RNA (1)...(19): siRNA sense strand
ccaccgaucgcugguauga

SEQ ID NO: 965050 - RNA, 19 nt, Homo sapiens
  misc_RNA (1)...(19): siRNA sense strand
gcggaggugucuggagcua

SEQ ID NO: 965051 - RNA, 19 nt, Homo sapiens
  misc_RNA (1)...(19): siRNA sense strand
ccacccaggcagagaauga

SEQ ID NO: 965052 - RNA, 19 nt, Homo sapiens
  misc_RNA (1)...(19): siRNA sense strand
aggaauauuuggagcaauc

SEQ ID NO: 965053 - RNA, 19 nt, Homo sapiens
  misc_RNA (1)...(19): siRNA sense strand
gcuauaaccugggcaucag

SEQ ID NO: 965054 - RNA, 19 nt, Homo sapiens
  misc_RNA (1)...(19): siRNA sense strand
gcacuucacccaggacaag

SEQ ID NO: 965055 - RNA, 19 nt, Homo sapiens
  misc_RNA (1)...(19): siRNA sense strand
accgaucgcugguaugaug

SEQ ID NO: 965056 - RNA, 19 nt, Homo sapiens
  misc_RNA (1)...(19): siRNA sense strand
gagccaagucagcuauaga

SEQ ID NO: 965057 - RNA, 19 nt, Homo sapiens
  misc_RNA (1)...(19): siRNA sense strand
cacaagaccaguaaacaca

SEQ ID NO: 965058 - RNA, 19 nt, Homo sapiens
  misc_RNA (1)...(19): siRNA sense strand
ccaguucacaagaccagua

SEQ ID NO: 965059 - RNA, 19 nt, Homo sapiens
  misc_RNA (1)...(19): siRNA sense strand
ccaacccgcucaugaagcu

SEQ ID NO: 965060 - RNA, 19 nt, Homo sapiens
  misc_RNA (1)...(19): siRNA sense strand
agagaaugaacaagaacua

SEQ ID NO: 965061 - RNA, 19 nt, Homo sapiens
  misc_RNA (1)...(19): siRNA sense strand
uggauguaacucaggauua

SEQ ID NO: 965062 - RNA, 19 nt, Homo sapiens
  misc_RNA (1)...(19): siRNA sense strand
ccucagcguucgucccaau

SEQ ID NO: 965063 - RNA, 19 nt, Homo sapiens
  misc_RNA (1)...(19): siRNA sense strand
acaaggccguggacugcuu

SEQ ID NO: 965064 - RNA, 19 nt, Homo sapiens
  misc_RNA (1)...(19): siRNA sense strand
uaaccagacagcacugaug

SEQ ID NO: 965065 - RNA, 19 nt, Homo sapiens
  misc_RNA (1)...(19): siRNA sense strand
aggcagaguuggaggagau

SEQ ID NO: 965066 - RNA, 19 nt, Homo sapiens
  misc_RNA (1)...(19): siRNA sense strand
cccuugauauggaguuuga

SEQ ID NO: 965067 - RNA, 19 nt, Homo sapiens
  misc_RNA (1)...(19): siRNA sense strand
cugacucccuguuucuuga

SEQ ID NO: 965068 - RNA, 19 nt, Homo sapiens
  misc_RNA (1)...(19): siRNA sense strand
gggcugaggaauauuugga

SEQ ID NO: 965069 - RNA, 19 nt, Homo sapiens
  misc_RNA (1)...(19): siRNA sense strand
aggcagagaaugaacaaga

SEQ ID NO: 965070 - RNA, 19 nt, Homo sapiens
  misc_RNA (1)...(19): siRNA sense strand
guaccacccaggcagagaa

SEQ ID NO: 965071 - RNA, 19 nt, Homo sapiens
  misc_RNA (1)...(19): siRNA sense strand
gugggcagcagaguuuaua

SEQ ID NO: 965072 - RNA, 19 nt, Homo sapiens
  misc_RNA (1)...(19): siRNA sense strand
guaacucaggauuauaaug

SEQ ID NO: 965073 - RNA, 19 nt, Homo sapiens
  misc_RNA (1)...(19): siRNA sense strand
gugccaacccgcucaugaa

SEQ ID NO: 965074 - RNA, 19 nt, Homo sapiens
  misc_RNA (1)...(19): siRNA sense strand
gaacagugggcagcagagu

SEQ ID NO: 965075 - RNA, 19 nt, Homo sapiens
  misc_RNA (1)...(19): siRNA sense strand
aaagccagauaaccagaca

SEQ ID NO: 965076 - RNA, 19 nt, Homo sapiens
  misc_RNA (1)...(19): siRNA sense strand
gagaaccccuugcgugauc

SEQ ID NO: 965077 - RNA, 19 nt, Homo sapiens
  misc_RNA (1)...(19): siRNA sense strand
ggugccaacccgcucauga

SEQ ID NO: 965078 - RNA, 19 nt, Homo sapiens
  misc_RNA (1)...(19): siRNA sense strand
gcagcagauugagcaguca

SEQ ID NO: 965079 - RNA, 19 nt, Homo sapiens
  misc_RNA (1)...(19): siRNA sense strand
cguuuggcauugucuaugu

SEQ ID NO: 965080 - RNA, 19 nt, Homo sapiens
  misc_RNA (1)...(19): siRNA sense strand
gcacccugcguuuggcauu

SEQ ID NO: 965081 - RNA, 19 nt, Homo sapiens
  misc_RNA (1)...(19): siRNA sense strand
gauaaccagacagcacuga

SEQ ID NO: 965082 - RNA, 19 nt, Homo sapiens
  misc_RNA (1)...(19): siRNA sense strand
aggauuauaaugagacuga

SEQ ID NO: 965083 - RNA, 19 nt, Homo sapiens
  misc_RNA (1)...(19): siRNA sense strand
ccacccuccuaacuauguu

SEQ ID NO: 965084 - RNA, 19 nt, Homo sapiens
  misc_RNA (1)...(19): siRNA sense strand
gaugaccuccuggcugaga

SEQ ID NO: 965085 - RNA, 19 nt, Homo sapiens
  misc_RNA (1)...(19): siRNA sense strand
gagacuggcugcgguacac

SEQ ID NO: 965086 - RNA, 19 nt, Homo sapiens
  misc_RNA (1)...(19): siRNA sense strand
cgagccaagucagcuauag

SEQ ID NO: 965087 - RNA, 19 nt, Homo sapiens
  misc_RNA (1)...(19): siRNA sense strand
gggcagcagaguuuauaca

SEQ ID NO: 965088 - RNA, 19 nt, Homo sapiens
  misc_RNA (1)...(19): siRNA sense strand
gaucgcugguaugaugaau

SEQ ID NO: 965089 - RNA, 19 nt, Homo sapiens
  misc_RNA (1)...(19): siRNA sense strand
ggaucuguccacccuccua

SEQ ID NO: 965090 - RNA, 19 nt, Homo sapiens
  misc_RNA (1)...(19): siRNA sense strand
uacgucagcuaccuaugau

SEQ ID NO: 965091 - RNA, 19 nt, Homo sapiens
  misc_RNA (1)...(19): siRNA sense strand
ugacuaugaugaccuuacg

SEQ ID NO: 965092 - RNA, 19 nt, Homo sapiens
  misc_RNA (1)...(19): siRNA sense strand
uaaacacaucugcccuuga

SEQ ID NO: 965093 - RNA, 19 nt, Homo sapiens
  misc_RNA (1)...(19): siRNA sense strand
gaggaauauuuggagcaau

SEQ ID NO: 965094 - RNA, 19 nt, Homo sapiens
  misc_RNA (1)...(19): siRNA sense strand
ugaaauucgugcggcagau

SEQ ID NO: 965095 - RNA, 19 nt, Homo sapiens
  misc_RNA (1)...(19): siRNA sense strand
uggaggcccugaacaugca

SEQ ID NO: 965096 - RNA, 19 nt, Homo sapiens
  misc_RNA (1)...(19): siRNA sense strand
uauuagccaucagugcauu

SEQ ID NO: 965097 - RNA, 19 nt, Homo sapiens
  misc_RNA (1)...(19): siRNA sense strand
gcagagaaugaacaagaac

SEQ ID NO: 965098 - RNA, 19 nt, Homo sapiens
  misc_RNA (1)...(19): siRNA sense strand
ucagcuaccuaugauaagg

SEQ ID NO: 965099 - RNA, 19 nt, Homo sapiens
  misc_RNA (1)...(19): siRNA sense strand
ugauauggaguuugaacga

SEQ ID NO: 965100 - RNA, 19 nt, Homo sapiens
  misc_RNA (1)...(19): siRNA sense strand
ggacggaaccugcguacaa

SEQ ID NO: 965101 - RNA, 19 nt, Homo sapiens
  misc_RNA (1)...(19): siRNA sense strand
gaacaaauacauggagauc

SEQ ID NO: 965102 - RNA, 19 nt, Homo sapiens
  misc_RNA (1)...(19): siRNA sense strand
ggaaggagucccugaucuu

SEQ ID NO: 965103 - RNA, 19 nt, Homo sapiens
  misc_RNA (1)...(19): siRNA sense strand
caucaaggccauuaugaga

SEQ ID NO: 965104 - RNA, 19 nt, Homo sapiens
  misc_RNA (1)...(19): siRNA sense strand
ggagaagcggcucaucaaa

SEQ ID NO: 965105 - RNA, 19 nt, Homo sapiens
  misc_RNA (1)...(19): siRNA sense strand
gagaagcggcucaucaaag

SEQ ID NO: 965106 - RNA, 19 nt, Homo sapiens
  misc_RNA (1)...(19): siRNA sense strand
gcgcaaggccaaacucuuc

SEQ ID NO: 965107 - RNA, 19 nt, Homo sapiens
  misc_RNA (1)...(19): siRNA sense strand
caacauggccgugguguac

SEQ ID NO: 965108 - RNA, 19 nt, Homo sapiens
  misc_RNA (1)...(19): siRNA sense strand
agaagcggcucaucaaagg

SEQ ID NO: 965109 - RNA, 19 nt, Homo sapiens
  misc_RNA (1)...(19): siRNA sense strand
ccaagcaguucaugaccau

SEQ ID NO: 965110 - RNA, 19 nt, Homo sapiens
  misc_RNA (1)...(19): siRNA sense strand
ggagaugaaccaccuguac

SEQ ID NO: 965111 - RNA, 19 nt, Homo sapiens
  misc_RNA (1)...(19): siRNA sense strand
ggacagucgacuacaacaa

SEQ ID NO: 965112 - RNA, 19 nt, Homo sapiens
  misc_RNA (1)...(19): siRNA sense strand
ugaagaagcggaccaagag

SEQ ID NO: 965113 - RNA, 19 nt, Homo sapiens
  misc_RNA (1)...(19): siRNA sense strand
ugggcauccugaacaaaua

SEQ ID NO: 965114 - RNA, 19 nt, Homo sapiens
  misc_RNA (1)...(19): siRNA sense strand
gcaacauggccguggugua

SEQ ID NO: 965115 - RNA, 19 nt, Homo sapiens
  misc_RNA (1)...(19): siRNA sense strand
cauucugacugcacucuau

SEQ ID NO: 965116 - RNA, 19 nt, Homo sapiens
  misc_RNA (1)...(19): siRNA sense strand
ucaaggccauuaugagaac

SEQ ID NO: 965117 - RNA, 19 nt, Homo sapiens
  misc_RNA (1)...(19): siRNA sense strand
gcaaggaggcgagcaucug

SEQ ID NO: 965118 - RNA, 19 nt, Homo sapiens
  misc_RNA (1)...(19): siRNA sense strand
ggaccacgggcuaaucugu

SEQ ID NO: 965119 - RNA, 19 nt, Homo sapiens
  misc_RNA (1)...(19): siRNA sense strand
gcaagcccaccuccagaga

SEQ ID NO: 965120 - RNA, 19 nt, Homo sapiens
  misc_RNA (1)...(19): siRNA sense strand
gcagugggcggacauucug

SEQ ID NO: 965121 - RNA, 19 nt, Homo sapiens
  misc_RNA (1)...(19): siRNA sense strand
gcagccaucaaggccauua

SEQ ID NO: 965122 - RNA, 19 nt, Homo sapiens
  misc_RNA (1)...(19): siRNA sense strand
gaaguaccggugccgaauc

SEQ ID NO: 965123 - RNA, 19 nt, Homo sapiens
  misc_RNA (1)...(19): siRNA sense strand
cgccaaugguugcaucuuc

SEQ ID NO: 965124 - RNA, 19 nt, Homo sapiens
  misc_RNA (1)...(19): siRNA sense strand
gccaucaaggccauuauga

SEQ ID NO: 965125 - RNA, 19 nt, Homo sapiens
  misc_RNA (1)...(19): siRNA sense strand
acaugggacucuccuucaa

SEQ ID NO: 965126 - RNA, 19 nt, Homo sapiens
  misc_RNA (1)...(19): siRNA sense strand
cguacaaccacgaggagua

SEQ ID NO: 965127 - RNA, 19 nt, Homo sapiens
  misc_RNA (1)...(19): siRNA sense strand
cggagaagcggcucaucaa

SEQ ID NO: 965128 - RNA, 19 nt, Homo sapiens
  misc_RNA (1)...(19): siRNA sense strand
gaggugccagccuuuguga

SEQ ID NO: 965129 - RNA, 19 nt, Homo sapiens
  misc_RNA (1)...(19): siRNA sense strand
cggcaaggccagcaacaug

SEQ ID NO: 965130 - RNA, 19 nt, Homo sapiens
  misc_RNA (1)...(19): siRNA sense strand
gaagcugcccgcucaccau

SEQ ID NO: 965131 - RNA, 19 nt, Homo sapiens
  misc_RNA (1)...(19): siRNA sense strand
ugccagccuuugugaagaa

SEQ ID NO: 965132 - RNA, 19 nt, Homo sapiens
  misc_RNA (1)...(19): siRNA sense strand
gugccagccuuugugaaga

SEQ ID NO: 965133 - RNA, 19 nt, Homo sapiens
  misc_RNA (1)...(19): siRNA sense strand
gacggaaccugcguacaac

SEQ ID NO: 965134 - RNA, 19 nt, Homo sapiens
  misc_RNA (1)...(19): siRNA sense strand
ggucacagucucccugaag

SEQ ID NO: 965135 - RNA, 19 nt, Homo sapiens
  misc_RNA (1)...(19): siRNA sense strand
agugcuaccugcagaagga

SEQ ID NO: 965136 - RNA, 19 nt, Homo sapiens
  misc_RNA (1)...(19): siRNA sense strand
ggaaggggaaggagaaguu

SEQ ID NO: 965137 - RNA, 19 nt, Homo sapiens
  misc_RNA (1)...(19): siRNA sense strand
uaccgcagccugaguuuca

SEQ ID NO: 965138 - RNA, 19 nt, Homo sapiens
  misc_RNA (1)...(19): siRNA sense strand
gcagaugaagcggcacaug

SEQ ID NO: 965139 - RNA, 19 nt, Homo sapiens
  misc_RNA (1)...(19): siRNA sense strand
cuaccuacccuacgaguac

SEQ ID NO: 965140 - RNA, 19 nt, Homo sapiens
  misc_RNA (1)...(19): siRNA sense strand
gacagucgacuacaacaac

SEQ ID NO: 965141 - RNA, 19 nt, Homo sapiens
  misc_RNA (1)...(19): siRNA sense strand
aaguaccggugccgaauca

SEQ ID NO: 965142 - RNA, 19 nt, Homo sapiens
  misc_RNA (1)...(19): siRNA sense strand
uguggacagucgacuacaa

SEQ ID NO: 965143 - RNA, 19 nt, Homo sapiens
  misc_RNA (1)...(19): siRNA sense strand
ucugugagcccuccuucuu

SEQ ID NO: 965144 - RNA, 19 nt, Homo sapiens
  misc_RNA (1)...(19): siRNA sense strand
gcagauccugguccacauc

SEQ ID NO: 965145 - RNA, 19 nt, Homo sapiens
  misc_RNA (1)...(19): siRNA sense strand
gugccagggcugucuguga

SEQ ID NO: 965146 - RNA, 19 nt, Homo sapiens
  misc_RNA (1)...(19): siRNA sense strand
ugaccauguuuccucauac

SEQ ID NO: 965147 - RNA, 19 nt, Homo sapiens
  misc_RNA (1)...(19): siRNA sense strand
accacgggcuaaucuguga

SEQ ID NO: 965148 - RNA, 19 nt, Homo sapiens
  misc_RNA (1)...(19): siRNA sense strand
ggugccagccuuugugaag

SEQ ID NO: 965149 - RNA, 19 nt, Homo sapiens
  misc_RNA (1)...(19): siRNA sense strand
ccacccagagggaccagaa

SEQ ID NO: 965150 - RNA, 19 nt, Homo sapiens
  misc_RNA (1)...(19): siRNA sense strand
ggacggaaccugcguacaa

SEQ ID NO: 965151 - RNA, 19 nt, Homo sapiens
  misc_RNA (1)...(19): siRNA sense strand
gaacaaauacauggagauc

SEQ ID NO: 965152 - RNA, 19 nt, Homo sapiens
  misc_RNA (1)...(19): siRNA sense strand
ggaaggagucccugaucuu

SEQ ID NO: 965153 - RNA, 19 nt, Homo sapiens
  misc_RNA (1)...(19): siRNA sense strand
caucaaggccauuaugaga

SEQ ID NO: 965154 - RNA, 19 nt, Homo sapiens
  misc_RNA (1)...(19): siRNA sense strand
ggagaagcggcucaucaaa

SEQ ID NO: 965155 - RNA, 19 nt, Homo sapiens
  misc_RNA (1)...(19): siRNA sense strand
gagaagcggcucaucaaag

SEQ ID NO: 965156 - RNA, 19 nt, Homo sapiens
  misc_RNA (1)...(19): siRNA sense strand
gcgcaaggccaaacucuuc

SEQ ID NO: 965157 - RNA, 19 nt, Homo sapiens
  misc_RNA (1)...(19): siRNA sense strand
caacauggccgugguguac

SEQ ID NO: 965158 - RNA, 19 nt, Homo sapiens
  misc_RNA (1)...(19): siRNA sense strand
agaagcggcucaucaaagg

SEQ ID NO: 965159 - RNA, 19 nt, Homo sapiens
  misc_RNA (1)...(19): siRNA sense strand
ccaagcaguucaugaccau

SEQ ID NO: 965160 - RNA, 19 nt, Homo sapiens
  misc_RNA (1)...(19): siRNA sense strand
ggagaugaaccaccuguac

SEQ ID NO: 965161 - RNA, 19 nt, Homo sapiens
  misc_RNA (1)...(19): siRNA sense strand
ggacagucgacuacaacaa

SEQ ID NO: 965162 - RNA, 19 nt, Homo sapiens
  misc_RNA (1)...(19): siRNA sense strand
ugaagaagcggaccaagag

SEQ ID NO: 965163 - RNA, 19 nt, Homo sapiens
  misc_RNA (1)...(19): siRNA sense strand
ugggcauccugaacaaaua

SEQ ID NO: 965164 - RNA, 19 nt, Homo sapiens
  misc_RNA (1)...(19): siRNA sense strand
gcaacauggccguggugua

SEQ ID NO: 965165 - RNA, 19 nt, Homo sapiens
  misc_RNA (1)...(19): siRNA sense strand
cauucugacugcacucuau

SEQ ID NO: 965166 - RNA, 19 nt, Homo sapiens
  misc_RNA (1)...(19): siRNA sense strand
ucaaggccauuaugagaac

SEQ ID NO: 965167 - RNA, 19 nt, Homo sapiens
  misc_RNA (1)...(19): siRNA sense strand
gcaaggaggcgagcaucug

SEQ ID NO: 965168 - RNA, 19 nt, Homo sapiens
  misc_RNA (1)...(19): siRNA sense strand
ggaccacgggcuaaucugu

SEQ ID NO: 965169 - RNA, 19 nt, Homo sapiens
  misc_RNA (1)...(19): siRNA sense strand
gcaagcccaccuccagaga

SEQ ID NO: 965170 - RNA, 19 nt, Homo sapiens
  misc_RNA (1)...(19): siRNA sense strand
gcagugggcggacauucug

SEQ ID NO: 965171 - RNA, 19 nt, Homo sapiens
  misc_RNA (1)...(19): siRNA sense strand
gcagccaucaaggccauua

SEQ ID NO: 965172 - RNA, 19 nt, Homo sapiens
  misc_RNA (1)...(19): siRNA sense strand
gaaguaccggugccgaauc

SEQ ID NO: 965173 - RNA, 19 nt, Homo sapiens
  misc_RNA (1)...(19): siRNA sense strand
cgccaaugguugcaucuuc

SEQ ID NO: 965174 - RNA, 19 nt, Homo sapiens
  misc_RNA (1)...(19): siRNA sense strand
gccaucaaggccauuauga

SEQ ID NO: 965175 - RNA, 19 nt, Homo sapiens
  misc_RNA (1)...(19): siRNA sense strand
acaugggacucuccuucaa

SEQ ID NO: 965176 - RNA, 19 nt, Homo sapiens
  misc_RNA (1)...(19): siRNA sense strand
cguacaaccacgaggagua

SEQ ID NO: 965177 - RNA, 19 nt, Homo sapiens
  misc_RNA (1)...(19): siRNA sense strand
cggagaagcggcucaucaa

SEQ ID NO: 965178 - RNA, 19 nt, Homo sapiens
  misc_RNA (1)...(19): siRNA sense strand
gaggugccagccuuuguga

SEQ ID NO: 965179 - RNA, 19 nt, Homo sapiens
  misc_RNA (1)...(19): siRNA sense strand
cggcaaggccagcaacaug

SEQ ID NO: 965180 - RNA, 19 nt, Homo sapiens
  misc_RNA (1)...(19): siRNA sense strand
gaagcugcccgcucaccau

SEQ ID NO: 965181 - RNA, 19 nt, Homo sapiens
  misc_RNA (1)...(19): siRNA sense strand
ugccagccuuugugaagaa

SEQ ID NO: 965182 - RNA, 19 nt, Homo sapiens
  misc_RNA (1)...(19): siRNA sense strand
gugccagccuuugugaaga

SEQ ID NO: 965183 - RNA, 19 nt, Homo sapiens
  misc_RNA (1)...(19): siRNA sense strand
gacggaaccugcguacaac

SEQ ID NO: 965184 - RNA, 19 nt, Homo sapiens
  misc_RNA (1)...(19): siRNA sense strand
ggucacagucucccugaag

SEQ ID NO: 965185 - RNA, 19 nt, Homo sapiens
  misc_RNA (1)...(19): siRNA sense strand
agugcuaccugcagaagga

SEQ ID NO: 965186 - RNA, 19 nt, Homo sapiens
  misc_RNA (1)...(19): siRNA sense strand
ggaaggggaaggagaaguu

SEQ ID NO: 965187 - RNA, 19 nt, Homo sapiens
  misc_RNA (1)...(19): siRNA sense strand
uaccgcagccugaguuuca

SEQ ID NO: 965188 - RNA, 19 nt, Homo sapiens
  misc_RNA (1)...(19): siRNA sense strand
gcagaugaagcggcacaug

SEQ ID NO: 965189 - RNA, 19 nt, Homo sapiens
  misc_RNA (1)...(19): siRNA sense strand
cuaccuacccuacgaguac

SEQ ID NO: 965190 - RNA, 19 nt, Homo sapiens
  misc_RNA (1)...(19): siRNA sense strand
gacagucgacuacaacaac

SEQ ID NO: 965191 - RNA, 19 nt, Homo sapiens
  misc_RNA (1)...(19): siRNA sense strand
aaguaccggugccgaauca

SEQ ID NO: 965192 - RNA, 19 nt, Homo sapiens
  misc_RNA (1)...(19): siRNA sense strand
uguggacagucgacuacaa

SEQ ID NO: 965193 - RNA, 19 nt, Homo sapiens
  misc_RNA (1)...(19): siRNA sense strand
ucugugagcccuccuucuu

SEQ ID NO: 965194 - RNA, 19 nt, Homo sapiens
  misc_RNA (1)...(19): siRNA sense strand
gcagauccugguccacauc

SEQ ID NO: 965195 - RNA, 19 nt, Homo sapiens
  misc_RNA (1)...(19): siRNA sense strand
gugccagggcugucuguga

SEQ ID NO: 965196 - RNA, 19 nt, Homo sapiens
  misc_RNA (1)...(19): siRNA sense strand
ugaccauguuuccucauac

SEQ ID NO: 965197 - RNA, 19 nt, Homo sapiens
  misc_RNA (1)...(19): siRNA sense strand
accacgggcuaaucuguga

SEQ ID NO: 965198 - RNA, 19 nt, Homo sapiens
  misc_RNA (1)...(19): siRNA sense strand
ggugccagccuuugugaag

SEQ ID NO: 965199 - RNA, 19 nt, Homo sapiens
  misc_RNA (1)...(19): siRNA sense strand
ccacccagagggaccagaa

SEQ ID NO: 965200 - RNA, 19 nt, Homo sapiens
  misc_RNA (1)...(19): siRNA sense strand
ggacggaaccugcguacaa

SEQ ID NO: 965201 - RNA, 19 nt, Homo sapiens
  misc_RNA (1)...(19): siRNA sense strand
gaacaaauacauggagauc

SEQ ID NO: 965202 - RNA, 19 nt, Homo sapiens
  misc_RNA (1)...(19): siRNA sense strand
ggaaggagucccugaucuu

SEQ ID NO: 965203 - RNA, 19 nt, Homo sapiens
  misc_RNA (1)...(19): siRNA sense strand
caucaaggccauuaugaga

SEQ ID NO: 965204 - RNA, 19 nt, Homo sapiens
  misc_RNA (1)...(19): siRNA sense strand
ggagaagcggcucaucaaa

SEQ ID NO: 965205 - RNA, 19 nt, Homo sapiens
  misc_RNA (1)...(19): siRNA sense strand
gagaagcggcucaucaaag

SEQ ID NO: 965206 - RNA, 19 nt, Homo sapiens
  misc_RNA (1)...(19): siRNA sense strand
gcgcaaggccaaacucuuc

SEQ ID NO: 965207 - RNA, 19 nt, Homo sapiens
  misc_RNA (1)...(19): siRNA sense strand
caacauggccgugguguac

SEQ ID NO: 965208 - RNA, 19 nt, Homo sapiens
  misc_RNA (1)...(19): siRNA sense strand
agaagcggcucaucaaagg

SEQ ID NO: 965209 - RNA, 19 nt, Homo sapiens
  misc_RNA (1)...(19): siRNA sense strand
ccaagcaguucaugaccau

SEQ ID NO: 965210 - RNA, 19 nt, Homo sapiens
  misc_RNA (1)...(19): siRNA sense strand
ggagaugaaccaccuguac

SEQ ID NO: 965211 - RNA, 19 nt, Homo sapiens
  misc_RNA (1)...(19): siRNA sense strand
ggacagucgacuacaacaa

SEQ ID NO: 965212 - RNA, 19 nt, Homo sapiens
  misc_RNA (1)...(19): siRNA sense strand
ugaagaagcggaccaagag

SEQ ID NO: 965213 - RNA, 19 nt, Homo sapiens
  misc_RNA (1)...(19): siRNA sense strand
ugggcauccugaacaaaua

SEQ ID NO: 965214 - RNA, 19 nt, Homo sapiens
  misc_RNA (1)...(19): siRNA sense strand
gcaacauggccguggugua

SEQ ID NO: 965215 - RNA, 19 nt, Homo sapiens
  misc_RNA (1)...(19): siRNA sense strand
cauucugacugcacucuau

SEQ ID NO: 965216 - RNA, 19 nt, Homo sapiens
  misc_RNA (1)...(19): siRNA sense strand
ucaaggccauuaugagaac

SEQ ID NO: 965217 - RNA, 19 nt, Homo sapiens
  misc_RNA (1)...(19): siRNA sense strand
gcaaggaggcgagcaucug

SEQ ID NO: 965218 - RNA, 19 nt, Homo sapiens
  misc_RNA (1)...(19): siRNA sense strand
ggaccacgggcuaaucugu

SEQ ID NO: 965219 - RNA, 19 nt, Homo sapiens
  misc_RNA (1)...(19): siRNA sense strand
gcaagcccaccuccagaga

SEQ ID NO: 965220 - RNA, 19 nt, Homo sapiens
  misc_RNA (1)...(19): siRNA sense strand
gcagugggcggacauucug

SEQ ID NO: 965221 - RNA, 19 nt, Homo sapiens
  misc_RNA (1)...(19): siRNA sense strand
gcagccaucaaggccauua

SEQ ID NO: 965222 - RNA, 19 nt, Homo sapiens
  misc_RNA (1)...(19): siRNA sense strand
gaaguaccggugccgaauc

SEQ ID NO: 965223 - RNA, 19 nt, Homo sapiens
  misc_RNA (1)...(19): siRNA sense strand
cgccaaugguugcaucuuc

SEQ ID NO: 965224 - RNA, 19 nt, Homo sapiens
  misc_RNA (1)...(19): siRNA sense strand
gccaucaaggccauuauga

SEQ ID NO: 965225 - RNA, 19 nt, Homo sapiens
  misc_RNA (1)...(19): siRNA sense strand
acaugggacucuccuucaa

SEQ ID NO: 965226 - RNA, 19 nt, Homo sapiens
  misc_RNA (1)...(19): siRNA sense strand
cguacaaccacgaggagua

SEQ ID NO: 965227 - RNA, 19 nt, Homo sapiens
  misc_RNA (1)...(19): siRNA sense strand
cggagaagcggcucaucaa

SEQ ID NO: 965228 - RNA, 19 nt, Homo sapiens
  misc_RNA (1)...(19): siRNA sense strand
gaggugccagccuuuguga

SEQ ID NO: 965229 - RNA, 19 nt, Homo sapiens
  misc_RNA (1)...(19): siRNA sense strand
cggcaaggccagcaacaug

SEQ ID NO: 965230 - RNA, 19 nt, Homo sapiens
  misc_RNA (1)...(19): siRNA sense strand
gaagcugcccgcucaccau

SEQ ID NO: 965231 - RNA, 19 nt, Homo sapiens
  misc_RNA (1)...(19): siRNA sense strand
ugccagccuuugugaagaa

SEQ ID NO: 965232 - RNA, 19 nt, Homo sapiens
  misc_RNA (1)...(19): siRNA sense strand
gugccagccuuugugaaga

SEQ ID NO: 965233 - RNA, 19 nt, Homo sapiens
  misc_RNA (1)...(19): siRNA sense strand
gacggaaccugcguacaac

SEQ ID NO: 965234 - RNA, 19 nt, Homo sapiens
  misc_RNA (1)...(19): siRNA sense strand
ggucacagucucccugaag

SEQ ID NO: 965235 - RNA, 19 nt, Homo sapiens
  misc_RNA (1)...(19): siRNA sense strand
agugcuaccugcagaagga

SEQ ID NO: 965236 - RNA, 19 nt, Homo sapiens
  misc_RNA (1)...(19): siRNA sense strand
ggaaggggaaggagaaguu

SEQ ID NO: 965237 - RNA, 19 nt, Homo sapiens
  misc_RNA (1)...(19): siRNA sense strand
uaccgcagccugaguuuca

SEQ ID NO: 965238 - RNA, 19 nt, Homo sapiens
  misc_RNA (1)...(19): siRNA sense strand
gcagaugaagcggcacaug

SEQ ID NO: 965239 - RNA, 19 nt, Homo sapiens
  misc_RNA (1)...(19): siRNA sense strand
cuaccuacccuacgaguac

SEQ ID NO: 965240 - RNA, 19 nt, Homo sapiens
  misc_RNA (1)...(19): siRNA sense strand
gacagucgacuacaacaac

SEQ ID NO: 965241 - RNA, 19 nt, Homo sapiens
  misc_RNA (1)...(19): siRNA sense strand
aaguaccggugccgaauca

SEQ ID NO: 965242 - RNA, 19 nt, Homo sapiens
  misc_RNA (1)...(19): siRNA sense strand
uguggacagucgacuacaa

SEQ ID NO: 965243 - RNA, 19 nt, Homo sapiens
  misc_RNA (1)...(19): siRNA sense strand
ucugugagcccuccuucuu

SEQ ID NO: 965244 - RNA, 19 nt, Homo sapiens
  misc_RNA (1)...(19): siRNA sense strand
gcagauccugguccacauc

SEQ ID NO: 965245 - RNA, 19 nt, Homo sapiens
  misc_RNA (1)...(19): siRNA sense strand
gugccagggcugucuguga

SEQ ID NO: 965246 - RNA, 19 nt, Homo sapiens
  misc_RNA (1)...(19): siRNA sense strand
ugaccauguuuccucauac

SEQ ID NO: 965247 - RNA, 19 nt, Homo sapiens
  misc_RNA (1)...(19): siRNA sense strand
accacgggcuaaucuguga

SEQ ID NO: 965248 - RNA, 19 nt, Homo sapiens
  misc_RNA (1)...(19): siRNA sense strand
ggugccagccuuugugaag

SEQ ID NO: 965249 - RNA, 19 nt, Homo sapiens
  misc_RNA (1)...(19): siRNA sense strand
ccacccagagggaccagaa

SEQ ID NO: 965250 - RNA, 19 nt, Homo sapiens
  misc_RNA (1)...(19): siRNA sense strand
agaaggagguggugcugua

SEQ ID NO: 965251 - RNA, 19 nt, Homo sapiens
  misc_RNA (1)...(19): siRNA sense strand
ucacaacgccgacgacaug

SEQ ID NO: 965252 - RNA, 19 nt, Homo sapiens
  misc_RNA (1)...(19): siRNA sense strand
gcggagaccgugcucauga

SEQ ID NO: 965253 - RNA, 19 nt, Homo sapiens
  misc_RNA (1)...(19): siRNA sense strand
agaccgugcucaugaacuu

SEQ ID NO: 965254 - RNA, 19 nt, Homo sapiens
  misc_RNA (1)...(19): siRNA sense strand
cggagaccgugcucaugaa

SEQ ID NO: 965255 - RNA, 19 nt, Homo sapiens
  misc_RNA (1)...(19): siRNA sense strand
gcaguucgccucgcagaag

SEQ ID NO: 965256 - RNA, 19 nt, Homo sapiens
  misc_RNA (1)...(19): siRNA sense strand
ucagaaugcuggaauguua

SEQ ID NO: 965257 - RNA, 19 nt, Homo sapiens
  misc_RNA (1)...(19): siRNA sense strand
gcagauauguuuccagaga

SEQ ID NO: 965258 - RNA, 19 nt, Homo sapiens
  misc_RNA (1)...(19): siRNA sense strand
gaaggcaguugcuguguuu

SEQ ID NO: 965259 - RNA, 19 nt, Homo sapiens
  misc_RNA (1)...(19): siRNA sense strand
gcgaugcccuccacaauuu

SEQ ID NO: 965260 - RNA, 19 nt, Homo sapiens
  misc_RNA (1)...(19): siRNA sense strand
caaauucucugucaucugu

SEQ ID NO: 965261 - RNA, 19 nt, Homo sapiens
  misc_RNA (1)...(19): siRNA sense strand
gaaagaaugcuaaagaugu

SEQ ID NO: 965262 - RNA, 19 nt, Homo sapiens
  misc_RNA (1)...(19): siRNA sense strand
gauuucaccuucuucauga

SEQ ID NO: 965263 - RNA, 19 nt, Homo sapiens
  misc_RNA (1)...(19): siRNA sense strand
uaacuuugguccucaagaa

SEQ ID NO: 965264 - RNA, 19 nt, Homo sapiens
  misc_RNA (1)...(19): siRNA sense strand
gcaacaauuucgcuccaaa

SEQ ID NO: 965265 - RNA, 19 nt, Homo sapiens
  misc_RNA (1)...(19): siRNA sense strand
ugaaugauaugcugagaga

SEQ ID NO: 965266 - RNA, 19 nt, Homo sapiens
  misc_RNA (1)...(19): siRNA sense strand
ucaucaaccuaaagcauua

SEQ ID NO: 965267 - RNA, 19 nt, Homo sapiens
  misc_RNA (1)...(19): siRNA sense strand
ugacuccacugauaaagaa

SEQ ID NO: 965268 - RNA, 19 nt, Homo sapiens
  misc_RNA (1)...(19): siRNA sense strand
ccaaauaaccagcuccaaa

SEQ ID NO: 965269 - RNA, 19 nt, Homo sapiens
  misc_RNA (1)...(19): siRNA sense strand
caaauaaccagcuccaaau

SEQ ID NO: 965270 - RNA, 19 nt, Homo sapiens
  misc_RNA (1)...(19): siRNA sense strand
gcauguuccugcuauguug

SEQ ID NO: 965271 - RNA, 19 nt, Homo sapiens
  misc_RNA (1)...(19): siRNA sense strand
gcauguuccucuauauuuc

SEQ ID NO: 965272 - RNA, 19 nt, Homo sapiens
  misc_RNA (1)...(19): siRNA sense strand
aaagacauauggucagaau

SEQ ID NO: 965273 - RNA, 19 nt, Homo sapiens
  misc_RNA (1)...(19): siRNA sense strand
ucaauggugugacaugcua

SEQ ID NO: 965274 - RNA, 19 nt, Homo sapiens
  misc_RNA (1)...(19): siRNA sense strand
gaauggucauacccacuuu

SEQ ID NO: 965275 - RNA, 19 nt, Homo sapiens
  misc_RNA (1)...(19): siRNA sense strand
caacuuccuuucugcaugu

SEQ ID NO: 965276 - RNA, 19 nt, Homo sapiens
  misc_RNA (1)...(19): siRNA sense strand
ggucauacccacuuuggaa

SEQ ID NO: 965277 - RNA, 19 nt, Homo sapiens
  misc_RNA (1)...(19): siRNA sense strand
acgauugccuggaugauaa

SEQ ID NO: 965278 - RNA, 19 nt, Homo sapiens
  misc_RNA (1)...(19): siRNA sense strand
caggagaaaucgaauugga

SEQ ID NO: 965279 - RNA, 19 nt, Homo sapiens
  misc_RNA (1)...(19): siRNA sense strand
ccaagucauucagaaguuu

SEQ ID NO: 965280 - RNA, 19 nt, Homo sapiens
  misc_RNA (1)...(19): siRNA sense strand
gcccaaacugucagaaaua

SEQ ID NO: 965281 - RNA, 19 nt, Homo sapiens
  misc_RNA (1)...(19): siRNA sense strand
ggcccaaacugucagaaau

SEQ ID NO: 965282 - RNA, 19 nt, Homo sapiens
  misc_RNA (1)...(19): siRNA sense strand
aaagguaacuggaagaaaa

SEQ ID NO: 965283 - RNA, 19 nt, Homo sapiens
  misc_RNA (1)...(19): siRNA sense strand
ucaaaugcuacccaaauaa

SEQ ID NO: 965284 - RNA, 19 nt, Homo sapiens
  misc_RNA (1)...(19): siRNA sense strand
uuccagagaugaaugauau

SEQ ID NO: 965285 - RNA, 19 nt, Homo sapiens
  misc_RNA (1)...(19): siRNA sense strand
ggugugacaugcuaugcaa

SEQ ID NO: 965286 - RNA, 19 nt, Homo sapiens
  misc_RNA (1)...(19): siRNA sense strand
caaagucgacaguuauguu

SEQ ID NO: 965287 - RNA, 19 nt, Homo sapiens
  misc_RNA (1)...(19): siRNA sense strand
uuacagcaauugaacuuuc

SEQ ID NO: 965288 - RNA, 19 nt, Homo sapiens
  misc_RNA (1)...(19): siRNA sense strand
gcuggaauguuaacuggau

SEQ ID NO: 965289 - RNA, 19 nt, Homo sapiens
  misc_RNA (1)...(19): siRNA sense strand
uucaaaugcuacccaaaua

SEQ ID NO: 965290 - RNA, 19 nt, Homo sapiens
  misc_RNA (1)...(19): siRNA sense strand
ggcauguuccucuauauuu

SEQ ID NO: 965291 - RNA, 19 nt, Homo sapiens
  misc_RNA (1)...(19): siRNA sense strand
ccagaggcauuuggauuug

SEQ ID NO: 965292 - RNA, 19 nt, Homo sapiens
  misc_RNA (1)...(19): siRNA sense strand
uggcaucucuccucggauu

SEQ ID NO: 965293 - RNA, 19 nt, Homo sapiens
  misc_RNA (1)...(19): siRNA sense strand
aauguuaacuggauucaca

SEQ ID NO: 965294 - RNA, 19 nt, Homo sapiens
  misc_RNA (1)...(19): siRNA sense strand
gauuuugacuccacugaua

SEQ ID NO: 965295 - RNA, 19 nt, Homo sapiens
  misc_RNA (1)...(19): siRNA sense strand
gauauggauuccugucagu

SEQ ID NO: 965296 - RNA, 19 nt, Homo sapiens
  misc_RNA (1)...(19): siRNA sense strand
cgacaguuauguugagaag

SEQ ID NO: 965297 - RNA, 19 nt, Homo sapiens
  misc_RNA (1)...(19): siRNA sense strand
gggacucaguacuuccaua

SEQ ID NO: 965298 - RNA, 19 nt, Homo sapiens
  misc_RNA (1)...(19): siRNA sense strand
gacgauugccuggaugaua

SEQ ID NO: 965299 - RNA, 19 nt, Homo sapiens
  misc_RNA (1)...(19): siRNA sense strand
uuaaagacauauggucaga

SEQ ID NO: 965300 - RNA, 19 nt, Homo sapiens
  misc_RNA (1)...(19): siRNA sense strand
ucagaaauagggacgauug

SEQ ID NO: 965301 - RNA, 19 nt, Homo sapiens
  misc_RNA (1)...(19): siRNA sense strand
cacagaagcuaauggacau

SEQ ID NO: 965302 - RNA, 19 nt, Homo sapiens
  misc_RNA (1)...(19): siRNA sense strand
caucuguccagcagucuua

SEQ ID NO: 965303 - RNA, 19 nt, Homo sapiens
  misc_RNA (1)...(19): siRNA sense strand
agaaaucgaauuggaguaa

SEQ ID NO: 965304 - RNA, 19 nt, Homo sapiens
  misc_RNA (1)...(19): siRNA sense strand
gaugaaugauaugcugaga

SEQ ID NO: 965305 - RNA, 19 nt, Homo sapiens
  misc_RNA (1)...(19): siRNA sense strand
gauaaugucagugugguau

SEQ ID NO: 965306 - RNA, 19 nt, Homo sapiens
  misc_RNA (1)...(19): siRNA sense strand
ugaaagaaugcuaaagaug

SEQ ID NO: 965307 - RNA, 19 nt, Homo sapiens
  misc_RNA (1)...(19): siRNA sense strand
aaaccgauuucaccuucuu

SEQ ID NO: 965308 - RNA, 19 nt, Homo sapiens
  misc_RNA (1)...(19): siRNA sense strand
aaugauaugcugagagaaa

SEQ ID NO: 965309 - RNA, 19 nt, Homo sapiens
  misc_RNA (1)...(19): siRNA sense strand
ggacucaguacuuccauag

SEQ ID NO: 965310 - RNA, 19 nt, Homo sapiens
  misc_RNA (1)...(19): siRNA sense strand
ccaaguucauguaccuguu

SEQ ID NO: 965311 - RNA, 19 nt, Homo sapiens
  misc_RNA (1)...(19): siRNA sense strand
aaagagccaaguucaugua

SEQ ID NO: 965312 - RNA, 19 nt, Homo sapiens
  misc_RNA (1)...(19): siRNA sense strand
gggaugagcacucgacaag

SEQ ID NO: 965313 - RNA, 19 nt, Homo sapiens
  misc_RNA (1)...(19): siRNA sense strand
caaguucauguaccuguuu

SEQ ID NO: 965314 - RNA, 19 nt, Homo sapiens
  misc_RNA (1)...(19): siRNA sense strand
ccagcagucuuacagcaau

SEQ ID NO: 965315 - RNA, 19 nt, Homo sapiens
  misc_RNA (1)...(19): siRNA sense strand
uuauuaaucuggcaucucu

SEQ ID NO: 965316 - RNA, 19 nt, Homo sapiens
  misc_RNA (1)...(19): siRNA sense strand
guuaggagacuuugugauc

SEQ ID NO: 965317 - RNA, 19 nt, Homo sapiens
  misc_RNA (1)...(19): siRNA sense strand
guguuuaacugcugaagag

SEQ ID NO: 965318 - RNA, 19 nt, Homo sapiens
  misc_RNA (1)...(19): siRNA sense strand
ugugguaucucuacaggau

SEQ ID NO: 965319 - RNA, 19 nt, Homo sapiens
  misc_RNA (1)...(19): siRNA sense strand
cuucauggcuuuucaaaug

SEQ ID NO: 965320 - RNA, 19 nt, Homo sapiens
  misc_RNA (1)...(19): siRNA sense strand
agaaggcaguugcuguguu

SEQ ID NO: 965321 - RNA, 19 nt, Homo sapiens
  misc_RNA (1)...(19): siRNA sense strand
gagaaaucgaauuggagua

SEQ ID NO: 965322 - RNA, 19 nt, Homo sapiens
  misc_RNA (1)...(19): siRNA sense strand
ucacagccauucuacucau

SEQ ID NO: 965323 - RNA, 19 nt, Homo sapiens
  misc_RNA (1)...(19): siRNA sense strand
gaccaagucauucagaagu

SEQ ID NO: 965324 - RNA, 19 nt, Homo sapiens
  misc_RNA (1)...(19): siRNA sense strand
gagccaaguucauguaccu

SEQ ID NO: 965325 - RNA, 19 nt, Homo sapiens
  misc_RNA (1)...(19): siRNA sense strand
agcauuaccugccaucaau

SEQ ID NO: 965326 - RNA, 19 nt, Homo sapiens
  misc_RNA (1)...(19): siRNA sense strand
aaauaaccagcuccaaauu

SEQ ID NO: 965327 - RNA, 19 nt, Homo sapiens
  misc_RNA (1)...(19): siRNA sense strand
auaaccagcuccaaauucu

SEQ ID NO: 965328 - RNA, 19 nt, Homo sapiens
  misc_RNA (1)...(19): siRNA sense strand
agacauauggucagaaugg

SEQ ID NO: 965329 - RNA, 19 nt, Homo sapiens
  misc_RNA (1)...(19): siRNA sense strand
ggaguuuccccacgaguua

SEQ ID NO: 965330 - RNA, 19 nt, Homo sapiens
  misc_RNA (1)...(19): siRNA sense strand
aaacaagaccaagucauuc

SEQ ID NO: 965331 - RNA, 19 nt, Homo sapiens
  misc_RNA (1)...(19): siRNA sense strand
uaccuuguaugcaggagaa

SEQ ID NO: 965332 - RNA, 19 nt, Homo sapiens
  misc_RNA (1)...(19): siRNA sense strand
caaaugcuacccaaauaac

SEQ ID NO: 965333 - RNA, 19 nt, Homo sapiens
  misc_RNA (1)...(19): siRNA sense strand
cgauuucaccuucuucaug

SEQ ID NO: 965334 - RNA, 19 nt, Homo sapiens
  misc_RNA (1)...(19): siRNA sense strand
cagaggcauuuggauuuga

SEQ ID NO: 965335 - RNA, 19 nt, Homo sapiens
  misc_RNA (1)...(19): siRNA sense strand
cauacccacuuuggaaaug

SEQ ID NO: 965336 - RNA, 19 nt, Homo sapiens
  misc_RNA (1)...(19): siRNA sense strand
cgaguuaggagacuuugug

SEQ ID NO: 965337 - RNA, 19 nt, Homo sapiens
  misc_RNA (1)...(19): siRNA sense strand
ccacgaguuaggagacuuu

SEQ ID NO: 965338 - RNA, 19 nt, Homo sapiens
  misc_RNA (1)...(19): siRNA sense strand
cagcagucuuacagcaauu

SEQ ID NO: 965339 - RNA, 19 nt, Homo sapiens
  misc_RNA (1)...(19): siRNA sense strand
caagaccaagucauucaga

SEQ ID NO: 965340 - RNA, 19 nt, Homo sapiens
  misc_RNA (1)...(19): siRNA sense strand
cagaaugcuggaauguuaa

SEQ ID NO: 965341 - RNA, 19 nt, Homo sapiens
  misc_RNA (1)...(19): siRNA sense strand
aucccaaagucgacaguua

SEQ ID NO: 965342 - RNA, 19 nt, Homo sapiens
  misc_RNA (1)...(19): siRNA sense strand
cuauucaacuuccuuucug

SEQ ID NO: 965343 - RNA, 19 nt, Homo sapiens
  misc_RNA (1)...(19): siRNA sense strand
agauauguuuccagagaug

SEQ ID NO: 965344 - RNA, 19 nt, Homo sapiens
  misc_RNA (1)...(19): siRNA sense strand
aagaccaagucauucagaa

SEQ ID NO: 965345 - RNA, 19 nt, Homo sapiens
  misc_RNA (1)...(19): siRNA sense strand
cagauauguuuccagagau

SEQ ID NO: 965346 - RNA, 19 nt, Homo sapiens
  misc_RNA (1)...(19): siRNA sense strand
aaagucgacaguuauguug

SEQ ID NO: 965347 - RNA, 19 nt, Homo sapiens
  misc_RNA (1)...(19): siRNA sense strand
gggcccaaacugucagaaa

SEQ ID NO: 965348 - RNA, 19 nt, Homo sapiens
  misc_RNA (1)...(19): siRNA sense strand
gaaaagguaacuggaagaa

SEQ ID NO: 965349 - RNA, 19 nt, Homo sapiens
  misc_RNA (1)...(19): siRNA sense strand
cccaaacugucagaaauag

SEQ ID NO: 965350 - RNA, 19 nt, Homo sapiens
  misc_RNA (1)...(19): siRNA sense strand
uagggacgauugccuggau

SEQ ID NO: 965351 - RNA, 19 nt, Homo sapiens
  misc_RNA (1)...(19): siRNA sense strand
guaugcaggagaaaucgaa

SEQ ID NO: 965352 - RNA, 19 nt, Homo sapiens
  misc_RNA (1)...(19): siRNA sense strand
acagccauucuacucauua

SEQ ID NO: 965353 - RNA, 19 nt, Homo sapiens
  misc_RNA (1)...(19): siRNA sense strand
gcuauucaacuuccuuucu

SEQ ID NO: 965354 - RNA, 19 nt, Homo sapiens
  misc_RNA (1)...(19): siRNA sense strand
acucaguacuuccauagca

SEQ ID NO: 965355 - RNA, 19 nt, Homo sapiens
  misc_RNA (1)...(19): siRNA sense strand
ccauucuacucauuaccuu

SEQ ID NO: 965356 - RNA, 19 nt, Homo sapiens
  misc_RNA (1)...(19): siRNA sense strand
ggagaugucuggcucugua

SEQ ID NO: 965357 - RNA, 19 nt, Homo sapiens
  misc_RNA (1)...(19): siRNA sense strand
acacggaucuguacaauug

SEQ ID NO: 965358 - RNA, 19 nt, Homo sapiens
  misc_RNA (1)...(19): siRNA sense strand
gagaagaauuugaccuuug

SEQ ID NO: 965359 - RNA, 19 nt, Homo sapiens
  misc_RNA (1)...(19): siRNA sense strand
gaaagugaccagugugaaa

SEQ ID NO: 965360 - RNA, 19 nt, Homo sapiens
  misc_RNA (1)...(19): siRNA sense strand
gagcguuucuucccauuug

SEQ ID NO: 965361 - RNA, 19 nt, Homo sapiens
  misc_RNA (1)...(19): siRNA sense strand
gcagugugcuggcucuuug

SEQ ID NO: 965362 - RNA, 19 nt, Homo sapiens
  misc_RNA (1)...(19): siRNA sense strand
gggaguccaauauaaauua

SEQ ID NO: 965363 - RNA, 19 nt, Homo sapiens
  misc_RNA (1)...(19): siRNA sense strand
gagcucagacgauggauuu

SEQ ID NO: 965364 - RNA, 19 nt, Homo sapiens
  misc_RNA (1)...(19): siRNA sense strand
aaacuuaggccauggauau

SEQ ID NO: 965365 - RNA, 19 nt, Homo sapiens
  misc_RNA (1)...(19): siRNA sense strand
agaagaauuugaccuuuga

SEQ ID NO: 965366 - RNA, 19 nt, Homo sapiens
  misc_RNA (1)...(19): siRNA sense strand
ugaagaaagugaccagugu

SEQ ID NO: 965367 - RNA, 19 nt, Homo sapiens
  misc_RNA (1)...(19): siRNA sense strand
ggucuaagcccaccucaga

SEQ ID NO: 965368 - RNA, 19 nt, Homo sapiens
  misc_RNA (1)...(19): siRNA sense strand
ccaaagaugcccaauacuu

SEQ ID NO: 965369 - RNA, 19 nt, Homo sapiens
  misc_RNA (1)...(19): siRNA sense strand
ccacguggccuugugaaua

SEQ ID NO: 965370 - RNA, 19 nt, Homo sapiens
  misc_RNA (1)...(19): siRNA sense strand
gaagugauggcacaacaga

SEQ ID NO: 965371 - RNA, 19 nt, Homo sapiens
  misc_RNA (1)...(19): siRNA sense strand
aaacaaggguccauuccau

SEQ ID NO: 965372 - RNA, 19 nt, Homo sapiens
  misc_RNA (1)...(19): siRNA sense strand
cauccacugugcaauauga

SEQ ID NO: 965373 - RNA, 19 nt, Homo sapiens
  misc_RNA (1)...(19): siRNA sense strand
uauuugagaucuccuguug

SEQ ID NO: 965374 - RNA, 19 nt, Homo sapiens
  misc_RNA (1)...(19): siRNA sense strand
ugcucaaucucacauauua

SEQ ID NO: 965375 - RNA, 19 nt, Homo sapiens
  misc_RNA (1)...(19): siRNA sense strand
cauccacccucgagauaaa

SEQ ID NO: 965376 - RNA, 19 nt, Homo sapiens
  misc_RNA (1)...(19): siRNA sense strand
gaagagcucagacgaugga

SEQ ID NO: 965377 - RNA, 19 nt, Homo sapiens
  misc_RNA (1)...(19): siRNA sense strand
uaacacggaucuguacaau

SEQ ID NO: 965378 - RNA, 19 nt, Homo sapiens
  misc_RNA (1)...(19): siRNA sense strand
cuucagauuugucuaagaa

SEQ ID NO: 965379 - RNA, 19 nt, Homo sapiens
  misc_RNA (1)...(19): siRNA sense strand
ugagaagaauuugaccuuu

SEQ ID NO: 965380 - RNA, 19 nt, Homo sapiens
  misc_RNA (1)...(19): siRNA sense strand
cagaguaacaugcagauga

SEQ ID NO: 965381 - RNA, 19 nt, Homo sapiens
  misc_RNA (1)...(19): siRNA sense strand
uggaggaccuuucgaagug

SEQ ID NO: 965382 - RNA, 19 nt, Homo sapiens
  misc_RNA (1)...(19): siRNA sense strand
gaaaccaucaugaagaaag

SEQ ID NO: 965383 - RNA, 19 nt, Homo sapiens
  misc_RNA (1)...(19): siRNA sense strand
cacguggccuugugaauau

SEQ ID NO: 965384 - RNA, 19 nt, Homo sapiens
  misc_RNA (1)...(19): siRNA sense strand
gauagagacucgccuuuug

SEQ ID NO: 965385 - RNA, 19 nt, Homo sapiens
  misc_RNA (1)...(19): siRNA sense strand
ucagauuugucuaagaaga

SEQ ID NO: 965386 - RNA, 19 nt, Homo sapiens
  misc_RNA (1)...(19): siRNA sense strand
gaaggaccacugccugaga

SEQ ID NO: 965387 - RNA, 19 nt, Homo sapiens
  misc_RNA (1)...(19): siRNA sense strand
aggaaaccaucaugaagaa

SEQ ID NO: 965388 - RNA, 19 nt, Homo sapiens
  misc_RNA (1)...(19): siRNA sense strand
ggaggaccuuucgaaguga

SEQ ID NO: 965389 - RNA, 19 nt, Homo sapiens
  misc_RNA (1)...(19): siRNA sense strand
gcaaauccaggugcagaaa

SEQ ID NO: 965390 - RNA, 19 nt, Homo sapiens
  misc_RNA (1)...(19): siRNA sense strand
gcuauggaucucugugaua

SEQ ID NO: 965391 - RNA, 19 nt, Homo sapiens
  misc_RNA (1)...(19): siRNA sense strand
ccauggauauuucaaguac

SEQ ID NO: 965392 - RNA, 19 nt, Homo sapiens
  misc_RNA (1)...(19): siRNA sense strand
uuucauggcuguagcuaug

SEQ ID NO: 965393 - RNA, 19 nt, Homo sapiens
  misc_RNA (1)...(19): siRNA sense strand
acaacagacuuuggagaaa

SEQ ID NO: 965394 - RNA, 19 nt, Homo sapiens
  misc_RNA (1)...(19): siRNA sense strand
cuucauugcuuucauuaca

SEQ ID NO: 965395 - RNA, 19 nt, Homo sapiens
  misc_RNA (1)...(19): siRNA sense strand
caggaaaccaucaugaaga

SEQ ID NO: 965396 - RNA, 19 nt, Homo sapiens
  misc_RNA (1)...(19): siRNA sense strand
cagauccguuggcaucaaa

SEQ ID NO: 965397 - RNA, 19 nt, Homo sapiens
  misc_RNA (1)...(19): siRNA sense strand
ggccauggauauuucaagu

SEQ ID NO: 965398 - RNA, 19 nt, Homo sapiens
  misc_RNA (1)...(19): siRNA sense strand
gguacuggauccuaugaag

SEQ ID NO: 965399 - RNA, 19 nt, Homo sapiens
  misc_RNA (1)...(19): siRNA sense strand
gcaauaugacucugaaagg

SEQ ID NO: 965400 - RNA, 19 nt, Homo sapiens
  misc_RNA (1)...(19): siRNA sense strand
caagggaguugucuaacac

SEQ ID NO: 965401 - RNA, 19 nt, Homo sapiens
  misc_RNA (1)...(19): siRNA sense strand
caacagacuuuggagaaaa

SEQ ID NO: 965402 - RNA, 19 nt, Homo sapiens
  misc_RNA (1)...(19): siRNA sense strand
cagcagacuucggcuaugu

SEQ ID NO: 965403 - RNA, 19 nt, Homo sapiens
  misc_RNA (1)...(19): siRNA sense strand
gacaacaagauauuugaga

SEQ ID NO: 965404 - RNA, 19 nt, Homo sapiens
  misc_RNA (1)...(19): siRNA sense strand
gcugcucaaucucacauau

SEQ ID NO: 965405 - RNA, 19 nt, Homo sapiens
  misc_RNA (1)...(19): siRNA sense strand
ggucaggaaaccaucauga

SEQ ID NO: 965406 - RNA, 19 nt, Homo sapiens
  misc_RNA (1)...(19): siRNA sense strand
ugaaagggguaguauggua

SEQ ID NO: 965407 - RNA, 19 nt, Homo sapiens
  misc_RNA (1)...(19): siRNA sense strand
gcacucuguucucuggaau

SEQ ID NO: 965408 - RNA, 19 nt, Homo sapiens
  misc_RNA (1)...(19): siRNA sense strand
ucucacauauuaccagcaa

SEQ ID NO: 965409 - RNA, 19 nt, Homo sapiens
  misc_RNA (1)...(19): siRNA sense strand
cacaacagacuuuggagaa

SEQ ID NO: 965410 - RNA, 19 nt, Homo sapiens
  misc_RNA (1)...(19): siRNA sense strand
uggcuuaucggcugcauuu

SEQ ID NO: 965411 - RNA, 19 nt, Homo sapiens
  misc_RNA (1)...(19): siRNA sense strand
acccaaagaugcccaauac

SEQ ID NO: 965412 - RNA, 19 nt, Homo sapiens
  misc_RNA (1)...(19): siRNA sense strand
cacauucccugcacucauc

SEQ ID NO: 965413 - RNA, 19 nt, Homo sapiens
  misc_RNA (1)...(19): siRNA sense strand
caacaagauauuugagauc

SEQ ID NO: 965414 - RNA, 19 nt, Homo sapiens
  misc_RNA (1)...(19): siRNA sense strand
gcagacggagcguuucuuc

SEQ ID NO: 965415 - RNA, 19 nt, Homo sapiens
  misc_RNA (1)...(19): siRNA sense strand
gcaucaaacagcagacuuc

SEQ ID NO: 965416 - RNA, 19 nt, Homo sapiens
  misc_RNA (1)...(19): siRNA sense strand
ucacauauuaccagcaaau

SEQ ID NO: 965417 - RNA, 19 nt, Homo sapiens
  misc_RNA (1)...(19): siRNA sense strand
guucaugacguccuguuug

SEQ ID NO: 965418 - RNA, 19 nt, Homo sapiens
  misc_RNA (1)...(19): siRNA sense strand
gcgaucgauucuugucaug

SEQ ID NO: 965419 - RNA, 19 nt, Homo sapiens
  misc_RNA (1)...(19): siRNA sense strand
aaaccaucaugaagaaagu

SEQ ID NO: 965420 - RNA, 19 nt, Homo sapiens
  misc_RNA (1)...(19): siRNA sense strand
ugucuaacacugcggcaua

SEQ ID NO: 965421 - RNA, 19 nt, Homo sapiens
  misc_RNA (1)...(19): siRNA sense strand
ggaccacguggccuuguga

SEQ ID NO: 965422 - RNA, 19 nt, Homo sapiens
  misc_RNA (1)...(19): siRNA sense strand
gcagugaccaucgaugcaa

SEQ ID NO: 965423 - RNA, 19 nt, Homo sapiens
  misc_RNA (1)...(19): siRNA sense strand
ugaaagcucacucugauac

SEQ ID NO: 965424 - RNA, 19 nt, Homo sapiens
  misc_RNA (1)...(19): siRNA sense strand
gcacauucccugcacucau

SEQ ID NO: 965425 - RNA, 19 nt, Homo sapiens
  misc_RNA (1)...(19): siRNA sense strand
ucauugcuuucauuacaga

SEQ ID NO: 965426 - RNA, 19 nt, Homo sapiens
  misc_RNA (1)...(19): siRNA sense strand
aaggaccacugccugagaa

SEQ ID NO: 965427 - RNA, 19 nt, Homo sapiens
  misc_RNA (1)...(19): siRNA sense strand
gugagaagaauuugaccuu

SEQ ID NO: 965428 - RNA, 19 nt, Homo sapiens
  misc_RNA (1)...(19): siRNA sense strand
gcauccacccucgagauaa

SEQ ID NO: 965429 - RNA, 19 nt, Homo sapiens
  misc_RNA (1)...(19): siRNA sense strand
ccagauccguuggcaucaa

SEQ ID NO: 965430 - RNA, 19 nt, Homo sapiens
  misc_RNA (1)...(19): siRNA sense strand
ccaguaagcacucuguucu

SEQ ID NO: 965431 - RNA, 19 nt, Homo sapiens
  misc_RNA (1)...(19): siRNA sense strand
ggacaacaagauauuugag

SEQ ID NO: 965432 - RNA, 19 nt, Homo sapiens
  misc_RNA (1)...(19): siRNA sense strand
gaccacugccugagaagau

SEQ ID NO: 965433 - RNA, 19 nt, Homo sapiens
  misc_RNA (1)...(19): siRNA sense strand
uaagaagagcucagacgau

SEQ ID NO: 965434 - RNA, 19 nt, Homo sapiens
  misc_RNA (1)...(19): siRNA sense strand
guaacaugcagaugacugu

SEQ ID NO: 965435 - RNA, 19 nt, Homo sapiens
  misc_RNA (1)...(19): siRNA sense strand
gaagaauuugaccuuugaa

SEQ ID NO: 965436 - RNA, 19 nt, Homo sapiens
  misc_RNA (1)...(19): siRNA sense strand
ggaaaccaucaugaagaaa

SEQ ID NO: 965437 - RNA, 19 nt, Homo sapiens
  misc_RNA (1)...(19): siRNA sense strand
ucccugcacucaucgaaga

SEQ ID NO: 965438 - RNA, 19 nt, Homo sapiens
  misc_RNA (1)...(19): siRNA sense strand
acaugcagaugacuguguu

SEQ ID NO: 965439 - RNA, 19 nt, Homo sapiens
  misc_RNA (1)...(19): siRNA sense strand
ucuaagcccaccucagaaa

SEQ ID NO: 965440 - RNA, 19 nt, Homo sapiens
  misc_RNA (1)...(19): siRNA sense strand
uuugagaucuccuguugca

SEQ ID NO: 965441 - RNA, 19 nt, Homo sapiens
  misc_RNA (1)...(19): siRNA sense strand
ucuguacaauugcacauuc

SEQ ID NO: 965442 - RNA, 19 nt, Homo sapiens
  misc_RNA (1)...(19): siRNA sense strand
gccaugauccauccacugu

SEQ ID NO: 965443 - RNA, 19 nt, Homo sapiens
  misc_RNA (1)...(19): siRNA sense strand
gccauggauauuucaagua

SEQ ID NO: 965444 - RNA, 19 nt, Homo sapiens
  misc_RNA (1)...(19): siRNA sense strand
cuuaggccauggauauuuc

SEQ ID NO: 965445 - RNA, 19 nt, Homo sapiens
  misc_RNA (1)...(19): siRNA sense strand
ggagcuggaggaccuuguu

SEQ ID NO: 965446 - RNA, 19 nt, Homo sapiens
  misc_RNA (1)...(19): siRNA sense strand
ggcgaucgauucuugucau

SEQ ID NO: 965447 - RNA, 19 nt, Homo sapiens
  misc_RNA (1)...(19): siRNA sense strand
gcuuccagcuucuaugaac

SEQ ID NO: 965448 - RNA, 19 nt, Homo sapiens
  misc_RNA (1)...(19): siRNA sense strand
ucgaagugauggcacaaca

SEQ ID NO: 965449 - RNA, 19 nt, Homo sapiens
  misc_RNA (1)...(19): siRNA sense strand
uuuaugacacucugcagua

SEQ ID NO: 965450 - RNA, 19 nt, Homo sapiens
  misc_RNA (1)...(19): siRNA sense strand
ggauauuucaaguacaugu

SEQ ID NO: 965451 - RNA, 19 nt, Homo sapiens
  misc_RNA (1)...(19): siRNA sense strand
cuuauggugagaagaauuu

SEQ ID NO: 965452 - RNA, 19 nt, Homo sapiens
  misc_RNA (1)...(19): siRNA sense strand
gcucuccgcuaugcuugga

SEQ ID NO: 965453 - RNA, 19 nt, Homo sapiens
  misc_RNA (1)...(19): siRNA sense strand
ggagcguuucuucccauuu

SEQ ID NO: 965454 - RNA, 19 nt, Homo sapiens
  misc_RNA (1)...(19): siRNA sense strand
gucaggaaaccaucaugaa

SEQ ID NO: 965455 - RNA, 19 nt, Homo sapiens
  misc_RNA (1)...(19): siRNA sense strand
gaugcccaauacuuucaug

SEQ ID NO: 965456 - RNA, 19 nt, Homo sapiens
  misc_RNA (1)...(19): siRNA sense strand
ggagaugucuggcucugua

SEQ ID NO: 965457 - RNA, 19 nt, Homo sapiens
  misc_RNA (1)...(19): siRNA sense strand
acacggaucuguacaauug

SEQ ID NO: 965458 - RNA, 19 nt, Homo sapiens
  misc_RNA (1)...(19): siRNA sense strand
gagaagaauuugaccuuug

SEQ ID NO: 965459 - RNA, 19 nt, Homo sapiens
  misc_RNA (1)...(19): siRNA sense strand
gaaagugaccagugugaaa

SEQ ID NO: 965460 - RNA, 19 nt, Homo sapiens
  misc_RNA (1)...(19): siRNA sense strand
gagcguuucuucccauuug

SEQ ID NO: 965461 - RNA, 19 nt, Homo sapiens
  misc_RNA (1)...(19): siRNA sense strand
gcagugugcuggcucuuug

SEQ ID NO: 965462 - RNA, 19 nt, Homo sapiens
  misc_RNA (1)...(19): siRNA sense strand
gggaguccaauauaaauua

SEQ ID NO: 965463 - RNA, 19 nt, Homo sapiens
  misc_RNA (1)...(19): siRNA sense strand
gagcucagacgauggauuu

SEQ ID NO: 965464 - RNA, 19 nt, Homo sapiens
  misc_RNA (1)...(19): siRNA sense strand
aaacuuaggccauggauau

SEQ ID NO: 965465 - RNA, 19 nt, Homo sapiens
  misc_RNA (1)...(19): siRNA sense strand
agaagaauuugaccuuuga

SEQ ID NO: 965466 - RNA, 19 nt, Homo sapiens
  misc_RNA (1)...(19): siRNA sense strand
ugaagaaagugaccagugu

SEQ ID NO: 965467 - RNA, 19 nt, Homo sapiens
  misc_RNA (1)...(19): siRNA sense strand
ggucuaagcccaccucaga

SEQ ID NO: 965468 - RNA, 19 nt, Homo sapiens
  misc_RNA (1)...(19): siRNA sense strand
ccaaagaugcccaauacuu

SEQ ID NO: 965469 - RNA, 19 nt, Homo sapiens
  misc_RNA (1)...(19): siRNA sense strand
ccacguggccuugugaaua

SEQ ID NO: 965470 - RNA, 19 nt, Homo sapiens
  misc_RNA (1)...(19): siRNA sense strand
gaagugauggcacaacaga

SEQ ID NO: 965471 - RNA, 19 nt, Homo sapiens
  misc_RNA (1)...(19): siRNA sense strand
aaacaaggguccauuccau

SEQ ID NO: 965472 - RNA, 19 nt, Homo sapiens
  misc_RNA (1)...(19): siRNA sense strand
cauccacugugcaauauga

SEQ ID NO: 965473 - RNA, 19 nt, Homo sapiens
  misc_RNA (1)...(19): siRNA sense strand
uauuugagaucuccuguug

SEQ ID NO: 965474 - RNA, 19 nt, Homo sapiens
  misc_RNA (1)...(19): siRNA sense strand
ugcucaaucucacauauua

SEQ ID NO: 965475 - RNA, 19 nt, Homo sapiens
  misc_RNA (1)...(19): siRNA sense strand
cauccacccucgagauaaa

SEQ ID NO: 965476 - RNA, 19 nt, Homo sapiens
  misc_RNA (1)...(19): siRNA sense strand
gaagagcucagacgaugga

SEQ ID NO: 965477 - RNA, 19 nt, Homo sapiens
  misc_RNA (1)...(19): siRNA sense strand
uaacacggaucuguacaau

SEQ ID NO: 965478 - RNA, 19 nt, Homo sapiens
  misc_RNA (1)...(19): siRNA sense strand
cuucagauuugucuaagaa

SEQ ID NO: 965479 - RNA, 19 nt, Homo sapiens
  misc_RNA (1)...(19): siRNA sense strand
ugagaagaauuugaccuuu

SEQ ID NO: 965480 - RNA, 19 nt, Homo sapiens
  misc_RNA (1)...(19): siRNA sense strand
cagaguaacaugcagauga

SEQ ID NO: 965481 - RNA, 19 nt, Homo sapiens
  misc_RNA (1)...(19): siRNA sense strand
uggaggaccuuucgaagug

SEQ ID NO: 965482 - RNA, 19 nt, Homo sapiens
  misc_RNA (1)...(19): siRNA sense strand
gaaaccaucaugaagaaag

SEQ ID NO: 965483 - RNA, 19 nt, Homo sapiens
  misc_RNA (1)...(19): siRNA sense strand
cacguggccuugugaauau

SEQ ID NO: 965484 - RNA, 19 nt, Homo sapiens
  misc_RNA (1)...(19): siRNA sense strand
gauagagacucgccuuuug

SEQ ID NO: 965485 - RNA, 19 nt, Homo sapiens
  misc_RNA (1)...(19): siRNA sense strand
ucagauuugucuaagaaga

SEQ ID NO: 965486 - RNA, 19 nt, Homo sapiens
  misc_RNA (1)...(19): siRNA sense strand
gaaggaccacugccugaga

SEQ ID NO: 965487 - RNA, 19 nt, Homo sapiens
  misc_RNA (1)...(19): siRNA sense strand
aggaaaccaucaugaagaa

SEQ ID NO: 965488 - RNA, 19 nt, Homo sapiens
  misc_RNA (1)...(19): siRNA sense strand
ggaggaccuuucgaaguga

SEQ ID NO: 965489 - RNA, 19 nt, Homo sapiens
  misc_RNA (1)...(19): siRNA sense strand
gcaaauccaggugcagaaa

SEQ ID NO: 965490 - RNA, 19 nt, Homo sapiens
  misc_RNA (1)...(19): siRNA sense strand
gcuauggaucucugugaua

SEQ ID NO: 965491 - RNA, 19 nt, Homo sapiens
  misc_RNA (1)...(19): siRNA sense strand
ccauggauauuucaaguac

SEQ ID NO: 965492 - RNA, 19 nt, Homo sapiens
  misc_RNA (1)...(19): siRNA sense strand
uuucauggcuguagcuaug

SEQ ID NO: 965493 - RNA, 19 nt, Homo sapiens
  misc_RNA (1)...(19): siRNA sense strand
caggaaaccaucaugaaga

SEQ ID NO: 965494 - RNA, 19 nt, Homo sapiens
  misc_RNA (1)...(19): siRNA sense strand
cuucauugcuuucauuaca

SEQ ID NO: 965495 - RNA, 19 nt, Homo sapiens
  misc_RNA (1)...(19): siRNA sense strand
cagauccguuggcaucaaa

SEQ ID NO: 965496 - RNA, 19 nt, Homo sapiens
  misc_RNA (1)...(19): siRNA sense strand
ggccauggauauuucaagu

SEQ ID NO: 965497 - RNA, 19 nt, Homo sapiens
  misc_RNA (1)...(19): siRNA sense strand
acaacagacuuuggagaaa

SEQ ID NO: 965498 - RNA, 19 nt, Homo sapiens
  misc_RNA (1)...(19): siRNA sense strand
gguacuggauccuaugaag

SEQ ID NO: 965499 - RNA, 19 nt, Homo sapiens
  misc_RNA (1)...(19): siRNA sense strand
gcaauaugacucugaaagg

SEQ ID NO: 965500 - RNA, 19 nt, Homo sapiens
  misc_RNA (1)...(19): siRNA sense strand
caagggaguugucuaacac

SEQ ID NO: 965501 - RNA, 19 nt, Homo sapiens
  misc_RNA (1)...(19): siRNA sense strand
caacagacuuuggagaaaa

SEQ ID NO: 965502 - RNA, 19 nt, Homo sapiens
  misc_RNA (1)...(19): siRNA sense strand
cagcagacuucggcuaugu

SEQ ID NO: 965503 - RNA, 19 nt, Homo sapiens
  misc_RNA (1)...(19): siRNA sense strand
gacaacaagauauuugaga

SEQ ID NO: 965504 - RNA, 19 nt, Homo sapiens
  misc_RNA (1)...(19): siRNA sense strand
gcugcucaaucucacauau

SEQ ID NO: 965505 - RNA, 19 nt, Homo sapiens
  misc_RNA (1)...(19): siRNA sense strand
ggucaggaaaccaucauga

SEQ ID NO: 965506 - RNA, 19 nt, Homo sapiens
  misc_RNA (1)...(19): siRNA sense strand
ugaaagggguaguauggua

SEQ ID NO: 965507 - RNA, 19 nt, Homo sapiens
  misc_RNA (1)...(19): siRNA sense strand
gcacucuguucucuggaau

SEQ ID NO: 965508 - RNA, 19 nt, Homo sapiens
  misc_RNA (1)...(19): siRNA sense strand
ucucacauauuaccagcaa

SEQ ID NO: 965509 - RNA, 19 nt, Homo sapiens
  misc_RNA (1)...(19): siRNA sense strand
cacaacagacuuuggagaa

SEQ ID NO: 965510 - RNA, 19 nt, Homo sapiens
  misc_RNA (1)...(19): siRNA sense strand
uggcuuaucggcugcauuu

SEQ ID NO: 965511 - RNA, 19 nt, Homo sapiens
  misc_RNA (1)...(19): siRNA sense strand
acccaaagaugcccaauac

SEQ ID NO: 965512 - RNA, 19 nt, Homo sapiens
  misc_RNA (1)...(19): siRNA sense strand
cacauucccugcacucauc

SEQ ID NO: 965513 - RNA, 19 nt, Homo sapiens
  misc_RNA (1)...(19): siRNA sense strand
caacaagauauuugagauc

SEQ ID NO: 965514 - RNA, 19 nt, Homo sapiens
  misc_RNA (1)...(19): siRNA sense strand
gcagacggagcguuucuuc

SEQ ID NO: 965515 - RNA, 19 nt, Homo sapiens
  misc_RNA (1)...(19): siRNA sense strand
gcaucaaacagcagacuuc

SEQ ID NO: 965516 - RNA, 19 nt, Homo sapiens
  misc_RNA (1)...(19): siRNA sense strand
ucgcuuugcuucauacauc

SEQ ID NO: 965517 - RNA, 19 nt, Homo sapiens
  misc_RNA (1)...(19): siRNA sense strand
ucacauauuaccagcaaau

SEQ ID NO: 965518 - RNA, 19 nt, Homo sapiens
  misc_RNA (1)...(19): siRNA sense strand
guucaugacguccuguuug

SEQ ID NO: 965519 - RNA, 19 nt, Homo sapiens
  misc_RNA (1)...(19): siRNA sense strand
gcgaucgauucuugucaug

SEQ ID NO: 965520 - RNA, 19 nt, Homo sapiens
  misc_RNA (1)...(19): siRNA sense strand
aaaccaucaugaagaaagu

SEQ ID NO: 965521 - RNA, 19 nt, Homo sapiens
  misc_RNA (1)...(19): siRNA sense strand
ugucuaacacugcggcaua

SEQ ID NO: 965522 - RNA, 19 nt, Homo sapiens
  misc_RNA (1)...(19): siRNA sense strand
ggaccacguggccuuguga

SEQ ID NO: 965523 - RNA, 19 nt, Homo sapiens
  misc_RNA (1)...(19): siRNA sense strand
gcagugaccaucgaugcaa

SEQ ID NO: 965524 - RNA, 19 nt, Homo sapiens
  misc_RNA (1)...(19): siRNA sense strand
ugaaagcucacucugauac

SEQ ID NO: 965525 - RNA, 19 nt, Homo sapiens
  misc_RNA (1)...(19): siRNA sense strand
gcacauucccugcacucau

SEQ ID NO: 965526 - RNA, 19 nt, Homo sapiens
  misc_RNA (1)...(19): siRNA sense strand
ucauugcuuucauuacaga

SEQ ID NO: 965527 - RNA, 19 nt, Homo sapiens
  misc_RNA (1)...(19): siRNA sense strand
aaggaccacugccugagaa

SEQ ID NO: 965528 - RNA, 19 nt, Homo sapiens
  misc_RNA (1)...(19): siRNA sense strand
gugagaagaauuugaccuu

SEQ ID NO: 965529 - RNA, 19 nt, Homo sapiens
  misc_RNA (1)...(19): siRNA sense strand
gcauccacccucgagauaa

SEQ ID NO: 965530 - RNA, 19 nt, Homo sapiens
  misc_RNA (1)...(19): siRNA sense strand
ccagauccguuggcaucaa

SEQ ID NO: 965531 - RNA, 19 nt, Homo sapiens
  misc_RNA (1)...(19): siRNA sense strand
ccaguaagcacucuguucu

SEQ ID NO: 965532 - RNA, 19 nt, Homo sapiens
  misc_RNA (1)...(19): siRNA sense strand
ggacaacaagauauuugag

SEQ ID NO: 965533 - RNA, 19 nt, Homo sapiens
  misc_RNA (1)...(19): siRNA sense strand
gaccacugccugagaagau

SEQ ID NO: 965534 - RNA, 19 nt, Homo sapiens
  misc_RNA (1)...(19): siRNA sense strand
uaagaagagcucagacgau

SEQ ID NO: 965535 - RNA, 19 nt, Homo sapiens
  misc_RNA (1)...(19): siRNA sense strand
guaacaugcagaugacugu

SEQ ID NO: 965536 - RNA, 19 nt, Homo sapiens
  misc_RNA (1)...(19): siRNA sense strand
gaagaauuugaccuuugaa

SEQ ID NO: 965537 - RNA, 19 nt, Homo sapiens
  misc_RNA (1)...(19): siRNA sense strand
ucccugcacucaucgaaga

SEQ ID NO: 965538 - RNA, 19 nt, Homo sapiens
  misc_RNA (1)...(19): siRNA sense strand
ggaaaccaucaugaagaaa

SEQ ID NO: 965539 - RNA, 19 nt, Homo sapiens
  misc_RNA (1)...(19): siRNA sense strand
acaugcagaugacuguguu

SEQ ID NO: 965540 - RNA, 19 nt, Homo sapiens
  misc_RNA (1)...(19): siRNA sense strand
ucuaagcccaccucagaaa

SEQ ID NO: 965541 - RNA, 19 nt, Homo sapiens
  misc_RNA (1)...(19): siRNA sense strand
uuugagaucuccuguugca

SEQ ID NO: 965542 - RNA, 19 nt, Homo sapiens
  misc_RNA (1)...(19): siRNA sense strand
ucuguacaauugcacauuc

SEQ ID NO: 965543 - RNA, 19 nt, Homo sapiens
  misc_RNA (1)...(19): siRNA sense strand
gccaugauccauccacugu

SEQ ID NO: 965544 - RNA, 19 nt, Homo sapiens
  misc_RNA (1)...(19): siRNA sense strand
gccauggauauuucaagua

SEQ ID NO: 965545 - RNA, 19 nt, Homo sapiens
  misc_RNA (1)...(19): siRNA sense strand
cuuaggccauggauauuuc

SEQ ID NO: 965546 - RNA, 19 nt, Homo sapiens
  misc_RNA (1)...(19): siRNA sense strand
ggagcuggaggaccuuguu

SEQ ID NO: 965547 - RNA, 19 nt, Homo sapiens
  misc_RNA (1)...(19): siRNA sense strand
ggcgaucgauucuugucau

SEQ ID NO: 965548 - RNA, 19 nt, Homo sapiens
  misc_RNA (1)...(19): siRNA sense strand
gcuuccagcuucuaugaac

SEQ ID NO: 965549 - RNA, 19 nt, Homo sapiens
  misc_RNA (1)...(19): siRNA sense strand
ucgaagugauggcacaaca

SEQ ID NO: 965550 - RNA, 19 nt, Homo sapiens
  misc_RNA (1)...(19): siRNA sense strand
uuuaugacacucugcagua

SEQ ID NO: 965551 - RNA, 19 nt, Homo sapiens
  misc_RNA (1)...(19): siRNA sense strand
ggauauuucaaguacaugu

SEQ ID NO: 965552 - RNA, 19 nt, Homo sapiens
  misc_RNA (1)...(19): siRNA sense strand
cuuauggugagaagaauuu

SEQ ID NO: 965553 - RNA, 19 nt, Homo sapiens
  misc_RNA (1)...(19): siRNA sense strand
gcucuccgcuaugcuugga

SEQ ID NO: 965554 - RNA, 19 nt, Homo sapiens
  misc_RNA (1)...(19): siRNA sense strand
ucaggaaaccaucaugaag

SEQ ID NO: 965555 - RNA, 19 nt, Homo sapiens
  misc_RNA (1)...(19): siRNA sense strand
gucaggaaaccaucaugaa

SEQ ID NO: 965556 - RNA, 19 nt, Homo sapiens
  misc_RNA (1)...(19): siRNA sense strand
ucacagauccuucaaauaa

SEQ ID NO: 965557 - RNA, 19 nt, Homo sapiens
  misc_RNA (1)...(19): siRNA sense strand
agucuuaccuccaguauua

SEQ ID NO: 965558 - RNA, 19 nt, Homo sapiens
  misc_RNA (1)...(19): siRNA sense strand
gaucagaugggucaagaua

SEQ ID NO: 965559 - RNA, 19 nt, Homo sapiens
  misc_RNA (1)...(19): siRNA sense strand
gaguaaaugugucacuauu

SEQ ID NO: 965560 - RNA, 19 nt, Homo sapiens
  misc_RNA (1)...(19): siRNA sense strand
gauaaaguccuuacucaga

SEQ ID NO: 965561 - RNA, 19 nt, Homo sapiens
  misc_RNA (1)...(19): siRNA sense strand
gaaaagguguucaucugua

SEQ ID NO: 965562 - RNA, 19 nt, Homo sapiens
  misc_RNA (1)...(19): siRNA sense strand
guagauggauucacagauc

SEQ ID NO: 965563 - RNA, 19 nt, Homo sapiens
  misc_RNA (1)...(19): siRNA sense strand
caacuuucaucauggcuuu

SEQ ID NO: 965564 - RNA, 19 nt, Homo sapiens
  misc_RNA (1)...(19): siRNA sense strand
gaggagaaaugggcagaaa

SEQ ID NO: 965565 - RNA, 19 nt, Homo sapiens
  misc_RNA (1)...(19): siRNA sense strand
cuaaagccguuggauauuu

SEQ ID NO: 965566 - RNA, 19 nt, Homo sapiens
  misc_RNA (1)...(19): siRNA sense strand
gagcuaaagccguuggaua

SEQ ID NO: 965567 - RNA, 19 nt, Homo sapiens
  misc_RNA (1)...(19): siRNA sense strand
uaaagccguuggauauuug

SEQ ID NO: 965568 - RNA, 19 nt, Homo sapiens
  misc_RNA (1)...(19): siRNA sense strand
guuaguagauggauucaca

SEQ ID NO: 965569 - RNA, 19 nt, Homo sapiens
  misc_RNA (1)...(19): siRNA sense strand
ucagaugggucaagauaau

SEQ ID NO: 965570 - RNA, 19 nt, Homo sapiens
  misc_RNA (1)...(19): siRNA sense strand
gaaccacacaugccacaaa

SEQ ID NO: 965571 - RNA, 19 nt, Homo sapiens
  misc_RNA (1)...(19): siRNA sense strand
cauguuggauugagauuau

SEQ ID NO: 965572 - RNA, 19 nt, Homo sapiens
  misc_RNA (1)...(19): siRNA sense strand
gauggacgccugcagguuu

SEQ ID NO: 965573 - RNA, 19 nt, Homo sapiens
  misc_RNA (1)...(19): siRNA sense strand
guucaucuguacuauguug

SEQ ID NO: 965574 - RNA, 19 nt, Homo sapiens
  misc_RNA (1)...(19): siRNA sense strand
caacacuccuuuucccuua

SEQ ID NO: 965575 - RNA, 19 nt, Homo sapiens
  misc_RNA (1)...(19): siRNA sense strand
cagauuaugcccaguauau

SEQ ID NO: 965576 - RNA, 19 nt, Homo sapiens
  misc_RNA (1)...(19): siRNA sense strand
cagcauauuuguacagagu

SEQ ID NO: 965577 - RNA, 19 nt, Homo sapiens
  misc_RNA (1)...(19): siRNA sense strand
gaaccugagccacaaugaa

SEQ ID NO: 965578 - RNA, 19 nt, Homo sapiens
  misc_RNA (1)...(19): siRNA sense strand
uauaugagcucaccaaaau

SEQ ID NO: 965579 - RNA, 19 nt, Homo sapiens
  misc_RNA (1)...(19): siRNA sense strand
guaaaugugucacuauucc

SEQ ID NO: 965580 - RNA, 19 nt, Homo sapiens
  misc_RNA (1)...(19): siRNA sense strand
gaacugcaacuuucaucau

SEQ ID NO: 965581 - RNA, 19 nt, Homo sapiens
  misc_RNA (1)...(19): siRNA sense strand
gaguaggaacugcaacuuu

SEQ ID NO: 965582 - RNA, 19 nt, Homo sapiens
  misc_RNA (1)...(19): siRNA sense strand
uuucaugcaucuucuacua

SEQ ID NO: 965583 - RNA, 19 nt, Homo sapiens
  misc_RNA (1)...(19): siRNA sense strand
augaagagccuaaacauug

SEQ ID NO: 965584 - RNA, 19 nt, Homo sapiens
  misc_RNA (1)...(19): siRNA sense strand
uggauaaaguccuuacuca

SEQ ID NO: 965585 - RNA, 19 nt, Homo sapiens
  misc_RNA (1)...(19): siRNA sense strand
ccucuucaguggcuggaua

SEQ ID NO: 965586 - RNA, 19 nt, Homo sapiens
  misc_RNA (1)...(19): siRNA sense strand
gucaauggccagcuuguuu

SEQ ID NO: 965587 - RNA, 19 nt, Homo sapiens
  misc_RNA (1)...(19): siRNA sense strand
uaaaguccuuacucagaug

SEQ ID NO: 965588 - RNA, 19 nt, Homo sapiens
  misc_RNA (1)...(19): siRNA sense strand
ugacagcagcauauuugua

SEQ ID NO: 965589 - RNA, 19 nt, Homo sapiens
  misc_RNA (1)...(19): siRNA sense strand
guguucaucuguacuaugu

SEQ ID NO: 965590 - RNA, 19 nt, Homo sapiens
  misc_RNA (1)...(19): siRNA sense strand
guauuagugccucgucaua

SEQ ID NO: 965591 - RNA, 19 nt, Homo sapiens
  misc_RNA (1)...(19): siRNA sense strand
ugaagagccuaaacauugg

SEQ ID NO: 965592 - RNA, 19 nt, Homo sapiens
  misc_RNA (1)...(19): siRNA sense strand
ccacguuuccagauucuuu

SEQ ID NO: 965593 - RNA, 19 nt, Homo sapiens
  misc_RNA (1)...(19): siRNA sense strand
gguuugaggcaguauauga

SEQ ID NO: 965594 - RNA, 19 nt, Homo sapiens
  misc_RNA (1)...(19): siRNA sense strand
aguaggaacugcaacuuuc

SEQ ID NO: 965595 - RNA, 19 nt, Homo sapiens
  misc_RNA (1)...(19): siRNA sense strand
gcauauuuguacagaguag

SEQ ID NO: 965596 - RNA, 19 nt, Homo sapiens
  misc_RNA (1)...(19): siRNA sense strand
ggacagccgaguaaaugug

SEQ ID NO: 965597 - RNA, 19 nt, Homo sapiens
  misc_RNA (1)...(19): siRNA sense strand
acagauccuucaaauaaca

SEQ ID NO: 965598 - RNA, 19 nt, Homo sapiens
  misc_RNA (1)...(19): siRNA sense strand
ccgaguaaaugugucacua

SEQ ID NO: 965599 - RNA, 19 nt, Homo sapiens
  misc_RNA (1)...(19): siRNA sense strand
ggauacaagcaauaauaug

SEQ ID NO: 965600 - RNA, 19 nt, Homo sapiens
  misc_RNA (1)...(19): siRNA sense strand
ggaguuugcucagcuucug

SEQ ID NO: 965601 - RNA, 19 nt, Homo sapiens
  misc_RNA (1)...(19): siRNA sense strand
gaaaacacuaggcgacaua

SEQ ID NO: 965602 - RNA, 19 nt, Homo sapiens
  misc_RNA (1)...(19): siRNA sense strand
gcuaaagccguuggauauu

SEQ ID NO: 965603 - RNA, 19 nt, Homo sapiens
  misc_RNA (1)...(19): siRNA sense strand
gugaugaggaggagaaaug

SEQ ID NO: 965604 - RNA, 19 nt, Homo sapiens
  misc_RNA (1)...(19): siRNA sense strand
uaucaacccauaccacuau

SEQ ID NO: 965605 - RNA, 19 nt, Homo sapiens
  misc_RNA (1)...(19): siRNA sense strand
guaccauucggaugaguuu

SEQ ID NO: 965606 - RNA, 19 nt, Homo sapiens
  misc_RNA (1)...(19): siRNA sense strand
auaaaguccuuacucagau

SEQ ID NO: 965607 - RNA, 19 nt, Homo sapiens
  misc_RNA (1)...(19): siRNA sense strand
ggccggauuugcagaguca

SEQ ID NO: 965608 - RNA, 19 nt, Homo sapiens
  misc_RNA (1)...(19): siRNA sense strand
caggacagccgaguaaaug

SEQ ID NO: 965609 - RNA, 19 nt, Homo sapiens
  misc_RNA (1)...(19): siRNA sense strand
gacagcagcauauuuguac

SEQ ID NO: 965610 - RNA, 19 nt, Homo sapiens
  misc_RNA (1)...(19): siRNA sense strand
auucacagauccuucaaau

SEQ ID NO: 965611 - RNA, 19 nt, Homo sapiens
  misc_RNA (1)...(19): siRNA sense strand
gauaauucccagccuaugg

SEQ ID NO: 965612 - RNA, 19 nt, Homo sapiens
  misc_RNA (1)...(19): siRNA sense strand
gaaaaggcuuaccccaugu

SEQ ID NO: 965613 - RNA, 19 nt, Homo sapiens
  misc_RNA (1)...(19): siRNA sense strand
ggaacugcaacuuucauca

SEQ ID NO: 965614 - RNA, 19 nt, Homo sapiens
  misc_RNA (1)...(19): siRNA sense strand
uaugaagagccuaaacauu

SEQ ID NO: 965615 - RNA, 19 nt, Homo sapiens
  misc_RNA (1)...(19): siRNA sense strand
aaguuuguaucaacccaua

SEQ ID NO: 965616 - RNA, 19 nt, Homo sapiens
  misc_RNA (1)...(19): siRNA sense strand
guuuggcgcuggccggauu

SEQ ID NO: 965617 - RNA, 19 nt, Homo sapiens
  misc_RNA (1)...(19): siRNA sense strand
ucacuauucccagaucuuu

SEQ ID NO: 965618 - RNA, 19 nt, Homo sapiens
  misc_RNA (1)...(19): siRNA sense strand
ggagagguguaugcggaau

SEQ ID NO: 965619 - RNA, 19 nt, Homo sapiens
  misc_RNA (1)...(19): siRNA sense strand
ccacaaugaaccacacaug

SEQ ID NO: 965620 - RNA, 19 nt, Homo sapiens
  misc_RNA (1)...(19): siRNA sense strand
uggaggaacuggagaaagc

SEQ ID NO: 965621 - RNA, 19 nt, Homo sapiens
  misc_RNA (1)...(19): siRNA sense strand
uaugauuccucagauuaug

SEQ ID NO: 965622 - RNA, 19 nt, Homo sapiens
  misc_RNA (1)...(19): siRNA sense strand
ggaaccugagccacaauga

SEQ ID NO: 965623 - RNA, 19 nt, Homo sapiens
  misc_RNA (1)...(19): siRNA sense strand
cgaguaaaugugucacuau

SEQ ID NO: 965624 - RNA, 19 nt, Homo sapiens
  misc_RNA (1)...(19): siRNA sense strand
gcugcagccucaaaauuuu

SEQ ID NO: 965625 - RNA, 19 nt, Homo sapiens
  misc_RNA (1)...(19): siRNA sense strand
ucaugcaucuucuacuagu

SEQ ID NO: 965626 - RNA, 19 nt, Homo sapiens
  misc_RNA (1)...(19): siRNA sense strand
uuaggaaccugagccacaa

SEQ ID NO: 965627 - RNA, 19 nt, Homo sapiens
  misc_RNA (1)...(19): siRNA sense strand
gaauucaauccacaacaca

SEQ ID NO: 965628 - RNA, 19 nt, Homo sapiens
  misc_RNA (1)...(19): siRNA sense strand
ugaauucaauccacaacac

SEQ ID NO: 965629 - RNA, 19 nt, Homo sapiens
  misc_RNA (1)...(19): siRNA sense strand
cguuggauauuugugaauu

SEQ ID NO: 965630 - RNA, 19 nt, Homo sapiens
  misc_RNA (1)...(19): siRNA sense strand
gccguuggauauuugugaa

SEQ ID NO: 965631 - RNA, 19 nt, Homo sapiens
  misc_RNA (1)...(19): siRNA sense strand
guccagcaguaaagcgauu

SEQ ID NO: 965632 - RNA, 19 nt, Homo sapiens
  misc_RNA (1)...(19): siRNA sense strand
ccucagauuaugcccagua

SEQ ID NO: 965633 - RNA, 19 nt, Homo sapiens
  misc_RNA (1)...(19): siRNA sense strand
gaccaggaaguccauuuca

SEQ ID NO: 965634 - RNA, 19 nt, Homo sapiens
  misc_RNA (1)...(19): siRNA sense strand
aacacuaggcgacauauug

SEQ ID NO: 965635 - RNA, 19 nt, Homo sapiens
  misc_RNA (1)...(19): siRNA sense strand
uucaguggcuggauaaagu

SEQ ID NO: 965636 - RNA, 19 nt, Homo sapiens
  misc_RNA (1)...(19): siRNA sense strand
ccaggacagccgaguaaau

SEQ ID NO: 965637 - RNA, 19 nt, Homo sapiens
  misc_RNA (1)...(19): siRNA sense strand
ccaccacugucuguaagau

SEQ ID NO: 965638 - RNA, 19 nt, Homo sapiens
  misc_RNA (1)...(19): siRNA sense strand
gcggaaugccucagugaca

SEQ ID NO: 965639 - RNA, 19 nt, Homo sapiens
  misc_RNA (1)...(19): siRNA sense strand
gaacuggagaaagccuuga

SEQ ID NO: 965640 - RNA, 19 nt, Homo sapiens
  misc_RNA (1)...(19): siRNA sense strand
caacccauaccacuauaag

SEQ ID NO: 965641 - RNA, 19 nt, Homo sapiens
  misc_RNA (1)...(19): siRNA sense strand
guaggaacugcaacuuuca

SEQ ID NO: 965642 - RNA, 19 nt, Homo sapiens
  misc_RNA (1)...(19): siRNA sense strand
uauauauugucguguuugg

SEQ ID NO: 965643 - RNA, 19 nt, Homo sapiens
  misc_RNA (1)...(19): siRNA sense strand
agugacagcagcauauuug

SEQ ID NO: 965644 - RNA, 19 nt, Homo sapiens
  misc_RNA (1)...(19): siRNA sense strand
ggauauuugugaauuuccu

SEQ ID NO: 965645 - RNA, 19 nt, Homo sapiens
  misc_RNA (1)...(19): siRNA sense strand
ucaggaguuugcucagcuu

SEQ ID NO: 965646 - RNA, 19 nt, Homo sapiens
  misc_RNA (1)...(19): siRNA sense strand
gccuauggauacaagcaau

SEQ ID NO: 965647 - RNA, 19 nt, Homo sapiens
  misc_RNA (1)...(19): siRNA sense strand
ccuauaugccaccugauga

SEQ ID NO: 965648 - RNA, 19 nt, Homo sapiens
  misc_RNA (1)...(19): siRNA sense strand
uauuagugccucgucauaa

SEQ ID NO: 965649 - RNA, 19 nt, Homo sapiens
  misc_RNA (1)...(19): siRNA sense strand
uugaugcuuuggugaagaa

SEQ ID NO: 965650 - RNA, 19 nt, Homo sapiens
  misc_RNA (1)...(19): siRNA sense strand
ccuauggauacaagcaaua

SEQ ID NO: 965651 - RNA, 19 nt, Homo sapiens
  misc_RNA (1)...(19): siRNA sense strand
aaugccacguuuccagauu

SEQ ID NO: 965652 - RNA, 19 nt, Homo sapiens
  misc_RNA (1)...(19): siRNA sense strand
cuauggauacaagcaauaa

SEQ ID NO: 965653 - RNA, 19 nt, Homo sapiens
  misc_RNA (1)...(19): siRNA sense strand
ccauguuggauugagauua

SEQ ID NO: 965654 - RNA, 19 nt, Homo sapiens
  misc_RNA (1)...(19): siRNA sense strand
ccauggguuugaggcagua

SEQ ID NO: 965655 - RNA, 19 nt, Homo sapiens
  misc_RNA (1)...(19): siRNA sense strand
cacagauccuucaaauaac

SEQ ID NO: 965656 - RNA, 19 nt, Homo sapiens
  misc_RNA (1)...(19): siRNA sense strand
ccaaaugucucucaaauau

SEQ ID NO: 965657 - RNA, 19 nt, Homo sapiens
  misc_RNA (1)...(19): siRNA sense strand
ggaaauagauaacgaaagu

SEQ ID NO: 965658 - RNA, 19 nt, Homo sapiens
  misc_RNA (1)...(19): siRNA sense strand
ggacgaaaguguacagaaa

SEQ ID NO: 965659 - RNA, 19 nt, Homo sapiens
  misc_RNA (1)...(19): siRNA sense strand
gaggaauggucuaauaaua

SEQ ID NO: 965660 - RNA, 19 nt, Homo sapiens
  misc_RNA (1)...(19): siRNA sense strand
gaaauaaggcacacaauga

SEQ ID NO: 965661 - RNA, 19 nt, Homo sapiens
  misc_RNA (1)...(19): siRNA sense strand
guugaaagcugucaguuaa

SEQ ID NO: 965662 - RNA, 19 nt, Homo sapiens
  misc_RNA (1)...(19): siRNA sense strand
gaagaaauguggacuuuac

SEQ ID NO: 965663 - RNA, 19 nt, Homo sapiens
  misc_RNA (1)...(19): siRNA sense strand
ggacagaguaguaucaaua

SEQ ID NO: 965664 - RNA, 19 nt, Homo sapiens
  misc_RNA (1)...(19): siRNA sense strand
gcauguaucucuuaaggaa

SEQ ID NO: 965665 - RNA, 19 nt, Homo sapiens
  misc_RNA (1)...(19): siRNA sense strand
gauaauagcuguguucaag

SEQ ID NO: 965666 - RNA, 19 nt, Homo sapiens
  misc_RNA (1)...(19): siRNA sense strand
caagauagauaccacauca

SEQ ID NO: 965667 - RNA, 19 nt, Homo sapiens
  misc_RNA (1)...(19): siRNA sense strand
caucuaauguuccauguuu

SEQ ID NO: 965668 - RNA, 19 nt, Homo sapiens
  misc_RNA (1)...(19): siRNA sense strand
ucacacaacugccuuagaa

SEQ ID NO: 965669 - RNA, 19 nt, Homo sapiens
  misc_RNA (1)...(19): siRNA sense strand
ucacacaacugccuuagaa

SEQ ID NO: 965670 - RNA, 19 nt, Homo sapiens
  misc_RNA (1)...(19): siRNA sense strand
gaaacgugauugucauuug

SEQ ID NO: 965671 - RNA, 19 nt, Homo sapiens
  misc_RNA (1)...(19): siRNA sense strand
cauaaacucugcagacaaa

SEQ ID NO: 965672 - RNA, 19 nt, Homo sapiens
  misc_RNA (1)...(19): siRNA sense strand
gaacuaaagcuucaggaaa

SEQ ID NO: 965673 - RNA, 19 nt, Homo sapiens
  misc_RNA (1)...(19): siRNA sense strand
gaacauacccgugaaagga

SEQ ID NO: 965674 - RNA, 19 nt, Homo sapiens
  misc_RNA (1)...(19): siRNA sense strand
ggagaugacuaaacuuaau

SEQ ID NO: 965675 - RNA, 19 nt, Homo sapiens
  misc_RNA (1)...(19): siRNA sense strand
caacaacucuuugcugcua

SEQ ID NO: 965676 - RNA, 19 nt, Homo sapiens
  misc_RNA (1)...(19): siRNA sense strand
uaauacagcucuagauuuc

SEQ ID NO: 965677 - RNA, 19 nt, Homo sapiens
  misc_RNA (1)...(19): siRNA sense strand
gccaugcucuuaugugaua

SEQ ID NO: 965678 - RNA, 19 nt, Homo sapiens
  misc_RNA (1)...(19): siRNA sense strand
gaacaaagacaaagauugg

SEQ ID NO: 965679 - RNA, 19 nt, Homo sapiens
  misc_RNA (1)...(19): siRNA sense strand
gaaauaaaccauagaccuu

SEQ ID NO: 965680 - RNA, 19 nt, Homo sapiens
  misc_RNA (1)...(19): siRNA sense strand
guaaggagauguucuuugg

SEQ ID NO: 965681 - RNA, 19 nt, Homo sapiens
  misc_RNA (1)...(19): siRNA sense strand
uagcaaagauucaggcauu

SEQ ID NO: 965682 - RNA, 19 nt, Homo sapiens
  misc_RNA (1)...(19): siRNA sense strand
cgagucagcuuugcagaua

SEQ ID NO: 965683 - RNA, 19 nt, Homo sapiens
  misc_RNA (1)...(19): siRNA sense strand
gauuauauguucagaggaa

SEQ ID NO: 965684 - RNA, 19 nt, Homo sapiens
  misc_RNA (1)...(19): siRNA sense strand
gcaacaagccauaauauag

SEQ ID NO: 965685 - RNA, 19 nt, Homo sapiens
  misc_RNA (1)...(19): siRNA sense strand
gaccaaaugucucucaaau

SEQ ID NO: 965686 - RNA, 19 nt, Homo sapiens
  misc_RNA (1)...(19): siRNA sense strand
gcaaugacuuuauggacuu

SEQ ID NO: 965687 - RNA, 19 nt, Homo sapiens
  misc_RNA (1)...(19): siRNA sense strand
guggagugcuuaaaucuaa

SEQ ID NO: 965688 - RNA, 19 nt, Homo sapiens
  misc_RNA (1)...(19): siRNA sense strand
gcaaaugacagccagcuaa

SEQ ID NO: 965689 - RNA, 19 nt, Homo sapiens
  misc_RNA (1)...(19): siRNA sense strand
ccacaucauuucuagcuaa

SEQ ID NO: 965690 - RNA, 19 nt, Homo sapiens
  misc_RNA (1)...(19): siRNA sense strand
gaaccuaaguccuucucaa

SEQ ID NO: 965691 - RNA, 19 nt, Homo sapiens
  misc_RNA (1)...(19): siRNA sense strand
gauauuacccagaguugua

SEQ ID NO: 965692 - RNA, 19 nt, Homo sapiens
  misc_RNA (1)...(19): siRNA sense strand
gauaaucccauaagugaaa

SEQ ID NO: 965693 - RNA, 19 nt, Homo sapiens
  misc_RNA (1)...(19): siRNA sense strand
agagagaccuguuagaaga

SEQ ID NO: 965694 - RNA, 19 nt, Homo sapiens
  misc_RNA (1)...(19): siRNA sense strand
aaagugcccuggaggauaa

SEQ ID NO: 965695 - RNA, 19 nt, Homo sapiens
  misc_RNA (1)...(19): siRNA sense strand
agagguagcugauaacaug

SEQ ID NO: 965696 - RNA, 19 nt, Homo sapiens
  misc_RNA (1)...(19): siRNA sense strand
gaaagugaccgucuaguag

SEQ ID NO: 965697 - RNA, 19 nt, Homo sapiens
  misc_RNA (1)...(19): siRNA sense strand
agacagaccuaacuuugaa

SEQ ID NO: 965698 - RNA, 19 nt, Homo sapiens
  misc_RNA (1)...(19): siRNA sense strand
gaggagaacauggacauua

SEQ ID NO: 965699 - RNA, 19 nt, Homo sapiens
  misc_RNA (1)...(19): siRNA sense strand
guuauuuccuguacugaua

SEQ ID NO: 965700 - RNA, 19 nt, Homo sapiens
  misc_RNA (1)...(19): siRNA sense strand
uaacaacaaugaacagaca

SEQ ID NO: 965701 - RNA, 19 nt, Homo sapiens
  misc_RNA (1)...(19): siRNA sense strand
gaagaaaacccuaaauuug

SEQ ID NO: 965702 - RNA, 19 nt, Homo sapiens
  misc_RNA (1)...(19): siRNA sense strand
gaaaugacagagucccaua

SEQ ID NO: 965703 - RNA, 19 nt, Homo sapiens
  misc_RNA (1)...(19): siRNA sense strand
cauauuaccagaagucaua

SEQ ID NO: 965704 - RNA, 19 nt, Homo sapiens
  misc_RNA (1)...(19): siRNA sense strand
ggaaauaaggcacacaaug

SEQ ID NO: 965705 - RNA, 19 nt, Homo sapiens
  misc_RNA (1)...(19): siRNA sense strand
uagaagaaauguggacuuu

SEQ ID NO: 965706 - RNA, 19 nt, Homo sapiens
  misc_RNA (1)...(19): siRNA sense strand
caacugccuuagaauguaa

SEQ ID NO: 965707 - RNA, 19 nt, Homo sapiens
  misc_RNA (1)...(19): siRNA sense strand
gaaagugcccuggaggaua

SEQ ID NO: 965708 - RNA, 19 nt, Homo sapiens
  misc_RNA (1)...(19): siRNA sense strand
ggaauccaaugcuuugaga

SEQ ID NO: 965709 - RNA, 19 nt, Homo sapiens
  misc_RNA (1)...(19): siRNA sense strand
caacugccuuagaauguaa

SEQ ID NO: 965710 - RNA, 19 nt, Homo sapiens
  misc_RNA (1)...(19): siRNA sense strand
gugcuuaaaucuaacugua

SEQ ID NO: 965711 - RNA, 19 nt, Homo sapiens
  misc_RNA (1)...(19): siRNA sense strand
gacggagucucauaugaaa

SEQ ID NO: 965712 - RNA, 19 nt, Homo sapiens
  misc_RNA (1)...(19): siRNA sense strand
gaaggaagaaguuauucaa

SEQ ID NO: 965713 - RNA, 19 nt, Homo sapiens
  misc_RNA (1)...(19): siRNA sense strand
cagaaggaguuuucaauua

SEQ ID NO: 965714 - RNA, 19 nt, Homo sapiens
  misc_RNA (1)...(19): siRNA sense strand
caaaugaaagucuauguug

SEQ ID NO: 965715 - RNA, 19 nt, Homo sapiens
  misc_RNA (1)...(19): siRNA sense strand
gaaguuauucaaaccagua

SEQ ID NO: 965716 - RNA, 19 nt, Homo sapiens
  misc_RNA (1)...(19): siRNA sense strand
uaauagcuguguucaagaa

SEQ ID NO: 965717 - RNA, 19 nt, Homo sapiens
  misc_RNA (1)...(19): siRNA sense strand
gcaggaacuucugaaacua

SEQ ID NO: 965718 - RNA, 19 nt, Homo sapiens
  misc_RNA (1)...(19): siRNA sense strand
ccauagaccuuuauuagag

SEQ ID NO: 965719 - RNA, 19 nt, Homo sapiens
  misc_RNA (1)...(19): siRNA sense strand
ucacgggaaucuaaaggua

SEQ ID NO: 965720 - RNA, 19 nt, Homo sapiens
  misc_RNA (1)...(19): siRNA sense strand
ccaaugcuuugagaaauaa

SEQ ID NO: 965721 - RNA, 19 nt, Homo sapiens
  misc_RNA (1)...(19): siRNA sense strand
gaucaauucuucagacucu

SEQ ID NO: 965722 - RNA, 19 nt, Homo sapiens
  misc_RNA (1)...(19): siRNA sense strand
gaaaucuauuggcuaauca

SEQ ID NO: 965723 - RNA, 19 nt, Homo sapiens
  misc_RNA (1)...(19): siRNA sense strand
gauuaaggauccacgaaau

SEQ ID NO: 965724 - RNA, 19 nt, Homo sapiens
  misc_RNA (1)...(19): siRNA sense strand
gaacagacagaccuaacuu

SEQ ID NO: 965725 - RNA, 19 nt, Homo sapiens
  misc_RNA (1)...(19): siRNA sense strand
gaacagugccucuucuaca

SEQ ID NO: 965726 - RNA, 19 nt, Homo sapiens
  misc_RNA (1)...(19): siRNA sense strand
cuaaguccuucucaauaua

SEQ ID NO: 965727 - RNA, 19 nt, Homo sapiens
  misc_RNA (1)...(19): siRNA sense strand
gaaagucuauguugaugac

SEQ ID NO: 965728 - RNA, 19 nt, Homo sapiens
  misc_RNA (1)...(19): siRNA sense strand
cacgaaaucuauuggcuaa

SEQ ID NO: 965729 - RNA, 19 nt, Homo sapiens
  misc_RNA (1)...(19): siRNA sense strand
ggaauggucuaauaauagg

SEQ ID NO: 965730 - RNA, 19 nt, Homo sapiens
  misc_RNA (1)...(19): siRNA sense strand
ggacaguucucuaugaaaa

SEQ ID NO: 965731 - RNA, 19 nt, Homo sapiens
  misc_RNA (1)...(19): siRNA sense strand
uaaagauucuccucaguca

SEQ ID NO: 965732 - RNA, 19 nt, Homo sapiens
  misc_RNA (1)...(19): siRNA sense strand
cagcagagccugucaaauc

SEQ ID NO: 965733 - RNA, 19 nt, Homo sapiens
  misc_RNA (1)...(19): siRNA sense strand
uaaucaggaugccagaaua

SEQ ID NO: 965734 - RNA, 19 nt, Homo sapiens
  misc_RNA (1)...(19): siRNA sense strand
caaaugcauguaucucuua

SEQ ID NO: 965735 - RNA, 19 nt, Homo sapiens
  misc_RNA (1)...(19): siRNA sense strand
gaaaguguacagaaaccua

SEQ ID NO: 965736 - RNA, 19 nt, Homo sapiens
  misc_RNA (1)...(19): siRNA sense strand
ccuaaguccuucucaauau

SEQ ID NO: 965737 - RNA, 19 nt, Homo sapiens
  misc_RNA (1)...(19): siRNA sense strand
gaaagcugucaguuaaaua

SEQ ID NO: 965738 - RNA, 19 nt, Homo sapiens
  misc_RNA (1)...(19): siRNA sense strand
aaaggaaacaugcaaauga

SEQ ID NO: 965739 - RNA, 19 nt, Homo sapiens
  misc_RNA (1)...(19): siRNA sense strand
gagaaagucagaaauggaa

SEQ ID NO: 965740 - RNA, 19 nt, Homo sapiens
  misc_RNA (1)...(19): siRNA sense strand
uaaagaggacuuccauuug

SEQ ID NO: 965741 - RNA, 19 nt, Homo sapiens
  misc_RNA (1)...(19): siRNA sense strand
gaaagaacagacagaccua

SEQ ID NO: 965742 - RNA, 19 nt, Homo sapiens
  misc_RNA (1)...(19): siRNA sense strand
uuacugggaugaacacauu

SEQ ID NO: 965743 - RNA, 19 nt, Homo sapiens
  misc_RNA (1)...(19): siRNA sense strand
gaaaggaaacaugcaaaug

SEQ ID NO: 965744 - RNA, 19 nt, Homo sapiens
  misc_RNA (1)...(19): siRNA sense strand
ccagagcaauuacuugaau

SEQ ID NO: 965745 - RNA, 19 nt, Homo sapiens
  misc_RNA (1)...(19): siRNA sense strand
gcucuagauuuccacagua

SEQ ID NO: 965746 - RNA, 19 nt, Homo sapiens
  misc_RNA (1)...(19): siRNA sense strand
ucaggacaguucucuauga

SEQ ID NO: 965747 - RNA, 19 nt, Homo sapiens
  misc_RNA (1)...(19): siRNA sense strand
cagccaauauucagacauu

SEQ ID NO: 965748 - RNA, 19 nt, Homo sapiens
  misc_RNA (1)...(19): siRNA sense strand
gacaucaagucacacugua

SEQ ID NO: 965749 - RNA, 19 nt, Homo sapiens
  misc_RNA (1)...(19): siRNA sense strand
ggcagaaacucacauaguc

SEQ ID NO: 965750 - RNA, 19 nt, Homo sapiens
  misc_RNA (1)...(19): siRNA sense strand
uaacaaagagccacacugu

SEQ ID NO: 965751 - RNA, 19 nt, Homo sapiens
  misc_RNA (1)...(19): siRNA sense strand
guacuaggccagaauucua

SEQ ID NO: 965752 - RNA, 19 nt, Homo sapiens
  misc_RNA (1)...(19): siRNA sense strand
gacauuaccaagagucaua

SEQ ID NO: 965753 - RNA, 19 nt, Homo sapiens
  misc_RNA (1)...(19): siRNA sense strand
ccauggaaaugaccaaaug

SEQ ID NO: 965754 - RNA, 19 nt, Homo sapiens
  misc_RNA (1)...(19): siRNA sense strand
uaacuaagcaagucauuca

SEQ ID NO: 965755 - RNA, 19 nt, Homo sapiens
  misc_RNA (1)...(19): siRNA sense strand
agugcaagcuacagaaaua

SEQ ID NO: 965756 - RNA, 19 nt, Homo sapiens
  misc_RNA (1)...(19): siRNA sense strand
ccaaaugucucucaaauau

SEQ ID NO: 965757 - RNA, 19 nt, Homo sapiens
  misc_RNA (1)...(19): siRNA sense strand
ggaaauagauaacgaaagu

SEQ ID NO: 965758 - RNA, 19 nt, Homo sapiens
  misc_RNA (1)...(19): siRNA sense strand
ggacgaaaguguacagaaa

SEQ ID NO: 965759 - RNA, 19 nt, Homo sapiens
  misc_RNA (1)...(19): siRNA sense strand
gaggaauggucuaauaaua

SEQ ID NO: 965760 - RNA, 19 nt, Homo sapiens
  misc_RNA (1)...(19): siRNA sense strand
gaaauaaggcacacaauga

SEQ ID NO: 965761 - RNA, 19 nt, Homo sapiens
  misc_RNA (1)...(19): siRNA sense strand
guugaaagcugucaguuaa

SEQ ID NO: 965762 - RNA, 19 nt, Homo sapiens
  misc_RNA (1)...(19): siRNA sense strand
gaagaaauguggacuuuac

SEQ ID NO: 965763 - RNA, 19 nt, Homo sapiens
  misc_RNA (1)...(19): siRNA sense strand
ggacagaguaguaucaaua

SEQ ID NO: 965764 - RNA, 19 nt, Homo sapiens
  misc_RNA (1)...(19): siRNA sense strand
gcauguaucucuuaaggaa

SEQ ID NO: 965765 - RNA, 19 nt, Homo sapiens
  misc_RNA (1)...(19): siRNA sense strand
gauaauagcuguguucaag

SEQ ID NO: 965766 - RNA, 19 nt, Homo sapiens
  misc_RNA (1)...(19): siRNA sense strand
caagauagauaccacauca

SEQ ID NO: 965767 - RNA, 19 nt, Homo sapiens
  misc_RNA (1)...(19): siRNA sense strand
caucuaauguuccauguuu

SEQ ID NO: 965768 - RNA, 19 nt, Homo sapiens
  misc_RNA (1)...(19): siRNA sense strand
ucacacaacugccuuagaa

SEQ ID NO: 965769 - RNA, 19 nt, Homo sapiens
  misc_RNA (1)...(19): siRNA sense strand
ucacacaacugccuuagaa

SEQ ID NO: 965770 - RNA, 19 nt, Homo sapiens
  misc_RNA (1)...(19): siRNA sense strand
gaaacgugauugucauuug

SEQ ID NO: 965771 - RNA, 19 nt, Homo sapiens
  misc_RNA (1)...(19): siRNA sense strand
cauaaacucugcagacaaa

SEQ ID NO: 965772 - RNA, 19 nt, Homo sapiens
  misc_RNA (1)...(19): siRNA sense strand
gaacuaaagcuucaggaaa

SEQ ID NO: 965773 - RNA, 19 nt, Homo sapiens
  misc_RNA (1)...(19): siRNA sense strand
gaacauacccgugaaagga

SEQ ID NO: 965774 - RNA, 19 nt, Homo sapiens
  misc_RNA (1)...(19): siRNA sense strand
ggagaugacuaaacuuaau

SEQ ID NO: 965775 - RNA, 19 nt, Homo sapiens
  misc_RNA (1)...(19): siRNA sense strand
caacaacucuuugcugcua

SEQ ID NO: 965776 - RNA, 19 nt, Homo sapiens
  misc_RNA (1)...(19): siRNA sense strand
uaauacagcucuagauuuc

SEQ ID NO: 965777 - RNA, 19 nt, Homo sapiens
  misc_RNA (1)...(19): siRNA sense strand
gccaugcucuuaugugaua

SEQ ID NO: 965778 - RNA, 19 nt, Homo sapiens
  misc_RNA (1)...(19): siRNA sense strand
gaacaaagacaaagauugg

SEQ ID NO: 965779 - RNA, 19 nt, Homo sapiens
  misc_RNA (1)...(19): siRNA sense strand
gaaauaaaccauagaccuu

SEQ ID NO: 965780 - RNA, 19 nt, Homo sapiens
  misc_RNA (1)...(19): siRNA sense strand
guaaggagauguucuuugg

SEQ ID NO: 965781 - RNA, 19 nt, Homo sapiens
  misc_RNA (1)...(19): siRNA sense strand
uagcaaagauucaggcauu

SEQ ID NO: 965782 - RNA, 19 nt, Homo sapiens
  misc_RNA (1)...(19): siRNA sense strand
cgagucagcuuugcagaua

SEQ ID NO: 965783 - RNA, 19 nt, Homo sapiens
  misc_RNA (1)...(19): siRNA sense strand
gauuauauguucagaggaa

SEQ ID NO: 965784 - RNA, 19 nt, Homo sapiens
  misc_RNA (1)...(19): siRNA sense strand
gcaacaagccauaauauag

SEQ ID NO: 965785 - RNA, 19 nt, Homo sapiens
  misc_RNA (1)...(19): siRNA sense strand
gaccaaaugucucucaaau

SEQ ID NO: 965786 - RNA, 19 nt, Homo sapiens
  misc_RNA (1)...(19): siRNA sense strand
gcaaugacuuuauggacuu

SEQ ID NO: 965787 - RNA, 19 nt, Homo sapiens
  misc_RNA (1)...(19): siRNA sense strand
guggagugcuuaaaucuaa

SEQ ID NO: 965788 - RNA, 19 nt, Homo sapiens
  misc_RNA (1)...(19): siRNA sense strand
gcaaaugacagccagcuaa

SEQ ID NO: 965789 - RNA, 19 nt, Homo sapiens
  misc_RNA (1)...(19): siRNA sense strand
ccacaucauuucuagcuaa

SEQ ID NO: 965790 - RNA, 19 nt, Homo sapiens
  misc_RNA (1)...(19): siRNA sense strand
gaaccuaaguccuucucaa

SEQ ID NO: 965791 - RNA, 19 nt, Homo sapiens
  misc_RNA (1)...(19): siRNA sense strand
gauauuacccagaguugua

SEQ ID NO: 965792 - RNA, 19 nt, Homo sapiens
  misc_RNA (1)...(19): siRNA sense strand
gauaaucccauaagugaaa

SEQ ID NO: 965793 - RNA, 19 nt, Homo sapiens
  misc_RNA (1)...(19): siRNA sense strand
agagagaccuguuagaaga

SEQ ID NO: 965794 - RNA, 19 nt, Homo sapiens
  misc_RNA (1)...(19): siRNA sense strand
aaagugcccuggaggauaa

SEQ ID NO: 965795 - RNA, 19 nt, Homo sapiens
  misc_RNA (1)...(19): siRNA sense strand
agagguagcugauaacaug

SEQ ID NO: 965796 - RNA, 19 nt, Homo sapiens
  misc_RNA (1)...(19): siRNA sense strand
gaaagugaccgucuaguag

SEQ ID NO: 965797 - RNA, 19 nt, Homo sapiens
  misc_RNA (1)...(19): siRNA sense strand
agacagaccuaacuuugaa

SEQ ID NO: 965798 - RNA, 19 nt, Homo sapiens
  misc_RNA (1)...(19): siRNA sense strand
gaggagaacauggacauua

SEQ ID NO: 965799 - RNA, 19 nt, Homo sapiens
  misc_RNA (1)...(19): siRNA sense strand
guuauuuccuguacugaua

SEQ ID NO: 965800 - RNA, 19 nt, Homo sapiens
  misc_RNA (1)...(19): siRNA sense strand
uaacaacaaugaacagaca

SEQ ID NO: 965801 - RNA, 19 nt, Homo sapiens
  misc_RNA (1)...(19): siRNA sense strand
gaagaaaacccuaaauuug

SEQ ID NO: 965802 - RNA, 19 nt, Homo sapiens
  misc_RNA (1)...(19): siRNA sense strand
gaaaugacagagucccaua

SEQ ID NO: 965803 - RNA, 19 nt, Homo sapiens
  misc_RNA (1)...(19): siRNA sense strand
cauauuaccagaagucaua

SEQ ID NO: 965804 - RNA, 19 nt, Homo sapiens
  misc_RNA (1)...(19): siRNA sense strand
ggaaauaaggcacacaaug

SEQ ID NO: 965805 - RNA, 19 nt, Homo sapiens
  misc_RNA (1)...(19): siRNA sense strand
uagaagaaauguggacuuu

SEQ ID NO: 965806 - RNA, 19 nt, Homo sapiens
  misc_RNA (1)...(19): siRNA sense strand
caacugccuuagaauguaa

SEQ ID NO: 965807 - RNA, 19 nt, Homo sapiens
  misc_RNA (1)...(19): siRNA sense strand
gaaagugcccuggaggaua

SEQ ID NO: 965808 - RNA, 19 nt, Homo sapiens
  misc_RNA (1)...(19): siRNA sense strand
ggaauccaaugcuuugaga

SEQ ID NO: 965809 - RNA, 19 nt, Homo sapiens
  misc_RNA (1)...(19): siRNA sense strand
caacugccuuagaauguaa

SEQ ID NO: 965810 - RNA, 19 nt, Homo sapiens
  misc_RNA (1)...(19): siRNA sense strand
gugcuuaaaucuaacugua

SEQ ID NO: 965811 - RNA, 19 nt, Homo sapiens
  misc_RNA (1)...(19): siRNA sense strand
gacggagucucauaugaaa

SEQ ID NO: 965812 - RNA, 19 nt, Homo sapiens
  misc_RNA (1)...(19): siRNA sense strand
gaaggaagaaguuauucaa

SEQ ID NO: 965813 - RNA, 19 nt, Homo sapiens
  misc_RNA (1)...(19): siRNA sense strand
cagaaggaguuuucaauua

SEQ ID NO: 965814 - RNA, 19 nt, Homo sapiens
  misc_RNA (1)...(19): siRNA sense strand
caaaugaaagucuauguug

SEQ ID NO: 965815 - RNA, 19 nt, Homo sapiens
  misc_RNA (1)...(19): siRNA sense strand
gaaguuauucaaaccagua

SEQ ID NO: 965816 - RNA, 19 nt, Homo sapiens
  misc_RNA (1)...(19): siRNA sense strand
uaauagcuguguucaagaa

SEQ ID NO: 965817 - RNA, 19 nt, Homo sapiens
  misc_RNA (1)...(19): siRNA sense strand
gcaggaacuucugaaacua

SEQ ID NO: 965818 - RNA, 19 nt, Homo sapiens
  misc_RNA (1)...(19): siRNA sense strand
ccauagaccuuuauuagag

SEQ ID NO: 965819 - RNA, 19 nt, Homo sapiens
  misc_RNA (1)...(19): siRNA sense strand
ucacgggaaucuaaaggua

SEQ ID NO: 965820 - RNA, 19 nt, Homo sapiens
  misc_RNA (1)...(19): siRNA sense strand
ccaaugcuuugagaaauaa

SEQ ID NO: 965821 - RNA, 19 nt, Homo sapiens
  misc_RNA (1)...(19): siRNA sense strand
gaucaauucuucagacucu

SEQ ID NO: 965822 - RNA, 19 nt, Homo sapiens
  misc_RNA (1)...(19): siRNA sense strand
gaaaucuauuggcuaauca

SEQ ID NO: 965823 - RNA, 19 nt, Homo sapiens
  misc_RNA (1)...(19): siRNA sense strand
gauuaaggauccacgaaau

SEQ ID NO: 965824 - RNA, 19 nt, Homo sapiens
  misc_RNA (1)...(19): siRNA sense strand
gaacagacagaccuaacuu

SEQ ID NO: 965825 - RNA, 19 nt, Homo sapiens
  misc_RNA (1)...(19): siRNA sense strand
gaacagugccucuucuaca

SEQ ID NO: 965826 - RNA, 19 nt, Homo sapiens
  misc_RNA (1)...(19): siRNA sense strand
cuaaguccuucucaauaua

SEQ ID NO: 965827 - RNA, 19 nt, Homo sapiens
  misc_RNA (1)...(19): siRNA sense strand
gaaagucuauguugaugac

SEQ ID NO: 965828 - RNA, 19 nt, Homo sapiens
  misc_RNA (1)...(19): siRNA sense strand
cacgaaaucuauuggcuaa

SEQ ID NO: 965829 - RNA, 19 nt, Homo sapiens
  misc_RNA (1)...(19): siRNA sense strand
ggaauggucuaauaauagg

SEQ ID NO: 965830 - RNA, 19 nt, Homo sapiens
  misc_RNA (1)...(19): siRNA sense strand
ggacaguucucuaugaaaa

SEQ ID NO: 965831 - RNA, 19 nt, Homo sapiens
  misc_RNA (1)...(19): siRNA sense strand
uaaagauucuccucaguca

SEQ ID NO: 965832 - RNA, 19 nt, Homo sapiens
  misc_RNA (1)...(19): siRNA sense strand
cagcagagccugucaaauc

SEQ ID NO: 965833 - RNA, 19 nt, Homo sapiens
  misc_RNA (1)...(19): siRNA sense strand
uaaucaggaugccagaaua

SEQ ID NO: 965834 - RNA, 19 nt, Homo sapiens
  misc_RNA (1)...(19): siRNA sense strand
caaaugcauguaucucuua

SEQ ID NO: 965835 - RNA, 19 nt, Homo sapiens
  misc_RNA (1)...(19): siRNA sense strand
gaaaguguacagaaaccua

SEQ ID NO: 965836 - RNA, 19 nt, Homo sapiens
  misc_RNA (1)...(19): siRNA sense strand
ccuaaguccuucucaauau

SEQ ID NO: 965837 - RNA, 19 nt, Homo sapiens
  misc_RNA (1)...(19): siRNA sense strand
gaaagcugucaguuaaaua

SEQ ID NO: 965838 - RNA, 19 nt, Homo sapiens
  misc_RNA (1)...(19): siRNA sense strand
aaaggaaacaugcaaauga

SEQ ID NO: 965839 - RNA, 19 nt, Homo sapiens
  misc_RNA (1)...(19): siRNA sense strand
gagaaagucagaaauggaa

SEQ ID NO: 965840 - RNA, 19 nt, Homo sapiens
  misc_RNA (1)...(19): siRNA sense strand
uaaagaggacuuccauuug

SEQ ID NO: 965841 - RNA, 19 nt, Homo sapiens
  misc_RNA (1)...(19): siRNA sense strand
gaaagaacagacagaccua

SEQ ID NO: 965842 - RNA, 19 nt, Homo sapiens
  misc_RNA (1)...(19): siRNA sense strand
uuacugggaugaacacauu

SEQ ID NO: 965843 - RNA, 19 nt, Homo sapiens
  misc_RNA (1)...(19): siRNA sense strand
gaaaggaaacaugcaaaug

SEQ ID NO: 965844 - RNA, 19 nt, Homo sapiens
  misc_RNA (1)...(19): siRNA sense strand
ccagagcaauuacuugaau

SEQ ID NO: 965845 - RNA, 19 nt, Homo sapiens
  misc_RNA (1)...(19): siRNA sense strand
gcucuagauuuccacagua

SEQ ID NO: 965846 - RNA, 19 nt, Homo sapiens
  misc_RNA (1)...(19): siRNA sense strand
ucaggacaguucucuauga

SEQ ID NO: 965847 - RNA, 19 nt, Homo sapiens
  misc_RNA (1)...(19): siRNA sense strand
cagccaauauucagacauu

SEQ ID NO: 965848 - RNA, 19 nt, Homo sapiens
  misc_RNA (1)...(19): siRNA sense strand
gacaucaagucacacugua

SEQ ID NO: 965849 - RNA, 19 nt, Homo sapiens
  misc_RNA (1)...(19): siRNA sense strand
ggcagaaacucacauaguc

SEQ ID NO: 965850 - RNA, 19 nt, Homo sapiens
  misc_RNA (1)...(19): siRNA sense strand
uaacaaagagccacacugu

SEQ ID NO: 965851 - RNA, 19 nt, Homo sapiens
  misc_RNA (1)...(19): siRNA sense strand
guacuaggccagaauucua

SEQ ID NO: 965852 - RNA, 19 nt, Homo sapiens
  misc_RNA (1)...(19): siRNA sense strand
gacauuaccaagagucaua

SEQ ID NO: 965853 - RNA, 19 nt, Homo sapiens
  misc_RNA (1)...(19): siRNA sense strand
ccauggaaaugaccaaaug

SEQ ID NO: 965854 - RNA, 19 nt, Homo sapiens
  misc_RNA (1)...(19): siRNA sense strand
uaacuaagcaagucauuca

SEQ ID NO: 965855 - RNA, 19 nt, Homo sapiens
  misc_RNA (1)...(19): siRNA sense strand
agugcaagcuacagaaaua

SEQ ID NO: 965856 - RNA, 19 nt, Homo sapiens
  misc_RNA (1)...(19): siRNA sense strand
ccaaaugucucucaaauau

SEQ ID NO: 965857 - RNA, 19 nt, Homo sapiens
  misc_RNA (1)...(19): siRNA sense strand
ggaaauagauaacgaaagu

SEQ ID NO: 965858 - RNA, 19 nt, Homo sapiens
  misc_RNA (1)...(19): siRNA sense strand
ggacgaaaguguacagaaa

SEQ ID NO: 965859 - RNA, 19 nt, Homo sapiens
  misc_RNA (1)...(19): siRNA sense strand
gaggaauggucuaauaaua

SEQ ID NO: 965860 - RNA, 19 nt, Homo sapiens
  misc_RNA (1)...(19): siRNA sense strand
gaaauaaggcacacaauga

SEQ ID NO: 965861 - RNA, 19 nt, Homo sapiens
  misc_RNA (1)...(19): siRNA sense strand
guugaaagcugucaguuaa

SEQ ID NO: 965862 - RNA, 19 nt, Homo sapiens
  misc_RNA (1)...(19): siRNA sense strand
gaagaaauguggacuuuac

SEQ ID NO: 965863 - RNA, 19 nt, Homo sapiens
  misc_RNA (1)...(19): siRNA sense strand
ggacagaguaguaucaaua

SEQ ID NO: 965864 - RNA, 19 nt, Homo sapiens
  misc_RNA (1)...(19): siRNA sense strand
gcauguaucucuuaaggaa

SEQ ID NO: 965865 - RNA, 19 nt, Homo sapiens
  misc_RNA (1)...(19): siRNA sense strand
gauaauagcuguguucaag

SEQ ID NO: 965866 - RNA, 19 nt, Homo sapiens
  misc_RNA (1)...(19): siRNA sense strand
caagauagauaccacauca

SEQ ID NO: 965867 - RNA, 19 nt, Homo sapiens
  misc_RNA (1)...(19): siRNA sense strand
caucuaauguuccauguuu

SEQ ID NO: 965868 - RNA, 19 nt, Homo sapiens
  misc_RNA (1)...(19): siRNA sense strand
ucacacaacugccuuagaa

SEQ ID NO: 965869 - RNA, 19 nt, Homo sapiens
  misc_RNA (1)...(19): siRNA sense strand
ucacacaacugccuuagaa

SEQ ID NO: 965870 - RNA, 19 nt, Homo sapiens
  misc_RNA (1)...(19): siRNA sense strand
gaaacgugauugucauuug

SEQ ID NO: 965871 - RNA, 19 nt, Homo sapiens
  misc_RNA (1)...(19): siRNA sense strand
cauaaacucugcagacaaa

SEQ ID NO: 965872 - RNA, 19 nt, Homo sapiens
  misc_RNA (1)...(19): siRNA sense strand
gaacuaaagcuucaggaaa

SEQ ID NO: 965873 - RNA, 19 nt, Homo sapiens
  misc_RNA (1)...(19): siRNA sense strand
gaacauacccgugaaagga

SEQ ID NO: 965874 - RNA, 19 nt, Homo sapiens
  misc_RNA (1)...(19): siRNA sense strand
ggagaugacuaaacuuaau

SEQ ID NO: 965875 - RNA, 19 nt, Homo sapiens
  misc_RNA (1)...(19): siRNA sense strand
caacaacucuuugcugcua

SEQ ID NO: 965876 - RNA, 19 nt, Homo sapiens
  misc_RNA (1)...(19): siRNA sense strand
uaauacagcucuagauuuc

SEQ ID NO: 965877 - RNA, 19 nt, Homo sapiens
  misc_RNA (1)...(19): siRNA sense strand
gccaugcucuuaugugaua

SEQ ID NO: 965878 - RNA, 19 nt, Homo sapiens
  misc_RNA (1)...(19): siRNA sense strand
gaacaaagacaaagauugg

SEQ ID NO: 965879 - RNA, 19 nt, Homo sapiens
  misc_RNA (1)...(19): siRNA sense strand
gaaauaaaccauagaccuu

SEQ ID NO: 965880 - RNA, 19 nt, Homo sapiens
  misc_RNA (1)...(19): siRNA sense strand
guaaggagauguucuuugg

SEQ ID NO: 965881 - RNA, 19 nt, Homo sapiens
  misc_RNA (1)...(19): siRNA sense strand
uagcaaagauucaggcauu

SEQ ID NO: 965882 - RNA, 19 nt, Homo sapiens
  misc_RNA (1)...(19): siRNA sense strand
cgagucagcuuugcagaua

SEQ ID NO: 965883 - RNA, 19 nt, Homo sapiens
  misc_RNA (1)...(19): siRNA sense strand
gauuauauguucagaggaa

SEQ ID NO: 965884 - RNA, 19 nt, Homo sapiens
  misc_RNA (1)...(19): siRNA sense strand
gcaacaagccauaauauag

SEQ ID NO: 965885 - RNA, 19 nt, Homo sapiens
  misc_RNA (1)...(19): siRNA sense strand
gaccaaaugucucucaaau

SEQ ID NO: 965886 - RNA, 19 nt, Homo sapiens
  misc_RNA (1)...(19): siRNA sense strand
gcaaugacuuuauggacuu

SEQ ID NO: 965887 - RNA, 19 nt, Homo sapiens
  misc_RNA (1)...(19): siRNA sense strand
guggagugcuuaaaucuaa

SEQ ID NO: 965888 - RNA, 19 nt, Homo sapiens
  misc_RNA (1)...(19): siRNA sense strand
gcaaaugacagccagcuaa

SEQ ID NO: 965889 - RNA, 19 nt, Homo sapiens
  misc_RNA (1)...(19): siRNA sense strand
ccacaucauuucuagcuaa

SEQ ID NO: 965890 - RNA, 19 nt, Homo sapiens
  misc_RNA (1)...(19): siRNA sense strand
gaaccuaaguccuucucaa

SEQ ID NO: 965891 - RNA, 19 nt, Homo sapiens
  misc_RNA (1)...(19): siRNA sense strand
gauauuacccagaguugua

SEQ ID NO: 965892 - RNA, 19 nt, Homo sapiens
  misc_RNA (1)...(19): siRNA sense strand
gauaaucccauaagugaaa

SEQ ID NO: 965893 - RNA, 19 nt, Homo sapiens
  misc_RNA (1)...(19): siRNA sense strand
agagagaccuguuagaaga

SEQ ID NO: 965894 - RNA, 19 nt, Homo sapiens
  misc_RNA (1)...(19): siRNA sense strand
aaagugcccuggaggauaa

SEQ ID NO: 965895 - RNA, 19 nt, Homo sapiens
  misc_RNA (1)...(19): siRNA sense strand
agagguagcugauaacaug

SEQ ID NO: 965896 - RNA, 19 nt, Homo sapiens
  misc_RNA (1)...(19): siRNA sense strand
gaaagugaccgucuaguag

SEQ ID NO: 965897 - RNA, 19 nt, Homo sapiens
  misc_RNA (1)...(19): siRNA sense strand
agacagaccuaacuuugaa

SEQ ID NO: 965898 - RNA, 19 nt, Homo sapiens
  misc_RNA (1)...(19): siRNA sense strand
gaggagaacauggacauua

SEQ ID NO: 965899 - RNA, 19 nt, Homo sapiens
  misc_RNA (1)...(19): siRNA sense strand
guuauuuccuguacugaua

SEQ ID NO: 965900 - RNA, 19 nt, Homo sapiens
  misc_RNA (1)...(19): siRNA sense strand
uaacaacaaugaacagaca

SEQ ID NO: 965901 - RNA, 19 nt, Homo sapiens
  misc_RNA (1)...(19): siRNA sense strand
gaagaaaacccuaaauuug

SEQ ID NO: 965902 - RNA, 19 nt, Homo sapiens
  misc_RNA (1)...(19): siRNA sense strand
gaaaugacagagucccaua

SEQ ID NO: 965903 - RNA, 19 nt, Homo sapiens
  misc_RNA (1)...(19): siRNA sense strand
cauauuaccagaagucaua

SEQ ID NO: 965904 - RNA, 19 nt, Homo sapiens
  misc_RNA (1)...(19): siRNA sense strand
ggaaauaaggcacacaaug

SEQ ID NO: 965905 - RNA, 19 nt, Homo sapiens
  misc_RNA (1)...(19): siRNA sense strand
uagaagaaauguggacuuu

SEQ ID NO: 965906 - RNA, 19 nt, Homo sapiens
  misc_RNA (1)...(19): siRNA sense strand
caacugccuuagaauguaa

SEQ ID NO: 965907 - RNA, 19 nt, Homo sapiens
  misc_RNA (1)...(19): siRNA sense strand
gaaagugcccuggaggaua

SEQ ID NO: 965908 - RNA, 19 nt, Homo sapiens
  misc_RNA (1)...(19): siRNA sense strand
ggaauccaaugcuuugaga

SEQ ID NO: 965909 - RNA, 19 nt, Homo sapiens
  misc_RNA (1)...(19): siRNA sense strand
caacugccuuagaauguaa

SEQ ID NO: 965910 - RNA, 19 nt, Homo sapiens
  misc_RNA (1)...(19): siRNA sense strand
gugcuuaaaucuaacugua

SEQ ID NO: 965911 - RNA, 19 nt, Homo sapiens
  misc_RNA (1)...(19): siRNA sense strand
gacggagucucauaugaaa

SEQ ID NO: 965912 - RNA, 19 nt, Homo sapiens
  misc_RNA (1)...(19): siRNA sense strand
gaaggaagaaguuauucaa

SEQ ID NO: 965913 - RNA, 19 nt, Homo sapiens
  misc_RNA (1)...(19): siRNA sense strand
cagaaggaguuuucaauua

SEQ ID NO: 965914 - RNA, 19 nt, Homo sapiens
  misc_RNA (1)...(19): siRNA sense strand
caaaugaaagucuauguug

SEQ ID NO: 965915 - RNA, 19 nt, Homo sapiens
  misc_RNA (1)...(19): siRNA sense strand
gaaguuauucaaaccagua

SEQ ID NO: 965916 - RNA, 19 nt, Homo sapiens
  misc_RNA (1)...(19): siRNA sense strand
uaauagcuguguucaagaa

SEQ ID NO: 965917 - RNA, 19 nt, Homo sapiens
  misc_RNA (1)...(19): siRNA sense strand
gcaggaacuucugaaacua

SEQ ID NO: 965918 - RNA, 19 nt, Homo sapiens
  misc_RNA (1)...(19): siRNA sense strand
ccauagaccuuuauuagag

SEQ ID NO: 965919 - RNA, 19 nt, Homo sapiens
  misc_RNA (1)...(19): siRNA sense strand
ucacgggaaucuaaaggua

SEQ ID NO: 965920 - RNA, 19 nt, Homo sapiens
  misc_RNA (1)...(19): siRNA sense strand
ccaaugcuuugagaaauaa

SEQ ID NO: 965921 - RNA, 19 nt, Homo sapiens
  misc_RNA (1)...(19): siRNA sense strand
gaucaauucuucagacucu

SEQ ID NO: 965922 - RNA, 19 nt, Homo sapiens
  misc_RNA (1)...(19): siRNA sense strand
gaaaucuauuggcuaauca

SEQ ID NO: 965923 - RNA, 19 nt, Homo sapiens
  misc_RNA (1)...(19): siRNA sense strand
gauuaaggauccacgaaau

SEQ ID NO: 965924 - RNA, 19 nt, Homo sapiens
  misc_RNA (1)...(19): siRNA sense strand
gaacagacagaccuaacuu

SEQ ID NO: 965925 - RNA, 19 nt, Homo sapiens
  misc_RNA (1)...(19): siRNA sense strand
gaacagugccucuucuaca

SEQ ID NO: 965926 - RNA, 19 nt, Homo sapiens
  misc_RNA (1)...(19): siRNA sense strand
cuaaguccuucucaauaua

SEQ ID NO: 965927 - RNA, 19 nt, Homo sapiens
  misc_RNA (1)...(19): siRNA sense strand
gaaagucuauguugaugac

SEQ ID NO: 965928 - RNA, 19 nt, Homo sapiens
  misc_RNA (1)...(19): siRNA sense strand
cacgaaaucuauuggcuaa

SEQ ID NO: 965929 - RNA, 19 nt, Homo sapiens
  misc_RNA (1)...(19): siRNA sense strand
ggaauggucuaauaauagg

SEQ ID NO: 965930 - RNA, 19 nt, Homo sapiens
  misc_RNA (1)...(19): siRNA sense strand
ggacaguucucuaugaaaa

SEQ ID NO: 965931 - RNA, 19 nt, Homo sapiens
  misc_RNA (1)...(19): siRNA sense strand
uaaagauucuccucaguca

SEQ ID NO: 965932 - RNA, 19 nt, Homo sapiens
  misc_RNA (1)...(19): siRNA sense strand
cagcagagccugucaaauc

SEQ ID NO: 965933 - RNA, 19 nt, Homo sapiens
  misc_RNA (1)...(19): siRNA sense strand
uaaucaggaugccagaaua

SEQ ID NO: 965934 - RNA, 19 nt, Homo sapiens
  misc_RNA (1)...(19): siRNA sense strand
caaaugcauguaucucuua

SEQ ID NO: 965935 - RNA, 19 nt, Homo sapiens
  misc_RNA (1)...(19): siRNA sense strand
gaaaguguacagaaaccua

SEQ ID NO: 965936 - RNA, 19 nt, Homo sapiens
  misc_RNA (1)...(19): siRNA sense strand
ccuaaguccuucucaauau

SEQ ID NO: 965937 - RNA, 19 nt, Homo sapiens
  misc_RNA (1)...(19): siRNA sense strand
gaaagcugucaguuaaaua

SEQ ID NO: 965938 - RNA, 19 nt, Homo sapiens
  misc_RNA (1)...(19): siRNA sense strand
aaaggaaacaugcaaauga

SEQ ID NO: 965939 - RNA, 19 nt, Homo sapiens
  misc_RNA (1)...(19): siRNA sense strand
gagaaagucagaaauggaa

SEQ ID NO: 965940 - RNA, 19 nt, Homo sapiens
  misc_RNA (1)...(19): siRNA sense strand
uaaagaggacuuccauuug

SEQ ID NO: 965941 - RNA, 19 nt, Homo sapiens
  misc_RNA (1)...(19): siRNA sense strand
gaaagaacagacagaccua

SEQ ID NO: 965942 - RNA, 19 nt, Homo sapiens
  misc_RNA (1)...(19): siRNA sense strand
uuacugggaugaacacauu

SEQ ID NO: 965943 - RNA, 19 nt, Homo sapiens
  misc_RNA (1)...(19): siRNA sense strand
gaaaggaaacaugcaaaug

SEQ ID NO: 965944 - RNA, 19 nt, Homo sapiens
  misc_RNA (1)...(19): siRNA sense strand
ccagagcaauuacuugaau

SEQ ID NO: 965945 - RNA, 19 nt, Homo sapiens
  misc_RNA (1)...(19): siRNA sense strand
gcucuagauuuccacagua

SEQ ID NO: 965946 - RNA, 19 nt, Homo sapiens
  misc_RNA (1)...(19): siRNA sense strand
ucaggacaguucucuauga

SEQ ID NO: 965947 - RNA, 19 nt, Homo sapiens
  misc_RNA (1)...(19): siRNA sense strand
cagccaauauucagacauu

SEQ ID NO: 965948 - RNA, 19 nt, Homo sapiens
  misc_RNA (1)...(19): siRNA sense strand
gacaucaagucacacugua

SEQ ID NO: 965949 - RNA, 19 nt, Homo sapiens
  misc_RNA (1)...(19): siRNA sense strand
ggcagaaacucacauaguc

SEQ ID NO: 965950 - RNA, 19 nt, Homo sapiens
  misc_RNA (1)...(19): siRNA sense strand
uaacaaagagccacacugu

SEQ ID NO: 965951 - RNA, 19 nt, Homo sapiens
  misc_RNA (1)...(19): siRNA sense strand
guacuaggccagaauucua

SEQ ID NO: 965952 - RNA, 19 nt, Homo sapiens
  misc_RNA (1)...(19): siRNA sense strand
gacauuaccaagagucaua

SEQ ID NO: 965953 - RNA, 19 nt, Homo sapiens
  misc_RNA (1)...(19): siRNA sense strand
ccauggaaaugaccaaaug

SEQ ID NO: 965954 - RNA, 19 nt, Homo sapiens
  misc_RNA (1)...(19): siRNA sense strand
uaacuaagcaagucauuca

SEQ ID NO: 965955 - RNA, 19 nt, Homo sapiens
  misc_RNA (1)...(19): siRNA sense strand
agugcaagcuacagaaaua

SEQ ID NO: 965956 - RNA, 19 nt, Homo sapiens
  misc_RNA (1)...(19): siRNA sense strand
acacuaagcuggcuaaugu

SEQ ID NO: 965957 - RNA, 19 nt, Homo sapiens
  misc_RNA (1)...(19): siRNA sense strand
ccucagagcucaccagauu

SEQ ID NO: 965958 - RNA, 19 nt, Homo sapiens
  misc_RNA (1)...(19): siRNA sense strand
gggcauaugcugacacuaa

SEQ ID NO: 965959 - RNA, 19 nt, Homo sapiens
  misc_RNA (1)...(19): siRNA sense strand
ccagauuugucuaagauga

SEQ ID NO: 965960 - RNA, 19 nt, Homo sapiens
  misc_RNA (1)...(19): siRNA sense strand
gaauucaggcuaaaguuga

SEQ ID NO: 965961 - RNA, 19 nt, Homo sapiens
  misc_RNA (1)...(19): siRNA sense strand
ccacuggcgucaccugcua

SEQ ID NO: 965962 - RNA, 19 nt, Homo sapiens
  misc_RNA (1)...(19): siRNA sense strand
uaagaugacgcaccgaauu

SEQ ID NO: 965963 - RNA, 19 nt, Homo sapiens
  misc_RNA (1)...(19): siRNA sense strand
gcaccgaauucaggcuaaa

SEQ ID NO: 965964 - RNA, 19 nt, Homo sapiens
  misc_RNA (1)...(19): siRNA sense strand
caccagauuugucuaagau

SEQ ID NO: 965965 - RNA, 19 nt, Homo sapiens
  misc_RNA (1)...(19): siRNA sense strand
uaagcuggcuaauguacug

SEQ ID NO: 965966 - RNA, 19 nt, Homo sapiens
  misc_RNA (1)...(19): siRNA sense strand
ccacaguuucucaaccuua

SEQ ID NO: 965967 - RNA, 19 nt, Homo sapiens
  misc_RNA (1)...(19): siRNA sense strand
ucaccagauuugucuaaga

SEQ ID NO: 965968 - RNA, 19 nt, Homo sapiens
  misc_RNA (1)...(19): siRNA sense strand
ccacaaugccgguaucagu

SEQ ID NO: 965969 - RNA, 19 nt, Homo sapiens
  misc_RNA (1)...(19): siRNA sense strand
gcucaccagauuugucuaa

SEQ ID NO: 965970 - RNA, 19 nt, Homo sapiens
  misc_RNA (1)...(19): siRNA sense strand
gcuggcuaauguacuguuu

SEQ ID NO: 965971 - RNA, 19 nt, Homo sapiens
  misc_RNA (1)...(19): siRNA sense strand
cgaauucaggcuaaaguug

SEQ ID NO: 965972 - RNA, 19 nt, Homo sapiens
  misc_RNA (1)...(19): siRNA sense strand
ccauaucggucccuuucug

SEQ ID NO: 965973 - RNA, 19 nt, Homo sapiens
  misc_RNA (1)...(19): siRNA sense strand
ucagagcucaccagauuug

SEQ ID NO: 965974 - RNA, 19 nt, Homo sapiens
  misc_RNA (1)...(19): siRNA sense strand
ggagauauuuugccaacug

SEQ ID NO: 965975 - RNA, 19 nt, Homo sapiens
  misc_RNA (1)...(19): siRNA sense strand
ggauggcugcgcccacuuu

SEQ ID NO: 965976 - RNA, 19 nt, Homo sapiens
  misc_RNA (1)...(19): siRNA sense strand
ggacauccucauccacaau

SEQ ID NO: 965977 - RNA, 19 nt, Homo sapiens
  misc_RNA (1)...(19): siRNA sense strand
caacugccauguggaagag

SEQ ID NO: 965978 - RNA, 19 nt, Homo sapiens
  misc_RNA (1)...(19): siRNA sense strand
gaaccauaucggucccuuu

SEQ ID NO: 965979 - RNA, 19 nt, Homo sapiens
  misc_RNA (1)...(19): siRNA sense strand
ggcauaugcugacacuaag

SEQ ID NO: 965980 - RNA, 19 nt, Homo sapiens
  misc_RNA (1)...(19): siRNA sense strand
gagcucaccagauuugucu

SEQ ID NO: 965981 - RNA, 19 nt, Homo sapiens
  misc_RNA (1)...(19): siRNA sense strand
ggacccgugaggcguuuaa

SEQ ID NO: 965982 - RNA, 19 nt, Homo sapiens
  misc_RNA (1)...(19): siRNA sense strand
cacaaugccgguaucaguu

SEQ ID NO: 965983 - RNA, 19 nt, Homo sapiens
  misc_RNA (1)...(19): siRNA sense strand
gcugcugccuugccugaag

SEQ ID NO: 965984 - RNA, 19 nt, Homo sapiens
  misc_RNA (1)...(19): siRNA sense strand
ccaacugccauguggaaga

SEQ ID NO: 965985 - RNA, 19 nt, Homo sapiens
  misc_RNA (1)...(19): siRNA sense strand
ccaggagagugggaacaau

SEQ ID NO: 965986 - RNA, 19 nt, Homo sapiens
  misc_RNA (1)...(19): siRNA sense strand
ccugaggagcccacaguuu

SEQ ID NO: 965987 - RNA, 19 nt, Homo sapiens
  misc_RNA (1)...(19): siRNA sense strand
caggagagugggaacaaug

SEQ ID NO: 965988 - RNA, 19 nt, Homo sapiens
  misc_RNA (1)...(19): siRNA sense strand
cuucauggccuuggacuug

SEQ ID NO: 965989 - RNA, 19 nt, Homo sapiens
  misc_RNA (1)...(19): siRNA sense strand
cugaggagcccacaguuuc

SEQ ID NO: 965990 - RNA, 19 nt, Homo sapiens
  misc_RNA (1)...(19): siRNA sense strand
gacacuaagcuggcuaaug

SEQ ID NO: 965991 - RNA, 19 nt, Homo sapiens
  misc_RNA (1)...(19): siRNA sense strand
gacauccucauccacaaug

SEQ ID NO: 965992 - RNA, 19 nt, Homo sapiens
  misc_RNA (1)...(19): siRNA sense strand
agccucagcugcccacugu

SEQ ID NO: 965993 - RNA, 19 nt, Homo sapiens
  misc_RNA (1)...(19): siRNA sense strand
uaaaguugagccugagauc

SEQ ID NO: 965994 - RNA, 19 nt, Homo sapiens
  misc_RNA (1)...(19): siRNA sense strand
ggccuuugccacugccuuu

SEQ ID NO: 965995 - RNA, 19 nt, Homo sapiens
  misc_RNA (1)...(19): siRNA sense strand
gcccacaguuucucaaccu

SEQ ID NO: 965996 - RNA, 19 nt, Homo sapiens
  misc_RNA (1)...(19): siRNA sense strand
cacaguuucucaaccuuac

SEQ ID NO: 965997 - RNA, 19 nt, Homo sapiens
  misc_RNA (1)...(19): siRNA sense strand
gcgggcauaugcugacacu

SEQ ID NO: 965998 - RNA, 19 nt, Homo sapiens
  misc_RNA (1)...(19): siRNA sense strand
aagaugacgcaccgaauuc

SEQ ID NO: 965999 - RNA, 19 nt, Homo sapiens
  misc_RNA (1)...(19): siRNA sense strand
uaaagaagcugaaggagaa

SEQ ID NO: 966000 - RNA, 19 nt, Homo sapiens
  misc_RNA (1)...(19): siRNA sense strand
gaauugaucucucaggauu

SEQ ID NO: 966001 - RNA, 19 nt, Homo sapiens
  misc_RNA (1)...(19): siRNA sense strand
gauuaacacugcagaguaa

SEQ ID NO: 966002 - RNA, 19 nt, Homo sapiens
  misc_RNA (1)...(19): siRNA sense strand
gaaggacauucaauucaaa

SEQ ID NO: 966003 - RNA, 19 nt, Homo sapiens
  misc_RNA (1)...(19): siRNA sense strand
ggacauuacuggccuguuc

SEQ ID NO: 966004 - RNA, 19 nt, Homo sapiens
  misc_RNA (1)...(19): siRNA sense strand
gaaguaggacugcaccaua

SEQ ID NO: 966005 - RNA, 19 nt, Homo sapiens
  misc_RNA (1)...(19): siRNA sense strand
gcaaaggugugcaguugga

SEQ ID NO: 966006 - RNA, 19 nt, Homo sapiens
  misc_RNA (1)...(19): siRNA sense strand
gaaggacuguugcagauag

SEQ ID NO: 966007 - RNA, 19 nt, Homo sapiens
  misc_RNA (1)...(19): siRNA sense strand
cauaagaucuacccaagug

SEQ ID NO: 966008 - RNA, 19 nt, Homo sapiens
  misc_RNA (1)...(19): siRNA sense strand
gaaacaccuugcuggauug

SEQ ID NO: 966009 - RNA, 19 nt, Homo sapiens
  misc_RNA (1)...(19): siRNA sense strand
agacagagcaucaaagaaa

SEQ ID NO: 966010 - RNA, 19 nt, Homo sapiens
  misc_RNA (1)...(19): siRNA sense strand
agaaacaccuugcuggauu

SEQ ID NO: 966011 - RNA, 19 nt, Homo sapiens
  misc_RNA (1)...(19): siRNA sense strand
guacagaguuacuacuuag

SEQ ID NO: 966012 - RNA, 19 nt, Homo sapiens
  misc_RNA (1)...(19): siRNA sense strand
gagaugcuguucauaagau

SEQ ID NO: 966013 - RNA, 19 nt, Homo sapiens
  misc_RNA (1)...(19): siRNA sense strand
uaccagcacugccaacuuu

SEQ ID NO: 966014 - RNA, 19 nt, Homo sapiens
  misc_RNA (1)...(19): siRNA sense strand
gcaauugaaaguuugguaa

SEQ ID NO: 966015 - RNA, 19 nt, Homo sapiens
  misc_RNA (1)...(19): siRNA sense strand
gaauccauaucacuacgaa

SEQ ID NO: 966016 - RNA, 19 nt, Homo sapiens
  misc_RNA (1)...(19): siRNA sense strand
gaguauugguguuccauug

SEQ ID NO: 966017 - RNA, 19 nt, Homo sapiens
  misc_RNA (1)...(19): siRNA sense strand
cgaauacaccaacaaguaa

SEQ ID NO: 966018 - RNA, 19 nt, Homo sapiens
  misc_RNA (1)...(19): siRNA sense strand
ggugaaggaugaauaugug

SEQ ID NO: 966019 - RNA, 19 nt, Homo sapiens
  misc_RNA (1)...(19): siRNA sense strand
gcagaguaaugcuccauca

SEQ ID NO: 966020 - RNA, 19 nt, Homo sapiens
  misc_RNA (1)...(19): siRNA sense strand
ggauuaacacugcagagua

SEQ ID NO: 966021 - RNA, 19 nt, Homo sapiens
  misc_RNA (1)...(19): siRNA sense strand
caaguaugauggugaagga

SEQ ID NO: 966022 - RNA, 19 nt, Homo sapiens
  misc_RNA (1)...(19): siRNA sense strand
cuacccaagugcauauaua

SEQ ID NO: 966023 - RNA, 19 nt, Homo sapiens
  misc_RNA (1)...(19): siRNA sense strand
caagucagccugccaguau

SEQ ID NO: 966024 - RNA, 19 nt, Homo sapiens
  misc_RNA (1)...(19): siRNA sense strand
ucagguggcuggucggaaa

SEQ ID NO: 966025 - RNA, 19 nt, Homo sapiens
  misc_RNA (1)...(19): siRNA sense strand
caagacagagcaucaaaga

SEQ ID NO: 966026 - RNA, 19 nt, Homo sapiens
  misc_RNA (1)...(19): siRNA sense strand
ucaagcugcccuauuguua

SEQ ID NO: 966027 - RNA, 19 nt, Homo sapiens
  misc_RNA (1)...(19): siRNA sense strand
gauagugucugugugaauc

SEQ ID NO: 966028 - RNA, 19 nt, Homo sapiens
  misc_RNA (1)...(19): siRNA sense strand
uguacagaguuacuacuua

SEQ ID NO: 966029 - RNA, 19 nt, Homo sapiens
  misc_RNA (1)...(19): siRNA sense strand
ggagagagugaaacauuug

SEQ ID NO: 966030 - RNA, 19 nt, Homo sapiens
  misc_RNA (1)...(19): siRNA sense strand
gacagaagccauugagaga

SEQ ID NO: 966031 - RNA, 19 nt, Homo sapiens
  misc_RNA (1)...(19): siRNA sense strand
ucaguaugcguuugacuua

SEQ ID NO: 966032 - RNA, 19 nt, Homo sapiens
  misc_RNA (1)...(19): siRNA sense strand
gaguaaugcuccaucaagu

SEQ ID NO: 966033 - RNA, 19 nt, Homo sapiens
  misc_RNA (1)...(19): siRNA sense strand
guaaugcuccaucaaguau

SEQ ID NO: 966034 - RNA, 19 nt, Homo sapiens
  misc_RNA (1)...(19): siRNA sense strand
acaccuugcuggauugaaa

SEQ ID NO: 966035 - RNA, 19 nt, Homo sapiens
  misc_RNA (1)...(19): siRNA sense strand
gugaaggacuguugcagau

SEQ ID NO: 966036 - RNA, 19 nt, Homo sapiens
  misc_RNA (1)...(19): siRNA sense strand
uggagagagugaaacauuu

SEQ ID NO: 966037 - RNA, 19 nt, Homo sapiens
  misc_RNA (1)...(19): siRNA sense strand
ccuucaagcugcccuauug

SEQ ID NO: 966038 - RNA, 19 nt, Homo sapiens
  misc_RNA (1)...(19): siRNA sense strand
caccauacacaccuaauuu

SEQ ID NO: 966039 - RNA, 19 nt, Homo sapiens
  misc_RNA (1)...(19): siRNA sense strand
guaugauggugaaggauga

SEQ ID NO: 966040 - RNA, 19 nt, Homo sapiens
  misc_RNA (1)...(19): siRNA sense strand
aaauggagcucauccuagu

SEQ ID NO: 966041 - RNA, 19 nt, Homo sapiens
  misc_RNA (1)...(19): siRNA sense strand
ccagcuacuuaccaucaua

SEQ ID NO: 966042 - RNA, 19 nt, Homo sapiens
  misc_RNA (1)...(19): siRNA sense strand
cgaguuguaucaccuggaa

SEQ ID NO: 966043 - RNA, 19 nt, Homo sapiens
  misc_RNA (1)...(19): siRNA sense strand
gagcucauccuaguaaaug

SEQ ID NO: 966044 - RNA, 19 nt, Homo sapiens
  misc_RNA (1)...(19): siRNA sense strand
uuacuggccuguucacaau

SEQ ID NO: 966045 - RNA, 19 nt, Homo sapiens
  misc_RNA (1)...(19): siRNA sense strand
acgaauacaccaacaagua

SEQ ID NO: 966046 - RNA, 19 nt, Homo sapiens
  misc_RNA (1)...(19): siRNA sense strand
cccacaaccuuuagacuga

SEQ ID NO: 966047 - RNA, 19 nt, Homo sapiens
  misc_RNA (1)...(19): siRNA sense strand
gguguuccauugcuuacuu

SEQ ID NO: 966048 - RNA, 19 nt, Homo sapiens
  misc_RNA (1)...(19): siRNA sense strand
uaauuugccucaccaccaa

SEQ ID NO: 966049 - RNA, 19 nt, Homo sapiens
  misc_RNA (1)...(19): siRNA sense strand
gcaccauacacaccuaauu

SEQ ID NO: 966050 - RNA, 19 nt, Homo sapiens
  misc_RNA (1)...(19): siRNA sense strand
gugcaucgacagagacaua

SEQ ID NO: 966051 - RNA, 19 nt, Homo sapiens
  misc_RNA (1)...(19): siRNA sense strand
gggcagccauagugaagga

SEQ ID NO: 966052 - RNA, 19 nt, Homo sapiens
  misc_RNA (1)...(19): siRNA sense strand
cagcagccguggcaggaaa

SEQ ID NO: 966053 - RNA, 19 nt, Homo sapiens
  misc_RNA (1)...(19): siRNA sense strand
ggagaugcuguucauaaga

SEQ ID NO: 966054 - RNA, 19 nt, Homo sapiens
  misc_RNA (1)...(19): siRNA sense strand
gugcauauauaaaggucuu

SEQ ID NO: 966055 - RNA, 19 nt, Homo sapiens
  misc_RNA (1)...(19): siRNA sense strand
ccacaggacagaagccauu

SEQ ID NO: 966056 - RNA, 19 nt, Homo sapiens
  misc_RNA (1)...(19): siRNA sense strand
ucacuacgaacgaguugua

SEQ ID NO: 966057 - RNA, 19 nt, Homo sapiens
  misc_RNA (1)...(19): siRNA sense strand
guggagagagugaaacauu

SEQ ID NO: 966058 - RNA, 19 nt, Homo sapiens
  misc_RNA (1)...(19): siRNA sense strand
gacagcagcagaauggauu

SEQ ID NO: 966059 - RNA, 19 nt, Homo sapiens
  misc_RNA (1)...(19): siRNA sense strand
gacauucaauucaaaccau

SEQ ID NO: 966060 - RNA, 19 nt, Homo sapiens
  misc_RNA (1)...(19): siRNA sense strand
aggcaaaggugugcaguug

SEQ ID NO: 966061 - RNA, 19 nt, Homo sapiens
  misc_RNA (1)...(19): siRNA sense strand
gcuccuagacgaaguacuu

SEQ ID NO: 966062 - RNA, 19 nt, Homo sapiens
  misc_RNA (1)...(19): siRNA sense strand
ccaagugcauauauaaagg

SEQ ID NO: 966063 - RNA, 19 nt, Homo sapiens
  misc_RNA (1)...(19): siRNA sense strand
cauccuaguaaauguguua

SEQ ID NO: 966064 - RNA, 19 nt, Homo sapiens
  misc_RNA (1)...(19): siRNA sense strand
gugugcaguuggaauguaa

SEQ ID NO: 966065 - RNA, 19 nt, Homo sapiens
  misc_RNA (1)...(19): siRNA sense strand
ggugugcaguuggaaugua

SEQ ID NO: 966066 - RNA, 19 nt, Homo sapiens
  misc_RNA (1)...(19): siRNA sense strand
gauggugaaggaugaauau

SEQ ID NO: 966067 - RNA, 19 nt, Homo sapiens
  misc_RNA (1)...(19): siRNA sense strand
aguaugcguuugacuuaaa

SEQ ID NO: 966068 - RNA, 19 nt, Homo sapiens
  misc_RNA (1)...(19): siRNA sense strand
ugaugaccuucgucgcuua

SEQ ID NO: 966069 - RNA, 19 nt, Homo sapiens
  misc_RNA (1)...(19): siRNA sense strand
acaaauggagcucauccua

SEQ ID NO: 966070 - RNA, 19 nt, Homo sapiens
  misc_RNA (1)...(19): siRNA sense strand
gaucuacccaagugcauau

SEQ ID NO: 966071 - RNA, 19 nt, Homo sapiens
  misc_RNA (1)...(19): siRNA sense strand
gaauacaccaacaaguaau

SEQ ID NO: 966072 - RNA, 19 nt, Homo sapiens
  misc_RNA (1)...(19): siRNA sense strand
ugagcauugugcauaguuu

SEQ ID NO: 966073 - RNA, 19 nt, Homo sapiens
  misc_RNA (1)...(19): siRNA sense strand
uagacaagguggagagagu

SEQ ID NO: 966074 - RNA, 19 nt, Homo sapiens
  misc_RNA (1)...(19): siRNA sense strand
ggacagcagcagaauggau

SEQ ID NO: 966075 - RNA, 19 nt, Homo sapiens
  misc_RNA (1)...(19): siRNA sense strand
gacagagcaucaaagaaac

SEQ ID NO: 966076 - RNA, 19 nt, Homo sapiens
  misc_RNA (1)...(19): siRNA sense strand
gggaccggauuacccaaga

SEQ ID NO: 966077 - RNA, 19 nt, Homo sapiens
  misc_RNA (1)...(19): siRNA sense strand
cuucgucgcuuaugcauac

SEQ ID NO: 966078 - RNA, 19 nt, Homo sapiens
  misc_RNA (1)...(19): siRNA sense strand
gcaguuggaauguaaaggu

SEQ ID NO: 966079 - RNA, 19 nt, Homo sapiens
  misc_RNA (1)...(19): siRNA sense strand
ugggucaacucuccaaugu

SEQ ID NO: 966080 - RNA, 19 nt, Homo sapiens
  misc_RNA (1)...(19): siRNA sense strand
ggaauugaucucucaggau

SEQ ID NO: 966081 - RNA, 19 nt, Homo sapiens
  misc_RNA (1)...(19): siRNA sense strand
cagguaggagagacauuua

SEQ ID NO: 966082 - RNA, 19 nt, Homo sapiens
  misc_RNA (1)...(19): siRNA sense strand
gcagcagaauggauuuacu

SEQ ID NO: 966083 - RNA, 19 nt, Homo sapiens
  misc_RNA (1)...(19): siRNA sense strand
caguaugcguuugacuuaa

SEQ ID NO: 966084 - RNA, 19 nt, Homo sapiens
  misc_RNA (1)...(19): siRNA sense strand
cuucauaccaugccgauug

SEQ ID NO: 966085 - RNA, 19 nt, Homo sapiens
  misc_RNA (1)...(19): siRNA sense strand
cuggagaugcuguucauaa

SEQ ID NO: 966086 - RNA, 19 nt, Homo sapiens
  misc_RNA (1)...(19): siRNA sense strand
gcccuauuguuacuguuga

SEQ ID NO: 966087 - RNA, 19 nt, Homo sapiens
  misc_RNA (1)...(19): siRNA sense strand
caagguggagagagugaaa

SEQ ID NO: 966088 - RNA, 19 nt, Homo sapiens
  misc_RNA (1)...(19): siRNA sense strand
uuccauugcuuacuuugaa

SEQ ID NO: 966089 - RNA, 19 nt, Homo sapiens
  misc_RNA (1)...(19): siRNA sense strand
caucauaacagcacuacca

SEQ ID NO: 966090 - RNA, 19 nt, Homo sapiens
  misc_RNA (1)...(19): siRNA sense strand
ccaucugagucuaaugcua

SEQ ID NO: 966091 - RNA, 19 nt, Homo sapiens
  misc_RNA (1)...(19): siRNA sense strand
aaugcuccaucaaguauga

SEQ ID NO: 966092 - RNA, 19 nt, Homo sapiens
  misc_RNA (1)...(19): siRNA sense strand
cuacgaacgaguuguauca

SEQ ID NO: 966093 - RNA, 19 nt, Homo sapiens
  misc_RNA (1)...(19): siRNA sense strand
cagcauccaccaaguaauc

SEQ ID NO: 966094 - RNA, 19 nt, Homo sapiens
  misc_RNA (1)...(19): siRNA sense strand
guuggaauguaaaggugaa

SEQ ID NO: 966095 - RNA, 19 nt, Homo sapiens
  misc_RNA (1)...(19): siRNA sense strand
ggacccuucuggaggagau

SEQ ID NO: 966096 - RNA, 19 nt, Homo sapiens
  misc_RNA (1)...(19): siRNA sense strand
ucagguaggagagacauuu

SEQ ID NO: 966097 - RNA, 19 nt, Homo sapiens
  misc_RNA (1)...(19): siRNA sense strand
gcauuccagccucccauuu

SEQ ID NO: 966098 - RNA, 19 nt, Homo sapiens
  misc_RNA (1)...(19): siRNA sense strand
aaucgugcaucgacagaga

SEQ ID NO: 966099 - RNA, 19 nt, Homo sapiens
  misc_RNA (1)...(19): siRNA sense strand
gaagagagguaucauccau

SEQ ID NO: 966100 - RNA, 19 nt, Homo sapiens
  misc_RNA (1)...(19): siRNA sense strand
ucagaccgcuguuuaacga

SEQ ID NO: 966101 - RNA, 19 nt, Homo sapiens
  misc_RNA (1)...(19): siRNA sense strand
uagaggagaugggcaaaga

SEQ ID NO: 966102 - RNA, 19 nt, Homo sapiens
  misc_RNA (1)...(19): siRNA sense strand
acacggaccugcugucagu

SEQ ID NO: 966103 - RNA, 19 nt, Homo sapiens
  misc_RNA (1)...(19): siRNA sense strand
gaggagaugggcaaagaga

SEQ ID NO: 966104 - RNA, 19 nt, Homo sapiens
  misc_RNA (1)...(19): siRNA sense strand
ggagaugggcaaagagauc

SEQ ID NO: 966105 - RNA, 19 nt, Homo sapiens
  misc_RNA (1)...(19): siRNA sense strand
ggaccugcugucagucaua

SEQ ID NO: 966106 - RNA, 19 nt, Homo sapiens
  misc_RNA (1)...(19): siRNA sense strand
gaccugcugucagucauag

SEQ ID NO: 966107 - RNA, 19 nt, Homo sapiens
  misc_RNA (1)...(19): siRNA sense strand
gcagcaagagcgccaugga

SEQ ID NO: 966108 - RNA, 19 nt, Homo sapiens
  misc_RNA (1)...(19): siRNA sense strand
gagauccggccuaccuaug

SEQ ID NO: 966109 - RNA, 19 nt, Homo sapiens
  misc_RNA (1)...(19): siRNA sense strand
ccuuucagaccgcuguuua

SEQ ID NO: 966110 - RNA, 19 nt, Homo sapiens
  misc_RNA (1)...(19): siRNA sense strand
aaagagauccggccuaccu

SEQ ID NO: 966111 - RNA, 19 nt, Homo sapiens
  misc_RNA (1)...(19): siRNA sense strand
gaccgcuguuuaacgacuu

SEQ ID NO: 966112 - RNA, 19 nt, Homo sapiens
  misc_RNA (1)...(19): siRNA sense strand
ccauggagcgccugaagag

SEQ ID NO: 966113 - RNA, 19 nt, Homo sapiens
  misc_RNA (1)...(19): siRNA sense strand
gauccggccuaccuaugcu

SEQ ID NO: 966114 - RNA, 19 nt, Homo sapiens
  misc_RNA (1)...(19): siRNA sense strand
ggaaauaucugcgcagugu

SEQ ID NO: 966115 - RNA, 19 nt, Homo sapiens
  misc_RNA (1)...(19): siRNA sense strand
gaaaugacaccaaagaaga

SEQ ID NO: 966116 - RNA, 19 nt, Homo sapiens
  misc_RNA (1)...(19): siRNA sense strand
caccaaagaagauguauuu

SEQ ID NO: 966117 - RNA, 19 nt, Homo sapiens
  misc_RNA (1)...(19): siRNA sense strand
uuacagacguggcuacuau

SEQ ID NO: 966118 - RNA, 19 nt, Homo sapiens
  misc_RNA (1)...(19): siRNA sense strand
uggagaggcugaagauaaa

SEQ ID NO: 966119 - RNA, 19 nt, Homo sapiens
  misc_RNA (1)...(19): siRNA sense strand
cggcagcagugaaggauuu

SEQ ID NO: 966120 - RNA, 19 nt, Homo sapiens
  misc_RNA (1)...(19): siRNA sense strand
agacguggcuacuauggaa

SEQ ID NO: 966121 - RNA, 19 nt, Homo sapiens
  misc_RNA (1)...(19): siRNA sense strand
cgucagaaauggauaugga

SEQ ID NO: 966122 - RNA, 19 nt, Homo sapiens
  misc_RNA (1)...(19): siRNA sense strand
gaauaacccacggaaauau

SEQ ID NO: 966123 - RNA, 19 nt, Homo sapiens
  misc_RNA (1)...(19): siRNA sense strand
agacugccaucaagaagaa

SEQ ID NO: 966124 - RNA, 19 nt, Homo sapiens
  misc_RNA (1)...(19): siRNA sense strand
gaagaauaacccacggaaa

SEQ ID NO: 966125 - RNA, 19 nt, Homo sapiens
  misc_RNA (1)...(19): siRNA sense strand
aauacaggcuggugagauu

SEQ ID NO: 966126 - RNA, 19 nt, Homo sapiens
  misc_RNA (1)...(19): siRNA sense strand
agaauaacccacggaaaua

SEQ ID NO: 966127 - RNA, 19 nt, Homo sapiens
  misc_RNA (1)...(19): siRNA sense strand
aagaauaacccacggaaau

SEQ ID NO: 966128 - RNA, 19 nt, Homo sapiens
  misc_RNA (1)...(19): siRNA sense strand
uaacgcuccuucacaagau

SEQ ID NO: 966129 - RNA, 19 nt, Homo sapiens
  misc_RNA (1)...(19): siRNA sense strand
aaaucgaaaugacaccaaa

SEQ ID NO: 966130 - RNA, 19 nt, Homo sapiens
  misc_RNA (1)...(19): siRNA sense strand
cgaaaugacaccaaagaag

SEQ ID NO: 966131 - RNA, 19 nt, Homo sapiens
  misc_RNA (1)...(19): siRNA sense strand
ggagauggagaaacuguag

SEQ ID NO: 966132 - RNA, 19 nt, Homo sapiens
  misc_RNA (1)...(19): siRNA sense strand
uguaggagauggagaaacu

SEQ ID NO: 966133 - RNA, 19 nt, Homo sapiens
  misc_RNA (1)...(19): siRNA sense strand
gaaauaucugcgcagugua

SEQ ID NO: 966134 - RNA, 19 nt, Homo sapiens
  misc_RNA (1)...(19): siRNA sense strand
uuggagaggcugaagauaa

SEQ ID NO: 966135 - RNA, 19 nt, Homo sapiens
  misc_RNA (1)...(19): siRNA sense strand
caacgucagaaauggauau

SEQ ID NO: 966136 - RNA, 19 nt, Homo sapiens
  misc_RNA (1)...(19): siRNA sense strand
gaauacaggcuggugagau

SEQ ID NO: 966137 - RNA, 19 nt, Homo sapiens
  misc_RNA (1)...(19): siRNA sense strand
ugacaccaaagaagaugua

SEQ ID NO: 966138 - RNA, 19 nt, Homo sapiens
  misc_RNA (1)...(19): siRNA sense strand
cagcgaagacgcggagaaa

SEQ ID NO: 966139 - RNA, 19 nt, Homo sapiens
  misc_RNA (1)...(19): siRNA sense strand
gugaagcaccaacugagaa

SEQ ID NO: 966140 - RNA, 19 nt, Homo sapiens
  misc_RNA (1)...(19): siRNA sense strand
gagaggcugaagauaaaga

SEQ ID NO: 966141 - RNA, 19 nt, Homo sapiens
  misc_RNA (1)...(19): siRNA sense strand
ccagagggagcacaacuuc

SEQ ID NO: 966142 - RNA, 19 nt, Homo sapiens
  misc_RNA (1)...(19): siRNA sense strand
ucagaaauggauauggauu

SEQ ID NO: 966143 - RNA, 19 nt, Homo sapiens
  misc_RNA (1)...(19): siRNA sense strand
agagaagggugcagaagcu

SEQ ID NO: 966144 - RNA, 19 nt, Homo sapiens
  misc_RNA (1)...(19): siRNA sense strand
caaaugguucaacgucaga

SEQ ID NO: 966145 - RNA, 19 nt, Homo sapiens
  misc_RNA (1)...(19): siRNA sense strand
caucagacugccaucaaga

SEQ ID NO: 966146 - RNA, 19 nt, Homo sapiens
  misc_RNA (1)...(19): siRNA sense strand
ccaaaccagccgucuguuc

SEQ ID NO: 966147 - RNA, 19 nt, Homo sapiens
  misc_RNA (1)...(19): siRNA sense strand
uguagaguuugaugugguu

SEQ ID NO: 966148 - RNA, 19 nt, Homo sapiens
  misc_RNA (1)...(19): siRNA sense strand
cuaacgcuccuucacaaga

SEQ ID NO: 966149 - RNA, 19 nt, Homo sapiens
  misc_RNA (1)...(19): siRNA sense strand
gcagcgaagacgcggagaa

SEQ ID NO: 966150 - RNA, 19 nt, Homo sapiens
  misc_RNA (1)...(19): siRNA sense strand
cccaguaucgcccucagua

SEQ ID NO: 966151 - RNA, 19 nt, Homo sapiens
  misc_RNA (1)...(19): siRNA sense strand
gggaccgguucaucgaaau

SEQ ID NO: 966152 - RNA, 19 nt, Homo sapiens
  misc_RNA (1)...(19): siRNA sense strand
ggccaaggcaggugaagca

SEQ ID NO: 966153 - RNA, 19 nt, Homo sapiens
  misc_RNA (1)...(19): siRNA sense strand
guucaucgaaauccaacuu

SEQ ID NO: 966154 - RNA, 19 nt, Homo sapiens
  misc_RNA (1)...(19): siRNA sense strand
guacaucagacugccauca

SEQ ID NO: 966155 - RNA, 19 nt, Homo sapiens
  misc_RNA (1)...(19): siRNA sense strand
ccuuggcacugucaaaugg

SEQ ID NO: 966156 - RNA, 19 nt, Homo sapiens
  misc_RNA (1)...(19): siRNA sense strand
uccuaacgcuccuucacaa

SEQ ID NO: 966157 - RNA, 19 nt, Homo sapiens
  misc_RNA (1)...(19): siRNA sense strand
agaguuugaugugguugaa

SEQ ID NO: 966158 - RNA, 19 nt, Homo sapiens
  misc_RNA (1)...(19): siRNA sense strand
guccaaaccagccgucugu

SEQ ID NO: 966159 - RNA, 19 nt, Homo sapiens
  misc_RNA (1)...(19): siRNA sense strand
ccacgugggacagaccuuu

SEQ ID NO: 966160 - RNA, 19 nt, Homo sapiens
  misc_RNA (1)...(19): siRNA sense strand
gagcggcagcagugaagga

SEQ ID NO: 966161 - RNA, 19 nt, Homo sapiens
  misc_RNA (1)...(19): siRNA sense strand
ggagagaagggugcagaag

SEQ ID NO: 966162 - RNA, 19 nt, Homo sapiens
  misc_RNA (1)...(19): siRNA sense strand
aaauaucugcgcaguguag

SEQ ID NO: 966163 - RNA, 19 nt, Homo sapiens
  misc_RNA (1)...(19): siRNA sense strand
agggaccgguucaucgaaa

SEQ ID NO: 966164 - RNA, 19 nt, Homo sapiens
  misc_RNA (1)...(19): siRNA sense strand
uaaaucgaaaugacaccaa

SEQ ID NO: 966165 - RNA, 19 nt, Homo sapiens
  misc_RNA (1)...(19): siRNA sense strand
ggugagauuggagagauga

SEQ ID NO: 966166 - RNA, 19 nt, Homo sapiens
  misc_RNA (1)...(19): siRNA sense strand
caguguaggagauggagaa

SEQ ID NO: 966167 - RNA, 19 nt, Homo sapiens
  misc_RNA (1)...(19): siRNA sense strand
ucaucgaaauccaacuuac

SEQ ID NO: 966168 - RNA, 19 nt, Homo sapiens
  misc_RNA (1)...(19): siRNA sense strand
ucgaaaugacaccaaagaa

SEQ ID NO: 966169 - RNA, 19 nt, Homo sapiens
  misc_RNA (1)...(19): siRNA sense strand
aaaugacaccaaagaagau

SEQ ID NO: 966170 - RNA, 19 nt, Homo sapiens
  misc_RNA (1)...(19): siRNA sense strand
gagauggagaaacuguaga

SEQ ID NO: 966171 - RNA, 19 nt, Homo sapiens
  misc_RNA (1)...(19): siRNA sense strand
cagacugccaucaagaaga

SEQ ID NO: 966172 - RNA, 19 nt, Homo sapiens
  misc_RNA (1)...(19): siRNA sense strand
gagcuggccucaacucuca

SEQ ID NO: 966173 - RNA, 19 nt, Homo sapiens
  misc_RNA (1)...(19): siRNA sense strand
cgaguccucugguuauuug

SEQ ID NO: 966174 - RNA, 19 nt, Homo sapiens
  misc_RNA (1)...(19): siRNA sense strand
ggauggaccugaauaaaau

SEQ ID NO: 966175 - RNA, 19 nt, Homo sapiens
  misc_RNA (1)...(19): siRNA sense strand
ccaauaagaauuugacaag

SEQ ID NO: 966176 - RNA, 19 nt, Homo sapiens
  misc_RNA (1)...(19): siRNA sense strand
ggaaaugcacuggaggauu

SEQ ID NO: 966177 - RNA, 19 nt, Homo sapiens
  misc_RNA (1)...(19): siRNA sense strand
ucucauagccaauaagaau

SEQ ID NO: 966178 - RNA, 19 nt, Homo sapiens
  misc_RNA (1)...(19): siRNA sense strand
gucaggagauggcuucugu

SEQ ID NO: 966179 - RNA, 19 nt, Homo sapiens
  misc_RNA (1)...(19): siRNA sense strand
ggauuugggccugagguua

SEQ ID NO: 966180 - RNA, 19 nt, Homo sapiens
  misc_RNA (1)...(19): siRNA sense strand
gcagcucucauagccaaua

SEQ ID NO: 966181 - RNA, 19 nt, Homo sapiens
  misc_RNA (1)...(19): siRNA sense strand
cagcucucauagccaauaa

SEQ ID NO: 966182 - RNA, 19 nt, Homo sapiens
  misc_RNA (1)...(19): siRNA sense strand
ccucaacucucagugugaa

SEQ ID NO: 966183 - RNA, 19 nt, Homo sapiens
  misc_RNA (1)...(19): siRNA sense strand
gugacgagcuggccucaac

SEQ ID NO: 966184 - RNA, 19 nt, Homo sapiens
  misc_RNA (1)...(19): siRNA sense strand
cugaagaggugccgcaucu

SEQ ID NO: 966185 - RNA, 19 nt, Homo sapiens
  misc_RNA (1)...(19): siRNA sense strand
gcucucauagccaauaaga

SEQ ID NO: 966186 - RNA, 19 nt, Homo sapiens
  misc_RNA (1)...(19): siRNA sense strand
gaagaucugccgccucacu

SEQ ID NO: 966187 - RNA, 19 nt, Homo sapiens
  misc_RNA (1)...(19): siRNA sense strand
ggcugcagaugauucaguu

SEQ ID NO: 966188 - RNA, 19 nt, Homo sapiens
  misc_RNA (1)...(19): siRNA sense strand
acccacaucugguugaguu

SEQ ID NO: 966189 - RNA, 19 nt, Homo sapiens
  misc_RNA (1)...(19): siRNA sense strand
gggugcugcugcuguguga

SEQ ID NO: 966190 - RNA, 19 nt, Homo sapiens
  misc_RNA (1)...(19): siRNA sense strand
guuggcagcgcuucgagua

SEQ ID NO: 966191 - RNA, 19 nt, Homo sapiens
  misc_RNA (1)...(19): siRNA sense strand
acagguguccgacugcuuu

SEQ ID NO: 966192 - RNA, 19 nt, Homo sapiens
  misc_RNA (1)...(19): siRNA sense strand
gggauggaccugaauaaaa

SEQ ID NO: 966193 - RNA, 19 nt, Homo sapiens
  misc_RNA (1)...(19): siRNA sense strand
gaccuugaccgaccuuuac

SEQ ID NO: 966194 - RNA, 19 nt, Homo sapiens
  misc_RNA (1)...(19): siRNA sense strand
ggacuuuguggcugaagau

SEQ ID NO: 966195 - RNA, 19 nt, Homo sapiens
  misc_RNA (1)...(19): siRNA sense strand
agaccuugaccgaccuuua

SEQ ID NO: 966196 - RNA, 19 nt, Homo sapiens
  misc_RNA (1)...(19): siRNA sense strand
cauagccaauaagaauuug

SEQ ID NO: 966197 - RNA, 19 nt, Homo sapiens
  misc_RNA (1)...(19): siRNA sense strand
uauuugggauggaccugaa

SEQ ID NO: 966198 - RNA, 19 nt, Homo sapiens
  misc_RNA (1)...(19): siRNA sense strand
gccaauaagaauuugacaa

SEQ ID NO: 966199 - RNA, 19 nt, Homo sapiens
  misc_RNA (1)...(19): siRNA sense strand
gauuugggccugagguuac

SEQ ID NO: 966200 - RNA, 19 nt, Homo sapiens
  misc_RNA (1)...(19): siRNA sense strand
gcagacuacggacuuugug

SEQ ID NO: 966201 - RNA, 19 nt, Homo sapiens
  misc_RNA (1)...(19): siRNA sense strand
gaccuuuaccugaccaaca

SEQ ID NO: 966202 - RNA, 19 nt, Homo sapiens
  misc_RNA (1)...(19): siRNA sense strand
ccucucugcagcucucaua

SEQ ID NO: 966203 - RNA, 19 nt, Homo sapiens
  misc_RNA (1)...(19): siRNA sense strand
aaaccuuauuuggacauug

SEQ ID NO: 966204 - RNA, 19 nt, Homo sapiens
  misc_RNA (1)...(19): siRNA sense strand
cugcagaugauucaguuga

SEQ ID NO: 966205 - RNA, 19 nt, Homo sapiens
  misc_RNA (1)...(19): siRNA sense strand
accuuuaccugaccaacaa

SEQ ID NO: 966206 - RNA, 19 nt, Homo sapiens
  misc_RNA (1)...(19): siRNA sense strand
ucaggcaucccacgugcaa

SEQ ID NO: 966207 - RNA, 19 nt, Homo sapiens
  misc_RNA (1)...(19): siRNA sense strand
ugauucaguugaggaagug

SEQ ID NO: 966208 - RNA, 19 nt, Homo sapiens
  misc_RNA (1)...(19): siRNA sense strand
aaccuuauuuggacauugg

SEQ ID NO: 966209 - RNA, 19 nt, Homo sapiens
  misc_RNA (1)...(19): siRNA sense strand
aggcuugugagaaucuuua

SEQ ID NO: 966210 - RNA, 19 nt, Homo sapiens
  misc_RNA (1)...(19): siRNA sense strand
gagcuggccucaacucuca

SEQ ID NO: 966211 - RNA, 19 nt, Homo sapiens
  misc_RNA (1)...(19): siRNA sense strand
gggugaagcugcucuguca

SEQ ID NO: 966212 - RNA, 19 nt, Homo sapiens
  misc_RNA (1)...(19): siRNA sense strand
cgaguccucugguuauuug

SEQ ID NO: 966213 - RNA, 19 nt, Homo sapiens
  misc_RNA (1)...(19): siRNA sense strand
ggauggaccugaauaaaau

SEQ ID NO: 966214 - RNA, 19 nt, Homo sapiens
  misc_RNA (1)...(19): siRNA sense strand
ccaauaagaauuugacaag

SEQ ID NO: 966215 - RNA, 19 nt, Homo sapiens
  misc_RNA (1)...(19): siRNA sense strand
ggaaaugcacuggaggauu

SEQ ID NO: 966216 - RNA, 19 nt, Homo sapiens
  misc_RNA (1)...(19): siRNA sense strand
ucucauagccaauaagaau

SEQ ID NO: 966217 - RNA, 19 nt, Homo sapiens
  misc_RNA (1)...(19): siRNA sense strand
gucaggagauggcuucugu

SEQ ID NO: 966218 - RNA, 19 nt, Homo sapiens
  misc_RNA (1)...(19): siRNA sense strand
ggauuugggccugagguua

SEQ ID NO: 966219 - RNA, 19 nt, Homo sapiens
  misc_RNA (1)...(19): siRNA sense strand
gcagcucucauagccaaua

SEQ ID NO: 966220 - RNA, 19 nt, Homo sapiens
  misc_RNA (1)...(19): siRNA sense strand
cagcucucauagccaauaa

SEQ ID NO: 966221 - RNA, 19 nt, Homo sapiens
  misc_RNA (1)...(19): siRNA sense strand
ccucaacucucagugugaa

SEQ ID NO: 966222 - RNA, 19 nt, Homo sapiens
  misc_RNA (1)...(19): siRNA sense strand
gcaccaauccaaaccugau

SEQ ID NO: 966223 - RNA, 19 nt, Homo sapiens
  misc_RNA (1)...(19): siRNA sense strand
gugacgagcuggccucaac

SEQ ID NO: 966224 - RNA, 19 nt, Homo sapiens
  misc_RNA (1)...(19): siRNA sense strand
gcucucauagccaauaaga

SEQ ID NO: 966225 - RNA, 19 nt, Homo sapiens
  misc_RNA (1)...(19): siRNA sense strand
cugaagaggugccgcaucu

SEQ ID NO: 966226 - RNA, 19 nt, Homo sapiens
  misc_RNA (1)...(19): siRNA sense strand
gaagaucugccgccucacu

SEQ ID NO: 966227 - RNA, 19 nt, Homo sapiens
  misc_RNA (1)...(19): siRNA sense strand
ggcugcagaugauucaguu

SEQ ID NO: 966228 - RNA, 19 nt, Homo sapiens
  misc_RNA (1)...(19): siRNA sense strand
gcuggacgccuacagugaa

SEQ ID NO: 966229 - RNA, 19 nt, Homo sapiens
  misc_RNA (1)...(19): siRNA sense strand
acccacaucugguugaguu

SEQ ID NO: 966230 - RNA, 19 nt, Homo sapiens
  misc_RNA (1)...(19): siRNA sense strand
gggugcugcugcuguguga

SEQ ID NO: 966231 - RNA, 19 nt, Homo sapiens
  misc_RNA (1)...(19): siRNA sense strand
guuggcagcgcuucgagua

SEQ ID NO: 966232 - RNA, 19 nt, Homo sapiens
  misc_RNA (1)...(19): siRNA sense strand
gaagcugcucugucaagga

SEQ ID NO: 966233 - RNA, 19 nt, Homo sapiens
  misc_RNA (1)...(19): siRNA sense strand
gggauggaccugaauaaaa

SEQ ID NO: 966234 - RNA, 19 nt, Homo sapiens
  misc_RNA (1)...(19): siRNA sense strand
acagguguccgacugcuuu

SEQ ID NO: 966235 - RNA, 19 nt, Homo sapiens
  misc_RNA (1)...(19): siRNA sense strand
gaccuugaccgaccuuuac

SEQ ID NO: 966236 - RNA, 19 nt, Homo sapiens
  misc_RNA (1)...(19): siRNA sense strand
ggacuuuguggcugaagau

SEQ ID NO: 966237 - RNA, 19 nt, Homo sapiens
  misc_RNA (1)...(19): siRNA sense strand
agaccuugaccgaccuuua

SEQ ID NO: 966238 - RNA, 19 nt, Homo sapiens
  misc_RNA (1)...(19): siRNA sense strand
cauagccaauaagaauuug

SEQ ID NO: 966239 - RNA, 19 nt, Homo sapiens
  misc_RNA (1)...(19): siRNA sense strand
uauuugggauggaccugaa

SEQ ID NO: 966240 - RNA, 19 nt, Homo sapiens
  misc_RNA (1)...(19): siRNA sense strand
gccaauaagaauuugacaa

SEQ ID NO: 966241 - RNA, 19 nt, Homo sapiens
  misc_RNA (1)...(19): siRNA sense strand
caccaauccaaaccugaua

SEQ ID NO: 966242 - RNA, 19 nt, Homo sapiens
  misc_RNA (1)...(19): siRNA sense strand
gauuugggccugagguuac

SEQ ID NO: 966243 - RNA, 19 nt, Homo sapiens
  misc_RNA (1)...(19): siRNA sense strand
gcagacuacggacuuugug

SEQ ID NO: 966244 - RNA, 19 nt, Homo sapiens
  misc_RNA (1)...(19): siRNA sense strand
gaccuuuaccugaccaaca

SEQ ID NO: 966245 - RNA, 19 nt, Homo sapiens
  misc_RNA (1)...(19): siRNA sense strand
caacugcaaacuucagaac

SEQ ID NO: 966246 - RNA, 19 nt, Homo sapiens
  misc_RNA (1)...(19): siRNA sense strand
aaaccuuauuuggacauug

SEQ ID NO: 966247 - RNA, 19 nt, Homo sapiens
  misc_RNA (1)...(19): siRNA sense strand
ccucucugcagcucucaua

SEQ ID NO: 966248 - RNA, 19 nt, Homo sapiens
  misc_RNA (1)...(19): siRNA sense strand
cugcagaugauucaguuga

SEQ ID NO: 966249 - RNA, 19 nt, Homo sapiens
  misc_RNA (1)...(19): siRNA sense strand
ccaauccaaaccugauaga

SEQ ID NO: 966250 - RNA, 19 nt, Homo sapiens
  misc_RNA (1)...(19): siRNA sense strand
accuuuaccugaccaacaa

SEQ ID NO: 966251 - RNA, 19 nt, Homo sapiens
  misc_RNA (1)...(19): siRNA sense strand
ucaggcaucccacgugcaa

SEQ ID NO: 966252 - RNA, 19 nt, Homo sapiens
  misc_RNA (1)...(19): siRNA sense strand
ugauucaguugaggaagug

SEQ ID NO: 966253 - RNA, 19 nt, Homo sapiens
  misc_RNA (1)...(19): siRNA sense strand
aaccuuauuuggacauugg

SEQ ID NO: 966254 - RNA, 19 nt, Homo sapiens
  misc_RNA (1)...(19): siRNA sense strand
aggcuugugagaaucuuua

SEQ ID NO: 966255 - RNA, 19 nt, Homo sapiens
  misc_RNA (1)...(19): siRNA sense strand
gggaaaggcugucaaauaa

SEQ ID NO: 966256 - RNA, 19 nt, Homo sapiens
  misc_RNA (1)...(19): siRNA sense strand
gaacaggcaccuccaauau

SEQ ID NO: 966257 - RNA, 19 nt, Homo sapiens
  misc_RNA (1)...(19): siRNA sense strand
caaagagcauggcugagaa

SEQ ID NO: 966258 - RNA, 19 nt, Homo sapiens
  misc_RNA (1)...(19): siRNA sense strand
acaggcaccuccaauauga

SEQ ID NO: 966259 - RNA, 19 nt, Homo sapiens
  misc_RNA (1)...(19): siRNA sense strand
gagaaguuccugacaaaga

SEQ ID NO: 966260 - RNA, 19 nt, Homo sapiens
  misc_RNA (1)...(19): siRNA sense strand
ugggaaaggcugucaaaua

SEQ ID NO: 966261 - RNA, 19 nt, Homo sapiens
  misc_RNA (1)...(19): siRNA sense strand
gcauguggcagaaccauau

SEQ ID NO: 966262 - RNA, 19 nt, Homo sapiens
  misc_RNA (1)...(19): siRNA sense strand
gagcccaccuggaaacaca

SEQ ID NO: 966263 - RNA, 19 nt, Homo sapiens
  misc_RNA (1)...(19): siRNA sense strand
gaaccggagccaacuuuca

SEQ ID NO: 966264 - RNA, 19 nt, Homo sapiens
  misc_RNA (1)...(19): siRNA sense strand
uugagaaguuccugacaaa

SEQ ID NO: 966265 - RNA, 19 nt, Homo sapiens
  misc_RNA (1)...(19): siRNA sense strand
agaacaggcaccuccaaua

SEQ ID NO: 966266 - RNA, 19 nt, Homo sapiens
  misc_RNA (1)...(19): siRNA sense strand
acaaagagcauggcugaga

SEQ ID NO: 966267 - RNA, 19 nt, Homo sapiens
  misc_RNA (1)...(19): siRNA sense strand
ucaccugccuagacccaaa

SEQ ID NO: 966268 - RNA, 19 nt, Homo sapiens
  misc_RNA (1)...(19): siRNA sense strand
gcugcugccucaccagaga

SEQ ID NO: 966269 - RNA, 19 nt, Homo sapiens
  misc_RNA (1)...(19): siRNA sense strand
gagaacaggcaccuccaau

SEQ ID NO: 966270 - RNA, 19 nt, Homo sapiens
  misc_RNA (1)...(19): siRNA sense strand
gagcucuucagccagauaa

SEQ ID NO: 966271 - RNA, 19 nt, Homo sapiens
  misc_RNA (1)...(19): siRNA sense strand
agaaguuccugacaaagag

SEQ ID NO: 966272 - RNA, 19 nt, Homo sapiens
  misc_RNA (1)...(19): siRNA sense strand
ccaguucuccgaaauccaa

SEQ ID NO: 966273 - RNA, 19 nt, Homo sapiens
  misc_RNA (1)...(19): siRNA sense strand
gcaggagguccggagagua

SEQ ID NO: 966274 - RNA, 19 nt, Homo sapiens
  misc_RNA (1)...(19): siRNA sense strand
ccuccaauaugagcgguuu

SEQ ID NO: 966275 - RNA, 19 nt, Homo sapiens
  misc_RNA (1)...(19): siRNA sense strand
uuugagaaguuccugacaa

SEQ ID NO: 966276 - RNA, 19 nt, Homo sapiens
  misc_RNA (1)...(19): siRNA sense strand
ggagcucuucagccagaua

SEQ ID NO: 966277 - RNA, 19 nt, Homo sapiens
  misc_RNA (1)...(19): siRNA sense strand
gcagaaccauauggaagcu

SEQ ID NO: 966278 - RNA, 19 nt, Homo sapiens
  misc_RNA (1)...(19): siRNA sense strand
caugggaaaggcugucaaa

SEQ ID NO: 966279 - RNA, 19 nt, Homo sapiens
  misc_RNA (1)...(19): siRNA sense strand
cggaaccggagccaacuuu

SEQ ID NO: 966280 - RNA, 19 nt, Homo sapiens
  misc_RNA (1)...(19): siRNA sense strand
ccuggaaggaucuugagaa

SEQ ID NO: 966281 - RNA, 19 nt, Homo sapiens
  misc_RNA (1)...(19): siRNA sense strand
ggaaccggagccaacuuuc

SEQ ID NO: 966282 - RNA, 19 nt, Homo sapiens
  misc_RNA (1)...(19): siRNA sense strand
ggaaaugccuuuaucaauc

SEQ ID NO: 966283 - RNA, 19 nt, Homo sapiens
  misc_RNA (1)...(19): siRNA sense strand
gcagauaauucccaaagug

SEQ ID NO: 966284 - RNA, 19 nt, Homo sapiens
  misc_RNA (1)...(19): siRNA sense strand
gaaaugccuuuaucaaucu

SEQ ID NO: 966285 - RNA, 19 nt, Homo sapiens
  misc_RNA (1)...(19): siRNA sense strand
aagaagaggucgaagauga

SEQ ID NO: 966286 - RNA, 19 nt, Homo sapiens
  misc_RNA (1)...(19): siRNA sense strand
cgaagaggcugaauaugug

SEQ ID NO: 966287 - RNA, 19 nt, Homo sapiens
  misc_RNA (1)...(19): siRNA sense strand
aggaagaggucgaagauga

SEQ ID NO: 966288 - RNA, 19 nt, Homo sapiens
  misc_RNA (1)...(19): siRNA sense strand
ggaagaagaggucgaagau

SEQ ID NO: 966289 - RNA, 19 nt, Homo sapiens
  misc_RNA (1)...(19): siRNA sense strand
ggaagcagccgaagcaaca

SEQ ID NO: 966290 - RNA, 19 nt, Homo sapiens
  misc_RNA (1)...(19): siRNA sense strand
ggucgaagaugaggaggaa

SEQ ID NO: 966291 - RNA, 19 nt, Homo sapiens
  misc_RNA (1)...(19): siRNA sense strand
ggucgaagaugaggaggaa

SEQ ID NO: 966292 - RNA, 19 nt, Homo sapiens
  misc_RNA (1)...(19): siRNA sense strand
ggucgaagaggcugaauau

SEQ ID NO: 966293 - RNA, 19 nt, Homo sapiens
  misc_RNA (1)...(19): siRNA sense strand
agagagaacuuuauaagcu

SEQ ID NO: 966294 - RNA, 19 nt, Homo sapiens
  misc_RNA (1)...(19): siRNA sense strand
gcagagaggggaagaauuu

SEQ ID NO: 966295 - RNA, 19 nt, Homo sapiens
  misc_RNA (1)...(19): siRNA sense strand
ucacuugccucuggaaaug

SEQ ID NO: 966296 - RNA, 19 nt, Homo sapiens
  misc_RNA (1)...(19): siRNA sense strand
caauagaccgcaccgauau

SEQ ID NO: 966297 - RNA, 19 nt, Homo sapiens
  misc_RNA (1)...(19): siRNA sense strand
gcaaguguuucggguguau

SEQ ID NO: 966298 - RNA, 19 nt, Homo sapiens
  misc_RNA (1)...(19): siRNA sense strand
ggaggugugugaugcaaag

SEQ ID NO: 966299 - RNA, 19 nt, Homo sapiens
  misc_RNA (1)...(19): siRNA sense strand
ggaagaagaggucgaagag

SEQ ID NO: 966300 - RNA, 19 nt, Homo sapiens
  misc_RNA (1)...(19): siRNA sense strand
gaaacucuguauggcuuug

SEQ ID NO: 966301 - RNA, 19 nt, Homo sapiens
  misc_RNA (1)...(19): siRNA sense strand
ggaggaagaggucgaagau

SEQ ID NO: 966302 - RNA, 19 nt, Homo sapiens
  misc_RNA (1)...(19): siRNA sense strand
cagaaucccucucuagcau

SEQ ID NO: 966303 - RNA, 19 nt, Homo sapiens
  misc_RNA (1)...(19): siRNA sense strand
caacaccacccaauucauc

SEQ ID NO: 966304 - RNA, 19 nt, Homo sapiens
  misc_RNA (1)...(19): siRNA sense strand
gagaggaggagcuggaaga

SEQ ID NO: 966305 - RNA, 19 nt, Homo sapiens
  misc_RNA (1)...(19): siRNA sense strand
acaauagaccgcaccgaua

SEQ ID NO: 966306 - RNA, 19 nt, Homo sapiens
  misc_RNA (1)...(19): siRNA sense strand
ucgaagaggcugaauaugu

SEQ ID NO: 966307 - RNA, 19 nt, Homo sapiens
  misc_RNA (1)...(19): siRNA sense strand
caaggaagcagccgaagca

SEQ ID NO: 966308 - RNA, 19 nt, Homo sapiens
  misc_RNA (1)...(19): siRNA sense strand
gagcagauaauucccaaag

SEQ ID NO: 966309 - RNA, 19 nt, Homo sapiens
  misc_RNA (1)...(19): siRNA sense strand
aagaagaggaggagaagaa

SEQ ID NO: 966310 - RNA, 19 nt, Homo sapiens
  misc_RNA (1)...(19): siRNA sense strand
guucauggcacaggacuuu

SEQ ID NO: 966311 - RNA, 19 nt, Homo sapiens
  misc_RNA (1)...(19): siRNA sense strand
gcagaaucccucucuagca

SEQ ID NO: 966312 - RNA, 19 nt, Homo sapiens
  misc_RNA (1)...(19): siRNA sense strand
ggaggaagaagaggucgaa

SEQ ID NO: 966313 - RNA, 19 nt, Homo sapiens
  misc_RNA (1)...(19): siRNA sense strand
ggaggaagaagaggucgaa

SEQ ID NO: 966314 - RNA, 19 nt, Homo sapiens
  misc_RNA (1)...(19): siRNA sense strand
gaagaagaggucgaagaug

SEQ ID NO: 966315 - RNA, 19 nt, Homo sapiens
  misc_RNA (1)...(19): siRNA sense strand
ggaagaagaggaggagaag

SEQ ID NO: 966316 - RNA, 19 nt, Homo sapiens
  misc_RNA (1)...(19): siRNA sense strand
ggaagaggaggagcuggaa

SEQ ID NO: 966317 - RNA, 19 nt, Homo sapiens
  misc_RNA (1)...(19): siRNA sense strand
gcccaacaccacccaauuc

SEQ ID NO: 966318 - RNA, 19 nt, Homo sapiens
  misc_RNA (1)...(19): siRNA sense strand
ccaaagugccacaggaauc

SEQ ID NO: 966319 - RNA, 19 nt, Homo sapiens
  misc_RNA (1)...(19): siRNA sense strand
uggaaaugccuuuaucaau

SEQ ID NO: 966320 - RNA, 19 nt, Homo sapiens
  misc_RNA (1)...(19): siRNA sense strand
ccugcacccucucugcuuu

SEQ ID NO: 966321 - RNA, 19 nt, Homo sapiens
  misc_RNA (1)...(19): siRNA sense strand
agagagagaacuuuauaag

SEQ ID NO: 966322 - RNA, 19 nt, Homo sapiens
  misc_RNA (1)...(19): siRNA sense strand
ggaagaggucgaagaugag

SEQ ID NO: 966323 - RNA, 19 nt, Homo sapiens
  misc_RNA (1)...(19): siRNA sense strand
ggaaacucuguauggcuuu

SEQ ID NO: 966324 - RNA, 19 nt, Homo sapiens
  misc_RNA (1)...(19): siRNA sense strand
gagagagaacuuuauaagc

SEQ ID NO: 966325 - RNA, 19 nt, Homo sapiens
  misc_RNA (1)...(19): siRNA sense strand
gggaagacccucugaaccu

SEQ ID NO: 966326 - RNA, 19 nt, Homo sapiens
  misc_RNA (1)...(19): siRNA sense strand
gaggaaaaccagucucuug

SEQ ID NO: 966327 - RNA, 19 nt, Homo sapiens
  misc_RNA (1)...(19): siRNA sense strand
ucauggcacaggacuuuaa

SEQ ID NO: 966328 - RNA, 19 nt, Homo sapiens
  misc_RNA (1)...(19): siRNA sense strand
gaagaagaggaggagaaga

SEQ ID NO: 966329 - RNA, 19 nt, Homo sapiens
  misc_RNA (1)...(19): siRNA sense strand
caaccacccgugugcucua

SEQ ID NO: 966330 - RNA, 19 nt, Homo sapiens
  misc_RNA (1)...(19): siRNA sense strand
ggacugcaggaaacucugu

SEQ ID NO: 966331 - RNA, 19 nt, Homo sapiens
  misc_RNA (1)...(19): siRNA sense strand
aagaugaggaggaagaaga

SEQ ID NO: 966332 - RNA, 19 nt, Homo sapiens
  misc_RNA (1)...(19): siRNA sense strand
gagcgaggaggaagaagag

SEQ ID NO: 966333 - RNA, 19 nt, Homo sapiens
  misc_RNA (1)...(19): siRNA sense strand
aaacccagagcagauaauu

SEQ ID NO: 966334 - RNA, 19 nt, Homo sapiens
  misc_RNA (1)...(19): siRNA sense strand
uguauggcuuugugcagaa

SEQ ID NO: 966335 - RNA, 19 nt, Homo sapiens
  misc_RNA (1)...(19): siRNA sense strand
gaccaggaggugugugaug

SEQ ID NO: 966336 - RNA, 19 nt, Homo sapiens
  misc_RNA (1)...(19): siRNA sense strand
gugcagaaucccucucuag

SEQ ID NO: 966337 - RNA, 19 nt, Homo sapiens
  misc_RNA (1)...(19): siRNA sense strand
ggaggagaacgagcagaga

SEQ ID NO: 966338 - RNA, 19 nt, Homo sapiens
  misc_RNA (1)...(19): siRNA sense strand
gccuuuaucaaucuucgua

SEQ ID NO: 966339 - RNA, 19 nt, Homo sapiens
  misc_RNA (1)...(19): siRNA sense strand
cgagcgaggaggaagaaga

SEQ ID NO: 966340 - RNA, 19 nt, Homo sapiens
  misc_RNA (1)...(19): siRNA sense strand
cguagaggcugaagaaaag

SEQ ID NO: 966341 - RNA, 19 nt, Homo sapiens
  misc_RNA (1)...(19): siRNA sense strand
caggaggugugugaugcaa

SEQ ID NO: 966342 - RNA, 19 nt, Homo sapiens
  misc_RNA (1)...(19): siRNA sense strand
aauagaccgcaccgauaua

SEQ ID NO: 966343 - RNA, 19 nt, Homo sapiens
  misc_RNA (1)...(19): siRNA sense strand
uggaagaagaggaggagaa

SEQ ID NO: 966344 - RNA, 19 nt, Homo sapiens
  misc_RNA (1)...(19): siRNA sense strand
ggaggagcuggaagaggaa

SEQ ID NO: 966345 - RNA, 19 nt, Homo sapiens
  misc_RNA (1)...(19): siRNA sense strand
aagaggaggagcuggaaga

SEQ ID NO: 966346 - RNA, 19 nt, Homo sapiens
  misc_RNA (1)...(19): siRNA sense strand
ggugcuccagcguacaaua

SEQ ID NO: 966347 - RNA, 19 nt, Homo sapiens
  misc_RNA (1)...(19): siRNA sense strand
ucgaagaugaggaggaaga

SEQ ID NO: 966348 - RNA, 19 nt, Homo sapiens
  misc_RNA (1)...(19): siRNA sense strand
gcacacucggccuccuuga

SEQ ID NO: 966349 - RNA, 19 nt, Homo sapiens
  misc_RNA (1)...(19): siRNA sense strand
ucgaagaugaggaggaaga

SEQ ID NO: 966350 - RNA, 19 nt, Homo sapiens
  misc_RNA (1)...(19): siRNA sense strand
augaugaggaggaguauga

SEQ ID NO: 966351 - RNA, 19 nt, Homo sapiens
  misc_RNA (1)...(19): siRNA sense strand
gaagaggaggagaagaaaa

SEQ ID NO: 966352 - RNA, 19 nt, Homo sapiens
  misc_RNA (1)...(19): siRNA sense strand
agaagaggaggagaagaaa

SEQ ID NO: 966353 - RNA, 19 nt, Homo sapiens
  misc_RNA (1)...(19): siRNA sense strand
ucaugaaccagaucuacga

SEQ ID NO: 966354 - RNA, 19 nt, Homo sapiens
  misc_RNA (1)...(19): siRNA sense strand
ccagaucuacgaggacaug

SEQ ID NO: 966355 - RNA, 19 nt, Homo sapiens
  misc_RNA (1)...(19): siRNA sense strand
uuuaaacccagagcagaua

SEQ ID NO: 966356 - RNA, 19 nt, Homo sapiens
  misc_RNA (1)...(19): siRNA sense strand
cuuuaucaaucuucguaga

SEQ ID NO: 966357 - RNA, 19 nt, Homo sapiens
  misc_RNA (1)...(19): siRNA sense strand
ugacugacaaggagaagga

SEQ ID NO: 966358 - RNA, 19 nt, Homo sapiens
  misc_RNA (1)...(19): siRNA sense strand
gcgccgugcucuaccucaa

SEQ ID NO: 966359 - RNA, 19 nt, Homo sapiens
  misc_RNA (1)...(19): siRNA sense strand
gagcccuccuucagcacaa

SEQ ID NO: 966360 - RNA, 19 nt, Homo sapiens
  misc_RNA (1)...(19): siRNA sense strand
caacagggcucucuaaauu

SEQ ID NO: 966361 - RNA, 19 nt, Homo sapiens
  misc_RNA (1)...(19): siRNA sense strand
gaaaguuggagaaauagaa

SEQ ID NO: 966362 - RNA, 19 nt, Homo sapiens
  misc_RNA (1)...(19): siRNA sense strand
gcaggaggcugagcacugu

SEQ ID NO: 966363 - RNA, 19 nt, Homo sapiens
  misc_RNA (1)...(19): siRNA sense strand
gcaacagggcucucuaaau

SEQ ID NO: 966364 - RNA, 19 nt, Homo sapiens
  misc_RNA (1)...(19): siRNA sense strand
cuacaaaccugcuccuacu

SEQ ID NO: 966365 - RNA, 19 nt, Homo sapiens
  misc_RNA (1)...(19): siRNA sense strand
ccucguggcuuugggcuuu

SEQ ID NO: 966366 - RNA, 19 nt, Homo sapiens
  misc_RNA (1)...(19): siRNA sense strand
uguaagggcuggguacgaa

SEQ ID NO: 966367 - RNA, 19 nt, Homo sapiens
  misc_RNA (1)...(19): siRNA sense strand
ccuggguucuuccuuguug

SEQ ID NO: 966368 - RNA, 19 nt, Homo sapiens
  misc_RNA (1)...(19): siRNA sense strand
gcuggugucuggucucacu

SEQ ID NO: 966369 - RNA, 19 nt, Homo sapiens
  misc_RNA (1)...(19): siRNA sense strand
uugcugaccuuggacugua

SEQ ID NO: 966370 - RNA, 19 nt, Homo sapiens
  misc_RNA (1)...(19): siRNA sense strand
acagggcucucuaaauugc

SEQ ID NO: 966371 - RNA, 19 nt, Homo sapiens
  misc_RNA (1)...(19): siRNA sense strand
gcuugcaccuggguucuuc

SEQ ID NO: 966372 - RNA, 19 nt, Homo sapiens
  misc_RNA (1)...(19): siRNA sense strand
caccuggguucuuccuugu

SEQ ID NO: 966373 - RNA, 19 nt, Homo sapiens
  misc_RNA (1)...(19): siRNA sense strand
ccaguauccucuacaaacc

SEQ ID NO: 966374 - RNA, 19 nt, Homo sapiens
  misc_RNA (1)...(19): siRNA sense strand
gcuuauuucugcccaauua

SEQ ID NO: 966375 - RNA, 19 nt, Homo sapiens
  misc_RNA (1)...(19): siRNA sense strand
gagaagcacucacggaaga

SEQ ID NO: 966376 - RNA, 19 nt, Homo sapiens
  misc_RNA (1)...(19): siRNA sense strand
ggagaauucugccugcaaa

SEQ ID NO: 966377 - RNA, 19 nt, Homo sapiens
  misc_RNA (1)...(19): siRNA sense strand
gaacuugcuguccaaauuu

SEQ ID NO: 966378 - RNA, 19 nt, Homo sapiens
  misc_RNA (1)...(19): siRNA sense strand
ugaacuugcuguccaaauu

SEQ ID NO: 966379 - RNA, 19 nt, Homo sapiens
  misc_RNA (1)...(19): siRNA sense strand
cagcaggaguuguuucaaa

SEQ ID NO: 966380 - RNA, 19 nt, Homo sapiens
  misc_RNA (1)...(19): siRNA sense strand
ccaauuacguucaggacaa

SEQ ID NO: 966381 - RNA, 19 nt, Homo sapiens
  misc_RNA (1)...(19): siRNA sense strand
gacggcaucuccaggaaga

SEQ ID NO: 966382 - RNA, 19 nt, Homo sapiens
  misc_RNA (1)...(19): siRNA sense strand
acaggcggcuucaccauga

SEQ ID NO: 966383 - RNA, 19 nt, Homo sapiens
  misc_RNA (1)...(19): siRNA sense strand
gaagauucaggacaagcua

SEQ ID NO: 966384 - RNA, 19 nt, Homo sapiens
  misc_RNA (1)...(19): siRNA sense strand
ccuccaagcugcaggugaa

SEQ ID NO: 966385 - RNA, 19 nt, Homo sapiens
  misc_RNA (1)...(19): siRNA sense strand
gacuucaucuccuccaaga

SEQ ID NO: 966386 - RNA, 19 nt, Homo sapiens
  misc_RNA (1)...(19): siRNA sense strand
gacaagcuacggaggauga

SEQ ID NO: 966387 - RNA, 19 nt, Homo sapiens
  misc_RNA (1)...(19): siRNA sense strand
ucaggacaaguaucuguua

SEQ ID NO: 966388 - RNA, 19 nt, Homo sapiens
  misc_RNA (1)...(19): siRNA sense strand
cuucagcggugccgacauu

SEQ ID NO: 966389 - RNA, 19 nt, Homo sapiens
  misc_RNA (1)...(19): siRNA sense strand
aaagccagcucuucugagu

SEQ ID NO: 966390 - RNA, 19 nt, Homo sapiens
  misc_RNA (1)...(19): siRNA sense strand
gcuaugagcagagaaacuu

SEQ ID NO: 966391 - RNA, 19 nt, Homo sapiens
  misc_RNA (1)...(19): siRNA sense strand
ccaaagccagcucuucuga

SEQ ID NO: 966392 - RNA, 19 nt, Homo sapiens
  misc_RNA (1)...(19): siRNA sense strand
aaagauagcagaggucaug

SEQ ID NO: 966393 - RNA, 19 nt, Homo sapiens
  misc_RNA (1)...(19): siRNA sense strand
ucaggaacaucgcaaaggu

SEQ ID NO: 966394 - RNA, 19 nt, Homo sapiens
  misc_RNA (1)...(19): siRNA sense strand
cacggaagauucaggacaa

SEQ ID NO: 966395 - RNA, 19 nt, Homo sapiens
  misc_RNA (1)...(19): siRNA sense strand
ugaaagccguggaggucuu

SEQ ID NO: 966396 - RNA, 19 nt, Homo sapiens
  misc_RNA (1)...(19): siRNA sense strand
cuggguggcugcagagauu

SEQ ID NO: 966397 - RNA, 19 nt, Homo sapiens
  misc_RNA (1)...(19): siRNA sense strand
aauucugccugcaaagaua

SEQ ID NO: 966398 - RNA, 19 nt, Homo sapiens
  misc_RNA (1)...(19): siRNA sense strand
gaauucugccugcaaagau

SEQ ID NO: 966399 - RNA, 19 nt, Homo sapiens
  misc_RNA (1)...(19): siRNA sense strand
ggccaaaaccugcagcuua

SEQ ID NO: 966400 - RNA, 19 nt, Homo sapiens
  misc_RNA (1)...(19): siRNA sense strand
ggaggaugaaggcuacauu

SEQ ID NO: 966401 - RNA, 19 nt, Homo sapiens
  misc_RNA (1)...(19): siRNA sense strand
gccaaaaccugcagcuuau

SEQ ID NO: 966402 - RNA, 19 nt, Homo sapiens
  misc_RNA (1)...(19): siRNA sense strand
gaagcacucacggaagauu

SEQ ID NO: 966403 - RNA, 19 nt, Homo sapiens
  misc_RNA (1)...(19): siRNA sense strand
aggguuaugugcagcaauu

SEQ ID NO: 966404 - RNA, 19 nt, Homo sapiens
  misc_RNA (1)...(19): siRNA sense strand
gugcagcaauuccucuaca

SEQ ID NO: 966405 - RNA, 19 nt, Homo sapiens
  misc_RNA (1)...(19): siRNA sense strand
gcagauagcagggccaacu

SEQ ID NO: 966406 - RNA, 19 nt, Homo sapiens
  misc_RNA (1)...(19): siRNA sense strand
ugaaggcuacauuccagua

SEQ ID NO: 966407 - RNA, 19 nt, Homo sapiens
  misc_RNA (1)...(19): siRNA sense strand
gaggaugaaggcuacauuc

SEQ ID NO: 966408 - RNA, 19 nt, Homo sapiens
  misc_RNA (1)...(19): siRNA sense strand
ggucauggaggagcugaaa

SEQ ID NO: 966409 - RNA, 19 nt, Homo sapiens
  misc_RNA (1)...(19): siRNA sense strand
gagaacccuuacaccuuca

SEQ ID NO: 966410 - RNA, 19 nt, Homo sapiens
  misc_RNA (1)...(19): siRNA sense strand
ggaugaaggcuacauucca

SEQ ID NO: 966411 - RNA, 19 nt, Homo sapiens
  misc_RNA (1)...(19): siRNA sense strand
gaggaugccagacccuuca

SEQ ID NO: 966412 - RNA, 19 nt, Homo sapiens
  misc_RNA (1)...(19): siRNA sense strand
caaaaccugcagcuuauuu

SEQ ID NO: 966413 - RNA, 19 nt, Homo sapiens
  misc_RNA (1)...(19): siRNA sense strand
ggaggguuaugugcagcaa

SEQ ID NO: 966414 - RNA, 19 nt, Homo sapiens
  misc_RNA (1)...(19): siRNA sense strand
uaccuguacuccagugaug

SEQ ID NO: 966415 - RNA, 19 nt, Homo sapiens
  misc_RNA (1)...(19): siRNA sense strand
cugcuacgcuguggacuuc

SEQ ID NO: 966416 - RNA, 19 nt, Homo sapiens
  misc_RNA (1)...(19): siRNA sense strand
ccguggaggucuuccugaa

SEQ ID NO: 966417 - RNA, 19 nt, Homo sapiens
  misc_RNA (1)...(19): siRNA sense strand
cagcuuauuucugcccaau

SEQ ID NO: 966418 - RNA, 19 nt, Homo sapiens
  misc_RNA (1)...(19): siRNA sense strand
caauuacguucaggacaag

SEQ ID NO: 966419 - RNA, 19 nt, Homo sapiens
  misc_RNA (1)...(19): siRNA sense strand
cgacagccaugcagauccu

SEQ ID NO: 966420 - RNA, 19 nt, Homo sapiens
  misc_RNA (1)...(19): siRNA sense strand
gcgccaagaccagugagaa

SEQ ID NO: 966421 - RNA, 19 nt, Homo sapiens
  misc_RNA (1)...(19): siRNA sense strand
ccaccucgaccuucaccaa

SEQ ID NO: 966422 - RNA, 19 nt, Homo sapiens
  misc_RNA (1)...(19): siRNA sense strand
gcacucaccagcucuucag

SEQ ID NO: 966423 - RNA, 19 nt, Homo sapiens
  misc_RNA (1)...(19): siRNA sense strand
guucaggacaaguaucugu

SEQ ID NO: 966424 - RNA, 19 nt, Homo sapiens
  misc_RNA (1)...(19): siRNA sense strand
ggaagauucaggacaagcu

SEQ ID NO: 966425 - RNA, 19 nt, Homo sapiens
  misc_RNA (1)...(19): siRNA sense strand
caggacaaguaucuguuac

SEQ ID NO: 966426 - RNA, 19 nt, Homo sapiens
  misc_RNA (1)...(19): siRNA sense strand
ccucgaccuucaccaagau

SEQ ID NO: 966427 - RNA, 19 nt, Homo sapiens
  misc_RNA (1)...(19): siRNA sense strand
gaaagccguggaggucuuc

SEQ ID NO: 966428 - RNA, 19 nt, Homo sapiens
  misc_RNA (1)...(19): siRNA sense strand
ccaagcugcaggugaacuu

SEQ ID NO: 966429 - RNA, 19 nt, Homo sapiens
  misc_RNA (1)...(19): siRNA sense strand
agaauucugccugcaaaga

SEQ ID NO: 966430 - RNA, 19 nt, Homo sapiens
  misc_RNA (1)...(19): siRNA sense strand
gugccgacauuuccacacu

SEQ ID NO: 966431 - RNA, 19 nt, Homo sapiens
  misc_RNA (1)...(19): siRNA sense strand
aggagaacccuuacaccuu

SEQ ID NO: 966432 - RNA, 19 nt, Homo sapiens
  misc_RNA (1)...(19): siRNA sense strand
cagccugugucugauggaa

SEQ ID NO: 966433 - RNA, 19 nt, Homo sapiens
  misc_RNA (1)...(19): siRNA sense strand
gcagugcugugaaggauau

SEQ ID NO: 966434 - RNA, 19 nt, Homo sapiens
  misc_RNA (1)...(19): siRNA sense strand
gcuaaaagcugcaaaggaa

SEQ ID NO: 966435 - RNA, 19 nt, Homo sapiens
  misc_RNA (1)...(19): siRNA sense strand
ugaaggauauagaaugugu

SEQ ID NO: 966436 - RNA, 19 nt, Homo sapiens
  misc_RNA (1)...(19): siRNA sense strand
gcucugucuuuacuucaaa

SEQ ID NO: 966437 - RNA, 19 nt, Homo sapiens
  misc_RNA (1)...(19): siRNA sense strand
ugugaaggauauagaaugu

SEQ ID NO: 966438 - RNA, 19 nt, Homo sapiens
  misc_RNA (1)...(19): siRNA sense strand
ugucaucgcuggugguauc

SEQ ID NO: 966439 - RNA, 19 nt, Homo sapiens
  misc_RNA (1)...(19): siRNA sense strand
uauagaaugugugccaguu

SEQ ID NO: 966440 - RNA, 19 nt, Homo sapiens
  misc_RNA (1)...(19): siRNA sense strand
cugaagcuguggcuguaaa

SEQ ID NO: 966441 - RNA, 19 nt, Homo sapiens
  misc_RNA (1)...(19): siRNA sense strand
gcuguugcgacauaaauga

SEQ ID NO: 966442 - RNA, 19 nt, Homo sapiens
  misc_RNA (1)...(19): siRNA sense strand
caagaacagccaggccaaa

SEQ ID NO: 966443 - RNA, 19 nt, Homo sapiens
  misc_RNA (1)...(19): siRNA sense strand
uagaaugugugccaguuuu

SEQ ID NO: 966444 - RNA, 19 nt, Homo sapiens
  misc_RNA (1)...(19): siRNA sense strand
gcccugcagugcugugaag

SEQ ID NO: 966445 - RNA, 19 nt, Homo sapiens
  misc_RNA (1)...(19): siRNA sense strand
cgugcucugucuuuacuuc

SEQ ID NO: 966446 - RNA, 19 nt, Homo sapiens
  misc_RNA (1)...(19): siRNA sense strand
gcugugaaggauauagaau

SEQ ID NO: 966447 - RNA, 19 nt, Homo sapiens
  misc_RNA (1)...(19): siRNA sense strand
ccauugccacggagucuug

SEQ ID NO: 966448 - RNA, 19 nt, Homo sapiens
  misc_RNA (1)...(19): siRNA sense strand
gacgagaacuuuacacuga

SEQ ID NO: 966449 - RNA, 19 nt, Homo sapiens
  misc_RNA (1)...(19): siRNA sense strand
gcauggacgucgugaagaa

SEQ ID NO: 966450 - RNA, 19 nt, Homo sapiens
  misc_RNA (1)...(19): siRNA sense strand
ggugaucccuuccuucaug

SEQ ID NO: 966451 - RNA, 19 nt, Homo sapiens
  misc_RNA (1)...(19): siRNA sense strand
gggaggacauccaagaaga

SEQ ID NO: 966452 - RNA, 19 nt, Homo sapiens
  misc_RNA (1)...(19): siRNA sense strand
aaagacagcugagaacuuc

SEQ ID NO: 966453 - RNA, 19 nt, Homo sapiens
  misc_RNA (1)...(19): siRNA sense strand
gcagaugucgucccaaaga

SEQ ID NO: 966454 - RNA, 19 nt, Homo sapiens
  misc_RNA (1)...(19): siRNA sense strand
caagaagauugucaucaca

SEQ ID NO: 966455 - RNA, 19 nt, Homo sapiens
  misc_RNA (1)...(19): siRNA sense strand
ggacauccaagaagauugu

SEQ ID NO: 966456 - RNA, 19 nt, Homo sapiens
  misc_RNA (1)...(19): siRNA sense strand
caaagacagcugagaacuu

SEQ ID NO: 966457 - RNA, 19 nt, Homo sapiens
  misc_RNA (1)...(19): siRNA sense strand
ccaagaagauugucaucac

SEQ ID NO: 966458 - RNA, 19 nt, Homo sapiens
  misc_RNA (1)...(19): siRNA sense strand
aggcagaugucgucccaaa

SEQ ID NO: 966459 - RNA, 19 nt, Homo sapiens
  misc_RNA (1)...(19): siRNA sense strand
ccauaaagacagacugguu

SEQ ID NO: 966460 - RNA, 19 nt, Homo sapiens
  misc_RNA (1)...(19): siRNA sense strand
uguguucggucacgucaaa

SEQ ID NO: 966461 - RNA, 19 nt, Homo sapiens
  misc_RNA (1)...(19): siRNA sense strand
uggcaagcauguuguguuc

SEQ ID NO: 966462 - RNA, 19 nt, Homo sapiens
  misc_RNA (1)...(19): siRNA sense strand
gaggacauccaagaagauu

SEQ ID NO: 966463 - RNA, 19 nt, Homo sapiens
  misc_RNA (1)...(19): siRNA sense strand
agaagauugucaucacaga

SEQ ID NO: 966464 - RNA, 19 nt, Homo sapiens
  misc_RNA (1)...(19): siRNA sense strand
ggaacccgcucguguaccu

SEQ ID NO: 966465 - RNA, 19 nt, Homo sapiens
  misc_RNA (1)...(19): siRNA sense strand
caacggcucccaguucuuc

SEQ ID NO: 966466 - RNA, 19 nt, Homo sapiens
  misc_RNA (1)...(19): siRNA sense strand
cgacuucaccaaccacaau

SEQ ID NO: 966467 - RNA, 19 nt, Homo sapiens
  misc_RNA (1)...(19): siRNA sense strand
gggcauggacgucgugaag

SEQ ID NO: 966468 - RNA, 19 nt, Homo sapiens
  misc_RNA (1)...(19): siRNA sense strand
ggaggacauccaagaagau

SEQ ID NO: 966469 - RNA, 19 nt, Homo sapiens
  misc_RNA (1)...(19): siRNA sense strand
cgagaacuuuacacugaag

SEQ ID NO: 966470 - RNA, 19 nt, Homo sapiens
  misc_RNA (1)...(19): siRNA sense strand
guucuucaucugcaccaua

SEQ ID NO: 966471 - RNA, 19 nt, Homo sapiens
  misc_RNA (1)...(19): siRNA sense strand
gcguggugcuggagcugaa

SEQ ID NO: 966472 - RNA, 19 nt, Homo sapiens
  misc_RNA (1)...(19): siRNA sense strand
gcacaggcgggaaguccau

SEQ ID NO: 966473 - RNA, 19 nt, Homo sapiens
  misc_RNA (1)...(19): siRNA sense strand
gcucccaguucuucaucug

SEQ ID NO: 966474 - RNA, 19 nt, Homo sapiens
  misc_RNA (1)...(19): siRNA sense strand
acgagaacuuuacacugaa

SEQ ID NO: 966475 - RNA, 19 nt, Homo sapiens
  misc_RNA (1)...(19): siRNA sense strand
caccaacggcucccaguuc

SEQ ID NO: 966476 - RNA, 19 nt, Homo sapiens
  misc_RNA (1)...(19): siRNA sense strand
ccugugcacuggugagaag

SEQ ID NO: 966477 - RNA, 19 nt, Homo sapiens
  misc_RNA (1)...(19): siRNA sense strand
gcuaaugcugguccuaaca

SEQ ID NO: 966478 - RNA, 19 nt, Homo sapiens
  misc_RNA (1)...(19): siRNA sense strand
caucugcaccauaaagaca

SEQ ID NO: 966479 - RNA, 19 nt, Homo sapiens
  misc_RNA (1)...(19): siRNA sense strand
uucuucaucugcaccauaa

SEQ ID NO: 966480 - RNA, 19 nt, Homo sapiens
  misc_RNA (1)...(19): siRNA sense strand
gugaucccuuccuucaugu

SEQ ID NO: 966481 - RNA, 19 nt, Homo sapiens
  misc_RNA (1)...(19): siRNA sense strand
ucccaaagacagcugagaa

SEQ ID NO: 966482 - RNA, 19 nt, Homo sapiens
  misc_RNA (1)...(19): siRNA sense strand
aaagacagacugguuggau

SEQ ID NO: 966483 - RNA, 19 nt, Homo sapiens
  misc_RNA (1)...(19): siRNA sense strand
uggaaagggugaucaguua

SEQ ID NO: 966484 - RNA, 19 nt, Homo sapiens
  misc_RNA (1)...(19): siRNA sense strand
caaaguugaucacaguaaa

SEQ ID NO: 966485 - RNA, 19 nt, Homo sapiens
  misc_RNA (1)...(19): siRNA sense strand
gcuauauucuuguguauuc

SEQ ID NO: 966486 - RNA, 19 nt, Homo sapiens
  misc_RNA (1)...(19): siRNA sense strand
ggugaucaguuaugaagaa

SEQ ID NO: 966487 - RNA, 19 nt, Homo sapiens
  misc_RNA (1)...(19): siRNA sense strand
ggaaagcuuuggcagaauc

SEQ ID NO: 966488 - RNA, 19 nt, Homo sapiens
  misc_RNA (1)...(19): siRNA sense strand
cacaguaaauggacaagaa

SEQ ID NO: 966489 - RNA, 19 nt, Homo sapiens
  misc_RNA (1)...(19): siRNA sense strand
cagacauacuccauagaua

SEQ ID NO: 966490 - RNA, 19 nt, Homo sapiens
  misc_RNA (1)...(19): siRNA sense strand
gaauaucaucuucaacuug

SEQ ID NO: 966491 - RNA, 19 nt, Homo sapiens
  misc_RNA (1)...(19): siRNA sense strand
gcaaauuguuggauauggu

SEQ ID NO: 966492 - RNA, 19 nt, Homo sapiens
  misc_RNA (1)...(19): siRNA sense strand
uuacaaaguugaucacagu

SEQ ID NO: 966493 - RNA, 19 nt, Homo sapiens
  misc_RNA (1)...(19): siRNA sense strand
cauggcaaauuguuggaua

SEQ ID NO: 966494 - RNA, 19 nt, Homo sapiens
  misc_RNA (1)...(19): siRNA sense strand
gaaagggugaucaguuaug

SEQ ID NO: 966495 - RNA, 19 nt, Homo sapiens
  misc_RNA (1)...(19): siRNA sense strand
gacauacuccauagauauu

SEQ ID NO: 966496 - RNA, 19 nt, Homo sapiens
  misc_RNA (1)...(19): siRNA sense strand
ggaaaguacaaauaccuau

SEQ ID NO: 966497 - RNA, 19 nt, Homo sapiens
  misc_RNA (1)...(19): siRNA sense strand
aaagggugaucaguuauga

SEQ ID NO: 966498 - RNA, 19 nt, Homo sapiens
  misc_RNA (1)...(19): siRNA sense strand
agacauacuccauagauau

SEQ ID NO: 966499 - RNA, 19 nt, Homo sapiens
  misc_RNA (1)...(19): siRNA sense strand
gccaauuuguggacuccua

SEQ ID NO: 966500 - RNA, 19 nt, Homo sapiens
  misc_RNA (1)...(19): siRNA sense strand
ccucagacauacuccauag

SEQ ID NO: 966501 - RNA, 19 nt, Homo sapiens
  misc_RNA (1)...(19): siRNA sense strand
uauucuaucuuuccucaga

SEQ ID NO: 966502 - RNA, 19 nt, Homo sapiens
  misc_RNA (1)...(19): siRNA sense strand
uuuggaaucuucugcuaaa

SEQ ID NO: 966503 - RNA, 19 nt, Homo sapiens
  misc_RNA (1)...(19): siRNA sense strand
agggaaagcuuuggcagaa

SEQ ID NO: 966504 - RNA, 19 nt, Homo sapiens
  misc_RNA (1)...(19): siRNA sense strand
gggaaaguacaaauaccua

SEQ ID NO: 966505 - RNA, 19 nt, Homo sapiens
  misc_RNA (1)...(19): siRNA sense strand
ggaaagggugaucaguuau

SEQ ID NO: 966506 - RNA, 19 nt, Homo sapiens
  misc_RNA (1)...(19): siRNA sense strand
cuccuacgauccaaccaua

SEQ ID NO: 966507 - RNA, 19 nt, Homo sapiens
  misc_RNA (1)...(19): siRNA sense strand
caguaaauggacaagaaua

SEQ ID NO: 966508 - RNA, 19 nt, Homo sapiens
  misc_RNA (1)...(19): siRNA sense strand
ggcagaaucuuggaaugca

SEQ ID NO: 966509 - RNA, 19 nt, Homo sapiens
  misc_RNA (1)...(19): siRNA sense strand
gcaagaugaauauucuauc

SEQ ID NO: 966510 - RNA, 19 nt, Homo sapiens
  misc_RNA (1)...(19): siRNA sense strand
ggcaagaugaauauucuau

SEQ ID NO: 966511 - RNA, 19 nt, Homo sapiens
  misc_RNA (1)...(19): siRNA sense strand
guaaauggacaagaauauc

SEQ ID NO: 966512 - RNA, 19 nt, Homo sapiens
  misc_RNA (1)...(19): siRNA sense strand
acaaaguugaucacaguaa

SEQ ID NO: 966513 - RNA, 19 nt, Homo sapiens
  misc_RNA (1)...(19): siRNA sense strand
gggaaagcuuuggcagaau

SEQ ID NO: 966514 - RNA, 19 nt, Homo sapiens
  misc_RNA (1)...(19): siRNA sense strand
ugaagaagggaaagcuuug

SEQ ID NO: 966515 - RNA, 19 nt, Homo sapiens
  misc_RNA (1)...(19): siRNA sense strand
ggaaauccucauugacgau

SEQ ID NO: 966516 - RNA, 19 nt, Homo sapiens
  misc_RNA (1)...(19): siRNA sense strand
aguuauccauggcaaauug

SEQ ID NO: 966517 - RNA, 19 nt, Homo sapiens
  misc_RNA (1)...(19): siRNA sense strand
ucagacauacuccauagau

SEQ ID NO: 966518 - RNA, 19 nt, Homo sapiens
  misc_RNA (1)...(19): siRNA sense strand
gaucacaguaaauggacaa

SEQ ID NO: 966519 - RNA, 19 nt, Homo sapiens
  misc_RNA (1)...(19): siRNA sense strand
uaauggcuauauucuugug

SEQ ID NO: 966520 - RNA, 19 nt, Homo sapiens
  misc_RNA (1)...(19): siRNA sense strand
caaggcaagucuucaugcu

SEQ ID NO: 966521 - RNA, 19 nt, Homo sapiens
  misc_RNA (1)...(19): siRNA sense strand
uaaaguuauccauggcaaa

SEQ ID NO: 966522 - RNA, 19 nt, Homo sapiens
  misc_RNA (1)...(19): siRNA sense strand
aaucuuggaaugcagcuuu

SEQ ID NO: 966523 - RNA, 19 nt, Homo sapiens
  misc_RNA (1)...(19): siRNA sense strand
aaaguuauccauggcaaau

SEQ ID NO: 966524 - RNA, 19 nt, Homo sapiens
  misc_RNA (1)...(19): siRNA sense strand
gaagaagggaaagcuuugg

SEQ ID NO: 966525 - RNA, 19 nt, Homo sapiens
  misc_RNA (1)...(19): siRNA sense strand
guugaucacaguaaaugga

SEQ ID NO: 966526 - RNA, 19 nt, Homo sapiens
  misc_RNA (1)...(19): siRNA sense strand
ggcaaauuguuggauaugg

SEQ ID NO: 966527 - RNA, 19 nt, Homo sapiens
  misc_RNA (1)...(19): siRNA sense strand
gggcaagaugaauauucua

SEQ ID NO: 966528 - RNA, 19 nt, Homo sapiens
  misc_RNA (1)...(19): siRNA sense strand
ucacaaggcaagucuucau

SEQ ID NO: 966529 - RNA, 19 nt, Homo sapiens
  misc_RNA (1)...(19): siRNA sense strand
uggcuauauucuuguguau

SEQ ID NO: 966530 - RNA, 19 nt, Homo sapiens
  misc_RNA (1)...(19): siRNA sense strand
guggggaaauccucauuga

SEQ ID NO: 966531 - RNA, 19 nt, Homo sapiens
  misc_RNA (1)...(19): siRNA sense strand
ccuacgauccaaccauaga

SEQ ID NO: 966532 - RNA, 19 nt, Homo sapiens
  misc_RNA (1)...(19): siRNA sense strand
uaucuuuccucagacauac

SEQ ID NO: 966533 - RNA, 19 nt, Homo sapiens
  misc_RNA (1)...(19): siRNA sense strand
cuaucuuuccucagacaua

SEQ ID NO: 966534 - RNA, 19 nt, Homo sapiens
  misc_RNA (1)...(19): siRNA sense strand
caaagaagcauauuggaaa

SEQ ID NO: 966535 - RNA, 19 nt, Homo sapiens
  misc_RNA (1)...(19): siRNA sense strand
gcagaacucuaaggaaaga

SEQ ID NO: 966536 - RNA, 19 nt, Homo sapiens
  misc_RNA (1)...(19): siRNA sense strand
aaggaaagaucaaguagaa

SEQ ID NO: 966537 - RNA, 19 nt, Homo sapiens
  misc_RNA (1)...(19): siRNA sense strand
ggaaacugcagaacucuaa

SEQ ID NO: 966538 - RNA, 19 nt, Homo sapiens
  misc_RNA (1)...(19): siRNA sense strand
cagcagcaacucaucauua

SEQ ID NO: 966539 - RNA, 19 nt, Homo sapiens
  misc_RNA (1)...(19): siRNA sense strand
ccaccauucuguuccauuu

SEQ ID NO: 966540 - RNA, 19 nt, Homo sapiens
  misc_RNA (1)...(19): siRNA sense strand
cugcagaacucuaaggaaa

SEQ ID NO: 966541 - RNA, 19 nt, Homo sapiens
  misc_RNA (1)...(19): siRNA sense strand
ggaucagcuuggcuucuua

SEQ ID NO: 966542 - RNA, 19 nt, Homo sapiens
  misc_RNA (1)...(19): siRNA sense strand
gagaaugaggaccuaauuu

SEQ ID NO: 966543 - RNA, 19 nt, Homo sapiens
  misc_RNA (1)...(19): siRNA sense strand
ucacugacuucacgaaugu

SEQ ID NO: 966544 - RNA, 19 nt, Homo sapiens
  misc_RNA (1)...(19): siRNA sense strand
caccagagcccaaggacua

SEQ ID NO: 966545 - RNA, 19 nt, Homo sapiens
  misc_RNA (1)...(19): siRNA sense strand
ugaagccgcugccaaguca

SEQ ID NO: 966546 - RNA, 19 nt, Homo sapiens
  misc_RNA (1)...(19): siRNA sense strand
aaguagaacugguugagaa

SEQ ID NO: 966547 - RNA, 19 nt, Homo sapiens
  misc_RNA (1)...(19): siRNA sense strand
ggaaagaucaaguagaacu

SEQ ID NO: 966548 - RNA, 19 nt, Homo sapiens
  misc_RNA (1)...(19): siRNA sense strand
cgacagcaccugcguguuc

SEQ ID NO: 966549 - RNA, 19 nt, Homo sapiens
  misc_RNA (1)...(19): siRNA sense strand
agaaugaggaccuaauuug

SEQ ID NO: 966550 - RNA, 19 nt, Homo sapiens
  misc_RNA (1)...(19): siRNA sense strand
caacucaucauuaucuugu

SEQ ID NO: 966551 - RNA, 19 nt, Homo sapiens
  misc_RNA (1)...(19): siRNA sense strand
cagcuuggcuucuuaucca

SEQ ID NO: 966552 - RNA, 19 nt, Homo sapiens
  misc_RNA (1)...(19): siRNA sense strand
caugguaacuguuggaaaa

SEQ ID NO: 966553 - RNA, 19 nt, Homo sapiens
  misc_RNA (1)...(19): siRNA sense strand
gaggauggguuuucauaug

SEQ ID NO: 966554 - RNA, 19 nt, Homo sapiens
  misc_RNA (1)...(19): siRNA sense strand
cgagaaugaggaccuaauu

SEQ ID NO: 966555 - RNA, 19 nt, Homo sapiens
  misc_RNA (1)...(19): siRNA sense strand
cuucaaagauaucaaacca

SEQ ID NO: 966556 - RNA, 19 nt, Homo sapiens
  misc_RNA (1)...(19): siRNA sense strand
gaaagaucaaguagaacug

SEQ ID NO: 966557 - RNA, 19 nt, Homo sapiens
  misc_RNA (1)...(19): siRNA sense strand
gaaugaggaccuaauuugc

SEQ ID NO: 966558 - RNA, 19 nt, Homo sapiens
  misc_RNA (1)...(19): siRNA sense strand
ucuaaggaaagaucaagua

SEQ ID NO: 966559 - RNA, 19 nt, Homo sapiens
  misc_RNA (1)...(19): siRNA sense strand
cagcaacucaucauuaucu

SEQ ID NO: 966560 - RNA, 19 nt, Homo sapiens
  misc_RNA (1)...(19): siRNA sense strand
gcaacucaucauuaucuug

SEQ ID NO: 966561 - RNA, 19 nt, Homo sapiens
  misc_RNA (1)...(19): siRNA sense strand
ccacuugcaccuucauguu

SEQ ID NO: 966562 - RNA, 19 nt, Homo sapiens
  misc_RNA (1)...(19): siRNA sense strand
gaacucuaaggaaagauca

SEQ ID NO: 966563 - RNA, 19 nt, Homo sapiens
  misc_RNA (1)...(19): siRNA sense strand
agcagcaacucaucauuau

SEQ ID NO: 966564 - RNA, 19 nt, Homo sapiens
  misc_RNA (1)...(19): siRNA sense strand
uaaggaaagaucaaguaga

SEQ ID NO: 966565 - RNA, 19 nt, Homo sapiens
  misc_RNA (1)...(19): siRNA sense strand
aaagaagcauauuggaaac

SEQ ID NO: 966566 - RNA, 19 nt, Homo sapiens
  misc_RNA (1)...(19): siRNA sense strand
cgaaugugaggauggguuu

SEQ ID NO: 966567 - RNA, 19 nt, Homo sapiens
  misc_RNA (1)...(19): siRNA sense strand
uugagaacaugguaacugu

SEQ ID NO: 966568 - RNA, 19 nt, Homo sapiens
  misc_RNA (1)...(19): siRNA sense strand
gaucagcuuggcuucuuau

SEQ ID NO: 966569 - RNA, 19 nt, Homo sapiens
  misc_RNA (1)...(19): siRNA sense strand
uagaacugguugagaacau

SEQ ID NO: 966570 - RNA, 19 nt, Homo sapiens
  misc_RNA (1)...(19): siRNA sense strand
uggaucagcuuggcuucuu

SEQ ID NO: 966571 - RNA, 19 nt, Homo sapiens
  misc_RNA (1)...(19): siRNA sense strand
agaagcauauuggaaacug

SEQ ID NO: 966572 - RNA, 19 nt, Homo sapiens
  misc_RNA (1)...(19): siRNA sense strand
caaguagaacugguugaga

SEQ ID NO: 966573 - RNA, 19 nt, Homo sapiens
  misc_RNA (1)...(19): siRNA sense strand
gauaucaaaccagcagcaa

SEQ ID NO: 966574 - RNA, 19 nt, Homo sapiens
  misc_RNA (1)...(19): siRNA sense strand
gcgagaaugaggaccuaau

SEQ ID NO: 966575 - RNA, 19 nt, Homo sapiens
  misc_RNA (1)...(19): siRNA sense strand
cauauuggaaacugcagaa

SEQ ID NO: 966576 - RNA, 19 nt, Homo sapiens
  misc_RNA (1)...(19): siRNA sense strand
uaucaaaccagcagcaacu

SEQ ID NO: 966577 - RNA, 19 nt, Homo sapiens
  misc_RNA (1)...(19): siRNA sense strand
augaggaccuaauuugcuu

SEQ ID NO: 966578 - RNA, 19 nt, Homo sapiens
  misc_RNA (1)...(19): siRNA sense strand
gacagcaccugcguguucu

SEQ ID NO: 966579 - RNA, 19 nt, Homo sapiens
  misc_RNA (1)...(19): siRNA sense strand
cauaugccaccauucuguu

SEQ ID NO: 966580 - RNA, 19 nt, Homo sapiens
  misc_RNA (1)...(19): siRNA sense strand
caaaccagcagcaacucau

SEQ ID NO: 966581 - RNA, 19 nt, Homo sapiens
  misc_RNA (1)...(19): siRNA sense strand
ucauaugccaccauucugu

SEQ ID NO: 966582 - RNA, 19 nt, Homo sapiens
  misc_RNA (1)...(19): siRNA sense strand
agaacugguugagaacaug

SEQ ID NO: 966583 - RNA, 19 nt, Homo sapiens
  misc_RNA (1)...(19): siRNA sense strand
cuaaggaaagaucaaguag

SEQ ID NO: 966584 - RNA, 19 nt, Homo sapiens
  misc_RNA (1)...(19): siRNA sense strand
gcagcaacucaucauuauc

SEQ ID NO: 966585 - RNA, 19 nt, Homo sapiens
  misc_RNA (1)...(19): siRNA sense strand
gugccaaagaagcauauug

SEQ ID NO: 966586 - RNA, 19 nt, Homo sapiens
  misc_RNA (1)...(19): siRNA sense strand
guacaaacuucugcucuuu

SEQ ID NO: 966587 - RNA, 19 nt, Homo sapiens
  misc_RNA (1)...(19): siRNA sense strand
gcagaaaggccuucacaga

SEQ ID NO: 966588 - RNA, 19 nt, Homo sapiens
  misc_RNA (1)...(19): siRNA sense strand
gcacacaggcaaagaaaug

SEQ ID NO: 966589 - RNA, 19 nt, Homo sapiens
  misc_RNA (1)...(19): siRNA sense strand
gcccaucgcugucuucugu

SEQ ID NO: 966590 - RNA, 19 nt, Homo sapiens
  misc_RNA (1)...(19): siRNA sense strand
ccacccagcucuucaacuu

SEQ ID NO: 966591 - RNA, 19 nt, Homo sapiens
  misc_RNA (1)...(19): siRNA sense strand
agacggaggcgcagaauaa

SEQ ID NO: 966592 - RNA, 19 nt, Homo sapiens
  misc_RNA (1)...(19): siRNA sense strand
caucaucuuguacgaauua

SEQ ID NO: 966593 - RNA, 19 nt, Homo sapiens
  misc_RNA (1)...(19): siRNA sense strand
cagaaaggccuucacagaa

SEQ ID NO: 966594 - RNA, 19 nt, Homo sapiens
  misc_RNA (1)...(19): siRNA sense strand
ugaauuaccuuccguccau

SEQ ID NO: 966595 - RNA, 19 nt, Homo sapiens
  misc_RNA (1)...(19): siRNA sense strand
gcucuucucucucuggaau

SEQ ID NO: 966596 - RNA, 19 nt, Homo sapiens
  misc_RNA (1)...(19): siRNA sense strand
caggaaauguacaaacuuc

SEQ ID NO: 966597 - RNA, 19 nt, Homo sapiens
  misc_RNA (1)...(19): siRNA sense strand
ccagaucccugagucuauu

SEQ ID NO: 966598 - RNA, 19 nt, Homo sapiens
  misc_RNA (1)...(19): siRNA sense strand
aaaccuguggcuacaauua

SEQ ID NO: 966599 - RNA, 19 nt, Homo sapiens
  misc_RNA (1)...(19): siRNA sense strand
gcgcugaccuccaccaaac

SEQ ID NO: 966600 - RNA, 19 nt, Homo sapiens
  misc_RNA (1)...(19): siRNA sense strand
ccgaggcucugaccagcua

SEQ ID NO: 966601 - RNA, 19 nt, Homo sapiens
  misc_RNA (1)...(19): siRNA sense strand
gccaggaaauguacaaacu

SEQ ID NO: 966602 - RNA, 19 nt, Homo sapiens
  misc_RNA (1)...(19): siRNA sense strand
ggaaauguacaaacuucug

SEQ ID NO: 966603 - RNA, 19 nt, Homo sapiens
  misc_RNA (1)...(19): siRNA sense strand
gagcagaaaggccuucaca

SEQ ID NO: 966604 - RNA, 19 nt, Homo sapiens
  misc_RNA (1)...(19): siRNA sense strand
gccagcgcaucaucuugua

SEQ ID NO: 966605 - RNA, 19 nt, Homo sapiens
  misc_RNA (1)...(19): siRNA sense strand
uggcuacaauuacaaacaa

SEQ ID NO: 966606 - RNA, 19 nt, Homo sapiens
  misc_RNA (1)...(19): siRNA sense strand
gggugaggguuaccuggaa

SEQ ID NO: 966607 - RNA, 19 nt, Homo sapiens
  misc_RNA (1)...(19): siRNA sense strand
ggaggaaggagcagaaagg

SEQ ID NO: 966608 - RNA, 19 nt, Homo sapiens
  misc_RNA (1)...(19): siRNA sense strand
gucuauggcucuggaacua

SEQ ID NO: 966609 - RNA, 19 nt, Homo sapiens
  misc_RNA (1)...(19): siRNA sense strand
gggcacacaggcaaagaaa

SEQ ID NO: 966610 - RNA, 19 nt, Homo sapiens
  misc_RNA (1)...(19): siRNA sense strand
gcacggaguccuacuucuc

SEQ ID NO: 966611 - RNA, 19 nt, Homo sapiens
  misc_RNA (1)...(19): siRNA sense strand
gcaucaucuuguacgaauu

SEQ ID NO: 966612 - RNA, 19 nt, Homo sapiens
  misc_RNA (1)...(19): siRNA sense strand
ccugagaccacccagaauu

SEQ ID NO: 966613 - RNA, 19 nt, Homo sapiens
  misc_RNA (1)...(19): siRNA sense strand
ucuuugaucugcugacugu

SEQ ID NO: 966614 - RNA, 19 nt, Homo sapiens
  misc_RNA (1)...(19): siRNA sense strand
uguacaaacuucugcucuu

SEQ ID NO: 966615 - RNA, 19 nt, Homo sapiens
  misc_RNA (1)...(19): siRNA sense strand
gauggaggaaggagcagaa

SEQ ID NO: 966616 - RNA, 19 nt, Homo sapiens
  misc_RNA (1)...(19): siRNA sense strand
caucuuguacgaauuaaag

SEQ ID NO: 966617 - RNA, 19 nt, Homo sapiens
  misc_RNA (1)...(19): siRNA sense strand
cgcaucaucuuguacgaau

SEQ ID NO: 966618 - RNA, 19 nt, Homo sapiens
  misc_RNA (1)...(19): siRNA sense strand
ccguggagcugcaggagau

SEQ ID NO: 966619 - RNA, 19 nt, Homo sapiens
  misc_RNA (1)...(19): siRNA sense strand
gcuccucuguggccucugu

SEQ ID NO: 966620 - RNA, 19 nt, Homo sapiens
  misc_RNA (1)...(19): siRNA sense strand
aaacuucugcucuuugauc

SEQ ID NO: 966621 - RNA, 19 nt, Homo sapiens
  misc_RNA (1)...(19): siRNA sense strand
caaaaccuguggcuacaau

SEQ ID NO: 966622 - RNA, 19 nt, Homo sapiens
  misc_RNA (1)...(19): siRNA sense strand
gcuuccugcuccuucuuaa

SEQ ID NO: 966623 - RNA, 19 nt, Homo sapiens
  misc_RNA (1)...(19): siRNA sense strand
ggaggcccaucgcugucuu

SEQ ID NO: 966624 - RNA, 19 nt, Homo sapiens
  misc_RNA (1)...(19): siRNA sense strand
gcccagaucccugagucua

SEQ ID NO: 966625 - RNA, 19 nt, Homo sapiens
  misc_RNA (1)...(19): siRNA sense strand
cggagucgccagaucguuu

SEQ ID NO: 966626 - RNA, 19 nt, Homo sapiens
  misc_RNA (1)...(19): siRNA sense strand
ggugaggguuaccuggaau

SEQ ID NO: 966627 - RNA, 19 nt, Homo sapiens
  misc_RNA (1)...(19): siRNA sense strand
uuaacgugcuggccucugu

SEQ ID NO: 966628 - RNA, 19 nt, Homo sapiens
  misc_RNA (1)...(19): siRNA sense strand
cguggacacugaagaggau

SEQ ID NO: 966629 - RNA, 19 nt, Homo sapiens
  misc_RNA (1)...(19): siRNA sense strand
acggacgccucaucucuga

SEQ ID NO: 966630 - RNA, 19 nt, Homo sapiens
  misc_RNA (1)...(19): siRNA sense strand
gcucauccaguuuccuaga

SEQ ID NO: 966631 - RNA, 19 nt, Homo sapiens
  misc_RNA (1)...(19): siRNA sense strand
guccugcucuucucucucu

SEQ ID NO: 966632 - RNA, 19 nt, Homo sapiens
  misc_RNA (1)...(19): siRNA sense strand
gcucaggaccguguuucuu

SEQ ID NO: 966633 - RNA, 19 nt, Homo sapiens
  misc_RNA (1)...(19): siRNA sense strand
ggaaugguccccucucuuc

SEQ ID NO: 966634 - RNA, 19 nt, Homo sapiens
  misc_RNA (1)...(19): siRNA sense strand
cugagaccacccagaauuu

SEQ ID NO: 966635 - RNA, 19 nt, Homo sapiens
  misc_RNA (1)...(19): siRNA sense strand
ucaaguuccugcugcuuuu

SEQ ID NO: 966636 - RNA, 19 nt, Homo sapiens
  misc_RNA (1)...(19): siRNA sense strand
gucaaguuccugcugcuuu

SEQ ID NO: 966637 - RNA, 19 nt, Homo sapiens
  misc_RNA (1)...(19): siRNA sense strand
gcuuaacacggucaaguuc

SEQ ID NO: 966638 - RNA, 19 nt, Homo sapiens
  misc_RNA (1)...(19): siRNA sense strand
ccaggaaauguacaaacuu

SEQ ID NO: 966639 - RNA, 19 nt, Homo sapiens
  misc_RNA (1)...(19): siRNA sense strand
cacccagaauuuccucuuc

SEQ ID NO: 966640 - RNA, 19 nt, Homo sapiens
  misc_RNA (1)...(19): siRNA sense strand
acacuguggcucuggcuaa

SEQ ID NO: 966641 - RNA, 19 nt, Homo sapiens
  misc_RNA (1)...(19): siRNA sense strand
ugucuucugugcugaacga

SEQ ID NO: 966642 - RNA, 19 nt, Homo sapiens
  misc_RNA (1)...(19): siRNA sense strand
gacggaggcgcagaauaaa

SEQ ID NO: 966643 - RNA, 19 nt, Homo sapiens
  misc_RNA (1)...(19): siRNA sense strand
ucucuucuauggcuucuac

SEQ ID NO: 966644 - RNA, 19 nt, Homo sapiens
  misc_RNA (1)...(19): siRNA sense strand
gcuggccucugugcucaug

SEQ ID NO: 966645 - RNA, 19 nt, Homo sapiens
  misc_RNA (1)...(19): siRNA sense strand
cggaggcgcagaauaaagu

SEQ ID NO: 966646 - RNA, 19 nt, Homo sapiens
  misc_RNA (1)...(19): siRNA sense strand
gcgcugcucauccaguuuc

SEQ ID NO: 966647 - RNA, 19 nt, Homo sapiens
  misc_RNA (1)...(19): siRNA sense strand
ucgcgcugcucauccaguu

SEQ ID NO: 966648 - RNA, 19 nt, Homo sapiens
  misc_RNA (1)...(19): siRNA sense strand
ggccagcaagccaggguuu

SEQ ID NO: 966649 - RNA, 19 nt, Homo sapiens
  misc_RNA (1)...(19): siRNA sense strand
cuauggcucuggaacuaag

SEQ ID NO: 966650 - RNA, 19 nt, Homo sapiens
  misc_RNA (1)...(19): siRNA sense strand
cagaagucacccagacaga

SEQ ID NO: 966651 - RNA, 19 nt, Homo sapiens
  misc_RNA (1)...(19): siRNA sense strand
uaccuuccguccaucuuca

SEQ ID NO: 966652 - RNA, 19 nt, Homo sapiens
  misc_RNA (1)...(19): siRNA sense strand
gcgcaucaucuuguacgaa

SEQ ID NO: 966653 - RNA, 19 nt, Homo sapiens
  misc_RNA (1)...(19): siRNA sense strand
ggagaccaauggauuaaua

SEQ ID NO: 966654 - RNA, 19 nt, Homo sapiens
  misc_RNA (1)...(19): siRNA sense strand
ggaggcaaaugaauaauau

SEQ ID NO: 966655 - RNA, 19 nt, Homo sapiens
  misc_RNA (1)...(19): siRNA sense strand
caaguucucuuucugauga

SEQ ID NO: 966656 - RNA, 19 nt, Homo sapiens
  misc_RNA (1)...(19): siRNA sense strand
ggacuuagguggauucagu

SEQ ID NO: 966657 - RNA, 19 nt, Homo sapiens
  misc_RNA (1)...(19): siRNA sense strand
guaagcgcauguucuguua

SEQ ID NO: 966658 - RNA, 19 nt, Homo sapiens
  misc_RNA (1)...(19): siRNA sense strand
gaaguggaaugcuacaaug

SEQ ID NO: 966659 - RNA, 19 nt, Homo sapiens
  misc_RNA (1)...(19): siRNA sense strand
gaauggaggcaaaugaaua

SEQ ID NO: 966660 - RNA, 19 nt, Homo sapiens
  misc_RNA (1)...(19): siRNA sense strand
guggaaugcuacaauguua

SEQ ID NO: 966661 - RNA, 19 nt, Homo sapiens
  misc_RNA (1)...(19): siRNA sense strand
gcuacaauguuaagagaaa

SEQ ID NO: 966662 - RNA, 19 nt, Homo sapiens
  misc_RNA (1)...(19): siRNA sense strand
ugaaggaaguggaaugcua

SEQ ID NO: 966663 - RNA, 19 nt, Homo sapiens
  misc_RNA (1)...(19): siRNA sense strand
gaagaaauaccaagugagu

SEQ ID NO: 966664 - RNA, 19 nt, Homo sapiens
  misc_RNA (1)...(19): siRNA sense strand
gaucaggacuacuuagaag

SEQ ID NO: 966665 - RNA, 19 nt, Homo sapiens
  misc_RNA (1)...(19): siRNA sense strand
accaacaacuacagaauua

SEQ ID NO: 966666 - RNA, 19 nt, Homo sapiens
  misc_RNA (1)...(19): siRNA sense strand
cagcaacucucuuguaucu

SEQ ID NO: 966667 - RNA, 19 nt, Homo sapiens
  misc_RNA (1)...(19): siRNA sense strand
ucuaugcucucaacaguaa

SEQ ID NO: 966668 - RNA, 19 nt, Homo sapiens
  misc_RNA (1)...(19): siRNA sense strand
gcaccgccauccucaaguu

SEQ ID NO: 966669 - RNA, 19 nt, Homo sapiens
  misc_RNA (1)...(19): siRNA sense strand
gaagugcguuucucugaag

SEQ ID NO: 966670 - RNA, 19 nt, Homo sapiens
  misc_RNA (1)...(19): siRNA sense strand
ggaggagacucuagcagau

SEQ ID NO: 966671 - RNA, 19 nt, Homo sapiens
  misc_RNA (1)...(19): siRNA sense strand
uagaagggcugcugaccaa

SEQ ID NO: 966672 - RNA, 19 nt, Homo sapiens
  misc_RNA (1)...(19): siRNA sense strand
aagaagaaauaccaaguga

SEQ ID NO: 966673 - RNA, 19 nt, Homo sapiens
  misc_RNA (1)...(19): siRNA sense strand
gauccuagccacaauaugu

SEQ ID NO: 966674 - RNA, 19 nt, Homo sapiens
  misc_RNA (1)...(19): siRNA sense strand
cuauauagcucagaacuuc

SEQ ID NO: 966675 - RNA, 19 nt, Homo sapiens
  misc_RNA (1)...(19): siRNA sense strand
gaagaagaaauaccaagug

SEQ ID NO: 966676 - RNA, 19 nt, Homo sapiens
  misc_RNA (1)...(19): siRNA sense strand
gcauggauguggcauaucu

SEQ ID NO: 966677 - RNA, 19 nt, Homo sapiens
  misc_RNA (1)...(19): siRNA sense strand
gggcauggauguggcauau

SEQ ID NO: 966678 - RNA, 19 nt, Homo sapiens
  misc_RNA (1)...(19): siRNA sense strand
gggugacuguguaugaaua

SEQ ID NO: 966679 - RNA, 19 nt, Homo sapiens
  misc_RNA (1)...(19): siRNA sense strand
gcagaauggaggcaaauga

SEQ ID NO: 966680 - RNA, 19 nt, Homo sapiens
  misc_RNA (1)...(19): siRNA sense strand
gaccaacaacuacagaauu

SEQ ID NO: 966681 - RNA, 19 nt, Homo sapiens
  misc_RNA (1)...(19): siRNA sense strand
gcgcuauggugaccuguug

SEQ ID NO: 966682 - RNA, 19 nt, Homo sapiens
  misc_RNA (1)...(19): siRNA sense strand
ggaaguggaaugcuacaau

SEQ ID NO: 966683 - RNA, 19 nt, Homo sapiens
  misc_RNA (1)...(19): siRNA sense strand
ccaagcccaucgugaagaa

SEQ ID NO: 966684 - RNA, 19 nt, Homo sapiens
  misc_RNA (1)...(19): siRNA sense strand
ggaaguucaaguucucuuu

SEQ ID NO: 966685 - RNA, 19 nt, Homo sapiens
  misc_RNA (1)...(19): siRNA sense strand
gaguuaaguugaaggaagu

SEQ ID NO: 966686 - RNA, 19 nt, Homo sapiens
  misc_RNA (1)...(19): siRNA sense strand
uaaaccagcucagaauagu

SEQ ID NO: 966687 - RNA, 19 nt, Homo sapiens
  misc_RNA (1)...(19): siRNA sense strand
gaaugggacuuagguggau

SEQ ID NO: 966688 - RNA, 19 nt, Homo sapiens
  misc_RNA (1)...(19): siRNA sense strand
ugaagaagaucaggacuac

SEQ ID NO: 966689 - RNA, 19 nt, Homo sapiens
  misc_RNA (1)...(19): siRNA sense strand
cauuaggccucuugcaguu

SEQ ID NO: 966690 - RNA, 19 nt, Homo sapiens
  misc_RNA (1)...(19): siRNA sense strand
uuacuggaguuaaguugaa

SEQ ID NO: 966691 - RNA, 19 nt, Homo sapiens
  misc_RNA (1)...(19): siRNA sense strand
caaguuugcagaugccuuu

SEQ ID NO: 966692 - RNA, 19 nt, Homo sapiens
  misc_RNA (1)...(19): siRNA sense strand
guucacagguggcauguac

SEQ ID NO: 966693 - RNA, 19 nt, Homo sapiens
  misc_RNA (1)...(19): siRNA sense strand
ugaagugcguuucucugaa

SEQ ID NO: 966694 - RNA, 19 nt, Homo sapiens
  misc_RNA (1)...(19): siRNA sense strand
gauguggcauaucucaaug

SEQ ID NO: 966695 - RNA, 19 nt, Homo sapiens
  misc_RNA (1)...(19): siRNA sense strand
uauaaaccagcucagaaua

SEQ ID NO: 966696 - RNA, 19 nt, Homo sapiens
  misc_RNA (1)...(19): siRNA sense strand
cagcagcaacucucuugua

SEQ ID NO: 966697 - RNA, 19 nt, Homo sapiens
  misc_RNA (1)...(19): siRNA sense strand
gaagaagaagaaauaccaa

SEQ ID NO: 966698 - RNA, 19 nt, Homo sapiens
  misc_RNA (1)...(19): siRNA sense strand
augaggagaucuauuguau

SEQ ID NO: 966699 - RNA, 19 nt, Homo sapiens
  misc_RNA (1)...(19): siRNA sense strand
guauaaaccagcucagaau

SEQ ID NO: 966700 - RNA, 19 nt, Homo sapiens
  misc_RNA (1)...(19): siRNA sense strand
ggauguggcauaucucaau

SEQ ID NO: 966701 - RNA, 19 nt, Homo sapiens
  misc_RNA (1)...(19): siRNA sense strand
caacaacuacagaauuauc

SEQ ID NO: 966702 - RNA, 19 nt, Homo sapiens
  misc_RNA (1)...(19): siRNA sense strand
gaaguucaaguucucuuuc

SEQ ID NO: 966703 - RNA, 19 nt, Homo sapiens
  misc_RNA (1)...(19): siRNA sense strand
gaccaugacaucuaucuag

SEQ ID NO: 966704 - RNA, 19 nt, Homo sapiens
  misc_RNA (1)...(19): siRNA sense strand
gaaggucuacaacccaguu

SEQ ID NO: 966705 - RNA, 19 nt, Homo sapiens
  misc_RNA (1)...(19): siRNA sense strand
ugaccaagcccaucgugaa

SEQ ID NO: 966706 - RNA, 19 nt, Homo sapiens
  misc_RNA (1)...(19): siRNA sense strand
cacugaagaagaagaaaua

SEQ ID NO: 966707 - RNA, 19 nt, Homo sapiens
  misc_RNA (1)...(19): siRNA sense strand
gcgcaaugacuuucaggaa

SEQ ID NO: 966708 - RNA, 19 nt, Homo sapiens
  misc_RNA (1)...(19): siRNA sense strand
gaaauaccaagugagucua

SEQ ID NO: 966709 - RNA, 19 nt, Homo sapiens
  misc_RNA (1)...(19): siRNA sense strand
gaccaauggauuaauauag

SEQ ID NO: 966710 - RNA, 19 nt, Homo sapiens
  misc_RNA (1)...(19): siRNA sense strand
aagaagaucaggacuacuu

SEQ ID NO: 966711 - RNA, 19 nt, Homo sapiens
  misc_RNA (1)...(19): siRNA sense strand
cagaauggaggcaaaugaa

SEQ ID NO: 966712 - RNA, 19 nt, Homo sapiens
  misc_RNA (1)...(19): siRNA sense strand
aaugguaauucgagacuau

SEQ ID NO: 966713 - RNA, 19 nt, Homo sapiens
  misc_RNA (1)...(19): siRNA sense strand
ccucucugcucguguuuau

SEQ ID NO: 966714 - RNA, 19 nt, Homo sapiens
  misc_RNA (1)...(19): siRNA sense strand
ggaaugcuacaauguuaag

SEQ ID NO: 966715 - RNA, 19 nt, Homo sapiens
  misc_RNA (1)...(19): siRNA sense strand
gcguguagcgccucaguga

SEQ ID NO: 966716 - RNA, 19 nt, Homo sapiens
  misc_RNA (1)...(19): siRNA sense strand
ugcuacagcuggaauaugu

SEQ ID NO: 966717 - RNA, 19 nt, Homo sapiens
  misc_RNA (1)...(19): siRNA sense strand
aagccugcgucuucaauga

SEQ ID NO: 966718 - RNA, 19 nt, Homo sapiens
  misc_RNA (1)...(19): siRNA sense strand
gaagcgcaaugacuuucag

SEQ ID NO: 966719 - RNA, 19 nt, Homo sapiens
  misc_RNA (1)...(19): siRNA sense strand
gcauaucucaauggcuaua

SEQ ID NO: 966720 - RNA, 19 nt, Homo sapiens
  misc_RNA (1)...(19): siRNA sense strand
guucaaguucucuuucuga

SEQ ID NO: 966721 - RNA, 19 nt, Homo sapiens
  misc_RNA (1)...(19): siRNA sense strand
gaucccaggcccaguccua

SEQ ID NO: 966722 - RNA, 19 nt, Homo sapiens
  misc_RNA (1)...(19): siRNA sense strand
ucuugcaguuugauucuaa

SEQ ID NO: 966723 - RNA, 19 nt, Homo sapiens
  misc_RNA (1)...(19): siRNA sense strand
ccaauggauuaauauaggu

SEQ ID NO: 966724 - RNA, 19 nt, Homo sapiens
  misc_RNA (1)...(19): siRNA sense strand
cuacagaauuaucaagcau

SEQ ID NO: 966725 - RNA, 19 nt, Homo sapiens
  misc_RNA (1)...(19): siRNA sense strand
aauggaggcaaaugaauaa

SEQ ID NO: 966726 - RNA, 19 nt, Homo sapiens
  misc_RNA (1)...(19): siRNA sense strand
gaagaucaggacuacuuag

SEQ ID NO: 966727 - RNA, 19 nt, Homo sapiens
  misc_RNA (1)...(19): siRNA sense strand
uggaggcaaaugaauaaua

SEQ ID NO: 966728 - RNA, 19 nt, Homo sapiens
  misc_RNA (1)...(19): siRNA sense strand
aagcgcauguucuguuaug

SEQ ID NO: 966729 - RNA, 19 nt, Homo sapiens
  misc_RNA (1)...(19): siRNA sense strand
gcuauggugaccuguugua

SEQ ID NO: 966730 - RNA, 19 nt, Homo sapiens
  misc_RNA (1)...(19): siRNA sense strand
gaaguacugccuggacguu

SEQ ID NO: 966731 - RNA, 19 nt, Homo sapiens
  misc_RNA (1)...(19): siRNA sense strand
agaagaucaggacuacuua

SEQ ID NO: 966732 - RNA, 19 nt, Homo sapiens
  misc_RNA (1)...(19): siRNA sense strand
ugaagaagaagaaauacca

SEQ ID NO: 966733 - RNA, 19 nt, Homo sapiens
  misc_RNA (1)...(19): siRNA sense strand
ggugaccuguuguacaagu

SEQ ID NO: 966734 - RNA, 19 nt, Homo sapiens
  misc_RNA (1)...(19): siRNA sense strand
ucaggaaguucaaguucuc

SEQ ID NO: 966735 - RNA, 19 nt, Homo sapiens
  misc_RNA (1)...(19): siRNA sense strand
gagaccaauggauuaauau

SEQ ID NO: 966736 - RNA, 19 nt, Homo sapiens
  misc_RNA (1)...(19): siRNA sense strand
agaaccgggugacugugua

SEQ ID NO: 966737 - RNA, 19 nt, Homo sapiens
  misc_RNA (1)...(19): siRNA sense strand
agcagcaacucucuuguau

SEQ ID NO: 966738 - RNA, 19 nt, Homo sapiens
  misc_RNA (1)...(19): siRNA sense strand
ugacuguguaugaauauga

SEQ ID NO: 966739 - RNA, 19 nt, Homo sapiens
  misc_RNA (1)...(19): siRNA sense strand
gaaccgggugacuguguau

SEQ ID NO: 966740 - RNA, 19 nt, Homo sapiens
  misc_RNA (1)...(19): siRNA sense strand
ucucuaugcucucaacagu

SEQ ID NO: 966741 - RNA, 19 nt, Homo sapiens
  misc_RNA (1)...(19): siRNA sense strand
gagaaaccagugggcauug

SEQ ID NO: 966742 - RNA, 19 nt, Homo sapiens
  misc_RNA (1)...(19): siRNA sense strand
gggcgagacccuauuacug

SEQ ID NO: 966743 - RNA, 19 nt, Homo sapiens
  misc_RNA (1)...(19): siRNA sense strand
guaucucuccugaccauga

SEQ ID NO: 966744 - RNA, 19 nt, Homo sapiens
  misc_RNA (1)...(19): siRNA sense strand
gcagacagugugccaugug

SEQ ID NO: 966745 - RNA, 19 nt, Homo sapiens
  misc_RNA (1)...(19): siRNA sense strand
uuaggccucuugcaguuug

SEQ ID NO: 966746 - RNA, 19 nt, Homo sapiens
  misc_RNA (1)...(19): siRNA sense strand
gacuguguaugaauaugau

SEQ ID NO: 966747 - RNA, 19 nt, Homo sapiens
  misc_RNA (1)...(19): siRNA sense strand
gaucuauuguaucugugau

SEQ ID NO: 966748 - RNA, 19 nt, Homo sapiens
  misc_RNA (1)...(19): siRNA sense strand
gcuggaugcacuucacuga

SEQ ID NO: 966749 - RNA, 19 nt, Homo sapiens
  misc_RNA (1)...(19): siRNA sense strand
ugugauaucccagucauga

SEQ ID NO: 966750 - RNA, 19 nt, Homo sapiens
  misc_RNA (1)...(19): siRNA sense strand
gacuaucucuaugcucuca

SEQ ID NO: 966751 - RNA, 19 nt, Homo sapiens
  misc_RNA (1)...(19): siRNA sense strand
uguauaaaccagcucagaa

SEQ ID NO: 966752 - RNA, 19 nt, Homo sapiens
  misc_RNA (1)...(19): siRNA sense strand
auggugaccuguuguacaa

SEQ ID NO: 966753 - RNA, 19 nt, Homo sapiens
  misc_RNA (1)...(19): siRNA sense strand
gcaccgggcugucaaguua

SEQ ID NO: 966754 - RNA, 19 nt, Homo sapiens
  misc_RNA (1)...(19): siRNA sense strand
ccaaggagcuuuagaaaug

SEQ ID NO: 966755 - RNA, 19 nt, Homo sapiens
  misc_RNA (1)...(19): siRNA sense strand
gcaaugagcucagacaaga

SEQ ID NO: 966756 - RNA, 19 nt, Homo sapiens
  misc_RNA (1)...(19): siRNA sense strand
gagcagaagugcacaggua

SEQ ID NO: 966757 - RNA, 19 nt, Homo sapiens
  misc_RNA (1)...(19): siRNA sense strand
gaacuggaacggcauaaua

SEQ ID NO: 966758 - RNA, 19 nt, Homo sapiens
  misc_RNA (1)...(19): siRNA sense strand
caagaaauguugaaaguag

SEQ ID NO: 966759 - RNA, 19 nt, Homo sapiens
  misc_RNA (1)...(19): siRNA sense strand
gaaauuaacaggcuucgaa

SEQ ID NO: 966760 - RNA, 19 nt, Homo sapiens
  misc_RNA (1)...(19): siRNA sense strand
ggagauaugugaucaccaa

SEQ ID NO: 966761 - RNA, 19 nt, Homo sapiens
  misc_RNA (1)...(19): siRNA sense strand
ccaaugacaucaaguguga

SEQ ID NO: 966762 - RNA, 19 nt, Homo sapiens
  misc_RNA (1)...(19): siRNA sense strand
gcacagguauucuugaaca

SEQ ID NO: 966763 - RNA, 19 nt, Homo sapiens
  misc_RNA (1)...(19): siRNA sense strand
gagaauggaucuuugaagu

SEQ ID NO: 966764 - RNA, 19 nt, Homo sapiens
  misc_RNA (1)...(19): siRNA sense strand
ccacaaagcccaagcaaga

SEQ ID NO: 966765 - RNA, 19 nt, Homo sapiens
  misc_RNA (1)...(19): siRNA sense strand
gagagaagcuacucaacau

SEQ ID NO: 966766 - RNA, 19 nt, Homo sapiens
  misc_RNA (1)...(19): siRNA sense strand
ccagugacauugaugagua

SEQ ID NO: 966767 - RNA, 19 nt, Homo sapiens
  misc_RNA (1)...(19): siRNA sense strand
ggcaaacggugaaauuaaa

SEQ ID NO: 966768 - RNA, 19 nt, Homo sapiens
  misc_RNA (1)...(19): siRNA sense strand
caacauccauaacucaaga

SEQ ID NO: 966769 - RNA, 19 nt, Homo sapiens
  misc_RNA (1)...(19): siRNA sense strand
agagaaagaucuacuggaa

SEQ ID NO: 966770 - RNA, 19 nt, Homo sapiens
  misc_RNA (1)...(19): siRNA sense strand
gcugucaaguuacacaaua

SEQ ID NO: 966771 - RNA, 19 nt, Homo sapiens
  misc_RNA (1)...(19): siRNA sense strand
ggaaaugcauuacggacau

SEQ ID NO: 966772 - RNA, 19 nt, Homo sapiens
  misc_RNA (1)...(19): siRNA sense strand
ccauagcacugcagaagaa

SEQ ID NO: 966773 - RNA, 19 nt, Homo sapiens
  misc_RNA (1)...(19): siRNA sense strand
aaacauacauggaaaugca

SEQ ID NO: 966774 - RNA, 19 nt, Homo sapiens
  misc_RNA (1)...(19): siRNA sense strand
gaauggaucuuugaagucu

SEQ ID NO: 966775 - RNA, 19 nt, Homo sapiens
  misc_RNA (1)...(19): siRNA sense strand
gccagaugcuuccgacuuu

SEQ ID NO: 966776 - RNA, 19 nt, Homo sapiens
  misc_RNA (1)...(19): siRNA sense strand
ucagugagcuagaaaguag

SEQ ID NO: 966777 - RNA, 19 nt, Homo sapiens
  misc_RNA (1)...(19): siRNA sense strand
gaucaaagacaugaaagaa

SEQ ID NO: 966778 - RNA, 19 nt, Homo sapiens
  misc_RNA (1)...(19): siRNA sense strand
gagaagcugaugaaucuuu

SEQ ID NO: 966779 - RNA, 19 nt, Homo sapiens
  misc_RNA (1)...(19): siRNA sense strand
auaaucaacucaucaguga

SEQ ID NO: 966780 - RNA, 19 nt, Homo sapiens
  misc_RNA (1)...(19): siRNA sense strand
gaaaugauuaaacgucuga

SEQ ID NO: 966781 - RNA, 19 nt, Homo sapiens
  misc_RNA (1)...(19): siRNA sense strand
ucaaagacaugaaagaaac

SEQ ID NO: 966782 - RNA, 19 nt, Homo sapiens
  misc_RNA (1)...(19): siRNA sense strand
gcucagacaagaauuacua

SEQ ID NO: 966783 - RNA, 19 nt, Homo sapiens
  misc_RNA (1)...(19): siRNA sense strand
ggaaaaggauuauucauac

SEQ ID NO: 966784 - RNA, 19 nt, Homo sapiens
  misc_RNA (1)...(19): siRNA sense strand
ccaaacagcguaagugaau

SEQ ID NO: 966785 - RNA, 19 nt, Homo sapiens
  misc_RNA (1)...(19): siRNA sense strand
gggcagagcagcuaaguca

SEQ ID NO: 966786 - RNA, 19 nt, Homo sapiens
  misc_RNA (1)...(19): siRNA sense strand
cagcagcaguugaccugua

SEQ ID NO: 966787 - RNA, 19 nt, Homo sapiens
  misc_RNA (1)...(19): siRNA sense strand
ggaacugucuugcaaugag

SEQ ID NO: 966788 - RNA, 19 nt, Homo sapiens
  misc_RNA (1)...(19): siRNA sense strand
gagaaacugaucuaucuug

SEQ ID NO: 966789 - RNA, 19 nt, Homo sapiens
  misc_RNA (1)...(19): siRNA sense strand
gaaaccauauuugaauugg

SEQ ID NO: 966790 - RNA, 19 nt, Homo sapiens
  misc_RNA (1)...(19): siRNA sense strand
gagcagaaccagccuaaag

SEQ ID NO: 966791 - RNA, 19 nt, Homo sapiens
  misc_RNA (1)...(19): siRNA sense strand
uuaaacgucugaaggaaga

SEQ ID NO: 966792 - RNA, 19 nt, Homo sapiens
  misc_RNA (1)...(19): siRNA sense strand
gauuaaacgucugaaggaa

SEQ ID NO: 966793 - RNA, 19 nt, Homo sapiens
  misc_RNA (1)...(19): siRNA sense strand
uaacaggcuucgaagugaa

SEQ ID NO: 966794 - RNA, 19 nt, Homo sapiens
  misc_RNA (1)...(19): siRNA sense strand
caaggagcuuuagaaauga

SEQ ID NO: 966795 - RNA, 19 nt, Homo sapiens
  misc_RNA (1)...(19): siRNA sense strand
gagaagcuacucaacauuc

SEQ ID NO: 966796 - RNA, 19 nt, Homo sapiens
  misc_RNA (1)...(19): siRNA sense strand
acaucaggcuccucaagua

SEQ ID NO: 966797 - RNA, 19 nt, Homo sapiens
  misc_RNA (1)...(19): siRNA sense strand
ugaagacucugaccaagca

SEQ ID NO: 966798 - RNA, 19 nt, Homo sapiens
  misc_RNA (1)...(19): siRNA sense strand
gaucuuugaagucucauuu

SEQ ID NO: 966799 - RNA, 19 nt, Homo sapiens
  misc_RNA (1)...(19): siRNA sense strand
gugcacagguauucuugaa

SEQ ID NO: 966800 - RNA, 19 nt, Homo sapiens
  misc_RNA (1)...(19): siRNA sense strand
augagaagcugguggauga

SEQ ID NO: 966801 - RNA, 19 nt, Homo sapiens
  misc_RNA (1)...(19): siRNA sense strand
gagaagaacaagaacuuuc

SEQ ID NO: 966802 - RNA, 19 nt, Homo sapiens
  misc_RNA (1)...(19): siRNA sense strand
gcagagaucaaagacauga

SEQ ID NO: 966803 - RNA, 19 nt, Homo sapiens
  misc_RNA (1)...(19): siRNA sense strand
gagcagcuaagucaagaaa

SEQ ID NO: 966804 - RNA, 19 nt, Homo sapiens
  misc_RNA (1)...(19): siRNA sense strand
caacaaaugguacaggaau

SEQ ID NO: 966805 - RNA, 19 nt, Homo sapiens
  misc_RNA (1)...(19): siRNA sense strand
uggaacggcauaauaauaa

SEQ ID NO: 966806 - RNA, 19 nt, Homo sapiens
  misc_RNA (1)...(19): siRNA sense strand
agacaagaauuacuaaagg

SEQ ID NO: 966807 - RNA, 19 nt, Homo sapiens
  misc_RNA (1)...(19): siRNA sense strand
uuggaagaguguagaguua

SEQ ID NO: 966808 - RNA, 19 nt, Homo sapiens
  misc_RNA (1)...(19): siRNA sense strand
gaaugaagguggagaaaag

SEQ ID NO: 966809 - RNA, 19 nt, Homo sapiens
  misc_RNA (1)...(19): siRNA sense strand
gcuagaaaguagugugauc

SEQ ID NO: 966810 - RNA, 19 nt, Homo sapiens
  misc_RNA (1)...(19): siRNA sense strand
ugaaggagauaugugauca

SEQ ID NO: 966811 - RNA, 19 nt, Homo sapiens
  misc_RNA (1)...(19): siRNA sense strand
agaaagaucuacuggaacu

SEQ ID NO: 966812 - RNA, 19 nt, Homo sapiens
  misc_RNA (1)...(19): siRNA sense strand
gagcugcgaaguucaagaa

SEQ ID NO: 966813 - RNA, 19 nt, Homo sapiens
  misc_RNA (1)...(19): siRNA sense strand
gaagugcacagguauucuu

SEQ ID NO: 966814 - RNA, 19 nt, Homo sapiens
  misc_RNA (1)...(19): siRNA sense strand
caagagcgaguaaagaaug

SEQ ID NO: 966815 - RNA, 19 nt, Homo sapiens
  misc_RNA (1)...(19): siRNA sense strand
ugacacggaaccuaugaua

SEQ ID NO: 966816 - RNA, 19 nt, Homo sapiens
  misc_RNA (1)...(19): siRNA sense strand
uuauugaacuggagcagaa

SEQ ID NO: 966817 - RNA, 19 nt, Homo sapiens
  misc_RNA (1)...(19): siRNA sense strand
agaaacugaucuaucuuga

SEQ ID NO: 966818 - RNA, 19 nt, Homo sapiens
  misc_RNA (1)...(19): siRNA sense strand
ggagaagaacaagaacuuu

SEQ ID NO: 966819 - RNA, 19 nt, Homo sapiens
  misc_RNA (1)...(19): siRNA sense strand
uuagagacauccuuucauc

SEQ ID NO: 966820 - RNA, 19 nt, Homo sapiens
  misc_RNA (1)...(19): siRNA sense strand
aggagaaacugaucuaucu

SEQ ID NO: 966821 - RNA, 19 nt, Homo sapiens
  misc_RNA (1)...(19): siRNA sense strand
cugcgaaguucaagaaaug

SEQ ID NO: 966822 - RNA, 19 nt, Homo sapiens
  misc_RNA (1)...(19): siRNA sense strand
uuaacaggcuucgaaguga

SEQ ID NO: 966823 - RNA, 19 nt, Homo sapiens
  misc_RNA (1)...(19): siRNA sense strand
aaaccaaggagcuuuagaa

SEQ ID NO: 966824 - RNA, 19 nt, Homo sapiens
  misc_RNA (1)...(19): siRNA sense strand
augagaagcugaugaaucu

SEQ ID NO: 966825 - RNA, 19 nt, Homo sapiens
  misc_RNA (1)...(19): siRNA sense strand
gagcuagaaaguaguguga

SEQ ID NO: 966826 - RNA, 19 nt, Homo sapiens
  misc_RNA (1)...(19): siRNA sense strand
gcugcgaaguucaagaaau

SEQ ID NO: 966827 - RNA, 19 nt, Homo sapiens
  misc_RNA (1)...(19): siRNA sense strand
gacagcaggugcccaacau

SEQ ID NO: 966828 - RNA, 19 nt, Homo sapiens
  misc_RNA (1)...(19): siRNA sense strand
ccacgggaauuuucaguaa

SEQ ID NO: 966829 - RNA, 19 nt, Homo sapiens
  misc_RNA (1)...(19): siRNA sense strand
ugaucaagcuggaggaaca

SEQ ID NO: 966830 - RNA, 19 nt, Homo sapiens
  misc_RNA (1)...(19): siRNA sense strand
agacaugaaagaaaccaua

SEQ ID NO: 966831 - RNA, 19 nt, Homo sapiens
  misc_RNA (1)...(19): siRNA sense strand
gccuaaagcugcaagaaaa

SEQ ID NO: 966832 - RNA, 19 nt, Homo sapiens
  misc_RNA (1)...(19): siRNA sense strand
cgacucagcaggcucaaga

SEQ ID NO: 966833 - RNA, 19 nt, Homo sapiens
  misc_RNA (1)...(19): siRNA sense strand
gcggaagguugaggaagaa

SEQ ID NO: 966834 - RNA, 19 nt, Homo sapiens
  misc_RNA (1)...(19): siRNA sense strand
gaaagagagaagcuacuca

SEQ ID NO: 966835 - RNA, 19 nt, Homo sapiens
  misc_RNA (1)...(19): siRNA sense strand
uacaagagcgaguaaagaa

SEQ ID NO: 966836 - RNA, 19 nt, Homo sapiens
  misc_RNA (1)...(19): siRNA sense strand
cagagcagcuaagucaaga

SEQ ID NO: 966837 - RNA, 19 nt, Homo sapiens
  misc_RNA (1)...(19): siRNA sense strand
cgaagugaacuaaagaaau

SEQ ID NO: 966838 - RNA, 19 nt, Homo sapiens
  misc_RNA (1)...(19): siRNA sense strand
ugaccaagcagaugaagga

SEQ ID NO: 966839 - RNA, 19 nt, Homo sapiens
  misc_RNA (1)...(19): siRNA sense strand
aaaggcaaacggugaaauu

SEQ ID NO: 966840 - RNA, 19 nt, Homo sapiens
  misc_RNA (1)...(19): siRNA sense strand
uaucagaccagcaacaaau

SEQ ID NO: 966841 - RNA, 19 nt, Homo sapiens
  misc_RNA (1)...(19): siRNA sense strand
gaacuacaggcuacucuac

SEQ ID NO: 966842 - RNA, 19 nt, Homo sapiens
  misc_RNA (1)...(19): siRNA sense strand
caaacagcguaagugaauu

SEQ ID NO: 966843 - RNA, 19 nt, Homo sapiens
  misc_RNA (1)...(19): siRNA sense strand
gcacauuacagcagagaca

SEQ ID NO: 966844 - RNA, 19 nt, Homo sapiens
  misc_RNA (1)...(19): siRNA sense strand
gaaaugcauuacggacauc

SEQ ID NO: 966845 - RNA, 19 nt, Homo sapiens
  misc_RNA (1)...(19): siRNA sense strand
gcagcuaagucaagaaaau

SEQ ID NO: 966846 - RNA, 19 nt, Homo sapiens
  misc_RNA (1)...(19): siRNA sense strand
acacaauaaucaacucauc

SEQ ID NO: 966847 - RNA, 19 nt, Homo sapiens
  misc_RNA (1)...(19): siRNA sense strand
gaacagcugagcagaacca

SEQ ID NO: 966848 - RNA, 19 nt, Homo sapiens
  misc_RNA (1)...(19): siRNA sense strand
gcagaagugcacagguauu

SEQ ID NO: 966849 - RNA, 19 nt, Homo sapiens
  misc_RNA (1)...(19): siRNA sense strand
aaacagcguaagugaauug

SEQ ID NO: 966850 - RNA, 19 nt, Homo sapiens
  misc_RNA (1)...(19): siRNA sense strand
uggcuucccucacagagaa

SEQ ID NO: 966851 - RNA, 19 nt, Homo sapiens
  misc_RNA (1)...(19): siRNA sense strand
gaacggcauaauaauaaca

SEQ ID NO: 966852 - RNA, 19 nt, Homo sapiens
  misc_RNA (1)...(19): siRNA sense strand
ugagcucagacaagaauua

SEQ ID NO: 966853 - RNA, 19 nt, Homo sapiens
  misc_RNA (1)...(19): siRNA sense strand
ggaaucagcucaauauguu

SEQ ID NO: 966854 - RNA, 19 nt, Homo sapiens
  misc_RNA (1)...(19): siRNA sense strand
gagcagcaauaauaacuuu

SEQ ID NO: 966855 - RNA, 19 nt, Homo sapiens
  misc_RNA (1)...(19): siRNA sense strand
ugacauugguggauaaauu

SEQ ID NO: 966856 - RNA, 19 nt, Homo sapiens
  misc_RNA (1)...(19): siRNA sense strand
ggaaagauacucagugaau

SEQ ID NO: 966857 - RNA, 19 nt, Homo sapiens
  misc_RNA (1)...(19): siRNA sense strand
ggagauggcuuugacuuuc

SEQ ID NO: 966858 - RNA, 19 nt, Homo sapiens
  misc_RNA (1)...(19): siRNA sense strand
gaaagauacucagugaaug

SEQ ID NO: 966859 - RNA, 19 nt, Homo sapiens
  misc_RNA (1)...(19): siRNA sense strand
caaauaagcccacaacagu

SEQ ID NO: 966860 - RNA, 19 nt, Homo sapiens
  misc_RNA (1)...(19): siRNA sense strand
acacagacacuuuaucuaa

SEQ ID NO: 966861 - RNA, 19 nt, Homo sapiens
  misc_RNA (1)...(19): siRNA sense strand
gagaugaugcuguaguuaa

SEQ ID NO: 966862 - RNA, 19 nt, Homo sapiens
  misc_RNA (1)...(19): siRNA sense strand
guaacucucugggauguaa

SEQ ID NO: 966863 - RNA, 19 nt, Homo sapiens
  misc_RNA (1)...(19): siRNA sense strand
caaacgaaguguuaaugug

SEQ ID NO: 966864 - RNA, 19 nt, Homo sapiens
  misc_RNA (1)...(19): siRNA sense strand
ggucacaucuggugcugaa

SEQ ID NO: 966865 - RNA, 19 nt, Homo sapiens
  misc_RNA (1)...(19): siRNA sense strand
ucaaacaguuagcaaaguu

SEQ ID NO: 966866 - RNA, 19 nt, Homo sapiens
  misc_RNA (1)...(19): siRNA sense strand
auagggacauugugaauuu

SEQ ID NO: 966867 - RNA, 19 nt, Homo sapiens
  misc_RNA (1)...(19): siRNA sense strand
cuaaauaccucuccaucau

SEQ ID NO: 966868 - RNA, 19 nt, Homo sapiens
  misc_RNA (1)...(19): siRNA sense strand
ccacacacaucaccacaug

SEQ ID NO: 966869 - RNA, 19 nt, Homo sapiens
  misc_RNA (1)...(19): siRNA sense strand
gcauaaacacagacacuuu

SEQ ID NO: 966870 - RNA, 19 nt, Homo sapiens
  misc_RNA (1)...(19): siRNA sense strand
ggaaauaaccggcaaaaug

SEQ ID NO: 966871 - RNA, 19 nt, Homo sapiens
  misc_RNA (1)...(19): siRNA sense strand
gaaagacuacgagaagaaa

SEQ ID NO: 966872 - RNA, 19 nt, Homo sapiens
  misc_RNA (1)...(19): siRNA sense strand
caagacaucugugcagugu

SEQ ID NO: 966873 - RNA, 19 nt, Homo sapiens
  misc_RNA (1)...(19): siRNA sense strand
gacauguucucaccuauca

SEQ ID NO: 966874 - RNA, 19 nt, Homo sapiens
  misc_RNA (1)...(19): siRNA sense strand
agacaucugugcaguguau

SEQ ID NO: 966875 - RNA, 19 nt, Homo sapiens
  misc_RNA (1)...(19): siRNA sense strand
gcugaaaguggaaaucuaa

SEQ ID NO: 966876 - RNA, 19 nt, Homo sapiens
  misc_RNA (1)...(19): siRNA sense strand
gauagcaucuucugucacu

SEQ ID NO: 966877 - RNA, 19 nt, Homo sapiens
  misc_RNA (1)...(19): siRNA sense strand
gaaauugaagcccaguuga

SEQ ID NO: 966878 - RNA, 19 nt, Homo sapiens
  misc_RNA (1)...(19): siRNA sense strand
guaagcggaggccuaaaua

SEQ ID NO: 966879 - RNA, 19 nt, Homo sapiens
  misc_RNA (1)...(19): siRNA sense strand
gggaagugaugaguccaua

SEQ ID NO: 966880 - RNA, 19 nt, Homo sapiens
  misc_RNA (1)...(19): siRNA sense strand
uaaaggcuguucaaauaag

SEQ ID NO: 966881 - RNA, 19 nt, Homo sapiens
  misc_RNA (1)...(19): siRNA sense strand
caucagugcucacaagaca

SEQ ID NO: 966882 - RNA, 19 nt, Homo sapiens
  misc_RNA (1)...(19): siRNA sense strand
uugaaguacuccuuguuua

SEQ ID NO: 966883 - RNA, 19 nt, Homo sapiens
  misc_RNA (1)...(19): siRNA sense strand
uagcaaaguuggucacauc

SEQ ID NO: 966884 - RNA, 19 nt, Homo sapiens
  misc_RNA (1)...(19): siRNA sense strand
uaugggaucuccagggaaa

SEQ ID NO: 966885 - RNA, 19 nt, Homo sapiens
  misc_RNA (1)...(19): siRNA sense strand
ugaaguacuccuuguuuaa

SEQ ID NO: 966886 - RNA, 19 nt, Homo sapiens
  misc_RNA (1)...(19): siRNA sense strand
guucaucgaucucuuaagg

SEQ ID NO: 966887 - RNA, 19 nt, Homo sapiens
  misc_RNA (1)...(19): siRNA sense strand
cagagaugaugcuguaguu

SEQ ID NO: 966888 - RNA, 19 nt, Homo sapiens
  misc_RNA (1)...(19): siRNA sense strand
cuacauugcuucuggaucu

SEQ ID NO: 966889 - RNA, 19 nt, Homo sapiens
  misc_RNA (1)...(19): siRNA sense strand
caaaauaguugucucaagu

SEQ ID NO: 966890 - RNA, 19 nt, Homo sapiens
  misc_RNA (1)...(19): siRNA sense strand
aaacgaaguguuaauguga

SEQ ID NO: 966891 - RNA, 19 nt, Homo sapiens
  misc_RNA (1)...(19): siRNA sense strand
uaacagcugagucuaagaa

SEQ ID NO: 966892 - RNA, 19 nt, Homo sapiens
  misc_RNA (1)...(19): siRNA sense strand
gcaacugaaugaaaugcau

SEQ ID NO: 966893 - RNA, 19 nt, Homo sapiens
  misc_RNA (1)...(19): siRNA sense strand
ggauguaaauagucagagu

SEQ ID NO: 966894 - RNA, 19 nt, Homo sapiens
  misc_RNA (1)...(19): siRNA sense strand
uuuaguggcugaaauugaa

SEQ ID NO: 966895 - RNA, 19 nt, Homo sapiens
  misc_RNA (1)...(19): siRNA sense strand
ggaaacguuggaugacuuu

SEQ ID NO: 966896 - RNA, 19 nt, Homo sapiens
  misc_RNA (1)...(19): siRNA sense strand
gccagagaaugaaauugaa

SEQ ID NO: 966897 - RNA, 19 nt, Homo sapiens
  misc_RNA (1)...(19): siRNA sense strand
aaacaggaaucuaaagacu

SEQ ID NO: 966898 - RNA, 19 nt, Homo sapiens
  misc_RNA (1)...(19): siRNA sense strand
ccucagauuugcuucauca

SEQ ID NO: 966899 - RNA, 19 nt, Homo sapiens
  misc_RNA (1)...(19): siRNA sense strand
gaauugcucuuuguaacca

SEQ ID NO: 966900 - RNA, 19 nt, Homo sapiens
  misc_RNA (1)...(19): siRNA sense strand
guggaggaguucagaauuc

SEQ ID NO: 966901 - RNA, 19 nt, Homo sapiens
  misc_RNA (1)...(19): siRNA sense strand
ccauaacuuugacagugua

SEQ ID NO: 966902 - RNA, 19 nt, Homo sapiens
  misc_RNA (1)...(19): siRNA sense strand
cuggaaagauacucaguga

SEQ ID NO: 966903 - RNA, 19 nt, Homo sapiens
  misc_RNA (1)...(19): siRNA sense strand
caaguaagaagcuagugaa

SEQ ID NO: 966904 - RNA, 19 nt, Homo sapiens
  misc_RNA (1)...(19): siRNA sense strand
uaaauagucagaguccaua

SEQ ID NO: 966905 - RNA, 19 nt, Homo sapiens
  misc_RNA (1)...(19): siRNA sense strand
cauggaaucagcucaauau

SEQ ID NO: 966906 - RNA, 19 nt, Homo sapiens
  misc_RNA (1)...(19): siRNA sense strand
aaagauacucagugaauga

SEQ ID NO: 966907 - RNA, 19 nt, Homo sapiens
  misc_RNA (1)...(19): siRNA sense strand
ggaaagaggaaaaugaaaa

SEQ ID NO: 966908 - RNA, 19 nt, Homo sapiens
  misc_RNA (1)...(19): siRNA sense strand
uaguuuaggugacauguuc

SEQ ID NO: 966909 - RNA, 19 nt, Homo sapiens
  misc_RNA (1)...(19): siRNA sense strand
gaccaucagugcucacaag

SEQ ID NO: 966910 - RNA, 19 nt, Homo sapiens
  misc_RNA (1)...(19): siRNA sense strand
guccauaccauaacuuuga

SEQ ID NO: 966911 - RNA, 19 nt, Homo sapiens
  misc_RNA (1)...(19): siRNA sense strand
aaauaguugucucaaguug

SEQ ID NO: 966912 - RNA, 19 nt, Homo sapiens
  misc_RNA (1)...(19): siRNA sense strand
caucuaaccaaacaagaaa

SEQ ID NO: 966913 - RNA, 19 nt, Homo sapiens
  misc_RNA (1)...(19): siRNA sense strand
caggauuucuccagcuuug

SEQ ID NO: 966914 - RNA, 19 nt, Homo sapiens
  misc_RNA (1)...(19): siRNA sense strand
ccacaacagugaacaaacg

SEQ ID NO: 966915 - RNA, 19 nt, Homo sapiens
  misc_RNA (1)...(19): siRNA sense strand
guaagaagcuagugaaaac

SEQ ID NO: 966916 - RNA, 19 nt, Homo sapiens
  misc_RNA (1)...(19): siRNA sense strand
gguaguaaccagucuguuc

SEQ ID NO: 966917 - RNA, 19 nt, Homo sapiens
  misc_RNA (1)...(19): siRNA sense strand
gaaguacuccuuguuuaag

SEQ ID NO: 966918 - RNA, 19 nt, Homo sapiens
  misc_RNA (1)...(19): siRNA sense strand
uguuggagcagcaauaaua

SEQ ID NO: 966919 - RNA, 19 nt, Homo sapiens
  misc_RNA (1)...(19): siRNA sense strand
gccgacagcauuggaaaua

SEQ ID NO: 966920 - RNA, 19 nt, Homo sapiens
  misc_RNA (1)...(19): siRNA sense strand
gaagcccaguugauaugug

SEQ ID NO: 966921 - RNA, 19 nt, Homo sapiens
  misc_RNA (1)...(19): siRNA sense strand
ucuaugacauugguggaua

SEQ ID NO: 966922 - RNA, 19 nt, Homo sapiens
  misc_RNA (1)...(19): siRNA sense strand
gaaaacaggaaucuaaaga

SEQ ID NO: 966923 - RNA, 19 nt, Homo sapiens
  misc_RNA (1)...(19): siRNA sense strand
guacuccacuguucuuacu

SEQ ID NO: 966924 - RNA, 19 nt, Homo sapiens
  misc_RNA (1)...(19): siRNA sense strand
uaacugcgguagauuucau

SEQ ID NO: 966925 - RNA, 19 nt, Homo sapiens
  misc_RNA (1)...(19): siRNA sense strand
caaccuaugacaucagcua

SEQ ID NO: 966926 - RNA, 19 nt, Homo sapiens
  misc_RNA (1)...(19): siRNA sense strand
ugaaagacuacgagaagaa

SEQ ID NO: 966927 - RNA, 19 nt, Homo sapiens
  misc_RNA (1)...(19): siRNA sense strand
cauaugcaacugaaugaaa

SEQ ID NO: 966928 - RNA, 19 nt, Homo sapiens
  misc_RNA (1)...(19): siRNA sense strand
gcaccugccacguccauug

SEQ ID NO: 966929 - RNA, 19 nt, Homo sapiens
  misc_RNA (1)...(19): siRNA sense strand
gagauggcuuugacuuucu

SEQ ID NO: 966930 - RNA, 19 nt, Homo sapiens
  misc_RNA (1)...(19): siRNA sense strand
aaacacagacacuuuaucu

SEQ ID NO: 966931 - RNA, 19 nt, Homo sapiens
  misc_RNA (1)...(19): siRNA sense strand
gguaagcggaggccuaaau

SEQ ID NO: 966932 - RNA, 19 nt, Homo sapiens
  misc_RNA (1)...(19): siRNA sense strand
aaguggagaugauuaaaca

SEQ ID NO: 966933 - RNA, 19 nt, Homo sapiens
  misc_RNA (1)...(19): siRNA sense strand
gcaaguggagaugauuaaa

SEQ ID NO: 966934 - RNA, 19 nt, Homo sapiens
  misc_RNA (1)...(19): siRNA sense strand
guaaaccuguuccacuuuu

SEQ ID NO: 966935 - RNA, 19 nt, Homo sapiens
  misc_RNA (1)...(19): siRNA sense strand
cucagugaaugaagguuua

SEQ ID NO: 966936 - RNA, 19 nt, Homo sapiens
  misc_RNA (1)...(19): siRNA sense strand
cgacagcauuggaaauaac

SEQ ID NO: 966937 - RNA, 19 nt, Homo sapiens
  misc_RNA (1)...(19): siRNA sense strand
gcaggaaaaccucagauuu

SEQ ID NO: 966938 - RNA, 19 nt, Homo sapiens
  misc_RNA (1)...(19): siRNA sense strand
ugucucaaguugcaaaugu

SEQ ID NO: 966939 - RNA, 19 nt, Homo sapiens
  misc_RNA (1)...(19): siRNA sense strand
ccacguccauugccacagu

SEQ ID NO: 966940 - RNA, 19 nt, Homo sapiens
  misc_RNA (1)...(19): siRNA sense strand
ucucuuaguggugaaauua

SEQ ID NO: 966941 - RNA, 19 nt, Homo sapiens
  misc_RNA (1)...(19): siRNA sense strand
ccaguucacucucagaaaa

SEQ ID NO: 966942 - RNA, 19 nt, Homo sapiens
  misc_RNA (1)...(19): siRNA sense strand
cuaaagacuccuucaaaca

SEQ ID NO: 966943 - RNA, 19 nt, Homo sapiens
  misc_RNA (1)...(19): siRNA sense strand
ucuaaagacuccuucaaac

SEQ ID NO: 966944 - RNA, 19 nt, Homo sapiens
  misc_RNA (1)...(19): siRNA sense strand
ggaaacagacaguggaaaa

SEQ ID NO: 966945 - RNA, 19 nt, Homo sapiens
  misc_RNA (1)...(19): siRNA sense strand
gacacuuuaucuaaggaaa

SEQ ID NO: 966946 - RNA, 19 nt, Homo sapiens
  misc_RNA (1)...(19): siRNA sense strand
auguugaaaucaccaguua

SEQ ID NO: 966947 - RNA, 19 nt, Homo sapiens
  misc_RNA (1)...(19): siRNA sense strand
ucaucgaucucuuaaggau

SEQ ID NO: 966948 - RNA, 19 nt, Homo sapiens
  misc_RNA (1)...(19): siRNA sense strand
uaaagacuccuucaaacag

SEQ ID NO: 966949 - RNA, 19 nt, Homo sapiens
  misc_RNA (1)...(19): siRNA sense strand
cuaugacauugguggauaa

SEQ ID NO: 966950 - RNA, 19 nt, Homo sapiens
  misc_RNA (1)...(19): siRNA sense strand
agucagaguccauaccaua

SEQ ID NO: 966951 - RNA, 19 nt, Homo sapiens
  misc_RNA (1)...(19): siRNA sense strand
guaaauagucagaguccau

SEQ ID NO: 966952 - RNA, 19 nt, Homo sapiens
  misc_RNA (1)...(19): siRNA sense strand
uggagaugauuaaacaguu

SEQ ID NO: 966953 - RNA, 19 nt, Homo sapiens
  misc_RNA (1)...(19): siRNA sense strand
cgaaugaggugcagaacau

SEQ ID NO: 966954 - RNA, 19 nt, Homo sapiens
  misc_RNA (1)...(19): siRNA sense strand
caaccuguuugccauguuu

SEQ ID NO: 966955 - RNA, 19 nt, Homo sapiens
  misc_RNA (1)...(19): siRNA sense strand
gagcccaccuccaaugaga

SEQ ID NO: 966956 - RNA, 19 nt, Homo sapiens
  misc_RNA (1)...(19): siRNA sense strand
gagaagaucaaccuguuug

SEQ ID NO: 966957 - RNA, 19 nt, Homo sapiens
  misc_RNA (1)...(19): siRNA sense strand
ggcacgagcuccugcagaa

SEQ ID NO: 966958 - RNA, 19 nt, Homo sapiens
  misc_RNA (1)...(19): siRNA sense strand
caaagcggaucaagaagag

SEQ ID NO: 966959 - RNA, 19 nt, Homo sapiens
  misc_RNA (1)...(19): siRNA sense strand
ggaggaagaggaagaagga

SEQ ID NO: 966960 - RNA, 19 nt, Homo sapiens
  misc_RNA (1)...(19): siRNA sense strand
ccugaaggcugcacgaaug

SEQ ID NO: 966961 - RNA, 19 nt, Homo sapiens
  misc_RNA (1)...(19): siRNA sense strand
gggacuaugugcuauguca

SEQ ID NO: 966962 - RNA, 19 nt, Homo sapiens
  misc_RNA (1)...(19): siRNA sense strand
ccugauggcuggugugguu

SEQ ID NO: 966963 - RNA, 19 nt, Homo sapiens
  misc_RNA (1)...(19): siRNA sense strand
ggacacagaacucauggau

SEQ ID NO: 966964 - RNA, 19 nt, Homo sapiens
  misc_RNA (1)...(19): siRNA sense strand
ggagaagaucaaccuguuu

SEQ ID NO: 966965 - RNA, 19 nt, Homo sapiens
  misc_RNA (1)...(19): siRNA sense strand
ggaagaagaagaggaggaa

SEQ ID NO: 966966 - RNA, 19 nt, Homo sapiens
  misc_RNA (1)...(19): siRNA sense strand
gcuacaagaacuaccgaua

SEQ ID NO: 966967 - RNA, 19 nt, Homo sapiens
  misc_RNA (1)...(19): siRNA sense strand
ucgcuacccugcuguuauu

SEQ ID NO: 966968 - RNA, 19 nt, Homo sapiens
  misc_RNA (1)...(19): siRNA sense strand
gggcaagaccuccuacuuc

SEQ ID NO: 966969 - RNA, 19 nt, Homo sapiens
  misc_RNA (1)...(19): siRNA sense strand
uggagaagaucaaccuguu

SEQ ID NO: 966970 - RNA, 19 nt, Homo sapiens
  misc_RNA (1)...(19): siRNA sense strand
aagaagagcaagaugauug

SEQ ID NO: 966971 - RNA, 19 nt, Homo sapiens
  misc_RNA (1)...(19): siRNA sense strand
ccaaagcggaucaagaaga

SEQ ID NO: 966972 - RNA, 19 nt, Homo sapiens
  misc_RNA (1)...(19): siRNA sense strand
agaacccgcucuucacaga

SEQ ID NO: 966973 - RNA, 19 nt, Homo sapiens
  misc_RNA (1)...(19): siRNA sense strand
ggacaugcacagcuacauc

SEQ ID NO: 966974 - RNA, 19 nt, Homo sapiens
  misc_RNA (1)...(19): siRNA sense strand
gagccaaagcggaucaaga

SEQ ID NO: 966975 - RNA, 19 nt, Homo sapiens
  misc_RNA (1)...(19): siRNA sense strand
gucaaugcgugcuucuuug

SEQ ID NO: 966976 - RNA, 19 nt, Homo sapiens
  misc_RNA (1)...(19): siRNA sense strand
cgucaaugcgugcuucuuu

SEQ ID NO: 966977 - RNA, 19 nt, Homo sapiens
  misc_RNA (1)...(19): siRNA sense strand
gcuuugugcucauuaccuu

SEQ ID NO: 966978 - RNA, 19 nt, Homo sapiens
  misc_RNA (1)...(19): siRNA sense strand
gccaaggccuucucuaagc

SEQ ID NO: 966979 - RNA, 19 nt, Homo sapiens
  misc_RNA (1)...(19): siRNA sense strand
ccacuucuacgacuucuuc

SEQ ID NO: 966980 - RNA, 19 nt, Homo sapiens
  misc_RNA (1)...(19): siRNA sense strand
ucaagaagagcaagaugau

SEQ ID NO: 966981 - RNA, 19 nt, Homo sapiens
  misc_RNA (1)...(19): siRNA sense strand
gauggacacagaacucaug

SEQ ID NO: 966982 - RNA, 19 nt, Homo sapiens
  misc_RNA (1)...(19): siRNA sense strand
gaucaagaagagcaagaug

SEQ ID NO: 966983 - RNA, 19 nt, Homo sapiens
  misc_RNA (1)...(19): siRNA sense strand
ccguauacaugcccaagug

SEQ ID NO: 966984 - RNA, 19 nt, Homo sapiens
  misc_RNA (1)...(19): siRNA sense strand
gguuugugguccucaccua

SEQ ID NO: 966985 - RNA, 19 nt, Homo sapiens
  misc_RNA (1)...(19): siRNA sense strand
caagaagagcaagaugauu

SEQ ID NO: 966986 - RNA, 19 nt, Homo sapiens
  misc_RNA (1)...(19): siRNA sense strand
agccaaagcggaucaagaa

SEQ ID NO: 966987 - RNA, 19 nt, Homo sapiens
  misc_RNA (1)...(19): siRNA sense strand
aacaucaaguucaacaguu

SEQ ID NO: 966988 - RNA, 19 nt, Homo sapiens
  misc_RNA (1)...(19): siRNA sense strand
gcugugugccguauacaug

SEQ ID NO: 966989 - RNA, 19 nt, Homo sapiens
  misc_RNA (1)...(19): siRNA sense strand
ccaaccugauggacacaga

SEQ ID NO: 966990 - RNA, 19 nt, Homo sapiens
  misc_RNA (1)...(19): siRNA sense strand
acaucaaguucaacaguuc

SEQ ID NO: 966991 - RNA, 19 nt, Homo sapiens
  misc_RNA (1)...(19): siRNA sense strand
uauacaugcccaaguguga

SEQ ID NO: 966992 - RNA, 19 nt, Homo sapiens
  misc_RNA (1)...(19): siRNA sense strand
uggcuggugugguuugguu

SEQ ID NO: 966993 - RNA, 19 nt, Homo sapiens
  misc_RNA (1)...(19): siRNA sense strand
acucuguucuccaucaaga

SEQ ID NO: 966994 - RNA, 19 nt, Homo sapiens
  misc_RNA (1)...(19): siRNA sense strand
ucaugacucuguucuccau

SEQ ID NO: 966995 - RNA, 19 nt, Homo sapiens
  misc_RNA (1)...(19): siRNA sense strand
cuggcacacuuccuucaaa

SEQ ID NO: 966996 - RNA, 19 nt, Homo sapiens
  misc_RNA (1)...(19): siRNA sense strand
aagaagaagaggaggaaga

SEQ ID NO: 966997 - RNA, 19 nt, Homo sapiens
  misc_RNA (1)...(19): siRNA sense strand
acugugagaucaagaaucg

SEQ ID NO: 966998 - RNA, 19 nt, Homo sapiens
  misc_RNA (1)...(19): siRNA sense strand
cuacaagaacuaccgauac

SEQ ID NO: 966999 - RNA, 19 nt, Homo sapiens
  misc_RNA (1)...(19): siRNA sense strand
ccagaacccgcucuucaca

SEQ ID NO: 967000 - RNA, 19 nt, Homo sapiens
  misc_RNA (1)...(19): siRNA sense strand
agaagaggaggaagaggaa

SEQ ID NO: 967001 - RNA, 19 nt, Homo sapiens
  misc_RNA (1)...(19): siRNA sense strand
accaggacaugcacagcua

SEQ ID NO: 967002 - RNA, 19 nt, Homo sapiens
  misc_RNA (1)...(19): siRNA sense strand
cagccucucucgggcaaga

SEQ ID NO: 967003 - RNA, 19 nt, Homo sapiens
  misc_RNA (1)...(19): siRNA sense strand
gagugacgaugagccaaag

SEQ ID NO: 967004 - RNA, 19 nt, Homo sapiens
  misc_RNA (1)...(19): siRNA sense strand
cugcuguuauucucuucua

SEQ ID NO: 967005 - RNA, 19 nt, Homo sapiens
  misc_RNA (1)...(19): siRNA sense strand
uugccaaggccuucucuaa

SEQ ID NO: 967006 - RNA, 19 nt, Homo sapiens
  misc_RNA (1)...(19): siRNA sense strand
ugacucuguucuccaucaa

SEQ ID NO: 967007 - RNA, 19 nt, Homo sapiens
  misc_RNA (1)...(19): siRNA sense strand
ggaugcagacucggacuuc

SEQ ID NO: 967008 - RNA, 19 nt, Homo sapiens
  misc_RNA (1)...(19): siRNA sense strand
gaaucgcuacccugcuguu

SEQ ID NO: 967009 - RNA, 19 nt, Homo sapiens
  misc_RNA (1)...(19): siRNA sense strand
gcagcuuccgggacuaugu

SEQ ID NO: 967010 - RNA, 19 nt, Homo sapiens
  misc_RNA (1)...(19): siRNA sense strand
cuuccuggccuuuggcuuu

SEQ ID NO: 967011 - RNA, 19 nt, Homo sapiens
  misc_RNA (1)...(19): siRNA sense strand
ucaaugcgugcuucuuugu

SEQ ID NO: 967012 - RNA, 19 nt, Homo sapiens
  misc_RNA (1)...(19): siRNA sense strand
cccagcaugucaccaagau

SEQ ID NO: 967013 - RNA, 19 nt, Homo sapiens
  misc_RNA (1)...(19): siRNA sense strand
caucgugggaggcuacuuc

SEQ ID NO: 967014 - RNA, 19 nt, Homo sapiens
  misc_RNA (1)...(19): siRNA sense strand
uggcacacuuccuucaaag

SEQ ID NO: 967015 - RNA, 19 nt, Homo sapiens
  misc_RNA (1)...(19): siRNA sense strand
gggcccagcaugucaccaa

SEQ ID NO: 967016 - RNA, 19 nt, Homo sapiens
  misc_RNA (1)...(19): siRNA sense strand
ggaagacccuuacuacugu

SEQ ID NO: 967017 - RNA, 19 nt, Homo sapiens
  misc_RNA (1)...(19): siRNA sense strand
uaauugagcauccggaaua

SEQ ID NO: 967018 - RNA, 19 nt, Homo sapiens
  misc_RNA (1)...(19): siRNA sense strand
ggaauauggagaaguaauu

SEQ ID NO: 967019 - RNA, 19 nt, Homo sapiens
  misc_RNA (1)...(19): siRNA sense strand
gcaagaacauaugccaguu

SEQ ID NO: 967020 - RNA, 19 nt, Homo sapiens
  misc_RNA (1)...(19): siRNA sense strand
uccagaaccuccacucuuu

SEQ ID NO: 967021 - RNA, 19 nt, Homo sapiens
  misc_RNA (1)...(19): siRNA sense strand
gcaggaagacccuuacuac

SEQ ID NO: 967022 - RNA, 19 nt, Homo sapiens
  misc_RNA (1)...(19): siRNA sense strand
gagaaguaauucagcuaca

SEQ ID NO: 967023 - RNA, 19 nt, Homo sapiens
  misc_RNA (1)...(19): siRNA sense strand
gaccaacgcaagaacauau

SEQ ID NO: 967024 - RNA, 19 nt, Homo sapiens
  misc_RNA (1)...(19): siRNA sense strand
uccaagggaucgcugauga

SEQ ID NO: 967025 - RNA, 19 nt, Homo sapiens
  misc_RNA (1)...(19): siRNA sense strand
uccggaauauggagaagua

SEQ ID NO: 967026 - RNA, 19 nt, Homo sapiens
  misc_RNA (1)...(19): siRNA sense strand
caagggaucgcugaugauu

SEQ ID NO: 967027 - RNA, 19 nt, Homo sapiens
  misc_RNA (1)...(19): siRNA sense strand
cugcaaugguacuguaauu

SEQ ID NO: 967028 - RNA, 19 nt, Homo sapiens
  misc_RNA (1)...(19): siRNA sense strand
cagagaaacggcaggaaga

SEQ ID NO: 967029 - RNA, 19 nt, Homo sapiens
  misc_RNA (1)...(19): siRNA sense strand
agggaucgcugaugauuac

SEQ ID NO: 967030 - RNA, 19 nt, Homo sapiens
  misc_RNA (1)...(19): siRNA sense strand
gaagguucauggguuuuaa

SEQ ID NO: 967031 - RNA, 19 nt, Homo sapiens
  misc_RNA (1)...(19): siRNA sense strand
uaaggacgaucagcugaag

SEQ ID NO: 967032 - RNA, 19 nt, Homo sapiens
  misc_RNA (1)...(19): siRNA sense strand
uagugaaggcguuuaagaa

SEQ ID NO: 967033 - RNA, 19 nt, Homo sapiens
  misc_RNA (1)...(19): siRNA sense strand
ucgcugaugauuacgauaa

SEQ ID NO: 967034 - RNA, 19 nt, Homo sapiens
  misc_RNA (1)...(19): siRNA sense strand
gugaaggcguuuaagaaaa

SEQ ID NO: 967035 - RNA, 19 nt, Homo sapiens
  misc_RNA (1)...(19): siRNA sense strand
ggcaggaagacccuuacua

SEQ ID NO: 967036 - RNA, 19 nt, Homo sapiens
  misc_RNA (1)...(19): siRNA sense strand
agugaaggcguuuaagaaa

SEQ ID NO: 967037 - RNA, 19 nt, Homo sapiens
  misc_RNA (1)...(19): siRNA sense strand
cuagugaaggcguuuaaga

SEQ ID NO: 967038 - RNA, 19 nt, Homo sapiens
  misc_RNA (1)...(19): siRNA sense strand
cauaugccaguuccucgua

SEQ ID NO: 967039 - RNA, 19 nt, Homo sapiens
  misc_RNA (1)...(19): siRNA sense strand
cugcuggcacugaggauua

SEQ ID NO: 967040 - RNA, 19 nt, Homo sapiens
  misc_RNA (1)...(19): siRNA sense strand
gccaguuccucguagagau

SEQ ID NO: 967041 - RNA, 19 nt, Homo sapiens
  misc_RNA (1)...(19): siRNA sense strand
aggaagacccuuacuacug

SEQ ID NO: 967042 - RNA, 19 nt, Homo sapiens
  misc_RNA (1)...(19): siRNA sense strand
ugaccaacgcaagaacaua

SEQ ID NO: 967043 - RNA, 19 nt, Homo sapiens
  misc_RNA (1)...(19): siRNA sense strand
ccaguuccucguagagauu

SEQ ID NO: 967044 - RNA, 19 nt, Homo sapiens
  misc_RNA (1)...(19): siRNA sense strand
ugccugcaaugguacugua

SEQ ID NO: 967045 - RNA, 19 nt, Homo sapiens
  misc_RNA (1)...(19): siRNA sense strand
gacccuuacuacuguccaa

SEQ ID NO: 967046 - RNA, 19 nt, Homo sapiens
  misc_RNA (1)...(19): siRNA sense strand
guaauugagcauccggaau

SEQ ID NO: 967047 - RNA, 19 nt, Homo sapiens
  misc_RNA (1)...(19): siRNA sense strand
aagggaucgcugaugauua

SEQ ID NO: 967048 - RNA, 19 nt, Homo sapiens
  misc_RNA (1)...(19): siRNA sense strand
cuaaggacgaucagcugaa

SEQ ID NO: 967049 - RNA, 19 nt, Homo sapiens
  misc_RNA (1)...(19): siRNA sense strand
gaagagacauuagaagaaa

SEQ ID NO: 967050 - RNA, 19 nt, Homo sapiens
  misc_RNA (1)...(19): siRNA sense strand
gaaagaagaccaucucaug

SEQ ID NO: 967051 - RNA, 19 nt, Homo sapiens
  misc_RNA (1)...(19): siRNA sense strand
gaaguuggguguauuaucu

SEQ ID NO: 967052 - RNA, 19 nt, Homo sapiens
  misc_RNA (1)...(19): siRNA sense strand
cuacucagguucagaauuu

SEQ ID NO: 967053 - RNA, 19 nt, Homo sapiens
  misc_RNA (1)...(19): siRNA sense strand
gggauaugcuaaugaauuu

SEQ ID NO: 967054 - RNA, 19 nt, Homo sapiens
  misc_RNA (1)...(19): siRNA sense strand
ucagaucccucacauguuu

SEQ ID NO: 967055 - RNA, 19 nt, Homo sapiens
  misc_RNA (1)...(19): siRNA sense strand
gggaacaucuucuguguca

SEQ ID NO: 967056 - RNA, 19 nt, Homo sapiens
  misc_RNA (1)...(19): siRNA sense strand
uagaagaaauggacaguga

SEQ ID NO: 967057 - RNA, 19 nt, Homo sapiens
  misc_RNA (1)...(19): siRNA sense strand
gcagauuccucuucauuca

SEQ ID NO: 967058 - RNA, 19 nt, Homo sapiens
  misc_RNA (1)...(19): siRNA sense strand
guacaucuaugcacaguag

SEQ ID NO: 967059 - RNA, 19 nt, Homo sapiens
  misc_RNA (1)...(19): siRNA sense strand
ccaagucagucuccuacua

SEQ ID NO: 967060 - RNA, 19 nt, Homo sapiens
  misc_RNA (1)...(19): siRNA sense strand
agacuuggcuucucaugaa

SEQ ID NO: 967061 - RNA, 19 nt, Homo sapiens
  misc_RNA (1)...(19): siRNA sense strand
agccagagcuacagaauaa

SEQ ID NO: 967062 - RNA, 19 nt, Homo sapiens
  misc_RNA (1)...(19): siRNA sense strand
ggugauaaauucagugugu

SEQ ID NO: 967063 - RNA, 19 nt, Homo sapiens
  misc_RNA (1)...(19): siRNA sense strand
aaacagagccaucuauaug

SEQ ID NO: 967064 - RNA, 19 nt, Homo sapiens
  misc_RNA (1)...(19): siRNA sense strand
gcagaaugcuuugguguca

SEQ ID NO: 967065 - RNA, 19 nt, Homo sapiens
  misc_RNA (1)...(19): siRNA sense strand
gaauguguccggauggaua

SEQ ID NO: 967066 - RNA, 19 nt, Homo sapiens
  misc_RNA (1)...(19): siRNA sense strand
ggaaagagaacgugagcuu

SEQ ID NO: 967067 - RNA, 19 nt, Homo sapiens
  misc_RNA (1)...(19): siRNA sense strand
aagccaagcucaaauguau

SEQ ID NO: 967068 - RNA, 19 nt, Homo sapiens
  misc_RNA (1)...(19): siRNA sense strand
ggauaucgcagaugaauuc

SEQ ID NO: 967069 - RNA, 19 nt, Homo sapiens
  misc_RNA (1)...(19): siRNA sense strand
aaacaacagugaccaguuc

SEQ ID NO: 967070 - RNA, 19 nt, Homo sapiens
  misc_RNA (1)...(19): siRNA sense strand
gcucaagugugaauucugu

SEQ ID NO: 967071 - RNA, 19 nt, Homo sapiens
  misc_RNA (1)...(19): siRNA sense strand
caucaaguauucaccaguu

SEQ ID NO: 967072 - RNA, 19 nt, Homo sapiens
  misc_RNA (1)...(19): siRNA sense strand
gccaaaagguacaauguua

SEQ ID NO: 967073 - RNA, 19 nt, Homo sapiens
  misc_RNA (1)...(19): siRNA sense strand
agucaucccucuccuuuaa

SEQ ID NO: 967074 - RNA, 19 nt, Homo sapiens
  misc_RNA (1)...(19): siRNA sense strand
caaucacacuucagaauuc

SEQ ID NO: 967075 - RNA, 19 nt, Homo sapiens
  misc_RNA (1)...(19): siRNA sense strand
aaacgauucugcacuaugu

SEQ ID NO: 967076 - RNA, 19 nt, Homo sapiens
  misc_RNA (1)...(19): siRNA sense strand
agucagugcuucaguaauu

SEQ ID NO: 967077 - RNA, 19 nt, Homo sapiens
  misc_RNA (1)...(19): siRNA sense strand
gaagaugugugugaagaag

SEQ ID NO: 967078 - RNA, 19 nt, Homo sapiens
  misc_RNA (1)...(19): siRNA sense strand
gccaggauaucgcagauga

SEQ ID NO: 967079 - RNA, 19 nt, Homo sapiens
  misc_RNA (1)...(19): siRNA sense strand
aagaagaaaugccagaaga

SEQ ID NO: 967080 - RNA, 19 nt, Homo sapiens
  misc_RNA (1)...(19): siRNA sense strand
acacagcagucaaguaugu

SEQ ID NO: 967081 - RNA, 19 nt, Homo sapiens
  misc_RNA (1)...(19): siRNA sense strand
ccagagcuacagaauaaua

SEQ ID NO: 967082 - RNA, 19 nt, Homo sapiens
  misc_RNA (1)...(19): siRNA sense strand
ugagaacagugacuugcua

SEQ ID NO: 967083 - RNA, 19 nt, Homo sapiens
  misc_RNA (1)...(19): siRNA sense strand
acacagagauggaagacau

SEQ ID NO: 967084 - RNA, 19 nt, Homo sapiens
  misc_RNA (1)...(19): siRNA sense strand
ucacacagcagucaaguau

SEQ ID NO: 967085 - RNA, 19 nt, Homo sapiens
  misc_RNA (1)...(19): siRNA sense strand
caucaacucucugaaggaa

SEQ ID NO: 967086 - RNA, 19 nt, Homo sapiens
  misc_RNA (1)...(19): siRNA sense strand
uaucgcagaugaauucaga

SEQ ID NO: 967087 - RNA, 19 nt, Homo sapiens
  misc_RNA (1)...(19): siRNA sense strand
gcacaaacagagccaucua

SEQ ID NO: 967088 - RNA, 19 nt, Homo sapiens
  misc_RNA (1)...(19): siRNA sense strand
gcacuuagucguuggaauc

SEQ ID NO: 967089 - RNA, 19 nt, Homo sapiens
  misc_RNA (1)...(19): siRNA sense strand
ggaguaacaguacaucuau

SEQ ID NO: 967090 - RNA, 19 nt, Homo sapiens
  misc_RNA (1)...(19): siRNA sense strand
guaauuaaaucuccaucag

SEQ ID NO: 967091 - RNA, 19 nt, Homo sapiens
  misc_RNA (1)...(19): siRNA sense strand
gguagaagaugugugugaa

SEQ ID NO: 967092 - RNA, 19 nt, Homo sapiens
  misc_RNA (1)...(19): siRNA sense strand
ccagaaguuggguguauua

SEQ ID NO: 967093 - RNA, 19 nt, Homo sapiens
  misc_RNA (1)...(19): siRNA sense strand
caucagaucccucacaugu

SEQ ID NO: 967094 - RNA, 19 nt, Homo sapiens
  misc_RNA (1)...(19): siRNA sense strand
cagccucauucucuaauaa

SEQ ID NO: 967095 - RNA, 19 nt, Homo sapiens
  misc_RNA (1)...(19): siRNA sense strand
caacagugaccaguucuaa

SEQ ID NO: 967096 - RNA, 19 nt, Homo sapiens
  misc_RNA (1)...(19): siRNA sense strand
uaauagcaccagcuucaua

SEQ ID NO: 967097 - RNA, 19 nt, Homo sapiens
  misc_RNA (1)...(19): siRNA sense strand
ggaagaccaucuacaucuc

SEQ ID NO: 967098 - RNA, 19 nt, Homo sapiens
  misc_RNA (1)...(19): siRNA sense strand
caaacagagccaucuauau

SEQ ID NO: 967099 - RNA, 19 nt, Homo sapiens
  misc_RNA (1)...(19): siRNA sense strand
ggaaucguaagccugauaa

SEQ ID NO: 967100 - RNA, 19 nt, Homo sapiens
  misc_RNA (1)...(19): siRNA sense strand
uagaagaugugugugaaga

SEQ ID NO: 967101 - RNA, 19 nt, Homo sapiens
  misc_RNA (1)...(19): siRNA sense strand
ccaaucacacuucagaauu

SEQ ID NO: 967102 - RNA, 19 nt, Homo sapiens
  misc_RNA (1)...(19): siRNA sense strand
gcacgcaucaacucucuga

SEQ ID NO: 967103 - RNA, 19 nt, Homo sapiens
  misc_RNA (1)...(19): siRNA sense strand
acaaacagagccaucuaua

SEQ ID NO: 967104 - RNA, 19 nt, Homo sapiens
  misc_RNA (1)...(19): siRNA sense strand
caugauugcugaagagaca

SEQ ID NO: 967105 - RNA, 19 nt, Homo sapiens
  misc_RNA (1)...(19): siRNA sense strand
gcggauaauucaucugaca

SEQ ID NO: 967106 - RNA, 19 nt, Homo sapiens
  misc_RNA (1)...(19): siRNA sense strand
cacaguagcauucccagua

SEQ ID NO: 967107 - RNA, 19 nt, Homo sapiens
  misc_RNA (1)...(19): siRNA sense strand
gaagaaaugccagaagagu

SEQ ID NO: 967108 - RNA, 19 nt, Homo sapiens
  misc_RNA (1)...(19): siRNA sense strand
guucaccgauucagaguca

SEQ ID NO: 967109 - RNA, 19 nt, Homo sapiens
  misc_RNA (1)...(19): siRNA sense strand
ugaagagacauuagaagaa

SEQ ID NO: 967110 - RNA, 19 nt, Homo sapiens
  misc_RNA (1)...(19): siRNA sense strand
guuaauagcaccagcuuca

SEQ ID NO: 967111 - RNA, 19 nt, Homo sapiens
  misc_RNA (1)...(19): siRNA sense strand
aaagaagaccaucucauga

SEQ ID NO: 967112 - RNA, 19 nt, Homo sapiens
  misc_RNA (1)...(19): siRNA sense strand
gaugaugucugggccuuca

SEQ ID NO: 967113 - RNA, 19 nt, Homo sapiens
  misc_RNA (1)...(19): siRNA sense strand
gaaaaugccugagaacagu

SEQ ID NO: 967114 - RNA, 19 nt, Homo sapiens
  misc_RNA (1)...(19): siRNA sense strand
gagagaacauauccuuagg

SEQ ID NO: 967115 - RNA, 19 nt, Homo sapiens
  misc_RNA (1)...(19): siRNA sense strand
uuaucuagcucacagaaug

SEQ ID NO: 967116 - RNA, 19 nt, Homo sapiens
  misc_RNA (1)...(19): siRNA sense strand
ucaacucucugaaggaauc

SEQ ID NO: 967117 - RNA, 19 nt, Homo sapiens
  misc_RNA (1)...(19): siRNA sense strand
ucaaaacgauucugcacua

SEQ ID NO: 967118 - RNA, 19 nt, Homo sapiens
  misc_RNA (1)...(19): siRNA sense strand
ccaccuccauuguuacuuc

SEQ ID NO: 967119 - RNA, 19 nt, Homo sapiens
  misc_RNA (1)...(19): siRNA sense strand
uccaccaccuccauuguua

SEQ ID NO: 967120 - RNA, 19 nt, Homo sapiens
  misc_RNA (1)...(19): siRNA sense strand
caucacaccagcaauauuc

SEQ ID NO: 967121 - RNA, 19 nt, Homo sapiens
  misc_RNA (1)...(19): siRNA sense strand
ucaccaccuuccaaaguuu

SEQ ID NO: 967122 - RNA, 19 nt, Homo sapiens
  misc_RNA (1)...(19): siRNA sense strand
cagcagauuccucuucauu

SEQ ID NO: 967123 - RNA, 19 nt, Homo sapiens
  misc_RNA (1)...(19): siRNA sense strand
gcgagagaacauauccuua

SEQ ID NO: 967124 - RNA, 19 nt, Homo sapiens
  misc_RNA (1)...(19): siRNA sense strand
gaagaaauggacagugagu

SEQ ID NO: 967125 - RNA, 19 nt, Homo sapiens
  misc_RNA (1)...(19): siRNA sense strand
gaacaucuucugugucaac

SEQ ID NO: 967126 - RNA, 19 nt, Homo sapiens
  misc_RNA (1)...(19): siRNA sense strand
gucagugcuucaguaauua

SEQ ID NO: 967127 - RNA, 19 nt, Homo sapiens
  misc_RNA (1)...(19): siRNA sense strand
cagaagcuuugguccaguu

SEQ ID NO: 967128 - RNA, 19 nt, Homo sapiens
  misc_RNA (1)...(19): siRNA sense strand
uaacagugucuccuaauca

SEQ ID NO: 967129 - RNA, 19 nt, Homo sapiens
  misc_RNA (1)...(19): siRNA sense strand
ucuaccagcggcaguauua

SEQ ID NO: 967130 - RNA, 19 nt, Homo sapiens
  misc_RNA (1)...(19): siRNA sense strand
gggccuucauccauucuuu

SEQ ID NO: 967131 - RNA, 19 nt, Homo sapiens
  misc_RNA (1)...(19): siRNA sense strand
aaugggauaugcuaaugaa

SEQ ID NO: 967132 - RNA, 19 nt, Homo sapiens
  misc_RNA (1)...(19): siRNA sense strand
uaaauucaguguguguuca

SEQ ID NO: 967133 - RNA, 19 nt, Homo sapiens
  misc_RNA (1)...(19): siRNA sense strand
gaagaagaaaugccagaag

SEQ ID NO: 967134 - RNA, 19 nt, Homo sapiens
  misc_RNA (1)...(19): siRNA sense strand
caacagcagcaacagcaaa

SEQ ID NO: 967135 - RNA, 19 nt, Homo sapiens
  misc_RNA (1)...(19): siRNA sense strand
ccgacaugcuguacaggua

SEQ ID NO: 967136 - RNA, 19 nt, Homo sapiens
  misc_RNA (1)...(19): siRNA sense strand
caagucagucuccuacuau

SEQ ID NO: 967137 - RNA, 19 nt, Homo sapiens
  misc_RNA (1)...(19): siRNA sense strand
ugagugcaaugaauaucaa

SEQ ID NO: 967138 - RNA, 19 nt, Homo sapiens
  misc_RNA (1)...(19): siRNA sense strand
gaaccaaacccgggaacau

SEQ ID NO: 967139 - RNA, 19 nt, Homo sapiens
  misc_RNA (1)...(19): siRNA sense strand
gacaugcuguacagguauu

SEQ ID NO: 967140 - RNA, 19 nt, Homo sapiens
  misc_RNA (1)...(19): siRNA sense strand
cagcauuguucaccgauuc

SEQ ID NO: 967141 - RNA, 19 nt, Homo sapiens
  misc_RNA (1)...(19): siRNA sense strand
gcucaguaccuucagcaaa

SEQ ID NO: 967142 - RNA, 19 nt, Homo sapiens
  misc_RNA (1)...(19): siRNA sense strand
uuaggcagcuuccaauuac

SEQ ID NO: 967143 - RNA, 19 nt, Homo sapiens
  misc_RNA (1)...(19): siRNA sense strand
cgagagaacauauccuuag

SEQ ID NO: 967144 - RNA, 19 nt, Homo sapiens
  misc_RNA (1)...(19): siRNA sense strand
gguacaauguuagcuguuc

SEQ ID NO: 967145 - RNA, 19 nt, Homo sapiens
  misc_RNA (1)...(19): siRNA sense strand
cuuagucguuggaaucgua

SEQ ID NO: 967146 - RNA, 19 nt, Homo sapiens
  misc_RNA (1)...(19): siRNA sense strand
gcccuucucuugcugaaag

SEQ ID NO: 967147 - RNA, 19 nt, Homo sapiens
  misc_RNA (1)...(19): siRNA sense strand
gcuaccaguugcacaaaca

SEQ ID NO: 967148 - RNA, 19 nt, Homo sapiens
  misc_RNA (1)...(19): siRNA sense strand
cuuaggcagcuuccaauua

SEQ ID NO: 967149 - RNA, 19 nt, Homo sapiens
  misc_RNA (1)...(19): siRNA sense strand
gguaaagucuucaguaaua

SEQ ID NO: 967150 - RNA, 19 nt, Homo sapiens
  misc_RNA (1)...(19): siRNA sense strand
gguaaaggcuucagucaua

SEQ ID NO: 967151 - RNA, 19 nt, Homo sapiens
  misc_RNA (1)...(19): siRNA sense strand
gaacagaaaguacaccuua

SEQ ID NO: 967152 - RNA, 19 nt, Homo sapiens
  misc_RNA (1)...(19): siRNA sense strand
agaaagaccuuacaaaugu

SEQ ID NO: 967153 - RNA, 19 nt, Homo sapiens
  misc_RNA (1)...(19): siRNA sense strand
gagagaagccuuacaaaug

SEQ ID NO: 967154 - RNA, 19 nt, Homo sapiens
  misc_RNA (1)...(19): siRNA sense strand
gagagaagccuuacaaaug

SEQ ID NO: 967155 - RNA, 19 nt, Homo sapiens
  misc_RNA (1)...(19): siRNA sense strand
gagagaagccuuacaaaug

SEQ ID NO: 967156 - RNA, 19 nt, Homo sapiens
  misc_RNA (1)...(19): siRNA sense strand
gcagaagacaaaccaauua

SEQ ID NO: 967157 - RNA, 19 nt, Homo sapiens
  misc_RNA (1)...(19): siRNA sense strand
gcacaacauuggagaauuc

SEQ ID NO: 967158 - RNA, 19 nt, Homo sapiens
  misc_RNA (1)...(19): siRNA sense strand
gaaaguacaccuuagagaa

SEQ ID NO: 967159 - RNA, 19 nt, Homo sapiens
  misc_RNA (1)...(19): siRNA sense strand
agagaaaccuuacaaaugu

SEQ ID NO: 967160 - RNA, 19 nt, Homo sapiens
  misc_RNA (1)...(19): siRNA sense strand
agagaaaccuuacaaaugu

SEQ ID NO: 967161 - RNA, 19 nt, Homo sapiens
  misc_RNA (1)...(19): siRNA sense strand
agagaaaccuuacaaaugu

SEQ ID NO: 967162 - RNA, 19 nt, Homo sapiens
  misc_RNA (1)...(19): siRNA sense strand
agagaaaccuuacaaaugu

SEQ ID NO: 967163 - RNA, 19 nt, Homo sapiens
  misc_RNA (1)...(19): siRNA sense strand
agagaaaccuuacaaaugu

SEQ ID NO: 967164 - RNA, 19 nt, Homo sapiens
  misc_RNA (1)...(19): siRNA sense strand
agagaaaccuuacaaaugu

SEQ ID NO: 967165 - RNA, 19 nt, Homo sapiens
  misc_RNA (1)...(19): siRNA sense strand
gagagaaaccuuacaaaug

SEQ ID NO: 967166 - RNA, 19 nt, Homo sapiens
  misc_RNA (1)...(19): siRNA sense strand
gagagaaaccuuacaaaug

SEQ ID NO: 967167 - RNA, 19 nt, Homo sapiens
  misc_RNA (1)...(19): siRNA sense strand
gagagaaaccuuacaaaug

SEQ ID NO: 967168 - RNA, 19 nt, Homo sapiens
  misc_RNA (1)...(19): siRNA sense strand
gagagaaaccuuacaaaug

SEQ ID NO: 967169 - RNA, 19 nt, Homo sapiens
  misc_RNA (1)...(19): siRNA sense strand
gaagagaaaccuuacaaau

SEQ ID NO: 967170 - RNA, 19 nt, Homo sapiens
  misc_RNA (1)...(19): siRNA sense strand
gcagaacauuguagaauuc

SEQ ID NO: 967171 - RNA, 19 nt, Homo sapiens
  misc_RNA (1)...(19): siRNA sense strand
agacacaaguuaucacuaa

SEQ ID NO: 967172 - RNA, 19 nt, Homo sapiens
  misc_RNA (1)...(19): siRNA sense strand
ggagaaagaccuuacaaau

SEQ ID NO: 967173 - RNA, 19 nt, Homo sapiens
  misc_RNA (1)...(19): siRNA sense strand
gagaaagaccuuacaaaug

SEQ ID NO: 967174 - RNA, 19 nt, Homo sapiens
  misc_RNA (1)...(19): siRNA sense strand
gagagaagccguaugaaug

SEQ ID NO: 967175 - RNA, 19 nt, Homo sapiens
  misc_RNA (1)...(19): siRNA sense strand
gaugaaaggguaauaaaug

SEQ ID NO: 967176 - RNA, 19 nt, Homo sapiens
  misc_RNA (1)...(19): siRNA sense strand
cgacaucgaagaauucaua

SEQ ID NO: 967177 - RNA, 19 nt, Homo sapiens
  misc_RNA (1)...(19): siRNA sense strand
caacauuggagaauucaua

SEQ ID NO: 967178 - RNA, 19 nt, Homo sapiens
  misc_RNA (1)...(19): siRNA sense strand
ggacaauucauaugggaua

SEQ ID NO: 967179 - RNA, 19 nt, Homo sapiens
  misc_RNA (1)...(19): siRNA sense strand
guaaaggcuucagucauaa

SEQ ID NO: 967180 - RNA, 19 nt, Homo sapiens
  misc_RNA (1)...(19): siRNA sense strand
ggacguggccauagaauuc

SEQ ID NO: 967181 - RNA, 19 nt, Homo sapiens
  misc_RNA (1)...(19): siRNA sense strand
uaagucaucucuagcaaau

SEQ ID NO: 967182 - RNA, 19 nt, Homo sapiens
  misc_RNA (1)...(19): siRNA sense strand
ggagagaaaccuuacaaau

SEQ ID NO: 967183 - RNA, 19 nt, Homo sapiens
  misc_RNA (1)...(19): siRNA sense strand
ggagagaaaccuuacaaau

SEQ ID NO: 967184 - RNA, 19 nt, Homo sapiens
  misc_RNA (1)...(19): siRNA sense strand
ggagagaaaccuuacaaau

SEQ ID NO: 967185 - RNA, 19 nt, Homo sapiens
  misc_RNA (1)...(19): siRNA sense strand
ggagagaaaccuuacaaau

SEQ ID NO: 967186 - RNA, 19 nt, Homo sapiens
  misc_RNA (1)...(19): siRNA sense strand
gugguaaagucuucaguaa

SEQ ID NO: 967187 - RNA, 19 nt, Homo sapiens
  misc_RNA (1)...(19): siRNA sense strand
uggaguauccuuucacuua

SEQ ID NO: 967188 - RNA, 19 nt, Homo sapiens
  misc_RNA (1)...(19): siRNA sense strand
ggcaaggucuucaaucgaa

SEQ ID NO: 967189 - RNA, 19 nt, Homo sapiens
  misc_RNA (1)...(19): siRNA sense strand
agagaagccuuacaaaugu

SEQ ID NO: 967190 - RNA, 19 nt, Homo sapiens
  misc_RNA (1)...(19): siRNA sense strand
agagaagccuuacaaaugu

SEQ ID NO: 967191 - RNA, 19 nt, Homo sapiens
  misc_RNA (1)...(19): siRNA sense strand
agagaagccuuacaaaugu

SEQ ID NO: 967192 - RNA, 19 nt, Homo sapiens
  misc_RNA (1)...(19): siRNA sense strand
cgacaucaaagaauucaua

SEQ ID NO: 967193 - RNA, 19 nt, Homo sapiens
  misc_RNA (1)...(19): siRNA sense strand
gcacagagggcuuuauaca

SEQ ID NO: 967194 - RNA, 19 nt, Homo sapiens
  misc_RNA (1)...(19): siRNA sense strand
ggagagaagccuuacaaau

SEQ ID NO: 967195 - RNA, 19 nt, Homo sapiens
  misc_RNA (1)...(19): siRNA sense strand
ggagagaagccuuacaaau

SEQ ID NO: 967196 - RNA, 19 nt, Homo sapiens
  misc_RNA (1)...(19): siRNA sense strand
ggagagaagccuuacaaau

SEQ ID NO: 967197 - RNA, 19 nt, Homo sapiens
  misc_RNA (1)...(19): siRNA sense strand
gaaaugucuuccaguguca

SEQ ID NO: 967198 - RNA, 19 nt, Homo sapiens
  misc_RNA (1)...(19): siRNA sense strand
ggcaaggccuucuauagga

SEQ ID NO: 967199 - RNA, 19 nt, Homo sapiens
  misc_RNA (1)...(19): siRNA sense strand
ccagagagaagccguauga

SEQ ID NO: 967200 - RNA, 19 nt, Homo sapiens
  misc_RNA (1)...(19): siRNA sense strand
gagaagccguaugaaugua

SEQ ID NO: 967201 - RNA, 19 nt, Homo sapiens
  misc_RNA (1)...(19): siRNA sense strand
ggagcuauuuccagaugaa

SEQ ID NO: 967202 - RNA, 19 nt, Homo sapiens
  misc_RNA (1)...(19): siRNA sense strand
guagagaaaccuuacaaau

SEQ ID NO: 967203 - RNA, 19 nt, Homo sapiens
  misc_RNA (1)...(19): siRNA sense strand
acagagggcuuuauacaag

SEQ ID NO: 967204 - RNA, 19 nt, Homo sapiens
  misc_RNA (1)...(19): siRNA sense strand
uagagaaaccuuacaaaug

SEQ ID NO: 967205 - RNA, 19 nt, Homo sapiens
  misc_RNA (1)...(19): siRNA sense strand
gaauauuaacuccauguug

SEQ ID NO: 967206 - RNA, 19 nt, Homo sapiens
  misc_RNA (1)...(19): siRNA sense strand
ugucugaacuggagcuauu

SEQ ID NO: 967207 - RNA, 19 nt, Homo sapiens
  misc_RNA (1)...(19): siRNA sense strand
uuccugaccugaauauuaa

SEQ ID NO: 967208 - RNA, 19 nt, Homo sapiens
  misc_RNA (1)...(19): siRNA sense strand
gaacacagggagcagcuau

SEQ ID NO: 967209 - RNA, 19 nt, Homo sapiens
  misc_RNA (1)...(19): siRNA sense strand
gcaaggccuucuauaggau

SEQ ID NO: 967210 - RNA, 19 nt, Homo sapiens
  misc_RNA (1)...(19): siRNA sense strand
aaaguacaccuuagagaaa

SEQ ID NO: 967211 - RNA, 19 nt, Homo sapiens
  misc_RNA (1)...(19): siRNA sense strand
uaaugaaugugguaaaguc

SEQ ID NO: 967212 - RNA, 19 nt, Homo sapiens
  misc_RNA (1)...(19): siRNA sense strand
gaaaggguaauaaauggau

SEQ ID NO: 967213 - RNA, 19 nt, Homo sapiens
  misc_RNA (1)...(19): siRNA sense strand
uaaugaaugugguaaagca

SEQ ID NO: 967214 - RNA, 19 nt, Homo sapiens
  misc_RNA (1)...(19): siRNA sense strand
gcaccuagcacaacauugg

SEQ ID NO: 967215 - RNA, 19 nt, Homo sapiens
  misc_RNA (1)...(19): siRNA sense strand
aagagaaaccuuacaaaug

SEQ ID NO: 967216 - RNA, 19 nt, Homo sapiens
  misc_RNA (1)...(19): siRNA sense strand
acaaggaugugauguugga

SEQ ID NO: 967217 - RNA, 19 nt, Homo sapiens
  misc_RNA (1)...(19): siRNA sense strand
guaaugagcauagcaaagu

SEQ ID NO: 967218 - RNA, 19 nt, Homo sapiens
  misc_RNA (1)...(19): siRNA sense strand
cagggacacuuaacauuca

SEQ ID NO: 967219 - RNA, 19 nt, Homo sapiens
  misc_RNA (1)...(19): siRNA sense strand
gcacgacaucgaagaauuc

SEQ ID NO: 967220 - RNA, 19 nt, Homo sapiens
  misc_RNA (1)...(19): siRNA sense strand
cagaagacaaaccaauuaa

SEQ ID NO: 967221 - RNA, 19 nt, Homo sapiens
  misc_RNA (1)...(19): siRNA sense strand
gaauuuauacuggagagaa

SEQ ID NO: 967222 - RNA, 19 nt, Homo sapiens
  misc_RNA (1)...(19): siRNA sense strand
auacaaggaugugauguug

SEQ ID NO: 967223 - RNA, 19 nt, Homo sapiens
  misc_RNA (1)...(19): siRNA sense strand
ggaguauccuuucacuuac

SEQ ID NO: 967224 - RNA, 19 nt, Homo sapiens
  misc_RNA (1)...(19): siRNA sense strand
ugcagaacauuguagaauu

SEQ ID NO: 967225 - RNA, 19 nt, Homo sapiens
  misc_RNA (1)...(19): siRNA sense strand
gagaagccuuacaaaugug

SEQ ID NO: 967226 - RNA, 19 nt, Homo sapiens
  misc_RNA (1)...(19): siRNA sense strand
agucauaagucaucucuag

SEQ ID NO: 967227 - RNA, 19 nt, Homo sapiens
  misc_RNA (1)...(19): siRNA sense strand
gaagccguaugaauguaau

SEQ ID NO: 967228 - RNA, 19 nt, Homo sapiens
  misc_RNA (1)...(19): siRNA sense strand
ucacuuacaucugucugaa

SEQ ID NO: 967229 - RNA, 19 nt, Homo sapiens
  misc_RNA (1)...(19): siRNA sense strand
uaaccaaucaucagagaau

SEQ ID NO: 967230 - RNA, 19 nt, Homo sapiens
  misc_RNA (1)...(19): siRNA sense strand
cuuccugaccugaauauua

SEQ ID NO: 967231 - RNA, 19 nt, Homo sapiens
  misc_RNA (1)...(19): siRNA sense strand
agucaucucuagcaaauca

SEQ ID NO: 967232 - RNA, 19 nt, Homo sapiens
  misc_RNA (1)...(19): siRNA sense strand
ucagggacguggccauaga

SEQ ID NO: 967233 - RNA, 19 nt, Homo sapiens
  misc_RNA (1)...(19): siRNA sense strand
gaauguaaugaauguggua

SEQ ID NO: 967234 - RNA, 19 nt, Homo sapiens
  misc_RNA (1)...(19): siRNA sense strand
cagaugaaaggguaauaaa

SEQ ID NO: 967235 - RNA, 19 nt, Homo sapiens
  misc_RNA (1)...(19): siRNA sense strand
gcaaggucuucaaucgaau

SEQ ID NO: 967236 - RNA, 19 nt, Homo sapiens
  misc_RNA (1)...(19): siRNA sense strand
caacuuggaguauccuuuc

SEQ ID NO: 967237 - RNA, 19 nt, Homo sapiens
  misc_RNA (1)...(19): siRNA sense strand
ggcauucagacacaaguua

SEQ ID NO: 967238 - RNA, 19 nt, Homo sapiens
  misc_RNA (1)...(19): siRNA sense strand
gcaaggcauucagacacaa

SEQ ID NO: 967239 - RNA, 19 nt, Homo sapiens
  misc_RNA (1)...(19): siRNA sense strand
cauaagucaucucuagcaa

SEQ ID NO: 967240 - RNA, 19 nt, Homo sapiens
  misc_RNA (1)...(19): siRNA sense strand
cgacaucaaagaauucaug

SEQ ID NO: 967241 - RNA, 19 nt, Homo sapiens
  misc_RNA (1)...(19): siRNA sense strand
gcacgacaucaaagaauuc

SEQ ID NO: 967242 - RNA, 19 nt, Homo sapiens
  misc_RNA (1)...(19): siRNA sense strand
ugaaugugguaaagucuuc

SEQ ID NO: 967243 - RNA, 19 nt, Homo sapiens
  misc_RNA (1)...(19): siRNA sense strand
gcacgacaucaaagaauuc

SEQ ID NO: 967244 - RNA, 19 nt, Homo sapiens
  misc_RNA (1)...(19): siRNA sense strand
uaaugucuguggcaagguu

SEQ ID NO: 967245 - RNA, 19 nt, Homo sapiens
  misc_RNA (1)...(19): siRNA sense strand
gggaagcaaugcagaagac

SEQ ID NO: 967246 - RNA, 19 nt, Homo sapiens
  misc_RNA (1)...(19): siRNA sense strand
caucagagaauccauacug

SEQ ID NO: 967247 - RNA, 19 nt, Homo sapiens
  misc_RNA (1)...(19): siRNA sense strand
ccagaugaaaggguaauaa

SEQ ID NO: 967248 - RNA, 19 nt, Homo sapiens
  misc_RNA (1)...(19): siRNA sense strand
ggcaaggcauucagacaca

SEQ ID NO: 967249 - RNA, 19 nt, Homo sapiens
  misc_RNA (1)...(19): siRNA sense strand
gaacuuaccucugcuaaug

SEQ ID NO: 967250 - RNA, 19 nt, Homo sapiens
  misc_RNA (1)...(19): siRNA sense strand
gcacagagaugauaugcaa

SEQ ID NO: 967251 - RNA, 19 nt, Homo sapiens
  misc_RNA (1)...(19): siRNA sense strand
ugaaggagcugguggaaga

SEQ ID NO: 967252 - RNA, 19 nt, Homo sapiens
  misc_RNA (1)...(19): siRNA sense strand
ugacaaggcuccacucaga

SEQ ID NO: 967253 - RNA, 19 nt, Homo sapiens
  misc_RNA (1)...(19): siRNA sense strand
gcaccuuugucauguauaa

SEQ ID NO: 967254 - RNA, 19 nt, Homo sapiens
  misc_RNA (1)...(19): siRNA sense strand
gcaccuggcacucugauga

SEQ ID NO: 967255 - RNA, 19 nt, Homo sapiens
  misc_RNA (1)...(19): siRNA sense strand
gagccacgcccuugaagaa

SEQ ID NO: 967256 - RNA, 19 nt, Homo sapiens
  misc_RNA (1)...(19): siRNA sense strand
acagagaucuuugguguuc

SEQ ID NO: 967257 - RNA, 19 nt, Homo sapiens
  misc_RNA (1)...(19): siRNA sense strand
acaacugucuggugacuga

SEQ ID NO: 967258 - RNA, 19 nt, Homo sapiens
  misc_RNA (1)...(19): siRNA sense strand
guacagcucagcauggauu

SEQ ID NO: 967259 - RNA, 19 nt, Homo sapiens
  misc_RNA (1)...(19): siRNA sense strand
gauuucagcuccuacuaca

SEQ ID NO: 967260 - RNA, 19 nt, Homo sapiens
  misc_RNA (1)...(19): siRNA sense strand
gaagaacuuaccucugcua

SEQ ID NO: 967261 - RNA, 19 nt, Homo sapiens
  misc_RNA (1)...(19): siRNA sense strand
ccacaccucuuuggucaga

SEQ ID NO: 967262 - RNA, 19 nt, Homo sapiens
  misc_RNA (1)...(19): siRNA sense strand
gaucuuugguguucucucu

SEQ ID NO: 967263 - RNA, 19 nt, Homo sapiens
  misc_RNA (1)...(19): siRNA sense strand
gauaugcaaguuccuggua

SEQ ID NO: 967264 - RNA, 19 nt, Homo sapiens
  misc_RNA (1)...(19): siRNA sense strand
ggcagaaguugguugacaa

SEQ ID NO: 967265 - RNA, 19 nt, Homo sapiens
  misc_RNA (1)...(19): siRNA sense strand
gcacaaagaguggcaccuu

SEQ ID NO: 967266 - RNA, 19 nt, Homo sapiens
  misc_RNA (1)...(19): siRNA sense strand
gcauggauuucagcuccua

SEQ ID NO: 967267 - RNA, 19 nt, Homo sapiens
  misc_RNA (1)...(19): siRNA sense strand
ucucacugcuacaugauga

SEQ ID NO: 967268 - RNA, 19 nt, Homo sapiens
  misc_RNA (1)...(19): siRNA sense strand
gaaguuggaccugcuuugg

SEQ ID NO: 967269 - RNA, 19 nt, Homo sapiens
  misc_RNA (1)...(19): siRNA sense strand
ccgcacagcuggcuaugac

SEQ ID NO: 967270 - RNA, 19 nt, Homo sapiens
  misc_RNA (1)...(19): siRNA sense strand
ccacgcccuugaagaacuu

SEQ ID NO: 967271 - RNA, 19 nt, Homo sapiens
  misc_RNA (1)...(19): siRNA sense strand
gaggagccacgcccuugaa

SEQ ID NO: 967272 - RNA, 19 nt, Homo sapiens
  misc_RNA (1)...(19): siRNA sense strand
ccacgaagggcacaaagag

SEQ ID NO: 967273 - RNA, 19 nt, Homo sapiens
  misc_RNA (1)...(19): siRNA sense strand
gaguggcaccuuugucaug

SEQ ID NO: 967274 - RNA, 19 nt, Homo sapiens
  misc_RNA (1)...(19): siRNA sense strand
cagagaugauaugcaaguu

SEQ ID NO: 967275 - RNA, 19 nt, Homo sapiens
  misc_RNA (1)...(19): siRNA sense strand
ccuuugucauguauaauug

SEQ ID NO: 967276 - RNA, 19 nt, Homo sapiens
  misc_RNA (1)...(19): siRNA sense strand
gaggaguuccagcaacaga

SEQ ID NO: 967277 - RNA, 19 nt, Homo sapiens
  misc_RNA (1)...(19): siRNA sense strand
guacgcacagagaugauau

SEQ ID NO: 967278 - RNA, 19 nt, Homo sapiens
  misc_RNA (1)...(19): siRNA sense strand
ggacuucucacugcuacau

SEQ ID NO: 967279 - RNA, 19 nt, Homo sapiens
  misc_RNA (1)...(19): siRNA sense strand
caucuguggcccugugaaa

SEQ ID NO: 967280 - RNA, 19 nt, Homo sapiens
  misc_RNA (1)...(19): siRNA sense strand
gugagugguuguugcucuu

SEQ ID NO: 967281 - RNA, 19 nt, Homo sapiens
  misc_RNA (1)...(19): siRNA sense strand
uggcagaaguugguugaca

SEQ ID NO: 967282 - RNA, 19 nt, Homo sapiens
  misc_RNA (1)...(19): siRNA sense strand
guauaauugugcccgucuu

SEQ ID NO: 967283 - RNA, 19 nt, Homo sapiens
  misc_RNA (1)...(19): siRNA sense strand
ggagccacgcccuugaaga

SEQ ID NO: 967284 - RNA, 19 nt, Homo sapiens
  misc_RNA (1)...(19): siRNA sense strand
caaguguaguauggaacaa

SEQ ID NO: 967285 - RNA, 19 nt, Homo sapiens
  misc_RNA (1)...(19): siRNA sense strand
uggcaccuuugucauguau

SEQ ID NO: 967286 - RNA, 19 nt, Homo sapiens
  misc_RNA (1)...(19): siRNA sense strand
acagcaguaucuccacgaa

SEQ ID NO: 967287 - RNA, 19 nt, Homo sapiens
  misc_RNA (1)...(19): siRNA sense strand
gcagaaguugguugacaag

SEQ ID NO: 967288 - RNA, 19 nt, Homo sapiens
  misc_RNA (1)...(19): siRNA sense strand
guggcaccuuugucaugua

SEQ ID NO: 967289 - RNA, 19 nt, Homo sapiens
  misc_RNA (1)...(19): siRNA sense strand
gaaggagcugguggaagaa

SEQ ID NO: 967290 - RNA, 19 nt, Homo sapiens
  misc_RNA (1)...(19): siRNA sense strand
ggccucagauacugguaca

SEQ ID NO: 967291 - RNA, 19 nt, Homo sapiens
  misc_RNA (1)...(19): siRNA sense strand
acaccucuuuggucagaug

SEQ ID NO: 967292 - RNA, 19 nt, Homo sapiens
  misc_RNA (1)...(19): siRNA sense strand
ggauuucagcuccuacuac

SEQ ID NO: 967293 - RNA, 19 nt, Homo sapiens
  misc_RNA (1)...(19): siRNA sense strand
aagaguggcaccuuuguca

SEQ ID NO: 967294 - RNA, 19 nt, Homo sapiens
  misc_RNA (1)...(19): siRNA sense strand
aggaggaguuccagcaaca

SEQ ID NO: 967295 - RNA, 19 nt, Homo sapiens
  misc_RNA (1)...(19): siRNA sense strand
gguuguacauguuguuagc

SEQ ID NO: 967296 - RNA, 19 nt, Homo sapiens
  misc_RNA (1)...(19): siRNA sense strand
ggaguuccagcaacagaag

SEQ ID NO: 967297 - RNA, 19 nt, Homo sapiens
  misc_RNA (1)...(19): siRNA sense strand
gagugguuguugcucuuca

SEQ ID NO: 967298 - RNA, 19 nt, Homo sapiens
  misc_RNA (1)...(19): siRNA sense strand
gcggcugccugguuguaca

SEQ ID NO: 967299 - RNA, 19 nt, Homo sapiens
  misc_RNA (1)...(19): siRNA sense strand
cagcucagcauggauuuca

SEQ ID NO: 967300 - RNA, 19 nt, Homo sapiens
  misc_RNA (1)...(19): siRNA sense strand
gagcacagccccacagagu

SEQ ID NO: 967301 - RNA, 19 nt, Homo sapiens
  misc_RNA (1)...(19): siRNA sense strand
ccucuuuggucagauguuc

SEQ ID NO: 967302 - RNA, 19 nt, Homo sapiens
  misc_RNA (1)...(19): siRNA sense strand
acagagaugauaugcaagu

SEQ ID NO: 967303 - RNA, 19 nt, Homo sapiens
  misc_RNA (1)...(19): siRNA sense strand
gcacagccccacagaguca

SEQ ID NO: 967304 - RNA, 19 nt, Homo sapiens
  misc_RNA (1)...(19): siRNA sense strand
agacagaagcaccucaucu

SEQ ID NO: 967305 - RNA, 19 nt, Homo sapiens
  misc_RNA (1)...(19): siRNA sense strand
gugcgugaggugcuccaua

SEQ ID NO: 967306 - RNA, 19 nt, Homo sapiens
  misc_RNA (1)...(19): siRNA sense strand
cauccuaggcagacugugu

SEQ ID NO: 967307 - RNA, 19 nt, Homo sapiens
  misc_RNA (1)...(19): siRNA sense strand
guggggaucuggcacaaga

SEQ ID NO: 967308 - RNA, 19 nt, Homo sapiens
  misc_RNA (1)...(19): siRNA sense strand
uacuacgaguuccggcaua

SEQ ID NO: 967309 - RNA, 19 nt, Homo sapiens
  misc_RNA (1)...(19): siRNA sense strand
cuguggcccugugaaagua

SEQ ID NO: 967310 - RNA, 19 nt, Homo sapiens
  misc_RNA (1)...(19): siRNA sense strand
uagcacagcugcaaacuuu

SEQ ID NO: 967311 - RNA, 19 nt, Homo sapiens
  misc_RNA (1)...(19): siRNA sense strand
gcagauccguuaaacagaa

SEQ ID NO: 967312 - RNA, 19 nt, Homo sapiens
  misc_RNA (1)...(19): siRNA sense strand
acacagagcuaccugacua

SEQ ID NO: 967313 - RNA, 19 nt, Homo sapiens
  misc_RNA (1)...(19): siRNA sense strand
ggagaaaucuaugugaaga

SEQ ID NO: 967314 - RNA, 19 nt, Homo sapiens
  misc_RNA (1)...(19): siRNA sense strand
gcauauagauggccuugau

SEQ ID NO: 967315 - RNA, 19 nt, Homo sapiens
  misc_RNA (1)...(19): siRNA sense strand
ucaaauggcuguucaaagg

SEQ ID NO: 967316 - RNA, 19 nt, Homo sapiens
  misc_RNA (1)...(19): siRNA sense strand
uaugaaagcucagcaaguu

SEQ ID NO: 967317 - RNA, 19 nt, Homo sapiens
  misc_RNA (1)...(19): siRNA sense strand
gagaugaauucacgucgaa

SEQ ID NO: 967318 - RNA, 19 nt, Homo sapiens
  misc_RNA (1)...(19): siRNA sense strand
gaauucacgucgaaggaaa

SEQ ID NO: 967319 - RNA, 19 nt, Homo sapiens
  misc_RNA (1)...(19): siRNA sense strand
gugaagaggcuuuguuaaa

SEQ ID NO: 967320 - RNA, 19 nt, Homo sapiens
  misc_RNA (1)...(19): siRNA sense strand
ccaagauacuccuguggaa

SEQ ID NO: 967321 - RNA, 19 nt, Homo sapiens
  misc_RNA (1)...(19): siRNA sense strand
gaacuggguaugauguuga

SEQ ID NO: 967322 - RNA, 19 nt, Homo sapiens
  misc_RNA (1)...(19): siRNA sense strand
gaaaggagaacuggguaug

SEQ ID NO: 967323 - RNA, 19 nt, Homo sapiens
  misc_RNA (1)...(19): siRNA sense strand
gguaugauguugagcuuac

SEQ ID NO: 967324 - RNA, 19 nt, Homo sapiens
  misc_RNA (1)...(19): siRNA sense strand
ucugggaacuacaaacaaa

SEQ ID NO: 967325 - RNA, 19 nt, Homo sapiens
  misc_RNA (1)...(19): siRNA sense strand
ugaagaggcuuuguuaaaa

SEQ ID NO: 967326 - RNA, 19 nt, Homo sapiens
  misc_RNA (1)...(19): siRNA sense strand
agaaugccgugcaaacaga

SEQ ID NO: 967327 - RNA, 19 nt, Homo sapiens
  misc_RNA (1)...(19): siRNA sense strand
ggugauaguuuuaaugaga

SEQ ID NO: 967328 - RNA, 19 nt, Homo sapiens
  misc_RNA (1)...(19): siRNA sense strand
uagauggccuugaugauac

SEQ ID NO: 967329 - RNA, 19 nt, Homo sapiens
  misc_RNA (1)...(19): siRNA sense strand
aaacaaacgugccaaaaca

SEQ ID NO: 967330 - RNA, 19 nt, Homo sapiens
  misc_RNA (1)...(19): siRNA sense strand
gacgcucuaucgguaguua

SEQ ID NO: 967331 - RNA, 19 nt, Homo sapiens
  misc_RNA (1)...(19): siRNA sense strand
auagauggccuugaugaua

SEQ ID NO: 967332 - RNA, 19 nt, Homo sapiens
  misc_RNA (1)...(19): siRNA sense strand
gcagaaugccgugcaaaca

SEQ ID NO: 967333 - RNA, 19 nt, Homo sapiens
  misc_RNA (1)...(19): siRNA sense strand
ucggagaaaucuaugugaa

SEQ ID NO: 967334 - RNA, 19 nt, Homo sapiens
  misc_RNA (1)...(19): siRNA sense strand
ucuagcagcagauccguua

SEQ ID NO: 967335 - RNA, 19 nt, Homo sapiens
  misc_RNA (1)...(19): siRNA sense strand
ggagaacuggguaugaugu

SEQ ID NO: 967336 - RNA, 19 nt, Homo sapiens
  misc_RNA (1)...(19): siRNA sense strand
ggaugagagucccacaaag

SEQ ID NO: 967337 - RNA, 19 nt, Homo sapiens
  misc_RNA (1)...(19): siRNA sense strand
caaaggaacaggacaaagc

SEQ ID NO: 967338 - RNA, 19 nt, Homo sapiens
  misc_RNA (1)...(19): siRNA sense strand
caaaacuucuggccucuga

SEQ ID NO: 967339 - RNA, 19 nt, Homo sapiens
  misc_RNA (1)...(19): siRNA sense strand
ccacaaaggaacaggacaa

SEQ ID NO: 967340 - RNA, 19 nt, Homo sapiens
  misc_RNA (1)...(19): siRNA sense strand
gaugagagucccacaaagg

SEQ ID NO: 967341 - RNA, 19 nt, Homo sapiens
  misc_RNA (1)...(19): siRNA sense strand
cagcagauccguuaaacag

SEQ ID NO: 967342 - RNA, 19 nt, Homo sapiens
  misc_RNA (1)...(19): siRNA sense strand
uggcagauggugauaguuu

SEQ ID NO: 967343 - RNA, 19 nt, Homo sapiens
  misc_RNA (1)...(19): siRNA sense strand
ccucugaaaucuaugacau

SEQ ID NO: 967344 - RNA, 19 nt, Homo sapiens
  misc_RNA (1)...(19): siRNA sense strand
gaaaguggagaagagaugu

SEQ ID NO: 967345 - RNA, 19 nt, Homo sapiens
  misc_RNA (1)...(19): siRNA sense strand
auucuucaguccuccaaua

SEQ ID NO: 967346 - RNA, 19 nt, Homo sapiens
  misc_RNA (1)...(19): siRNA sense strand
ucugaaaucuaugacauuc

SEQ ID NO: 967347 - RNA, 19 nt, Homo sapiens
  misc_RNA (1)...(19): siRNA sense strand
ucgaaggaaagcucaauuu

SEQ ID NO: 967348 - RNA, 19 nt, Homo sapiens
  misc_RNA (1)...(19): siRNA sense strand
gcaaacagagaaaagauga

SEQ ID NO: 967349 - RNA, 19 nt, Homo sapiens
  misc_RNA (1)...(19): siRNA sense strand
aaacuucuggccucugaaa

SEQ ID NO: 967350 - RNA, 19 nt, Homo sapiens
  misc_RNA (1)...(19): siRNA sense strand
ggcuuuggcaucagcaaua

SEQ ID NO: 967351 - RNA, 19 nt, Homo sapiens
  misc_RNA (1)...(19): siRNA sense strand
uaucgguaguuaaccaguu

SEQ ID NO: 967352 - RNA, 19 nt, Homo sapiens
  misc_RNA (1)...(19): siRNA sense strand
ugaaagcucagcaaguugu

SEQ ID NO: 967353 - RNA, 19 nt, Homo sapiens
  misc_RNA (1)...(19): siRNA sense strand
aaagguguguggugcgaau

SEQ ID NO: 967354 - RNA, 19 nt, Homo sapiens
  misc_RNA (1)...(19): siRNA sense strand
gcagauggugauaguuuua

SEQ ID NO: 967355 - RNA, 19 nt, Homo sapiens
  misc_RNA (1)...(19): siRNA sense strand
aaggagaacuggguaugau

SEQ ID NO: 967356 - RNA, 19 nt, Homo sapiens
  misc_RNA (1)...(19): siRNA sense strand
gagccaucguccaggauca

SEQ ID NO: 967357 - RNA, 19 nt, Homo sapiens
  misc_RNA (1)...(19): siRNA sense strand
ggaugucugccuggccuua

SEQ ID NO: 967358 - RNA, 19 nt, Homo sapiens
  misc_RNA (1)...(19): siRNA sense strand
uauggcagauggugauagu

SEQ ID NO: 967359 - RNA, 19 nt, Homo sapiens
  misc_RNA (1)...(19): siRNA sense strand
caauauggcagauggugau

SEQ ID NO: 967360 - RNA, 19 nt, Homo sapiens
  misc_RNA (1)...(19): siRNA sense strand
gagaacuggguaugauguu

SEQ ID NO: 967361 - RNA, 19 nt, Homo sapiens
  misc_RNA (1)...(19): siRNA sense strand
cuucaguccuccaauaugg

SEQ ID NO: 967362 - RNA, 19 nt, Homo sapiens
  misc_RNA (1)...(19): siRNA sense strand
ucuggccucugaaaucuau

SEQ ID NO: 967363 - RNA, 19 nt, Homo sapiens
  misc_RNA (1)...(19): siRNA sense strand
caucagcaauagcaucaac

SEQ ID NO: 967364 - RNA, 19 nt, Homo sapiens
  misc_RNA (1)...(19): siRNA sense strand
ugaaaguggagaagagaug

SEQ ID NO: 967365 - RNA, 19 nt, Homo sapiens
  misc_RNA (1)...(19): siRNA sense strand
agaacuggguaugauguug

SEQ ID NO: 967366 - RNA, 19 nt, Homo sapiens
  misc_RNA (1)...(19): siRNA sense strand
ggucggcucacacccagaa

SEQ ID NO: 967367 - RNA, 19 nt, Homo sapiens
  misc_RNA (1)...(19): siRNA sense strand
uagcagcagauccguuaaa

SEQ ID NO: 967368 - RNA, 19 nt, Homo sapiens
  misc_RNA (1)...(19): siRNA sense strand
aaaggagaacuggguauga

SEQ ID NO: 967369 - RNA, 19 nt, Homo sapiens
  misc_RNA (1)...(19): siRNA sense strand
cgaaggaaagcucaauuuu

SEQ ID NO: 967370 - RNA, 19 nt, Homo sapiens
  misc_RNA (1)...(19): siRNA sense strand
gguguuauuagcuuuacuu

SEQ ID NO: 967371 - RNA, 19 nt, Homo sapiens
  misc_RNA (1)...(19): siRNA sense strand
auacuccuguggaaguuga

SEQ ID NO: 967372 - RNA, 19 nt, Homo sapiens
  misc_RNA (1)...(19): siRNA sense strand
gcuuuggcaucagcaauag

SEQ ID NO: 967373 - RNA, 19 nt, Homo sapiens
  misc_RNA (1)...(19): siRNA sense strand
aggaugagagucccacaaa

SEQ ID NO: 967374 - RNA, 19 nt, Homo sapiens
  misc_RNA (1)...(19): siRNA sense strand
gaggaugagagucccacaa

SEQ ID NO: 967375 - RNA, 19 nt, Homo sapiens
  misc_RNA (1)...(19): siRNA sense strand
aagagauguuggucccauu

SEQ ID NO: 967376 - RNA, 19 nt, Homo sapiens
  misc_RNA (1)...(19): siRNA sense strand
ggcaucagcaauagcauca

SEQ ID NO: 967377 - RNA, 19 nt, Homo sapiens
  misc_RNA (1)...(19): siRNA sense strand
gcagcagauccguuaaaca

SEQ ID NO: 967378 - RNA, 19 nt, Homo sapiens
  misc_RNA (1)...(19): siRNA sense strand
gaaaagugaaaguggagaa

SEQ ID NO: 967379 - RNA, 19 nt, Homo sapiens
  misc_RNA (1)...(19): siRNA sense strand
gaaagcucagcaaguugug

SEQ ID NO: 967380 - RNA, 19 nt, Homo sapiens
  misc_RNA (1)...(19): siRNA sense strand
ugaauucacgucgaaggaa

SEQ ID NO: 967381 - RNA, 19 nt, Homo sapiens
  misc_RNA (1)...(19): siRNA sense strand
aaagaugaaaggagaacug

SEQ ID NO: 967382 - RNA, 19 nt, Homo sapiens
  misc_RNA (1)...(19): siRNA sense strand
caaauggcuguucaaaggu

SEQ ID NO: 967383 - RNA, 19 nt, Homo sapiens
  misc_RNA (1)...(19): siRNA sense strand
cacaaaggaacaggacaaa

SEQ ID NO: 967384 - RNA, 19 nt, Homo sapiens
  misc_RNA (1)...(19): siRNA sense strand
ggaaguugaacagaacaca

SEQ ID NO: 967385 - RNA, 19 nt, Homo sapiens
  misc_RNA (1)...(19): siRNA sense strand
ccacuccgcuuugcuugcu

SEQ ID NO: 967386 - RNA, 19 nt, Homo sapiens
  misc_RNA (1)...(19): siRNA sense strand
gguggagcuagcuggcuua

SEQ ID NO: 967387 - RNA, 19 nt, Homo sapiens
  misc_RNA (1)...(19): siRNA sense strand
ugagagucccacaaaggaa

SEQ ID NO: 967388 - RNA, 19 nt, Homo sapiens
  misc_RNA (1)...(19): siRNA sense strand
ccaguuacgggaucuagca

SEQ ID NO: 967389 - RNA, 19 nt, Homo sapiens
  misc_RNA (1)...(19): siRNA sense strand
ggccuuauuuuauuuaugg

SEQ ID NO: 967390 - RNA, 19 nt, Homo sapiens
  misc_RNA (1)...(19): siRNA sense strand
gaaaucuaugacauucuuc

SEQ ID NO: 967391 - RNA, 19 nt, Homo sapiens
  misc_RNA (1)...(19): siRNA sense strand
cuggaaagcuuuaggaguu

SEQ ID NO: 967392 - RNA, 19 nt, Homo sapiens
  misc_RNA (1)...(19): siRNA sense strand
aaugcuagcuggauuuauu

SEQ ID NO: 967393 - RNA, 19 nt, Homo sapiens
  misc_RNA (1)...(19): siRNA sense strand
ggaaugcuagcuggauuua

SEQ ID NO: 967394 - RNA, 19 nt, Homo sapiens
  misc_RNA (1)...(19): siRNA sense strand
gaggaaacauugaaaucca

SEQ ID NO: 967395 - RNA, 19 nt, Homo sapiens
  misc_RNA (1)...(19): siRNA sense strand
gugauuagcuucgcagucu

SEQ ID NO: 967396 - RNA, 19 nt, Homo sapiens
  misc_RNA (1)...(19): siRNA sense strand
cuagcuggauuuauuacaa

SEQ ID NO: 967397 - RNA, 19 nt, Homo sapiens
  misc_RNA (1)...(19): siRNA sense strand
ggaaacauugaaauccaaa

SEQ ID NO: 967398 - RNA, 19 nt, Homo sapiens
  misc_RNA (1)...(19): siRNA sense strand
ggaaagcuuuaggaguuca

SEQ ID NO: 967399 - RNA, 19 nt, Homo sapiens
  misc_RNA (1)...(19): siRNA sense strand
caacaauucccaagaacuc

SEQ ID NO: 967400 - RNA, 19 nt, Homo sapiens
  misc_RNA (1)...(19): siRNA sense strand
caacauuaucauuggcuaa

SEQ ID NO: 967401 - RNA, 19 nt, Homo sapiens
  misc_RNA (1)...(19): siRNA sense strand
gguuaaagguggaauuuuc

SEQ ID NO: 967402 - RNA, 19 nt, Homo sapiens
  misc_RNA (1)...(19): siRNA sense strand
gggaaugcuagcuggauuu

SEQ ID NO: 967403 - RNA, 19 nt, Homo sapiens
  misc_RNA (1)...(19): siRNA sense strand
gggaggaaacauugaaauc

SEQ ID NO: 967404 - RNA, 19 nt, Homo sapiens
  misc_RNA (1)...(19): siRNA sense strand
gcaaucaauauuuccaaca

SEQ ID NO: 967405 - RNA, 19 nt, Homo sapiens
  misc_RNA (1)...(19): siRNA sense strand
cgggaaugcuagcuggauu

SEQ ID NO: 967406 - RNA, 19 nt, Homo sapiens
  misc_RNA (1)...(19): siRNA sense strand
uagcuucgcagucuggaaa

SEQ ID NO: 967407 - RNA, 19 nt, Homo sapiens
  misc_RNA (1)...(19): siRNA sense strand
gcuuuaggaguucacagua

SEQ ID NO: 967408 - RNA, 19 nt, Homo sapiens
  misc_RNA (1)...(19): siRNA sense strand
uuccaacaauucccaagaa

SEQ ID NO: 967409 - RNA, 19 nt, Homo sapiens
  misc_RNA (1)...(19): siRNA sense strand
ugagugggaggaaacauug

SEQ ID NO: 967410 - RNA, 19 nt, Homo sapiens
  misc_RNA (1)...(19): siRNA sense strand
uuuaggaguucacaguaug

SEQ ID NO: 967411 - RNA, 19 nt, Homo sapiens
  misc_RNA (1)...(19): siRNA sense strand
gcuguugagugggaggaaa

SEQ ID NO: 967412 - RNA, 19 nt, Homo sapiens
  misc_RNA (1)...(19): siRNA sense strand
ggguuggugugauuagcuu

SEQ ID NO: 967413 - RNA, 19 nt, Homo sapiens
  misc_RNA (1)...(19): siRNA sense strand
gaccggcuuuuccugguua

SEQ ID NO: 967414 - RNA, 19 nt, Homo sapiens
  misc_RNA (1)...(19): siRNA sense strand
aggaaacauugaaauccaa

SEQ ID NO: 967415 - RNA, 19 nt, Homo sapiens
  misc_RNA (1)...(19): siRNA sense strand
uauggccacggcugcauua

SEQ ID NO: 967416 - RNA, 19 nt, Homo sapiens
  misc_RNA (1)...(19): siRNA sense strand
ggaggaaacauugaaaucc

SEQ ID NO: 967417 - RNA, 19 nt, Homo sapiens
  misc_RNA (1)...(19): siRNA sense strand
cuuuaggaguucacaguau

SEQ ID NO: 967418 - RNA, 19 nt, Homo sapiens
  misc_RNA (1)...(19): siRNA sense strand
uagcuggauuuauuacaac

SEQ ID NO: 967419 - RNA, 19 nt, Homo sapiens
  misc_RNA (1)...(19): siRNA sense strand
ggacuuggaugccugcaaa

SEQ ID NO: 967420 - RNA, 19 nt, Homo sapiens
  misc_RNA (1)...(19): siRNA sense strand
ggaagacacugaucaaggu

SEQ ID NO: 967421 - RNA, 19 nt, Homo sapiens
  misc_RNA (1)...(19): siRNA sense strand
ggaagaccaucucgaagga

SEQ ID NO: 967422 - RNA, 19 nt, Homo sapiens
  misc_RNA (1)...(19): siRNA sense strand
gagacuagaccucguaauu

SEQ ID NO: 967423 - RNA, 19 nt, Homo sapiens
  misc_RNA (1)...(19): siRNA sense strand
gcaaagcgaggcugaagaa

SEQ ID NO: 967424 - RNA, 19 nt, Homo sapiens
  misc_RNA (1)...(19): siRNA sense strand
agacuagaccucguaauua

SEQ ID NO: 967425 - RNA, 19 nt, Homo sapiens
  misc_RNA (1)...(19): siRNA sense strand
gacuagaccucguaauuac

SEQ ID NO: 967426 - RNA, 19 nt, Homo sapiens
  misc_RNA (1)...(19): siRNA sense strand
gcaaagcucgggugcucua

SEQ ID NO: 967427 - RNA, 19 nt, Homo sapiens
  misc_RNA (1)...(19): siRNA sense strand
ggacagagaagaucuugag

SEQ ID NO: 967428 - RNA, 19 nt, Homo sapiens
  misc_RNA (1)...(19): siRNA sense strand
gacccugacuggcucauug

SEQ ID NO: 967429 - RNA, 19 nt, Homo sapiens
  misc_RNA (1)...(19): siRNA sense strand
gcucuggaaugaugaagug

SEQ ID NO: 967430 - RNA, 19 nt, Homo sapiens
  misc_RNA (1)...(19): siRNA sense strand
ccacgacggugccugacuu

SEQ ID NO: 967431 - RNA, 19 nt, Homo sapiens
  misc_RNA (1)...(19): siRNA sense strand
gggcagacagcaccaagaa

SEQ ID NO: 967432 - RNA, 19 nt, Homo sapiens
  misc_RNA (1)...(19): siRNA sense strand
augagaagcuggacaggaa

SEQ ID NO: 967433 - RNA, 19 nt, Homo sapiens
  misc_RNA (1)...(19): siRNA sense strand
accaagaacuggacagaga

SEQ ID NO: 967434 - RNA, 19 nt, Homo sapiens
  misc_RNA (1)...(19): siRNA sense strand
aagcucgggugcucuauga

SEQ ID NO: 967435 - RNA, 19 nt, Homo sapiens
  misc_RNA (1)...(19): siRNA sense strand
ugagcuugaugcccacuuu

SEQ ID NO: 967436 - RNA, 19 nt, Homo sapiens
  misc_RNA (1)...(19): siRNA sense strand
gaacuggacagagaagauc

SEQ ID NO: 967437 - RNA, 19 nt, Homo sapiens
  misc_RNA (1)...(19): siRNA sense strand
gcagacagcaccaagaacu

SEQ ID NO: 967438 - RNA, 19 nt, Homo sapiens
  misc_RNA (1)...(19): siRNA sense strand
ggaaugaugaaguggacaa

SEQ ID NO: 967439 - RNA, 19 nt, Homo sapiens
  misc_RNA (1)...(19): siRNA sense strand
caagguggcagaagcugaa

SEQ ID NO: 967440 - RNA, 19 nt, Homo sapiens
  misc_RNA (1)...(19): siRNA sense strand
agaagugacccgucucuug

SEQ ID NO: 967441 - RNA, 19 nt, Homo sapiens
  misc_RNA (1)...(19): siRNA sense strand
ccuccgcgcucuggaauga

SEQ ID NO: 967442 - RNA, 19 nt, Homo sapiens
  misc_RNA (1)...(19): siRNA sense strand
ugagaagacugagcuugau

SEQ ID NO: 967443 - RNA, 19 nt, Homo sapiens
  misc_RNA (1)...(19): siRNA sense strand
gcaguucacggaggagaaa

SEQ ID NO: 967444 - RNA, 19 nt, Homo sapiens
  misc_RNA (1)...(19): siRNA sense strand
cgacggugccugacuuuca

SEQ ID NO: 967445 - RNA, 19 nt, Homo sapiens
  misc_RNA (1)...(19): siRNA sense strand
ggcagaagcugaaaagcaa

SEQ ID NO: 967446 - RNA, 19 nt, Homo sapiens
  misc_RNA (1)...(19): siRNA sense strand
gcaccaagaacuggacaga

SEQ ID NO: 967447 - RNA, 19 nt, Homo sapiens
  misc_RNA (1)...(19): siRNA sense strand
gcugcuggcucaguacaug

SEQ ID NO: 967448 - RNA, 19 nt, Homo sapiens
  misc_RNA (1)...(19): siRNA sense strand
gagaagacugagcuugaug

SEQ ID NO: 967449 - RNA, 19 nt, Homo sapiens
  misc_RNA (1)...(19): siRNA sense strand
acuuggaacugcucagcua

SEQ ID NO: 967450 - RNA, 19 nt, Homo sapiens
  misc_RNA (1)...(19): siRNA sense strand
ccaagaacuggacagagaa

SEQ ID NO: 967451 - RNA, 19 nt, Homo sapiens
  misc_RNA (1)...(19): siRNA sense strand
ccacugcugcggccacuau

SEQ ID NO: 967452 - RNA, 19 nt, Homo sapiens
  misc_RNA (1)...(19): siRNA sense strand
guucacggaggagaaauuu

SEQ ID NO: 967453 - RNA, 19 nt, Homo sapiens
  misc_RNA (1)...(19): siRNA sense strand
ucacggaggagaaauuugg

SEQ ID NO: 967454 - RNA, 19 nt, Homo sapiens
  misc_RNA (1)...(19): siRNA sense strand
gaaggccaaggcugcagaa

SEQ ID NO: 967455 - RNA, 19 nt, Homo sapiens
  misc_RNA (1)...(19): siRNA sense strand
aaaccggcgucuggacuug

SEQ ID NO: 967456 - RNA, 19 nt, Homo sapiens
  misc_RNA (1)...(19): siRNA sense strand
cugagaagacugagcuuga

SEQ ID NO: 967457 - RNA, 19 nt, Homo sapiens
  misc_RNA (1)...(19): siRNA sense strand
caggagacuagaccucgua

SEQ ID NO: 967458 - RNA, 19 nt, Homo sapiens
  misc_RNA (1)...(19): siRNA sense strand
caguagcacucacgugaac

SEQ ID NO: 967459 - RNA, 19 nt, Homo sapiens
  misc_RNA (1)...(19): siRNA sense strand
gcagaagugacccgucucu

SEQ ID NO: 967460 - RNA, 19 nt, Homo sapiens
  misc_RNA (1)...(19): siRNA sense strand
gcuugaugcccacuuugaa

SEQ ID NO: 967461 - RNA, 19 nt, Homo sapiens
  misc_RNA (1)...(19): siRNA sense strand
ccucguaauuacauucucu

SEQ ID NO: 967462 - RNA, 19 nt, Homo sapiens
  misc_RNA (1)...(19): siRNA sense strand
gagcuugaugcccacuuug

SEQ ID NO: 967463 - RNA, 19 nt, Homo sapiens
  misc_RNA (1)...(19): siRNA sense strand
gaucaagguggcagaagcu

SEQ ID NO: 967464 - RNA, 19 nt, Homo sapiens
  misc_RNA (1)...(19): siRNA sense strand
gccacaugcuggacuugca

SEQ ID NO: 967465 - RNA, 19 nt, Homo sapiens
  misc_RNA (1)...(19): siRNA sense strand
ucacacccuugcgcaacuu

SEQ ID NO: 967466 - RNA, 19 nt, Homo sapiens
  misc_RNA (1)...(19): siRNA sense strand
ggacagaaaucaucaauua

SEQ ID NO: 967467 - RNA, 19 nt, Homo sapiens
  misc_RNA (1)...(19): siRNA sense strand
ucacagagguugaaguuaa

SEQ ID NO: 967468 - RNA, 19 nt, Homo sapiens
  misc_RNA (1)...(19): siRNA sense strand
uaaaggaggugcaugauga

SEQ ID NO: 967469 - RNA, 19 nt, Homo sapiens
  misc_RNA (1)...(19): siRNA sense strand
gauaguaccagaugaaaua

SEQ ID NO: 967470 - RNA, 19 nt, Homo sapiens
  misc_RNA (1)...(19): siRNA sense strand
ucaaagaucucguacaaga

SEQ ID NO: 967471 - RNA, 19 nt, Homo sapiens
  misc_RNA (1)...(19): siRNA sense strand
caacaacauuugcaacuuu

SEQ ID NO: 967472 - RNA, 19 nt, Homo sapiens
  misc_RNA (1)...(19): siRNA sense strand
gauaguuccucaucacaua

SEQ ID NO: 967473 - RNA, 19 nt, Homo sapiens
  misc_RNA (1)...(19): siRNA sense strand
ggaaugagcugcuaaaucc

SEQ ID NO: 967474 - RNA, 19 nt, Homo sapiens
  misc_RNA (1)...(19): siRNA sense strand
ggagaucguuucaucauug

SEQ ID NO: 967475 - RNA, 19 nt, Homo sapiens
  misc_RNA (1)...(19): siRNA sense strand
ggacaagucaugcggguua

SEQ ID NO: 967476 - RNA, 19 nt, Homo sapiens
  misc_RNA (1)...(19): siRNA sense strand
gaaaggaucucaggaaugc

SEQ ID NO: 967477 - RNA, 19 nt, Homo sapiens
  misc_RNA (1)...(19): siRNA sense strand
ggauauugaugguguaaga

SEQ ID NO: 967478 - RNA, 19 nt, Homo sapiens
  misc_RNA (1)...(19): siRNA sense strand
caaaugagcagccgucuga

SEQ ID NO: 967479 - RNA, 19 nt, Homo sapiens
  misc_RNA (1)...(19): siRNA sense strand
ccagaugacuuacucaaug

SEQ ID NO: 967480 - RNA, 19 nt, Homo sapiens
  misc_RNA (1)...(19): siRNA sense strand
caacuuggguauuguagga

SEQ ID NO: 967481 - RNA, 19 nt, Homo sapiens
  misc_RNA (1)...(19): siRNA sense strand
uacaacaggugcuccaaua

SEQ ID NO: 967482 - RNA, 19 nt, Homo sapiens
  misc_RNA (1)...(19): siRNA sense strand
uaccaucgguguauacuaa

SEQ ID NO: 967483 - RNA, 19 nt, Homo sapiens
  misc_RNA (1)...(19): siRNA sense strand
gauaguugcuucaggaauc

SEQ ID NO: 967484 - RNA, 19 nt, Homo sapiens
  misc_RNA (1)...(19): siRNA sense strand
ucccuggucucaucaauua

SEQ ID NO: 967485 - RNA, 19 nt, Homo sapiens
  misc_RNA (1)...(19): siRNA sense strand
gaagaaagacagugguguu

SEQ ID NO: 967486 - RNA, 19 nt, Homo sapiens
  misc_RNA (1)...(19): siRNA sense strand
acaaaggaguucaauguga

SEQ ID NO: 967487 - RNA, 19 nt, Homo sapiens
  misc_RNA (1)...(19): siRNA sense strand
ucucaaagaucucguacaa

SEQ ID NO: 967488 - RNA, 19 nt, Homo sapiens
  misc_RNA (1)...(19): siRNA sense strand
ggaggugcaugaugaacuu

SEQ ID NO: 967489 - RNA, 19 nt, Homo sapiens
  misc_RNA (1)...(19): siRNA sense strand
gaguacagguaaucaaaug

SEQ ID NO: 967490 - RNA, 19 nt, Homo sapiens
  misc_RNA (1)...(19): siRNA sense strand
gggaaaacgcuuauaauua

SEQ ID NO: 967491 - RNA, 19 nt, Homo sapiens
  misc_RNA (1)...(19): siRNA sense strand
aaaccaggcuugccaacaa

SEQ ID NO: 967492 - RNA, 19 nt, Homo sapiens
  misc_RNA (1)...(19): siRNA sense strand
agacaacccagaugacuua

SEQ ID NO: 967493 - RNA, 19 nt, Homo sapiens
  misc_RNA (1)...(19): siRNA sense strand
gaagauaguuccucaucac

SEQ ID NO: 967494 - RNA, 19 nt, Homo sapiens
  misc_RNA (1)...(19): siRNA sense strand
caagaaaggaucucaggaa

SEQ ID NO: 967495 - RNA, 19 nt, Homo sapiens
  misc_RNA (1)...(19): siRNA sense strand
gaagaccgcagugggauaa

SEQ ID NO: 967496 - RNA, 19 nt, Homo sapiens
  misc_RNA (1)...(19): siRNA sense strand
gcacuacuccuucagaauc

SEQ ID NO: 967497 - RNA, 19 nt, Homo sapiens
  misc_RNA (1)...(19): siRNA sense strand
gaugcuaccuccaaagaca

SEQ ID NO: 967498 - RNA, 19 nt, Homo sapiens
  misc_RNA (1)...(19): siRNA sense strand
caucggccaugacauuaaa

SEQ ID NO: 967499 - RNA, 19 nt, Homo sapiens
  misc_RNA (1)...(19): siRNA sense strand
aggaaacccugauagauug

SEQ ID NO: 967500 - RNA, 19 nt, Homo sapiens
  misc_RNA (1)...(19): siRNA sense strand
gaaagacagugguguugcu

SEQ ID NO: 967501 - RNA, 19 nt, Homo sapiens
  misc_RNA (1)...(19): siRNA sense strand
ggacauugaucuucaugcu

SEQ ID NO: 967502 - RNA, 19 nt, Homo sapiens
  misc_RNA (1)...(19): siRNA sense strand
gcagugggauaaaucucaa

SEQ ID NO: 967503 - RNA, 19 nt, Homo sapiens
  misc_RNA (1)...(19): siRNA sense strand
caagauaguaccagaugaa

SEQ ID NO: 967504 - RNA, 19 nt, Homo sapiens
  misc_RNA (1)...(19): siRNA sense strand
gaugggaucacuuaauguu

SEQ ID NO: 967505 - RNA, 19 nt, Homo sapiens
  misc_RNA (1)...(19): siRNA sense strand
aaagcaagguuaucaugug

SEQ ID NO: 967506 - RNA, 19 nt, Homo sapiens
  misc_RNA (1)...(19): siRNA sense strand
agacaaaggaguucaaugu

SEQ ID NO: 967507 - RNA, 19 nt, Homo sapiens
  misc_RNA (1)...(19): siRNA sense strand
gaaugauccuuacuaacca

SEQ ID NO: 967508 - RNA, 19 nt, Homo sapiens
  misc_RNA (1)...(19): siRNA sense strand
ggaaugauccuuacuaacc

SEQ ID NO: 967509 - RNA, 19 nt, Homo sapiens
  misc_RNA (1)...(19): siRNA sense strand
caucaucaaagcaagguua

SEQ ID NO: 967510 - RNA, 19 nt, Homo sapiens
  misc_RNA (1)...(19): siRNA sense strand
uagaagaaaucaaggaaac

SEQ ID NO: 967511 - RNA, 19 nt, Homo sapiens
  misc_RNA (1)...(19): siRNA sense strand
caacccagaugacuuacuc

SEQ ID NO: 967512 - RNA, 19 nt, Homo sapiens
  misc_RNA (1)...(19): siRNA sense strand
gaucaacuuggguauugua

SEQ ID NO: 967513 - RNA, 19 nt, Homo sapiens
  misc_RNA (1)...(19): siRNA sense strand
caagguggcuagaagacau

SEQ ID NO: 967514 - RNA, 19 nt, Homo sapiens
  misc_RNA (1)...(19): siRNA sense strand
caucauuucucgugguguu

SEQ ID NO: 967515 - RNA, 19 nt, Homo sapiens
  misc_RNA (1)...(19): siRNA sense strand
gagggaaugauccuuacua

SEQ ID NO: 967516 - RNA, 19 nt, Homo sapiens
  misc_RNA (1)...(19): siRNA sense strand
gggcacagaguacagguaa

SEQ ID NO: 967517 - RNA, 19 nt, Homo sapiens
  misc_RNA (1)...(19): siRNA sense strand
aaggaaacccugauagauu

SEQ ID NO: 967518 - RNA, 19 nt, Homo sapiens
  misc_RNA (1)...(19): siRNA sense strand
ccaacaacauuugcaacuu

SEQ ID NO: 967519 - RNA, 19 nt, Homo sapiens
  misc_RNA (1)...(19): siRNA sense strand
uaauaaguuuccagugguu

SEQ ID NO: 967520 - RNA, 19 nt, Homo sapiens
  misc_RNA (1)...(19): siRNA sense strand
ugaugaacuugaagauuug

SEQ ID NO: 967521 - RNA, 19 nt, Homo sapiens
  misc_RNA (1)...(19): siRNA sense strand
aagaaaggaucucaggaau

SEQ ID NO: 967522 - RNA, 19 nt, Homo sapiens
  misc_RNA (1)...(19): siRNA sense strand
gcacagaguacagguaauc

SEQ ID NO: 967523 - RNA, 19 nt, Homo sapiens
  misc_RNA (1)...(19): siRNA sense strand
gcccaucccuggucucauc

SEQ ID NO: 967524 - RNA, 19 nt, Homo sapiens
  misc_RNA (1)...(19): siRNA sense strand
uaaacagacagaagacaaa

SEQ ID NO: 967525 - RNA, 19 nt, Homo sapiens
  misc_RNA (1)...(19): siRNA sense strand
caacucuucuagcaacaau

SEQ ID NO: 967526 - RNA, 19 nt, Homo sapiens
  misc_RNA (1)...(19): siRNA sense strand
aagcaagguuaucauguga

SEQ ID NO: 967527 - RNA, 19 nt, Homo sapiens
  misc_RNA (1)...(19): siRNA sense strand
uagcaacaauucaggaaca

SEQ ID NO: 967528 - RNA, 19 nt, Homo sapiens
  misc_RNA (1)...(19): siRNA sense strand
gacagaagacaaaggaguu

SEQ ID NO: 967529 - RNA, 19 nt, Homo sapiens
  misc_RNA (1)...(19): siRNA sense strand
gcugcuaaauccugaagau

SEQ ID NO: 967530 - RNA, 19 nt, Homo sapiens
  misc_RNA (1)...(19): siRNA sense strand
ugauggcacugaagaacuu

SEQ ID NO: 967531 - RNA, 19 nt, Homo sapiens
  misc_RNA (1)...(19): siRNA sense strand
cagcacuacuccuucagaa

SEQ ID NO: 967532 - RNA, 19 nt, Homo sapiens
  misc_RNA (1)...(19): siRNA sense strand
ucaaggaaacccugauaga

SEQ ID NO: 967533 - RNA, 19 nt, Homo sapiens
  misc_RNA (1)...(19): siRNA sense strand
caucaaagcaagguuauca

SEQ ID NO: 967534 - RNA, 19 nt, Homo sapiens
  misc_RNA (1)...(19): siRNA sense strand
ugacaucuauggacaaagc

SEQ ID NO: 967535 - RNA, 19 nt, Homo sapiens
  misc_RNA (1)...(19): siRNA sense strand
caaggaaacccugauagau

SEQ ID NO: 967536 - RNA, 19 nt, Homo sapiens
  misc_RNA (1)...(19): siRNA sense strand
ggaagaggaagaagagaag

SEQ ID NO: 967537 - RNA, 19 nt, Homo sapiens
  misc_RNA (1)...(19): siRNA sense strand
cagaguacagguaaucaaa

SEQ ID NO: 967538 - RNA, 19 nt, Homo sapiens
  misc_RNA (1)...(19): siRNA sense strand
agggaaugauccuuacuaa

SEQ ID NO: 967539 - RNA, 19 nt, Homo sapiens
  misc_RNA (1)...(19): siRNA sense strand
ucucaggaaugcuuucaau

SEQ ID NO: 967540 - RNA, 19 nt, Homo sapiens
  misc_RNA (1)...(19): siRNA sense strand
caauucaggaacaugguua

SEQ ID NO: 967541 - RNA, 19 nt, Homo sapiens
  misc_RNA (1)...(19): siRNA sense strand
gggaaugagcugcuaaauc

SEQ ID NO: 967542 - RNA, 19 nt, Homo sapiens
  misc_RNA (1)...(19): siRNA sense strand
gcccaucggccaugacauu

SEQ ID NO: 967543 - RNA, 19 nt, Homo sapiens
  misc_RNA (1)...(19): siRNA sense strand
guaaaggaggugcaugaug

SEQ ID NO: 967544 - RNA, 19 nt, Homo sapiens
  misc_RNA (1)...(19): siRNA sense strand
aguaccagaugaaauagaa

SEQ ID NO: 967545 - RNA, 19 nt, Homo sapiens
  misc_RNA (1)...(19): siRNA sense strand
caaagcaagguuaucaugu

SEQ ID NO: 967546 - RNA, 19 nt, Homo sapiens
  misc_RNA (1)...(19): siRNA sense strand
aaucaucaauuaccgagau

SEQ ID NO: 967547 - RNA, 19 nt, Homo sapiens
  misc_RNA (1)...(19): siRNA sense strand
ucaauuauucccaucauuc

SEQ ID NO: 967548 - RNA, 19 nt, Homo sapiens
  misc_RNA (1)...(19): siRNA sense strand
agacagugguguugcuuca

SEQ ID NO: 967549 - RNA, 19 nt, Homo sapiens
  misc_RNA (1)...(19): siRNA sense strand
gaagacaaaggaguucaau

SEQ ID NO: 967550 - RNA, 19 nt, Homo sapiens
  misc_RNA (1)...(19): siRNA sense strand
cuucaggaaucuugcagaa

SEQ ID NO: 967551 - RNA, 19 nt, Homo sapiens
  misc_RNA (1)...(19): siRNA sense strand
gcuaaauccugaagaugac

SEQ ID NO: 967552 - RNA, 19 nt, Homo sapiens
  misc_RNA (1)...(19): siRNA sense strand
uaaccacgaccaucaaauc

SEQ ID NO: 967553 - RNA, 19 nt, Homo sapiens
  misc_RNA (1)...(19): siRNA sense strand
gaagaagagaagaaagaca

SEQ ID NO: 967554 - RNA, 19 nt, Homo sapiens
  misc_RNA (1)...(19): siRNA sense strand
gugggacuauaucagcaua

SEQ ID NO: 967555 - RNA, 19 nt, Homo sapiens
  misc_RNA (1)...(19): siRNA sense strand
caccugcaaucucuuuguu

SEQ ID NO: 967556 - RNA, 19 nt, Homo sapiens
  misc_RNA (1)...(19): siRNA sense strand
acgaucaacuuggguauug

SEQ ID NO: 967557 - RNA, 19 nt, Homo sapiens
  misc_RNA (1)...(19): siRNA sense strand
gacaaaggaguucaaugug

SEQ ID NO: 967558 - RNA, 19 nt, Homo sapiens
  misc_RNA (1)...(19): siRNA sense strand
cacagagguugaaguuaau

SEQ ID NO: 967559 - RNA, 19 nt, Homo sapiens
  misc_RNA (1)...(19): siRNA sense strand
gaacuuaucagggaaucag

SEQ ID NO: 967560 - RNA, 19 nt, Homo sapiens
  misc_RNA (1)...(19): siRNA sense strand
cccaggagaucguuucauc

SEQ ID NO: 967561 - RNA, 19 nt, Homo sapiens
  misc_RNA (1)...(19): siRNA sense strand
gccuguauguggaaucaga

SEQ ID NO: 967562 - RNA, 19 nt, Homo sapiens
  misc_RNA (1)...(19): siRNA sense strand
ucaaagcaagguuaucaug

SEQ ID NO: 967563 - RNA, 19 nt, Homo sapiens
  misc_RNA (1)...(19): siRNA sense strand
gagacaacccagaugacuu

SEQ ID NO: 967564 - RNA, 19 nt, Homo sapiens
  misc_RNA (1)...(19): siRNA sense strand
ccucagcacuacuccuuca

SEQ ID NO: 967565 - RNA, 19 nt, Homo sapiens
  misc_RNA (1)...(19): siRNA sense strand
agaagauaguuccucauca

SEQ ID NO: 967566 - RNA, 19 nt, Homo sapiens
  misc_RNA (1)...(19): siRNA sense strand
gaaauccgguaccaaguga

SEQ ID NO: 967567 - RNA, 19 nt, Homo sapiens
  misc_RNA (1)...(19): siRNA sense strand
ccugucagccuuucaauaa

SEQ ID NO: 967568 - RNA, 19 nt, Homo sapiens
  misc_RNA (1)...(19): siRNA sense strand
ggaaauccgguaccaagug

SEQ ID NO: 967569 - RNA, 19 nt, Homo sapiens
  misc_RNA (1)...(19): siRNA sense strand
agggauaccugaagcuguu

SEQ ID NO: 967570 - RNA, 19 nt, Homo sapiens
  misc_RNA (1)...(19): siRNA sense strand
gcaggcacccacuguuuca

SEQ ID NO: 967571 - RNA, 19 nt, Homo sapiens
  misc_RNA (1)...(19): siRNA sense strand
cagcuucagccuagggaua

SEQ ID NO: 967572 - RNA, 19 nt, Homo sapiens
  misc_RNA (1)...(19): siRNA sense strand
cacccacuguuucaacuug

SEQ ID NO: 967573 - RNA, 19 nt, Homo sapiens
  misc_RNA (1)...(19): siRNA sense strand
ccgcuagccuacccuguca

SEQ ID NO: 967574 - RNA, 19 nt, Homo sapiens
  misc_RNA (1)...(19): siRNA sense strand
ucgcaggcacccacuguuu

SEQ ID NO: 967575 - RNA, 19 nt, Homo sapiens
  misc_RNA (1)...(19): siRNA sense strand
gacccacccaagccugaua

SEQ ID NO: 967576 - RNA, 19 nt, Homo sapiens
  misc_RNA (1)...(19): siRNA sense strand
gcacccacuguuucaacuu

SEQ ID NO: 967577 - RNA, 19 nt, Homo sapiens
  misc_RNA (1)...(19): siRNA sense strand
cugucagccuuucaauaaa

SEQ ID NO: 967578 - RNA, 19 nt, Homo sapiens
  misc_RNA (1)...(19): siRNA sense strand
ugucagccuuucaauaaaa

SEQ ID NO: 967579 - RNA, 19 nt, Homo sapiens
  misc_RNA (1)...(19): siRNA sense strand
accugaagcuguugagcaa

SEQ ID NO: 967580 - RNA, 19 nt, Homo sapiens
  misc_RNA (1)...(19): siRNA sense strand
ugccagagcagcaacacuu

SEQ ID NO: 967581 - RNA, 19 nt, Homo sapiens
  misc_RNA (1)...(19): siRNA sense strand
gggaaauccgguaccaagu

SEQ ID NO: 967582 - RNA, 19 nt, Homo sapiens
  misc_RNA (1)...(19): siRNA sense strand
gaacuugcuucgaagauuu

SEQ ID NO: 967583 - RNA, 19 nt, Homo sapiens
  misc_RNA (1)...(19): siRNA sense strand
gaggauguguucccaaaua

SEQ ID NO: 967584 - RNA, 19 nt, Homo sapiens
  misc_RNA (1)...(19): siRNA sense strand
gaagacaggucgauugcuu

SEQ ID NO: 967585 - RNA, 19 nt, Homo sapiens
  misc_RNA (1)...(19): siRNA sense strand
gaacuggccagaacaauau

SEQ ID NO: 967586 - RNA, 19 nt, Homo sapiens
  misc_RNA (1)...(19): siRNA sense strand
gagcuacucuaauucuuga

SEQ ID NO: 967587 - RNA, 19 nt, Homo sapiens
  misc_RNA (1)...(19): siRNA sense strand
caagagaggccuccauuug

SEQ ID NO: 967588 - RNA, 19 nt, Homo sapiens
  misc_RNA (1)...(19): siRNA sense strand
cggcagaggugaaauacaa

SEQ ID NO: 967589 - RNA, 19 nt, Homo sapiens
  misc_RNA (1)...(19): siRNA sense strand
gagacccacucaagaauau

SEQ ID NO: 967590 - RNA, 19 nt, Homo sapiens
  misc_RNA (1)...(19): siRNA sense strand
ggaacuugcuucgaagauu

SEQ ID NO: 967591 - RNA, 19 nt, Homo sapiens
  misc_RNA (1)...(19): siRNA sense strand
gauggaagcccugaaguuu

SEQ ID NO: 967592 - RNA, 19 nt, Homo sapiens
  misc_RNA (1)...(19): siRNA sense strand
aaaugaaagucuuggagua

SEQ ID NO: 967593 - RNA, 19 nt, Homo sapiens
  misc_RNA (1)...(19): siRNA sense strand
ccaaauauccucaauagag

SEQ ID NO: 967594 - RNA, 19 nt, Homo sapiens
  misc_RNA (1)...(19): siRNA sense strand
ccacagaacuggccagaac

SEQ ID NO: 967595 - RNA, 19 nt, Homo sapiens
  misc_RNA (1)...(19): siRNA sense strand
ugaggcaacuaucauguuu

SEQ ID NO: 967596 - RNA, 19 nt, Homo sapiens
  misc_RNA (1)...(19): siRNA sense strand
ccagaucaccgauaggaua

SEQ ID NO: 967597 - RNA, 19 nt, Homo sapiens
  misc_RNA (1)...(19): siRNA sense strand
ggagacccacucaagaaua

SEQ ID NO: 967598 - RNA, 19 nt, Homo sapiens
  misc_RNA (1)...(19): siRNA sense strand
ggagcuggccagaagaaua

SEQ ID NO: 967599 - RNA, 19 nt, Homo sapiens
  misc_RNA (1)...(19): siRNA sense strand
cuaauccaguugaauauga

SEQ ID NO: 967600 - RNA, 19 nt, Homo sapiens
  misc_RNA (1)...(19): siRNA sense strand
ggaaccuccucacuacuga

SEQ ID NO: 967601 - RNA, 19 nt, Homo sapiens
  misc_RNA (1)...(19): siRNA sense strand
gggaggcuguggaagauga

SEQ ID NO: 967602 - RNA, 19 nt, Homo sapiens
  misc_RNA (1)...(19): siRNA sense strand
cgauugcuuuggugaauuu

SEQ ID NO: 967603 - RNA, 19 nt, Homo sapiens
  misc_RNA (1)...(19): siRNA sense strand
ugaaugauaaggcaaauga

SEQ ID NO: 967604 - RNA, 19 nt, Homo sapiens
  misc_RNA (1)...(19): siRNA sense strand
gcaagagaggccuccauuu

SEQ ID NO: 967605 - RNA, 19 nt, Homo sapiens
  misc_RNA (1)...(19): siRNA sense strand
gcugacaccuacaauuuag

SEQ ID NO: 967606 - RNA, 19 nt, Homo sapiens
  misc_RNA (1)...(19): siRNA sense strand
gcagagaucaccgcagauu

SEQ ID NO: 967607 - RNA, 19 nt, Homo sapiens
  misc_RNA (1)...(19): siRNA sense strand
gagcuggccagaagaauau

SEQ ID NO: 967608 - RNA, 19 nt, Homo sapiens
  misc_RNA (1)...(19): siRNA sense strand
ggccagaagaauauaauaa

SEQ ID NO: 967609 - RNA, 19 nt, Homo sapiens
  misc_RNA (1)...(19): siRNA sense strand
agacagcgcuaucuggaau

SEQ ID NO: 967610 - RNA, 19 nt, Homo sapiens
  misc_RNA (1)...(19): siRNA sense strand
cgacggcagaggugaaaua

SEQ ID NO: 967611 - RNA, 19 nt, Homo sapiens
  misc_RNA (1)...(19): siRNA sense strand
ucccaaauauccucaauag

SEQ ID NO: 967612 - RNA, 19 nt, Homo sapiens
  misc_RNA (1)...(19): siRNA sense strand
acagggaaaucacaaagau

SEQ ID NO: 967613 - RNA, 19 nt, Homo sapiens
  misc_RNA (1)...(19): siRNA sense strand
gaggacacuaugaaugaua

SEQ ID NO: 967614 - RNA, 19 nt, Homo sapiens
  misc_RNA (1)...(19): siRNA sense strand
uggaagcccugaaguuugu

SEQ ID NO: 967615 - RNA, 19 nt, Homo sapiens
  misc_RNA (1)...(19): siRNA sense strand
gacgagcaguccagacguu

SEQ ID NO: 967616 - RNA, 19 nt, Homo sapiens
  misc_RNA (1)...(19): siRNA sense strand
uggccaggcucuacagaaa

SEQ ID NO: 967617 - RNA, 19 nt, Homo sapiens
  misc_RNA (1)...(19): siRNA sense strand
gggcaaccgugucaaagag

SEQ ID NO: 967618 - RNA, 19 nt, Homo sapiens
  misc_RNA (1)...(19): siRNA sense strand
gaggagaugcugccuauac

SEQ ID NO: 967619 - RNA, 19 nt, Homo sapiens
  misc_RNA (1)...(19): siRNA sense strand
ccagaagaauauaauaagg

SEQ ID NO: 967620 - RNA, 19 nt, Homo sapiens
  misc_RNA (1)...(19): siRNA sense strand
ggaaaucacaaagauggaa

SEQ ID NO: 967621 - RNA, 19 nt, Homo sapiens
  misc_RNA (1)...(19): siRNA sense strand
gcaugcgauucuuggagua

SEQ ID NO: 967622 - RNA, 19 nt, Homo sapiens
  misc_RNA (1)...(19): siRNA sense strand
ccacuguccuacucuaauc

SEQ ID NO: 967623 - RNA, 19 nt, Homo sapiens
  misc_RNA (1)...(19): siRNA sense strand
agaacuggccagaacaaua

SEQ ID NO: 967624 - RNA, 19 nt, Homo sapiens
  misc_RNA (1)...(19): siRNA sense strand
ggcugacaccuacaauuua

SEQ ID NO: 967625 - RNA, 19 nt, Homo sapiens
  misc_RNA (1)...(19): siRNA sense strand
acucuaauccaguugaaua

SEQ ID NO: 967626 - RNA, 19 nt, Homo sapiens
  misc_RNA (1)...(19): siRNA sense strand
gaagauuuaguguggaugu

SEQ ID NO: 967627 - RNA, 19 nt, Homo sapiens
  misc_RNA (1)...(19): siRNA sense strand
gcaaccagaaucagaggaa

SEQ ID NO: 967628 - RNA, 19 nt, Homo sapiens
  misc_RNA (1)...(19): siRNA sense strand
gcacaucuaccuccuuguc

SEQ ID NO: 967629 - RNA, 19 nt, Homo sapiens
  misc_RNA (1)...(19): siRNA sense strand
cggaggacacuaugaauga

SEQ ID NO: 967630 - RNA, 19 nt, Homo sapiens
  misc_RNA (1)...(19): siRNA sense strand
gcacuaauccccuugaguu

SEQ ID NO: 967631 - RNA, 19 nt, Homo sapiens
  misc_RNA (1)...(19): siRNA sense strand
ccuccucacuacugacuuu

SEQ ID NO: 967632 - RNA, 19 nt, Homo sapiens
  misc_RNA (1)...(19): siRNA sense strand
ccaaaucugaggcaacuau

SEQ ID NO: 967633 - RNA, 19 nt, Homo sapiens
  misc_RNA (1)...(19): siRNA sense strand
cccguaagcuuaugagaca

SEQ ID NO: 967634 - RNA, 19 nt, Homo sapiens
  misc_RNA (1)...(19): siRNA sense strand
ggagaaagcauuccaucac

SEQ ID NO: 967635 - RNA, 19 nt, Homo sapiens
  misc_RNA (1)...(19): siRNA sense strand
uaaugccaauccuagguuu

SEQ ID NO: 967636 - RNA, 19 nt, Homo sapiens
  misc_RNA (1)...(19): siRNA sense strand
ggaggacacuaugaaugau

SEQ ID NO: 967637 - RNA, 19 nt, Homo sapiens
  misc_RNA (1)...(19): siRNA sense strand
ggucggaggacacuaugaa

SEQ ID NO: 967638 - RNA, 19 nt, Homo sapiens
  misc_RNA (1)...(19): siRNA sense strand
gaaagcgaccacagaacug

SEQ ID NO: 967639 - RNA, 19 nt, Homo sapiens
  misc_RNA (1)...(19): siRNA sense strand
gcaggccacuguccuacuc

SEQ ID NO: 967640 - RNA, 19 nt, Homo sapiens
  misc_RNA (1)...(19): siRNA sense strand
gcuacucuaauucuugaua

SEQ ID NO: 967641 - RNA, 19 nt, Homo sapiens
  misc_RNA (1)...(19): siRNA sense strand
ggccacauccucuugaaug

SEQ ID NO: 967642 - RNA, 19 nt, Homo sapiens
  misc_RNA (1)...(19): siRNA sense strand
ucacacuggcaaagaauuu

SEQ ID NO: 967643 - RNA, 19 nt, Homo sapiens
  misc_RNA (1)...(19): siRNA sense strand
cugaggagaugcugccuau

SEQ ID NO: 967644 - RNA, 19 nt, Homo sapiens
  misc_RNA (1)...(19): siRNA sense strand
gaaugggaaccgagcaaga

SEQ ID NO: 967645 - RNA, 19 nt, Homo sapiens
  misc_RNA (1)...(19): siRNA sense strand
cagagaucaccgcagauua

SEQ ID NO: 967646 - RNA, 19 nt, Homo sapiens
  misc_RNA (1)...(19): siRNA sense strand
gaaauacaagcuacuaacg

SEQ ID NO: 967647 - RNA, 19 nt, Homo sapiens
  misc_RNA (1)...(19): siRNA sense strand
aggcugacaccuacaauuu

SEQ ID NO: 967648 - RNA, 19 nt, Homo sapiens
  misc_RNA (1)...(19): siRNA sense strand
gaugggcaaccgugucaaa

SEQ ID NO: 967649 - RNA, 19 nt, Homo sapiens
  misc_RNA (1)...(19): siRNA sense strand
aggacacuaugaaugauaa

SEQ ID NO: 967650 - RNA, 19 nt, Homo sapiens
  misc_RNA (1)...(19): siRNA sense strand
ugucagaugcccaugauga

SEQ ID NO: 967651 - RNA, 19 nt, Homo sapiens
  misc_RNA (1)...(19): siRNA sense strand
gauguagggagaaagcauu

SEQ ID NO: 967652 - RNA, 19 nt, Homo sapiens
  misc_RNA (1)...(19): siRNA sense strand
acagaaagcgaccacagaa

SEQ ID NO: 967653 - RNA, 19 nt, Homo sapiens
  misc_RNA (1)...(19): siRNA sense strand
gagaguacucagaucaguu

SEQ ID NO: 967654 - RNA, 19 nt, Homo sapiens
  misc_RNA (1)...(19): siRNA sense strand
ggugaaauacaagcuacua

SEQ ID NO: 967655 - RNA, 19 nt, Homo sapiens
  misc_RNA (1)...(19): siRNA sense strand
guccuacucuaauccaguu

SEQ ID NO: 967656 - RNA, 19 nt, Homo sapiens
  misc_RNA (1)...(19): siRNA sense strand
gucuggaacuugcuucgaa

SEQ ID NO: 967657 - RNA, 19 nt, Homo sapiens
  misc_RNA (1)...(19): siRNA sense strand
cagaaugcacgccacugua

SEQ ID NO: 967658 - RNA, 19 nt, Homo sapiens
  misc_RNA (1)...(19): siRNA sense strand
gaaccugagaguuauugau

SEQ ID NO: 967659 - RNA, 19 nt, Homo sapiens
  misc_RNA (1)...(19): siRNA sense strand
cuagaagacaggucgauug

SEQ ID NO: 967660 - RNA, 19 nt, Homo sapiens
  misc_RNA (1)...(19): siRNA sense strand
guaaugccaauccuagguu

SEQ ID NO: 967661 - RNA, 19 nt, Homo sapiens
  misc_RNA (1)...(19): siRNA sense strand
ugacaaaaccaaagaaaga

SEQ ID NO: 967662 - RNA, 19 nt, Homo sapiens
  misc_RNA (1)...(19): siRNA sense strand
aaguugauaugugggauaa

SEQ ID NO: 967663 - RNA, 19 nt, Homo sapiens
  misc_RNA (1)...(19): siRNA sense strand
aauccuagguuugaucuuc

SEQ ID NO: 967664 - RNA, 19 nt, Homo sapiens
  misc_RNA (1)...(19): siRNA sense strand
uugaggauguguucccaaa

SEQ ID NO: 967665 - RNA, 19 nt, Homo sapiens
  misc_RNA (1)...(19): siRNA sense strand
gugaaauacaagcuacuaa

SEQ ID NO: 967666 - RNA, 19 nt, Homo sapiens
  misc_RNA (1)...(19): siRNA sense strand
ucagagaguacucagauca

SEQ ID NO: 967667 - RNA, 19 nt, Homo sapiens
  misc_RNA (1)...(19): siRNA sense strand
gggagaaagcauuccauca

SEQ ID NO: 967668 - RNA, 19 nt, Homo sapiens
  misc_RNA (1)...(19): siRNA sense strand
cuacugacuuugugugcau

SEQ ID NO: 967669 - RNA, 19 nt, Homo sapiens
  misc_RNA (1)...(19): siRNA sense strand
gaaagucuuggaguacaug

SEQ ID NO: 967670 - RNA, 19 nt, Homo sapiens
  misc_RNA (1)...(19): siRNA sense strand
caugaaaccaucaaaauga

SEQ ID NO: 967671 - RNA, 19 nt, Homo sapiens
  misc_RNA (1)...(19): siRNA sense strand
gauauguucuauggguugu

SEQ ID NO: 967672 - RNA, 19 nt, Homo sapiens
  misc_RNA (1)...(19): siRNA sense strand
gccagaagaauauaauaag

SEQ ID NO: 967673 - RNA, 19 nt, Homo sapiens
  misc_RNA (1)...(19): siRNA sense strand
aguccgagaugcuggaguu

SEQ ID NO: 967674 - RNA, 19 nt, Homo sapiens
  misc_RNA (1)...(19): siRNA sense strand
ugaaagucuuggaguacau

SEQ ID NO: 967675 - RNA, 19 nt, Homo sapiens
  misc_RNA (1)...(19): siRNA sense strand
uccaucacccguaagcuua

SEQ ID NO: 967676 - RNA, 19 nt, Homo sapiens
  misc_RNA (1)...(19): siRNA sense strand
cagaugcccaugaugaaga

SEQ ID NO: 967677 - RNA, 19 nt, Homo sapiens
  misc_RNA (1)...(19): siRNA sense strand
uagggaggcuguggaagau

SEQ ID NO: 967678 - RNA, 19 nt, Homo sapiens
  misc_RNA (1)...(19): siRNA sense strand
gagacagcgcuaucuggaa

SEQ ID NO: 967679 - RNA, 19 nt, Homo sapiens
  misc_RNA (1)...(19): siRNA sense strand
ccgagaugcuggaguuucu

SEQ ID NO: 967680 - RNA, 19 nt, Homo sapiens
  misc_RNA (1)...(19): siRNA sense strand
ggcucacacuggcaaagaa

SEQ ID NO: 967681 - RNA, 19 nt, Homo sapiens
  misc_RNA (1)...(19): siRNA sense strand
guacauggccaggcucuac

SEQ ID NO: 967682 - RNA, 19 nt, Homo sapiens
  misc_RNA (1)...(19): siRNA sense strand
ccucaacagugucuacauu

SEQ ID NO: 967683 - RNA, 19 nt, Homo sapiens
  misc_RNA (1)...(19): siRNA sense strand
gaccggaagcugagcaaga

SEQ ID NO: 967684 - RNA, 19 nt, Homo sapiens
  misc_RNA (1)...(19): siRNA sense strand
ggagaccaagccacuguga

SEQ ID NO: 967685 - RNA, 19 nt, Homo sapiens
  misc_RNA (1)...(19): siRNA sense strand
ccacuuuggcccugcacua

SEQ ID NO: 967686 - RNA, 19 nt, Homo sapiens
  misc_RNA (1)...(19): siRNA sense strand
ucaacagugucuacauugg

SEQ ID NO: 967687 - RNA, 19 nt, Homo sapiens
  misc_RNA (1)...(19): siRNA sense strand
ugacugagaaggcagagau

SEQ ID NO: 967688 - RNA, 19 nt, Homo sapiens
  misc_RNA (1)...(19): siRNA sense strand
ggcggcagcagaacguuaa

SEQ ID NO: 967689 - RNA, 19 nt, Homo sapiens
  misc_RNA (1)...(19): siRNA sense strand
accggaagcugagcaagaa

SEQ ID NO: 967690 - RNA, 19 nt, Homo sapiens
  misc_RNA (1)...(19): siRNA sense strand
uuuagcaucuucccuagca

SEQ ID NO: 967691 - RNA, 19 nt, Homo sapiens
  misc_RNA (1)...(19): siRNA sense strand
gcggagaccaagccacugu

SEQ ID NO: 967692 - RNA, 19 nt, Homo sapiens
  misc_RNA (1)...(19): siRNA sense strand
agauggagcaaaccgcuuu

SEQ ID NO: 967693 - RNA, 19 nt, Homo sapiens
  misc_RNA (1)...(19): siRNA sense strand
gaaggcagagauggugugu

SEQ ID NO: 967694 - RNA, 19 nt, Homo sapiens
  misc_RNA (1)...(19): siRNA sense strand
ggaagcugagcaagaacga

SEQ ID NO: 967695 - RNA, 19 nt, Homo sapiens
  misc_RNA (1)...(19): siRNA sense strand
gccuagccaugaaguacau

SEQ ID NO: 967696 - RNA, 19 nt, Homo sapiens
  misc_RNA (1)...(19): siRNA sense strand
ggaagaacauggcaaagug

SEQ ID NO: 967697 - RNA, 19 nt, Homo sapiens
  misc_RNA (1)...(19): siRNA sense strand
ggaccgagaugcccaauuc

SEQ ID NO: 967698 - RNA, 19 nt, Homo sapiens
  misc_RNA (1)...(19): siRNA sense strand
gagaauggcugugggaaug

SEQ ID NO: 967699 - RNA, 19 nt, Homo sapiens
  misc_RNA (1)...(19): siRNA sense strand
ucaaugagcugcaguacug

SEQ ID NO: 967700 - RNA, 19 nt, Homo sapiens
  misc_RNA (1)...(19): siRNA sense strand
gcccggaacuugccuguuu

SEQ ID NO: 967701 - RNA, 19 nt, Homo sapiens
  misc_RNA (1)...(19): siRNA sense strand
gaccggaaguaccaccuua

SEQ ID NO: 967702 - RNA, 19 nt, Homo sapiens
  misc_RNA (1)...(19): siRNA sense strand
ucaaggauguggaggcaaa

SEQ ID NO: 967703 - RNA, 19 nt, Homo sapiens
  misc_RNA (1)...(19): siRNA sense strand
gaaccgguauacagugaug

SEQ ID NO: 967704 - RNA, 19 nt, Homo sapiens
  misc_RNA (1)...(19): siRNA sense strand
gggaaugcaucuccucaga

SEQ ID NO: 967705 - RNA, 19 nt, Homo sapiens
  misc_RNA (1)...(19): siRNA sense strand
ggacaccacucaccaacag

SEQ ID NO: 967706 - RNA, 19 nt, Homo sapiens
  misc_RNA (1)...(19): siRNA sense strand
gagcgucucuuuguuguca

SEQ ID NO: 967707 - RNA, 19 nt, Homo sapiens
  misc_RNA (1)...(19): siRNA sense strand
gcaccuacgucugcaacaa

SEQ ID NO: 967708 - RNA, 19 nt, Homo sapiens
  misc_RNA (1)...(19): siRNA sense strand
gcuccaugcuccacacuga

SEQ ID NO: 967709 - RNA, 19 nt, Homo sapiens
  misc_RNA (1)...(19): siRNA sense strand
gagcagaagaaucucaauu

SEQ ID NO: 967710 - RNA, 19 nt, Homo sapiens
  misc_RNA (1)...(19): siRNA sense strand
gcgaggagucccuggauuu

SEQ ID NO: 967711 - RNA, 19 nt, Homo sapiens
  misc_RNA (1)...(19): siRNA sense strand
ucaaugagcgucucuuugu

SEQ ID NO: 967712 - RNA, 19 nt, Homo sapiens
  misc_RNA (1)...(19): siRNA sense strand
gcucaugacccaacagaga

SEQ ID NO: 967713 - RNA, 19 nt, Homo sapiens
  misc_RNA (1)...(19): siRNA sense strand
gagcuggaccucaucuuug

SEQ ID NO: 967714 - RNA, 19 nt, Homo sapiens
  misc_RNA (1)...(19): siRNA sense strand
gauccuagagcuucuguug

SEQ ID NO: 967715 - RNA, 19 nt, Homo sapiens
  misc_RNA (1)...(19): siRNA sense strand
gcacuucgugguacauuau

SEQ ID NO: 967716 - RNA, 19 nt, Homo sapiens
  misc_RNA (1)...(19): siRNA sense strand
cgugggaacucaugagaug

SEQ ID NO: 967717 - RNA, 19 nt, Homo sapiens
  misc_RNA (1)...(19): siRNA sense strand
ucaaggagcagaagaaucu

SEQ ID NO: 967718 - RNA, 19 nt, Homo sapiens
  misc_RNA (1)...(19): siRNA sense strand
caaugagcgucucuuuguu

SEQ ID NO: 967719 - RNA, 19 nt, Homo sapiens
  misc_RNA (1)...(19): siRNA sense strand
ggaagugcaugagcugauc

SEQ ID NO: 967720 - RNA, 19 nt, Homo sapiens
  misc_RNA (1)...(19): siRNA sense strand
ggcacuucgugguacauua

SEQ ID NO: 967721 - RNA, 19 nt, Homo sapiens
  misc_RNA (1)...(19): siRNA sense strand
ggacuucaaccguaucauc

SEQ ID NO: 967722 - RNA, 19 nt, Homo sapiens
  misc_RNA (1)...(19): siRNA sense strand
cgugguacauuaucuggaa

SEQ ID NO: 967723 - RNA, 19 nt, Homo sapiens
  misc_RNA (1)...(19): siRNA sense strand
gcaggaaccgguauacagu

SEQ ID NO: 967724 - RNA, 19 nt, Homo sapiens
  misc_RNA (1)...(19): siRNA sense strand
gcagggaccguguuguuca

SEQ ID NO: 967725 - RNA, 19 nt, Homo sapiens
  misc_RNA (1)...(19): siRNA sense strand
uggagccucuucaacagua

SEQ ID NO: 967726 - RNA, 19 nt, Homo sapiens
  misc_RNA (1)...(19): siRNA sense strand
ggucaauucugcaggugau

SEQ ID NO: 967727 - RNA, 19 nt, Homo sapiens
  misc_RNA (1)...(19): siRNA sense strand
cggcuguucugcucuuuga

SEQ ID NO: 967728 - RNA, 19 nt, Homo sapiens
  misc_RNA (1)...(19): siRNA sense strand
gcugguggaugggaucuug

SEQ ID NO: 967729 - RNA, 19 nt, Homo sapiens
  misc_RNA (1)...(19): siRNA sense strand
ggagccaaguugugggaau

SEQ ID NO: 967730 - RNA, 19 nt, Homo sapiens
  misc_RNA (1)...(19): siRNA sense strand
gcaacaagaggcagcagau

SEQ ID NO: 967731 - RNA, 19 nt, Homo sapiens
  misc_RNA (1)...(19): siRNA sense strand
gagggaaaccacacacuag

SEQ ID NO: 967732 - RNA, 19 nt, Homo sapiens
  misc_RNA (1)...(19): siRNA sense strand
ucaggaaguucauuaagcu

SEQ ID NO: 967733 - RNA, 19 nt, Homo sapiens
  misc_RNA (1)...(19): siRNA sense strand
gcuggaagaacauggcaaa

SEQ ID NO: 967734 - RNA, 19 nt, Homo sapiens
  misc_RNA (1)...(19): siRNA sense strand
uggcgaggauuuccacaug

SEQ ID NO: 967735 - RNA, 19 nt, Homo sapiens
  misc_RNA (1)...(19): siRNA sense strand
gagccaaguugugggaauc

SEQ ID NO: 967736 - RNA, 19 nt, Homo sapiens
  misc_RNA (1)...(19): siRNA sense strand
ggagaauggcugugggaau

SEQ ID NO: 967737 - RNA, 19 nt, Homo sapiens
  misc_RNA (1)...(19): siRNA sense strand
gugccucucucaccacuca

SEQ ID NO: 967738 - RNA, 19 nt, Homo sapiens
  misc_RNA (1)...(19): siRNA sense strand
ugagggaaaccacacacua

SEQ ID NO: 967739 - RNA, 19 nt, Homo sapiens
  misc_RNA (1)...(19): siRNA sense strand
gaggagcugcugcacauca

SEQ ID NO: 967740 - RNA, 19 nt, Homo sapiens
  misc_RNA (1)...(19): siRNA sense strand
gaucuuggcccugggacuu

SEQ ID NO: 967741 - RNA, 19 nt, Homo sapiens
  misc_RNA (1)...(19): siRNA sense strand
uccuagagcuucuguugga

SEQ ID NO: 967742 - RNA, 19 nt, Homo sapiens
  misc_RNA (1)...(19): siRNA sense strand
ggugcccucugccauguga

SEQ ID NO: 967743 - RNA, 19 nt, Homo sapiens
  misc_RNA (1)...(19): siRNA sense strand
ccaugcggcuggaagaaca

SEQ ID NO: 967744 - RNA, 19 nt, Homo sapiens
  misc_RNA (1)...(19): siRNA sense strand
ucaaccguaucaucaagga

SEQ ID NO: 967745 - RNA, 19 nt, Homo sapiens
  misc_RNA (1)...(19): siRNA sense strand
aaucucaauuccuucuuug

SEQ ID NO: 967746 - RNA, 19 nt, Homo sapiens
  misc_RNA (1)...(19): siRNA sense strand
gacuggagccucuucaaca

SEQ ID NO: 967747 - RNA, 19 nt, Homo sapiens
  misc_RNA (1)...(19): siRNA sense strand
acaagggcacuucguggua

SEQ ID NO: 967748 - RNA, 19 nt, Homo sapiens
  misc_RNA (1)...(19): siRNA sense strand
cuucuuugccgucauguuu

SEQ ID NO: 967749 - RNA, 19 nt, Homo sapiens
  misc_RNA (1)...(19): siRNA sense strand
ggcaggugcuggugaaggu

SEQ ID NO: 967750 - RNA, 19 nt, Homo sapiens
  misc_RNA (1)...(19): siRNA sense strand
ccaccagcuuccuccagaa

SEQ ID NO: 967751 - RNA, 19 nt, Homo sapiens
  misc_RNA (1)...(19): siRNA sense strand
ggacaagcaggacuucaac

SEQ ID NO: 967752 - RNA, 19 nt, Homo sapiens
  misc_RNA (1)...(19): siRNA sense strand
caggucagcgcacggauga

SEQ ID NO: 967753 - RNA, 19 nt, Homo sapiens
  misc_RNA (1)...(19): siRNA sense strand
gcggcugccucacaaaguc

SEQ ID NO: 967754 - RNA, 19 nt, Homo sapiens
  misc_RNA (1)...(19): siRNA sense strand
caaccuggagcgcuucaug

SEQ ID NO: 967755 - RNA, 19 nt, Homo sapiens
  misc_RNA (1)...(19): siRNA sense strand
aggaaccgguauacaguga

SEQ ID NO: 967756 - RNA, 19 nt, Homo sapiens
  misc_RNA (1)...(19): siRNA sense strand
uugaggagcugcugcacau

SEQ ID NO: 967757 - RNA, 19 nt, Homo sapiens
  misc_RNA (1)...(19): siRNA sense strand
agacauuccucagcgacuu

SEQ ID NO: 967758 - RNA, 19 nt, Homo sapiens
  misc_RNA (1)...(19): siRNA sense strand
gggaaaccacacacuagug

SEQ ID NO: 967759 - RNA, 19 nt, Homo sapiens
  misc_RNA (1)...(19): siRNA sense strand
gaauggcugugggaaugca

SEQ ID NO: 967760 - RNA, 19 nt, Homo sapiens
  misc_RNA (1)...(19): siRNA sense strand
agagcuggaccucaucuuu

SEQ ID NO: 967761 - RNA, 19 nt, Homo sapiens
  misc_RNA (1)...(19): siRNA sense strand
cagcugugccauccaaguu

SEQ ID NO: 967762 - RNA, 19 nt, Homo sapiens
  misc_RNA (1)...(19): siRNA sense strand
gcaaggcagggaccguguu

SEQ ID NO: 967763 - RNA, 19 nt, Homo sapiens
  misc_RNA (1)...(19): siRNA sense strand
gaagagcuggaccucaucu

SEQ ID NO: 967764 - RNA, 19 nt, Homo sapiens
  misc_RNA (1)...(19): siRNA sense strand
acaaaguccggaagcugua

SEQ ID NO: 967765 - RNA, 19 nt, Homo sapiens
  misc_RNA (1)...(19): siRNA sense strand
ugugacagccuccgugaga

SEQ ID NO: 967766 - RNA, 19 nt, Homo sapiens
  misc_RNA (1)...(19): siRNA sense strand
cagauuccagugcucauga

SEQ ID NO: 967767 - RNA, 19 nt, Homo sapiens
  misc_RNA (1)...(19): siRNA sense strand
gacuucaaccguaucauca

SEQ ID NO: 967768 - RNA, 19 nt, Homo sapiens
  misc_RNA (1)...(19): siRNA sense strand
ugagggagaugauuuugga

SEQ ID NO: 967769 - RNA, 19 nt, Homo sapiens
  misc_RNA (1)...(19): siRNA sense strand
caaggcagggaccguguug

SEQ ID NO: 967770 - RNA, 19 nt, Homo sapiens
  misc_RNA (1)...(19): siRNA sense strand
acacacuaguggagaaucu

SEQ ID NO: 967771 - RNA, 19 nt, Homo sapiens
  misc_RNA (1)...(19): siRNA sense strand
gcucaggaaguucauuaag

SEQ ID NO: 967772 - RNA, 19 nt, Homo sapiens
  misc_RNA (1)...(19): siRNA sense strand
gauaaaguccccuaugaca

SEQ ID NO: 967773 - RNA, 19 nt, Homo sapiens
  misc_RNA (1)...(19): siRNA sense strand
agcuggaccucaucuuuga

SEQ ID NO: 967774 - RNA, 19 nt, Homo sapiens
  misc_RNA (1)...(19): siRNA sense strand
gcgaggauuuccacaugcu

SEQ ID NO: 967775 - RNA, 19 nt, Homo sapiens
  misc_RNA (1)...(19): siRNA sense strand
uuugagaagaugagaauga

SEQ ID NO: 967776 - RNA, 19 nt, Homo sapiens
  misc_RNA (1)...(19): siRNA sense strand
cugcucaggaaguucauua

SEQ ID NO: 967777 - RNA, 19 nt, Homo sapiens
  misc_RNA (1)...(19): siRNA sense strand
ggagccucuucaacaguau

SEQ ID NO: 967778 - RNA, 19 nt, Homo sapiens
  misc_RNA (1)...(19): siRNA sense strand
acagcuggcucuggugaau

SEQ ID NO: 967779 - RNA, 19 nt, Homo sapiens
  misc_RNA (1)...(19): siRNA sense strand
cauggaaccaccggguaua

SEQ ID NO: 967780 - RNA, 19 nt, Homo sapiens
  misc_RNA (1)...(19): siRNA sense strand
aaugagcgucucuuuguug

SEQ ID NO: 967781 - RNA, 19 nt, Homo sapiens
  misc_RNA (1)...(19): siRNA sense strand
ugacagccuccgugagaga

SEQ ID NO: 967782 - RNA, 19 nt, Homo sapiens
  misc_RNA (1)...(19): siRNA sense strand
gccacagguuggagaaugg

SEQ ID NO: 967783 - RNA, 19 nt, Homo sapiens
  misc_RNA (1)...(19): siRNA sense strand
ggaagggaucugucaacgu

SEQ ID NO: 967784 - RNA, 19 nt, Homo sapiens
  misc_RNA (1)...(19): siRNA sense strand
uugagaagaugagaaugau

SEQ ID NO: 967785 - RNA, 19 nt, Homo sapiens
  misc_RNA (1)...(19): siRNA sense strand
gagcggcugccucacaaag

SEQ ID NO: 967786 - RNA, 19 nt, Homo sapiens
  misc_RNA (1)...(19): siRNA sense strand
ccaggcaggaaccgguaua

SEQ ID NO: 967787 - RNA, 19 nt, Homo sapiens
  misc_RNA (1)...(19): siRNA sense strand
uagcggcuguucugcucuu

SEQ ID NO: 967788 - RNA, 19 nt, Homo sapiens
  misc_RNA (1)...(19): siRNA sense strand
acucugcgcugcccuucug

SEQ ID NO: 967789 - RNA, 19 nt, Homo sapiens
  misc_RNA (1)...(19): siRNA sense strand
ggcaggaaccgguauacag

SEQ ID NO: 967790 - RNA, 19 nt, Homo sapiens
  misc_RNA (1)...(19): siRNA sense strand
gaggagucccuggauuuca

SEQ ID NO: 967791 - RNA, 19 nt, Homo sapiens
  misc_RNA (1)...(19): siRNA sense strand
caacaagaggcagcagauc

SEQ ID NO: 967792 - RNA, 19 nt, Homo sapiens
  misc_RNA (1)...(19): siRNA sense strand
ugagauggaggaggaguug

SEQ ID NO: 967793 - RNA, 19 nt, Homo sapiens
  misc_RNA (1)...(19): siRNA sense strand
ugccacagguuggagaaug

SEQ ID NO: 967794 - RNA, 19 nt, Homo sapiens
  misc_RNA (1)...(19): siRNA sense strand
ccagcuuccuccagaaacu

SEQ ID NO: 967795 - RNA, 19 nt, Homo sapiens
  misc_RNA (1)...(19): siRNA sense strand
ggucagcgcacggaugaag

SEQ ID NO: 967796 - RNA, 19 nt, Homo sapiens
  misc_RNA (1)...(19): siRNA sense strand
ggaaagagcugcaggugaa

SEQ ID NO: 967797 - RNA, 19 nt, Homo sapiens
  misc_RNA (1)...(19): siRNA sense strand
gagagcagcuuccaaauca

SEQ ID NO: 967798 - RNA, 19 nt, Homo sapiens
  misc_RNA (1)...(19): siRNA sense strand
cgacuacacuauuggauuu

SEQ ID NO: 967799 - RNA, 19 nt, Homo sapiens
  misc_RNA (1)...(19): siRNA sense strand
cagaagauguggaugaguu

SEQ ID NO: 967800 - RNA, 19 nt, Homo sapiens
  misc_RNA (1)...(19): siRNA sense strand
gaugacaaccgaccuauug

SEQ ID NO: 967801 - RNA, 19 nt, Homo sapiens
  misc_RNA (1)...(19): siRNA sense strand
ccaggaagauccauuucaa

SEQ ID NO: 967802 - RNA, 19 nt, Homo sapiens
  misc_RNA (1)...(19): siRNA sense strand
gaccaacaguucuuccaaa

SEQ ID NO: 967803 - RNA, 19 nt, Homo sapiens
  misc_RNA (1)...(19): siRNA sense strand
ugaagaaagugcugguuga

SEQ ID NO: 967804 - RNA, 19 nt, Homo sapiens
  misc_RNA (1)...(19): siRNA sense strand
gcuggaaggucaccaacaa

SEQ ID NO: 967805 - RNA, 19 nt, Homo sapiens
  misc_RNA (1)...(19): siRNA sense strand
guggaugaguuccggaaua

SEQ ID NO: 967806 - RNA, 19 nt, Homo sapiens
  misc_RNA (1)...(19): siRNA sense strand
acgagaagcuucacaccua

SEQ ID NO: 967807 - RNA, 19 nt, Homo sapiens
  misc_RNA (1)...(19): siRNA sense strand
gaccagugcugcugccuau

SEQ ID NO: 967808 - RNA, 19 nt, Homo sapiens
  misc_RNA (1)...(19): siRNA sense strand
gaacuggaccggagcuuca

SEQ ID NO: 967809 - RNA, 19 nt, Homo sapiens
  misc_RNA (1)...(19): siRNA sense strand
gcgagaacgugcccuacaa

SEQ ID NO: 967810 - RNA, 19 nt, Homo sapiens
  misc_RNA (1)...(19): siRNA sense strand
guaaacaucaccaucauca

SEQ ID NO: 967811 - RNA, 19 nt, Homo sapiens
  misc_RNA (1)...(19): siRNA sense strand
agaaagugcugguugacaa

SEQ ID NO: 967812 - RNA, 19 nt, Homo sapiens
  misc_RNA (1)...(19): siRNA sense strand
gauggccucugaccacuug

SEQ ID NO: 967813 - RNA, 19 nt, Homo sapiens
  misc_RNA (1)...(19): siRNA sense strand
uacgacagcuuccuuaugu

SEQ ID NO: 967814 - RNA, 19 nt, Homo sapiens
  misc_RNA (1)...(19): siRNA sense strand
ggaugcugcuuauugagaa

SEQ ID NO: 967815 - RNA, 19 nt, Homo sapiens
  misc_RNA (1)...(19): siRNA sense strand
gcucagcaacccuaaguuu

SEQ ID NO: 967816 - RNA, 19 nt, Homo sapiens
  misc_RNA (1)...(19): siRNA sense strand
gccaggagguggaggagaa

SEQ ID NO: 967817 - RNA, 19 nt, Homo sapiens
  misc_RNA (1)...(19): siRNA sense strand
gaaggucaccaacaacaug

SEQ ID NO: 967818 - RNA, 19 nt, Homo sapiens
  misc_RNA (1)...(19): siRNA sense strand
ccagagacgugguguccuu

SEQ ID NO: 967819 - RNA, 19 nt, Homo sapiens
  misc_RNA (1)...(19): siRNA sense strand
uaaggaagaccacuacaug

SEQ ID NO: 967820 - RNA, 19 nt, Homo sapiens
  misc_RNA (1)...(19): siRNA sense strand
gcuauggccuggucaacga

SEQ ID NO: 967821 - RNA, 19 nt, Homo sapiens
  misc_RNA (1)...(19): siRNA sense strand
ggaagucccaggucuccua

SEQ ID NO: 967822 - RNA, 19 nt, Homo sapiens
  misc_RNA (1)...(19): siRNA sense strand
gagacgugguguccuuuga

SEQ ID NO: 967823 - RNA, 19 nt, Homo sapiens
  misc_RNA (1)...(19): siRNA sense strand
ccaacuccauguccgauga

SEQ ID NO: 967824 - RNA, 19 nt, Homo sapiens
  misc_RNA (1)...(19): siRNA sense strand
ccacauggaccaacaguuc

SEQ ID NO: 967825 - RNA, 19 nt, Homo sapiens
  misc_RNA (1)...(19): siRNA sense strand
cagaggagacccagauuga

SEQ ID NO: 967826 - RNA, 19 nt, Homo sapiens
  misc_RNA (1)...(19): siRNA sense strand
uggaugaguuccggaauaa

SEQ ID NO: 967827 - RNA, 19 nt, Homo sapiens
  misc_RNA (1)...(19): siRNA sense strand
ugacagaagauguggauga

SEQ ID NO: 967828 - RNA, 19 nt, Homo sapiens
  misc_RNA (1)...(19): siRNA sense strand
gcacccaccugcuggucuu

SEQ ID NO: 967829 - RNA, 19 nt, Homo sapiens
  misc_RNA (1)...(19): siRNA sense strand
cgagucagccuuccacuau

SEQ ID NO: 967830 - RNA, 19 nt, Homo sapiens
  misc_RNA (1)...(19): siRNA sense strand
ggagagcagcuuccaaauc

SEQ ID NO: 967831 - RNA, 19 nt, Homo sapiens
  misc_RNA (1)...(19): siRNA sense strand
gaacggcggugagcugcau

SEQ ID NO: 967832 - RNA, 19 nt, Homo sapiens
  misc_RNA (1)...(19): siRNA sense strand
ccuccaagauguuccagaa

SEQ ID NO: 967833 - RNA, 19 nt, Homo sapiens
  misc_RNA (1)...(19): siRNA sense strand
gaucuccgguguacacaag

SEQ ID NO: 967834 - RNA, 19 nt, Homo sapiens
  misc_RNA (1)...(19): siRNA sense strand
gcacccacauggaccaaca

SEQ ID NO: 967835 - RNA, 19 nt, Homo sapiens
  misc_RNA (1)...(19): siRNA sense strand
uauuggauuuggcaaguuu

SEQ ID NO: 967836 - RNA, 19 nt, Homo sapiens
  misc_RNA (1)...(19): siRNA sense strand
gaugacgacugcaccuaca

SEQ ID NO: 967837 - RNA, 19 nt, Homo sapiens
  misc_RNA (1)...(19): siRNA sense strand
cgagaagcuucacaccuau

SEQ ID NO: 967838 - RNA, 19 nt, Homo sapiens
  misc_RNA (1)...(19): siRNA sense strand
uccaagauguuccagaaga

SEQ ID NO: 967839 - RNA, 19 nt, Homo sapiens
  misc_RNA (1)...(19): siRNA sense strand
caaccacuccuacguguuc

SEQ ID NO: 967840 - RNA, 19 nt, Homo sapiens
  misc_RNA (1)...(19): siRNA sense strand
guacccguauugcgacuau

SEQ ID NO: 967841 - RNA, 19 nt, Homo sapiens
  misc_RNA (1)...(19): siRNA sense strand
ggacguggccacugugagu

SEQ ID NO: 967842 - RNA, 19 nt, Homo sapiens
  misc_RNA (1)...(19): siRNA sense strand
uaauggacguggccacugu

SEQ ID NO: 967843 - RNA, 19 nt, Homo sapiens
  misc_RNA (1)...(19): siRNA sense strand
gaggagacccagauugaca

SEQ ID NO: 967844 - RNA, 19 nt, Homo sapiens
  misc_RNA (1)...(19): siRNA sense strand
uggacaaccucaagaagau

SEQ ID NO: 967845 - RNA, 19 nt, Homo sapiens
  misc_RNA (1)...(19): siRNA sense strand
gcaugugacccaggaguuu

SEQ ID NO: 967846 - RNA, 19 nt, Homo sapiens
  misc_RNA (1)...(19): siRNA sense strand
ggacuacgacagcuuccuu

SEQ ID NO: 967847 - RNA, 19 nt, Homo sapiens
  misc_RNA (1)...(19): siRNA sense strand
gggcaacauccaucugaaa

SEQ ID NO: 967848 - RNA, 19 nt, Homo sapiens
  misc_RNA (1)...(19): siRNA sense strand
gcaccgagaaccugcugaa

SEQ ID NO: 967849 - RNA, 19 nt, Homo sapiens
  misc_RNA (1)...(19): siRNA sense strand
caacuucaaggucaagaug

SEQ ID NO: 967850 - RNA, 19 nt, Homo sapiens
  misc_RNA (1)...(19): siRNA sense strand
gacagaagauguggaugag

SEQ ID NO: 967851 - RNA, 19 nt, Homo sapiens
  misc_RNA (1)...(19): siRNA sense strand
ccacgacucucgccugacu

SEQ ID NO: 967852 - RNA, 19 nt, Homo sapiens
  misc_RNA (1)...(19): siRNA sense strand
ucaaggagcaagccagaga

SEQ ID NO: 967853 - RNA, 19 nt, Homo sapiens
  misc_RNA (1)...(19): siRNA sense strand
agucagccuuccacuauga

SEQ ID NO: 967854 - RNA, 19 nt, Homo sapiens
  misc_RNA (1)...(19): siRNA sense strand
ggaccaacaguucuuccaa

SEQ ID NO: 967855 - RNA, 19 nt, Homo sapiens
  misc_RNA (1)...(19): siRNA sense strand
ggaagauccauuucaacug

SEQ ID NO: 967856 - RNA, 19 nt, Homo sapiens
  misc_RNA (1)...(19): siRNA sense strand
gcgacuacacuauuggauu

SEQ ID NO: 967857 - RNA, 19 nt, Homo sapiens
  misc_RNA (1)...(19): siRNA sense strand
gguccaggaagauccauuu

SEQ ID NO: 967858 - RNA, 19 nt, Homo sapiens
  misc_RNA (1)...(19): siRNA sense strand
aaacaucaccaucaucaag

SEQ ID NO: 967859 - RNA, 19 nt, Homo sapiens
  misc_RNA (1)...(19): siRNA sense strand
cagagaagcagguggaaca

SEQ ID NO: 967860 - RNA, 19 nt, Homo sapiens
  misc_RNA (1)...(19): siRNA sense strand
ugcugaagcuuacagagaa

SEQ ID NO: 967861 - RNA, 19 nt, Homo sapiens
  misc_RNA (1)...(19): siRNA sense strand
gauaaggacugcgccuacu

SEQ ID NO: 967862 - RNA, 19 nt, Homo sapiens
  misc_RNA (1)...(19): siRNA sense strand
ggacaugaggccugagaag

SEQ ID NO: 967863 - RNA, 19 nt, Homo sapiens
  misc_RNA (1)...(19): siRNA sense strand
aaagcaagaccacaccauu

SEQ ID NO: 967864 - RNA, 19 nt, Homo sapiens
  misc_RNA (1)...(19): siRNA sense strand
ggucaguucugcgaguaug

SEQ ID NO: 967865 - RNA, 19 nt, Homo sapiens
  misc_RNA (1)...(19): siRNA sense strand
gucaccaacuacuccuaua

SEQ ID NO: 967866 - RNA, 19 nt, Homo sapiens
  misc_RNA (1)...(19): siRNA sense strand
gaucuggacaaccucaaga

SEQ ID NO: 967867 - RNA, 19 nt, Homo sapiens
  misc_RNA (1)...(19): siRNA sense strand
cuauugggcccaugaagaa

SEQ ID NO: 967868 - RNA, 19 nt, Homo sapiens
  misc_RNA (1)...(19): siRNA sense strand
guauugcgacuaugagaug

SEQ ID NO: 967869 - RNA, 19 nt, Homo sapiens
  misc_RNA (1)...(19): siRNA sense strand
gcagcccaaugccgggaaa

SEQ ID NO: 967870 - RNA, 19 nt, Homo sapiens
  misc_RNA (1)...(19): siRNA sense strand
ucacagaggagacccagau

SEQ ID NO: 967871 - RNA, 19 nt, Homo sapiens
  misc_RNA (1)...(19): siRNA sense strand
caacauccaucugaaaccu

SEQ ID NO: 967872 - RNA, 19 nt, Homo sapiens
  misc_RNA (1)...(19): siRNA sense strand
ccaacuacuccuauagcua

SEQ ID NO: 967873 - RNA, 19 nt, Homo sapiens
  misc_RNA (1)...(19): siRNA sense strand
gagucagccuuccacuaug

SEQ ID NO: 967874 - RNA, 19 nt, Homo sapiens
  misc_RNA (1)...(19): siRNA sense strand
ccaagaggcccauguccau

SEQ ID NO: 967875 - RNA, 19 nt, Homo sapiens
  misc_RNA (1)...(19): siRNA sense strand
ggucacauggugggcuuua

SEQ ID NO: 967876 - RNA, 19 nt, Homo sapiens
  misc_RNA (1)...(19): siRNA sense strand
gcacgugugaggaaugcaa

SEQ ID NO: 967877 - RNA, 19 nt, Homo sapiens
  misc_RNA (1)...(19): siRNA sense strand
ccaccugcaucgacagcaa

SEQ ID NO: 967878 - RNA, 19 nt, Homo sapiens
  misc_RNA (1)...(19): siRNA sense strand
gcacagacgagauguucag

SEQ ID NO: 967879 - RNA, 19 nt, Homo sapiens
  misc_RNA (1)...(19): siRNA sense strand
caccagcgacuacacuauu

SEQ ID NO: 967880 - RNA, 19 nt, Homo sapiens
  misc_RNA (1)...(19): siRNA sense strand
gagcagcuuccaaaucaca

SEQ ID NO: 967881 - RNA, 19 nt, Homo sapiens
  misc_RNA (1)...(19): siRNA sense strand
gcagaucuccgguguacac

SEQ ID NO: 967882 - RNA, 19 nt, Homo sapiens
  misc_RNA (1)...(19): siRNA sense strand
gagaagcuucacaccuauu

SEQ ID NO: 967883 - RNA, 19 nt, Homo sapiens
  misc_RNA (1)...(19): siRNA sense strand
gaugaguuccggaauaaac

SEQ ID NO: 967884 - RNA, 19 nt, Homo sapiens
  misc_RNA (1)...(19): siRNA sense strand
gagcuucacgagucagaug

SEQ ID NO: 967885 - RNA, 19 nt, Homo sapiens
  misc_RNA (1)...(19): siRNA sense strand
gcuaccuggugaccuguga

SEQ ID NO: 967886 - RNA, 19 nt, Homo sapiens
  misc_RNA (1)...(19): siRNA sense strand
gacuacgacagcuuccuua

SEQ ID NO: 967887 - RNA, 19 nt, Homo sapiens
  misc_RNA (1)...(19): siRNA sense strand
cgugcuggcuggcaucaug

SEQ ID NO: 967888 - RNA, 19 nt, Homo sapiens
  misc_RNA (1)...(19): siRNA sense strand
ccaccgagcccuuccuagu

SEQ ID NO: 967889 - RNA, 19 nt, Homo sapiens
  misc_RNA (1)...(19): siRNA sense strand
ggaguggccagaccugcaa

SEQ ID NO: 967890 - RNA, 19 nt, Homo sapiens
  misc_RNA (1)...(19): siRNA sense strand
ccgaugaucuggacaaccu

SEQ ID NO: 967891 - RNA, 19 nt, Homo sapiens
  misc_RNA (1)...(19): siRNA sense strand
gagggcaucaucaccauag

SEQ ID NO: 967892 - RNA, 19 nt, Homo sapiens
  misc_RNA (1)...(19): siRNA sense strand
gcgagggcaucaucaccau

SEQ ID NO: 967893 - RNA, 19 nt, Homo sapiens
  misc_RNA (1)...(19): siRNA sense strand
aagaaccggaugcugcuua

SEQ ID NO: 967894 - RNA, 19 nt, Homo sapiens
  misc_RNA (1)...(19): siRNA sense strand
ccaaugggguacaggguaa

SEQ ID NO: 967895 - RNA, 19 nt, Homo sapiens
  misc_RNA (1)...(19): siRNA sense strand
aagcaagaccacaccauug

SEQ ID NO: 967896 - RNA, 19 nt, Homo sapiens
  misc_RNA (1)...(19): siRNA sense strand
ggaaggagcugucuuuaca

SEQ ID NO: 967897 - RNA, 19 nt, Homo sapiens
  misc_RNA (1)...(19): siRNA sense strand
ggacgcagauccagaguuu

SEQ ID NO: 967898 - RNA, 19 nt, Homo sapiens
  misc_RNA (1)...(19): siRNA sense strand
acacaaagcugaucuacaa

SEQ ID NO: 967899 - RNA, 19 nt, Homo sapiens
  misc_RNA (1)...(19): siRNA sense strand
gagaagagcucaccagagu

SEQ ID NO: 967900 - RNA, 19 nt, Homo sapiens
  misc_RNA (1)...(19): siRNA sense strand
caagagcaauuucuaaguu

SEQ ID NO: 967901 - RNA, 19 nt, Homo sapiens
  misc_RNA (1)...(19): siRNA sense strand
ccagcuaucuuacccaaua

SEQ ID NO: 967902 - RNA, 19 nt, Homo sapiens
  misc_RNA (1)...(19): siRNA sense strand
gcagaccaguguauucuaa

SEQ ID NO: 967903 - RNA, 19 nt, Homo sapiens
  misc_RNA (1)...(19): siRNA sense strand
ugacagaaguggagcagua

SEQ ID NO: 967904 - RNA, 19 nt, Homo sapiens
  misc_RNA (1)...(19): siRNA sense strand
ugaaauagccgaguacaua

SEQ ID NO: 967905 - RNA, 19 nt, Homo sapiens
  misc_RNA (1)...(19): siRNA sense strand
gaaaggagcauaguguuug

SEQ ID NO: 967906 - RNA, 19 nt, Homo sapiens
  misc_RNA (1)...(19): siRNA sense strand
caacauuuauuuccaguuc

SEQ ID NO: 967907 - RNA, 19 nt, Homo sapiens
  misc_RNA (1)...(19): siRNA sense strand
ugacgaagcucagaauuuc

SEQ ID NO: 967908 - RNA, 19 nt, Homo sapiens
  misc_RNA (1)...(19): siRNA sense strand
caacaagaaaugcaacuaa

SEQ ID NO: 967909 - RNA, 19 nt, Homo sapiens
  misc_RNA (1)...(19): siRNA sense strand
ggaguucucuggaucuuuc

SEQ ID NO: 967910 - RNA, 19 nt, Homo sapiens
  misc_RNA (1)...(19): siRNA sense strand
ggaaaggagcauaguguuu

SEQ ID NO: 967911 - RNA, 19 nt, Homo sapiens
  misc_RNA (1)...(19): siRNA sense strand
guacauacaacaagaaaug

SEQ ID NO: 967912 - RNA, 19 nt, Homo sapiens
  misc_RNA (1)...(19): siRNA sense strand
gagaagaucaggaaugugu

SEQ ID NO: 967913 - RNA, 19 nt, Homo sapiens
  misc_RNA (1)...(19): siRNA sense strand
gaagaucaggaauguguuu

SEQ ID NO: 967914 - RNA, 19 nt, Homo sapiens
  misc_RNA (1)...(19): siRNA sense strand
ucaggucucucuugaguga

SEQ ID NO: 967915 - RNA, 19 nt, Homo sapiens
  misc_RNA (1)...(19): siRNA sense strand
cagaugaaauagccgagua

SEQ ID NO: 967916 - RNA, 19 nt, Homo sapiens
  misc_RNA (1)...(19): siRNA sense strand
agaaaggucuggaacacaa

SEQ ID NO: 967917 - RNA, 19 nt, Homo sapiens
  misc_RNA (1)...(19): siRNA sense strand
gaauugugauccucucuag

SEQ ID NO: 967918 - RNA, 19 nt, Homo sapiens
  misc_RNA (1)...(19): siRNA sense strand
ccaggcaacacaaagauua

SEQ ID NO: 967919 - RNA, 19 nt, Homo sapiens
  misc_RNA (1)...(19): siRNA sense strand
acacagaauucucuacguu

SEQ ID NO: 967920 - RNA, 19 nt, Homo sapiens
  misc_RNA (1)...(19): siRNA sense strand
ggcuaucucugugugauua

SEQ ID NO: 967921 - RNA, 19 nt, Homo sapiens
  misc_RNA (1)...(19): siRNA sense strand
caaagcugaucuacaacaa

SEQ ID NO: 967922 - RNA, 19 nt, Homo sapiens
  misc_RNA (1)...(19): siRNA sense strand
ugaggaacuuuaucaguga

SEQ ID NO: 967923 - RNA, 19 nt, Homo sapiens
  misc_RNA (1)...(19): siRNA sense strand
ugaaagcaaugaggaagaa

SEQ ID NO: 967924 - RNA, 19 nt, Homo sapiens
  misc_RNA (1)...(19): siRNA sense strand
gaagagcucaccagaguag

SEQ ID NO: 967925 - RNA, 19 nt, Homo sapiens
  misc_RNA (1)...(19): siRNA sense strand
gcucagaauuuccguacug

SEQ ID NO: 967926 - RNA, 19 nt, Homo sapiens
  misc_RNA (1)...(19): siRNA sense strand
cuaaaggaguuaauacaca

SEQ ID NO: 967927 - RNA, 19 nt, Homo sapiens
  misc_RNA (1)...(19): siRNA sense strand
ccagaagccuccgcaagaa

SEQ ID NO: 967928 - RNA, 19 nt, Homo sapiens
  misc_RNA (1)...(19): siRNA sense strand
gaauuuccguacugaagau

SEQ ID NO: 967929 - RNA, 19 nt, Homo sapiens
  misc_RNA (1)...(19): siRNA sense strand
gaaaggggcuauucuccaa

SEQ ID NO: 967930 - RNA, 19 nt, Homo sapiens
  misc_RNA (1)...(19): siRNA sense strand
uaaauggguuccagguguu

SEQ ID NO: 967931 - RNA, 19 nt, Homo sapiens
  misc_RNA (1)...(19): siRNA sense strand
gcaccgccuuuacuuugaa

SEQ ID NO: 967932 - RNA, 19 nt, Homo sapiens
  misc_RNA (1)...(19): siRNA sense strand
caaaacagcaccuauauau

SEQ ID NO: 967933 - RNA, 19 nt, Homo sapiens
  misc_RNA (1)...(19): siRNA sense strand
ggcaacacaaagauuauua

SEQ ID NO: 967934 - RNA, 19 nt, Homo sapiens
  misc_RNA (1)...(19): siRNA sense strand
gcagagacccgggaaacuu

SEQ ID NO: 967935 - RNA, 19 nt, Homo sapiens
  misc_RNA (1)...(19): siRNA sense strand
ucacagcccagcaguauga

SEQ ID NO: 967936 - RNA, 19 nt, Homo sapiens
  misc_RNA (1)...(19): siRNA sense strand
ugauuaaagugaaggcauu

SEQ ID NO: 967937 - RNA, 19 nt, Homo sapiens
  misc_RNA (1)...(19): siRNA sense strand
ucuaagcucuugaaagcaa

SEQ ID NO: 967938 - RNA, 19 nt, Homo sapiens
  misc_RNA (1)...(19): siRNA sense strand
agaguuuccuccagacuuu

SEQ ID NO: 967939 - RNA, 19 nt, Homo sapiens
  misc_RNA (1)...(19): siRNA sense strand
ccaauauucugaucugucu

SEQ ID NO: 967940 - RNA, 19 nt, Homo sapiens
  misc_RNA (1)...(19): siRNA sense strand
acagaauucucuacguuug

SEQ ID NO: 967941 - RNA, 19 nt, Homo sapiens
  misc_RNA (1)...(19): siRNA sense strand
ucgcaaugcagaugaaaua

SEQ ID NO: 967942 - RNA, 19 nt, Homo sapiens
  misc_RNA (1)...(19): siRNA sense strand
gcaauucucagugaagcua

SEQ ID NO: 967943 - RNA, 19 nt, Homo sapiens
  misc_RNA (1)...(19): siRNA sense strand
gcagcucagugaugcaugu

SEQ ID NO: 967944 - RNA, 19 nt, Homo sapiens
  misc_RNA (1)...(19): siRNA sense strand
gaaagaguuguauggcuau

SEQ ID NO: 967945 - RNA, 19 nt, Homo sapiens
  misc_RNA (1)...(19): siRNA sense strand
gaaauagccgaguacauac

SEQ ID NO: 967946 - RNA, 19 nt, Homo sapiens
  misc_RNA (1)...(19): siRNA sense strand
ggacuaaaggaguuaauac

SEQ ID NO: 967947 - RNA, 19 nt, Homo sapiens
  misc_RNA (1)...(19): siRNA sense strand
gcucacagcccagcaguau

SEQ ID NO: 967948 - RNA, 19 nt, Homo sapiens
  misc_RNA (1)...(19): siRNA sense strand
gcaagagcaauuucuaagu

SEQ ID NO: 967949 - RNA, 19 nt, Homo sapiens
  misc_RNA (1)...(19): siRNA sense strand
agacuuugcugaggccuuu

SEQ ID NO: 967950 - RNA, 19 nt, Homo sapiens
  misc_RNA (1)...(19): siRNA sense strand
ugaugcaugugauauguug

SEQ ID NO: 967951 - RNA, 19 nt, Homo sapiens
  misc_RNA (1)...(19): siRNA sense strand
ggaucuuucuggacuacuu

SEQ ID NO: 967952 - RNA, 19 nt, Homo sapiens
  misc_RNA (1)...(19): siRNA sense strand
ggauuacccugcguccuau

SEQ ID NO: 967953 - RNA, 19 nt, Homo sapiens
  misc_RNA (1)...(19): siRNA sense strand
cagugucuccgauggauua

SEQ ID NO: 967954 - RNA, 19 nt, Homo sapiens
  misc_RNA (1)...(19): siRNA sense strand
gugaaggcauucuguugug

SEQ ID NO: 967955 - RNA, 19 nt, Homo sapiens
  misc_RNA (1)...(19): siRNA sense strand
ggaauugugauccucucua

SEQ ID NO: 967956 - RNA, 19 nt, Homo sapiens
  misc_RNA (1)...(19): siRNA sense strand
gguugacccugacucuuug

SEQ ID NO: 967957 - RNA, 19 nt, Homo sapiens
  misc_RNA (1)...(19): siRNA sense strand
aagcugaucuacaacaaca

SEQ ID NO: 967958 - RNA, 19 nt, Homo sapiens
  misc_RNA (1)...(19): siRNA sense strand
gcaaaacagcaccuauaua

SEQ ID NO: 967959 - RNA, 19 nt, Homo sapiens
  misc_RNA (1)...(19): siRNA sense strand
gggcuauucuccaaaggau

SEQ ID NO: 967960 - RNA, 19 nt, Homo sapiens
  misc_RNA (1)...(19): siRNA sense strand
ccgaguacauacaacaaga

SEQ ID NO: 967961 - RNA, 19 nt, Homo sapiens
  misc_RNA (1)...(19): siRNA sense strand
uggagaagaucaggaaugu

SEQ ID NO: 967962 - RNA, 19 nt, Homo sapiens
  misc_RNA (1)...(19): siRNA sense strand
uaagaaaggucuggaacac

SEQ ID NO: 967963 - RNA, 19 nt, Homo sapiens
  misc_RNA (1)...(19): siRNA sense strand
gcucagugaugcaugugau

SEQ ID NO: 967964 - RNA, 19 nt, Homo sapiens
  misc_RNA (1)...(19): siRNA sense strand
agucuaagcucuugaaagc

SEQ ID NO: 967965 - RNA, 19 nt, Homo sapiens
  misc_RNA (1)...(19): siRNA sense strand
cagaguaguucgcaaugca

SEQ ID NO: 967966 - RNA, 19 nt, Homo sapiens
  misc_RNA (1)...(19): siRNA sense strand
ggagaagccaggagucauc

SEQ ID NO: 967967 - RNA, 19 nt, Homo sapiens
  misc_RNA (1)...(19): siRNA sense strand
gaaaggucuggaacacaaa

SEQ ID NO: 967968 - RNA, 19 nt, Homo sapiens
  misc_RNA (1)...(19): siRNA sense strand
aagagcaauuucuaaguug

SEQ ID NO: 967969 - RNA, 19 nt, Homo sapiens
  misc_RNA (1)...(19): siRNA sense strand
cagagacccgggaaacuuu

SEQ ID NO: 967970 - RNA, 19 nt, Homo sapiens
  misc_RNA (1)...(19): siRNA sense strand
ugacaguccuucacuuugc

SEQ ID NO: 967971 - RNA, 19 nt, Homo sapiens
  misc_RNA (1)...(19): siRNA sense strand
ugcaggugcuucuuugaaa

SEQ ID NO: 967972 - RNA, 19 nt, Homo sapiens
  misc_RNA (1)...(19): siRNA sense strand
aaacuuuacuuuggagcaa

SEQ ID NO: 967973 - RNA, 19 nt, Homo sapiens
  misc_RNA (1)...(19): siRNA sense strand
ugaagaucauggagaagau

SEQ ID NO: 967974 - RNA, 19 nt, Homo sapiens
  misc_RNA (1)...(19): siRNA sense strand
acaagcaaaugcgaccuuu

SEQ ID NO: 967975 - RNA, 19 nt, Homo sapiens
  misc_RNA (1)...(19): siRNA sense strand
gaacacaaagcugaucuac

SEQ ID NO: 967976 - RNA, 19 nt, Homo sapiens
  misc_RNA (1)...(19): siRNA sense strand
ggaacacaaagcugaucua

SEQ ID NO: 967977 - RNA, 19 nt, Homo sapiens
  misc_RNA (1)...(19): siRNA sense strand
gaguacauacaacaagaaa

SEQ ID NO: 967978 - RNA, 19 nt, Homo sapiens
  misc_RNA (1)...(19): siRNA sense strand
ggauggugagggagaagua

SEQ ID NO: 967979 - RNA, 19 nt, Homo sapiens
  misc_RNA (1)...(19): siRNA sense strand
agaccaguguauucuaaga

SEQ ID NO: 967980 - RNA, 19 nt, Homo sapiens
  misc_RNA (1)...(19): siRNA sense strand
caaaaucguagaaguguuu

SEQ ID NO: 967981 - RNA, 19 nt, Homo sapiens
  misc_RNA (1)...(19): siRNA sense strand
cuucaggucucucuugagu

SEQ ID NO: 967982 - RNA, 19 nt, Homo sapiens
  misc_RNA (1)...(19): siRNA sense strand
gaagccaggagucaucugu

SEQ ID NO: 967983 - RNA, 19 nt, Homo sapiens
  misc_RNA (1)...(19): siRNA sense strand
ggaguuaauacacaagcaa

SEQ ID NO: 967984 - RNA, 19 nt, Homo sapiens
  misc_RNA (1)...(19): siRNA sense strand
gcugaucuacaacaacauu

SEQ ID NO: 967985 - RNA, 19 nt, Homo sapiens
  misc_RNA (1)...(19): siRNA sense strand
gcuauucuccaaaggaugu

SEQ ID NO: 967986 - RNA, 19 nt, Homo sapiens
  misc_RNA (1)...(19): siRNA sense strand
ugaggaauggguagagaaa

SEQ ID NO: 967987 - RNA, 19 nt, Homo sapiens
  misc_RNA (1)...(19): siRNA sense strand
guacagcaccaaaaucgua

SEQ ID NO: 967988 - RNA, 19 nt, Homo sapiens
  misc_RNA (1)...(19): siRNA sense strand
gggcaaaacagcaccuaua

SEQ ID NO: 967989 - RNA, 19 nt, Homo sapiens
  misc_RNA (1)...(19): siRNA sense strand
aaaggauuguccaggaguu

SEQ ID NO: 967990 - RNA, 19 nt, Homo sapiens
  misc_RNA (1)...(19): siRNA sense strand
gcaccaaaaucguagaagu

SEQ ID NO: 967991 - RNA, 19 nt, Homo sapiens
  misc_RNA (1)...(19): siRNA sense strand
gcugugagguuuuaaaucu

SEQ ID NO: 967992 - RNA, 19 nt, Homo sapiens
  misc_RNA (1)...(19): siRNA sense strand
uggauuacccugcguccua

SEQ ID NO: 967993 - RNA, 19 nt, Homo sapiens
  misc_RNA (1)...(19): siRNA sense strand
gaguuaauacacaagcaaa

SEQ ID NO: 967994 - RNA, 19 nt, Homo sapiens
  misc_RNA (1)...(19): siRNA sense strand
uaaagugaaggcauucugu

SEQ ID NO: 967995 - RNA, 19 nt, Homo sapiens
  misc_RNA (1)...(19): siRNA sense strand
ccagcaguaugagauauuc

SEQ ID NO: 967996 - RNA, 19 nt, Homo sapiens
  misc_RNA (1)...(19): siRNA sense strand
gagaagaaaucaacuuugu

SEQ ID NO: 967997 - RNA, 19 nt, Homo sapiens
  misc_RNA (1)...(19): siRNA sense strand
ggaaagagcccgugaagau

SEQ ID NO: 967998 - RNA, 19 nt, Homo sapiens
  misc_RNA (1)...(19): siRNA sense strand
ggaaacaccagaucacaua

SEQ ID NO: 967999 - RNA, 19 nt, Homo sapiens
  misc_RNA (1)...(19): siRNA sense strand
gaagaugaacccacaaaga

SEQ ID NO: 968000 - RNA, 19 nt, Homo sapiens
  misc_RNA (1)...(19): siRNA sense strand
cgacagugaugaggaagua

SEQ ID NO: 968001 - RNA, 19 nt, Homo sapiens
  misc_RNA (1)...(19): siRNA sense strand
gagagaagaaaucaacuuu

SEQ ID NO: 968002 - RNA, 19 nt, Homo sapiens
  misc_RNA (1)...(19): siRNA sense strand
ugaaagagacuaacagguu

SEQ ID NO: 968003 - RNA, 19 nt, Homo sapiens
  misc_RNA (1)...(19): siRNA sense strand
gaguugagccauacccuua

SEQ ID NO: 968004 - RNA, 19 nt, Homo sapiens
  misc_RNA (1)...(19): siRNA sense strand
gaaccgagggagagaagaa

SEQ ID NO: 968005 - RNA, 19 nt, Homo sapiens
  misc_RNA (1)...(19): siRNA sense strand
ggaagaagacgacagugau

SEQ ID NO: 968006 - RNA, 19 nt, Homo sapiens
  misc_RNA (1)...(19): siRNA sense strand
gaagaagacgacagugaug

SEQ ID NO: 968007 - RNA, 19 nt, Homo sapiens
  misc_RNA (1)...(19): siRNA sense strand
aagaacaccuggucagaga

SEQ ID NO: 968008 - RNA, 19 nt, Homo sapiens
  misc_RNA (1)...(19): siRNA sense strand
gcccagcaauggaugacua

SEQ ID NO: 968009 - RNA, 19 nt, Homo sapiens
  misc_RNA (1)...(19): siRNA sense strand
caaugccgcuggugcuuau

SEQ ID NO: 968010 - RNA, 19 nt, Homo sapiens
  misc_RNA (1)...(19): siRNA sense strand
uuacagugguggcuacuau

SEQ ID NO: 968011 - RNA, 19 nt, Homo sapiens
  misc_RNA (1)...(19): siRNA sense strand
aagaugaacccacaaagaa

SEQ ID NO: 968012 - RNA, 19 nt, Homo sapiens
  misc_RNA (1)...(19): siRNA sense strand
ggagagaagaaaucaacuu

SEQ ID NO: 968013 - RNA, 19 nt, Homo sapiens
  misc_RNA (1)...(19): siRNA sense strand
gugcuuauuaucaggauua

SEQ ID NO: 968014 - RNA, 19 nt, Homo sapiens
  misc_RNA (1)...(19): siRNA sense strand
gaugaacccacaaagaaga

SEQ ID NO: 968015 - RNA, 19 nt, Homo sapiens
  misc_RNA (1)...(19): siRNA sense strand
gaaagagcccgugaagauc

SEQ ID NO: 968016 - RNA, 19 nt, Homo sapiens
  misc_RNA (1)...(19): siRNA sense strand
gcagaucacgcaggaagaa

SEQ ID NO: 968017 - RNA, 19 nt, Homo sapiens
  misc_RNA (1)...(19): siRNA sense strand
caagauggcagcagguuca

SEQ ID NO: 968018 - RNA, 19 nt, Homo sapiens
  misc_RNA (1)...(19): siRNA sense strand
agacgacagugaugaggaa

SEQ ID NO: 968019 - RNA, 19 nt, Homo sapiens
  misc_RNA (1)...(19): siRNA sense strand
gacuacagcuacaaucagu

SEQ ID NO: 968020 - RNA, 19 nt, Homo sapiens
  misc_RNA (1)...(19): siRNA sense strand
caccuggaguugagccaua

SEQ ID NO: 968021 - RNA, 19 nt, Homo sapiens
  misc_RNA (1)...(19): siRNA sense strand
cuacagcuacaaucaguuu

SEQ ID NO: 968022 - RNA, 19 nt, Homo sapiens
  misc_RNA (1)...(19): siRNA sense strand
gcaggaagaagacgacagu

SEQ ID NO: 968023 - RNA, 19 nt, Homo sapiens
  misc_RNA (1)...(19): siRNA sense strand
gaaacaccagaucacauau

SEQ ID NO: 968024 - RNA, 19 nt, Homo sapiens
  misc_RNA (1)...(19): siRNA sense strand
ccaggacgaugcagccaau

SEQ ID NO: 968025 - RNA, 19 nt, Homo sapiens
  misc_RNA (1)...(19): siRNA sense strand
caucgaugacgaagcauuu

SEQ ID NO: 968026 - RNA, 19 nt, Homo sapiens
  misc_RNA (1)...(19): siRNA sense strand
acaaucaguuuuccacaua

SEQ ID NO: 968027 - RNA, 19 nt, Homo sapiens
  misc_RNA (1)...(19): siRNA sense strand
caaggcugcugccaagagu

SEQ ID NO: 968028 - RNA, 19 nt, Homo sapiens
  misc_RNA (1)...(19): siRNA sense strand
ggacgacuacagcuacaau

SEQ ID NO: 968029 - RNA, 19 nt, Homo sapiens
  misc_RNA (1)...(19): siRNA sense strand
ccacaaagaagaaaacuau

SEQ ID NO: 968030 - RNA, 19 nt, Homo sapiens
  misc_RNA (1)...(19): siRNA sense strand
gaggaaagagcccgugaag

SEQ ID NO: 968031 - RNA, 19 nt, Homo sapiens
  misc_RNA (1)...(19): siRNA sense strand
gacccaagccaaauaugga

SEQ ID NO: 968032 - RNA, 19 nt, Homo sapiens
  misc_RNA (1)...(19): siRNA sense strand
agccaaauauggauucuag

SEQ ID NO: 968033 - RNA, 19 nt, Homo sapiens
  misc_RNA (1)...(19): siRNA sense strand
ccaaugccgcuggugcuua

SEQ ID NO: 968034 - RNA, 19 nt, Homo sapiens
  misc_RNA (1)...(19): siRNA sense strand
ggcgguggcuccuacaucu

SEQ ID NO: 968035 - RNA, 19 nt, Homo sapiens
  misc_RNA (1)...(19): siRNA sense strand
gagcuggaacugaagaaca

SEQ ID NO: 968036 - RNA, 19 nt, Homo sapiens
  misc_RNA (1)...(19): siRNA sense strand
ucggauggcuccccugaua

SEQ ID NO: 968037 - RNA, 19 nt, Homo sapiens
  misc_RNA (1)...(19): siRNA sense strand
gauggcagcagguucaagu

SEQ ID NO: 968038 - RNA, 19 nt, Homo sapiens
  misc_RNA (1)...(19): siRNA sense strand
aaaccugacugugaaagag

SEQ ID NO: 968039 - RNA, 19 nt, Homo sapiens
  misc_RNA (1)...(19): siRNA sense strand
cuucuaagaccaagacuuc

SEQ ID NO: 968040 - RNA, 19 nt, Homo sapiens
  misc_RNA (1)...(19): siRNA sense strand
gaacaccuggucagagaac

SEQ ID NO: 968041 - RNA, 19 nt, Homo sapiens
  misc_RNA (1)...(19): siRNA sense strand
ggaagaugaacccacaaag

SEQ ID NO: 968042 - RNA, 19 nt, Homo sapiens
  misc_RNA (1)...(19): siRNA sense strand
ugacugugaaagagacuaa

SEQ ID NO: 968043 - RNA, 19 nt, Homo sapiens
  misc_RNA (1)...(19): siRNA sense strand
gucagacccaagccaaaua

SEQ ID NO: 968044 - RNA, 19 nt, Homo sapiens
  misc_RNA (1)...(19): siRNA sense strand
gaagagaaaaccaugaagu

SEQ ID NO: 968045 - RNA, 19 nt, Homo sapiens
  misc_RNA (1)...(19): siRNA sense strand
ugaagaacaccuggucaga

SEQ ID NO: 968046 - RNA, 19 nt, Homo sapiens
  misc_RNA (1)...(19): siRNA sense strand
gagcgggagcuggaacuga

SEQ ID NO: 968047 - RNA, 19 nt, Homo sapiens
  misc_RNA (1)...(19): siRNA sense strand
ucaacuuuguggagaucaa

SEQ ID NO: 968048 - RNA, 19 nt, Homo sapiens
  misc_RNA (1)...(19): siRNA sense strand
agcgggagcuggaacugaa

SEQ ID NO: 968049 - RNA, 19 nt, Homo sapiens
  misc_RNA (1)...(19): siRNA sense strand
auacuaagcccuccagacu

SEQ ID NO: 968050 - RNA, 19 nt, Homo sapiens
  misc_RNA (1)...(19): siRNA sense strand
agagaagaaaucaacuuug

SEQ ID NO: 968051 - RNA, 19 nt, Homo sapiens
  misc_RNA (1)...(19): siRNA sense strand
ccgcuggugcuuauuauca

SEQ ID NO: 968052 - RNA, 19 nt, Homo sapiens
  misc_RNA (1)...(19): siRNA sense strand
aggaagaagacgacaguga

SEQ ID NO: 968053 - RNA, 19 nt, Homo sapiens
  misc_RNA (1)...(19): siRNA sense strand
ucagacccaagccaaauau

SEQ ID NO: 968054 - RNA, 19 nt, Homo sapiens
  misc_RNA (1)...(19): siRNA sense strand
aaaucaacuuuguggagau

SEQ ID NO: 968055 - RNA, 19 nt, Homo sapiens
  misc_RNA (1)...(19): siRNA sense strand
ucgaugacgaagcauuuaa

SEQ ID NO: 968056 - RNA, 19 nt, Homo sapiens
  misc_RNA (1)...(19): siRNA sense strand
cagcaauggaugacuaagu

SEQ ID NO: 968057 - RNA, 19 nt, Homo sapiens
  misc_RNA (1)...(19): siRNA sense strand
agaccaagacuuccucucu

SEQ ID NO: 968058 - RNA, 19 nt, Homo sapiens
  misc_RNA (1)...(19): siRNA sense strand
ccaagccaaauauggauuc

SEQ ID NO: 968059 - RNA, 19 nt, Homo sapiens
  misc_RNA (1)...(19): siRNA sense strand
cgagggagagaagaaauca

SEQ ID NO: 968060 - RNA, 19 nt, Homo sapiens
  misc_RNA (1)...(19): siRNA sense strand
aagaagacgacagugauga

SEQ ID NO: 968061 - RNA, 19 nt, Homo sapiens
  misc_RNA (1)...(19): siRNA sense strand
caacagagauccuaugauu

SEQ ID NO: 968062 - RNA, 19 nt, Homo sapiens
  misc_RNA (1)...(19): siRNA sense strand
cgaaauagcugacacacua

SEQ ID NO: 968063 - RNA, 19 nt, Homo sapiens
  misc_RNA (1)...(19): siRNA sense strand
gggcugaccucccaucuaa

SEQ ID NO: 968064 - RNA, 19 nt, Homo sapiens
  misc_RNA (1)...(19): siRNA sense strand
ccugagagaugauauaauu

SEQ ID NO: 968065 - RNA, 19 nt, Homo sapiens
  misc_RNA (1)...(19): siRNA sense strand
ccaagaaggugugguauga

SEQ ID NO: 968066 - RNA, 19 nt, Homo sapiens
  misc_RNA (1)...(19): siRNA sense strand
ugagaugccuuauguggua

SEQ ID NO: 968067 - RNA, 19 nt, Homo sapiens
  misc_RNA (1)...(19): siRNA sense strand
gcaccagucuguucugcua

SEQ ID NO: 968068 - RNA, 19 nt, Homo sapiens
  misc_RNA (1)...(19): siRNA sense strand
ccuccaagcuguacaauga

SEQ ID NO: 968069 - RNA, 19 nt, Homo sapiens
  misc_RNA (1)...(19): siRNA sense strand
ucagacauaugaaguguuu

SEQ ID NO: 968070 - RNA, 19 nt, Homo sapiens
  misc_RNA (1)...(19): siRNA sense strand
gaagggauuuccuguucuu

SEQ ID NO: 968071 - RNA, 19 nt, Homo sapiens
  misc_RNA (1)...(19): siRNA sense strand
ggacuggaauacgcuaauu

SEQ ID NO: 968072 - RNA, 19 nt, Homo sapiens
  misc_RNA (1)...(19): siRNA sense strand
caagggcuaugaagacuau

SEQ ID NO: 968073 - RNA, 19 nt, Homo sapiens
  misc_RNA (1)...(19): siRNA sense strand
ggaguacacuuccuuucug

SEQ ID NO: 968074 - RNA, 19 nt, Homo sapiens
  misc_RNA (1)...(19): siRNA sense strand
cccauccucuucccuauua

SEQ ID NO: 968075 - RNA, 19 nt, Homo sapiens
  misc_RNA (1)...(19): siRNA sense strand
cagaggaccugagagauga

SEQ ID NO: 968076 - RNA, 19 nt, Homo sapiens
  misc_RNA (1)...(19): siRNA sense strand
acagagauccuaugauuga

SEQ ID NO: 968077 - RNA, 19 nt, Homo sapiens
  misc_RNA (1)...(19): siRNA sense strand
agagaaagcagacaucauu

SEQ ID NO: 968078 - RNA, 19 nt, Homo sapiens
  misc_RNA (1)...(19): siRNA sense strand
ggccaucacucuuccaugu

SEQ ID NO: 968079 - RNA, 19 nt, Homo sapiens
  misc_RNA (1)...(19): siRNA sense strand
ggagaaggauaccaauguc

SEQ ID NO: 968080 - RNA, 19 nt, Homo sapiens
  misc_RNA (1)...(19): siRNA sense strand
gauuuccuguucuuucuaa

SEQ ID NO: 968081 - RNA, 19 nt, Homo sapiens
  misc_RNA (1)...(19): siRNA sense strand
ugcaguggcucuugaaauu

SEQ ID NO: 968082 - RNA, 19 nt, Homo sapiens
  misc_RNA (1)...(19): siRNA sense strand
caucuaaucaugucauuga

SEQ ID NO: 968083 - RNA, 19 nt, Homo sapiens
  misc_RNA (1)...(19): siRNA sense strand
gaaccguccuccaccuaau

SEQ ID NO: 968084 - RNA, 19 nt, Homo sapiens
  misc_RNA (1)...(19): siRNA sense strand
aagaagggauuuccuguuc

SEQ ID NO: 968085 - RNA, 19 nt, Homo sapiens
  misc_RNA (1)...(19): siRNA sense strand
ggaccugagagaugauaua

SEQ ID NO: 968086 - RNA, 19 nt, Homo sapiens
  misc_RNA (1)...(19): siRNA sense strand
aaaaggaccccaucaaaua

SEQ ID NO: 968087 - RNA, 19 nt, Homo sapiens
  misc_RNA (1)...(19): siRNA sense strand
gaggugcaguucaucauca

SEQ ID NO: 968088 - RNA, 19 nt, Homo sapiens
  misc_RNA (1)...(19): siRNA sense strand
ggauugcaguggcucuuga

SEQ ID NO: 968089 - RNA, 19 nt, Homo sapiens
  misc_RNA (1)...(19): siRNA sense strand
gagauccuaugauugacaa

SEQ ID NO: 968090 - RNA, 19 nt, Homo sapiens
  misc_RNA (1)...(19): siRNA sense strand
uaaugccuaugaacucuuu

SEQ ID NO: 968091 - RNA, 19 nt, Homo sapiens
  misc_RNA (1)...(19): siRNA sense strand
ccaauaccuggaauacuua

SEQ ID NO: 968092 - RNA, 19 nt, Homo sapiens
  misc_RNA (1)...(19): siRNA sense strand
caucagacaugagggaaug

SEQ ID NO: 968093 - RNA, 19 nt, Homo sapiens
  misc_RNA (1)...(19): siRNA sense strand
gcaccaaccaccacucaga

SEQ ID NO: 968094 - RNA, 19 nt, Homo sapiens
  misc_RNA (1)...(19): siRNA sense strand
gcauuuuccugaccaauaa

SEQ ID NO: 968095 - RNA, 19 nt, Homo sapiens
  misc_RNA (1)...(19): siRNA sense strand
gaaaaggaccccaucaaau

SEQ ID NO: 968096 - RNA, 19 nt, Homo sapiens
  misc_RNA (1)...(19): siRNA sense strand
gcuguaugcuguggagaaa

SEQ ID NO: 968097 - RNA, 19 nt, Homo sapiens
  misc_RNA (1)...(19): siRNA sense strand
gaccugagagaugauauaa

SEQ ID NO: 968098 - RNA, 19 nt, Homo sapiens
  misc_RNA (1)...(19): siRNA sense strand
gggauguucucaugguuuc

SEQ ID NO: 968099 - RNA, 19 nt, Homo sapiens
  misc_RNA (1)...(19): siRNA sense strand
uggacaaucuggaaucuca

SEQ ID NO: 968100 - RNA, 19 nt, Homo sapiens
  misc_RNA (1)...(19): siRNA sense strand
ggaggugaacacaguacua

SEQ ID NO: 968101 - RNA, 19 nt, Homo sapiens
  misc_RNA (1)...(19): siRNA sense strand
ccaagugaccguagucuca

SEQ ID NO: 968102 - RNA, 19 nt, Homo sapiens
  misc_RNA (1)...(19): siRNA sense strand
gaauuuuggugcauauuug

SEQ ID NO: 968103 - RNA, 19 nt, Homo sapiens
  misc_RNA (1)...(19): siRNA sense strand
gcuauugcaccuuggaauu

SEQ ID NO: 968104 - RNA, 19 nt, Homo sapiens
  misc_RNA (1)...(19): siRNA sense strand
ccagaggaccugagagaug

SEQ ID NO: 968105 - RNA, 19 nt, Homo sapiens
  misc_RNA (1)...(19): siRNA sense strand
gagaaagcagacaucauug

SEQ ID NO: 968106 - RNA, 19 nt, Homo sapiens
  misc_RNA (1)...(19): siRNA sense strand
cagcaggccaucuauaaau

SEQ ID NO: 968107 - RNA, 19 nt, Homo sapiens
  misc_RNA (1)...(19): siRNA sense strand
uggaaucucagacauauga

SEQ ID NO: 968108 - RNA, 19 nt, Homo sapiens
  misc_RNA (1)...(19): siRNA sense strand
gggauuuccuguucuuucu

SEQ ID NO: 968109 - RNA, 19 nt, Homo sapiens
  misc_RNA (1)...(19): siRNA sense strand
gaccucccaucuaaucaug

SEQ ID NO: 968110 - RNA, 19 nt, Homo sapiens
  misc_RNA (1)...(19): siRNA sense strand
ggauggagcccagcacuuc

SEQ ID NO: 968111 - RNA, 19 nt, Homo sapiens
  misc_RNA (1)...(19): siRNA sense strand
gaagccaagugaccguagu

SEQ ID NO: 968112 - RNA, 19 nt, Homo sapiens
  misc_RNA (1)...(19): siRNA sense strand
ucaggaagggacuggaaua

SEQ ID NO: 968113 - RNA, 19 nt, Homo sapiens
  misc_RNA (1)...(19): siRNA sense strand
gagcccagcacuuccuaaa

SEQ ID NO: 968114 - RNA, 19 nt, Homo sapiens
  misc_RNA (1)...(19): siRNA sense strand
gggcucauuugcugacaau

SEQ ID NO: 968115 - RNA, 19 nt, Homo sapiens
  misc_RNA (1)...(19): siRNA sense strand
uggcacaacuuccggacuu

SEQ ID NO: 968116 - RNA, 19 nt, Homo sapiens
  misc_RNA (1)...(19): siRNA sense strand
gagagaugauauaauugag

SEQ ID NO: 968117 - RNA, 19 nt, Homo sapiens
  misc_RNA (1)...(19): siRNA sense strand
ccaucacucuuccauguuc

SEQ ID NO: 968118 - RNA, 19 nt, Homo sapiens
  misc_RNA (1)...(19): siRNA sense strand
agacauaugaaguguuuga

SEQ ID NO: 968119 - RNA, 19 nt, Homo sapiens
  misc_RNA (1)...(19): siRNA sense strand
aaagcuuucuccauggauu

SEQ ID NO: 968120 - RNA, 19 nt, Homo sapiens
  misc_RNA (1)...(19): siRNA sense strand
ccacaggccgcucauauac

SEQ ID NO: 968121 - RNA, 19 nt, Homo sapiens
  misc_RNA (1)...(19): siRNA sense strand
ggacuuugugugacuauag

SEQ ID NO: 968122 - RNA, 19 nt, Homo sapiens
  misc_RNA (1)...(19): siRNA sense strand
acaccaaccuggccagagu

SEQ ID NO: 968123 - RNA, 19 nt, Homo sapiens
  misc_RNA (1)...(19): siRNA sense strand
uggagaagauucgcaggaa

SEQ ID NO: 968124 - RNA, 19 nt, Homo sapiens
  misc_RNA (1)...(19): siRNA sense strand
uaagaagggauuuccuguu

SEQ ID NO: 968125 - RNA, 19 nt, Homo sapiens
  misc_RNA (1)...(19): siRNA sense strand
gauggacaaucuggaaucu

SEQ ID NO: 968126 - RNA, 19 nt, Homo sapiens
  misc_RNA (1)...(19): siRNA sense strand
gcccauaacgguacgugaa

SEQ ID NO: 968127 - RNA, 19 nt, Homo sapiens
  misc_RNA (1)...(19): siRNA sense strand
ccuauuaagcagcccauaa

SEQ ID NO: 968128 - RNA, 19 nt, Homo sapiens
  misc_RNA (1)...(19): siRNA sense strand
gacaacaaccgcuauugca

SEQ ID NO: 968129 - RNA, 19 nt, Homo sapiens
  misc_RNA (1)...(19): siRNA sense strand
cuacacacacagaggagua

SEQ ID NO: 968130 - RNA, 19 nt, Homo sapiens
  misc_RNA (1)...(19): siRNA sense strand
gaauugcguccccgaaaua

SEQ ID NO: 968131 - RNA, 19 nt, Homo sapiens
  misc_RNA (1)...(19): siRNA sense strand
aguuugagaugccuuaugu

SEQ ID NO: 968132 - RNA, 19 nt, Homo sapiens
  misc_RNA (1)...(19): siRNA sense strand
cagaagaggagaaggauac

SEQ ID NO: 968133 - RNA, 19 nt, Homo sapiens
  misc_RNA (1)...(19): siRNA sense strand
ccagcaggccaucuauaaa

SEQ ID NO: 968134 - RNA, 19 nt, Homo sapiens
  misc_RNA (1)...(19): siRNA sense strand
gcuccuaccuccaauaccu

SEQ ID NO: 968135 - RNA, 19 nt, Homo sapiens
  misc_RNA (1)...(19): siRNA sense strand
caucaaagcagccauucuc

SEQ ID NO: 968136 - RNA, 19 nt, Homo sapiens
  misc_RNA (1)...(19): siRNA sense strand
gcacaacuuccggacuuug

SEQ ID NO: 968137 - RNA, 19 nt, Homo sapiens
  misc_RNA (1)...(19): siRNA sense strand
aagaaggugugguaugagu

SEQ ID NO: 968138 - RNA, 19 nt, Homo sapiens
  misc_RNA (1)...(19): siRNA sense strand
gaggagaaggauaccaaug

SEQ ID NO: 968139 - RNA, 19 nt, Homo sapiens
  misc_RNA (1)...(19): siRNA sense strand
gcaguggcucuugaaauug

SEQ ID NO: 968140 - RNA, 19 nt, Homo sapiens
  misc_RNA (1)...(19): siRNA sense strand
cuucagccaucccaacaga

SEQ ID NO: 968141 - RNA, 19 nt, Homo sapiens
  misc_RNA (1)...(19): siRNA sense strand
gaaauagcugacacacuag

SEQ ID NO: 968142 - RNA, 19 nt, Homo sapiens
  misc_RNA (1)...(19): siRNA sense strand
gagaagauucgcaggaacu

SEQ ID NO: 968143 - RNA, 19 nt, Homo sapiens
  misc_RNA (1)...(19): siRNA sense strand
cauauaccauuggccucua

SEQ ID NO: 968144 - RNA, 19 nt, Homo sapiens
  misc_RNA (1)...(19): siRNA sense strand
ggauucguccagacucaaa

SEQ ID NO: 968145 - RNA, 19 nt, Homo sapiens
  misc_RNA (1)...(19): siRNA sense strand
gcugaccucccaucuaauc

SEQ ID NO: 968146 - RNA, 19 nt, Homo sapiens
  misc_RNA (1)...(19): siRNA sense strand
uugagacugugcuuuauca

SEQ ID NO: 968147 - RNA, 19 nt, Homo sapiens
  misc_RNA (1)...(19): siRNA sense strand
gggaguacacuuccuuucu

SEQ ID NO: 968148 - RNA, 19 nt, Homo sapiens
  misc_RNA (1)...(19): siRNA sense strand
gcaggccaucuauaaaugu

SEQ ID NO: 968149 - RNA, 19 nt, Homo sapiens
  misc_RNA (1)...(19): siRNA sense strand
ucaagagggaguucauuca

SEQ ID NO: 968150 - RNA, 19 nt, Homo sapiens
  misc_RNA (1)...(19): siRNA sense strand
cuaauugugggaaagcuuu

SEQ ID NO: 968151 - RNA, 19 nt, Homo sapiens
  misc_RNA (1)...(19): siRNA sense strand
caccagaggaccugagaga

SEQ ID NO: 968152 - RNA, 19 nt, Homo sapiens
  misc_RNA (1)...(19): siRNA sense strand
gaccuacugcugucaggaa

SEQ ID NO: 968153 - RNA, 19 nt, Homo sapiens
  misc_RNA (1)...(19): siRNA sense strand
acuuugagacugugcuuua

SEQ ID NO: 968154 - RNA, 19 nt, Homo sapiens
  misc_RNA (1)...(19): siRNA sense strand
uggcuuugccggcuacuuu

SEQ ID NO: 968155 - RNA, 19 nt, Homo sapiens
  misc_RNA (1)...(19): siRNA sense strand
cuauugcaccuuggaauuu

SEQ ID NO: 968156 - RNA, 19 nt, Homo sapiens
  misc_RNA (1)...(19): siRNA sense strand
auggguggcuccagagaaa

SEQ ID NO: 968157 - RNA, 19 nt, Homo sapiens
  misc_RNA (1)...(19): siRNA sense strand
ccagaagaggagaaggaua

SEQ ID NO: 968158 - RNA, 19 nt, Homo sapiens
  misc_RNA (1)...(19): siRNA sense strand
gcgggagggaccugaauug

SEQ ID NO: 968159 - RNA, 19 nt, Homo sapiens
  misc_RNA (1)...(19): siRNA sense strand
ggcacaacuuccggacuuu

SEQ ID NO: 968160 - RNA, 19 nt, Homo sapiens
  misc_RNA (1)...(19): siRNA sense strand
cccacaggccgcucauaua

SEQ ID NO: 968161 - RNA, 19 nt, Homo sapiens
  misc_RNA (1)...(19): siRNA sense strand
ggaaggaaguccagagaaa

SEQ ID NO: 968162 - RNA, 19 nt, Homo sapiens
  misc_RNA (1)...(19): siRNA sense strand
ggccagagcucauuaacau

SEQ ID NO: 968163 - RNA, 19 nt, Homo sapiens
  misc_RNA (1)...(19): siRNA sense strand
uaugacagcugcccucaaa

SEQ ID NO: 968164 - RNA, 19 nt, Homo sapiens
  misc_RNA (1)...(19): siRNA sense strand
caaaggaagcugcucauug

SEQ ID NO: 968165 - RNA, 19 nt, Homo sapiens
  misc_RNA (1)...(19): siRNA sense strand
uugaugaacuggacucuuu

SEQ ID NO: 968166 - RNA, 19 nt, Homo sapiens
  misc_RNA (1)...(19): siRNA sense strand
gcugggaccucucugauag

SEQ ID NO: 968167 - RNA, 19 nt, Homo sapiens
  misc_RNA (1)...(19): siRNA sense strand
gggagggacuggagauuca

SEQ ID NO: 968168 - RNA, 19 nt, Homo sapiens
  misc_RNA (1)...(19): siRNA sense strand
ggaccugccugcugaugug

SEQ ID NO: 968169 - RNA, 19 nt, Homo sapiens
  misc_RNA (1)...(19): siRNA sense strand
cuacagcacuaauggaaau

SEQ ID NO: 968170 - RNA, 19 nt, Homo sapiens
  misc_RNA (1)...(19): siRNA sense strand
aaaggaagcugcucauugc

SEQ ID NO: 968171 - RNA, 19 nt, Homo sapiens
  misc_RNA (1)...(19): siRNA sense strand
ggagagcucagaauucaga

SEQ ID NO: 968172 - RNA, 19 nt, Homo sapiens
  misc_RNA (1)...(19): siRNA sense strand
gcaaguagagauccuggaa

SEQ ID NO: 968173 - RNA, 19 nt, Homo sapiens
  misc_RNA (1)...(19): siRNA sense strand
ggaaggggauguucuaugu

SEQ ID NO: 968174 - RNA, 19 nt, Homo sapiens
  misc_RNA (1)...(19): siRNA sense strand
gcgcggaccucuacucucu

SEQ ID NO: 968175 - RNA, 19 nt, Homo sapiens
  misc_RNA (1)...(19): siRNA sense strand
gaucaagaacucagguuug

SEQ ID NO: 968176 - RNA, 19 nt, Homo sapiens
  misc_RNA (1)...(19): siRNA sense strand
gcaccaggaucaagaacuc

SEQ ID NO: 968177 - RNA, 19 nt, Homo sapiens
  misc_RNA (1)...(19): siRNA sense strand
agacagcauuuccucauga

SEQ ID NO: 968178 - RNA, 19 nt, Homo sapiens
  misc_RNA (1)...(19): siRNA sense strand
gaaaugggagagcucagaa

SEQ ID NO: 968179 - RNA, 19 nt, Homo sapiens
  misc_RNA (1)...(19): siRNA sense strand
gcugugugcugccggcuuu

SEQ ID NO: 968180 - RNA, 19 nt, Homo sapiens
  misc_RNA (1)...(19): siRNA sense strand
ugcauuaucuucuuugaug

SEQ ID NO: 968181 - RNA, 19 nt, Homo sapiens
  misc_RNA (1)...(19): siRNA sense strand
cgaggugccugcucuguca

SEQ ID NO: 968182 - RNA, 19 nt, Homo sapiens
  misc_RNA (1)...(19): siRNA sense strand
gcauuaucuucuuugauga

SEQ ID NO: 968183 - RNA, 19 nt, Homo sapiens
  misc_RNA (1)...(19): siRNA sense strand
gcacucaggauguguuugu

SEQ ID NO: 968184 - RNA, 19 nt, Homo sapiens
  misc_RNA (1)...(19): siRNA sense strand
gaaugugcgggaaguguuu

SEQ ID NO: 968185 - RNA, 19 nt, Homo sapiens
  misc_RNA (1)...(19): siRNA sense strand
gcagcuccaugcauuaucu

SEQ ID NO: 968186 - RNA, 19 nt, Homo sapiens
  misc_RNA (1)...(19): siRNA sense strand
gaacuuggcacagcuagca

SEQ ID NO: 968187 - RNA, 19 nt, Homo sapiens
  misc_RNA (1)...(19): siRNA sense strand
ugggagagcucagaauuca

SEQ ID NO: 968188 - RNA, 19 nt, Homo sapiens
  misc_RNA (1)...(19): siRNA sense strand
ggaaaugggagagcucaga

SEQ ID NO: 968189 - RNA, 19 nt, Homo sapiens
  misc_RNA (1)...(19): siRNA sense strand
ggaucaagaacucagguuu

SEQ ID NO: 968190 - RNA, 19 nt, Homo sapiens
  misc_RNA (1)...(19): siRNA sense strand
gggaagaccacaguaguug

SEQ ID NO: 968191 - RNA, 19 nt, Homo sapiens
  misc_RNA (1)...(19): siRNA sense strand
ccagagaguuacacaucga

SEQ ID NO: 968192 - RNA, 19 nt, Homo sapiens
  misc_RNA (1)...(19): siRNA sense strand
caggauguguuugugauug

SEQ ID NO: 968193 - RNA, 19 nt, Homo sapiens
  misc_RNA (1)...(19): siRNA sense strand
ugguaaacgugcuagauug

SEQ ID NO: 968194 - RNA, 19 nt, Homo sapiens
  misc_RNA (1)...(19): siRNA sense strand
gcuugucccugccacuuug

SEQ ID NO: 968195 - RNA, 19 nt, Homo sapiens
  misc_RNA (1)...(19): siRNA sense strand
cagagcucauuaacaugua

SEQ ID NO: 968196 - RNA, 19 nt, Homo sapiens
  misc_RNA (1)...(19): siRNA sense strand
gaauucagagguacuugga

SEQ ID NO: 968197 - RNA, 19 nt, Homo sapiens
  misc_RNA (1)...(19): siRNA sense strand
gcagacagcauuuccucau

SEQ ID NO: 968198 - RNA, 19 nt, Homo sapiens
  misc_RNA (1)...(19): siRNA sense strand
ccagagcucauuaacaugu

SEQ ID NO: 968199 - RNA, 19 nt, Homo sapiens
  misc_RNA (1)...(19): siRNA sense strand
ugcaggaggugaagaagga

SEQ ID NO: 968200 - RNA, 19 nt, Homo sapiens
  misc_RNA (1)...(19): siRNA sense strand
agaguuacacaucgaaauu

SEQ ID NO: 968201 - RNA, 19 nt, Homo sapiens
  misc_RNA (1)...(19): siRNA sense strand
ucaguguccuggcaugaug

SEQ ID NO: 968202 - RNA, 19 nt, Homo sapiens
  misc_RNA (1)...(19): siRNA sense strand
uuccauggcucccuucaga

SEQ ID NO: 968203 - RNA, 19 nt, Homo sapiens
  misc_RNA (1)...(19): siRNA sense strand
cagcuacgcguucuaagug

SEQ ID NO: 968204 - RNA, 19 nt, Homo sapiens
  misc_RNA (1)...(19): siRNA sense strand
cagacagcauuuccucaug

SEQ ID NO: 968205 - RNA, 19 nt, Homo sapiens
  misc_RNA (1)...(19): siRNA sense strand
ucucugcucugaugcuaug

SEQ ID NO: 968206 - RNA, 19 nt, Homo sapiens
  misc_RNA (1)...(19): siRNA sense strand
gagaguuacacaucgaaau

SEQ ID NO: 968207 - RNA, 19 nt, Homo sapiens
  misc_RNA (1)...(19): siRNA sense strand
ggagcacccugagcuacug

SEQ ID NO: 968208 - RNA, 19 nt, Homo sapiens
  misc_RNA (1)...(19): siRNA sense strand
ccacccauaccuccuugua

SEQ ID NO: 968209 - RNA, 19 nt, Homo sapiens
  misc_RNA (1)...(19): siRNA sense strand
ccagguggcgggaaauguu

SEQ ID NO: 968210 - RNA, 19 nt, Homo sapiens
  misc_RNA (1)...(19): siRNA sense strand
gaaauuaugacgguguucu

SEQ ID NO: 968211 - RNA, 19 nt, Homo sapiens
  misc_RNA (1)...(19): siRNA sense strand
gaacuagcaguguccuucu

SEQ ID NO: 968212 - RNA, 19 nt, Homo sapiens
  misc_RNA (1)...(19): siRNA sense strand
gagagucaucgaacacuuc

SEQ ID NO: 968213 - RNA, 19 nt, Homo sapiens
  misc_RNA (1)...(19): siRNA sense strand
gccagagagucaucgaaca

SEQ ID NO: 968214 - RNA, 19 nt, Homo sapiens
  misc_RNA (1)...(19): siRNA sense strand
uaucuucuuugaugaacug

SEQ ID NO: 968215 - RNA, 19 nt, Homo sapiens
  misc_RNA (1)...(19): siRNA sense strand
caugcauuaucuucuuuga

SEQ ID NO: 968216 - RNA, 19 nt, Homo sapiens
  misc_RNA (1)...(19): siRNA sense strand
gggccaaagugaggagaau

SEQ ID NO: 968217 - RNA, 19 nt, Homo sapiens
  misc_RNA (1)...(19): siRNA sense strand
gaguuacacaucgaaauug

SEQ ID NO: 968218 - RNA, 19 nt, Homo sapiens
  misc_RNA (1)...(19): siRNA sense strand
gaaggaaguccagagaaac

SEQ ID NO: 968219 - RNA, 19 nt, Homo sapiens
  misc_RNA (1)...(19): siRNA sense strand
acaucgaaauugugucuuc

SEQ ID NO: 968220 - RNA, 19 nt, Homo sapiens
  misc_RNA (1)...(19): siRNA sense strand
uaccggcacuuucagauac

SEQ ID NO: 968221 - RNA, 19 nt, Homo sapiens
  misc_RNA (1)...(19): siRNA sense strand
gagaaugugcgggaagugu

SEQ ID NO: 968222 - RNA, 19 nt, Homo sapiens
  misc_RNA (1)...(19): siRNA sense strand
ucaccuugggcuccacuua

SEQ ID NO: 968223 - RNA, 19 nt, Homo sapiens
  misc_RNA (1)...(19): siRNA sense strand
caacaauugggcaaguaga

SEQ ID NO: 968224 - RNA, 19 nt, Homo sapiens
  misc_RNA (1)...(19): siRNA sense strand
uuaccggcacuuucagaua

SEQ ID NO: 968225 - RNA, 19 nt, Homo sapiens
  misc_RNA (1)...(19): siRNA sense strand
gguggugucucagcuccuu

SEQ ID NO: 968226 - RNA, 19 nt, Homo sapiens
  misc_RNA (1)...(19): siRNA sense strand
acccauaccuccuuguaca

SEQ ID NO: 968227 - RNA, 19 nt, Homo sapiens
  misc_RNA (1)...(19): siRNA sense strand
ucaaacgcaggguucauga

SEQ ID NO: 968228 - RNA, 19 nt, Homo sapiens
  misc_RNA (1)...(19): siRNA sense strand
uccauuugccagagaguua

SEQ ID NO: 968229 - RNA, 19 nt, Homo sapiens
  misc_RNA (1)...(19): siRNA sense strand
gccagacuguguccagagu

SEQ ID NO: 968230 - RNA, 19 nt, Homo sapiens
  misc_RNA (1)...(19): siRNA sense strand
agagagucaucgaacacuu

SEQ ID NO: 968231 - RNA, 19 nt, Homo sapiens
  misc_RNA (1)...(19): siRNA sense strand
ggauguguuugugauugga

SEQ ID NO: 968232 - RNA, 19 nt, Homo sapiens
  misc_RNA (1)...(19): siRNA sense strand
cuuggugucugaacucugu

SEQ ID NO: 968233 - RNA, 19 nt, Homo sapiens
  misc_RNA (1)...(19): siRNA sense strand
uggaaauuaugacgguguu

SEQ ID NO: 968234 - RNA, 19 nt, Homo sapiens
  misc_RNA (1)...(19): siRNA sense strand
ucuacucucucugcucuga

SEQ ID NO: 968235 - RNA, 19 nt, Homo sapiens
  misc_RNA (1)...(19): siRNA sense strand
gcggaccucuacucucucu

SEQ ID NO: 968236 - RNA, 19 nt, Homo sapiens
  misc_RNA (1)...(19): siRNA sense strand
gccaaagugaggagaaugu

SEQ ID NO: 968237 - RNA, 19 nt, Homo sapiens
  misc_RNA (1)...(19): siRNA sense strand
ggcaggcacuggagcaacu

SEQ ID NO: 968238 - RNA, 19 nt, Homo sapiens
  misc_RNA (1)...(19): siRNA sense strand
ggaucucuaugcccuucug

SEQ ID NO: 968239 - RNA, 19 nt, Homo sapiens
  misc_RNA (1)...(19): siRNA sense strand
gaagaccacaguaguugcu

SEQ ID NO: 968240 - RNA, 19 nt, Homo sapiens
  misc_RNA (1)...(19): siRNA sense strand
aaugggagagcucagaauu

SEQ ID NO: 968241 - RNA, 19 nt, Homo sapiens
  misc_RNA (1)...(19): siRNA sense strand
gaccagccagugccuacuu

SEQ ID NO: 968242 - RNA, 19 nt, Homo sapiens
  misc_RNA (1)...(19): siRNA sense strand
gacagcauuuccucaugag

SEQ ID NO: 968243 - RNA, 19 nt, Homo sapiens
  misc_RNA (1)...(19): siRNA sense strand
uuaugacgguguucuuuac

SEQ ID NO: 968244 - RNA, 19 nt, Homo sapiens
  misc_RNA (1)...(19): siRNA sense strand
uccaugcauuaucuucuuu

SEQ ID NO: 968245 - RNA, 19 nt, Homo sapiens
  misc_RNA (1)...(19): siRNA sense strand
ugaggaugcccgugugaug

SEQ ID NO: 968246 - RNA, 19 nt, Homo sapiens
  misc_RNA (1)...(19): siRNA sense strand
uggaggccuuggugucuga

SEQ ID NO: 968247 - RNA, 19 nt, Homo sapiens
  misc_RNA (1)...(19): siRNA sense strand
gaaaacaguuggggaagcu

SEQ ID NO: 968248 - RNA, 19 nt, Homo sapiens
  misc_RNA (1)...(19): siRNA sense strand
cuaugugugccaacaauug

SEQ ID NO: 968249 - RNA, 19 nt, Homo sapiens
  misc_RNA (1)...(19): siRNA sense strand
auuaugacgguguucuuua

SEQ ID NO: 968250 - RNA, 19 nt, Homo sapiens
  misc_RNA (1)...(19): siRNA sense strand
cuccaugcauuaucuucuu

SEQ ID NO: 968251 - RNA, 19 nt, Homo sapiens
  misc_RNA (1)...(19): siRNA sense strand
cacuacagcacuaauggaa

SEQ ID NO: 968252 - RNA, 19 nt, Homo sapiens
  misc_RNA (1)...(19): siRNA sense strand
cugguaaacgugcuagauu

SEQ ID NO: 968253 - RNA, 19 nt, Homo sapiens
  misc_RNA (1)...(19): siRNA sense strand
aagcuagagccaucuguga

SEQ ID NO: 968254 - RNA, 19 nt, Homo sapiens
  misc_RNA (1)...(19): siRNA sense strand
gccaucacacgcaaauuca

SEQ ID NO: 968255 - RNA, 19 nt, Homo sapiens
  misc_RNA (1)...(19): siRNA sense strand
ccagcuacgcguucuaagu

SEQ ID NO: 968256 - RNA, 19 nt, Homo sapiens
  misc_RNA (1)...(19): siRNA sense strand
gugugcaggcuuuguggua

SEQ ID NO: 968257 - RNA, 19 nt, Homo sapiens
  misc_RNA (1)...(19): siRNA sense strand
gucaccuccuccucaauga

SEQ ID NO: 968258 - RNA, 19 nt, Homo sapiens
  misc_RNA (1)...(19): siRNA sense strand
cgucaccuccuccucaaug

SEQ ID NO: 968259 - RNA, 19 nt, Homo sapiens
  misc_RNA (1)...(19): siRNA sense strand
gauuugacaagcugguguu

SEQ ID NO: 968260 - RNA, 19 nt, Homo sapiens
  misc_RNA (1)...(19): siRNA sense strand
gcugcaacccucagucagu

SEQ ID NO: 968261 - RNA, 19 nt, Homo sapiens
  misc_RNA (1)...(19): siRNA sense strand
gacaugauccagcaauuua

SEQ ID NO: 968262 - RNA, 19 nt, Homo sapiens
  misc_RNA (1)...(19): siRNA sense strand
gaaaucaugcaucaaacua

SEQ ID NO: 968263 - RNA, 19 nt, Homo sapiens
  misc_RNA (1)...(19): siRNA sense strand
agacagaaaucaugcauca

SEQ ID NO: 968264 - RNA, 19 nt, Homo sapiens
  misc_RNA (1)...(19): siRNA sense strand
gaugagauccugcagcaaa

SEQ ID NO: 968265 - RNA, 19 nt, Homo sapiens
  misc_RNA (1)...(19): siRNA sense strand
caacagcgaguccggauuu

SEQ ID NO: 968266 - RNA, 19 nt, Homo sapiens
  misc_RNA (1)...(19): siRNA sense strand
ggagauccaugaggugauu

SEQ ID NO: 968267 - RNA, 19 nt, Homo sapiens
  misc_RNA (1)...(19): siRNA sense strand
aaacuauggugcagaagaa

SEQ ID NO: 968268 - RNA, 19 nt, Homo sapiens
  misc_RNA (1)...(19): siRNA sense strand
gggaggaacugggcguuaa

SEQ ID NO: 968269 - RNA, 19 nt, Homo sapiens
  misc_RNA (1)...(19): siRNA sense strand
aggaagaccuggccgagua

SEQ ID NO: 968270 - RNA, 19 nt, Homo sapiens
  misc_RNA (1)...(19): siRNA sense strand
ggacaugauccagcaauuu

SEQ ID NO: 968271 - RNA, 19 nt, Homo sapiens
  misc_RNA (1)...(19): siRNA sense strand
uagagaaggugguggagaa

SEQ ID NO: 968272 - RNA, 19 nt, Homo sapiens
  misc_RNA (1)...(19): siRNA sense strand
ggaaaaggaugaugagauc

SEQ ID NO: 968273 - RNA, 19 nt, Homo sapiens
  misc_RNA (1)...(19): siRNA sense strand
gaacaccgcagccaagaag

SEQ ID NO: 968274 - RNA, 19 nt, Homo sapiens
  misc_RNA (1)...(19): siRNA sense strand
acagaaaucaugcaucaaa

SEQ ID NO: 968275 - RNA, 19 nt, Homo sapiens
  misc_RNA (1)...(19): siRNA sense strand
acaagcagcuggacaugau

SEQ ID NO: 968276 - RNA, 19 nt, Homo sapiens
  misc_RNA (1)...(19): siRNA sense strand
uaaggaagcccaacugaag

SEQ ID NO: 968277 - RNA, 19 nt, Homo sapiens
  misc_RNA (1)...(19): siRNA sense strand
ggaacugggcguuaaggaa

SEQ ID NO: 968278 - RNA, 19 nt, Homo sapiens
  misc_RNA (1)...(19): siRNA sense strand
gcagcaaugucaucuucug

SEQ ID NO: 968279 - RNA, 19 nt, Homo sapiens
  misc_RNA (1)...(19): siRNA sense strand
caacaaguaccuagagaag

SEQ ID NO: 968280 - RNA, 19 nt, Homo sapiens
  misc_RNA (1)...(19): siRNA sense strand
ugaagaaagccaacaagga

SEQ ID NO: 968281 - RNA, 19 nt, Homo sapiens
  misc_RNA (1)...(19): siRNA sense strand
aaucaugcaucaaacuaug

SEQ ID NO: 968282 - RNA, 19 nt, Homo sapiens
  misc_RNA (1)...(19): siRNA sense strand
ccgcagcaaugucaucuuc

SEQ ID NO: 968283 - RNA, 19 nt, Homo sapiens
  misc_RNA (1)...(19): siRNA sense strand
acaagacgcuggugagcau

SEQ ID NO: 968284 - RNA, 19 nt, Homo sapiens
  misc_RNA (1)...(19): siRNA sense strand
caaacuauggugcagaaga

SEQ ID NO: 968285 - RNA, 19 nt, Homo sapiens
  misc_RNA (1)...(19): siRNA sense strand
agaagaagaagauguuuca

SEQ ID NO: 968286 - RNA, 19 nt, Homo sapiens
  misc_RNA (1)...(19): siRNA sense strand
gcagaagaagaagauguuu

SEQ ID NO: 968287 - RNA, 19 nt, Homo sapiens
  misc_RNA (1)...(19): siRNA sense strand
caacaaggagcgagaacuc

SEQ ID NO: 968288 - RNA, 19 nt, Homo sapiens
  misc_RNA (1)...(19): siRNA sense strand
ccaucuggcuacuggagaa

SEQ ID NO: 968289 - RNA, 19 nt, Homo sapiens
  misc_RNA (1)...(19): siRNA sense strand
gcugaaggacuacuacauc

SEQ ID NO: 968290 - RNA, 19 nt, Homo sapiens
  misc_RNA (1)...(19): siRNA sense strand
acuacuacaucuucaacaa

SEQ ID NO: 968291 - RNA, 19 nt, Homo sapiens
  misc_RNA (1)...(19): siRNA sense strand
ugaaggcucacauccagaa

SEQ ID NO: 968292 - RNA, 19 nt, Homo sapiens
  misc_RNA (1)...(19): siRNA sense strand
ggaaggccaggagaagauu

SEQ ID NO: 968293 - RNA, 19 nt, Homo sapiens
  misc_RNA (1)...(19): siRNA sense strand
ccaggagaacgaccagaaa

SEQ ID NO: 968294 - RNA, 19 nt, Homo sapiens
  misc_RNA (1)...(19): siRNA sense strand
aaaggagacagaaaucaug

SEQ ID NO: 968295 - RNA, 19 nt, Homo sapiens
  misc_RNA (1)...(19): siRNA sense strand
gcucggcaccauuaagaug

SEQ ID NO: 968296 - RNA, 19 nt, Homo sapiens
  misc_RNA (1)...(19): siRNA sense strand
aaugucaucuucugggaau

SEQ ID NO: 968297 - RNA, 19 nt, Homo sapiens
  misc_RNA (1)...(19): siRNA sense strand
cagaaaucaugcaucaaac

SEQ ID NO: 968298 - RNA, 19 nt, Homo sapiens
  misc_RNA (1)...(19): siRNA sense strand
caagaccggucggacaucu

SEQ ID NO: 968299 - RNA, 19 nt, Homo sapiens
  misc_RNA (1)...(19): siRNA sense strand
ugagcaagcaccugaagga

SEQ ID NO: 968300 - RNA, 19 nt, Homo sapiens
  misc_RNA (1)...(19): siRNA sense strand
guuaaggaagcccaacuga

SEQ ID NO: 968301 - RNA, 19 nt, Homo sapiens
  misc_RNA (1)...(19): siRNA sense strand
gcaggaaggccaggagaag

SEQ ID NO: 968302 - RNA, 19 nt, Homo sapiens
  misc_RNA (1)...(19): siRNA sense strand
uacuacaucuucaacaagu

SEQ ID NO: 968303 - RNA, 19 nt, Homo sapiens
  misc_RNA (1)...(19): siRNA sense strand
gaaccugcgcugggaggaa

SEQ ID NO: 968304 - RNA, 19 nt, Homo sapiens
  misc_RNA (1)...(19): siRNA sense strand
gaaggccaggagaagauug

SEQ ID NO: 968305 - RNA, 19 nt, Homo sapiens
  misc_RNA (1)...(19): siRNA sense strand
ucaacaaguaccuagagaa

SEQ ID NO: 968306 - RNA, 19 nt, Homo sapiens
  misc_RNA (1)...(19): siRNA sense strand
ggagacagaaaucaugcau

SEQ ID NO: 968307 - RNA, 19 nt, Homo sapiens
  misc_RNA (1)...(19): siRNA sense strand
ggacuacuacaucuucaac

SEQ ID NO: 968308 - RNA, 19 nt, Homo sapiens
  misc_RNA (1)...(19): siRNA sense strand
cugaaggacuacuacaucu

SEQ ID NO: 968309 - RNA, 19 nt, Homo sapiens
  misc_RNA (1)...(19): siRNA sense strand
gaauggaaacccugaaccu

SEQ ID NO: 968310 - RNA, 19 nt, Homo sapiens
  misc_RNA (1)...(19): siRNA sense strand
uuaaggaagcccaacugaa

SEQ ID NO: 968311 - RNA, 19 nt, Homo sapiens
  misc_RNA (1)...(19): siRNA sense strand
cagaagaagaagauguuuc

SEQ ID NO: 968312 - RNA, 19 nt, Homo sapiens
  misc_RNA (1)...(19): siRNA sense strand
ccaagcugaaggacuacua

SEQ ID NO: 968313 - RNA, 19 nt, Homo sapiens
  misc_RNA (1)...(19): siRNA sense strand
gcagaauggaaacccugaa

SEQ ID NO: 968314 - RNA, 19 nt, Homo sapiens
  misc_RNA (1)...(19): siRNA sense strand
gugauugcacgcuacaaga

SEQ ID NO: 968315 - RNA, 19 nt, Homo sapiens
  misc_RNA (1)...(19): siRNA sense strand
acaaggagcgagaacucaa

SEQ ID NO: 968316 - RNA, 19 nt, Homo sapiens
  misc_RNA (1)...(19): siRNA sense strand
gggcaucauggaagaggaa

SEQ ID NO: 968317 - RNA, 19 nt, Homo sapiens
  misc_RNA (1)...(19): siRNA sense strand
gauccagcaauuuauccaa

SEQ ID NO: 968318 - RNA, 19 nt, Homo sapiens
  misc_RNA (1)...(19): siRNA sense strand
cagaaacuccccaauguug

SEQ ID NO: 968319 - RNA, 19 nt, Homo sapiens
  misc_RNA (1)...(19): siRNA sense strand
agaaggugguggagaacuc

SEQ ID NO: 968320 - RNA, 19 nt, Homo sapiens
  misc_RNA (1)...(19): siRNA sense strand
gugcagaagaagaagaugu

SEQ ID NO: 968321 - RNA, 19 nt, Homo sapiens
  misc_RNA (1)...(19): siRNA sense strand
aacagcgaguccggauuua

SEQ ID NO: 968322 - RNA, 19 nt, Homo sapiens
  misc_RNA (1)...(19): siRNA sense strand
ccaugaagaaagccaacaa

SEQ ID NO: 968323 - RNA, 19 nt, Homo sapiens
  misc_RNA (1)...(19): siRNA sense strand
ggcugcagaugcgcuuuga

SEQ ID NO: 968324 - RNA, 19 nt, Homo sapiens
  misc_RNA (1)...(19): siRNA sense strand
uggccacgcugaaccucuu

SEQ ID NO: 968325 - RNA, 19 nt, Homo sapiens
  misc_RNA (1)...(19): siRNA sense strand
ggaggaacugggcguuaag

SEQ ID NO: 968326 - RNA, 19 nt, Homo sapiens
  misc_RNA (1)...(19): siRNA sense strand
gggcgcacauccagaacac

SEQ ID NO: 968327 - RNA, 19 nt, Homo sapiens
  misc_RNA (1)...(19): siRNA sense strand
ggugauugcacgcuacaag

SEQ ID NO: 968328 - RNA, 19 nt, Homo sapiens
  misc_RNA (1)...(19): siRNA sense strand
acuacaucuucaacaagua

SEQ ID NO: 968329 - RNA, 19 nt, Homo sapiens
  misc_RNA (1)...(19): siRNA sense strand
ugaaggacuacuacaucuu

SEQ ID NO: 968330 - RNA, 19 nt, Homo sapiens
  misc_RNA (1)...(19): siRNA sense strand
gcagguggcucccaaauua

SEQ ID NO: 968331 - RNA, 19 nt, Homo sapiens
  misc_RNA (1)...(19): siRNA sense strand
gaaggaagcucaacgauau

SEQ ID NO: 968332 - RNA, 19 nt, Homo sapiens
  misc_RNA (1)...(19): siRNA sense strand
ggaaguagaucgagauuca

SEQ ID NO: 968333 - RNA, 19 nt, Homo sapiens
  misc_RNA (1)...(19): siRNA sense strand
ggaaguggguggaaguauu

SEQ ID NO: 968334 - RNA, 19 nt, Homo sapiens
  misc_RNA (1)...(19): siRNA sense strand
guacaagcccuccaagaua

SEQ ID NO: 968335 - RNA, 19 nt, Homo sapiens
  misc_RNA (1)...(19): siRNA sense strand
ggaaaggacuguucuugag

SEQ ID NO: 968336 - RNA, 19 nt, Homo sapiens
  misc_RNA (1)...(19): siRNA sense strand
ggacuguucuugagguauu

SEQ ID NO: 968337 - RNA, 19 nt, Homo sapiens
  misc_RNA (1)...(19): siRNA sense strand
ggaaguauuuaaagcaugu

SEQ ID NO: 968338 - RNA, 19 nt, Homo sapiens
  misc_RNA (1)...(19): siRNA sense strand
gaaguggguggaaguauuu

SEQ ID NO: 968339 - RNA, 19 nt, Homo sapiens
  misc_RNA (1)...(19): siRNA sense strand
uaaagcaugugaugaagau

SEQ ID NO: 968340 - RNA, 19 nt, Homo sapiens
  misc_RNA (1)...(19): siRNA sense strand
ucugugaugucuucaauaa

SEQ ID NO: 968341 - RNA, 19 nt, Homo sapiens
  misc_RNA (1)...(19): siRNA sense strand
gaauaugcccugaacuaug

SEQ ID NO: 968342 - RNA, 19 nt, Homo sapiens
  misc_RNA (1)...(19): siRNA sense strand
cagcagagaggacuuuaaa

SEQ ID NO: 968343 - RNA, 19 nt, Homo sapiens
  misc_RNA (1)...(19): siRNA sense strand
gauggucacgucagcuuua

SEQ ID NO: 968344 - RNA, 19 nt, Homo sapiens
  misc_RNA (1)...(19): siRNA sense strand
ucacagccuuugacaccua

SEQ ID NO: 968345 - RNA, 19 nt, Homo sapiens
  misc_RNA (1)...(19): siRNA sense strand
caccuacuaucguggauuu

SEQ ID NO: 968346 - RNA, 19 nt, Homo sapiens
  misc_RNA (1)...(19): siRNA sense strand
uaaaacugcuguuguaaug

SEQ ID NO: 968347 - RNA, 19 nt, Homo sapiens
  misc_RNA (1)...(19): siRNA sense strand
agaaggaagcucaacgaua

SEQ ID NO: 968348 - RNA, 19 nt, Homo sapiens
  misc_RNA (1)...(19): siRNA sense strand
gaaguggauucugugaugu

SEQ ID NO: 968349 - RNA, 19 nt, Homo sapiens
  misc_RNA (1)...(19): siRNA sense strand
gaucacaaaggauaucuca

SEQ ID NO: 968350 - RNA, 19 nt, Homo sapiens
  misc_RNA (1)...(19): siRNA sense strand
gguacaagcccuccaagau

SEQ ID NO: 968351 - RNA, 19 nt, Homo sapiens
  misc_RNA (1)...(19): siRNA sense strand
uacaagcccuccaagauag

SEQ ID NO: 968352 - RNA, 19 nt, Homo sapiens
  misc_RNA (1)...(19): siRNA sense strand
gcucccaaauuaccggaaa

SEQ ID NO: 968353 - RNA, 19 nt, Homo sapiens
  misc_RNA (1)...(19): siRNA sense strand
aauaugcccugaacuaugg

SEQ ID NO: 968354 - RNA, 19 nt, Homo sapiens
  misc_RNA (1)...(19): siRNA sense strand
cgucagcuuuagagacuuu

SEQ ID NO: 968355 - RNA, 19 nt, Homo sapiens
  misc_RNA (1)...(19): siRNA sense strand
uuagagacuuugaauaugc

SEQ ID NO: 968356 - RNA, 19 nt, Homo sapiens
  misc_RNA (1)...(19): siRNA sense strand
gaacuauggacagaaggaa

SEQ ID NO: 968357 - RNA, 19 nt, Homo sapiens
  misc_RNA (1)...(19): siRNA sense strand
gcccugaacuauggacaga

SEQ ID NO: 968358 - RNA, 19 nt, Homo sapiens
  misc_RNA (1)...(19): siRNA sense strand
cggaaaggacuguucuuga

SEQ ID NO: 968359 - RNA, 19 nt, Homo sapiens
  misc_RNA (1)...(19): siRNA sense strand
gaagaucacaaaggauauc

SEQ ID NO: 968360 - RNA, 19 nt, Homo sapiens
  misc_RNA (1)...(19): siRNA sense strand
guagaucgagauucagaug

SEQ ID NO: 968361 - RNA, 19 nt, Homo sapiens
  misc_RNA (1)...(19): siRNA sense strand
uugaauaugcccugaacua

SEQ ID NO: 968362 - RNA, 19 nt, Homo sapiens
  misc_RNA (1)...(19): siRNA sense strand
augaagaucacaaaggaua

SEQ ID NO: 968363 - RNA, 19 nt, Homo sapiens
  misc_RNA (1)...(19): siRNA sense strand
guggaaguauuuaaagcau

SEQ ID NO: 968364 - RNA, 19 nt, Homo sapiens
  misc_RNA (1)...(19): siRNA sense strand
uggauucugugaugucuuc

SEQ ID NO: 968365 - RNA, 19 nt, Homo sapiens
  misc_RNA (1)...(19): siRNA sense strand
guauuuaaagcaugugaug

SEQ ID NO: 968366 - RNA, 19 nt, Homo sapiens
  misc_RNA (1)...(19): siRNA sense strand
guaaugcuguuuggguaca

SEQ ID NO: 968367 - RNA, 19 nt, Homo sapiens
  misc_RNA (1)...(19): siRNA sense strand
gcuuuagagacuuugaaua

SEQ ID NO: 968368 - RNA, 19 nt, Homo sapiens
  misc_RNA (1)...(19): siRNA sense strand
ugaauaugcccugaacuau

SEQ ID NO: 968369 - RNA, 19 nt, Homo sapiens
  misc_RNA (1)...(19): siRNA sense strand
aaacugcuguuguaaugcu

SEQ ID NO: 968370 - RNA, 19 nt, Homo sapiens
  misc_RNA (1)...(19): siRNA sense strand
gugaugucuucaauaaauc

SEQ ID NO: 968371 - RNA, 19 nt, Homo sapiens
  misc_RNA (1)...(19): siRNA sense strand
cacgucagcuuuagagacu

SEQ ID NO: 968372 - RNA, 19 nt, Homo sapiens
  misc_RNA (1)...(19): siRNA sense strand
aaagaaggaagcucaacga

SEQ ID NO: 968373 - RNA, 19 nt, Homo sapiens
  misc_RNA (1)...(19): siRNA sense strand
ccugaacuauggacagaag

SEQ ID NO: 968374 - RNA, 19 nt, Homo sapiens
  misc_RNA (1)...(19): siRNA sense strand
cuuuaaaacugcuguugua

SEQ ID NO: 968375 - RNA, 19 nt, Homo sapiens
  misc_RNA (1)...(19): siRNA sense strand
ggcagguggcucccaaauu

SEQ ID NO: 968376 - RNA, 19 nt, Homo sapiens
  misc_RNA (1)...(19): siRNA sense strand
guggguggaaguauuuaaa

SEQ ID NO: 968377 - RNA, 19 nt, Homo sapiens
  misc_RNA (1)...(19): siRNA sense strand
gguggaaguauuuaaagca

SEQ ID NO: 968378 - RNA, 19 nt, Homo sapiens
  misc_RNA (1)...(19): siRNA sense strand
gguauucagggaaguagau

SEQ ID NO: 968379 - RNA, 19 nt, Homo sapiens
  misc_RNA (1)...(19): siRNA sense strand
aaggacuguucuugaggua

SEQ ID NO: 968380 - RNA, 19 nt, Homo sapiens
  misc_RNA (1)...(19): siRNA sense strand
gcagagaggacuuuaaaac

SEQ ID NO: 968381 - RNA, 19 nt, Homo sapiens
  misc_RNA (1)...(19): siRNA sense strand
acacaucuucacagccuuu

SEQ ID NO: 968382 - RNA, 19 nt, Homo sapiens
  misc_RNA (1)...(19): siRNA sense strand
agagaggacuuuaaaacug

SEQ ID NO: 968383 - RNA, 19 nt, Homo sapiens
  misc_RNA (1)...(19): siRNA sense strand
gccagucccucggaacaca

SEQ ID NO: 968384 - RNA, 19 nt, Homo sapiens
  misc_RNA (1)...(19): siRNA sense strand
ggguggaaguauuuaaagc

SEQ ID NO: 968385 - RNA, 19 nt, Homo sapiens
  misc_RNA (1)...(19): siRNA sense strand
ggucacgucagcuuuagag

SEQ ID NO: 968386 - RNA, 19 nt, Homo sapiens
  misc_RNA (1)...(19): siRNA sense strand
uuaaagcaugugaugaaga

SEQ ID NO: 968387 - RNA, 19 nt, Homo sapiens
  misc_RNA (1)...(19): siRNA sense strand
agaucgagauucagauggu

SEQ ID NO: 968388 - RNA, 19 nt, Homo sapiens
  misc_RNA (1)...(19): siRNA sense strand
gcuguuguaaugcuguuug

SEQ ID NO: 968389 - RNA, 19 nt, Homo sapiens
  misc_RNA (1)...(19): siRNA sense strand
ugaagaucacaaaggauau

SEQ ID NO: 968390 - RNA, 19 nt, Homo sapiens
  misc_RNA (1)...(19): siRNA sense strand
ggaggaagaucugguguug

SEQ ID NO: 968391 - RNA, 19 nt, Homo sapiens
  misc_RNA (1)...(19): siRNA sense strand
ugaugaagaugaagaacua

SEQ ID NO: 968392 - RNA, 19 nt, Homo sapiens
  misc_RNA (1)...(19): siRNA sense strand
cagaugagcugugcgauga

SEQ ID NO: 968393 - RNA, 19 nt, Homo sapiens
  misc_RNA (1)...(19): siRNA sense strand
ggaguccacugauuucuca

SEQ ID NO: 968394 - RNA, 19 nt, Homo sapiens
  misc_RNA (1)...(19): siRNA sense strand
ggacgggaauaagaucuuu

SEQ ID NO: 968395 - RNA, 19 nt, Homo sapiens
  misc_RNA (1)...(19): siRNA sense strand
ggacaagugcacugaacua

SEQ ID NO: 968396 - RNA, 19 nt, Homo sapiens
  misc_RNA (1)...(19): siRNA sense strand
gaagcgaggugguaauugc

SEQ ID NO: 968397 - RNA, 19 nt, Homo sapiens
  misc_RNA (1)...(19): siRNA sense strand
ccacugauuucucaucuuc

SEQ ID NO: 968398 - RNA, 19 nt, Homo sapiens
  misc_RNA (1)...(19): siRNA sense strand
gaacaugcaccucaaucug

SEQ ID NO: 968399 - RNA, 19 nt, Homo sapiens
  misc_RNA (1)...(19): siRNA sense strand
caagugcacugaacuacuc

SEQ ID NO: 968400 - RNA, 19 nt, Homo sapiens
  misc_RNA (1)...(19): siRNA sense strand
gaucagguccuacucaaag

SEQ ID NO: 968401 - RNA, 19 nt, Homo sapiens
  misc_RNA (1)...(19): siRNA sense strand
ggucugugcuccaaaugug

SEQ ID NO: 968402 - RNA, 19 nt, Homo sapiens
  misc_RNA (1)...(19): siRNA sense strand
ccagggaguccacugauuu

SEQ ID NO: 968403 - RNA, 19 nt, Homo sapiens
  misc_RNA (1)...(19): siRNA sense strand
gcucugcgauguaucuauc

SEQ ID NO: 968404 - RNA, 19 nt, Homo sapiens
  misc_RNA (1)...(19): siRNA sense strand
gggaggagcaggucaacuu

SEQ ID NO: 968405 - RNA, 19 nt, Homo sapiens
  misc_RNA (1)...(19): siRNA sense strand
ccaacucccucuuccuaug

SEQ ID NO: 968406 - RNA, 19 nt, Homo sapiens
  misc_RNA (1)...(19): siRNA sense strand
gggaauaagaucuuucugu

SEQ ID NO: 968407 - RNA, 19 nt, Homo sapiens
  misc_RNA (1)...(19): siRNA sense strand
ucgaggagguggcccugua

SEQ ID NO: 968408 - RNA, 19 nt, Homo sapiens
  misc_RNA (1)...(19): siRNA sense strand
ggccagcucugcgauguau

SEQ ID NO: 968409 - RNA, 19 nt, Homo sapiens
  misc_RNA (1)...(19): siRNA sense strand
gaugagcugugcgaugaug

SEQ ID NO: 968410 - RNA, 19 nt, Homo sapiens
  misc_RNA (1)...(19): siRNA sense strand
ugaggaugaugaagaugaa

SEQ ID NO: 968411 - RNA, 19 nt, Homo sapiens
  misc_RNA (1)...(19): siRNA sense strand
caagaggcauuugcagcuu

SEQ ID NO: 968412 - RNA, 19 nt, Homo sapiens
  misc_RNA (1)...(19): siRNA sense strand
caaugacuuuggcccauau

SEQ ID NO: 968413 - RNA, 19 nt, Homo sapiens
  misc_RNA (1)...(19): siRNA sense strand
ccacagaaacacuggguau

SEQ ID NO: 968414 - RNA, 19 nt, Homo sapiens
  misc_RNA (1)...(19): siRNA sense strand
ggugaccagugcccucuug

SEQ ID NO: 968415 - RNA, 19 nt, Homo sapiens
  misc_RNA (1)...(19): siRNA sense strand
ggccaacucccucuuccua

SEQ ID NO: 968416 - RNA, 19 nt, Homo sapiens
  misc_RNA (1)...(19): siRNA sense strand
ucaaaggcaugaccuccau

SEQ ID NO: 968417 - RNA, 19 nt, Homo sapiens
  misc_RNA (1)...(19): siRNA sense strand
ugaagcaccaucugacuga

SEQ ID NO: 968418 - RNA, 19 nt, Homo sapiens
  misc_RNA (1)...(19): siRNA sense strand
cagcugcagugguacaugu

SEQ ID NO: 968419 - RNA, 19 nt, Homo sapiens
  misc_RNA (1)...(19): siRNA sense strand
cauggcugcugcugacauu

SEQ ID NO: 968420 - RNA, 19 nt, Homo sapiens
  misc_RNA (1)...(19): siRNA sense strand
caggucaacuucugugagu

SEQ ID NO: 968421 - RNA, 19 nt, Homo sapiens
  misc_RNA (1)...(19): siRNA sense strand
ccaucucgcugcccagugu

SEQ ID NO: 968422 - RNA, 19 nt, Homo sapiens
  misc_RNA (1)...(19): siRNA sense strand
ggaggaagaggaggaggaa

SEQ ID NO: 968423 - RNA, 19 nt, Homo sapiens
  misc_RNA (1)...(19): siRNA sense strand
gugaggaugaugaagauga

SEQ ID NO: 968424 - RNA, 19 nt, Homo sapiens
  misc_RNA (1)...(19): siRNA sense strand
ggaugaugaagaugaagaa

SEQ ID NO: 968425 - RNA, 19 nt, Homo sapiens
  misc_RNA (1)...(19): siRNA sense strand
ugacugagcacaugaagac

SEQ ID NO: 968426 - RNA, 19 nt, Homo sapiens
  misc_RNA (1)...(19): siRNA sense strand
ggaagaggaggaggaagau

SEQ ID NO: 968427 - RNA, 19 nt, Homo sapiens
  misc_RNA (1)...(19): siRNA sense strand
gugaagcgaggugguaauu

SEQ ID NO: 968428 - RNA, 19 nt, Homo sapiens
  misc_RNA (1)...(19): siRNA sense strand
ggaggagcaggucaacuuc

SEQ ID NO: 968429 - RNA, 19 nt, Homo sapiens
  misc_RNA (1)...(19): siRNA sense strand
aggaagaucugguguugac

SEQ ID NO: 968430 - RNA, 19 nt, Homo sapiens
  misc_RNA (1)...(19): siRNA sense strand
cccagggaguccacugauu

SEQ ID NO: 968431 - RNA, 19 nt, Homo sapiens
  misc_RNA (1)...(19): siRNA sense strand
ucugugaguccuccaauga

SEQ ID NO: 968432 - RNA, 19 nt, Homo sapiens
  misc_RNA (1)...(19): siRNA sense strand
cacagaaacacuggguaua

SEQ ID NO: 968433 - RNA, 19 nt, Homo sapiens
  misc_RNA (1)...(19): siRNA sense strand
gcuaccaccaccaucacua

SEQ ID NO: 968434 - RNA, 19 nt, Homo sapiens
  misc_RNA (1)...(19): siRNA sense strand
ggccauccuugccguccaa

SEQ ID NO: 968435 - RNA, 19 nt, Homo sapiens
  misc_RNA (1)...(19): siRNA sense strand
gaggagguggcccuguauu

SEQ ID NO: 968436 - RNA, 19 nt, Homo sapiens
  misc_RNA (1)...(19): siRNA sense strand
gacccaggcgccuuugaga

SEQ ID NO: 968437 - RNA, 19 nt, Homo sapiens
  misc_RNA (1)...(19): siRNA sense strand
cagaaacacuggguauacg

SEQ ID NO: 968438 - RNA, 19 nt, Homo sapiens
  misc_RNA (1)...(19): siRNA sense strand
gaccgcuccuucccuugga

SEQ ID NO: 968439 - RNA, 19 nt, Homo sapiens
  misc_RNA (1)...(19): siRNA sense strand
gguguugaccugugaggau

SEQ ID NO: 968440 - RNA, 19 nt, Homo sapiens
  misc_RNA (1)...(19): siRNA sense strand
gcgccaagaaguucaugug

SEQ ID NO: 968441 - RNA, 19 nt, Homo sapiens
  misc_RNA (1)...(19): siRNA sense strand
guggacaagugcacugaac

SEQ ID NO: 968442 - RNA, 19 nt, Homo sapiens
  misc_RNA (1)...(19): siRNA sense strand
ccaucugacugagcacaug

SEQ ID NO: 968443 - RNA, 19 nt, Homo sapiens
  misc_RNA (1)...(19): siRNA sense strand
ccugugaggaugaugaaga

SEQ ID NO: 968444 - RNA, 19 nt, Homo sapiens
  misc_RNA (1)...(19): siRNA sense strand
aggaagaggaggaggaaga

SEQ ID NO: 968445 - RNA, 19 nt, Homo sapiens
  misc_RNA (1)...(19): siRNA sense strand
cagcagcagcaacuacuuc

SEQ ID NO: 968446 - RNA, 19 nt, Homo sapiens
  misc_RNA (1)...(19): siRNA sense strand
gaccugugaggaugaugaa

SEQ ID NO: 968447 - RNA, 19 nt, Homo sapiens
  misc_RNA (1)...(19): siRNA sense strand
ucagcuaccaccaccauca

SEQ ID NO: 968448 - RNA, 19 nt, Homo sapiens
  misc_RNA (1)...(19): siRNA sense strand
gaggaagaucugguguuga

SEQ ID NO: 968449 - RNA, 19 nt, Homo sapiens
  misc_RNA (1)...(19): siRNA sense strand
gaagaaagcucucaaguug

SEQ ID NO: 968450 - RNA, 19 nt, Homo sapiens
  misc_RNA (1)...(19): siRNA sense strand
gcugaagacugaauuguaa

SEQ ID NO: 968451 - RNA, 19 nt, Homo sapiens
  misc_RNA (1)...(19): siRNA sense strand
aacaaacccuugaugauua

SEQ ID NO: 968452 - RNA, 19 nt, Homo sapiens
  misc_RNA (1)...(19): siRNA sense strand
gaaauuggcagagcaguuu

SEQ ID NO: 968453 - RNA, 19 nt, Homo sapiens
  misc_RNA (1)...(19): siRNA sense strand
caacaaacccuugaugauu

SEQ ID NO: 968454 - RNA, 19 nt, Homo sapiens
  misc_RNA (1)...(19): siRNA sense strand
ucaaguugcugaagacuga

SEQ ID NO: 968455 - RNA, 19 nt, Homo sapiens
  misc_RNA (1)...(19): siRNA sense strand
cagucaagcuuuaaagaaa

SEQ ID NO: 968456 - RNA, 19 nt, Homo sapiens
  misc_RNA (1)...(19): siRNA sense strand
agucaaaccuggagccaaa

SEQ ID NO: 968457 - RNA, 19 nt, Homo sapiens
  misc_RNA (1)...(19): siRNA sense strand
gcaacaaacccuugaugau

SEQ ID NO: 968458 - RNA, 19 nt, Homo sapiens
  misc_RNA (1)...(19): siRNA sense strand
ggacucagacauaugaaga

SEQ ID NO: 968459 - RNA, 19 nt, Homo sapiens
  misc_RNA (1)...(19): siRNA sense strand
aaaggacucucgacccaaa

SEQ ID NO: 968460 - RNA, 19 nt, Homo sapiens
  misc_RNA (1)...(19): siRNA sense strand
gcucucaaguugcugaaga

SEQ ID NO: 968461 - RNA, 19 nt, Homo sapiens
  misc_RNA (1)...(19): siRNA sense strand
uuacgaaccugcagauaca

SEQ ID NO: 968462 - RNA, 19 nt, Homo sapiens
  misc_RNA (1)...(19): siRNA sense strand
ugaagaaagcucucaaguu

SEQ ID NO: 968463 - RNA, 19 nt, Homo sapiens
  misc_RNA (1)...(19): siRNA sense strand
gaaaguguuugcugaaaau

SEQ ID NO: 968464 - RNA, 19 nt, Homo sapiens
  misc_RNA (1)...(19): siRNA sense strand
ugaaacaacugacaaacac

SEQ ID NO: 968465 - RNA, 19 nt, Homo sapiens
  misc_RNA (1)...(19): siRNA sense strand
ggagaaaauuccaguguca

SEQ ID NO: 968466 - RNA, 19 nt, Homo sapiens
  misc_RNA (1)...(19): siRNA sense strand
acaaacccuugaugauuau

SEQ ID NO: 968467 - RNA, 19 nt, Homo sapiens
  misc_RNA (1)...(19): siRNA sense strand
ccaggauuauguuuguuga

SEQ ID NO: 968468 - RNA, 19 nt, Homo sapiens
  misc_RNA (1)...(19): siRNA sense strand
aaacaccuuucuccugaug

SEQ ID NO: 968469 - RNA, 19 nt, Homo sapiens
  misc_RNA (1)...(19): siRNA sense strand
aagaaaguguuugcugaaa

SEQ ID NO: 968470 - RNA, 19 nt, Homo sapiens
  misc_RNA (1)...(19): siRNA sense strand
aaagaaauccagaaauugg

SEQ ID NO: 968471 - RNA, 19 nt, Homo sapiens
  misc_RNA (1)...(19): siRNA sense strand
agaaagcucucaaguugcu

SEQ ID NO: 968472 - RNA, 19 nt, Homo sapiens
  misc_RNA (1)...(19): siRNA sense strand
gaagcucuauauaaaucca

SEQ ID NO: 968473 - RNA, 19 nt, Homo sapiens
  misc_RNA (1)...(19): siRNA sense strand
gauuauucaucacuuggau

SEQ ID NO: 968474 - RNA, 19 nt, Homo sapiens
  misc_RNA (1)...(19): siRNA sense strand
cauaugaagaagcucuaua

SEQ ID NO: 968475 - RNA, 19 nt, Homo sapiens
  misc_RNA (1)...(19): siRNA sense strand
aaagaaaguguuugcugaa

SEQ ID NO: 968476 - RNA, 19 nt, Homo sapiens
  misc_RNA (1)...(19): siRNA sense strand
ccacacagucaagcuuuaa

SEQ ID NO: 968477 - RNA, 19 nt, Homo sapiens
  misc_RNA (1)...(19): siRNA sense strand
ucagacauaugaagaagcu

SEQ ID NO: 968478 - RNA, 19 nt, Homo sapiens
  misc_RNA (1)...(19): siRNA sense strand
ugacccaucucugacaguu

SEQ ID NO: 968479 - RNA, 19 nt, Homo sapiens
  misc_RNA (1)...(19): siRNA sense strand
cccacacagucaagcuuua

SEQ ID NO: 968480 - RNA, 19 nt, Homo sapiens
  misc_RNA (1)...(19): siRNA sense strand
ccagagauaccacagucaa

SEQ ID NO: 968481 - RNA, 19 nt, Homo sapiens
  misc_RNA (1)...(19): siRNA sense strand
uccucaaucugguuuauga

SEQ ID NO: 968482 - RNA, 19 nt, Homo sapiens
  misc_RNA (1)...(19): siRNA sense strand
acagucaagcuuuaaagaa

SEQ ID NO: 968483 - RNA, 19 nt, Homo sapiens
  misc_RNA (1)...(19): siRNA sense strand
caacugacaaacaccuuuc

SEQ ID NO: 968484 - RNA, 19 nt, Homo sapiens
  misc_RNA (1)...(19): siRNA sense strand
caaacaccuuucuccugau

SEQ ID NO: 968485 - RNA, 19 nt, Homo sapiens
  misc_RNA (1)...(19): siRNA sense strand
aaauuccagugucagcauu

SEQ ID NO: 968486 - RNA, 19 nt, Homo sapiens
  misc_RNA (1)...(19): siRNA sense strand
gcccacacagucaagcuuu

SEQ ID NO: 968487 - RNA, 19 nt, Homo sapiens
  misc_RNA (1)...(19): siRNA sense strand
ucacuggaagauauucaaa

SEQ ID NO: 968488 - RNA, 19 nt, Homo sapiens
  misc_RNA (1)...(19): siRNA sense strand
gcaguuuguccuccucaau

SEQ ID NO: 968489 - RNA, 19 nt, Homo sapiens
  misc_RNA (1)...(19): siRNA sense strand
cagagauaccacagucaaa

SEQ ID NO: 968490 - RNA, 19 nt, Homo sapiens
  misc_RNA (1)...(19): siRNA sense strand
agaaaguguuugcugaaaa

SEQ ID NO: 968491 - RNA, 19 nt, Homo sapiens
  misc_RNA (1)...(19): siRNA sense strand
gacccaucucugacaguua

SEQ ID NO: 968492 - RNA, 19 nt, Homo sapiens
  misc_RNA (1)...(19): siRNA sense strand
acccaucucugacaguuag

SEQ ID NO: 968493 - RNA, 19 nt, Homo sapiens
  misc_RNA (1)...(19): siRNA sense strand
gacauaugaagaagcucua

SEQ ID NO: 968494 - RNA, 19 nt, Homo sapiens
  misc_RNA (1)...(19): siRNA sense strand
cacagucaagcuuuaaaga

SEQ ID NO: 968495 - RNA, 19 nt, Homo sapiens
  misc_RNA (1)...(19): siRNA sense strand
caguauguccccaggauua

SEQ ID NO: 968496 - RNA, 19 nt, Homo sapiens
  misc_RNA (1)...(19): siRNA sense strand
agaaauuggcagagcaguu

SEQ ID NO: 968497 - RNA, 19 nt, Homo sapiens
  misc_RNA (1)...(19): siRNA sense strand
acaguuagagccgauauca

SEQ ID NO: 968498 - RNA, 19 nt, Homo sapiens
  misc_RNA (1)...(19): siRNA sense strand
agaaacagaucaacgauua

SEQ ID NO: 968499 - RNA, 19 nt, Homo sapiens
  misc_RNA (1)...(19): siRNA sense strand
gagcaucgcuacagccuuu

SEQ ID NO: 968500 - RNA, 19 nt, Homo sapiens
  misc_RNA (1)...(19): siRNA sense strand
gaaggguacucaagggaaa

SEQ ID NO: 968501 - RNA, 19 nt, Homo sapiens
  misc_RNA (1)...(19): siRNA sense strand
ucacuaaggucuucagcaa

SEQ ID NO: 968502 - RNA, 19 nt, Homo sapiens
  misc_RNA (1)...(19): siRNA sense strand
gaagcuaguggauaaguuu

SEQ ID NO: 968503 - RNA, 19 nt, Homo sapiens
  misc_RNA (1)...(19): siRNA sense strand
cagcuuacauuuacccaaa

SEQ ID NO: 968504 - RNA, 19 nt, Homo sapiens
  misc_RNA (1)...(19): siRNA sense strand
gccugaagcuaguggauaa

SEQ ID NO: 968505 - RNA, 19 nt, Homo sapiens
  misc_RNA (1)...(19): siRNA sense strand
caacagcaccaauaucuuc

SEQ ID NO: 968506 - RNA, 19 nt, Homo sapiens
  misc_RNA (1)...(19): siRNA sense strand
gggugcugcugaugaaaua

SEQ ID NO: 968507 - RNA, 19 nt, Homo sapiens
  misc_RNA (1)...(19): siRNA sense strand
ggaccaaggcugacacuca

SEQ ID NO: 968508 - RNA, 19 nt, Homo sapiens
  misc_RNA (1)...(19): siRNA sense strand
ugaaauaccugggcaaugc

SEQ ID NO: 968509 - RNA, 19 nt, Homo sapiens
  misc_RNA (1)...(19): siRNA sense strand
gcaccaauaucuucuucuc

SEQ ID NO: 968510 - RNA, 19 nt, Homo sapiens
  misc_RNA (1)...(19): siRNA sense strand
gaagaggccaagaaacaga

SEQ ID NO: 968511 - RNA, 19 nt, Homo sapiens
  misc_RNA (1)...(19): siRNA sense strand
gaacucacccacgauauca

SEQ ID NO: 968512 - RNA, 19 nt, Homo sapiens
  misc_RNA (1)...(19): siRNA sense strand
cacccaaccuucaacaaga

SEQ ID NO: 968513 - RNA, 19 nt, Homo sapiens
  misc_RNA (1)...(19): siRNA sense strand
gaaggugccuaugaugaag

SEQ ID NO: 968514 - RNA, 19 nt, Homo sapiens
  misc_RNA (1)...(19): siRNA sense strand
gcugggugcugcugaugaa

SEQ ID NO: 968515 - RNA, 19 nt, Homo sapiens
  misc_RNA (1)...(19): siRNA sense strand
acuaaggucuucagcaaug

SEQ ID NO: 968516 - RNA, 19 nt, Homo sapiens
  misc_RNA (1)...(19): siRNA sense strand
ccaagaaacagaucaacga

SEQ ID NO: 968517 - RNA, 19 nt, Homo sapiens
  misc_RNA (1)...(19): siRNA sense strand
gggcaucacuaaggucuuc

SEQ ID NO: 968518 - RNA, 19 nt, Homo sapiens
  misc_RNA (1)...(19): siRNA sense strand
caacugggcaucacuaagg

SEQ ID NO: 968519 - RNA, 19 nt, Homo sapiens
  misc_RNA (1)...(19): siRNA sense strand
gggagaugcugcccagaag

SEQ ID NO: 968520 - RNA, 19 nt, Homo sapiens
  misc_RNA (1)...(19): siRNA sense strand
ccgaagaggccaagaaaca

SEQ ID NO: 968521 - RNA, 19 nt, Homo sapiens
  misc_RNA (1)...(19): siRNA sense strand
ugaaggugccuaugaugaa

SEQ ID NO: 968522 - RNA, 19 nt, Homo sapiens
  misc_RNA (1)...(19): siRNA sense strand
caaguucaacaaacccuuu

SEQ ID NO: 968523 - RNA, 19 nt, Homo sapiens
  misc_RNA (1)...(19): siRNA sense strand
ugaagcuaguggauaaguu

SEQ ID NO: 968524 - RNA, 19 nt, Homo sapiens
  misc_RNA (1)...(19): siRNA sense strand
gaggucaaguucaacaaac

SEQ ID NO: 968525 - RNA, 19 nt, Homo sapiens
  misc_RNA (1)...(19): siRNA sense strand
uuacccaaacuguccauua

SEQ ID NO: 968526 - RNA, 19 nt, Homo sapiens
  misc_RNA (1)...(19): siRNA sense strand
ggucugccagcuuacauuu

SEQ ID NO: 968527 - RNA, 19 nt, Homo sapiens
  misc_RNA (1)...(19): siRNA sense strand
gugaaggugccuaugauga

SEQ ID NO: 968528 - RNA, 19 nt, Homo sapiens
  misc_RNA (1)...(19): siRNA sense strand
gaguucgccuucagccuau

SEQ ID NO: 968529 - RNA, 19 nt, Homo sapiens
  misc_RNA (1)...(19): siRNA sense strand
ucaaggacaccgaggaaga

SEQ ID NO: 968530 - RNA, 19 nt, Homo sapiens
  misc_RNA (1)...(19): siRNA sense strand
gcgagggccugaagcuagu

SEQ ID NO: 968531 - RNA, 19 nt, Homo sapiens
  misc_RNA (1)...(19): siRNA sense strand
cagcaccaauaucuucuuc

SEQ ID NO: 968532 - RNA, 19 nt, Homo sapiens
  misc_RNA (1)...(19): siRNA sense strand
caucuucuuuaaaggcaaa

SEQ ID NO: 968533 - RNA, 19 nt, Homo sapiens
  misc_RNA (1)...(19): siRNA sense strand
ggucaacugggcaucacua

SEQ ID NO: 968534 - RNA, 19 nt, Homo sapiens
  misc_RNA (1)...(19): siRNA sense strand
ggugaauuacaucuucuuu

SEQ ID NO: 968535 - RNA, 19 nt, Homo sapiens
  misc_RNA (1)...(19): siRNA sense strand
ggcugacacucacgaugaa

SEQ ID NO: 968536 - RNA, 19 nt, Homo sapiens
  misc_RNA (1)...(19): siRNA sense strand
caagaaacagaucaacgau

SEQ ID NO: 968537 - RNA, 19 nt, Homo sapiens
  misc_RNA (1)...(19): siRNA sense strand
caccgaagaggccaagaaa

SEQ ID NO: 968538 - RNA, 19 nt, Homo sapiens
  misc_RNA (1)...(19): siRNA sense strand
uacccaaacuguccauuac

SEQ ID NO: 968539 - RNA, 19 nt, Homo sapiens
  misc_RNA (1)...(19): siRNA sense strand
aaaguuguaccacucagaa

SEQ ID NO: 968540 - RNA, 19 nt, Homo sapiens
  misc_RNA (1)...(19): siRNA sense strand
cgaggucaaguucaacaaa

SEQ ID NO: 968541 - RNA, 19 nt, Homo sapiens
  misc_RNA (1)...(19): siRNA sense strand
gaugaaauaccugggcaau

SEQ ID NO: 968542 - RNA, 19 nt, Homo sapiens
  misc_RNA (1)...(19): siRNA sense strand
ggagaugcugcccagaaga

SEQ ID NO: 968543 - RNA, 19 nt, Homo sapiens
  misc_RNA (1)...(19): siRNA sense strand
aaugaacucacccacgaua

SEQ ID NO: 968544 - RNA, 19 nt, Homo sapiens
  misc_RNA (1)...(19): siRNA sense strand
ucuggugaauuacaucuuc

SEQ ID NO: 968545 - RNA, 19 nt, Homo sapiens
  misc_RNA (1)...(19): siRNA sense strand
cccaaacuguccauuacug

SEQ ID NO: 968546 - RNA, 19 nt, Homo sapiens
  misc_RNA (1)...(19): siRNA sense strand
ggccugaagcuaguggaua

SEQ ID NO: 968547 - RNA, 19 nt, Homo sapiens
  misc_RNA (1)...(19): siRNA sense strand
gaagcguuuaggcauguuu

SEQ ID NO: 968548 - RNA, 19 nt, Homo sapiens
  misc_RNA (1)...(19): siRNA sense strand
ugccuaugaugaagcguuu

SEQ ID NO: 968549 - RNA, 19 nt, Homo sapiens
  misc_RNA (1)...(19): siRNA sense strand
gcuacagccuuugcaaugc

SEQ ID NO: 968550 - RNA, 19 nt, Homo sapiens
  misc_RNA (1)...(19): siRNA sense strand
caggaucacccaaccuuca

SEQ ID NO: 968551 - RNA, 19 nt, Homo sapiens
  misc_RNA (1)...(19): siRNA sense strand
agccuucacugucaacuuc

SEQ ID NO: 968552 - RNA, 19 nt, Homo sapiens
  misc_RNA (1)...(19): siRNA sense strand
cagauacaucccaccauga

SEQ ID NO: 968553 - RNA, 19 nt, Homo sapiens
  misc_RNA (1)...(19): siRNA sense strand
gaaggucugccagcuuaca

SEQ ID NO: 968554 - RNA, 19 nt, Homo sapiens
  misc_RNA (1)...(19): siRNA sense strand
gaaacagaucaacgauuac

SEQ ID NO: 968555 - RNA, 19 nt, Homo sapiens
  misc_RNA (1)...(19): siRNA sense strand
ccgugaaggugccuaugau

SEQ ID NO: 968556 - RNA, 19 nt, Homo sapiens
  misc_RNA (1)...(19): siRNA sense strand
auacaucccaccaugauca

SEQ ID NO: 968557 - RNA, 19 nt, Homo sapiens
  misc_RNA (1)...(19): siRNA sense strand
acuggaaccuaugaucuga

SEQ ID NO: 968558 - RNA, 19 nt, Homo sapiens
  misc_RNA (1)...(19): siRNA sense strand
ucugccagcuuacauuuac

SEQ ID NO: 968559 - RNA, 19 nt, Homo sapiens
  misc_RNA (1)...(19): siRNA sense strand
acgauaucaucaccaaguu

SEQ ID NO: 968560 - RNA, 19 nt, Homo sapiens
  misc_RNA (1)...(19): siRNA sense strand
cggaggcucagauccauga

SEQ ID NO: 968561 - RNA, 19 nt, Homo sapiens
  misc_RNA (1)...(19): siRNA sense strand
gaucacccaaccuucaaca

SEQ ID NO: 968562 - RNA, 19 nt, Homo sapiens
  misc_RNA (1)...(19): siRNA sense strand
ugaacucacccacgauauc

SEQ ID NO: 968563 - RNA, 19 nt, Homo sapiens
  misc_RNA (1)...(19): siRNA sense strand
aagaaacagaucaacgauu

SEQ ID NO: 968564 - RNA, 19 nt, Homo sapiens
  misc_RNA (1)...(19): siRNA sense strand
uggaaccuaugaucugaag

SEQ ID NO: 968565 - RNA, 19 nt, Homo sapiens
  misc_RNA (1)...(19): siRNA sense strand
ccaacagcaccaauaucuu

SEQ ID NO: 968566 - RNA, 19 nt, Homo sapiens
  misc_RNA (1)...(19): siRNA sense strand
cacgauaucaucaccaagu

SEQ ID NO: 968567 - RNA, 19 nt, Homo sapiens
  misc_RNA (1)...(19): siRNA sense strand
cccacgauaucaucaccaa

SEQ ID NO: 968568 - RNA, 19 nt, Homo sapiens
  misc_RNA (1)...(19): siRNA sense strand
ucacccaaccuucaacaag

SEQ ID NO: 968569 - RNA, 19 nt, Homo sapiens
  misc_RNA (1)...(19): siRNA sense strand
uuacauuuacccaaacugu

SEQ ID NO: 968570 - RNA, 19 nt, Homo sapiens
  misc_RNA (1)...(19): siRNA sense strand
aggcugacacucacgauga

SEQ ID NO: 968571 - RNA, 19 nt, Homo sapiens
  misc_RNA (1)...(19): siRNA sense strand
gcacagcacuucaucaaag

SEQ ID NO: 968572 - RNA, 19 nt, Homo sapiens
  misc_RNA (1)...(19): siRNA sense strand
ggagaguccuguccugaug

SEQ ID NO: 968573 - RNA, 19 nt, Homo sapiens
  misc_RNA (1)...(19): siRNA sense strand
ggaacagcuuguaccagaa

SEQ ID NO: 968574 - RNA, 19 nt, Homo sapiens
  misc_RNA (1)...(19): siRNA sense strand
caacaaggccaccaagauc

SEQ ID NO: 968575 - RNA, 19 nt, Homo sapiens
  misc_RNA (1)...(19): siRNA sense strand
gagccgcgacuccuuguuu

SEQ ID NO: 968576 - RNA, 19 nt, Homo sapiens
  misc_RNA (1)...(19): siRNA sense strand
gcacggcugugaggcauca

SEQ ID NO: 968577 - RNA, 19 nt, Homo sapiens
  misc_RNA (1)...(19): siRNA sense strand
cagaauuccucccagaaca

SEQ ID NO: 968578 - RNA, 19 nt, Homo sapiens
  misc_RNA (1)...(19): siRNA sense strand
guggacugcucaacuguga

SEQ ID NO: 968579 - RNA, 19 nt, Homo sapiens
  misc_RNA (1)...(19): siRNA sense strand
gaacagcuuguaccagaag

SEQ ID NO: 968580 - RNA, 19 nt, Homo sapiens
  misc_RNA (1)...(19): siRNA sense strand
aaacgcaacucugccuuca

SEQ ID NO: 968581 - RNA, 19 nt, Homo sapiens
  misc_RNA (1)...(19): siRNA sense strand
cgggcuaccuguuugaaga

SEQ ID NO: 968582 - RNA, 19 nt, Homo sapiens
  misc_RNA (1)...(19): siRNA sense strand
ccaacaaggccaccaagau

SEQ ID NO: 968583 - RNA, 19 nt, Homo sapiens
  misc_RNA (1)...(19): siRNA sense strand
ccacggcuccuccuucuuc

SEQ ID NO: 968584 - RNA, 19 nt, Homo sapiens
  misc_RNA (1)...(19): siRNA sense strand
cuaccuguuugaagagauu

SEQ ID NO: 968585 - RNA, 19 nt, Homo sapiens
  misc_RNA (1)...(19): siRNA sense strand
ggacguccgaugaugaugu

SEQ ID NO: 968586 - RNA, 19 nt, Homo sapiens
  misc_RNA (1)...(19): siRNA sense strand
gaggacagcagccaaagag

SEQ ID NO: 968587 - RNA, 19 nt, Homo sapiens
  misc_RNA (1)...(19): siRNA sense strand
gcacggacagcccaaagag

SEQ ID NO: 968588 - RNA, 19 nt, Homo sapiens
  misc_RNA (1)...(19): siRNA sense strand
acgcaacucugccuucauc

SEQ ID NO: 968589 - RNA, 19 nt, Homo sapiens
  misc_RNA (1)...(19): siRNA sense strand
ccagaggacagcagccaaa

SEQ ID NO: 968590 - RNA, 19 nt, Homo sapiens
  misc_RNA (1)...(19): siRNA sense strand
cgggugaccuggcagaaag

SEQ ID NO: 968591 - RNA, 19 nt, Homo sapiens
  misc_RNA (1)...(19): siRNA sense strand
ccaagauccugaggcacuu

SEQ ID NO: 968592 - RNA, 19 nt, Homo sapiens
  misc_RNA (1)...(19): siRNA sense strand
cguguggacugcucaacug

SEQ ID NO: 968593 - RNA, 19 nt, Homo sapiens
  misc_RNA (1)...(19): siRNA sense strand
gcgaggaggcacagcacuu

SEQ ID NO: 968594 - RNA, 19 nt, Homo sapiens
  misc_RNA (1)...(19): siRNA sense strand
gcacgggaacagcuuguac

SEQ ID NO: 968595 - RNA, 19 nt, Homo sapiens
  misc_RNA (1)...(19): siRNA sense strand
uguccgggcuaccuguuug

SEQ ID NO: 968596 - RNA, 19 nt, Homo sapiens
  misc_RNA (1)...(19): siRNA sense strand
gacguccgaugaugauguc

SEQ ID NO: 968597 - RNA, 19 nt, Homo sapiens
  misc_RNA (1)...(19): siRNA sense strand
ucaaggugcugaagauccu

SEQ ID NO: 968598 - RNA, 19 nt, Homo sapiens
  misc_RNA (1)...(19): siRNA sense strand
cuacaccggcucccgauuc

SEQ ID NO: 968599 - RNA, 19 nt, Homo sapiens
  misc_RNA (1)...(19): siRNA sense strand
cugaagauccugcucuauc

SEQ ID NO: 968600 - RNA, 19 nt, Homo sapiens
  misc_RNA (1)...(19): siRNA sense strand
ggaggcacagcacuucauc

SEQ ID NO: 968601 - RNA, 19 nt, Homo sapiens
  misc_RNA (1)...(19): siRNA sense strand
ggccccagcucucagaauu

SEQ ID NO: 968602 - RNA, 19 nt, Homo sapiens
  misc_RNA (1)...(19): siRNA sense strand
cgggaccugugaccaacaa

SEQ ID NO: 968603 - RNA, 19 nt, Homo sapiens
  misc_RNA (1)...(19): siRNA sense strand
gggagaguccuguccugau

SEQ ID NO: 968604 - RNA, 19 nt, Homo sapiens
  misc_RNA (1)...(19): siRNA sense strand
ggcacagcacuucaucaaa

SEQ ID NO: 968605 - RNA, 19 nt, Homo sapiens
  misc_RNA (1)...(19): siRNA sense strand
ccauggagcuggccaagac

SEQ ID NO: 968606 - RNA, 19 nt, Homo sapiens
  misc_RNA (1)...(19): siRNA sense strand
uguccuggcucucuaccua

SEQ ID NO: 968607 - RNA, 19 nt, Homo sapiens
  misc_RNA (1)...(19): siRNA sense strand
ucuacuuccucaccuauga

SEQ ID NO: 968608 - RNA, 19 nt, Homo sapiens
  misc_RNA (1)...(19): siRNA sense strand
cagcuucggcgucuacuuc

SEQ ID NO: 968609 - RNA, 19 nt, Homo sapiens
  misc_RNA (1)...(19): siRNA sense strand
gcgucuacuuccucaccua

SEQ ID NO: 968610 - RNA, 19 nt, Homo sapiens
  misc_RNA (1)...(19): siRNA sense strand
caucaacgcgcugguguuc

SEQ ID NO: 968611 - RNA, 19 nt, Homo sapiens
  misc_RNA (1)...(19): siRNA sense strand
ccaaggagcuggagaaagu

SEQ ID NO: 968612 - RNA, 19 nt, Homo sapiens
  misc_RNA (1)...(19): siRNA sense strand
gaaaggaggcggagaggaa

SEQ ID NO: 968613 - RNA, 19 nt, Homo sapiens
  misc_RNA (1)...(19): siRNA sense strand
gccgagagcuggacuuugu

SEQ ID NO: 968614 - RNA, 19 nt, Homo sapiens
  misc_RNA (1)...(19): siRNA sense strand
gcuacgagaugcuuaagga

SEQ ID NO: 968615 - RNA, 19 nt, Homo sapiens
  misc_RNA (1)...(19): siRNA sense strand
gggagcaugugaugaagaa

SEQ ID NO: 968616 - RNA, 19 nt, Homo sapiens
  misc_RNA (1)...(19): siRNA sense strand
ugaagaauguggacaccaa

SEQ ID NO: 968617 - RNA, 19 nt, Homo sapiens
  misc_RNA (1)...(19): siRNA sense strand
cgagcaggaucccaaugua

SEQ ID NO: 968618 - RNA, 19 nt, Homo sapiens
  misc_RNA (1)...(19): siRNA sense strand
cgacgcagcccaucaugaa

SEQ ID NO: 968619 - RNA, 19 nt, Homo sapiens
  misc_RNA (1)...(19): siRNA sense strand
gaaaguguacgacccaaag

SEQ ID NO: 968620 - RNA, 19 nt, Homo sapiens
  misc_RNA (1)...(19): siRNA sense strand
ggagacggaugggcauuuc

SEQ ID NO: 968621 - RNA, 19 nt, Homo sapiens
  misc_RNA (1)...(19): siRNA sense strand
gagaggagcagagaaagga

SEQ ID NO: 968622 - RNA, 19 nt, Homo sapiens
  misc_RNA (1)...(19): siRNA sense strand
gugaugguguccuggauga

SEQ ID NO: 968623 - RNA, 19 nt, Homo sapiens
  misc_RNA (1)...(19): siRNA sense strand
ugcaugauaucaacaguga

SEQ ID NO: 968624 - RNA, 19 nt, Homo sapiens
  misc_RNA (1)...(19): siRNA sense strand
gagcugaggcgcuuugaag

SEQ ID NO: 968625 - RNA, 19 nt, Homo sapiens
  misc_RNA (1)...(19): siRNA sense strand
gaagagcugaggcgcuuug

SEQ ID NO: 968626 - RNA, 19 nt, Homo sapiens
  misc_RNA (1)...(19): siRNA sense strand
ugaaucuccugaaacaguu

SEQ ID NO: 968627 - RNA, 19 nt, Homo sapiens
  misc_RNA (1)...(19): siRNA sense strand
gagcaugugaugaagaaug

SEQ ID NO: 968628 - RNA, 19 nt, Homo sapiens
  misc_RNA (1)...(19): siRNA sense strand
acagguggaucaucugaau

SEQ ID NO: 968629 - RNA, 19 nt, Homo sapiens
  misc_RNA (1)...(19): siRNA sense strand
gagguggacacuucagaaa

SEQ ID NO: 968630 - RNA, 19 nt, Homo sapiens
  misc_RNA (1)...(19): siRNA sense strand
gaugggcauuuccgagaga

SEQ ID NO: 968631 - RNA, 19 nt, Homo sapiens
  misc_RNA (1)...(19): siRNA sense strand
ggagguggacacuucagaa

SEQ ID NO: 968632 - RNA, 19 nt, Homo sapiens
  misc_RNA (1)...(19): siRNA sense strand
gaaugaggaggacgacaug

SEQ ID NO: 968633 - RNA, 19 nt, Homo sapiens
  misc_RNA (1)...(19): siRNA sense strand
guacagguggaucaucuga

SEQ ID NO: 968634 - RNA, 19 nt, Homo sapiens
  misc_RNA (1)...(19): siRNA sense strand
gagccgagagcuggacuuu

SEQ ID NO: 968635 - RNA, 19 nt, Homo sapiens
  misc_RNA (1)...(19): siRNA sense strand
gaacaccuggacccucaga

SEQ ID NO: 968636 - RNA, 19 nt, Homo sapiens
  misc_RNA (1)...(19): siRNA sense strand
ucaucugaaucuccugaaa

SEQ ID NO: 968637 - RNA, 19 nt, Homo sapiens
  misc_RNA (1)...(19): siRNA sense strand
uccaggaggucaucgaugu

SEQ ID NO: 968638 - RNA, 19 nt, Homo sapiens
  misc_RNA (1)...(19): siRNA sense strand
gcaccgcgagcacccuaaa

SEQ ID NO: 968639 - RNA, 19 nt, Homo sapiens
  misc_RNA (1)...(19): siRNA sense strand
ggcguuaucuggagucacu

SEQ ID NO: 968640 - RNA, 19 nt, Homo sapiens
  misc_RNA (1)...(19): siRNA sense strand
uggaggcacucuucaccaa

SEQ ID NO: 968641 - RNA, 19 nt, Homo sapiens
  misc_RNA (1)...(19): siRNA sense strand
gggagacaguggagaugca

SEQ ID NO: 968642 - RNA, 19 nt, Homo sapiens
  misc_RNA (1)...(19): siRNA sense strand
uguacgacccaaagaauga

SEQ ID NO: 968643 - RNA, 19 nt, Homo sapiens
  misc_RNA (1)...(19): siRNA sense strand
gcgagcacccuaaagucaa

SEQ ID NO: 968644 - RNA, 19 nt, Homo sapiens
  misc_RNA (1)...(19): siRNA sense strand
gccaagcccaguugaagga

SEQ ID NO: 968645 - RNA, 19 nt, Homo sapiens
  misc_RNA (1)...(19): siRNA sense strand
gagcaggaucccaauguac

SEQ ID NO: 968646 - RNA, 19 nt, Homo sapiens
  misc_RNA (1)...(19): siRNA sense strand
ucaccaaggagcuggagaa

SEQ ID NO: 968647 - RNA, 19 nt, Homo sapiens
  misc_RNA (1)...(19): siRNA sense strand
gcagccaagcccaguugaa

SEQ ID NO: 968648 - RNA, 19 nt, Homo sapiens
  misc_RNA (1)...(19): siRNA sense strand
acgagaugcuuaaggaaca

SEQ ID NO: 968649 - RNA, 19 nt, Homo sapiens
  misc_RNA (1)...(19): siRNA sense strand
guucaagcgcuacgagaug

SEQ ID NO: 968650 - RNA, 19 nt, Homo sapiens
  misc_RNA (1)...(19): siRNA sense strand
guacgacgcagcccaucau

SEQ ID NO: 968651 - RNA, 19 nt, Homo sapiens
  misc_RNA (1)...(19): siRNA sense strand
ccucagaaccagcauacau

SEQ ID NO: 968652 - RNA, 19 nt, Homo sapiens
  misc_RNA (1)...(19): siRNA sense strand
ccaaugcggaggacaucaa

SEQ ID NO: 968653 - RNA, 19 nt, Homo sapiens
  misc_RNA (1)...(19): siRNA sense strand
ccaauguacagguggauca

SEQ ID NO: 968654 - RNA, 19 nt, Homo sapiens
  misc_RNA (1)...(19): siRNA sense strand
caaguuccacccagacaca

SEQ ID NO: 968655 - RNA, 19 nt, Homo sapiens
  misc_RNA (1)...(19): siRNA sense strand
ccaggaggucaucgaugua

SEQ ID NO: 968656 - RNA, 19 nt, Homo sapiens
  misc_RNA (1)...(19): siRNA sense strand
ggagcuggaggcacucuuc

SEQ ID NO: 968657 - RNA, 19 nt, Homo sapiens
  misc_RNA (1)...(19): siRNA sense strand
ggagaggagcagagaaagg

SEQ ID NO: 968658 - RNA, 19 nt, Homo sapiens
  misc_RNA (1)...(19): siRNA sense strand
ugggagaggagcagagaaa

SEQ ID NO: 968659 - RNA, 19 nt, Homo sapiens
  misc_RNA (1)...(19): siRNA sense strand
ucagaaccagcauacauuc

SEQ ID NO: 968660 - RNA, 19 nt, Homo sapiens
  misc_RNA (1)...(19): siRNA sense strand
ggaggucaucgauguacug

SEQ ID NO: 968661 - RNA, 19 nt, Homo sapiens
  misc_RNA (1)...(19): siRNA sense strand
cauacugcaugauaucaac

SEQ ID NO: 968662 - RNA, 19 nt, Homo sapiens
  misc_RNA (1)...(19): siRNA sense strand
gcuuaaggaacacgagaga

SEQ ID NO: 968663 - RNA, 19 nt, Homo sapiens
  misc_RNA (1)...(19): siRNA sense strand
ggacacuucagaaaagaaa

SEQ ID NO: 968664 - RNA, 19 nt, Homo sapiens
  misc_RNA (1)...(19): siRNA sense strand
cacgagagacggcguuauc

SEQ ID NO: 968665 - RNA, 19 nt, Homo sapiens
  misc_RNA (1)...(19): siRNA sense strand
gguggacacuucagaaaag

SEQ ID NO: 968666 - RNA, 19 nt, Homo sapiens
  misc_RNA (1)...(19): siRNA sense strand
agcaugugaugaagaaugu

SEQ ID NO: 968667 - RNA, 19 nt, Homo sapiens
  misc_RNA (1)...(19): siRNA sense strand
gauggacgccgagcaggau

SEQ ID NO: 968668 - RNA, 19 nt, Homo sapiens
  misc_RNA (1)...(19): siRNA sense strand
cugaaucuccugaaacagu

SEQ ID NO: 968669 - RNA, 19 nt, Homo sapiens
  misc_RNA (1)...(19): siRNA sense strand
gagcuggaggcacucuuca

SEQ ID NO: 968670 - RNA, 19 nt, Homo sapiens
  misc_RNA (1)...(19): siRNA sense strand
agacauaccugcauacaua

SEQ ID NO: 968671 - RNA, 19 nt, Homo sapiens
  misc_RNA (1)...(19): siRNA sense strand
gaacgcagauggcauguug

SEQ ID NO: 968672 - RNA, 19 nt, Homo sapiens
  misc_RNA (1)...(19): siRNA sense strand
gaaauaugcuucggaaaga

SEQ ID NO: 968673 - RNA, 19 nt, Homo sapiens
  misc_RNA (1)...(19): siRNA sense strand
gaaagugguuauagugaaa

SEQ ID NO: 968674 - RNA, 19 nt, Homo sapiens
  misc_RNA (1)...(19): siRNA sense strand
ggugaaagcuggaacauuc

SEQ ID NO: 968675 - RNA, 19 nt, Homo sapiens
  misc_RNA (1)...(19): siRNA sense strand
gcaaagucaugccuaauau

SEQ ID NO: 968676 - RNA, 19 nt, Homo sapiens
  misc_RNA (1)...(19): siRNA sense strand
uaauaucccuguucacuuu

SEQ ID NO: 968677 - RNA, 19 nt, Homo sapiens
  misc_RNA (1)...(19): siRNA sense strand
gaagccagcuccuaauaau

SEQ ID NO: 968678 - RNA, 19 nt, Homo sapiens
  misc_RNA (1)...(19): siRNA sense strand
ggaaagaaauggaguuaac

SEQ ID NO: 968679 - RNA, 19 nt, Homo sapiens
  misc_RNA (1)...(19): siRNA sense strand
ggagacugcuguaccaauu

SEQ ID NO: 968680 - RNA, 19 nt, Homo sapiens
  misc_RNA (1)...(19): siRNA sense strand
ucaaacgggucuggaauua

SEQ ID NO: 968681 - RNA, 19 nt, Homo sapiens
  misc_RNA (1)...(19): siRNA sense strand
gcaacaaugcuaaauauga

SEQ ID NO: 968682 - RNA, 19 nt, Homo sapiens
  misc_RNA (1)...(19): siRNA sense strand
gaauugaggauauccauuu

SEQ ID NO: 968683 - RNA, 19 nt, Homo sapiens
  misc_RNA (1)...(19): siRNA sense strand
acaaacggcuucauacaaa

SEQ ID NO: 968684 - RNA, 19 nt, Homo sapiens
  misc_RNA (1)...(19): siRNA sense strand
uaaagugccuccauuugaa

SEQ ID NO: 968685 - RNA, 19 nt, Homo sapiens
  misc_RNA (1)...(19): siRNA sense strand
gaaguuaccagacccaauu

SEQ ID NO: 968686 - RNA, 19 nt, Homo sapiens
  misc_RNA (1)...(19): siRNA sense strand
uagaagaacucaugaagau

SEQ ID NO: 968687 - RNA, 19 nt, Homo sapiens
  misc_RNA (1)...(19): siRNA sense strand
aaacgggucuggaauuauu

SEQ ID NO: 968688 - RNA, 19 nt, Homo sapiens
  misc_RNA (1)...(19): siRNA sense strand
gcagcaaagucaugccuaa

SEQ ID NO: 968689 - RNA, 19 nt, Homo sapiens
  misc_RNA (1)...(19): siRNA sense strand
uacauaggauggaucauua

SEQ ID NO: 968690 - RNA, 19 nt, Homo sapiens
  misc_RNA (1)...(19): siRNA sense strand
gguuauggcccaacauuua

SEQ ID NO: 968691 - RNA, 19 nt, Homo sapiens
  misc_RNA (1)...(19): siRNA sense strand
ccaauaugguuccaaugua

SEQ ID NO: 968692 - RNA, 19 nt, Homo sapiens
  misc_RNA (1)...(19): siRNA sense strand
gaaauggaguuaacgugau

SEQ ID NO: 968693 - RNA, 19 nt, Homo sapiens
  misc_RNA (1)...(19): siRNA sense strand
cauaugagagcgagauuua

SEQ ID NO: 968694 - RNA, 19 nt, Homo sapiens
  misc_RNA (1)...(19): siRNA sense strand
ggucaaccgcuauggauua

SEQ ID NO: 968695 - RNA, 19 nt, Homo sapiens
  misc_RNA (1)...(19): siRNA sense strand
caauaugguuccaauguau

SEQ ID NO: 968696 - RNA, 19 nt, Homo sapiens
  misc_RNA (1)...(19): siRNA sense strand
uguaagagcuauaccaguu

SEQ ID NO: 968697 - RNA, 19 nt, Homo sapiens
  misc_RNA (1)...(19): siRNA sense strand
gaugagcuguguuugaaga

SEQ ID NO: 968698 - RNA, 19 nt, Homo sapiens
  misc_RNA (1)...(19): siRNA sense strand
ggaaauaaaggccgcagaa

SEQ ID NO: 968699 - RNA, 19 nt, Homo sapiens
  misc_RNA (1)...(19): siRNA sense strand
gaugaugacugugaggaaa

SEQ ID NO: 968700 - RNA, 19 nt, Homo sapiens
  misc_RNA (1)...(19): siRNA sense strand
uaugaugcauuccuuguaa

SEQ ID NO: 968701 - RNA, 19 nt, Homo sapiens
  misc_RNA (1)...(19): siRNA sense strand
ggagaccacggauuugaua

SEQ ID NO: 968702 - RNA, 19 nt, Homo sapiens
  misc_RNA (1)...(19): siRNA sense strand
gaagaaaggcagcaaaguc

SEQ ID NO: 968703 - RNA, 19 nt, Homo sapiens
  misc_RNA (1)...(19): siRNA sense strand
uaagagaccuaagaggaaa

SEQ ID NO: 968704 - RNA, 19 nt, Homo sapiens
  misc_RNA (1)...(19): siRNA sense strand
ggaccaaucuucgacuaug

SEQ ID NO: 968705 - RNA, 19 nt, Homo sapiens
  misc_RNA (1)...(19): siRNA sense strand
caccagaggcuaaauauga

SEQ ID NO: 968706 - RNA, 19 nt, Homo sapiens
  misc_RNA (1)...(19): siRNA sense strand
caaagaacaaguuggauga

SEQ ID NO: 968707 - RNA, 19 nt, Homo sapiens
  misc_RNA (1)...(19): siRNA sense strand
ggaguuaacgugauaagug

SEQ ID NO: 968708 - RNA, 19 nt, Homo sapiens
  misc_RNA (1)...(19): siRNA sense strand
gcagauguccuacggauuc

SEQ ID NO: 968709 - RNA, 19 nt, Homo sapiens
  misc_RNA (1)...(19): siRNA sense strand
aaauggaguuaacgugaua

SEQ ID NO: 968710 - RNA, 19 nt, Homo sapiens
  misc_RNA (1)...(19): siRNA sense strand
gcucagaggacgaaucaaa

SEQ ID NO: 968711 - RNA, 19 nt, Homo sapiens
  misc_RNA (1)...(19): siRNA sense strand
ccaagugguuugcaaagga

SEQ ID NO: 968712 - RNA, 19 nt, Homo sapiens
  misc_RNA (1)...(19): siRNA sense strand
ccagaaauccugacacuca

SEQ ID NO: 968713 - RNA, 19 nt, Homo sapiens
  misc_RNA (1)...(19): siRNA sense strand
uaugauggcuuacaugaca

SEQ ID NO: 968714 - RNA, 19 nt, Homo sapiens
  misc_RNA (1)...(19): siRNA sense strand
ugaaagugguuauagugaa

SEQ ID NO: 968715 - RNA, 19 nt, Homo sapiens
  misc_RNA (1)...(19): siRNA sense strand
acacaaauauggcccuuuc

SEQ ID NO: 968716 - RNA, 19 nt, Homo sapiens
  misc_RNA (1)...(19): siRNA sense strand
agacuaaagugccuccauu

SEQ ID NO: 968717 - RNA, 19 nt, Homo sapiens
  misc_RNA (1)...(19): siRNA sense strand
gcaaaggagagucgcauug

SEQ ID NO: 968718 - RNA, 19 nt, Homo sapiens
  misc_RNA (1)...(19): siRNA sense strand
gaccaaucuucgacuauga

SEQ ID NO: 968719 - RNA, 19 nt, Homo sapiens
  misc_RNA (1)...(19): siRNA sense strand
gaccugggcugcacuugug

SEQ ID NO: 968720 - RNA, 19 nt, Homo sapiens
  misc_RNA (1)...(19): siRNA sense strand
ccagggagaccacggauuu

SEQ ID NO: 968721 - RNA, 19 nt, Homo sapiens
  misc_RNA (1)...(19): siRNA sense strand
acagaagaauugaggauau

SEQ ID NO: 968722 - RNA, 19 nt, Homo sapiens
  misc_RNA (1)...(19): siRNA sense strand
caacaaugcuaaauaugac

SEQ ID NO: 968723 - RNA, 19 nt, Homo sapiens
  misc_RNA (1)...(19): siRNA sense strand
ggaagaauucgauccaaau

SEQ ID NO: 968724 - RNA, 19 nt, Homo sapiens
  misc_RNA (1)...(19): siRNA sense strand
ugauuucucuggacacaaa

SEQ ID NO: 968725 - RNA, 19 nt, Homo sapiens
  misc_RNA (1)...(19): siRNA sense strand
gauggcauguugcaaggaa

SEQ ID NO: 968726 - RNA, 19 nt, Homo sapiens
  misc_RNA (1)...(19): siRNA sense strand
caaaggguauuggugaaga

SEQ ID NO: 968727 - RNA, 19 nt, Homo sapiens
  misc_RNA (1)...(19): siRNA sense strand
cuaaagugccuccauuuga

SEQ ID NO: 968728 - RNA, 19 nt, Homo sapiens
  misc_RNA (1)...(19): siRNA sense strand
gauugaagccagcuccuaa

SEQ ID NO: 968729 - RNA, 19 nt, Homo sapiens
  misc_RNA (1)...(19): siRNA sense strand
agaaucacauggaauuguu

SEQ ID NO: 968730 - RNA, 19 nt, Homo sapiens
  misc_RNA (1)...(19): siRNA sense strand
cuaugacuaugauggcuua

SEQ ID NO: 968731 - RNA, 19 nt, Homo sapiens
  misc_RNA (1)...(19): siRNA sense strand
gcacuaugccaacaacaga

SEQ ID NO: 968732 - RNA, 19 nt, Homo sapiens
  misc_RNA (1)...(19): siRNA sense strand
gaaacagcaccuucccaaa

SEQ ID NO: 968733 - RNA, 19 nt, Homo sapiens
  misc_RNA (1)...(19): siRNA sense strand
gaaaggcagcaaagucaug

SEQ ID NO: 968734 - RNA, 19 nt, Homo sapiens
  misc_RNA (1)...(19): siRNA sense strand
gggcugcacuugugaugau

SEQ ID NO: 968735 - RNA, 19 nt, Homo sapiens
  misc_RNA (1)...(19): siRNA sense strand
ccagucgugucagauaaua

SEQ ID NO: 968736 - RNA, 19 nt, Homo sapiens
  misc_RNA (1)...(19): siRNA sense strand
ccacggauuugauaacaag

SEQ ID NO: 968737 - RNA, 19 nt, Homo sapiens
  misc_RNA (1)...(19): siRNA sense strand
gccaacaacagaagaauug

SEQ ID NO: 968738 - RNA, 19 nt, Homo sapiens
  misc_RNA (1)...(19): siRNA sense strand
ggaaacucgucaggacaaa

SEQ ID NO: 968739 - RNA, 19 nt, Homo sapiens
  misc_RNA (1)...(19): siRNA sense strand
uguaugauccuguauuuga

SEQ ID NO: 968740 - RNA, 19 nt, Homo sapiens
  misc_RNA (1)...(19): siRNA sense strand
ggcuaaauaugaugcauuc

SEQ ID NO: 968741 - RNA, 19 nt, Homo sapiens
  misc_RNA (1)...(19): siRNA sense strand
caacaaacggcuucauaca

SEQ ID NO: 968742 - RNA, 19 nt, Homo sapiens
  misc_RNA (1)...(19): siRNA sense strand
gaggauauccauuuauugg

SEQ ID NO: 968743 - RNA, 19 nt, Homo sapiens
  misc_RNA (1)...(19): siRNA sense strand
gagacugcuguaccaauua

SEQ ID NO: 968744 - RNA, 19 nt, Homo sapiens
  misc_RNA (1)...(19): siRNA sense strand
guagaagaacucaugaaga

SEQ ID NO: 968745 - RNA, 19 nt, Homo sapiens
  misc_RNA (1)...(19): siRNA sense strand
caucauauacuguuuccaa

SEQ ID NO: 968746 - RNA, 19 nt, Homo sapiens
  misc_RNA (1)...(19): siRNA sense strand
gcagugcuuuaucggacua

SEQ ID NO: 968747 - RNA, 19 nt, Homo sapiens
  misc_RNA (1)...(19): siRNA sense strand
gcccaacauuuaaguacaa

SEQ ID NO: 968748 - RNA, 19 nt, Homo sapiens
  misc_RNA (1)...(19): siRNA sense strand
uauaagaaaccaucaggaa

SEQ ID NO: 968749 - RNA, 19 nt, Homo sapiens
  misc_RNA (1)...(19): siRNA sense strand
uugccaaucucacguguaa

SEQ ID NO: 968750 - RNA, 19 nt, Homo sapiens
  misc_RNA (1)...(19): siRNA sense strand
gaaauaaaggccgcagaau

SEQ ID NO: 968751 - RNA, 19 nt, Homo sapiens
  misc_RNA (1)...(19): siRNA sense strand
caauguauccugcuuucaa

SEQ ID NO: 968752 - RNA, 19 nt, Homo sapiens
  misc_RNA (1)...(19): siRNA sense strand
ggauuccucuuuccuccuu

SEQ ID NO: 968753 - RNA, 19 nt, Homo sapiens
  misc_RNA (1)...(19): siRNA sense strand
cauggaaguuugaaucauc

SEQ ID NO: 968754 - RNA, 19 nt, Homo sapiens
  misc_RNA (1)...(19): siRNA sense strand
gauccaaauuuagcaacaa

SEQ ID NO: 968755 - RNA, 19 nt, Homo sapiens
  misc_RNA (1)...(19): siRNA sense strand
auuaauggauggacugaaa

SEQ ID NO: 968756 - RNA, 19 nt, Homo sapiens
  misc_RNA (1)...(19): siRNA sense strand
gucaguaucugcuuaggau

SEQ ID NO: 968757 - RNA, 19 nt, Homo sapiens
  misc_RNA (1)...(19): siRNA sense strand
gggauuauguaccuucagu

SEQ ID NO: 968758 - RNA, 19 nt, Homo sapiens
  misc_RNA (1)...(19): siRNA sense strand
ugagaggccuucggucuau

SEQ ID NO: 968759 - RNA, 19 nt, Homo sapiens
  misc_RNA (1)...(19): siRNA sense strand
aaagucaugccuaauauug

SEQ ID NO: 968760 - RNA, 19 nt, Homo sapiens
  misc_RNA (1)...(19): siRNA sense strand
ugaugacugugaggaaaua

SEQ ID NO: 968761 - RNA, 19 nt, Homo sapiens
  misc_RNA (1)...(19): siRNA sense strand
cgcauuggguugaugauga

SEQ ID NO: 968762 - RNA, 19 nt, Homo sapiens
  misc_RNA (1)...(19): siRNA sense strand
gaaauccugacacucaaga

SEQ ID NO: 968763 - RNA, 19 nt, Homo sapiens
  misc_RNA (1)...(19): siRNA sense strand
uggcuuacaugacacagaa

SEQ ID NO: 968764 - RNA, 19 nt, Homo sapiens
  misc_RNA (1)...(19): siRNA sense strand
gaccacggauuugauaaca

SEQ ID NO: 968765 - RNA, 19 nt, Homo sapiens
  misc_RNA (1)...(19): siRNA sense strand
guucuugaguaauuaccua

SEQ ID NO: 968766 - RNA, 19 nt, Homo sapiens
  misc_RNA (1)...(19): siRNA sense strand
acugaguucuugaguaauu

SEQ ID NO: 968767 - RNA, 19 nt, Homo sapiens
  misc_RNA (1)...(19): siRNA sense strand
guaguuauggcucaccuuu

SEQ ID NO: 968768 - RNA, 19 nt, Homo sapiens
  misc_RNA (1)...(19): siRNA sense strand
ucacgagcggagaauauua

SEQ ID NO: 968769 - RNA, 19 nt, Homo sapiens
  misc_RNA (1)...(19): siRNA sense strand
ugugugaucuccugggauu

SEQ ID NO: 968770 - RNA, 19 nt, Homo sapiens
  misc_RNA (1)...(19): siRNA sense strand
gagagacccucccugagaa

SEQ ID NO: 968771 - RNA, 19 nt, Homo sapiens
  misc_RNA (1)...(19): siRNA sense strand
ggacaagccucuggucaag

SEQ ID NO: 968772 - RNA, 19 nt, Homo sapiens
  misc_RNA (1)...(19): siRNA sense strand
ugaugaggcugacaaaguu

SEQ ID NO: 968773 - RNA, 19 nt, Homo sapiens
  misc_RNA (1)...(19): siRNA sense strand
ccacugcacaggaaacaua

SEQ ID NO: 968774 - RNA, 19 nt, Homo sapiens
  misc_RNA (1)...(19): siRNA sense strand
gauuaccacugcacaggaa

SEQ ID NO: 968775 - RNA, 19 nt, Homo sapiens
  misc_RNA (1)...(19): siRNA sense strand
gaacacaaucaccuauuca

SEQ ID NO: 968776 - RNA, 19 nt, Homo sapiens
  misc_RNA (1)...(19): siRNA sense strand
gcacccggaugcucuggaa

SEQ ID NO: 968777 - RNA, 19 nt, Homo sapiens
  misc_RNA (1)...(19): siRNA sense strand
guggacagcugugcuauuc

SEQ ID NO: 968778 - RNA, 19 nt, Homo sapiens
  misc_RNA (1)...(19): siRNA sense strand
caaaggcugugcugaaacu

SEQ ID NO: 968779 - RNA, 19 nt, Homo sapiens
  misc_RNA (1)...(19): siRNA sense strand
uuucagcucucccaggaua

SEQ ID NO: 968780 - RNA, 19 nt, Homo sapiens
  misc_RNA (1)...(19): siRNA sense strand
acaaucaccuauucacuuc

SEQ ID NO: 968781 - RNA, 19 nt, Homo sapiens
  misc_RNA (1)...(19): siRNA sense strand
gagagcgacuccauucagu

SEQ ID NO: 968782 - RNA, 19 nt, Homo sapiens
  misc_RNA (1)...(19): siRNA sense strand
gaccaucacuguccaagcu

SEQ ID NO: 968783 - RNA, 19 nt, Homo sapiens
  misc_RNA (1)...(19): siRNA sense strand
cccaaaggcugugcugaaa

SEQ ID NO: 968784 - RNA, 19 nt, Homo sapiens
  misc_RNA (1)...(19): siRNA sense strand
gagaacacaaucaccuauu

SEQ ID NO: 968785 - RNA, 19 nt, Homo sapiens
  misc_RNA (1)...(19): siRNA sense strand
agaacacaaucaccuauuc

SEQ ID NO: 968786 - RNA, 19 nt, Homo sapiens
  misc_RNA (1)...(19): siRNA sense strand
ggacagcugugcuauuccu

SEQ ID NO: 968787 - RNA, 19 nt, Homo sapiens
  misc_RNA (1)...(19): siRNA sense strand
gcgacuccauucagugguu

SEQ ID NO: 968788 - RNA, 19 nt, Homo sapiens
  misc_RNA (1)...(19): siRNA sense strand
ggccauuguugcugcugua

SEQ ID NO: 968789 - RNA, 19 nt, Homo sapiens
  misc_RNA (1)...(19): siRNA sense strand
caacuucuccaucccacaa

SEQ ID NO: 968790 - RNA, 19 nt, Homo sapiens
  misc_RNA (1)...(19): siRNA sense strand
guucaaggccaacaacaau

SEQ ID NO: 968791 - RNA, 19 nt, Homo sapiens
  misc_RNA (1)...(19): siRNA sense strand
ucaaggccaacaacaauga

SEQ ID NO: 968792 - RNA, 19 nt, Homo sapiens
  misc_RNA (1)...(19): siRNA sense strand
ccuauucacuucucaugca

SEQ ID NO: 968793 - RNA, 19 nt, Homo sapiens
  misc_RNA (1)...(19): siRNA sense strand
cauuguugcugcuguagug

SEQ ID NO: 968794 - RNA, 19 nt, Homo sapiens
  misc_RNA (1)...(19): siRNA sense strand
cacaaucaccuauucacuu

SEQ ID NO: 968795 - RNA, 19 nt, Homo sapiens
  misc_RNA (1)...(19): siRNA sense strand
gaugaccagaaccguauuu

SEQ ID NO: 968796 - RNA, 19 nt, Homo sapiens
  misc_RNA (1)...(19): siRNA sense strand
uaccuguccuugccacuga

SEQ ID NO: 968797 - RNA, 19 nt, Homo sapiens
  misc_RNA (1)...(19): siRNA sense strand
gagagugacugggcugacu

SEQ ID NO: 968798 - RNA, 19 nt, Homo sapiens
  misc_RNA (1)...(19): siRNA sense strand
cagcccagcuacagguuca

SEQ ID NO: 968799 - RNA, 19 nt, Homo sapiens
  misc_RNA (1)...(19): siRNA sense strand
ggucaaggucacauucuuc

SEQ ID NO: 968800 - RNA, 19 nt, Homo sapiens
  misc_RNA (1)...(19): siRNA sense strand
acaagccucuggucaaggu

SEQ ID NO: 968801 - RNA, 19 nt, Homo sapiens
  misc_RNA (1)...(19): siRNA sense strand
caagcaaaccacagucaca

SEQ ID NO: 968802 - RNA, 19 nt, Homo sapiens
  misc_RNA (1)...(19): siRNA sense strand
gcaucugacugugcuuucu

SEQ ID NO: 968803 - RNA, 19 nt, Homo sapiens
  misc_RNA (1)...(19): siRNA sense strand
cauccaagccugugaccau

SEQ ID NO: 968804 - RNA, 19 nt, Homo sapiens
  misc_RNA (1)...(19): siRNA sense strand
ccugagagcgacuccauuc

SEQ ID NO: 968805 - RNA, 19 nt, Homo sapiens
  misc_RNA (1)...(19): siRNA sense strand
ugagaacacaaucaccuau

SEQ ID NO: 968806 - RNA, 19 nt, Homo sapiens
  misc_RNA (1)...(19): siRNA sense strand
gguucaaggccaacaacaa

SEQ ID NO: 968807 - RNA, 19 nt, Homo sapiens
  misc_RNA (1)...(19): siRNA sense strand
cugaugaggcugacaaagu

SEQ ID NO: 968808 - RNA, 19 nt, Homo sapiens
  misc_RNA (1)...(19): siRNA sense strand
ggaguacacgugccagacu

SEQ ID NO: 968809 - RNA, 19 nt, Homo sapiens
  misc_RNA (1)...(19): siRNA sense strand
gaugaggcugacaaaguug

SEQ ID NO: 968810 - RNA, 19 nt, Homo sapiens
  misc_RNA (1)...(19): siRNA sense strand
cagcgacccugugcaucug

SEQ ID NO: 968811 - RNA, 19 nt, Homo sapiens
  misc_RNA (1)...(19): siRNA sense strand
guucggaucccaacuucuc

SEQ ID NO: 968812 - RNA, 19 nt, Homo sapiens
  misc_RNA (1)...(19): siRNA sense strand
gcccagagccuuguuauua

SEQ ID NO: 968813 - RNA, 19 nt, Homo sapiens
  misc_RNA (1)...(19): siRNA sense strand
ccacagggauuucucauag

SEQ ID NO: 968814 - RNA, 19 nt, Homo sapiens
  misc_RNA (1)...(19): siRNA sense strand
gaaaacaacugaaugauac

SEQ ID NO: 968815 - RNA, 19 nt, Homo sapiens
  misc_RNA (1)...(19): siRNA sense strand
uaucagcuuugucuaagua

SEQ ID NO: 968816 - RNA, 19 nt, Homo sapiens
  misc_RNA (1)...(19): siRNA sense strand
gaagacagaaccucuaagu

SEQ ID NO: 968817 - RNA, 19 nt, Homo sapiens
  misc_RNA (1)...(19): siRNA sense strand
caacaacuacagauacaaa

SEQ ID NO: 968818 - RNA, 19 nt, Homo sapiens
  misc_RNA (1)...(19): siRNA sense strand
ccagagccuuguuauuauu

SEQ ID NO: 968819 - RNA, 19 nt, Homo sapiens
  misc_RNA (1)...(19): siRNA sense strand
caaagaagccaagaugcua

SEQ ID NO: 968820 - RNA, 19 nt, Homo sapiens
  misc_RNA (1)...(19): siRNA sense strand
gcaacuguauuucuugaag

SEQ ID NO: 968821 - RNA, 19 nt, Homo sapiens
  misc_RNA (1)...(19): siRNA sense strand
gaacaauaucuuucacaug

SEQ ID NO: 968822 - RNA, 19 nt, Homo sapiens
  misc_RNA (1)...(19): siRNA sense strand
guaaucagcauaaucacuu

SEQ ID NO: 968823 - RNA, 19 nt, Homo sapiens
  misc_RNA (1)...(19): siRNA sense strand
ucacuucgguucugugcaa

SEQ ID NO: 968824 - RNA, 19 nt, Homo sapiens
  misc_RNA (1)...(19): siRNA sense strand
caacuacagauacaaagaa

SEQ ID NO: 968825 - RNA, 19 nt, Homo sapiens
  misc_RNA (1)...(19): siRNA sense strand
ugacuuugccaucaugaua

SEQ ID NO: 968826 - RNA, 19 nt, Homo sapiens
  misc_RNA (1)...(19): siRNA sense strand
ccguggagcugaucgauau

SEQ ID NO: 968827 - RNA, 19 nt, Homo sapiens
  misc_RNA (1)...(19): siRNA sense strand
ggauacuucuauuucaguu

SEQ ID NO: 968828 - RNA, 19 nt, Homo sapiens
  misc_RNA (1)...(19): siRNA sense strand
acaaacagaaggaaagaaa

SEQ ID NO: 968829 - RNA, 19 nt, Homo sapiens
  misc_RNA (1)...(19): siRNA sense strand
gaucacaaacagaaggaaa

SEQ ID NO: 968830 - RNA, 19 nt, Homo sapiens
  misc_RNA (1)...(19): siRNA sense strand
aagcgucucuucaauguuc

SEQ ID NO: 968831 - RNA, 19 nt, Homo sapiens
  misc_RNA (1)...(19): siRNA sense strand
cgauaugacuuugccauca

SEQ ID NO: 968832 - RNA, 19 nt, Homo sapiens
  misc_RNA (1)...(19): siRNA sense strand
cccagagccuuguuauuau

SEQ ID NO: 968833 - RNA, 19 nt, Homo sapiens
  misc_RNA (1)...(19): siRNA sense strand
cagaagacagaaccucuaa

SEQ ID NO: 968834 - RNA, 19 nt, Homo sapiens
  misc_RNA (1)...(19): siRNA sense strand
ggaaugcuuuuggcaauuu

SEQ ID NO: 968835 - RNA, 19 nt, Homo sapiens
  misc_RNA (1)...(19): siRNA sense strand
agacugaucacaaacagaa

SEQ ID NO: 968836 - RNA, 19 nt, Homo sapiens
  misc_RNA (1)...(19): siRNA sense strand
gccugagacugaucacaaa

SEQ ID NO: 968837 - RNA, 19 nt, Homo sapiens
  misc_RNA (1)...(19): siRNA sense strand
gagcugaucgauaugacuu

SEQ ID NO: 968838 - RNA, 19 nt, Homo sapiens
  misc_RNA (1)...(19): siRNA sense strand
gcugaucgauaugacuuug

SEQ ID NO: 968839 - RNA, 19 nt, Homo sapiens
  misc_RNA (1)...(19): siRNA sense strand
cagacuggauacuucuauu

SEQ ID NO: 968840 - RNA, 19 nt, Homo sapiens
  misc_RNA (1)...(19): siRNA sense strand
cauaaucacuucgguucug

SEQ ID NO: 968841 - RNA, 19 nt, Homo sapiens
  misc_RNA (1)...(19): siRNA sense strand
gaaagaaaacaacugaaug

SEQ ID NO: 968842 - RNA, 19 nt, Homo sapiens
  misc_RNA (1)...(19): siRNA sense strand
caaacuauaacuacgugaa

SEQ ID NO: 968843 - RNA, 19 nt, Homo sapiens
  misc_RNA (1)...(19): siRNA sense strand
aaagaagccaagaugcuaa

SEQ ID NO: 968844 - RNA, 19 nt, Homo sapiens
  misc_RNA (1)...(19): siRNA sense strand
guuccaacaacuacagaua

SEQ ID NO: 968845 - RNA, 19 nt, Homo sapiens
  misc_RNA (1)...(19): siRNA sense strand
auacaaagaagccaagaug

SEQ ID NO: 968846 - RNA, 19 nt, Homo sapiens
  misc_RNA (1)...(19): siRNA sense strand
ccagaagacagaaccucua

SEQ ID NO: 968847 - RNA, 19 nt, Homo sapiens
  misc_RNA (1)...(19): siRNA sense strand
ccaaucaaacuauaacuac

SEQ ID NO: 968848 - RNA, 19 nt, Homo sapiens
  misc_RNA (1)...(19): siRNA sense strand
gcagaacaauaucuuucac

SEQ ID NO: 968849 - RNA, 19 nt, Homo sapiens
  misc_RNA (1)...(19): siRNA sense strand
caaaaggugcagaacaaua

SEQ ID NO: 968850 - RNA, 19 nt, Homo sapiens
  misc_RNA (1)...(19): siRNA sense strand
cacaaaaggugcagaacaa

SEQ ID NO: 968851 - RNA, 19 nt, Homo sapiens
  misc_RNA (1)...(19): siRNA sense strand
ggaaagaaaacaacugaau

SEQ ID NO: 968852 - RNA, 19 nt, Homo sapiens
  misc_RNA (1)...(19): siRNA sense strand
agacuggauacuucuauuu

SEQ ID NO: 968853 - RNA, 19 nt, Homo sapiens
  misc_RNA (1)...(19): siRNA sense strand
gcuggucguucugaaucua

SEQ ID NO: 968854 - RNA, 19 nt, Homo sapiens
  misc_RNA (1)...(19): siRNA sense strand
gaaugauacucuggaugca

SEQ ID NO: 968855 - RNA, 19 nt, Homo sapiens
  misc_RNA (1)...(19): siRNA sense strand
ggccugagacugaucacaa

SEQ ID NO: 968856 - RNA, 19 nt, Homo sapiens
  misc_RNA (1)...(19): siRNA sense strand
gugcagaacaauaucuuuc

SEQ ID NO: 968857 - RNA, 19 nt, Homo sapiens
  misc_RNA (1)...(19): siRNA sense strand
cugcaacuguauuucuuga

SEQ ID NO: 968858 - RNA, 19 nt, Homo sapiens
  misc_RNA (1)...(19): siRNA sense strand
guggcgauacuacaacuuu

SEQ ID NO: 968859 - RNA, 19 nt, Homo sapiens
  misc_RNA (1)...(19): siRNA sense strand
cuauuucaguugcgagguu

SEQ ID NO: 968860 - RNA, 19 nt, Homo sapiens
  misc_RNA (1)...(19): siRNA sense strand
gagccuuguuauuauucuu

SEQ ID NO: 968861 - RNA, 19 nt, Homo sapiens
  misc_RNA (1)...(19): siRNA sense strand
cacagggauuucucauaga

SEQ ID NO: 968862 - RNA, 19 nt, Homo sapiens
  misc_RNA (1)...(19): siRNA sense strand
gacuggauacuucuauuuc

SEQ ID NO: 968863 - RNA, 19 nt, Homo sapiens
  misc_RNA (1)...(19): siRNA sense strand
ucacaaacagaaggaaaga

SEQ ID NO: 968864 - RNA, 19 nt, Homo sapiens
  misc_RNA (1)...(19): siRNA sense strand
cacauaacccacagggauu

SEQ ID NO: 968865 - RNA, 19 nt, Homo sapiens
  misc_RNA (1)...(19): siRNA sense strand
uaaucagcauaaucacuuc

SEQ ID NO: 968866 - RNA, 19 nt, Homo sapiens
  misc_RNA (1)...(19): siRNA sense strand
ucgguucugugcaagugua

SEQ ID NO: 968867 - RNA, 19 nt, Homo sapiens
  misc_RNA (1)...(19): siRNA sense strand
uccaacaacuacagauaca

SEQ ID NO: 968868 - RNA, 19 nt, Homo sapiens
  misc_RNA (1)...(19): siRNA sense strand
ccaggagccagaagacaga

SEQ ID NO: 968869 - RNA, 19 nt, Homo sapiens
  misc_RNA (1)...(19): siRNA sense strand
cuaaguaaucagcauaauc

SEQ ID NO: 968870 - RNA, 19 nt, Homo sapiens
  misc_RNA (1)...(19): siRNA sense strand
gauacaaagaagccaagau

SEQ ID NO: 968871 - RNA, 19 nt, Homo sapiens
  misc_RNA (1)...(19): siRNA sense strand
ggauccugcaacuguauuu

SEQ ID NO: 968872 - RNA, 19 nt, Homo sapiens
  misc_RNA (1)...(19): siRNA sense strand
ggugcagaacaauaucuuu

SEQ ID NO: 968873 - RNA, 19 nt, Homo sapiens
  misc_RNA (1)...(19): siRNA sense strand
gggcuggucguucugaauc

SEQ ID NO: 968874 - RNA, 19 nt, Homo sapiens
  misc_RNA (1)...(19): siRNA sense strand
acaauaucuuucacaugug

SEQ ID NO: 968875 - RNA, 19 nt, Homo sapiens
  misc_RNA (1)...(19): siRNA sense strand
ugucuaaguaaucagcaua

SEQ ID NO: 968876 - RNA, 19 nt, Homo sapiens
  misc_RNA (1)...(19): siRNA sense strand
uggcgauacuacaacuuug

SEQ ID NO: 968877 - RNA, 19 nt, Homo sapiens
  misc_RNA (1)...(19): siRNA sense strand
acuggauacuucuauuuca

SEQ ID NO: 968878 - RNA, 19 nt, Homo sapiens
  misc_RNA (1)...(19): siRNA sense strand
acagggauuucucauagac

SEQ ID NO: 968879 - RNA, 19 nt, Homo sapiens
  misc_RNA (1)...(19): siRNA sense strand
acaacuacagauacaaaga

SEQ ID NO: 968880 - RNA, 19 nt, Homo sapiens
  misc_RNA (1)...(19): siRNA sense strand
ugagacugaucacaaacag

SEQ ID NO: 968881 - RNA, 19 nt, Homo sapiens
  misc_RNA (1)...(19): siRNA sense strand
gugcaaguguaccucaacu

SEQ ID NO: 968882 - RNA, 19 nt, Homo sapiens
  misc_RNA (1)...(19): siRNA sense strand
gaggaaaauggcugacuuu

SEQ ID NO: 968883 - RNA, 19 nt, Homo sapiens
  misc_RNA (1)...(19): siRNA sense strand
augauacucuggaugcaau

SEQ ID NO: 968884 - RNA, 19 nt, Homo sapiens
  misc_RNA (1)...(19): siRNA sense strand
cagcuuugucuaaguaauc

SEQ ID NO: 968885 - RNA, 19 nt, Homo sapiens
  misc_RNA (1)...(19): siRNA sense strand
ucacauguggcgauacuac

SEQ ID NO: 968886 - RNA, 19 nt, Homo sapiens
  misc_RNA (1)...(19): siRNA sense strand
ggucaugcaucccuuaaua

SEQ ID NO: 968887 - RNA, 19 nt, Homo sapiens
  misc_RNA (1)...(19): siRNA sense strand
ggacagaagccauauaaau

SEQ ID NO: 968888 - RNA, 19 nt, Homo sapiens
  misc_RNA (1)...(19): siRNA sense strand
ggaugugccucgagcguua

SEQ ID NO: 968889 - RNA, 19 nt, Homo sapiens
  misc_RNA (1)...(19): siRNA sense strand
gagagaagccuuaugaaug

SEQ ID NO: 968890 - RNA, 19 nt, Homo sapiens
  misc_RNA (1)...(19): siRNA sense strand
gagagaagcccuaugaaug

SEQ ID NO: 968891 - RNA, 19 nt, Homo sapiens
  misc_RNA (1)...(19): siRNA sense strand
gagaaacccuaugaaugua

SEQ ID NO: 968892 - RNA, 19 nt, Homo sapiens
  misc_RNA (1)...(19): siRNA sense strand
gagaagcccuaugaaugua

SEQ ID NO: 968893 - RNA, 19 nt, Homo sapiens
  misc_RNA (1)...(19): siRNA sense strand
gaaacccuaugaauguaaa

SEQ ID NO: 968894 - RNA, 19 nt, Homo sapiens
  misc_RNA (1)...(19): siRNA sense strand
uaagaaagaucaucagcau

SEQ ID NO: 968895 - RNA, 19 nt, Homo sapiens
  misc_RNA (1)...(19): siRNA sense strand
cagaugacaugcugaagaa

SEQ ID NO: 968896 - RNA, 19 nt, Homo sapiens
  misc_RNA (1)...(19): siRNA sense strand
gagagaaacccuaugaaug

SEQ ID NO: 968897 - RNA, 19 nt, Homo sapiens
  misc_RNA (1)...(19): siRNA sense strand
gacagaagccauauaaaug

SEQ ID NO: 968898 - RNA, 19 nt, Homo sapiens
  misc_RNA (1)...(19): siRNA sense strand
gagaaaccauaugaaugua

SEQ ID NO: 968899 - RNA, 19 nt, Homo sapiens
  misc_RNA (1)...(19): siRNA sense strand
ggagagaaaccauaugaau

SEQ ID NO: 968900 - RNA, 19 nt, Homo sapiens
  misc_RNA (1)...(19): siRNA sense strand
ugucucaguuuguaucuua

SEQ ID NO: 968901 - RNA, 19 nt, Homo sapiens
  misc_RNA (1)...(19): siRNA sense strand
cagaagccauauaaaugua

SEQ ID NO: 968902 - RNA, 19 nt, Homo sapiens
  misc_RNA (1)...(19): siRNA sense strand
guaagaaagccuucaguga

SEQ ID NO: 968903 - RNA, 19 nt, Homo sapiens
  misc_RNA (1)...(19): siRNA sense strand
gaauguaaacaauguggua

SEQ ID NO: 968904 - RNA, 19 nt, Homo sapiens
  misc_RNA (1)...(19): siRNA sense strand
ggagagaagccuuaugaau

SEQ ID NO: 968905 - RNA, 19 nt, Homo sapiens
  misc_RNA (1)...(19): siRNA sense strand
ggagagaaacccuaugaau

SEQ ID NO: 968906 - RNA, 19 nt, Homo sapiens
  misc_RNA (1)...(19): siRNA sense strand
gggagaagccguaugaaug

SEQ ID NO: 968907 - RNA, 19 nt, Homo sapiens
  misc_RNA (1)...(19): siRNA sense strand
gagauggacccuacaaaug

SEQ ID NO: 968908 - RNA, 19 nt, Homo sapiens
  misc_RNA (1)...(19): siRNA sense strand
gaauguaaacaguguggua

SEQ ID NO: 968909 - RNA, 19 nt, Homo sapiens
  misc_RNA (1)...(19): siRNA sense strand
gagagaaaccauaugaaug

SEQ ID NO: 968910 - RNA, 19 nt, Homo sapiens
  misc_RNA (1)...(19): siRNA sense strand
ggaaagccuugaugugucu

SEQ ID NO: 968911 - RNA, 19 nt, Homo sapiens
  misc_RNA (1)...(19): siRNA sense strand
ggagagaagcccuaugaau

SEQ ID NO: 968912 - RNA, 19 nt, Homo sapiens
  misc_RNA (1)...(19): siRNA sense strand
gagaagccguaugaaugua

SEQ ID NO: 968913 - RNA, 19 nt, Homo sapiens
  misc_RNA (1)...(19): siRNA sense strand
ggagaagccguaugaaugu

SEQ ID NO: 968914 - RNA, 19 nt, Homo sapiens
  misc_RNA (1)...(19): siRNA sense strand
uaagaaagccuucagugau

SEQ ID NO: 968915 - RNA, 19 nt, Homo sapiens
  misc_RNA (1)...(19): siRNA sense strand
gaagccguaugaauguaaa

SEQ ID NO: 968916 - RNA, 19 nt, Homo sapiens
  misc_RNA (1)...(19): siRNA sense strand
ggagauggacccuacaaau

SEQ ID NO: 968917 - RNA, 19 nt, Homo sapiens
  misc_RNA (1)...(19): siRNA sense strand
gacacaagccauaugagua

SEQ ID NO: 968918 - RNA, 19 nt, Homo sapiens
  misc_RNA (1)...(19): siRNA sense strand
gggaaagccuucagaucug

SEQ ID NO: 968919 - RNA, 19 nt, Homo sapiens
  misc_RNA (1)...(19): siRNA sense strand
cauaugaguaucaggaaua

SEQ ID NO: 968920 - RNA, 19 nt, Homo sapiens
  misc_RNA (1)...(19): siRNA sense strand
agagaaacccuaugaaugu

SEQ ID NO: 968921 - RNA, 19 nt, Homo sapiens
  misc_RNA (1)...(19): siRNA sense strand
ugacccagguuccagauga

SEQ ID NO: 968922 - RNA, 19 nt, Homo sapiens
  misc_RNA (1)...(19): siRNA sense strand
ggacacaagccauaugagu

SEQ ID NO: 968923 - RNA, 19 nt, Homo sapiens
  misc_RNA (1)...(19): siRNA sense strand
gaaagaucaucagcaugga

SEQ ID NO: 968924 - RNA, 19 nt, Homo sapiens
  misc_RNA (1)...(19): siRNA sense strand
aagaaagccuucagugauc

SEQ ID NO: 968925 - RNA, 19 nt, Homo sapiens
  misc_RNA (1)...(19): siRNA sense strand
guaugaauguaaacagugu

SEQ ID NO: 968926 - RNA, 19 nt, Homo sapiens
  misc_RNA (1)...(19): siRNA sense strand
agagaaaccauaugaaugu

SEQ ID NO: 968927 - RNA, 19 nt, Homo sapiens
  misc_RNA (1)...(19): siRNA sense strand
gaacucacacuggagagaa

SEQ ID NO: 968928 - RNA, 19 nt, Homo sapiens
  misc_RNA (1)...(19): siRNA sense strand
gaacucacacuggagagaa

SEQ ID NO: 968929 - RNA, 19 nt, Homo sapiens
  misc_RNA (1)...(19): siRNA sense strand
agagaagccuuaugaaugc

SEQ ID NO: 968930 - RNA, 19 nt, Homo sapiens
  misc_RNA (1)...(19): siRNA sense strand
gaacucacacuggagagaa

SEQ ID NO: 968931 - RNA, 19 nt, Homo sapiens
  misc_RNA (1)...(19): siRNA sense strand
ggaaaccuuaugauuguga

SEQ ID NO: 968932 - RNA, 19 nt, Homo sapiens
  misc_RNA (1)...(19): siRNA sense strand
ucaauuccguucgauauca

SEQ ID NO: 968933 - RNA, 19 nt, Homo sapiens
  misc_RNA (1)...(19): siRNA sense strand
gaugacaugcugaagaaga

SEQ ID NO: 968934 - RNA, 19 nt, Homo sapiens
  misc_RNA (1)...(19): siRNA sense strand
gaagccauauaaauguaca

SEQ ID NO: 968935 - RNA, 19 nt, Homo sapiens
  misc_RNA (1)...(19): siRNA sense strand
ccauaugaauguaaacagu

SEQ ID NO: 968936 - RNA, 19 nt, Homo sapiens
  misc_RNA (1)...(19): siRNA sense strand
ucaggaauauggacagaag

SEQ ID NO: 968937 - RNA, 19 nt, Homo sapiens
  misc_RNA (1)...(19): siRNA sense strand
gaagucagcgugggucaug

SEQ ID NO: 968938 - RNA, 19 nt, Homo sapiens
  misc_RNA (1)...(19): siRNA sense strand
ugaugugucucaguuugua

SEQ ID NO: 968939 - RNA, 19 nt, Homo sapiens
  misc_RNA (1)...(19): siRNA sense strand
acacaagccauaugaguau

SEQ ID NO: 968940 - RNA, 19 nt, Homo sapiens
  misc_RNA (1)...(19): siRNA sense strand
ggggaaaccuuaugauugu

SEQ ID NO: 968941 - RNA, 19 nt, Homo sapiens
  misc_RNA (1)...(19): siRNA sense strand
uaucuuauccacaaacgaa

SEQ ID NO: 968942 - RNA, 19 nt, Homo sapiens
  misc_RNA (1)...(19): siRNA sense strand
gacucacacuggagagaaa

SEQ ID NO: 968943 - RNA, 19 nt, Homo sapiens
  misc_RNA (1)...(19): siRNA sense strand
agagaagcccuaugaaugu

SEQ ID NO: 968944 - RNA, 19 nt, Homo sapiens
  misc_RNA (1)...(19): siRNA sense strand
gaagacacaggauaaugca

SEQ ID NO: 968945 - RNA, 19 nt, Homo sapiens
  misc_RNA (1)...(19): siRNA sense strand
ccagaugacaugcugaaga

SEQ ID NO: 968946 - RNA, 19 nt, Homo sapiens
  misc_RNA (1)...(19): siRNA sense strand
gaaaguaagaaagaucauc

SEQ ID NO: 968947 - RNA, 19 nt, Homo sapiens
  misc_RNA (1)...(19): siRNA sense strand
ucaucagcauggagaaauu

SEQ ID NO: 968948 - RNA, 19 nt, Homo sapiens
  misc_RNA (1)...(19): siRNA sense strand
ucgaauacaugaaagaacu

SEQ ID NO: 968949 - RNA, 19 nt, Homo sapiens
  misc_RNA (1)...(19): siRNA sense strand
acagaagccauauaaaugu

SEQ ID NO: 968950 - RNA, 19 nt, Homo sapiens
  misc_RNA (1)...(19): siRNA sense strand
acacuggacacaagccaua

SEQ ID NO: 968951 - RNA, 19 nt, Homo sapiens
  misc_RNA (1)...(19): siRNA sense strand
gaagcccuaugaauguaag

SEQ ID NO: 968952 - RNA, 19 nt, Homo sapiens
  misc_RNA (1)...(19): siRNA sense strand
gaucaucagcauggagaaa

SEQ ID NO: 968953 - RNA, 19 nt, Homo sapiens
  misc_RNA (1)...(19): siRNA sense strand
ggacucacacuggagagaa

SEQ ID NO: 968954 - RNA, 19 nt, Homo sapiens
  misc_RNA (1)...(19): siRNA sense strand
gccuugaugugucucaguu

SEQ ID NO: 968955 - RNA, 19 nt, Homo sapiens
  misc_RNA (1)...(19): siRNA sense strand
ggccaaggcgagaagauug

SEQ ID NO: 968956 - RNA, 19 nt, Homo sapiens
  misc_RNA (1)...(19): siRNA sense strand
gaaaggccaaggcgagaag

SEQ ID NO: 968957 - RNA, 19 nt, Homo sapiens
  misc_RNA (1)...(19): siRNA sense strand
gaacacauggaaggacuca

SEQ ID NO: 968958 - RNA, 19 nt, Homo sapiens
  misc_RNA (1)...(19): siRNA sense strand
gauaaugcacaguggagau

SEQ ID NO: 968959 - RNA, 19 nt, Homo sapiens
  misc_RNA (1)...(19): siRNA sense strand
cguucgauaucaugaaaga

SEQ ID NO: 968960 - RNA, 19 nt, Homo sapiens
  misc_RNA (1)...(19): siRNA sense strand
acacuggagagaagccuua

SEQ ID NO: 968961 - RNA, 19 nt, Homo sapiens
  misc_RNA (1)...(19): siRNA sense strand
agauggacccuacaaaugu

SEQ ID NO: 968962 - RNA, 19 nt, Homo sapiens
  misc_RNA (1)...(19): siRNA sense strand
ccauaugaguaucaggaau

SEQ ID NO: 968963 - RNA, 19 nt, Homo sapiens
  misc_RNA (1)...(19): siRNA sense strand
gcacauaaaauaacucaca

SEQ ID NO: 968964 - RNA, 19 nt, Homo sapiens
  misc_RNA (1)...(19): siRNA sense strand
cuggagagaagccuuauga

SEQ ID NO: 968965 - RNA, 19 nt, Homo sapiens
  misc_RNA (1)...(19): siRNA sense strand
ucagugaucuccccuacuu

SEQ ID NO: 968966 - RNA, 19 nt, Homo sapiens
  misc_RNA (1)...(19): siRNA sense strand
gccuuuguuucuuucaauu

SEQ ID NO: 968967 - RNA, 19 nt, Homo sapiens
  misc_RNA (1)...(19): siRNA sense strand
guucaagcauucgaagaca

SEQ ID NO: 968968 - RNA, 19 nt, Homo sapiens
  misc_RNA (1)...(19): siRNA sense strand
cuugaugugucucaguuug

SEQ ID NO: 968969 - RNA, 19 nt, Homo sapiens
  misc_RNA (1)...(19): siRNA sense strand
cccuguagcuccaacacuu

SEQ ID NO: 968970 - RNA, 19 nt, Homo sapiens
  misc_RNA (1)...(19): siRNA sense strand
uguaaacaaugugguaaag

SEQ ID NO: 968971 - RNA, 19 nt, Homo sapiens
  misc_RNA (1)...(19): siRNA sense strand
ugggaaagccuucagaucu

SEQ ID NO: 968972 - RNA, 19 nt, Homo sapiens
  misc_RNA (1)...(19): siRNA sense strand
uaucaggaauauggacaga

SEQ ID NO: 968973 - RNA, 19 nt, Homo sapiens
  misc_RNA (1)...(19): siRNA sense strand
ucugguagccuucgaauac

SEQ ID NO: 968974 - RNA, 19 nt, Homo sapiens
  misc_RNA (1)...(19): siRNA sense strand
acacaugaaugggcucaca

SEQ ID NO: 968975 - RNA, 19 nt, Homo sapiens
  misc_RNA (1)...(19): siRNA sense strand
caucagcauggagaaauuu

SEQ ID NO: 968976 - RNA, 19 nt, Homo sapiens
  misc_RNA (1)...(19): siRNA sense strand
cuggagagaagcccuauga

SEQ ID NO: 968977 - RNA, 19 nt, Homo sapiens
  misc_RNA (1)...(19): siRNA sense strand
acacuggagagaaaccaua

SEQ ID NO: 968978 - RNA, 19 nt, Homo sapiens
  misc_RNA (1)...(19): siRNA sense strand
gagcugacacuggacacaa

SEQ ID NO: 968979 - RNA, 19 nt, Homo sapiens
  misc_RNA (1)...(19): siRNA sense strand
cgaagacacaggauaaugc

SEQ ID NO: 968980 - RNA, 19 nt, Homo sapiens
  misc_RNA (1)...(19): siRNA sense strand
uguaaacagugugguaaag

SEQ ID NO: 968981 - RNA, 19 nt, Homo sapiens
  misc_RNA (1)...(19): siRNA sense strand
aaggcgagaagauugcuua

SEQ ID NO: 968982 - RNA, 19 nt, Homo sapiens
  misc_RNA (1)...(19): siRNA sense strand
agaaacccuaugaauguaa

SEQ ID NO: 968983 - RNA, 19 nt, Homo sapiens
  misc_RNA (1)...(19): siRNA sense strand
agaagccguaugaauguaa

SEQ ID NO: 968984 - RNA, 19 nt, Homo sapiens
  misc_RNA (1)...(19): siRNA sense strand
cuaugaauguaagcaaugu

SEQ ID NO: 968985 - RNA, 19 nt, Homo sapiens
  misc_RNA (1)...(19): siRNA sense strand
uccguucgauaucaugaaa

SEQ ID NO: 968986 - RNA, 19 nt, Homo sapiens
  misc_RNA (1)...(19): siRNA sense strand
gcuguaugcuaccguauua

SEQ ID NO: 968987 - RNA, 19 nt, Homo sapiens
  misc_RNA (1)...(19): siRNA sense strand
caugaaugcugaaauguuu

SEQ ID NO: 968988 - RNA, 19 nt, Homo sapiens
  misc_RNA (1)...(19): siRNA sense strand
ucacaugaaugcugaaaug

SEQ ID NO: 968989 - RNA, 19 nt, Homo sapiens
  misc_RNA (1)...(19): siRNA sense strand
gaagagaaggagcaauuca

SEQ ID NO: 968990 - RNA, 19 nt, Homo sapiens
  misc_RNA (1)...(19): siRNA sense strand
gguaugcacccauguuuga

SEQ ID NO: 968991 - RNA, 19 nt, Homo sapiens
  misc_RNA (1)...(19): siRNA sense strand
gugaagagaaggagcaauu

SEQ ID NO: 968992 - RNA, 19 nt, Homo sapiens
  misc_RNA (1)...(19): siRNA sense strand
caaccgugcccgaauggua

SEQ ID NO: 968993 - RNA, 19 nt, Homo sapiens
  misc_RNA (1)...(19): siRNA sense strand
cacacuaccugaugucaug

SEQ ID NO: 968994 - RNA, 19 nt, Homo sapiens
  misc_RNA (1)...(19): siRNA sense strand
ggaugcaagugaagaccuu

SEQ ID NO: 968995 - RNA, 19 nt, Homo sapiens
  misc_RNA (1)...(19): siRNA sense strand
caaaagaggagaagugauu

SEQ ID NO: 968996 - RNA, 19 nt, Homo sapiens
  misc_RNA (1)...(19): siRNA sense strand
ggaggacugcuguaugcua

SEQ ID NO: 968997 - RNA, 19 nt, Homo sapiens
  misc_RNA (1)...(19): siRNA sense strand
ggaacacauuggacucauc

SEQ ID NO: 968998 - RNA, 19 nt, Homo sapiens
  misc_RNA (1)...(19): siRNA sense strand
gagaaggagcaauucagaa

SEQ ID NO: 968999 - RNA, 19 nt, Homo sapiens
  misc_RNA (1)...(19): siRNA sense strand
gauaugccaugaaguuuug

SEQ ID NO: 969000 - RNA, 19 nt, Homo sapiens
  misc_RNA (1)...(19): siRNA sense strand
gaacacauuggacucaucu

SEQ ID NO: 969001 - RNA, 19 nt, Homo sapiens
  misc_RNA (1)...(19): siRNA sense strand
gaaaguccgccugcagaga

SEQ ID NO: 969002 - RNA, 19 nt, Homo sapiens
  misc_RNA (1)...(19): siRNA sense strand
guggaggcuuacagugaua

SEQ ID NO: 969003 - RNA, 19 nt, Homo sapiens
  misc_RNA (1)...(19): siRNA sense strand
cugcagagaucuuagaacu

SEQ ID NO: 969004 - RNA, 19 nt, Homo sapiens
  misc_RNA (1)...(19): siRNA sense strand
guccaccuauugugauuau

SEQ ID NO: 969005 - RNA, 19 nt, Homo sapiens
  misc_RNA (1)...(19): siRNA sense strand
ccagugggauaugccauga

SEQ ID NO: 969006 - RNA, 19 nt, Homo sapiens
  misc_RNA (1)...(19): siRNA sense strand
gaaaauaaccauccacaac

SEQ ID NO: 969007 - RNA, 19 nt, Homo sapiens
  misc_RNA (1)...(19): siRNA sense strand
cugcuucccuugauguuug

SEQ ID NO: 969008 - RNA, 19 nt, Homo sapiens
  misc_RNA (1)...(19): siRNA sense strand
guacaaaggcgaguauacu

SEQ ID NO: 969009 - RNA, 19 nt, Homo sapiens
  misc_RNA (1)...(19): siRNA sense strand
uauccuagcugggaacaca

SEQ ID NO: 969010 - RNA, 19 nt, Homo sapiens
  misc_RNA (1)...(19): siRNA sense strand
uacaaaggcgaguauacua

SEQ ID NO: 969011 - RNA, 19 nt, Homo sapiens
  misc_RNA (1)...(19): siRNA sense strand
acauuggacucaucugugu

SEQ ID NO: 969012 - RNA, 19 nt, Homo sapiens
  misc_RNA (1)...(19): siRNA sense strand
gagcgacuuuauccagauc

SEQ ID NO: 969013 - RNA, 19 nt, Homo sapiens
  misc_RNA (1)...(19): siRNA sense strand
gggauaugccaugaaguuu

SEQ ID NO: 969014 - RNA, 19 nt, Homo sapiens
  misc_RNA (1)...(19): siRNA sense strand
caguggaggcuuacaguga

SEQ ID NO: 969015 - RNA, 19 nt, Homo sapiens
  misc_RNA (1)...(19): siRNA sense strand
acaaaggcgaguauacuau

SEQ ID NO: 969016 - RNA, 19 nt, Homo sapiens
  misc_RNA (1)...(19): siRNA sense strand
ggguccaccuauugugauu

SEQ ID NO: 969017 - RNA, 19 nt, Homo sapiens
  misc_RNA (1)...(19): siRNA sense strand
cagguaugcacccauguuu

SEQ ID NO: 969018 - RNA, 19 nt, Homo sapiens
  misc_RNA (1)...(19): siRNA sense strand
ugggauaugccaugaaguu

SEQ ID NO: 969019 - RNA, 19 nt, Homo sapiens
  misc_RNA (1)...(19): siRNA sense strand
aaauaaccauccacaacag

SEQ ID NO: 969020 - RNA, 19 nt, Homo sapiens
  misc_RNA (1)...(19): siRNA sense strand
ccgcaaugggcauguuuaa

SEQ ID NO: 969021 - RNA, 19 nt, Homo sapiens
  misc_RNA (1)...(19): siRNA sense strand
agagaaggagcaauucaga

SEQ ID NO: 969022 - RNA, 19 nt, Homo sapiens
  misc_RNA (1)...(19): siRNA sense strand
ccaggcugcuucccuugau

SEQ ID NO: 969023 - RNA, 19 nt, Homo sapiens
  misc_RNA (1)...(19): siRNA sense strand
aaagaggagaagugauuga

SEQ ID NO: 969024 - RNA, 19 nt, Homo sapiens
  misc_RNA (1)...(19): siRNA sense strand
ggauaugccaugaaguuuu

SEQ ID NO: 969025 - RNA, 19 nt, Homo sapiens
  misc_RNA (1)...(19): siRNA sense strand
gguaacaaugggcaucguu

SEQ ID NO: 969026 - RNA, 19 nt, Homo sapiens
  misc_RNA (1)...(19): siRNA sense strand
gaaguuuugugaagagaag

SEQ ID NO: 969027 - RNA, 19 nt, Homo sapiens
  misc_RNA (1)...(19): siRNA sense strand
caucuguguuggaggaagu

SEQ ID NO: 969028 - RNA, 19 nt, Homo sapiens
  misc_RNA (1)...(19): siRNA sense strand
caccuauugugauuauaca

SEQ ID NO: 969029 - RNA, 19 nt, Homo sapiens
  misc_RNA (1)...(19): siRNA sense strand
gggaacacauuggacucau

SEQ ID NO: 969030 - RNA, 19 nt, Homo sapiens
  misc_RNA (1)...(19): siRNA sense strand
ccaccuauugugauuauac

SEQ ID NO: 969031 - RNA, 19 nt, Homo sapiens
  misc_RNA (1)...(19): siRNA sense strand
aaaguccgccugcagagau

SEQ ID NO: 969032 - RNA, 19 nt, Homo sapiens
  misc_RNA (1)...(19): siRNA sense strand
ucagguaugcacccauguu

SEQ ID NO: 969033 - RNA, 19 nt, Homo sapiens
  misc_RNA (1)...(19): siRNA sense strand
aaccgugcccgaaugguaa

SEQ ID NO: 969034 - RNA, 19 nt, Homo sapiens
  misc_RNA (1)...(19): siRNA sense strand
acacauuggacucaucugu

SEQ ID NO: 969035 - RNA, 19 nt, Homo sapiens
  misc_RNA (1)...(19): siRNA sense strand
aguggaggcuuacagugau

SEQ ID NO: 969036 - RNA, 19 nt, Homo sapiens
  misc_RNA (1)...(19): siRNA sense strand
gcccgaaugguaacaaugg

SEQ ID NO: 969037 - RNA, 19 nt, Homo sapiens
  misc_RNA (1)...(19): siRNA sense strand
gcacagagcuuucauuguu

SEQ ID NO: 969038 - RNA, 19 nt, Homo sapiens
  misc_RNA (1)...(19): siRNA sense strand
guaacaagcucaauuaaag

SEQ ID NO: 969039 - RNA, 19 nt, Homo sapiens
  misc_RNA (1)...(19): siRNA sense strand
gaaagaguauacacuuguu

SEQ ID NO: 969040 - RNA, 19 nt, Homo sapiens
  misc_RNA (1)...(19): siRNA sense strand
caacagagccuaaagaaag

SEQ ID NO: 969041 - RNA, 19 nt, Homo sapiens
  misc_RNA (1)...(19): siRNA sense strand
uaagaaacauggaacaguu

SEQ ID NO: 969042 - RNA, 19 nt, Homo sapiens
  misc_RNA (1)...(19): siRNA sense strand
gaaagaagagaaagaguau

SEQ ID NO: 969043 - RNA, 19 nt, Homo sapiens
  misc_RNA (1)...(19): siRNA sense strand
gagaaagaguauacacuug

SEQ ID NO: 969044 - RNA, 19 nt, Homo sapiens
  misc_RNA (1)...(19): siRNA sense strand
gcagaugucuacagugaau

SEQ ID NO: 969045 - RNA, 19 nt, Homo sapiens
  misc_RNA (1)...(19): siRNA sense strand
gaauauagagccagucuug

SEQ ID NO: 969046 - RNA, 19 nt, Homo sapiens
  misc_RNA (1)...(19): siRNA sense strand
ggacaagacauauuagaug

SEQ ID NO: 969047 - RNA, 19 nt, Homo sapiens
  misc_RNA (1)...(19): siRNA sense strand
cacaacaagucuuugcuua

SEQ ID NO: 969048 - RNA, 19 nt, Homo sapiens
  misc_RNA (1)...(19): siRNA sense strand
caaacaaccuauucaucaa

SEQ ID NO: 969049 - RNA, 19 nt, Homo sapiens
  misc_RNA (1)...(19): siRNA sense strand
guaaaucacagaacaaaug

SEQ ID NO: 969050 - RNA, 19 nt, Homo sapiens
  misc_RNA (1)...(19): siRNA sense strand
gaaauugccguggauauug

SEQ ID NO: 969051 - RNA, 19 nt, Homo sapiens
  misc_RNA (1)...(19): siRNA sense strand
aaggaacgauucacaaauu

SEQ ID NO: 969052 - RNA, 19 nt, Homo sapiens
  misc_RNA (1)...(19): siRNA sense strand
gaagagaagcugucgaauc

SEQ ID NO: 969053 - RNA, 19 nt, Homo sapiens
  misc_RNA (1)...(19): siRNA sense strand
gguacuuccuugaacauaa

SEQ ID NO: 969054 - RNA, 19 nt, Homo sapiens
  misc_RNA (1)...(19): siRNA sense strand
aagcaauucugaucaguuu

SEQ ID NO: 969055 - RNA, 19 nt, Homo sapiens
  misc_RNA (1)...(19): siRNA sense strand
gaacaaucucuuucaaaug

SEQ ID NO: 969056 - RNA, 19 nt, Homo sapiens
  misc_RNA (1)...(19): siRNA sense strand
ccaaacaaccuauucauca

SEQ ID NO: 969057 - RNA, 19 nt, Homo sapiens
  misc_RNA (1)...(19): siRNA sense strand
gcgaauaccaagagaauug

SEQ ID NO: 969058 - RNA, 19 nt, Homo sapiens
  misc_RNA (1)...(19): siRNA sense strand
gcaugcaauucuuauaaug

SEQ ID NO: 969059 - RNA, 19 nt, Homo sapiens
  misc_RNA (1)...(19): siRNA sense strand
gcacggaggaugggcuuua

SEQ ID NO: 969060 - RNA, 19 nt, Homo sapiens
  misc_RNA (1)...(19): siRNA sense strand
gaacgauucacaaauuaug

SEQ ID NO: 969061 - RNA, 19 nt, Homo sapiens
  misc_RNA (1)...(19): siRNA sense strand
uuucauggcuguucucuau

SEQ ID NO: 969062 - RNA, 19 nt, Homo sapiens
  misc_RNA (1)...(19): siRNA sense strand
gaucaucucuggguguugu

SEQ ID NO: 969063 - RNA, 19 nt, Homo sapiens
  misc_RNA (1)...(19): siRNA sense strand
ggacagcaacagagccuaa

SEQ ID NO: 969064 - RNA, 19 nt, Homo sapiens
  misc_RNA (1)...(19): siRNA sense strand
ggacauaacgcaggacaau

SEQ ID NO: 969065 - RNA, 19 nt, Homo sapiens
  misc_RNA (1)...(19): siRNA sense strand
ggaaaucgugccaguaugu

SEQ ID NO: 969066 - RNA, 19 nt, Homo sapiens
  misc_RNA (1)...(19): siRNA sense strand
caauuaaagugcaaggaau

SEQ ID NO: 969067 - RNA, 19 nt, Homo sapiens
  misc_RNA (1)...(19): siRNA sense strand
guacuuccuugaacauaau

SEQ ID NO: 969068 - RNA, 19 nt, Homo sapiens
  misc_RNA (1)...(19): siRNA sense strand
caacaagucuuugcuuacu

SEQ ID NO: 969069 - RNA, 19 nt, Homo sapiens
  misc_RNA (1)...(19): siRNA sense strand
caauguagcuuuuaacuca

SEQ ID NO: 969070 - RNA, 19 nt, Homo sapiens
  misc_RNA (1)...(19): siRNA sense strand
agaaagaagagaaagagua

SEQ ID NO: 969071 - RNA, 19 nt, Homo sapiens
  misc_RNA (1)...(19): siRNA sense strand
guugauaucccugaaagua

SEQ ID NO: 969072 - RNA, 19 nt, Homo sapiens
  misc_RNA (1)...(19): siRNA sense strand
cugcagaugucuacaguga

SEQ ID NO: 969073 - RNA, 19 nt, Homo sapiens
  misc_RNA (1)...(19): siRNA sense strand
aggaacgauucacaaauua

SEQ ID NO: 969074 - RNA, 19 nt, Homo sapiens
  misc_RNA (1)...(19): siRNA sense strand
gguagcugaucgucuguuu

SEQ ID NO: 969075 - RNA, 19 nt, Homo sapiens
  misc_RNA (1)...(19): siRNA sense strand
gcaacagagccuaaagaaa

SEQ ID NO: 969076 - RNA, 19 nt, Homo sapiens
  misc_RNA (1)...(19): siRNA sense strand
ggccaaguauacagaaaga

SEQ ID NO: 969077 - RNA, 19 nt, Homo sapiens
  misc_RNA (1)...(19): siRNA sense strand
agcaacaacucucaaugua

SEQ ID NO: 969078 - RNA, 19 nt, Homo sapiens
  misc_RNA (1)...(19): siRNA sense strand
ggcaagccguccaguaaau

SEQ ID NO: 969079 - RNA, 19 nt, Homo sapiens
  misc_RNA (1)...(19): siRNA sense strand
gauagugugucuaagaaac

SEQ ID NO: 969080 - RNA, 19 nt, Homo sapiens
  misc_RNA (1)...(19): siRNA sense strand
cagagacgcugggcuucua

SEQ ID NO: 969081 - RNA, 19 nt, Homo sapiens
  misc_RNA (1)...(19): siRNA sense strand
aaacacagauccucaaaau

SEQ ID NO: 969082 - RNA, 19 nt, Homo sapiens
  misc_RNA (1)...(19): siRNA sense strand
uaacgcaggacaauucuga

SEQ ID NO: 969083 - RNA, 19 nt, Homo sapiens
  misc_RNA (1)...(19): siRNA sense strand
ggacagacguuugcuucag

SEQ ID NO: 969084 - RNA, 19 nt, Homo sapiens
  misc_RNA (1)...(19): siRNA sense strand
uauaaugguucaagcaaca

SEQ ID NO: 969085 - RNA, 19 nt, Homo sapiens
  misc_RNA (1)...(19): siRNA sense strand
uauucaggcuccucacuuu

SEQ ID NO: 969086 - RNA, 19 nt, Homo sapiens
  misc_RNA (1)...(19): siRNA sense strand
caggcaagccguccaguaa

SEQ ID NO: 969087 - RNA, 19 nt, Homo sapiens
  misc_RNA (1)...(19): siRNA sense strand
caugauguaccaccugaua

SEQ ID NO: 969088 - RNA, 19 nt, Homo sapiens
  misc_RNA (1)...(19): siRNA sense strand
gcccaggugugugacauuu

SEQ ID NO: 969089 - RNA, 19 nt, Homo sapiens
  misc_RNA (1)...(19): siRNA sense strand
uauguugacuacuccauga

SEQ ID NO: 969090 - RNA, 19 nt, Homo sapiens
  misc_RNA (1)...(19): siRNA sense strand
gaaggaagccaaaauggaa

SEQ ID NO: 969091 - RNA, 19 nt, Homo sapiens
  misc_RNA (1)...(19): siRNA sense strand
acaagucuuugcuuacuau

SEQ ID NO: 969092 - RNA, 19 nt, Homo sapiens
  misc_RNA (1)...(19): siRNA sense strand
gaggguacuuccuugaaca

SEQ ID NO: 969093 - RNA, 19 nt, Homo sapiens
  misc_RNA (1)...(19): siRNA sense strand
ggaacgauucacaaauuau

SEQ ID NO: 969094 - RNA, 19 nt, Homo sapiens
  misc_RNA (1)...(19): siRNA sense strand
aagagaagcugucgaaucc

SEQ ID NO: 969095 - RNA, 19 nt, Homo sapiens
  misc_RNA (1)...(19): siRNA sense strand
uuacugauagugugucuaa

SEQ ID NO: 969096 - RNA, 19 nt, Homo sapiens
  misc_RNA (1)...(19): siRNA sense strand
gcaacaacucucaauguag

SEQ ID NO: 969097 - RNA, 19 nt, Homo sapiens
  misc_RNA (1)...(19): siRNA sense strand
gaggccaaguauacagaaa

SEQ ID NO: 969098 - RNA, 19 nt, Homo sapiens
  misc_RNA (1)...(19): siRNA sense strand
cauaaugaggccaaguaua

SEQ ID NO: 969099 - RNA, 19 nt, Homo sapiens
  misc_RNA (1)...(19): siRNA sense strand
uaugguaauugcaucagaa

SEQ ID NO: 969100 - RNA, 19 nt, Homo sapiens
  misc_RNA (1)...(19): siRNA sense strand
uaucauaccauuacuugug

SEQ ID NO: 969101 - RNA, 19 nt, Homo sapiens
  misc_RNA (1)...(19): siRNA sense strand
ucaauuaaagugcaaggaa

SEQ ID NO: 969102 - RNA, 19 nt, Homo sapiens
  misc_RNA (1)...(19): siRNA sense strand
gauauuaaggaacgauuca

SEQ ID NO: 969103 - RNA, 19 nt, Homo sapiens
  misc_RNA (1)...(19): siRNA sense strand
acagagcuuucauuguuga

SEQ ID NO: 969104 - RNA, 19 nt, Homo sapiens
  misc_RNA (1)...(19): siRNA sense strand
ucaaggccuuuccacagaa

SEQ ID NO: 969105 - RNA, 19 nt, Homo sapiens
  misc_RNA (1)...(19): siRNA sense strand
gugucauacucuucuauuu

SEQ ID NO: 969106 - RNA, 19 nt, Homo sapiens
  misc_RNA (1)...(19): siRNA sense strand
cugauagugugucuaagaa

SEQ ID NO: 969107 - RNA, 19 nt, Homo sapiens
  misc_RNA (1)...(19): siRNA sense strand
ucaucaagcucuacaucau

SEQ ID NO: 969108 - RNA, 19 nt, Homo sapiens
  misc_RNA (1)...(19): siRNA sense strand
gggaaaucgugccaguaug

SEQ ID NO: 969109 - RNA, 19 nt, Homo sapiens
  misc_RNA (1)...(19): siRNA sense strand
gagccagucuugcuuuuga

SEQ ID NO: 969110 - RNA, 19 nt, Homo sapiens
  misc_RNA (1)...(19): siRNA sense strand
uuaaggaacgauucacaaa

SEQ ID NO: 969111 - RNA, 19 nt, Homo sapiens
  misc_RNA (1)...(19): siRNA sense strand
gacaagcaauucugaucag

SEQ ID NO: 969112 - RNA, 19 nt, Homo sapiens
  misc_RNA (1)...(19): siRNA sense strand
ucacagaacaaauguaaac

SEQ ID NO: 969113 - RNA, 19 nt, Homo sapiens
  misc_RNA (1)...(19): siRNA sense strand
cugcuuccuuuaagaguuu

SEQ ID NO: 969114 - RNA, 19 nt, Homo sapiens
  misc_RNA (1)...(19): siRNA sense strand
agaaauugccguggauauu

SEQ ID NO: 969115 - RNA, 19 nt, Homo sapiens
  misc_RNA (1)...(19): siRNA sense strand
guaugguaauugcaucaga

SEQ ID NO: 969116 - RNA, 19 nt, Homo sapiens
  misc_RNA (1)...(19): siRNA sense strand
agagaaagaguauacacuu

SEQ ID NO: 969117 - RNA, 19 nt, Homo sapiens
  misc_RNA (1)...(19): siRNA sense strand
caaguauacagaaagaaga

SEQ ID NO: 969118 - RNA, 19 nt, Homo sapiens
  misc_RNA (1)...(19): siRNA sense strand
ucauggcuguucucuaugu

SEQ ID NO: 969119 - RNA, 19 nt, Homo sapiens
  misc_RNA (1)...(19): siRNA sense strand
aacagagccuaaagaaaga

SEQ ID NO: 969120 - RNA, 19 nt, Homo sapiens
  misc_RNA (1)...(19): siRNA sense strand
cacagagcuuucauuguug

SEQ ID NO: 969121 - RNA, 19 nt, Homo sapiens
  misc_RNA (1)...(19): siRNA sense strand
gaugcacuauguugacuac

SEQ ID NO: 969122 - RNA, 19 nt, Homo sapiens
  misc_RNA (1)...(19): siRNA sense strand
ucccugaaaguacuuaaua

SEQ ID NO: 969123 - RNA, 19 nt, Homo sapiens
  misc_RNA (1)...(19): siRNA sense strand
uaaggaacgauucacaaau

SEQ ID NO: 969124 - RNA, 19 nt, Homo sapiens
  misc_RNA (1)...(19): siRNA sense strand
uaaaggaaguguuuucaag

SEQ ID NO: 969125 - RNA, 19 nt, Homo sapiens
  misc_RNA (1)...(19): siRNA sense strand
gaaguguuuucaagaaguu

SEQ ID NO: 969126 - RNA, 19 nt, Homo sapiens
  misc_RNA (1)...(19): siRNA sense strand
ggguugauaucccugaaag

SEQ ID NO: 969127 - RNA, 19 nt, Homo sapiens
  misc_RNA (1)...(19): siRNA sense strand
aaauugccguggauauugu

SEQ ID NO: 969128 - RNA, 19 nt, Homo sapiens
  misc_RNA (1)...(19): siRNA sense strand
gaacaguuuucuuggaauc

SEQ ID NO: 969129 - RNA, 19 nt, Homo sapiens
  misc_RNA (1)...(19): siRNA sense strand
caaucucuuucaaauguca

SEQ ID NO: 969130 - RNA, 19 nt, Homo sapiens
  misc_RNA (1)...(19): siRNA sense strand
auaaugaggccaaguauac

SEQ ID NO: 969131 - RNA, 19 nt, Homo sapiens
  misc_RNA (1)...(19): siRNA sense strand
acauaacgcaggacaauuc

SEQ ID NO: 969132 - RNA, 19 nt, Homo sapiens
  misc_RNA (1)...(19): siRNA sense strand
caagcaauucugaucaguu

SEQ ID NO: 969133 - RNA, 19 nt, Homo sapiens
  misc_RNA (1)...(19): siRNA sense strand
ugacaagcaauucugauca

SEQ ID NO: 969134 - RNA, 19 nt, Homo sapiens
  misc_RNA (1)...(19): siRNA sense strand
cucaaggccuuuccacaga

SEQ ID NO: 969135 - RNA, 19 nt, Homo sapiens
  misc_RNA (1)...(19): siRNA sense strand
gaagagaaagaguauacac

SEQ ID NO: 969136 - RNA, 19 nt, Homo sapiens
  misc_RNA (1)...(19): siRNA sense strand
caaaugucaaauagcgaua

SEQ ID NO: 969137 - RNA, 19 nt, Homo sapiens
  misc_RNA (1)...(19): siRNA sense strand
gaacuuggauggugaugug

SEQ ID NO: 969138 - RNA, 19 nt, Homo sapiens
  misc_RNA (1)...(19): siRNA sense strand
gaggacgggcucauuauua

SEQ ID NO: 969139 - RNA, 19 nt, Homo sapiens
  misc_RNA (1)...(19): siRNA sense strand
uuaaagcucuugacaguga

SEQ ID NO: 969140 - RNA, 19 nt, Homo sapiens
  misc_RNA (1)...(19): siRNA sense strand
gauggaaucuccuuugcaa

SEQ ID NO: 969141 - RNA, 19 nt, Homo sapiens
  misc_RNA (1)...(19): siRNA sense strand
ggaaaccuauuacuacuac

SEQ ID NO: 969142 - RNA, 19 nt, Homo sapiens
  misc_RNA (1)...(19): siRNA sense strand
ggauauugaccuuaaauug

SEQ ID NO: 969143 - RNA, 19 nt, Homo sapiens
  misc_RNA (1)...(19): siRNA sense strand
gaccuuaaauuggaucuug

SEQ ID NO: 969144 - RNA, 19 nt, Homo sapiens
  misc_RNA (1)...(19): siRNA sense strand
ugaaucaaaugcugaacuu

SEQ ID NO: 969145 - RNA, 19 nt, Homo sapiens
  misc_RNA (1)...(19): siRNA sense strand
gagaguuugugguggcuuu

SEQ ID NO: 969146 - RNA, 19 nt, Homo sapiens
  misc_RNA (1)...(19): siRNA sense strand
gaaaaugcauuauccagau

SEQ ID NO: 969147 - RNA, 19 nt, Homo sapiens
  misc_RNA (1)...(19): siRNA sense strand
gcaaagaacuggggaugaa

SEQ ID NO: 969148 - RNA, 19 nt, Homo sapiens
  misc_RNA (1)...(19): siRNA sense strand
uaaagugguugaaggaaca

SEQ ID NO: 969149 - RNA, 19 nt, Homo sapiens
  misc_RNA (1)...(19): siRNA sense strand
gagggugacugauggaauc

SEQ ID NO: 969150 - RNA, 19 nt, Homo sapiens
  misc_RNA (1)...(19): siRNA sense strand
agucauaccugaaacaauc

SEQ ID NO: 969151 - RNA, 19 nt, Homo sapiens
  misc_RNA (1)...(19): siRNA sense strand
gauauugaccuuaaauugg

SEQ ID NO: 969152 - RNA, 19 nt, Homo sapiens
  misc_RNA (1)...(19): siRNA sense strand
caggaggaauuacaacuuc

SEQ ID NO: 969153 - RNA, 19 nt, Homo sapiens
  misc_RNA (1)...(19): siRNA sense strand
auugagagaucacgaugua

SEQ ID NO: 969154 - RNA, 19 nt, Homo sapiens
  misc_RNA (1)...(19): siRNA sense strand
gagagaucacgauguaauu

SEQ ID NO: 969155 - RNA, 19 nt, Homo sapiens
  misc_RNA (1)...(19): siRNA sense strand
caacauaaaugggaaaccu

SEQ ID NO: 969156 - RNA, 19 nt, Homo sapiens
  misc_RNA (1)...(19): siRNA sense strand
gaaggaacagcugcucaaa

SEQ ID NO: 969157 - RNA, 19 nt, Homo sapiens
  misc_RNA (1)...(19): siRNA sense strand
uguuaaagcucuugacagu

SEQ ID NO: 969158 - RNA, 19 nt, Homo sapiens
  misc_RNA (1)...(19): siRNA sense strand
uuaugaagcuguugucaag

SEQ ID NO: 969159 - RNA, 19 nt, Homo sapiens
  misc_RNA (1)...(19): siRNA sense strand
ggaaccagcaguggauuga

SEQ ID NO: 969160 - RNA, 19 nt, Homo sapiens
  misc_RNA (1)...(19): siRNA sense strand
uggaaucuccuuugcaauu

SEQ ID NO: 969161 - RNA, 19 nt, Homo sapiens
  misc_RNA (1)...(19): siRNA sense strand
ugaacuuccuguacugaug

SEQ ID NO: 969162 - RNA, 19 nt, Homo sapiens
  misc_RNA (1)...(19): siRNA sense strand
gggaaaccuauuacuacua

SEQ ID NO: 969163 - RNA, 19 nt, Homo sapiens
  misc_RNA (1)...(19): siRNA sense strand
caguggcucuggguucaua

SEQ ID NO: 969164 - RNA, 19 nt, Homo sapiens
  misc_RNA (1)...(19): siRNA sense strand
gaagcuguugucaaggaua

SEQ ID NO: 969165 - RNA, 19 nt, Homo sapiens
  misc_RNA (1)...(19): siRNA sense strand
gaugaaaggaaaggcguuu

SEQ ID NO: 969166 - RNA, 19 nt, Homo sapiens
  misc_RNA (1)...(19): siRNA sense strand
ccuucgggcuggagaguuu

SEQ ID NO: 969167 - RNA, 19 nt, Homo sapiens
  misc_RNA (1)...(19): siRNA sense strand
ugagagaucacgauguaau

SEQ ID NO: 969168 - RNA, 19 nt, Homo sapiens
  misc_RNA (1)...(19): siRNA sense strand
ggaauugucagcaccaaac

SEQ ID NO: 969169 - RNA, 19 nt, Homo sapiens
  misc_RNA (1)...(19): siRNA sense strand
auaauuugcuccugacagu

SEQ ID NO: 969170 - RNA, 19 nt, Homo sapiens
  misc_RNA (1)...(19): siRNA sense strand
gagaucacgauguaauugu

SEQ ID NO: 969171 - RNA, 19 nt, Homo sapiens
  misc_RNA (1)...(19): siRNA sense strand
aaugggaaaccuauuacua

SEQ ID NO: 969172 - RNA, 19 nt, Homo sapiens
  misc_RNA (1)...(19): siRNA sense strand
guacugaugcugggaagau

SEQ ID NO: 969173 - RNA, 19 nt, Homo sapiens
  misc_RNA (1)...(19): siRNA sense strand
aggaacagcugcucaaagc

SEQ ID NO: 969174 - RNA, 19 nt, Homo sapiens
  misc_RNA (1)...(19): siRNA sense strand
gagcaccagaugaaaggaa

SEQ ID NO: 969175 - RNA, 19 nt, Homo sapiens
  misc_RNA (1)...(19): siRNA sense strand
cacagcuacugcaggaauu

SEQ ID NO: 969176 - RNA, 19 nt, Homo sapiens
  misc_RNA (1)...(19): siRNA sense strand
gugguccucuggugaacuu

SEQ ID NO: 969177 - RNA, 19 nt, Homo sapiens
  misc_RNA (1)...(19): siRNA sense strand
ggauucagauauggacuac

SEQ ID NO: 969178 - RNA, 19 nt, Homo sapiens
  misc_RNA (1)...(19): siRNA sense strand
aagcuguugucaaggauau

SEQ ID NO: 969179 - RNA, 19 nt, Homo sapiens
  misc_RNA (1)...(19): siRNA sense strand
ccagauuucccugauguga

SEQ ID NO: 969180 - RNA, 19 nt, Homo sapiens
  misc_RNA (1)...(19): siRNA sense strand
gaacuggggaugaaggauu

SEQ ID NO: 969181 - RNA, 19 nt, Homo sapiens
  misc_RNA (1)...(19): siRNA sense strand
uugcggugauuaagauuga

SEQ ID NO: 969182 - RNA, 19 nt, Homo sapiens
  misc_RNA (1)...(19): siRNA sense strand
agauuucccugaugugagu

SEQ ID NO: 969183 - RNA, 19 nt, Homo sapiens
  misc_RNA (1)...(19): siRNA sense strand
ugaaggaacagcugcucaa

SEQ ID NO: 969184 - RNA, 19 nt, Homo sapiens
  misc_RNA (1)...(19): siRNA sense strand
gagguggugcuccagaaug

SEQ ID NO: 969185 - RNA, 19 nt, Homo sapiens
  misc_RNA (1)...(19): siRNA sense strand
ugacagugauucccuuucc

SEQ ID NO: 969186 - RNA, 19 nt, Homo sapiens
  misc_RNA (1)...(19): siRNA sense strand
gaucacgauguaauuguca

SEQ ID NO: 969187 - RNA, 19 nt, Homo sapiens
  misc_RNA (1)...(19): siRNA sense strand
gaaauaucugggucugcaa

SEQ ID NO: 969188 - RNA, 19 nt, Homo sapiens
  misc_RNA (1)...(19): siRNA sense strand
ucaggaggaauuacaacuu

SEQ ID NO: 969189 - RNA, 19 nt, Homo sapiens
  misc_RNA (1)...(19): siRNA sense strand
guuaugaagcuguugucaa

SEQ ID NO: 969190 - RNA, 19 nt, Homo sapiens
  misc_RNA (1)...(19): siRNA sense strand
uaaaugggaaaccuauuac

SEQ ID NO: 969191 - RNA, 19 nt, Homo sapiens
  misc_RNA (1)...(19): siRNA sense strand
gaugugaguucugggguuu

SEQ ID NO: 969192 - RNA, 19 nt, Homo sapiens
  misc_RNA (1)...(19): siRNA sense strand
augaagcuguugucaagga

SEQ ID NO: 969193 - RNA, 19 nt, Homo sapiens
  misc_RNA (1)...(19): siRNA sense strand
cuuggauggugaugugauu

SEQ ID NO: 969194 - RNA, 19 nt, Homo sapiens
  misc_RNA (1)...(19): siRNA sense strand
cuauuacuacuacaacuga

SEQ ID NO: 969195 - RNA, 19 nt, Homo sapiens
  misc_RNA (1)...(19): siRNA sense strand
ggaggaauuacaacuucau

SEQ ID NO: 969196 - RNA, 19 nt, Homo sapiens
  misc_RNA (1)...(19): siRNA sense strand
aggacgggcucauuauuac

SEQ ID NO: 969197 - RNA, 19 nt, Homo sapiens
  misc_RNA (1)...(19): siRNA sense strand
uauuaccaaugcccauguu

SEQ ID NO: 969198 - RNA, 19 nt, Homo sapiens
  misc_RNA (1)...(19): siRNA sense strand
uacaguggcucuggguuca

SEQ ID NO: 969199 - RNA, 19 nt, Homo sapiens
  misc_RNA (1)...(19): siRNA sense strand
ccuuugcaauuccuucaga

SEQ ID NO: 969200 - RNA, 19 nt, Homo sapiens
  misc_RNA (1)...(19): siRNA sense strand
gaauugucagcaccaaaca

SEQ ID NO: 969201 - RNA, 19 nt, Homo sapiens
  misc_RNA (1)...(19): siRNA sense strand
uauccagauuucccugaug

SEQ ID NO: 969202 - RNA, 19 nt, Homo sapiens
  misc_RNA (1)...(19): siRNA sense strand
ucauugagggugacugaug

SEQ ID NO: 969203 - RNA, 19 nt, Homo sapiens
  misc_RNA (1)...(19): siRNA sense strand
aauuggaucuugcggugau

SEQ ID NO: 969204 - RNA, 19 nt, Homo sapiens
  misc_RNA (1)...(19): siRNA sense strand
gaaaccuauuacuacuaca

SEQ ID NO: 969205 - RNA, 19 nt, Homo sapiens
  misc_RNA (1)...(19): siRNA sense strand
ugggaaaccuauuacuacu

SEQ ID NO: 969206 - RNA, 19 nt, Homo sapiens
  misc_RNA (1)...(19): siRNA sense strand
cauaaaugggaaaccuauu

SEQ ID NO: 969207 - RNA, 19 nt, Homo sapiens
  misc_RNA (1)...(19): siRNA sense strand
acauaaaugggaaaccuau

SEQ ID NO: 969208 - RNA, 19 nt, Homo sapiens
  misc_RNA (1)...(19): siRNA sense strand
agagaucacgauguaauug

SEQ ID NO: 969209 - RNA, 19 nt, Homo sapiens
  misc_RNA (1)...(19): siRNA sense strand
cagaucgaguuaggcaguu

SEQ ID NO: 969210 - RNA, 19 nt, Homo sapiens
  misc_RNA (1)...(19): siRNA sense strand
acacagcuacugcaggaau

SEQ ID NO: 969211 - RNA, 19 nt, Homo sapiens
  misc_RNA (1)...(19): siRNA sense strand
auucagauauggacuacgu

SEQ ID NO: 969212 - RNA, 19 nt, Homo sapiens
  misc_RNA (1)...(19): siRNA sense strand
gcaaaugcugucccucacu

SEQ ID NO: 969213 - RNA, 19 nt, Homo sapiens
  misc_RNA (1)...(19): siRNA sense strand
aaauaucugggucugcaaa

SEQ ID NO: 969214 - RNA, 19 nt, Homo sapiens
  misc_RNA (1)...(19): siRNA sense strand
ucaggaaccagcaguggau

SEQ ID NO: 969215 - RNA, 19 nt, Homo sapiens
  misc_RNA (1)...(19): siRNA sense strand
gcuguugucaaggauauug

SEQ ID NO: 969216 - RNA, 19 nt, Homo sapiens
  misc_RNA (1)...(19): siRNA sense strand
gacagugauucccuuucca

SEQ ID NO: 969217 - RNA, 19 nt, Homo sapiens
  misc_RNA (1)...(19): siRNA sense strand
ugaagcuguugucaaggau

SEQ ID NO: 969218 - RNA, 19 nt, Homo sapiens
  misc_RNA (1)...(19): siRNA sense strand
gcgagggccugacuccaua

SEQ ID NO: 969219 - RNA, 19 nt, Homo sapiens
  misc_RNA (1)...(19): siRNA sense strand
gcaagguccugggcuacua

SEQ ID NO: 969220 - RNA, 19 nt, Homo sapiens
  misc_RNA (1)...(19): siRNA sense strand
caacaaaggacacuacauc

SEQ ID NO: 969221 - RNA, 19 nt, Homo sapiens
  misc_RNA (1)...(19): siRNA sense strand
caaaggacacuacaucaag

SEQ ID NO: 969222 - RNA, 19 nt, Homo sapiens
  misc_RNA (1)...(19): siRNA sense strand
gagcaacaguguguacaag

SEQ ID NO: 969223 - RNA, 19 nt, Homo sapiens
  misc_RNA (1)...(19): siRNA sense strand
gggcaggagugcaucaagu

SEQ ID NO: 969224 - RNA, 19 nt, Homo sapiens
  misc_RNA (1)...(19): siRNA sense strand
gagaggcgcugagcaacag

SEQ ID NO: 969225 - RNA, 19 nt, Homo sapiens
  misc_RNA (1)...(19): siRNA sense strand
gaguacaagugucccaagu

SEQ ID NO: 969226 - RNA, 19 nt, Homo sapiens
  misc_RNA (1)...(19): siRNA sense strand
ucaccgagcacuucucaga

SEQ ID NO: 969227 - RNA, 19 nt, Homo sapiens
  misc_RNA (1)...(19): siRNA sense strand
gcgcugagcaacagugugu

SEQ ID NO: 969228 - RNA, 19 nt, Homo sapiens
  misc_RNA (1)...(19): siRNA sense strand
gaacuccugggccaacaug

SEQ ID NO: 969229 - RNA, 19 nt, Homo sapiens
  misc_RNA (1)...(19): siRNA sense strand
ggagaggcgcugagcaaca

SEQ ID NO: 969230 - RNA, 19 nt, Homo sapiens
  misc_RNA (1)...(19): siRNA sense strand
ccaccugugcuucaacaaa

SEQ ID NO: 969231 - RNA, 19 nt, Homo sapiens
  misc_RNA (1)...(19): siRNA sense strand
caccugugcuucaacaaag

SEQ ID NO: 969232 - RNA, 19 nt, Homo sapiens
  misc_RNA (1)...(19): siRNA sense strand
acaaaggacacuacaucaa

SEQ ID NO: 969233 - RNA, 19 nt, Homo sapiens
  misc_RNA (1)...(19): siRNA sense strand
acaagugucccaagugcaa

SEQ ID NO: 969234 - RNA, 19 nt, Homo sapiens
  misc_RNA (1)...(19): siRNA sense strand
cagcaccucugcgagaagu

SEQ ID NO: 969235 - RNA, 19 nt, Homo sapiens
  misc_RNA (1)...(19): siRNA sense strand
cccuauggcucccucaaca

SEQ ID NO: 969236 - RNA, 19 nt, Homo sapiens
  misc_RNA (1)...(19): siRNA sense strand
ugucccaagugcaagagaa

SEQ ID NO: 969237 - RNA, 19 nt, Homo sapiens
  misc_RNA (1)...(19): siRNA sense strand
gcacuccagcuaucucaac

SEQ ID NO: 969238 - RNA, 19 nt, Homo sapiens
  misc_RNA (1)...(19): siRNA sense strand
ggcaggagugcaucaagug

SEQ ID NO: 969239 - RNA, 19 nt, Homo sapiens
  misc_RNA (1)...(19): siRNA sense strand
ugcaucaagugccacauca

SEQ ID NO: 969240 - RNA, 19 nt, Homo sapiens
  misc_RNA (1)...(19): siRNA sense strand
acacgaagauuccggauga

SEQ ID NO: 969241 - RNA, 19 nt, Homo sapiens
  misc_RNA (1)...(19): siRNA sense strand
gcacuacuuucucuuugga

SEQ ID NO: 969242 - RNA, 19 nt, Homo sapiens
  misc_RNA (1)...(19): siRNA sense strand
ggaaggcguggacuugcua

SEQ ID NO: 969243 - RNA, 19 nt, Homo sapiens
  misc_RNA (1)...(19): siRNA sense strand
gaagauuccggaugaggau

SEQ ID NO: 969244 - RNA, 19 nt, Homo sapiens
  misc_RNA (1)...(19): siRNA sense strand
gcuaggguuucucaucauc

SEQ ID NO: 969245 - RNA, 19 nt, Homo sapiens
  misc_RNA (1)...(19): siRNA sense strand
cggaugaggaugagaguga

SEQ ID NO: 969246 - RNA, 19 nt, Homo sapiens
  misc_RNA (1)...(19): siRNA sense strand
gcgaaaagcugggcagaca

SEQ ID NO: 969247 - RNA, 19 nt, Homo sapiens
  misc_RNA (1)...(19): siRNA sense strand
uugcuaggguuucucauca

SEQ ID NO: 969248 - RNA, 19 nt, Homo sapiens
  misc_RNA (1)...(19): siRNA sense strand
ggacgagcaggagagguuu

SEQ ID NO: 969249 - RNA, 19 nt, Homo sapiens
  misc_RNA (1)...(19): siRNA sense strand
gcgccaauguuugcuacga

SEQ ID NO: 969250 - RNA, 19 nt, Homo sapiens
  misc_RNA (1)...(19): siRNA sense strand
ggaugagagugaggugaca

SEQ ID NO: 969251 - RNA, 19 nt, Homo sapiens
  misc_RNA (1)...(19): siRNA sense strand
ugagagccaggaagucuga

SEQ ID NO: 969252 - RNA, 19 nt, Homo sapiens
  misc_RNA (1)...(19): siRNA sense strand
ggaugcuggugauugucuu

SEQ ID NO: 969253 - RNA, 19 nt, Homo sapiens
  misc_RNA (1)...(19): siRNA sense strand
gagcaggagagguuugucu

SEQ ID NO: 969254 - RNA, 19 nt, Homo sapiens
  misc_RNA (1)...(19): siRNA sense strand
gguuucucaucaucacauu

SEQ ID NO: 969255 - RNA, 19 nt, Homo sapiens
  misc_RNA (1)...(19): siRNA sense strand
agaagucccugcugaugcu

SEQ ID NO: 969256 - RNA, 19 nt, Homo sapiens
  misc_RNA (1)...(19): siRNA sense strand
ugucagggcacacgaagau

SEQ ID NO: 969257 - RNA, 19 nt, Homo sapiens
  misc_RNA (1)...(19): siRNA sense strand
uugcacuacuuucucuuug

SEQ ID NO: 969258 - RNA, 19 nt, Homo sapiens
  misc_RNA (1)...(19): siRNA sense strand
acuacuuucucuuuggauu

SEQ ID NO: 969259 - RNA, 19 nt, Homo sapiens
  misc_RNA (1)...(19): siRNA sense strand
gaagucugaguggguguga

SEQ ID NO: 969260 - RNA, 19 nt, Homo sapiens
  misc_RNA (1)...(19): siRNA sense strand
gggaugcgccaauguuugc

SEQ ID NO: 969261 - RNA, 19 nt, Homo sapiens
  misc_RNA (1)...(19): siRNA sense strand
ucagggcacacgaagauuc

SEQ ID NO: 969262 - RNA, 19 nt, Homo sapiens
  misc_RNA (1)...(19): siRNA sense strand
ugggaaagcucugguucgu

SEQ ID NO: 969263 - RNA, 19 nt, Homo sapiens
  misc_RNA (1)...(19): siRNA sense strand
caacaaacgugaaccgaaa

SEQ ID NO: 969264 - RNA, 19 nt, Homo sapiens
  misc_RNA (1)...(19): siRNA sense strand
gauagcaacuucaguguau

SEQ ID NO: 969265 - RNA, 19 nt, Homo sapiens
  misc_RNA (1)...(19): siRNA sense strand
gcccacagcugaagucuau

SEQ ID NO: 969266 - RNA, 19 nt, Homo sapiens
  misc_RNA (1)...(19): siRNA sense strand
gcuccgggcuaaaugaaua

SEQ ID NO: 969267 - RNA, 19 nt, Homo sapiens
  misc_RNA (1)...(19): siRNA sense strand
guacuuacauguucuuagu

SEQ ID NO: 969268 - RNA, 19 nt, Homo sapiens
  misc_RNA (1)...(19): siRNA sense strand
gugaagcacuugccagaaa

SEQ ID NO: 969269 - RNA, 19 nt, Homo sapiens
  misc_RNA (1)...(19): siRNA sense strand
ggacccacguuucaagauu

SEQ ID NO: 969270 - RNA, 19 nt, Homo sapiens
  misc_RNA (1)...(19): siRNA sense strand
cagcugaagucuauaauca

SEQ ID NO: 969271 - RNA, 19 nt, Homo sapiens
  misc_RNA (1)...(19): siRNA sense strand
gagcugagguaacauaugg

SEQ ID NO: 969272 - RNA, 19 nt, Homo sapiens
  misc_RNA (1)...(19): siRNA sense strand
guucuuaguuucugucauu

SEQ ID NO: 969273 - RNA, 19 nt, Homo sapiens
  misc_RNA (1)...(19): siRNA sense strand
gggauugaguguugcuaua

SEQ ID NO: 969274 - RNA, 19 nt, Homo sapiens
  misc_RNA (1)...(19): siRNA sense strand
guccuuaucuuggcuauuu

SEQ ID NO: 969275 - RNA, 19 nt, Homo sapiens
  misc_RNA (1)...(19): siRNA sense strand
uaucuucgguguuucaauu

SEQ ID NO: 969276 - RNA, 19 nt, Homo sapiens
  misc_RNA (1)...(19): siRNA sense strand
gguaacauauggcucuuau

SEQ ID NO: 969277 - RNA, 19 nt, Homo sapiens
  misc_RNA (1)...(19): siRNA sense strand
gggcugggauugaguguug

SEQ ID NO: 969278 - RNA, 19 nt, Homo sapiens
  misc_RNA (1)...(19): siRNA sense strand
cgaaauaucaguagucugu

SEQ ID NO: 969279 - RNA, 19 nt, Homo sapiens
  misc_RNA (1)...(19): siRNA sense strand
agaaagcucugcucucuag

SEQ ID NO: 969280 - RNA, 19 nt, Homo sapiens
  misc_RNA (1)...(19): siRNA sense strand
gcugaagucuauaaucaau

SEQ ID NO: 969281 - RNA, 19 nt, Homo sapiens
  misc_RNA (1)...(19): siRNA sense strand
gaaccgaaauaucaguagu

SEQ ID NO: 969282 - RNA, 19 nt, Homo sapiens
  misc_RNA (1)...(19): siRNA sense strand
ucaauuggcauucuggaua

SEQ ID NO: 969283 - RNA, 19 nt, Homo sapiens
  misc_RNA (1)...(19): siRNA sense strand
gacccacguuucaagauuu

SEQ ID NO: 969284 - RNA, 19 nt, Homo sapiens
  misc_RNA (1)...(19): siRNA sense strand
ugaaacgaaugauacaaug

SEQ ID NO: 969285 - RNA, 19 nt, Homo sapiens
  misc_RNA (1)...(19): siRNA sense strand
gaaacgaaugauacaauga

SEQ ID NO: 969286 - RNA, 19 nt, Homo sapiens
  misc_RNA (1)...(19): siRNA sense strand
caaaagggacuaacguuua

SEQ ID NO: 969287 - RNA, 19 nt, Homo sapiens
  misc_RNA (1)...(19): siRNA sense strand
gcugagacauuucgaagag

SEQ ID NO: 969288 - RNA, 19 nt, Homo sapiens
  misc_RNA (1)...(19): siRNA sense strand
ggucgugccuugggauauu

SEQ ID NO: 969289 - RNA, 19 nt, Homo sapiens
  misc_RNA (1)...(19): siRNA sense strand
gaaaugauugaaacgaaug

SEQ ID NO: 969290 - RNA, 19 nt, Homo sapiens
  misc_RNA (1)...(19): siRNA sense strand
gaaagagugaggaccagaa

SEQ ID NO: 969291 - RNA, 19 nt, Homo sapiens
  misc_RNA (1)...(19): siRNA sense strand
gaaccaugauuguguugag

SEQ ID NO: 969292 - RNA, 19 nt, Homo sapiens
  misc_RNA (1)...(19): siRNA sense strand
agaauuuacugugggcuua

SEQ ID NO: 969293 - RNA, 19 nt, Homo sapiens
  misc_RNA (1)...(19): siRNA sense strand
gucuuuaucuuguuccuuu

SEQ ID NO: 969294 - RNA, 19 nt, Homo sapiens
  misc_RNA (1)...(19): siRNA sense strand
ggauagcaacuucagugua

SEQ ID NO: 969295 - RNA, 19 nt, Homo sapiens
  misc_RNA (1)...(19): siRNA sense strand
ccacagcugaagucuauaa

SEQ ID NO: 969296 - RNA, 19 nt, Homo sapiens
  misc_RNA (1)...(19): siRNA sense strand
gcucuuauguuuucucauu

SEQ ID NO: 969297 - RNA, 19 nt, Homo sapiens
  misc_RNA (1)...(19): siRNA sense strand
aguagucugucuuucauuu

SEQ ID NO: 969298 - RNA, 19 nt, Homo sapiens
  misc_RNA (1)...(19): siRNA sense strand
uaucacaacgcccuucuuu

SEQ ID NO: 969299 - RNA, 19 nt, Homo sapiens
  misc_RNA (1)...(19): siRNA sense strand
uuucuuggauugagcagua

SEQ ID NO: 969300 - RNA, 19 nt, Homo sapiens
  misc_RNA (1)...(19): siRNA sense strand
gcaauauuacucacuguca

SEQ ID NO: 969301 - RNA, 19 nt, Homo sapiens
  misc_RNA (1)...(19): siRNA sense strand
uaucgguacuuacauguuc

SEQ ID NO: 969302 - RNA, 19 nt, Homo sapiens
  misc_RNA (1)...(19): siRNA sense strand
gcacugguguuugagucuu

SEQ ID NO: 969303 - RNA, 19 nt, Homo sapiens
  misc_RNA (1)...(19): siRNA sense strand
guggauuucuugucgaugu

SEQ ID NO: 969304 - RNA, 19 nt, Homo sapiens
  misc_RNA (1)...(19): siRNA sense strand
gcccuucuuugucuccuuu

SEQ ID NO: 969305 - RNA, 19 nt, Homo sapiens
  misc_RNA (1)...(19): siRNA sense strand
gaauagcucaaagcaagaa

SEQ ID NO: 969306 - RNA, 19 nt, Homo sapiens
  misc_RNA (1)...(19): siRNA sense strand
uaaagaauagcucaaagca

SEQ ID NO: 969307 - RNA, 19 nt, Homo sapiens
  misc_RNA (1)...(19): siRNA sense strand
caaaggagccccacauaug

SEQ ID NO: 969308 - RNA, 19 nt, Homo sapiens
  misc_RNA (1)...(19): siRNA sense strand
uugucgaugucaugaauua

SEQ ID NO: 969309 - RNA, 19 nt, Homo sapiens
  misc_RNA (1)...(19): siRNA sense strand
ucaguagucugucuuucau

SEQ ID NO: 969310 - RNA, 19 nt, Homo sapiens
  misc_RNA (1)...(19): siRNA sense strand
gcuaaaugaauaugaggaa

SEQ ID NO: 969311 - RNA, 19 nt, Homo sapiens
  misc_RNA (1)...(19): siRNA sense strand
gcaucaauagcuacuggua

SEQ ID NO: 969312 - RNA, 19 nt, Homo sapiens
  misc_RNA (1)...(19): siRNA sense strand
caauuggcauucuggauac

SEQ ID NO: 969313 - RNA, 19 nt, Homo sapiens
  misc_RNA (1)...(19): siRNA sense strand
gcacucaaccaaucaucug

SEQ ID NO: 969314 - RNA, 19 nt, Homo sapiens
  misc_RNA (1)...(19): siRNA sense strand
gugguaacguccuuaucuu

SEQ ID NO: 969315 - RNA, 19 nt, Homo sapiens
  misc_RNA (1)...(19): siRNA sense strand
caagacagcaauauuacuc

SEQ ID NO: 969316 - RNA, 19 nt, Homo sapiens
  misc_RNA (1)...(19): siRNA sense strand
caaggaaaauacccugauu

SEQ ID NO: 969317 - RNA, 19 nt, Homo sapiens
  misc_RNA (1)...(19): siRNA sense strand
ggcuauuccugcagucauu

SEQ ID NO: 969318 - RNA, 19 nt, Homo sapiens
  misc_RNA (1)...(19): siRNA sense strand
cgagugguguuucuuggau

SEQ ID NO: 969319 - RNA, 19 nt, Homo sapiens
  misc_RNA (1)...(19): siRNA sense strand
cccaauuugucucuggaua

SEQ ID NO: 969320 - RNA, 19 nt, Homo sapiens
  misc_RNA (1)...(19): siRNA sense strand
gauugaguguugcuauagu

SEQ ID NO: 969321 - RNA, 19 nt, Homo sapiens
  misc_RNA (1)...(19): siRNA sense strand
caauauuacucacugucau

SEQ ID NO: 969322 - RNA, 19 nt, Homo sapiens
  misc_RNA (1)...(19): siRNA sense strand
ucacugucaugaugccuau

SEQ ID NO: 969323 - RNA, 19 nt, Homo sapiens
  misc_RNA (1)...(19): siRNA sense strand
aauaugaggaagagaauga

SEQ ID NO: 969324 - RNA, 19 nt, Homo sapiens
  misc_RNA (1)...(19): siRNA sense strand
uggaguaccuaaugauaag

SEQ ID NO: 969325 - RNA, 19 nt, Homo sapiens
  misc_RNA (1)...(19): siRNA sense strand
gaagcucuguuuggaguac

SEQ ID NO: 969326 - RNA, 19 nt, Homo sapiens
  misc_RNA (1)...(19): siRNA sense strand
uggcuccacugcuagcuaa

SEQ ID NO: 969327 - RNA, 19 nt, Homo sapiens
  misc_RNA (1)...(19): siRNA sense strand
gcucugugauugguggauu

SEQ ID NO: 969328 - RNA, 19 nt, Homo sapiens
  misc_RNA (1)...(19): siRNA sense strand
aaucaauacccaucaaaug

SEQ ID NO: 969329 - RNA, 19 nt, Homo sapiens
  misc_RNA (1)...(19): siRNA sense strand
cauuggaauucuucaagga

SEQ ID NO: 969330 - RNA, 19 nt, Homo sapiens
  misc_RNA (1)...(19): siRNA sense strand
gaagaggaggaugcagaaa

SEQ ID NO: 969331 - RNA, 19 nt, Homo sapiens
  misc_RNA (1)...(19): siRNA sense strand
gagugguguuucuuggauu

SEQ ID NO: 969332 - RNA, 19 nt, Homo sapiens
  misc_RNA (1)...(19): siRNA sense strand
guaguucuguauaccucuu

SEQ ID NO: 969333 - RNA, 19 nt, Homo sapiens
  misc_RNA (1)...(19): siRNA sense strand
uugaguggcucugugauug

SEQ ID NO: 969334 - RNA, 19 nt, Homo sapiens
  misc_RNA (1)...(19): siRNA sense strand
agagacaucuagaaguagu

SEQ ID NO: 969335 - RNA, 19 nt, Homo sapiens
  misc_RNA (1)...(19): siRNA sense strand
gcuguuaucgguacuuaca

SEQ ID NO: 969336 - RNA, 19 nt, Homo sapiens
  misc_RNA (1)...(19): siRNA sense strand
ggugguaacguccuuaucu

SEQ ID NO: 969337 - RNA, 19 nt, Homo sapiens
  misc_RNA (1)...(19): siRNA sense strand
acaaacgugaaccgaaaua

SEQ ID NO: 969338 - RNA, 19 nt, Homo sapiens
  misc_RNA (1)...(19): siRNA sense strand
gcagugcccaugugaagca

SEQ ID NO: 969339 - RNA, 19 nt, Homo sapiens
  misc_RNA (1)...(19): siRNA sense strand
ugaagaggaggaugcagaa

SEQ ID NO: 969340 - RNA, 19 nt, Homo sapiens
  misc_RNA (1)...(19): siRNA sense strand
ugauuugccuguaguucug

SEQ ID NO: 969341 - RNA, 19 nt, Homo sapiens
  misc_RNA (1)...(19): siRNA sense strand
caucaaaugcacugguguu

SEQ ID NO: 969342 - RNA, 19 nt, Homo sapiens
  misc_RNA (1)...(19): siRNA sense strand
aaagagugaggaccagaaa

SEQ ID NO: 969343 - RNA, 19 nt, Homo sapiens
  misc_RNA (1)...(19): siRNA sense strand
acugugggcuuaugcuguu

SEQ ID NO: 969344 - RNA, 19 nt, Homo sapiens
  misc_RNA (1)...(19): siRNA sense strand
aaacgugaaccgaaauauc

SEQ ID NO: 969345 - RNA, 19 nt, Homo sapiens
  misc_RNA (1)...(19): siRNA sense strand
gcagucauuggaauucuuc

SEQ ID NO: 969346 - RNA, 19 nt, Homo sapiens
  misc_RNA (1)...(19): siRNA sense strand
gaguaccuaaugauaagaa

SEQ ID NO: 969347 - RNA, 19 nt, Homo sapiens
  misc_RNA (1)...(19): siRNA sense strand
uuggaauucuucaaggaaa

SEQ ID NO: 969348 - RNA, 19 nt, Homo sapiens
  misc_RNA (1)...(19): siRNA sense strand
gucgaugucaugaauuauu

SEQ ID NO: 969349 - RNA, 19 nt, Homo sapiens
  misc_RNA (1)...(19): siRNA sense strand
gugaaccgaaauaucagua

SEQ ID NO: 969350 - RNA, 19 nt, Homo sapiens
  misc_RNA (1)...(19): siRNA sense strand
aaaugaauaugaggaagag

SEQ ID NO: 969351 - RNA, 19 nt, Homo sapiens
  misc_RNA (1)...(19): siRNA sense strand
aagaagacagaaagaguga

SEQ ID NO: 969352 - RNA, 19 nt, Homo sapiens
  misc_RNA (1)...(19): siRNA sense strand
aaauaucaguagucugucu

SEQ ID NO: 969353 - RNA, 19 nt, Homo sapiens
  misc_RNA (1)...(19): siRNA sense strand
aacgugaaccgaaauauca

SEQ ID NO: 969354 - RNA, 19 nt, Homo sapiens
  misc_RNA (1)...(19): siRNA sense strand
ggauugaguguugcuauag

SEQ ID NO: 969355 - RNA, 19 nt, Homo sapiens
  misc_RNA (1)...(19): siRNA sense strand
gagguaacauauggcucuu

SEQ ID NO: 969356 - RNA, 19 nt, Homo sapiens
  misc_RNA (1)...(19): siRNA sense strand
caccguuggucuuuaucuu

SEQ ID NO: 969357 - RNA, 19 nt, Homo sapiens
  misc_RNA (1)...(19): siRNA sense strand
gcaagacagcaauauuacu

SEQ ID NO: 969358 - RNA, 19 nt, Homo sapiens
  misc_RNA (1)...(19): siRNA sense strand
augccuaucuucgguguuu

SEQ ID NO: 969359 - RNA, 19 nt, Homo sapiens
  misc_RNA (1)...(19): siRNA sense strand
gauugaaacgaaugauaca

SEQ ID NO: 969360 - RNA, 19 nt, Homo sapiens
  misc_RNA (1)...(19): siRNA sense strand
uguuaucgguacuuacaug

SEQ ID NO: 969361 - RNA, 19 nt, Homo sapiens
  misc_RNA (1)...(19): siRNA sense strand
caucaauagcuacugguau

SEQ ID NO: 969362 - RNA, 19 nt, Homo sapiens
  misc_RNA (1)...(19): siRNA sense strand
ugugauugguggauuucuu

SEQ ID NO: 969363 - RNA, 19 nt, Homo sapiens
  misc_RNA (1)...(19): siRNA sense strand
ggaagaugcucaggauuug

SEQ ID NO: 969364 - RNA, 19 nt, Homo sapiens
  misc_RNA (1)...(19): siRNA sense strand
ggagaccaacaucgaauua

SEQ ID NO: 969365 - RNA, 19 nt, Homo sapiens
  misc_RNA (1)...(19): siRNA sense strand
caacugaggucccuuccau

SEQ ID NO: 969366 - RNA, 19 nt, Homo sapiens
  misc_RNA (1)...(19): siRNA sense strand
gguguuggcuggaaucuuc

SEQ ID NO: 969367 - RNA, 19 nt, Homo sapiens
  misc_RNA (1)...(19): siRNA sense strand
gcaagaacucccucuguga

SEQ ID NO: 969368 - RNA, 19 nt, Homo sapiens
  misc_RNA (1)...(19): siRNA sense strand
gauuccggcuuucuuggua

SEQ ID NO: 969369 - RNA, 19 nt, Homo sapiens
  misc_RNA (1)...(19): siRNA sense strand
gagaaucuguucgccauca

SEQ ID NO: 969370 - RNA, 19 nt, Homo sapiens
  misc_RNA (1)...(19): siRNA sense strand
gggcacaccuccuccaagu

SEQ ID NO: 969371 - RNA, 19 nt, Homo sapiens
  misc_RNA (1)...(19): siRNA sense strand
ccaagucccuccccaauuu

SEQ ID NO: 969372 - RNA, 19 nt, Homo sapiens
  misc_RNA (1)...(19): siRNA sense strand
caagaacucccucugugaa

SEQ ID NO: 969373 - RNA, 19 nt, Homo sapiens
  misc_RNA (1)...(19): siRNA sense strand
cggaagaugcucaggauuu

SEQ ID NO: 969374 - RNA, 19 nt, Homo sapiens
  misc_RNA (1)...(19): siRNA sense strand
gagaggaucggcugugguu

SEQ ID NO: 969375 - RNA, 19 nt, Homo sapiens
  misc_RNA (1)...(19): siRNA sense strand
caacuuccuuagcaacgaa

SEQ ID NO: 969376 - RNA, 19 nt, Homo sapiens
  misc_RNA (1)...(19): siRNA sense strand
caacggggauuccggcuuu

SEQ ID NO: 969377 - RNA, 19 nt, Homo sapiens
  misc_RNA (1)...(19): siRNA sense strand
cagacaaagugacagacaa

SEQ ID NO: 969378 - RNA, 19 nt, Homo sapiens
  misc_RNA (1)...(19): siRNA sense strand
gaaaauggguacuccuucu

SEQ ID NO: 969379 - RNA, 19 nt, Homo sapiens
  misc_RNA (1)...(19): siRNA sense strand
aaacaaaagugcccucuag

SEQ ID NO: 969380 - RNA, 19 nt, Homo sapiens
  misc_RNA (1)...(19): siRNA sense strand
gagaagcuccaggguguug

SEQ ID NO: 969381 - RNA, 19 nt, Homo sapiens
  misc_RNA (1)...(19): siRNA sense strand
agacaaagugacagacaaa

SEQ ID NO: 969382 - RNA, 19 nt, Homo sapiens
  misc_RNA (1)...(19): siRNA sense strand
ccucagacaugcugcacau

SEQ ID NO: 969383 - RNA, 19 nt, Homo sapiens
  misc_RNA (1)...(19): siRNA sense strand
gcagacaaagugacagaca

SEQ ID NO: 969384 - RNA, 19 nt, Homo sapiens
  misc_RNA (1)...(19): siRNA sense strand
ucgaauuacuggugugcaa

SEQ ID NO: 969385 - RNA, 19 nt, Homo sapiens
  misc_RNA (1)...(19): siRNA sense strand
ccaguuaccuuccccaaau

SEQ ID NO: 969386 - RNA, 19 nt, Homo sapiens
  misc_RNA (1)...(19): siRNA sense strand
gaggagaccaacaucgaau

SEQ ID NO: 969387 - RNA, 19 nt, Homo sapiens
  misc_RNA (1)...(19): siRNA sense strand
caccuugcguaacaacuga

SEQ ID NO: 969388 - RNA, 19 nt, Homo sapiens
  misc_RNA (1)...(19): siRNA sense strand
gcaucagacucuaggaaaa

SEQ ID NO: 969389 - RNA, 19 nt, Homo sapiens
  misc_RNA (1)...(19): siRNA sense strand
uuacuggugugcaacuaug

SEQ ID NO: 969390 - RNA, 19 nt, Homo sapiens
  misc_RNA (1)...(19): siRNA sense strand
acugaggucccuuccauuu

SEQ ID NO: 969391 - RNA, 19 nt, Homo sapiens
  misc_RNA (1)...(19): siRNA sense strand
agaccaacaucgaauuacu

SEQ ID NO: 969392 - RNA, 19 nt, Homo sapiens
  misc_RNA (1)...(19): siRNA sense strand
ugaggucccuuccauuuug

SEQ ID NO: 969393 - RNA, 19 nt, Homo sapiens
  misc_RNA (1)...(19): siRNA sense strand
gaccaacaucgaauuacug

SEQ ID NO: 969394 - RNA, 19 nt, Homo sapiens
  misc_RNA (1)...(19): siRNA sense strand
gugcagagggcccugacaa

SEQ ID NO: 969395 - RNA, 19 nt, Homo sapiens
  misc_RNA (1)...(19): siRNA sense strand
cagcagacaaagugacaga

SEQ ID NO: 969396 - RNA, 19 nt, Homo sapiens
  misc_RNA (1)...(19): siRNA sense strand
gaggcuccaccuugcguaa

SEQ ID NO: 969397 - RNA, 19 nt, Homo sapiens
  misc_RNA (1)...(19): siRNA sense strand
ggacuccgugcucccaaug

SEQ ID NO: 969398 - RNA, 19 nt, Homo sapiens
  misc_RNA (1)...(19): siRNA sense strand
ccaacuuccuuagcaacga

SEQ ID NO: 969399 - RNA, 19 nt, Homo sapiens
  misc_RNA (1)...(19): siRNA sense strand
ugaggagaccaacaucgaa

SEQ ID NO: 969400 - RNA, 19 nt, Homo sapiens
  misc_RNA (1)...(19): siRNA sense strand
gguucccacuucugugaga

SEQ ID NO: 969401 - RNA, 19 nt, Homo sapiens
  misc_RNA (1)...(19): siRNA sense strand
cccggaagaugcucaggau

SEQ ID NO: 969402 - RNA, 19 nt, Homo sapiens
  misc_RNA (1)...(19): siRNA sense strand
gcaacagaggcuccaccuu

SEQ ID NO: 969403 - RNA, 19 nt, Homo sapiens
  misc_RNA (1)...(19): siRNA sense strand
caaagugacagacaaaaca

SEQ ID NO: 969404 - RNA, 19 nt, Homo sapiens
  misc_RNA (1)...(19): siRNA sense strand
gcuucuagcuuuauauuug

SEQ ID NO: 969405 - RNA, 19 nt, Homo sapiens
  misc_RNA (1)...(19): siRNA sense strand
uagccagacugacggauua

SEQ ID NO: 969406 - RNA, 19 nt, Homo sapiens
  misc_RNA (1)...(19): siRNA sense strand
gaauaccaccugcuauaaa

SEQ ID NO: 969407 - RNA, 19 nt, Homo sapiens
  misc_RNA (1)...(19): siRNA sense strand
gagacgguccagccaauua

SEQ ID NO: 969408 - RNA, 19 nt, Homo sapiens
  misc_RNA (1)...(19): siRNA sense strand
ugacaugaauaaugcaaga

SEQ ID NO: 969409 - RNA, 19 nt, Homo sapiens
  misc_RNA (1)...(19): siRNA sense strand
gaaaggcauauuagaacaa

SEQ ID NO: 969410 - RNA, 19 nt, Homo sapiens
  misc_RNA (1)...(19): siRNA sense strand
aagaauaccaccugcuaua

SEQ ID NO: 969411 - RNA, 19 nt, Homo sapiens
  misc_RNA (1)...(19): siRNA sense strand
caaguuuauucccuuauca

SEQ ID NO: 969412 - RNA, 19 nt, Homo sapiens
  misc_RNA (1)...(19): siRNA sense strand
ugaaaggcauauuagaaca

SEQ ID NO: 969413 - RNA, 19 nt, Homo sapiens
  misc_RNA (1)...(19): siRNA sense strand
ggcccuggauguuuccuuu

SEQ ID NO: 969414 - RNA, 19 nt, Homo sapiens
  misc_RNA (1)...(19): siRNA sense strand
uuauguggcuuuccuugaa

SEQ ID NO: 969415 - RNA, 19 nt, Homo sapiens
  misc_RNA (1)...(19): siRNA sense strand
ccaauuauggaagcacuua

SEQ ID NO: 969416 - RNA, 19 nt, Homo sapiens
  misc_RNA (1)...(19): siRNA sense strand
gcacuuagagaugcaacaa

SEQ ID NO: 969417 - RNA, 19 nt, Homo sapiens
  misc_RNA (1)...(19): siRNA sense strand
ggaagcacuuagagaugca

SEQ ID NO: 969418 - RNA, 19 nt, Homo sapiens
  misc_RNA (1)...(19): siRNA sense strand
ugugaaaggcauauuagaa

SEQ ID NO: 969419 - RNA, 19 nt, Homo sapiens
  misc_RNA (1)...(19): siRNA sense strand
uagaagaggcugugaaagg

SEQ ID NO: 969420 - RNA, 19 nt, Homo sapiens
  misc_RNA (1)...(19): siRNA sense strand
agaauaccaccugcuauaa

SEQ ID NO: 969421 - RNA, 19 nt, Homo sapiens
  misc_RNA (1)...(19): siRNA sense strand
cccuggauguuuccuuuaa

SEQ ID NO: 969422 - RNA, 19 nt, Homo sapiens
  misc_RNA (1)...(19): siRNA sense strand
ccuggucucucaagcguau

SEQ ID NO: 969423 - RNA, 19 nt, Homo sapiens
  misc_RNA (1)...(19): siRNA sense strand
gcuuuauauuugcuccaua

SEQ ID NO: 969424 - RNA, 19 nt, Homo sapiens
  misc_RNA (1)...(19): siRNA sense strand
gcuccauaaugacaugaau

SEQ ID NO: 969425 - RNA, 19 nt, Homo sapiens
  misc_RNA (1)...(19): siRNA sense strand
uguagaagaggcugugaaa

SEQ ID NO: 969426 - RNA, 19 nt, Homo sapiens
  misc_RNA (1)...(19): siRNA sense strand
acaaguuuauucccuuauc

SEQ ID NO: 969427 - RNA, 19 nt, Homo sapiens
  misc_RNA (1)...(19): siRNA sense strand
ugacggauuauguggcuuu

SEQ ID NO: 969428 - RNA, 19 nt, Homo sapiens
  misc_RNA (1)...(19): siRNA sense strand
gugaaaggcauauuagaac

SEQ ID NO: 969429 - RNA, 19 nt, Homo sapiens
  misc_RNA (1)...(19): siRNA sense strand
gcugauuccaccacaagaa

SEQ ID NO: 969430 - RNA, 19 nt, Homo sapiens
  misc_RNA (1)...(19): siRNA sense strand
caagcugauuccaccacaa

SEQ ID NO: 969431 - RNA, 19 nt, Homo sapiens
  misc_RNA (1)...(19): siRNA sense strand
ggcugugaaaggcauauua

SEQ ID NO: 969432 - RNA, 19 nt, Homo sapiens
  misc_RNA (1)...(19): siRNA sense strand
uauggaagcacuuagagau

SEQ ID NO: 969433 - RNA, 19 nt, Homo sapiens
  misc_RNA (1)...(19): siRNA sense strand
ucucaagcguauacuucaa

SEQ ID NO: 969434 - RNA, 19 nt, Homo sapiens
  misc_RNA (1)...(19): siRNA sense strand
aaaggcauauuagaacaag

SEQ ID NO: 969435 - RNA, 19 nt, Homo sapiens
  misc_RNA (1)...(19): siRNA sense strand
ucaagcguauacuucaauc

SEQ ID NO: 969436 - RNA, 19 nt, Homo sapiens
  misc_RNA (1)...(19): siRNA sense strand
gcugugaaaggcauauuag

SEQ ID NO: 969437 - RNA, 19 nt, Homo sapiens
  misc_RNA (1)...(19): siRNA sense strand
ccagacugacggauuaugu

SEQ ID NO: 969438 - RNA, 19 nt, Homo sapiens
  misc_RNA (1)...(19): siRNA sense strand
ccugggaucuauacaacca

SEQ ID NO: 969439 - RNA, 19 nt, Homo sapiens
  misc_RNA (1)...(19): siRNA sense strand
aauaccaccugcuauaaaa

SEQ ID NO: 969440 - RNA, 19 nt, Homo sapiens
  misc_RNA (1)...(19): siRNA sense strand
ccaaugaacagcaguuagc

SEQ ID NO: 969441 - RNA, 19 nt, Homo sapiens
  misc_RNA (1)...(19): siRNA sense strand
ccuuugcccuggucucuca

SEQ ID NO: 969442 - RNA, 19 nt, Homo sapiens
  misc_RNA (1)...(19): siRNA sense strand
gcccuggauguuuccuuua

SEQ ID NO: 969443 - RNA, 19 nt, Homo sapiens
  misc_RNA (1)...(19): siRNA sense strand
aaagaauaccaccugcuau

SEQ ID NO: 969444 - RNA, 19 nt, Homo sapiens
  misc_RNA (1)...(19): siRNA sense strand
uguuggacuuccuguagaa

SEQ ID NO: 969445 - RNA, 19 nt, Homo sapiens
  misc_RNA (1)...(19): siRNA sense strand
gggaauuuggucaguagga

SEQ ID NO: 969446 - RNA, 19 nt, Homo sapiens
  misc_RNA (1)...(19): siRNA sense strand
ggaucuauacaaccaucaa

SEQ ID NO: 969447 - RNA, 19 nt, Homo sapiens
  misc_RNA (1)...(19): siRNA sense strand
aaaagaauaccaccugcua

SEQ ID NO: 969448 - RNA, 19 nt, Homo sapiens
  misc_RNA (1)...(19): siRNA sense strand
ucaguaggacaaagaaucu

SEQ ID NO: 969449 - RNA, 19 nt, Homo sapiens
  misc_RNA (1)...(19): siRNA sense strand
cugagacgguccagccaau

SEQ ID NO: 969450 - RNA, 19 nt, Homo sapiens
  misc_RNA (1)...(19): siRNA sense strand
uagccagacugacggauua

SEQ ID NO: 969451 - RNA, 19 nt, Homo sapiens
  misc_RNA (1)...(19): siRNA sense strand
gaauaccaccugcuauaaa

SEQ ID NO: 969452 - RNA, 19 nt, Homo sapiens
  misc_RNA (1)...(19): siRNA sense strand
gagacgguccagccaauua

SEQ ID NO: 969453 - RNA, 19 nt, Homo sapiens
  misc_RNA (1)...(19): siRNA sense strand
gaaaggcauauuagaacaa

SEQ ID NO: 969454 - RNA, 19 nt, Homo sapiens
  misc_RNA (1)...(19): siRNA sense strand
aagaauaccaccugcuaua

SEQ ID NO: 969455 - RNA, 19 nt, Homo sapiens
  misc_RNA (1)...(19): siRNA sense strand
caaguuuauucccuuauca

SEQ ID NO: 969456 - RNA, 19 nt, Homo sapiens
  misc_RNA (1)...(19): siRNA sense strand
ugaaaggcauauuagaaca

SEQ ID NO: 969457 - RNA, 19 nt, Homo sapiens
  misc_RNA (1)...(19): siRNA sense strand
ggcccuggauguuuccuuu

SEQ ID NO: 969458 - RNA, 19 nt, Homo sapiens
  misc_RNA (1)...(19): siRNA sense strand
uuauguggcuuuccuugaa

SEQ ID NO: 969459 - RNA, 19 nt, Homo sapiens
  misc_RNA (1)...(19): siRNA sense strand
ccaauuauggaagcacuua

SEQ ID NO: 969460 - RNA, 19 nt, Homo sapiens
  misc_RNA (1)...(19): siRNA sense strand
gcacuuagagaugcaacaa

SEQ ID NO: 969461 - RNA, 19 nt, Homo sapiens
  misc_RNA (1)...(19): siRNA sense strand
ggaagcacuuagagaugca

SEQ ID NO: 969462 - RNA, 19 nt, Homo sapiens
  misc_RNA (1)...(19): siRNA sense strand
ugugaaaggcauauuagaa

SEQ ID NO: 969463 - RNA, 19 nt, Homo sapiens
  misc_RNA (1)...(19): siRNA sense strand
uagaagaggcugugaaagg

SEQ ID NO: 969464 - RNA, 19 nt, Homo sapiens
  misc_RNA (1)...(19): siRNA sense strand
agaauaccaccugcuauaa

SEQ ID NO: 969465 - RNA, 19 nt, Homo sapiens
  misc_RNA (1)...(19): siRNA sense strand
cccuggauguuuccuuuaa

SEQ ID NO: 969466 - RNA, 19 nt, Homo sapiens
  misc_RNA (1)...(19): siRNA sense strand
ccuggucucucaagcguau

SEQ ID NO: 969467 - RNA, 19 nt, Homo sapiens
  misc_RNA (1)...(19): siRNA sense strand
uguagaagaggcugugaaa

SEQ ID NO: 969468 - RNA, 19 nt, Homo sapiens
  misc_RNA (1)...(19): siRNA sense strand
acaaguuuauucccuuauc

SEQ ID NO: 969469 - RNA, 19 nt, Homo sapiens
  misc_RNA (1)...(19): siRNA sense strand
ugacggauuauguggcuuu

SEQ ID NO: 969470 - RNA, 19 nt, Homo sapiens
  misc_RNA (1)...(19): siRNA sense strand
gugaaaggcauauuagaac

SEQ ID NO: 969471 - RNA, 19 nt, Homo sapiens
  misc_RNA (1)...(19): siRNA sense strand
gcugauuccaccacaagaa

SEQ ID NO: 969472 - RNA, 19 nt, Homo sapiens
  misc_RNA (1)...(19): siRNA sense strand
caagcugauuccaccacaa

SEQ ID NO: 969473 - RNA, 19 nt, Homo sapiens
  misc_RNA (1)...(19): siRNA sense strand
ggcugugaaaggcauauua

SEQ ID NO: 969474 - RNA, 19 nt, Homo sapiens
  misc_RNA (1)...(19): siRNA sense strand
uauggaagcacuuagagau

SEQ ID NO: 969475 - RNA, 19 nt, Homo sapiens
  misc_RNA (1)...(19): siRNA sense strand
ucucaagcguauacuucaa

SEQ ID NO: 969476 - RNA, 19 nt, Homo sapiens
  misc_RNA (1)...(19): siRNA sense strand
aaaggcauauuagaacaag

SEQ ID NO: 969477 - RNA, 19 nt, Homo sapiens
  misc_RNA (1)...(19): siRNA sense strand
ucaagcguauacuucaauc

SEQ ID NO: 969478 - RNA, 19 nt, Homo sapiens
  misc_RNA (1)...(19): siRNA sense strand
gcugugaaaggcauauuag

SEQ ID NO: 969479 - RNA, 19 nt, Homo sapiens
  misc_RNA (1)...(19): siRNA sense strand
ccagacugacggauuaugu

SEQ ID NO: 969480 - RNA, 19 nt, Homo sapiens
  misc_RNA (1)...(19): siRNA sense strand
ccugggaucuauacaacca

SEQ ID NO: 969481 - RNA, 19 nt, Homo sapiens
  misc_RNA (1)...(19): siRNA sense strand
aauaccaccugcuauaaaa

SEQ ID NO: 969482 - RNA, 19 nt, Homo sapiens
  misc_RNA (1)...(19): siRNA sense strand
ccaaugaacagcaguuagc

SEQ ID NO: 969483 - RNA, 19 nt, Homo sapiens
  misc_RNA (1)...(19): siRNA sense strand
aaagaauaccaccugcuau

SEQ ID NO: 969484 - RNA, 19 nt, Homo sapiens
  misc_RNA (1)...(19): siRNA sense strand
gcccuggauguuuccuuua

SEQ ID NO: 969485 - RNA, 19 nt, Homo sapiens
  misc_RNA (1)...(19): siRNA sense strand
uguuggacuuccuguagaa

SEQ ID NO: 969486 - RNA, 19 nt, Homo sapiens
  misc_RNA (1)...(19): siRNA sense strand
ccuuugcccuggucucuca

SEQ ID NO: 969487 - RNA, 19 nt, Homo sapiens
  misc_RNA (1)...(19): siRNA sense strand
gggaauuuggucaguagga

SEQ ID NO: 969488 - RNA, 19 nt, Homo sapiens
  misc_RNA (1)...(19): siRNA sense strand
ggaucuauacaaccaucaa

SEQ ID NO: 969489 - RNA, 19 nt, Homo sapiens
  misc_RNA (1)...(19): siRNA sense strand
aaaagaauaccaccugcua

SEQ ID NO: 969490 - RNA, 19 nt, Homo sapiens
  misc_RNA (1)...(19): siRNA sense strand
ucaguaggacaaagaaucu

SEQ ID NO: 969491 - RNA, 19 nt, Homo sapiens
  misc_RNA (1)...(19): siRNA sense strand
cugagacgguccagccaau

SEQ ID NO: 969492 - RNA, 19 nt, Homo sapiens
  misc_RNA (1)...(19): siRNA sense strand
gaacaagcacaucaugauu

SEQ ID NO: 969493 - RNA, 19 nt, Homo sapiens
  misc_RNA (1)...(19): siRNA sense strand
gcaacaacaacaagauuaa

SEQ ID NO: 969494 - RNA, 19 nt, Homo sapiens
  misc_RNA (1)...(19): siRNA sense strand
gauccuacgugcaugaaga

SEQ ID NO: 969495 - RNA, 19 nt, Homo sapiens
  misc_RNA (1)...(19): siRNA sense strand
acaagcacaucaugauuga

SEQ ID NO: 969496 - RNA, 19 nt, Homo sapiens
  misc_RNA (1)...(19): siRNA sense strand
ggaacaagcacaucaugau

SEQ ID NO: 969497 - RNA, 19 nt, Homo sapiens
  misc_RNA (1)...(19): siRNA sense strand
ggcaacaacaacaagauua

SEQ ID NO: 969498 - RNA, 19 nt, Homo sapiens
  misc_RNA (1)...(19): siRNA sense strand
gcacaucaugauugacuug

SEQ ID NO: 969499 - RNA, 19 nt, Homo sapiens
  misc_RNA (1)...(19): siRNA sense strand
ggacuggcaacaacaacaa

SEQ ID NO: 969500 - RNA, 19 nt, Homo sapiens
  misc_RNA (1)...(19): siRNA sense strand
cuacgugcaugaagaugga

SEQ ID NO: 969501 - RNA, 19 nt, Homo sapiens
  misc_RNA (1)...(19): siRNA sense strand
cagcaucgccgagaagguu

SEQ ID NO: 969502 - RNA, 19 nt, Homo sapiens
  misc_RNA (1)...(19): siRNA sense strand
ugaguuauacgauccaugu

SEQ ID NO: 969503 - RNA, 19 nt, Homo sapiens
  misc_RNA (1)...(19): siRNA sense strand
ggccacgacugggauccua

SEQ ID NO: 969504 - RNA, 19 nt, Homo sapiens
  misc_RNA (1)...(19): siRNA sense strand
guuauacgauccauguacu

SEQ ID NO: 969505 - RNA, 19 nt, Homo sapiens
  misc_RNA (1)...(19): siRNA sense strand
uacgauccauguacuguca

SEQ ID NO: 969506 - RNA, 19 nt, Homo sapiens
  misc_RNA (1)...(19): siRNA sense strand
aacaagcacaucaugauug

SEQ ID NO: 969507 - RNA, 19 nt, Homo sapiens
  misc_RNA (1)...(19): siRNA sense strand
guacagcaucgccgagaag

SEQ ID NO: 969508 - RNA, 19 nt, Homo sapiens
  misc_RNA (1)...(19): siRNA sense strand
gugccugacuucaacaaaa

SEQ ID NO: 969509 - RNA, 19 nt, Homo sapiens
  misc_RNA (1)...(19): siRNA sense strand
ucuuguggauauuacagaa

SEQ ID NO: 969510 - RNA, 19 nt, Homo sapiens
  misc_RNA (1)...(19): siRNA sense strand
uggcaacaacaacaagauu

SEQ ID NO: 969511 - RNA, 19 nt, Homo sapiens
  misc_RNA (1)...(19): siRNA sense strand
gaguuauacgauccaugua

SEQ ID NO: 969512 - RNA, 19 nt, Homo sapiens
  misc_RNA (1)...(19): siRNA sense strand
caacaacaacaagauuaac

SEQ ID NO: 969513 - RNA, 19 nt, Homo sapiens
  misc_RNA (1)...(19): siRNA sense strand
ccaaggacuacuccaccaa

SEQ ID NO: 969514 - RNA, 19 nt, Homo sapiens
  misc_RNA (1)...(19): siRNA sense strand
gaacaagcacaucaugauu

SEQ ID NO: 969515 - RNA, 19 nt, Homo sapiens
  misc_RNA (1)...(19): siRNA sense strand
gcaacaacaacaagauuaa

SEQ ID NO: 969516 - RNA, 19 nt, Homo sapiens
  misc_RNA (1)...(19): siRNA sense strand
gauccuacgugcaugaaga

SEQ ID NO: 969517 - RNA, 19 nt, Homo sapiens
  misc_RNA (1)...(19): siRNA sense strand
acaagcacaucaugauuga

SEQ ID NO: 969518 - RNA, 19 nt, Homo sapiens
  misc_RNA (1)...(19): siRNA sense strand
ggaacaagcacaucaugau

SEQ ID NO: 969519 - RNA, 19 nt, Homo sapiens
  misc_RNA (1)...(19): siRNA sense strand
ggcaacaacaacaagauua

SEQ ID NO: 969520 - RNA, 19 nt, Homo sapiens
  misc_RNA (1)...(19): siRNA sense strand
gcacaucaugauugacuug

SEQ ID NO: 969521 - RNA, 19 nt, Homo sapiens
  misc_RNA (1)...(19): siRNA sense strand
ggacuggcaacaacaacaa

SEQ ID NO: 969522 - RNA, 19 nt, Homo sapiens
  misc_RNA (1)...(19): siRNA sense strand
cuacgugcaugaagaugga

SEQ ID NO: 969523 - RNA, 19 nt, Homo sapiens
  misc_RNA (1)...(19): siRNA sense strand
cagcaucgccgagaagguu

SEQ ID NO: 969524 - RNA, 19 nt, Homo sapiens
  misc_RNA (1)...(19): siRNA sense strand
ugaguuauacgauccaugu

SEQ ID NO: 969525 - RNA, 19 nt, Homo sapiens
  misc_RNA (1)...(19): siRNA sense strand
ggccacgacugggauccua

SEQ ID NO: 969526 - RNA, 19 nt, Homo sapiens
  misc_RNA (1)...(19): siRNA sense strand
guuauacgauccauguacu

SEQ ID NO: 969527 - RNA, 19 nt, Homo sapiens
  misc_RNA (1)...(19): siRNA sense strand
uacgauccauguacuguca

SEQ ID NO: 969528 - RNA, 19 nt, Homo sapiens
  misc_RNA (1)...(19): siRNA sense strand
aacaagcacaucaugauug

SEQ ID NO: 969529 - RNA, 19 nt, Homo sapiens
  misc_RNA (1)...(19): siRNA sense strand
guacagcaucgccgagaag

SEQ ID NO: 969530 - RNA, 19 nt, Homo sapiens
  misc_RNA (1)...(19): siRNA sense strand
gugccugacuucaacaaaa

SEQ ID NO: 969531 - RNA, 19 nt, Homo sapiens
  misc_RNA (1)...(19): siRNA sense strand
ucuuguggauauuacagaa

SEQ ID NO: 969532 - RNA, 19 nt, Homo sapiens
  misc_RNA (1)...(19): siRNA sense strand
uggcaacaacaacaagauu

SEQ ID NO: 969533 - RNA, 19 nt, Homo sapiens
  misc_RNA (1)...(19): siRNA sense strand
gaguuauacgauccaugua

SEQ ID NO: 969534 - RNA, 19 nt, Homo sapiens
  misc_RNA (1)...(19): siRNA sense strand
caacaacaacaagauuaac

SEQ ID NO: 969535 - RNA, 19 nt, Homo sapiens
  misc_RNA (1)...(19): siRNA sense strand
ccaaggacuacuccaccaa

SEQ ID NO: 969536 - RNA, 19 nt, Homo sapiens
  misc_RNA (1)...(19): siRNA sense strand
ggaaguggcuuaagauguu

SEQ ID NO: 969537 - RNA, 19 nt, Homo sapiens
  misc_RNA (1)...(19): siRNA sense strand
gcacaaagaugcagauccu

SEQ ID NO: 969538 - RNA, 19 nt, Homo sapiens
  misc_RNA (1)...(19): siRNA sense strand
gggacaaucuucacuuuca

SEQ ID NO: 969539 - RNA, 19 nt, Homo sapiens
  misc_RNA (1)...(19): siRNA sense strand
caacaggcccuuucugaug

SEQ ID NO: 969540 - RNA, 19 nt, Homo sapiens
  misc_RNA (1)...(19): siRNA sense strand
gagaauggacugagugaga

SEQ ID NO: 969541 - RNA, 19 nt, Homo sapiens
  misc_RNA (1)...(19): siRNA sense strand
gcaaugcggucgugaucau

SEQ ID NO: 969542 - RNA, 19 nt, Homo sapiens
  misc_RNA (1)...(19): siRNA sense strand
ccaugaagcagaucaauga

SEQ ID NO: 969543 - RNA, 19 nt, Homo sapiens
  misc_RNA (1)...(19): siRNA sense strand
ccuaucagcuggagaaagu

SEQ ID NO: 969544 - RNA, 19 nt, Homo sapiens
  misc_RNA (1)...(19): siRNA sense strand
gcgaggaucaguaucacua

SEQ ID NO: 969545 - RNA, 19 nt, Homo sapiens
  misc_RNA (1)...(19): siRNA sense strand
gcaggacaccuucguaagu

SEQ ID NO: 969546 - RNA, 19 nt, Homo sapiens
  misc_RNA (1)...(19): siRNA sense strand
gcaaugccacggcuuuguu

SEQ ID NO: 969547 - RNA, 19 nt, Homo sapiens
  misc_RNA (1)...(19): siRNA sense strand
gcaaacgaagggcaagauu

SEQ ID NO: 969548 - RNA, 19 nt, Homo sapiens
  misc_RNA (1)...(19): siRNA sense strand
caaaggcacccaagagcaa

SEQ ID NO: 969549 - RNA, 19 nt, Homo sapiens
  misc_RNA (1)...(19): siRNA sense strand
caaauauccaggugucuga

SEQ ID NO: 969550 - RNA, 19 nt, Homo sapiens
  misc_RNA (1)...(19): siRNA sense strand
caaacgaagggcaagauug

SEQ ID NO: 969551 - RNA, 19 nt, Homo sapiens
  misc_RNA (1)...(19): siRNA sense strand
ugucugagauggugcacaa

SEQ ID NO: 969552 - RNA, 19 nt, Homo sapiens
  misc_RNA (1)...(19): siRNA sense strand
cugaggaaguggcuuaaga

SEQ ID NO: 969553 - RNA, 19 nt, Homo sapiens
  misc_RNA (1)...(19): siRNA sense strand
agaauggacugagugagaa

SEQ ID NO: 969554 - RNA, 19 nt, Homo sapiens
  misc_RNA (1)...(19): siRNA sense strand
cauggugaauuacaucuuc

SEQ ID NO: 969555 - RNA, 19 nt, Homo sapiens
  misc_RNA (1)...(19): siRNA sense strand
aaacgaagggcaagauugu

SEQ ID NO: 969556 - RNA, 19 nt, Homo sapiens
  misc_RNA (1)...(19): siRNA sense strand
ugauguucauuguggauaa

SEQ ID NO: 969557 - RNA, 19 nt, Homo sapiens
  misc_RNA (1)...(19): siRNA sense strand
gaaguggcuuaagauguuc

SEQ ID NO: 969558 - RNA, 19 nt, Homo sapiens
  misc_RNA (1)...(19): siRNA sense strand
caggacaccuucguaagug

SEQ ID NO: 969559 - RNA, 19 nt, Homo sapiens
  misc_RNA (1)...(19): siRNA sense strand
gagcuuuaccuucccaaau

SEQ ID NO: 969560 - RNA, 19 nt, Homo sapiens
  misc_RNA (1)...(19): siRNA sense strand
agacaagcuucaaccacaa

SEQ ID NO: 969561 - RNA, 19 nt, Homo sapiens
  misc_RNA (1)...(19): siRNA sense strand
ucagcaaccacucaaauau

SEQ ID NO: 969562 - RNA, 19 nt, Homo sapiens
  misc_RNA (1)...(19): siRNA sense strand
ccacaaaggcacccaagag

SEQ ID NO: 969563 - RNA, 19 nt, Homo sapiens
  misc_RNA (1)...(19): siRNA sense strand
ccugugagcaucuccauga

SEQ ID NO: 969564 - RNA, 19 nt, Homo sapiens
  misc_RNA (1)...(19): siRNA sense strand
ggacaaucuucacuuucag

SEQ ID NO: 969565 - RNA, 19 nt, Homo sapiens
  misc_RNA (1)...(19): siRNA sense strand
ucgugaucauggugaauua

SEQ ID NO: 969566 - RNA, 19 nt, Homo sapiens
  misc_RNA (1)...(19): siRNA sense strand
agcuuuaccuucccaaauu

SEQ ID NO: 969567 - RNA, 19 nt, Homo sapiens
  misc_RNA (1)...(19): siRNA sense strand
uaacaacauccucuuccuu

SEQ ID NO: 969568 - RNA, 19 nt, Homo sapiens
  misc_RNA (1)...(19): siRNA sense strand
gaauggacugagugagaaa

SEQ ID NO: 969569 - RNA, 19 nt, Homo sapiens
  misc_RNA (1)...(19): siRNA sense strand
gcuuuaccuucccaaauuc

SEQ ID NO: 969570 - RNA, 19 nt, Homo sapiens
  misc_RNA (1)...(19): siRNA sense strand
cagcugagccucggcaaug

SEQ ID NO: 969571 - RNA, 19 nt, Homo sapiens
  misc_RNA (1)...(19): siRNA sense strand
caucagcaaccacucaaau

SEQ ID NO: 969572 - RNA, 19 nt, Homo sapiens
  misc_RNA (1)...(19): siRNA sense strand
gaggaaguggcuuaagaug

SEQ ID NO: 969573 - RNA, 19 nt, Homo sapiens
  misc_RNA (1)...(19): siRNA sense strand
ccacggcuuuguucauucu

SEQ ID NO: 969574 - RNA, 19 nt, Homo sapiens
  misc_RNA (1)...(19): siRNA sense strand
ggugaauuacaucuucuuu

SEQ ID NO: 969575 - RNA, 19 nt, Homo sapiens
  misc_RNA (1)...(19): siRNA sense strand
guaccuggcagacacuuuc

SEQ ID NO: 969576 - RNA, 19 nt, Homo sapiens
  misc_RNA (1)...(19): siRNA sense strand
ccauugagggcuccuauca

SEQ ID NO: 969577 - RNA, 19 nt, Homo sapiens
  misc_RNA (1)...(19): siRNA sense strand
gguggagaauggacugagu

SEQ ID NO: 969578 - RNA, 19 nt, Homo sapiens
  misc_RNA (1)...(19): siRNA sense strand
ucaaugauuauguggcaaa

SEQ ID NO: 969579 - RNA, 19 nt, Homo sapiens
  misc_RNA (1)...(19): siRNA sense strand
gauuauguggcaaagcaaa

SEQ ID NO: 969580 - RNA, 19 nt, Homo sapiens
  misc_RNA (1)...(19): siRNA sense strand
aacaggcccuuucugaugu

SEQ ID NO: 969581 - RNA, 19 nt, Homo sapiens
  misc_RNA (1)...(19): siRNA sense strand
ugccacggcuuuguucauu

SEQ ID NO: 969582 - RNA, 19 nt, Homo sapiens
  misc_RNA (1)...(19): siRNA sense strand
cccaagagcaagacuucua

SEQ ID NO: 969583 - RNA, 19 nt, Homo sapiens
  misc_RNA (1)...(19): siRNA sense strand
gacaagcuucaaccacaaa

SEQ ID NO: 969584 - RNA, 19 nt, Homo sapiens
  misc_RNA (1)...(19): siRNA sense strand
gaucauggugaauuacauc

SEQ ID NO: 969585 - RNA, 19 nt, Homo sapiens
  misc_RNA (1)...(19): siRNA sense strand
auuguggacuugcuuaaga

SEQ ID NO: 969586 - RNA, 19 nt, Homo sapiens
  misc_RNA (1)...(19): siRNA sense strand
cagcaaccacucaaauauc

SEQ ID NO: 969587 - RNA, 19 nt, Homo sapiens
  misc_RNA (1)...(19): siRNA sense strand
gagccgcgaggaucaguau

SEQ ID NO: 969588 - RNA, 19 nt, Homo sapiens
  misc_RNA (1)...(19): siRNA sense strand
agaaaacgcugaggaagug

SEQ ID NO: 969589 - RNA, 19 nt, Homo sapiens
  misc_RNA (1)...(19): siRNA sense strand
cuucccaaauucuccauug

SEQ ID NO: 969590 - RNA, 19 nt, Homo sapiens
  misc_RNA (1)...(19): siRNA sense strand
aaagcuaagugggagacaa

SEQ ID NO: 969591 - RNA, 19 nt, Homo sapiens
  misc_RNA (1)...(19): siRNA sense strand
ccucuuccuuggcaaagug

SEQ ID NO: 969592 - RNA, 19 nt, Homo sapiens
  misc_RNA (1)...(19): siRNA sense strand
gcagcucuuccuccucuug

SEQ ID NO: 969593 - RNA, 19 nt, Homo sapiens
  misc_RNA (1)...(19): siRNA sense strand
gggccucaaccuccagaaa

SEQ ID NO: 969594 - RNA, 19 nt, Homo sapiens
  misc_RNA (1)...(19): siRNA sense strand
ggagcugcacagaggcuuu

SEQ ID NO: 969595 - RNA, 19 nt, Homo sapiens
  misc_RNA (1)...(19): siRNA sense strand
gugcggguacccaugauga

SEQ ID NO: 969596 - RNA, 19 nt, Homo sapiens
  misc_RNA (1)...(19): siRNA sense strand
gccaugaagcagaucaaug

SEQ ID NO: 969597 - RNA, 19 nt, Homo sapiens
  misc_RNA (1)...(19): siRNA sense strand
gcacccaagagcaagacuu

SEQ ID NO: 969598 - RNA, 19 nt, Homo sapiens
  misc_RNA (1)...(19): siRNA sense strand
ucaacaggcccuuucugau

SEQ ID NO: 969599 - RNA, 19 nt, Homo sapiens
  misc_RNA (1)...(19): siRNA sense strand
cccgggagaugaagaagag

SEQ ID NO: 969600 - RNA, 19 nt, Homo sapiens
  misc_RNA (1)...(19): siRNA sense strand
ugaggaaguggcuuaagau

SEQ ID NO: 969601 - RNA, 19 nt, Homo sapiens
  misc_RNA (1)...(19): siRNA sense strand
cugcaggacaccuucguaa

SEQ ID NO: 969602 - RNA, 19 nt, Homo sapiens
  misc_RNA (1)...(19): siRNA sense strand
augauuauguggcaaagca

SEQ ID NO: 969603 - RNA, 19 nt, Homo sapiens
  misc_RNA (1)...(19): siRNA sense strand
gcaucagcaaccacucaaa

SEQ ID NO: 969604 - RNA, 19 nt, Homo sapiens
  misc_RNA (1)...(19): siRNA sense strand
gccacggcuuuguucauuc

SEQ ID NO: 969605 - RNA, 19 nt, Homo sapiens
  misc_RNA (1)...(19): siRNA sense strand
acgcugaggaaguggcuua

SEQ ID NO: 969606 - RNA, 19 nt, Homo sapiens
  misc_RNA (1)...(19): siRNA sense strand
ugcagcagguggagaaugg

SEQ ID NO: 969607 - RNA, 19 nt, Homo sapiens
  misc_RNA (1)...(19): siRNA sense strand
aagauuguggacuugcuua

SEQ ID NO: 969608 - RNA, 19 nt, Homo sapiens
  misc_RNA (1)...(19): siRNA sense strand
cucagaggcuaguguucaa

SEQ ID NO: 969609 - RNA, 19 nt, Homo sapiens
  misc_RNA (1)...(19): siRNA sense strand
gagaaaacgcugaggaagu

SEQ ID NO: 969610 - RNA, 19 nt, Homo sapiens
  misc_RNA (1)...(19): siRNA sense strand
ugacggaugugaagaauaa

SEQ ID NO: 969611 - RNA, 19 nt, Homo sapiens
  misc_RNA (1)...(19): siRNA sense strand
gcacucuucucucgcuaua

SEQ ID NO: 969612 - RNA, 19 nt, Homo sapiens
  misc_RNA (1)...(19): siRNA sense strand
ggauugauuugguccauga

SEQ ID NO: 969613 - RNA, 19 nt, Homo sapiens
  misc_RNA (1)...(19): siRNA sense strand
cgaagacgcugcaggagau

SEQ ID NO: 969614 - RNA, 19 nt, Homo sapiens
  misc_RNA (1)...(19): siRNA sense strand
cuacucagaccgccaguua

SEQ ID NO: 969615 - RNA, 19 nt, Homo sapiens
  misc_RNA (1)...(19): siRNA sense strand
gaagugcuuuaaccugaga

SEQ ID NO: 969616 - RNA, 19 nt, Homo sapiens
  misc_RNA (1)...(19): siRNA sense strand
ggaaguggauuugcuaaaa

SEQ ID NO: 969617 - RNA, 19 nt, Homo sapiens
  misc_RNA (1)...(19): siRNA sense strand
gcuaaaauguugccaagaa

SEQ ID NO: 969618 - RNA, 19 nt, Homo sapiens
  misc_RNA (1)...(19): siRNA sense strand
caaacacucucagaacaug

SEQ ID NO: 969619 - RNA, 19 nt, Homo sapiens
  misc_RNA (1)...(19): siRNA sense strand
gccaagaacagaugagaaa

SEQ ID NO: 969620 - RNA, 19 nt, Homo sapiens
  misc_RNA (1)...(19): siRNA sense strand
gagaagaggauugggauug

SEQ ID NO: 969621 - RNA, 19 nt, Homo sapiens
  misc_RNA (1)...(19): siRNA sense strand
ggccuagccucuucuacaa

SEQ ID NO: 969622 - RNA, 19 nt, Homo sapiens
  misc_RNA (1)...(19): siRNA sense strand
gaggugaacugcccauugc

SEQ ID NO: 969623 - RNA, 19 nt, Homo sapiens
  misc_RNA (1)...(19): siRNA sense strand
agaagaggauugggauuga

SEQ ID NO: 969624 - RNA, 19 nt, Homo sapiens
  misc_RNA (1)...(19): siRNA sense strand
gaugagaagugcuuuaacc

SEQ ID NO: 969625 - RNA, 19 nt, Homo sapiens
  misc_RNA (1)...(19): siRNA sense strand
ggauugggauugauuuggu

SEQ ID NO: 969626 - RNA, 19 nt, Homo sapiens
  misc_RNA (1)...(19): siRNA sense strand
gaagaggauugggauugau

SEQ ID NO: 969627 - RNA, 19 nt, Homo sapiens
  misc_RNA (1)...(19): siRNA sense strand
gagcuggacaggcuucuga

SEQ ID NO: 969628 - RNA, 19 nt, Homo sapiens
  misc_RNA (1)...(19): siRNA sense strand
uggacaggcuucugacuga

SEQ ID NO: 969629 - RNA, 19 nt, Homo sapiens
  misc_RNA (1)...(19): siRNA sense strand
uuacuguggucccaagaaa

SEQ ID NO: 969630 - RNA, 19 nt, Homo sapiens
  misc_RNA (1)...(19): siRNA sense strand
gaacagaugagaaaauuag

SEQ ID NO: 969631 - RNA, 19 nt, Homo sapiens
  misc_RNA (1)...(19): siRNA sense strand
ucucugaggugacggaugu

SEQ ID NO: 969632 - RNA, 19 nt, Homo sapiens
  misc_RNA (1)...(19): siRNA sense strand
acaccaaccuggccuucaa

SEQ ID NO: 969633 - RNA, 19 nt, Homo sapiens
  misc_RNA (1)...(19): siRNA sense strand
gcuuuaaccugagaaauac

SEQ ID NO: 969634 - RNA, 19 nt, Homo sapiens
  misc_RNA (1)...(19): siRNA sense strand
ugacugagaaccagaacuu

SEQ ID NO: 969635 - RNA, 19 nt, Homo sapiens
  misc_RNA (1)...(19): siRNA sense strand
gcggagcaccucuuugaga

SEQ ID NO: 969636 - RNA, 19 nt, Homo sapiens
  misc_RNA (1)...(19): siRNA sense strand
aagaaaugcuguggcuuga

SEQ ID NO: 969637 - RNA, 19 nt, Homo sapiens
  misc_RNA (1)...(19): siRNA sense strand
gcagguggccuuggagugu

SEQ ID NO: 969638 - RNA, 19 nt, Homo sapiens
  misc_RNA (1)...(19): siRNA sense strand
aagaauugauauccagaug

SEQ ID NO: 969639 - RNA, 19 nt, Homo sapiens
  misc_RNA (1)...(19): siRNA sense strand
agacgcagcuggcgaagac

SEQ ID NO: 969640 - RNA, 19 nt, Homo sapiens
  misc_RNA (1)...(19): siRNA sense strand
ugcuuuaaccugagaaaua

SEQ ID NO: 969641 - RNA, 19 nt, Homo sapiens
  misc_RNA (1)...(19): siRNA sense strand
gaaauacgucagacugcau

SEQ ID NO: 969642 - RNA, 19 nt, Homo sapiens
  misc_RNA (1)...(19): siRNA sense strand
guaacgacaacaucaaaca

SEQ ID NO: 969643 - RNA, 19 nt, Homo sapiens
  misc_RNA (1)...(19): siRNA sense strand
ggugacggaugugaagaau

SEQ ID NO: 969644 - RNA, 19 nt, Homo sapiens
  misc_RNA (1)...(19): siRNA sense strand
gggaaguggauuugcuaaa

SEQ ID NO: 969645 - RNA, 19 nt, Homo sapiens
  misc_RNA (1)...(19): siRNA sense strand
ggacaucccgcaguugaag

SEQ ID NO: 969646 - RNA, 19 nt, Homo sapiens
  misc_RNA (1)...(19): siRNA sense strand
caaguucaguaacgacaac

SEQ ID NO: 969647 - RNA, 19 nt, Homo sapiens
  misc_RNA (1)...(19): siRNA sense strand
gaccuugucggaucagaug

SEQ ID NO: 969648 - RNA, 19 nt, Homo sapiens
  misc_RNA (1)...(19): siRNA sense strand
caucaaacacucucagaac

SEQ ID NO: 969649 - RNA, 19 nt, Homo sapiens
  misc_RNA (1)...(19): siRNA sense strand
aguugaagcuggugaacga

SEQ ID NO: 969650 - RNA, 19 nt, Homo sapiens
  misc_RNA (1)...(19): siRNA sense strand
gaggauugggauugauuug

SEQ ID NO: 969651 - RNA, 19 nt, Homo sapiens
  misc_RNA (1)...(19): siRNA sense strand
gggccaaguucaguaacga

SEQ ID NO: 969652 - RNA, 19 nt, Homo sapiens
  misc_RNA (1)...(19): siRNA sense strand
cccaguguaucgaugagaa

SEQ ID NO: 969653 - RNA, 19 nt, Homo sapiens
  misc_RNA (1)...(19): siRNA sense strand
guaccgcuaccucaauuca

SEQ ID NO: 969654 - RNA, 19 nt, Homo sapiens
  misc_RNA (1)...(19): siRNA sense strand
caguaacgacaacaucaaa

SEQ ID NO: 969655 - RNA, 19 nt, Homo sapiens
  misc_RNA (1)...(19): siRNA sense strand
gagaaaauuagcucaaaga

SEQ ID NO: 969656 - RNA, 19 nt, Homo sapiens
  misc_RNA (1)...(19): siRNA sense strand
aggcggagcaccucuuuga

SEQ ID NO: 969657 - RNA, 19 nt, Homo sapiens
  misc_RNA (1)...(19): siRNA sense strand
cgccagugauccaggaaug

SEQ ID NO: 969658 - RNA, 19 nt, Homo sapiens
  misc_RNA (1)...(19): siRNA sense strand
ucgaugagaagugcuuuaa

SEQ ID NO: 969659 - RNA, 19 nt, Homo sapiens
  misc_RNA (1)...(19): siRNA sense strand
ugaggugaacugcccauug

SEQ ID NO: 969660 - RNA, 19 nt, Homo sapiens
  misc_RNA (1)...(19): siRNA sense strand
ccugagaccugggccaagu

SEQ ID NO: 969661 - RNA, 19 nt, Homo sapiens
  misc_RNA (1)...(19): siRNA sense strand
cauugcagguggccuugga

SEQ ID NO: 969662 - RNA, 19 nt, Homo sapiens
  misc_RNA (1)...(19): siRNA sense strand
gcuaucagcccuacuaccu

SEQ ID NO: 969663 - RNA, 19 nt, Homo sapiens
  misc_RNA (1)...(19): siRNA sense strand
ucaaacacucucagaacau

SEQ ID NO: 969664 - RNA, 19 nt, Homo sapiens
  misc_RNA (1)...(19): siRNA sense strand
ccaacacccucugcaucga

SEQ ID NO: 969665 - RNA, 19 nt, Homo sapiens
  misc_RNA (1)...(19): siRNA sense strand
gcacgagcucgccaucaag

SEQ ID NO: 969666 - RNA, 19 nt, Homo sapiens
  misc_RNA (1)...(19): siRNA sense strand
aaagcucggcccaguguau

SEQ ID NO: 969667 - RNA, 19 nt, Homo sapiens
  misc_RNA (1)...(19): siRNA sense strand
ccaucaugcugcuggaaag

SEQ ID NO: 969668 - RNA, 19 nt, Homo sapiens
  misc_RNA (1)...(19): siRNA sense strand
ucaguaacgacaacaucaa

SEQ ID NO: 969669 - RNA, 19 nt, Homo sapiens
  misc_RNA (1)...(19): siRNA sense strand
gcaucgacaaggagaagug

SEQ ID NO: 969670 - RNA, 19 nt, Homo sapiens
  misc_RNA (1)...(19): siRNA sense strand
agcacgagcucgccaucaa

SEQ ID NO: 969671 - RNA, 19 nt, Homo sapiens
  misc_RNA (1)...(19): siRNA sense strand
gacaggcuucugacugaga

SEQ ID NO: 969672 - RNA, 19 nt, Homo sapiens
  misc_RNA (1)...(19): siRNA sense strand
aucaaacacucucagaaca

SEQ ID NO: 969673 - RNA, 19 nt, Homo sapiens
  misc_RNA (1)...(19): siRNA sense strand
aaugcuaucagcccuacua

SEQ ID NO: 969674 - RNA, 19 nt, Homo sapiens
  misc_RNA (1)...(19): siRNA sense strand
uggaggcaguucacagaca

SEQ ID NO: 969675 - RNA, 19 nt, Homo sapiens
  misc_RNA (1)...(19): siRNA sense strand
ggacagaaaugguaaagaa

SEQ ID NO: 969676 - RNA, 19 nt, Homo sapiens
  misc_RNA (1)...(19): siRNA sense strand
ugaaagaggugauguugua

SEQ ID NO: 969677 - RNA, 19 nt, Homo sapiens
  misc_RNA (1)...(19): siRNA sense strand
gcauuuggcuuuauugaaa

SEQ ID NO: 969678 - RNA, 19 nt, Homo sapiens
  misc_RNA (1)...(19): siRNA sense strand
gagaugauguugaauuuga

SEQ ID NO: 969679 - RNA, 19 nt, Homo sapiens
  misc_RNA (1)...(19): siRNA sense strand
guaaagaaguugcaacaga

SEQ ID NO: 969680 - RNA, 19 nt, Homo sapiens
  misc_RNA (1)...(19): siRNA sense strand
gagauaagguugaauuuag

SEQ ID NO: 969681 - RNA, 19 nt, Homo sapiens
  misc_RNA (1)...(19): siRNA sense strand
ggaaacccauugcuguuaa

SEQ ID NO: 969682 - RNA, 19 nt, Homo sapiens
  misc_RNA (1)...(19): siRNA sense strand
ugaaggaacuguaaccaaa

SEQ ID NO: 969683 - RNA, 19 nt, Homo sapiens
  misc_RNA (1)...(19): siRNA sense strand
agaccgacgugacaaauua

SEQ ID NO: 969684 - RNA, 19 nt, Homo sapiens
  misc_RNA (1)...(19): siRNA sense strand
gcuggaaacuggagauaaa

SEQ ID NO: 969685 - RNA, 19 nt, Homo sapiens
  misc_RNA (1)...(19): siRNA sense strand
gaguauagcuuguccaaag

SEQ ID NO: 969686 - RNA, 19 nt, Homo sapiens
  misc_RNA (1)...(19): siRNA sense strand
caacagaugucagacuauu

SEQ ID NO: 969687 - RNA, 19 nt, Homo sapiens
  misc_RNA (1)...(19): siRNA sense strand
ggagauaagguugaauuua

SEQ ID NO: 969688 - RNA, 19 nt, Homo sapiens
  misc_RNA (1)...(19): siRNA sense strand
guuaaccucuuacggauuu

SEQ ID NO: 969689 - RNA, 19 nt, Homo sapiens
  misc_RNA (1)...(19): siRNA sense strand
gaaggaggcauuuggcuuu

SEQ ID NO: 969690 - RNA, 19 nt, Homo sapiens
  misc_RNA (1)...(19): siRNA sense strand
gaaguucugucaaauacau

SEQ ID NO: 969691 - RNA, 19 nt, Homo sapiens
  misc_RNA (1)...(19): siRNA sense strand
gaacgucaagcuagacuuu

SEQ ID NO: 969692 - RNA, 19 nt, Homo sapiens
  misc_RNA (1)...(19): siRNA sense strand
gauaugcucucugcucaaa

SEQ ID NO: 969693 - RNA, 19 nt, Homo sapiens
  misc_RNA (1)...(19): siRNA sense strand
gaacuucccuuuggagaca

SEQ ID NO: 969694 - RNA, 19 nt, Homo sapiens
  misc_RNA (1)...(19): siRNA sense strand
uggcaacucugaaggauaa

SEQ ID NO: 969695 - RNA, 19 nt, Homo sapiens
  misc_RNA (1)...(19): siRNA sense strand
uaaagaaguugcaacagau

SEQ ID NO: 969696 - RNA, 19 nt, Homo sapiens
  misc_RNA (1)...(19): siRNA sense strand
ccacaacaauggacauaau

SEQ ID NO: 969697 - RNA, 19 nt, Homo sapiens
  misc_RNA (1)...(19): siRNA sense strand
gaaacagccaaucaugaua

SEQ ID NO: 969698 - RNA, 19 nt, Homo sapiens
  misc_RNA (1)...(19): siRNA sense strand
gacagcagguugcaacuug

SEQ ID NO: 969699 - RNA, 19 nt, Homo sapiens
  misc_RNA (1)...(19): siRNA sense strand
gaaacccauugcuguuaaa

SEQ ID NO: 969700 - RNA, 19 nt, Homo sapiens
  misc_RNA (1)...(19): siRNA sense strand
cauaauggguacccuaaug

SEQ ID NO: 969701 - RNA, 19 nt, Homo sapiens
  misc_RNA (1)...(19): siRNA sense strand
ggaggcauuuggcuuuauu

SEQ ID NO: 969702 - RNA, 19 nt, Homo sapiens
  misc_RNA (1)...(19): siRNA sense strand
gaagauaucagcauugaac

SEQ ID NO: 969703 - RNA, 19 nt, Homo sapiens
  misc_RNA (1)...(19): siRNA sense strand
aagcugaucccaccauuua

SEQ ID NO: 969704 - RNA, 19 nt, Homo sapiens
  misc_RNA (1)...(19): siRNA sense strand
ggaaccagcuccauauugc

SEQ ID NO: 969705 - RNA, 19 nt, Homo sapiens
  misc_RNA (1)...(19): siRNA sense strand
gcuggaaggugaccauguu

SEQ ID NO: 969706 - RNA, 19 nt, Homo sapiens
  misc_RNA (1)...(19): siRNA sense strand
ggugaggucuauccauuug

SEQ ID NO: 969707 - RNA, 19 nt, Homo sapiens
  misc_RNA (1)...(19): siRNA sense strand
guaagugcucgcaacauua

SEQ ID NO: 969708 - RNA, 19 nt, Homo sapiens
  misc_RNA (1)...(19): siRNA sense strand
gaaaucaugcuauuaggau

SEQ ID NO: 969709 - RNA, 19 nt, Homo sapiens
  misc_RNA (1)...(19): siRNA sense strand
uaaugaagcccgagaaaug

SEQ ID NO: 969710 - RNA, 19 nt, Homo sapiens
  misc_RNA (1)...(19): siRNA sense strand
caacagggaguguaugcua

SEQ ID NO: 969711 - RNA, 19 nt, Homo sapiens
  misc_RNA (1)...(19): siRNA sense strand
gagguggaguucucaguga

SEQ ID NO: 969712 - RNA, 19 nt, Homo sapiens
  misc_RNA (1)...(19): siRNA sense strand
ccucacaacuuagagagua

SEQ ID NO: 969713 - RNA, 19 nt, Homo sapiens
  misc_RNA (1)...(19): siRNA sense strand
ggaggagggcgauaugaaa

SEQ ID NO: 969714 - RNA, 19 nt, Homo sapiens
  misc_RNA (1)...(19): siRNA sense strand
caacaaagucagugcagaa

SEQ ID NO: 969715 - RNA, 19 nt, Homo sapiens
  misc_RNA (1)...(19): siRNA sense strand
ucaaauaggagauaagguu

SEQ ID NO: 969716 - RNA, 19 nt, Homo sapiens
  misc_RNA (1)...(19): siRNA sense strand
caaauaaaggcaaagagaa

SEQ ID NO: 969717 - RNA, 19 nt, Homo sapiens
  misc_RNA (1)...(19): siRNA sense strand
caagaaauccucccugaag

SEQ ID NO: 969718 - RNA, 19 nt, Homo sapiens
  misc_RNA (1)...(19): siRNA sense strand
cagaaaugguaaagaaguu

SEQ ID NO: 969719 - RNA, 19 nt, Homo sapiens
  misc_RNA (1)...(19): siRNA sense strand
uguaagugcucgcaacauu

SEQ ID NO: 969720 - RNA, 19 nt, Homo sapiens
  misc_RNA (1)...(19): siRNA sense strand
uaaacauacuggugcugua

SEQ ID NO: 969721 - RNA, 19 nt, Homo sapiens
  misc_RNA (1)...(19): siRNA sense strand
gaaacugacuauugcuuuu

SEQ ID NO: 969722 - RNA, 19 nt, Homo sapiens
  misc_RNA (1)...(19): siRNA sense strand
ggaagcugaucccaccauu

SEQ ID NO: 969723 - RNA, 19 nt, Homo sapiens
  misc_RNA (1)...(19): siRNA sense strand
gggaaacccauugcuguua

SEQ ID NO: 969724 - RNA, 19 nt, Homo sapiens
  misc_RNA (1)...(19): siRNA sense strand
gaaagaaagauccgucaag

SEQ ID NO: 969725 - RNA, 19 nt, Homo sapiens
  misc_RNA (1)...(19): siRNA sense strand
ugaguucucuggugauguu

SEQ ID NO: 969726 - RNA, 19 nt, Homo sapiens
  misc_RNA (1)...(19): siRNA sense strand
aaacagccaaucaugauaa

SEQ ID NO: 969727 - RNA, 19 nt, Homo sapiens
  misc_RNA (1)...(19): siRNA sense strand
ggaucuacuucuccucaaa

SEQ ID NO: 969728 - RNA, 19 nt, Homo sapiens
  misc_RNA (1)...(19): siRNA sense strand
ccaaauaaaggcaaagaga

SEQ ID NO: 969729 - RNA, 19 nt, Homo sapiens
  misc_RNA (1)...(19): siRNA sense strand
gaccauguuagguuuaaua

SEQ ID NO: 969730 - RNA, 19 nt, Homo sapiens
  misc_RNA (1)...(19): siRNA sense strand
gauaucagcauugaacauu

SEQ ID NO: 969731 - RNA, 19 nt, Homo sapiens
  misc_RNA (1)...(19): siRNA sense strand
gcagaugaaguagaguuua

SEQ ID NO: 969732 - RNA, 19 nt, Homo sapiens
  misc_RNA (1)...(19): siRNA sense strand
uaugaaaggugaggucuau

SEQ ID NO: 969733 - RNA, 19 nt, Homo sapiens
  misc_RNA (1)...(19): siRNA sense strand
caagggcacgguuucauuu

SEQ ID NO: 969734 - RNA, 19 nt, Homo sapiens
  misc_RNA (1)...(19): siRNA sense strand
gcucaaagaaaucaugcua

SEQ ID NO: 969735 - RNA, 19 nt, Homo sapiens
  misc_RNA (1)...(19): siRNA sense strand
gcaagugcagcgccuguaa

SEQ ID NO: 969736 - RNA, 19 nt, Homo sapiens
  misc_RNA (1)...(19): siRNA sense strand
caacucugaaggauaauuu

SEQ ID NO: 969737 - RNA, 19 nt, Homo sapiens
  misc_RNA (1)...(19): siRNA sense strand
gaucaguuuggcuucauua

SEQ ID NO: 969738 - RNA, 19 nt, Homo sapiens
  misc_RNA (1)...(19): siRNA sense strand
aguaggagaugauguugaa

SEQ ID NO: 969739 - RNA, 19 nt, Homo sapiens
  misc_RNA (1)...(19): siRNA sense strand
cacaaacuauggcuuacaa

SEQ ID NO: 969740 - RNA, 19 nt, Homo sapiens
  misc_RNA (1)...(19): siRNA sense strand
gcucucugcucaaagaaau

SEQ ID NO: 969741 - RNA, 19 nt, Homo sapiens
  misc_RNA (1)...(19): siRNA sense strand
aggagaugauguugaauuu

SEQ ID NO: 969742 - RNA, 19 nt, Homo sapiens
  misc_RNA (1)...(19): siRNA sense strand
caacuuagagaguaaaucu

SEQ ID NO: 969743 - RNA, 19 nt, Homo sapiens
  misc_RNA (1)...(19): siRNA sense strand
aggauggcauuauugcuua

SEQ ID NO: 969744 - RNA, 19 nt, Homo sapiens
  misc_RNA (1)...(19): siRNA sense strand
gaggauggcauuauugcuu

SEQ ID NO: 969745 - RNA, 19 nt, Homo sapiens
  misc_RNA (1)...(19): siRNA sense strand
ccauauugcagaugaagua

SEQ ID NO: 969746 - RNA, 19 nt, Homo sapiens
  misc_RNA (1)...(19): siRNA sense strand
ggaguaguuugugccauga

SEQ ID NO: 969747 - RNA, 19 nt, Homo sapiens
  misc_RNA (1)...(19): siRNA sense strand
gggauugccugcagaaagg

SEQ ID NO: 969748 - RNA, 19 nt, Homo sapiens
  misc_RNA (1)...(19): siRNA sense strand
gaaagaggugauguuguaa

SEQ ID NO: 969749 - RNA, 19 nt, Homo sapiens
  misc_RNA (1)...(19): siRNA sense strand
caacacagacugaguacca

SEQ ID NO: 969750 - RNA, 19 nt, Homo sapiens
  misc_RNA (1)...(19): siRNA sense strand
gugcagcgccuguaauguu

SEQ ID NO: 969751 - RNA, 19 nt, Homo sapiens
  misc_RNA (1)...(19): siRNA sense strand
gaaguaggagauagcaaga

SEQ ID NO: 969752 - RNA, 19 nt, Homo sapiens
  misc_RNA (1)...(19): siRNA sense strand
gagcgucaaguuccaauug

SEQ ID NO: 969753 - RNA, 19 nt, Homo sapiens
  misc_RNA (1)...(19): siRNA sense strand
aaggugaggucuauccauu

SEQ ID NO: 969754 - RNA, 19 nt, Homo sapiens
  misc_RNA (1)...(19): siRNA sense strand
guuaaacuggugaagauaa

SEQ ID NO: 969755 - RNA, 19 nt, Homo sapiens
  misc_RNA (1)...(19): siRNA sense strand
cauuaacuaugaaguagga

SEQ ID NO: 969756 - RNA, 19 nt, Homo sapiens
  misc_RNA (1)...(19): siRNA sense strand
caaaccuucuccacaacaa

SEQ ID NO: 969757 - RNA, 19 nt, Homo sapiens
  misc_RNA (1)...(19): siRNA sense strand
gaagcugaucccaccauuu

SEQ ID NO: 969758 - RNA, 19 nt, Homo sapiens
  misc_RNA (1)...(19): siRNA sense strand
caaaggcaaaggcaacaaa

SEQ ID NO: 969759 - RNA, 19 nt, Homo sapiens
  misc_RNA (1)...(19): siRNA sense strand
aaacugggguuauugaaaa

SEQ ID NO: 969760 - RNA, 19 nt, Homo sapiens
  misc_RNA (1)...(19): siRNA sense strand
gaggugauguuguaaaaga

SEQ ID NO: 969761 - RNA, 19 nt, Homo sapiens
  misc_RNA (1)...(19): siRNA sense strand
acgaaugaauggacaaguu

SEQ ID NO: 969762 - RNA, 19 nt, Homo sapiens
  misc_RNA (1)...(19): siRNA sense strand
gacauaauggguacccuaa

SEQ ID NO: 969763 - RNA, 19 nt, Homo sapiens
  misc_RNA (1)...(19): siRNA sense strand
gcgagcaaccaauauagaa

SEQ ID NO: 969764 - RNA, 19 nt, Homo sapiens
  misc_RNA (1)...(19): siRNA sense strand
acaaagauacgaaauccaa

SEQ ID NO: 969765 - RNA, 19 nt, Homo sapiens
  misc_RNA (1)...(19): siRNA sense strand
ugcaacagaugucagacua

SEQ ID NO: 969766 - RNA, 19 nt, Homo sapiens
  misc_RNA (1)...(19): siRNA sense strand
aagaaauccucccugaaga

SEQ ID NO: 969767 - RNA, 19 nt, Homo sapiens
  misc_RNA (1)...(19): siRNA sense strand
uggaaugugugaaagauca

SEQ ID NO: 969768 - RNA, 19 nt, Homo sapiens
  misc_RNA (1)...(19): siRNA sense strand
uuacugugguuccugauau

SEQ ID NO: 969769 - RNA, 19 nt, Homo sapiens
  misc_RNA (1)...(19): siRNA sense strand
ccaggacgcaucaaaguug

SEQ ID NO: 969770 - RNA, 19 nt, Homo sapiens
  misc_RNA (1)...(19): siRNA sense strand
ugaaacagccaaucaugau

SEQ ID NO: 969771 - RNA, 19 nt, Homo sapiens
  misc_RNA (1)...(19): siRNA sense strand
ccgucaagcuggugucauu

SEQ ID NO: 969772 - RNA, 19 nt, Homo sapiens
  misc_RNA (1)...(19): siRNA sense strand
gggaaccagcuccauauug

SEQ ID NO: 969773 - RNA, 19 nt, Homo sapiens
  misc_RNA (1)...(19): siRNA sense strand
gggaccagauaacucaaug

SEQ ID NO: 969774 - RNA, 19 nt, Homo sapiens
  misc_RNA (1)...(19): siRNA sense strand
uaugcucucugcucaaaga

SEQ ID NO: 969775 - RNA, 19 nt, Homo sapiens
  misc_RNA (1)...(19): siRNA sense strand
gaacugugccgcauaaaug

SEQ ID NO: 969776 - RNA, 19 nt, Homo sapiens
  misc_RNA (1)...(19): siRNA sense strand
ggaacaaauugacaaccua

SEQ ID NO: 969777 - RNA, 19 nt, Homo sapiens
  misc_RNA (1)...(19): siRNA sense strand
ccgaagggcugcuggaguu

SEQ ID NO: 969778 - RNA, 19 nt, Homo sapiens
  misc_RNA (1)...(19): siRNA sense strand
gaacgacugagacggcuaa

SEQ ID NO: 969779 - RNA, 19 nt, Homo sapiens
  misc_RNA (1)...(19): siRNA sense strand
gcauaaaugaggaucagaa

SEQ ID NO: 969780 - RNA, 19 nt, Homo sapiens
  misc_RNA (1)...(19): siRNA sense strand
ccacaguguugccaaggaa

SEQ ID NO: 969781 - RNA, 19 nt, Homo sapiens
  misc_RNA (1)...(19): siRNA sense strand
gaucuugaccccuauguua

SEQ ID NO: 969782 - RNA, 19 nt, Homo sapiens
  misc_RNA (1)...(19): siRNA sense strand
gcagcucgacucucacgua

SEQ ID NO: 969783 - RNA, 19 nt, Homo sapiens
  misc_RNA (1)...(19): siRNA sense strand
caaccuagccacagaacug

SEQ ID NO: 969784 - RNA, 19 nt, Homo sapiens
  misc_RNA (1)...(19): siRNA sense strand
uaaaugaggaucagaaggu

SEQ ID NO: 969785 - RNA, 19 nt, Homo sapiens
  misc_RNA (1)...(19): siRNA sense strand
gaagguggcccuggaucuu

SEQ ID NO: 969786 - RNA, 19 nt, Homo sapiens
  misc_RNA (1)...(19): siRNA sense strand
guuaacaacauucuacaga

SEQ ID NO: 969787 - RNA, 19 nt, Homo sapiens
  misc_RNA (1)...(19): siRNA sense strand
guagagcuccgggaacaaa

SEQ ID NO: 969788 - RNA, 19 nt, Homo sapiens
  misc_RNA (1)...(19): siRNA sense strand
gggaacaaauugacaaccu

SEQ ID NO: 969789 - RNA, 19 nt, Homo sapiens
  misc_RNA (1)...(19): siRNA sense strand
guacacgccgucagagaga

SEQ ID NO: 969790 - RNA, 19 nt, Homo sapiens
  misc_RNA (1)...(19): siRNA sense strand
gcgacgcguugucuugguu

SEQ ID NO: 969791 - RNA, 19 nt, Homo sapiens
  misc_RNA (1)...(19): siRNA sense strand
ugucuugguuaacaacauu

SEQ ID NO: 969792 - RNA, 19 nt, Homo sapiens
  misc_RNA (1)...(19): siRNA sense strand
ucacguacacgccgucaga

SEQ ID NO: 969793 - RNA, 19 nt, Homo sapiens
  misc_RNA (1)...(19): siRNA sense strand
gcucgacucucacguacac

SEQ ID NO: 969794 - RNA, 19 nt, Homo sapiens
  misc_RNA (1)...(19): siRNA sense strand
ugcagcagcucgacucuca

SEQ ID NO: 969795 - RNA, 19 nt, Homo sapiens
  misc_RNA (1)...(19): siRNA sense strand
cggcuaaaccacaguguug

SEQ ID NO: 969796 - RNA, 19 nt, Homo sapiens
  misc_RNA (1)...(19): siRNA sense strand
cgucagagagagccaggua

SEQ ID NO: 969797 - RNA, 19 nt, Homo sapiens
  misc_RNA (1)...(19): siRNA sense strand
gagcuccgggaacaaauug

SEQ ID NO: 969798 - RNA, 19 nt, Homo sapiens
  misc_RNA (1)...(19): siRNA sense strand
ucagagagagccagguaga

SEQ ID NO: 969799 - RNA, 19 nt, Homo sapiens
  misc_RNA (1)...(19): siRNA sense strand
acagaaugcucaggaacga

SEQ ID NO: 969800 - RNA, 19 nt, Homo sapiens
  misc_RNA (1)...(19): siRNA sense strand
gacgcguugucuugguuaa

SEQ ID NO: 969801 - RNA, 19 nt, Homo sapiens
  misc_RNA (1)...(19): siRNA sense strand
cgacgcguugucuugguua

SEQ ID NO: 969802 - RNA, 19 nt, Homo sapiens
  misc_RNA (1)...(19): siRNA sense strand
ucuacagaaugcucaggaa

SEQ ID NO: 969803 - RNA, 19 nt, Homo sapiens
  misc_RNA (1)...(19): siRNA sense strand
cgacugagacggcuaaacc

SEQ ID NO: 969804 - RNA, 19 nt, Homo sapiens
  misc_RNA (1)...(19): siRNA sense strand
uugacaaccuagccacaga

SEQ ID NO: 969805 - RNA, 19 nt, Homo sapiens
  misc_RNA (1)...(19): siRNA sense strand
ugacaaccuagccacagaa

SEQ ID NO: 969806 - RNA, 19 nt, Homo sapiens
  misc_RNA (1)...(19): siRNA sense strand
cauaaaugaggaucagaag

SEQ ID NO: 969807 - RNA, 19 nt, Homo sapiens
  misc_RNA (1)...(19): siRNA sense strand
ggagagaaguuuccauucc

SEQ ID NO: 969808 - RNA, 19 nt, Homo sapiens
  misc_RNA (1)...(19): siRNA sense strand
gagaaggcccugagcaugu

SEQ ID NO: 969809 - RNA, 19 nt, Homo sapiens
  misc_RNA (1)...(19): siRNA sense strand
ggagacgccuaugaguuug

SEQ ID NO: 969810 - RNA, 19 nt, Homo sapiens
  misc_RNA (1)...(19): siRNA sense strand
gcggagagaaguuuccauu

SEQ ID NO: 969811 - RNA, 19 nt, Homo sapiens
  misc_RNA (1)...(19): siRNA sense strand
gagagaaguuuccauuccu

SEQ ID NO: 969812 - RNA, 19 nt, Homo sapiens
  misc_RNA (1)...(19): siRNA sense strand
aggagacgccuaugaguuu

SEQ ID NO: 969813 - RNA, 19 nt, Homo sapiens
  misc_RNA (1)...(19): siRNA sense strand
gcaccgucaugaacaccuu

SEQ ID NO: 969814 - RNA, 19 nt, Homo sapiens
  misc_RNA (1)...(19): siRNA sense strand
agaaggcccugagcauguu

SEQ ID NO: 969815 - RNA, 19 nt, Homo sapiens
  misc_RNA (1)...(19): siRNA sense strand
gaacaccuucgcucacaag

SEQ ID NO: 969816 - RNA, 19 nt, Homo sapiens
  misc_RNA (1)...(19): siRNA sense strand
caacaucaagacccuagga

SEQ ID NO: 969817 - RNA, 19 nt, Homo sapiens
  misc_RNA (1)...(19): siRNA sense strand
ggacggcagccucacuauc

SEQ ID NO: 969818 - RNA, 19 nt, Homo sapiens
  misc_RNA (1)...(19): siRNA sense strand
gaaggcccugagcauguuu

SEQ ID NO: 969819 - RNA, 19 nt, Homo sapiens
  misc_RNA (1)...(19): siRNA sense strand
ugaacaccuucgcucacaa

SEQ ID NO: 969820 - RNA, 19 nt, Homo sapiens
  misc_RNA (1)...(19): siRNA sense strand
ugaaaggacucacuuggua

SEQ ID NO: 969821 - RNA, 19 nt, Homo sapiens
  misc_RNA (1)...(19): siRNA sense strand
gaggauauuugcugucuuu

SEQ ID NO: 969822 - RNA, 19 nt, Homo sapiens
  misc_RNA (1)...(19): siRNA sense strand
gaagucaucuggacaagca

SEQ ID NO: 969823 - RNA, 19 nt, Homo sapiens
  misc_RNA (1)...(19): siRNA sense strand
cauaguagcuacagacaga

SEQ ID NO: 969824 - RNA, 19 nt, Homo sapiens
  misc_RNA (1)...(19): siRNA sense strand
agaccuggcugcacuaauu

SEQ ID NO: 969825 - RNA, 19 nt, Homo sapiens
  misc_RNA (1)...(19): siRNA sense strand
ggagaaugauggaugugaa

SEQ ID NO: 969826 - RNA, 19 nt, Homo sapiens
  misc_RNA (1)...(19): siRNA sense strand
ucaaagaagcaaagugaua

SEQ ID NO: 969827 - RNA, 19 nt, Homo sapiens
  misc_RNA (1)...(19): siRNA sense strand
gaaaggacucacuugguaa

SEQ ID NO: 969828 - RNA, 19 nt, Homo sapiens
  misc_RNA (1)...(19): siRNA sense strand
gcacauccuccaaaugaaa

SEQ ID NO: 969829 - RNA, 19 nt, Homo sapiens
  misc_RNA (1)...(19): siRNA sense strand
cacaacaacuaaugagauu

SEQ ID NO: 969830 - RNA, 19 nt, Homo sapiens
  misc_RNA (1)...(19): siRNA sense strand
gaagcaaagugauacacau

SEQ ID NO: 969831 - RNA, 19 nt, Homo sapiens
  misc_RNA (1)...(19): siRNA sense strand
ugacauucaucuuccguuu

SEQ ID NO: 969832 - RNA, 19 nt, Homo sapiens
  misc_RNA (1)...(19): siRNA sense strand
acauucaucuuccguuuaa

SEQ ID NO: 969833 - RNA, 19 nt, Homo sapiens
  misc_RNA (1)...(19): siRNA sense strand
gaauuacugugaaagucaa

SEQ ID NO: 969834 - RNA, 19 nt, Homo sapiens
  misc_RNA (1)...(19): siRNA sense strand
ucugggagccaucuuauua

SEQ ID NO: 969835 - RNA, 19 nt, Homo sapiens
  misc_RNA (1)...(19): siRNA sense strand
caucaaguccugaguggua

SEQ ID NO: 969836 - RNA, 19 nt, Homo sapiens
  misc_RNA (1)...(19): siRNA sense strand
cuaauugucuauugggaaa

SEQ ID NO: 969837 - RNA, 19 nt, Homo sapiens
  misc_RNA (1)...(19): siRNA sense strand
gaaucaacacaacaacuaa

SEQ ID NO: 969838 - RNA, 19 nt, Homo sapiens
  misc_RNA (1)...(19): siRNA sense strand
gacaagcagugaccaucaa

SEQ ID NO: 969839 - RNA, 19 nt, Homo sapiens
  misc_RNA (1)...(19): siRNA sense strand
caagauacaaacucaaaga

SEQ ID NO: 969840 - RNA, 19 nt, Homo sapiens
  misc_RNA (1)...(19): siRNA sense strand
ggacucacuugguaauucu

SEQ ID NO: 969841 - RNA, 19 nt, Homo sapiens
  misc_RNA (1)...(19): siRNA sense strand
ggcauuugcugaacgcauu

SEQ ID NO: 969842 - RNA, 19 nt, Homo sapiens
  misc_RNA (1)...(19): siRNA sense strand
caagcgaauuacugugaaa

SEQ ID NO: 969843 - RNA, 19 nt, Homo sapiens
  misc_RNA (1)...(19): siRNA sense strand
cauccaagauacaaacuca

SEQ ID NO: 969844 - RNA, 19 nt, Homo sapiens
  misc_RNA (1)...(19): siRNA sense strand
ggacaagcagugaccauca

SEQ ID NO: 969845 - RNA, 19 nt, Homo sapiens
  misc_RNA (1)...(19): siRNA sense strand
aaauguggcauccaagaua

SEQ ID NO: 969846 - RNA, 19 nt, Homo sapiens
  misc_RNA (1)...(19): siRNA sense strand
ggaccuauaugugguagag

SEQ ID NO: 969847 - RNA, 19 nt, Homo sapiens
  misc_RNA (1)...(19): siRNA sense strand
ggaaauggaggauaagaac

SEQ ID NO: 969848 - RNA, 19 nt, Homo sapiens
  misc_RNA (1)...(19): siRNA sense strand
gguagaguaugguagcaau

SEQ ID NO: 969849 - RNA, 19 nt, Homo sapiens
  misc_RNA (1)...(19): siRNA sense strand
gagaaugauggaugugaaa

SEQ ID NO: 969850 - RNA, 19 nt, Homo sapiens
  misc_RNA (1)...(19): siRNA sense strand
gacauucaucuuccguuua

SEQ ID NO: 969851 - RNA, 19 nt, Homo sapiens
  misc_RNA (1)...(19): siRNA sense strand
caaaugaaaggacucacuu

SEQ ID NO: 969852 - RNA, 19 nt, Homo sapiens
  misc_RNA (1)...(19): siRNA sense strand
agaaucaacacaacaacua

SEQ ID NO: 969853 - RNA, 19 nt, Homo sapiens
  misc_RNA (1)...(19): siRNA sense strand
uggcacauccuccaaauga

SEQ ID NO: 969854 - RNA, 19 nt, Homo sapiens
  misc_RNA (1)...(19): siRNA sense strand
ggaaaugcugcacuucaga

SEQ ID NO: 969855 - RNA, 19 nt, Homo sapiens
  misc_RNA (1)...(19): siRNA sense strand
gagaagcuuuucaauguga

SEQ ID NO: 969856 - RNA, 19 nt, Homo sapiens
  misc_RNA (1)...(19): siRNA sense strand
gaguaugguagcaauauga

SEQ ID NO: 969857 - RNA, 19 nt, Homo sapiens
  misc_RNA (1)...(19): siRNA sense strand
gcacuucagaucacagaug

SEQ ID NO: 969858 - RNA, 19 nt, Homo sapiens
  misc_RNA (1)...(19): siRNA sense strand
gaaaugcugcacuucagau

SEQ ID NO: 969859 - RNA, 19 nt, Homo sapiens
  misc_RNA (1)...(19): siRNA sense strand
gggaaaugcugcacuucag

SEQ ID NO: 969860 - RNA, 19 nt, Homo sapiens
  misc_RNA (1)...(19): siRNA sense strand
ccagucaccucugaacaug

SEQ ID NO: 969861 - RNA, 19 nt, Homo sapiens
  misc_RNA (1)...(19): siRNA sense strand
gcgaauuacugugaaaguc

SEQ ID NO: 969862 - RNA, 19 nt, Homo sapiens
  misc_RNA (1)...(19): siRNA sense strand
ggauauuugcugucuuuau

SEQ ID NO: 969863 - RNA, 19 nt, Homo sapiens
  misc_RNA (1)...(19): siRNA sense strand
gggaaauggaggauaagaa

SEQ ID NO: 969864 - RNA, 19 nt, Homo sapiens
  misc_RNA (1)...(19): siRNA sense strand
gaaauggaggauaagaaca

SEQ ID NO: 969865 - RNA, 19 nt, Homo sapiens
  misc_RNA (1)...(19): siRNA sense strand
gaaagucaaugccccauac

SEQ ID NO: 969866 - RNA, 19 nt, Homo sapiens
  misc_RNA (1)...(19): siRNA sense strand
guguaccgcugcaugauca

SEQ ID NO: 969867 - RNA, 19 nt, Homo sapiens
  misc_RNA (1)...(19): siRNA sense strand
caaagaagcaaagugauac

SEQ ID NO: 969868 - RNA, 19 nt, Homo sapiens
  misc_RNA (1)...(19): siRNA sense strand
acucaaagaagcaaaguga

SEQ ID NO: 969869 - RNA, 19 nt, Homo sapiens
  misc_RNA (1)...(19): siRNA sense strand
agucaccucugaacaugaa

SEQ ID NO: 969870 - RNA, 19 nt, Homo sapiens
  misc_RNA (1)...(19): siRNA sense strand
auugggaaauggaggauaa

SEQ ID NO: 969871 - RNA, 19 nt, Homo sapiens
  misc_RNA (1)...(19): siRNA sense strand
ggaaaaccauacagcugaa

SEQ ID NO: 969872 - RNA, 19 nt, Homo sapiens
  misc_RNA (1)...(19): siRNA sense strand
cuaaugagauuuucuacug

SEQ ID NO: 969873 - RNA, 19 nt, Homo sapiens
  misc_RNA (1)...(19): siRNA sense strand
guagaguaugguagcaaua

SEQ ID NO: 969874 - RNA, 19 nt, Homo sapiens
  misc_RNA (1)...(19): siRNA sense strand
caagagagaggagaagcuu

SEQ ID NO: 969875 - RNA, 19 nt, Homo sapiens
  misc_RNA (1)...(19): siRNA sense strand
caccaccaauuccaagaga

SEQ ID NO: 969876 - RNA, 19 nt, Homo sapiens
  misc_RNA (1)...(19): siRNA sense strand
cgaauuacugugaaaguca

SEQ ID NO: 969877 - RNA, 19 nt, Homo sapiens
  misc_RNA (1)...(19): siRNA sense strand
aggagaagcuuuucaaugu

SEQ ID NO: 969878 - RNA, 19 nt, Homo sapiens
  misc_RNA (1)...(19): siRNA sense strand
caacacaacaacuaaugag

SEQ ID NO: 969879 - RNA, 19 nt, Homo sapiens
  misc_RNA (1)...(19): siRNA sense strand
acacugagaaucaacacaa

SEQ ID NO: 969880 - RNA, 19 nt, Homo sapiens
  misc_RNA (1)...(19): siRNA sense strand
acaagcgaauuacugugaa

SEQ ID NO: 969881 - RNA, 19 nt, Homo sapiens
  misc_RNA (1)...(19): siRNA sense strand
ugggagccaucuuauuaug

SEQ ID NO: 969882 - RNA, 19 nt, Homo sapiens
  misc_RNA (1)...(19): siRNA sense strand
caaggaccuauauguggua

SEQ ID NO: 969883 - RNA, 19 nt, Homo sapiens
  misc_RNA (1)...(19): siRNA sense strand
ucaacacaacaacuaauga

SEQ ID NO: 969884 - RNA, 19 nt, Homo sapiens
  misc_RNA (1)...(19): siRNA sense strand
uacaagcgaauuacuguga

SEQ ID NO: 969885 - RNA, 19 nt, Homo sapiens
  misc_RNA (1)...(19): siRNA sense strand
ggcacauccuccaaaugaa

SEQ ID NO: 969886 - RNA, 19 nt, Homo sapiens
  misc_RNA (1)...(19): siRNA sense strand
accuauaugugguagagua

SEQ ID NO: 969887 - RNA, 19 nt, Homo sapiens
  misc_RNA (1)...(19): siRNA sense strand
guaagaccaccaccaccaa

SEQ ID NO: 969888 - RNA, 19 nt, Homo sapiens
  misc_RNA (1)...(19): siRNA sense strand
cugcacuaauugucuauug

SEQ ID NO: 969889 - RNA, 19 nt, Homo sapiens
  misc_RNA (1)...(19): siRNA sense strand
gcaaauucccaguagaaaa

SEQ ID NO: 969890 - RNA, 19 nt, Homo sapiens
  misc_RNA (1)...(19): siRNA sense strand
uggcugcacuaauugucua

SEQ ID NO: 969891 - RNA, 19 nt, Homo sapiens
  misc_RNA (1)...(19): siRNA sense strand
acacaacaacuaaugagau

SEQ ID NO: 969892 - RNA, 19 nt, Homo sapiens
  misc_RNA (1)...(19): siRNA sense strand
aaaccauacagcugaauug

SEQ ID NO: 969893 - RNA, 19 nt, Homo sapiens
  misc_RNA (1)...(19): siRNA sense strand
ccugggaaaugcugcacuu

SEQ ID NO: 969894 - RNA, 19 nt, Homo sapiens
  misc_RNA (1)...(19): siRNA sense strand
caacaaaaucaaccaaaga

SEQ ID NO: 969895 - RNA, 19 nt, Homo sapiens
  misc_RNA (1)...(19): siRNA sense strand
uauaugugguagaguaugg

SEQ ID NO: 969896 - RNA, 19 nt, Homo sapiens
  misc_RNA (1)...(19): siRNA sense strand
aagcaaagugauacacauu

SEQ ID NO: 969897 - RNA, 19 nt, Homo sapiens
  misc_RNA (1)...(19): siRNA sense strand
gggagaaugauggauguga

SEQ ID NO: 969898 - RNA, 19 nt, Homo sapiens
  misc_RNA (1)...(19): siRNA sense strand
ccaccaauuccaagagaga

SEQ ID NO: 969899 - RNA, 19 nt, Homo sapiens
  misc_RNA (1)...(19): siRNA sense strand
ggagaagcuuuucaaugug

SEQ ID NO: 969900 - RNA, 19 nt, Homo sapiens
  misc_RNA (1)...(19): siRNA sense strand
guguagcacugacauucau

SEQ ID NO: 969901 - RNA, 19 nt, Homo sapiens
  misc_RNA (1)...(19): siRNA sense strand
cuuauuaugccuuggugua

SEQ ID NO: 969902 - RNA, 19 nt, Homo sapiens
  misc_RNA (1)...(19): siRNA sense strand
ccagcacacugagaaucaa

SEQ ID NO: 969903 - RNA, 19 nt, Homo sapiens
  misc_RNA (1)...(19): siRNA sense strand
cacuucagaucacagaugu

SEQ ID NO: 969904 - RNA, 19 nt, Homo sapiens
  misc_RNA (1)...(19): siRNA sense strand
aaagugauacacauuugga

SEQ ID NO: 969905 - RNA, 19 nt, Homo sapiens
  misc_RNA (1)...(19): siRNA sense strand
gaacuaccucuggcacauc

SEQ ID NO: 969906 - RNA, 19 nt, Homo sapiens
  misc_RNA (1)...(19): siRNA sense strand
gaauuggucaucccagaac

SEQ ID NO: 969907 - RNA, 19 nt, Homo sapiens
  misc_RNA (1)...(19): siRNA sense strand
gagaaucaacacaacaacu

SEQ ID NO: 969908 - RNA, 19 nt, Homo sapiens
  misc_RNA (1)...(19): siRNA sense strand
cugaacgcauuuacuguca

SEQ ID NO: 969909 - RNA, 19 nt, Homo sapiens
  misc_RNA (1)...(19): siRNA sense strand
agaguaugguagcaauaug

SEQ ID NO: 969910 - RNA, 19 nt, Homo sapiens
  misc_RNA (1)...(19): siRNA sense strand
uggauccagucaccucuga

SEQ ID NO: 969911 - RNA, 19 nt, Homo sapiens
  misc_RNA (1)...(19): siRNA sense strand
uccaagauacaaacucaaa

SEQ ID NO: 969912 - RNA, 19 nt, Homo sapiens
  misc_RNA (1)...(19): siRNA sense strand
gaaaagggagaaugaugga

SEQ ID NO: 969913 - RNA, 19 nt, Homo sapiens
  misc_RNA (1)...(19): siRNA sense strand
uagaguaugguagcaauau

SEQ ID NO: 969914 - RNA, 19 nt, Homo sapiens
  misc_RNA (1)...(19): siRNA sense strand
uaugguagcaauaugacaa

SEQ ID NO: 969915 - RNA, 19 nt, Homo sapiens
  misc_RNA (1)...(19): siRNA sense strand
gaggagaagcuuuucaaug

SEQ ID NO: 969916 - RNA, 19 nt, Homo sapiens
  misc_RNA (1)...(19): siRNA sense strand
aagggagaaugauggaugu

SEQ ID NO: 969917 - RNA, 19 nt, Homo sapiens
  misc_RNA (1)...(19): siRNA sense strand
gaccuggcugcacuaauug

SEQ ID NO: 969918 - RNA, 19 nt, Homo sapiens
  misc_RNA (1)...(19): siRNA sense strand
uucaugaccuacuggcauu

SEQ ID NO: 969919 - RNA, 19 nt, Homo sapiens
  misc_RNA (1)...(19): siRNA sense strand
gguguagcacugacauuca

SEQ ID NO: 969920 - RNA, 19 nt, Homo sapiens
  misc_RNA (1)...(19): siRNA sense strand
caagacaucuggauuuaug

SEQ ID NO: 969921 - RNA, 19 nt, Homo sapiens
  misc_RNA (1)...(19): siRNA sense strand
gcauuucucuggauaggua

SEQ ID NO: 969922 - RNA, 19 nt, Homo sapiens
  misc_RNA (1)...(19): siRNA sense strand
ggaauaacauuggcauaau

SEQ ID NO: 969923 - RNA, 19 nt, Homo sapiens
  misc_RNA (1)...(19): siRNA sense strand
ucauggugcuggccuauua

SEQ ID NO: 969924 - RNA, 19 nt, Homo sapiens
  misc_RNA (1)...(19): siRNA sense strand
gcaucuaugucacagcuaa

SEQ ID NO: 969925 - RNA, 19 nt, Homo sapiens
  misc_RNA (1)...(19): siRNA sense strand
ccaauauuguggauccuuu

SEQ ID NO: 969926 - RNA, 19 nt, Homo sapiens
  misc_RNA (1)...(19): siRNA sense strand
uauuguggauccuuucaua

SEQ ID NO: 969927 - RNA, 19 nt, Homo sapiens
  misc_RNA (1)...(19): siRNA sense strand
aaccagaacucuaacucua

SEQ ID NO: 969928 - RNA, 19 nt, Homo sapiens
  misc_RNA (1)...(19): siRNA sense strand
guucaagacaucuggauuu

SEQ ID NO: 969929 - RNA, 19 nt, Homo sapiens
  misc_RNA (1)...(19): siRNA sense strand
gccagcaacuucuccuuug

SEQ ID NO: 969930 - RNA, 19 nt, Homo sapiens
  misc_RNA (1)...(19): siRNA sense strand
caaacuugaugcuaaugug

SEQ ID NO: 969931 - RNA, 19 nt, Homo sapiens
  misc_RNA (1)...(19): siRNA sense strand
agacgugccuuccucauca

SEQ ID NO: 969932 - RNA, 19 nt, Homo sapiens
  misc_RNA (1)...(19): siRNA sense strand
agaggaaguucaaccagaa

SEQ ID NO: 969933 - RNA, 19 nt, Homo sapiens
  misc_RNA (1)...(19): siRNA sense strand
gaugagcgcuaccgaagac

SEQ ID NO: 969934 - RNA, 19 nt, Homo sapiens
  misc_RNA (1)...(19): siRNA sense strand
ggacaggcagcucaggaaa

SEQ ID NO: 969935 - RNA, 19 nt, Homo sapiens
  misc_RNA (1)...(19): siRNA sense strand
uaauggauccacacaugua

SEQ ID NO: 969936 - RNA, 19 nt, Homo sapiens
  misc_RNA (1)...(19): siRNA sense strand
gcucugugguggccuucua

SEQ ID NO: 969937 - RNA, 19 nt, Homo sapiens
  misc_RNA (1)...(19): siRNA sense strand
uucaagacaucuggauuua

SEQ ID NO: 969938 - RNA, 19 nt, Homo sapiens
  misc_RNA (1)...(19): siRNA sense strand
gccaagacccugugcauca

SEQ ID NO: 969939 - RNA, 19 nt, Homo sapiens
  misc_RNA (1)...(19): siRNA sense strand
augcaaggcuggaauaaca

SEQ ID NO: 969940 - RNA, 19 nt, Homo sapiens
  misc_RNA (1)...(19): siRNA sense strand
cuaaggagcaugcccauca

SEQ ID NO: 969941 - RNA, 19 nt, Homo sapiens
  misc_RNA (1)...(19): siRNA sense strand
gcaaggcuggaauaacauu

SEQ ID NO: 969942 - RNA, 19 nt, Homo sapiens
  misc_RNA (1)...(19): siRNA sense strand
gcucacaacggcaucgauu

SEQ ID NO: 969943 - RNA, 19 nt, Homo sapiens
  misc_RNA (1)...(19): siRNA sense strand
uggaauaacauuggcauaa

SEQ ID NO: 969944 - RNA, 19 nt, Homo sapiens
  misc_RNA (1)...(19): siRNA sense strand
uggcucggcuauaucaauu

SEQ ID NO: 969945 - RNA, 19 nt, Homo sapiens
  misc_RNA (1)...(19): siRNA sense strand
guucaaccacaaccauuaa

SEQ ID NO: 969946 - RNA, 19 nt, Homo sapiens
  misc_RNA (1)...(19): siRNA sense strand
ccuauuaccgcaucuaugu

SEQ ID NO: 969947 - RNA, 19 nt, Homo sapiens
  misc_RNA (1)...(19): siRNA sense strand
ucuacgccuucuugaauaa

SEQ ID NO: 969948 - RNA, 19 nt, Homo sapiens
  misc_RNA (1)...(19): siRNA sense strand
gccagacugucccuuguuc

SEQ ID NO: 969949 - RNA, 19 nt, Homo sapiens
  misc_RNA (1)...(19): siRNA sense strand
auuaauggauccacacaug

SEQ ID NO: 969950 - RNA, 19 nt, Homo sapiens
  misc_RNA (1)...(19): siRNA sense strand
ggaaccugcuggugauggu

SEQ ID NO: 969951 - RNA, 19 nt, Homo sapiens
  misc_RNA (1)...(19): siRNA sense strand
acguuucucucgacgguua

SEQ ID NO: 969952 - RNA, 19 nt, Homo sapiens
  misc_RNA (1)...(19): siRNA sense strand
gggccagacugucccuugu

SEQ ID NO: 969953 - RNA, 19 nt, Homo sapiens
  misc_RNA (1)...(19): siRNA sense strand
cauuguaucucuugcuuuu

SEQ ID NO: 969954 - RNA, 19 nt, Homo sapiens
  misc_RNA (1)...(19): siRNA sense strand
uuucaccugugcugcauuu

SEQ ID NO: 969955 - RNA, 19 nt, Homo sapiens
  misc_RNA (1)...(19): siRNA sense strand
aaacuugaugcuaauguga

SEQ ID NO: 969956 - RNA, 19 nt, Homo sapiens
  misc_RNA (1)...(19): siRNA sense strand
ccaagacccugugcaucau

SEQ ID NO: 969957 - RNA, 19 nt, Homo sapiens
  misc_RNA (1)...(19): siRNA sense strand
uugcggaucugcugguuuc

SEQ ID NO: 969958 - RNA, 19 nt, Homo sapiens
  misc_RNA (1)...(19): siRNA sense strand
ucucuacgccuucuugaau

SEQ ID NO: 969959 - RNA, 19 nt, Homo sapiens
  misc_RNA (1)...(19): siRNA sense strand
ggagcaugcccaucagauc

SEQ ID NO: 969960 - RNA, 19 nt, Homo sapiens
  misc_RNA (1)...(19): siRNA sense strand
cugcugggcaccauucuuu

SEQ ID NO: 969961 - RNA, 19 nt, Homo sapiens
  misc_RNA (1)...(19): siRNA sense strand
auaaugcaaggcuggaaua

SEQ ID NO: 969962 - RNA, 19 nt, Homo sapiens
  misc_RNA (1)...(19): siRNA sense strand
cucuacgccuucuugaaua

SEQ ID NO: 969963 - RNA, 19 nt, Homo sapiens
  misc_RNA (1)...(19): siRNA sense strand
ggggagguguuuugucuug

SEQ ID NO: 969964 - RNA, 19 nt, Homo sapiens
  misc_RNA (1)...(19): siRNA sense strand
gggacaggcagcucaggaa

SEQ ID NO: 969965 - RNA, 19 nt, Homo sapiens
  misc_RNA (1)...(19): siRNA sense strand
caucccauuucuccucaug

SEQ ID NO: 969966 - RNA, 19 nt, Homo sapiens
  misc_RNA (1)...(19): siRNA sense strand
ggccuucuacaucccauuu

SEQ ID NO: 969967 - RNA, 19 nt, Homo sapiens
  misc_RNA (1)...(19): siRNA sense strand
ggagguguuuugucuuguu

SEQ ID NO: 969968 - RNA, 19 nt, Homo sapiens
  misc_RNA (1)...(19): siRNA sense strand
ccagcaacuucuccuuugg

SEQ ID NO: 969969 - RNA, 19 nt, Homo sapiens
  misc_RNA (1)...(19): siRNA sense strand
uguucaaccacaaccauua

SEQ ID NO: 969970 - RNA, 19 nt, Homo sapiens
  misc_RNA (1)...(19): siRNA sense strand
caaccagaacucuaacucu

SEQ ID NO: 969971 - RNA, 19 nt, Homo sapiens
  misc_RNA (1)...(19): siRNA sense strand
ugagcugguucaagacauc

SEQ ID NO: 969972 - RNA, 19 nt, Homo sapiens
  misc_RNA (1)...(19): siRNA sense strand
augcuaaugugaguucuga

SEQ ID NO: 969973 - RNA, 19 nt, Homo sapiens
  misc_RNA (1)...(19): siRNA sense strand
cauucuuugucaccaauau

SEQ ID NO: 969974 - RNA, 19 nt, Homo sapiens
  misc_RNA (1)...(19): siRNA sense strand
gcaugaggacagagaccaa

SEQ ID NO: 969975 - RNA, 19 nt, Homo sapiens
  misc_RNA (1)...(19): siRNA sense strand
uacguacugugucuucaug

SEQ ID NO: 969976 - RNA, 19 nt, Homo sapiens
  misc_RNA (1)...(19): siRNA sense strand
uaaugcaaggcuggaauaa

SEQ ID NO: 969977 - RNA, 19 nt, Homo sapiens
  misc_RNA (1)...(19): siRNA sense strand
gccagccuuuggucuauag

SEQ ID NO: 969978 - RNA, 19 nt, Homo sapiens
  misc_RNA (1)...(19): siRNA sense strand
gugcugcauuucucuggau

SEQ ID NO: 969979 - RNA, 19 nt, Homo sapiens
  misc_RNA (1)...(19): siRNA sense strand
ucucgacgguuauccugau

SEQ ID NO: 969980 - RNA, 19 nt, Homo sapiens
  misc_RNA (1)...(19): siRNA sense strand
ucaaccacaaccauuaaug

SEQ ID NO: 969981 - RNA, 19 nt, Homo sapiens
  misc_RNA (1)...(19): siRNA sense strand
ucacaacggcaucgauuuu

SEQ ID NO: 969982 - RNA, 19 nt, Homo sapiens
  misc_RNA (1)...(19): siRNA sense strand
uggauccuuucauagacua

SEQ ID NO: 969983 - RNA, 19 nt, Homo sapiens
  misc_RNA (1)...(19): siRNA sense strand
gaggacagagaccaaagca

SEQ ID NO: 969984 - RNA, 19 nt, Homo sapiens
  misc_RNA (1)...(19): siRNA sense strand
uaaggagcaugcccaucag

SEQ ID NO: 969985 - RNA, 19 nt, Homo sapiens
  misc_RNA (1)...(19): siRNA sense strand
agaacucuaacucuacgua

SEQ ID NO: 969986 - RNA, 19 nt, Homo sapiens
  misc_RNA (1)...(19): siRNA sense strand
gaugcccuuuggugccauu

SEQ ID NO: 969987 - RNA, 19 nt, Homo sapiens
  misc_RNA (1)...(19): siRNA sense strand
cgccagcaacuucuccuuu

SEQ ID NO: 969988 - RNA, 19 nt, Homo sapiens
  misc_RNA (1)...(19): siRNA sense strand
cagacugucccuuguucaa

SEQ ID NO: 969989 - RNA, 19 nt, Homo sapiens
  misc_RNA (1)...(19): siRNA sense strand
caccugugcugcauuucuc

SEQ ID NO: 969990 - RNA, 19 nt, Homo sapiens
  misc_RNA (1)...(19): siRNA sense strand
gauccacacauguacuaag

SEQ ID NO: 969991 - RNA, 19 nt, Homo sapiens
  misc_RNA (1)...(19): siRNA sense strand
ugaguucugaggaggguuu

SEQ ID NO: 969992 - RNA, 19 nt, Homo sapiens
  misc_RNA (1)...(19): siRNA sense strand
caccauucuuugucaccaa

SEQ ID NO: 969993 - RNA, 19 nt, Homo sapiens
  misc_RNA (1)...(19): siRNA sense strand
gcugggcaccauucuuugu

SEQ ID NO: 969994 - RNA, 19 nt, Homo sapiens
  misc_RNA (1)...(19): siRNA sense strand
gaaagagaauccauuauug

SEQ ID NO: 969995 - RNA, 19 nt, Homo sapiens
  misc_RNA (1)...(19): siRNA sense strand
gaacuucgcucaaucuuac

SEQ ID NO: 969996 - RNA, 19 nt, Homo sapiens
  misc_RNA (1)...(19): siRNA sense strand
ggauggaccugcccaguuu

SEQ ID NO: 969997 - RNA, 19 nt, Homo sapiens
  misc_RNA (1)...(19): siRNA sense strand
gagcaccacugaaaucuug

SEQ ID NO: 969998 - RNA, 19 nt, Homo sapiens
  misc_RNA (1)...(19): siRNA sense strand
ugacagagcuaaucaccuu

SEQ ID NO: 969999 - RNA, 19 nt, Homo sapiens
  misc_RNA (1)...(19): siRNA sense strand
gacaagaacuucgcucaau

SEQ ID NO: 970000 - RNA, 19 nt, Homo sapiens
  misc_RNA (1)...(19): siRNA sense strand
gaugcgagaugacuuaagu

SEQ ID NO: 970001 - RNA, 19 nt, Homo sapiens
  misc_RNA (1)...(19): siRNA sense strand
caagagggccaccaucaaa

SEQ ID NO: 970002 - RNA, 19 nt, Homo sapiens
  misc_RNA (1)...(19): siRNA sense strand
agagaaagagaauccauua

SEQ ID NO: 970003 - RNA, 19 nt, Homo sapiens
  misc_RNA (1)...(19): siRNA sense strand
cagagacccugccagagaa

SEQ ID NO: 970004 - RNA, 19 nt, Homo sapiens
  misc_RNA (1)...(19): siRNA sense strand
cguggagucugaauucaaa

SEQ ID NO: 970005 - RNA, 19 nt, Homo sapiens
  misc_RNA (1)...(19): siRNA sense strand
gacaggugcccauggauuu

SEQ ID NO: 970006 - RNA, 19 nt, Homo sapiens
  misc_RNA (1)...(19): siRNA sense strand
ggugacaggugcccaugga

SEQ ID NO: 970007 - RNA, 19 nt, Homo sapiens
  misc_RNA (1)...(19): siRNA sense strand
gaagccagagcaccacuga

SEQ ID NO: 970008 - RNA, 19 nt, Homo sapiens
  misc_RNA (1)...(19): siRNA sense strand
caacaugcagcucaacaau

SEQ ID NO: 970009 - RNA, 19 nt, Homo sapiens
  misc_RNA (1)...(19): siRNA sense strand
gcuaaucaccuuugcaucu

SEQ ID NO: 970010 - RNA, 19 nt, Homo sapiens
  misc_RNA (1)...(19): siRNA sense strand
cagcugguaugcaagauag

SEQ ID NO: 970011 - RNA, 19 nt, Homo sapiens
  misc_RNA (1)...(19): siRNA sense strand
agagaugcgagaugacuua

SEQ ID NO: 970012 - RNA, 19 nt, Homo sapiens
  misc_RNA (1)...(19): siRNA sense strand
gagaaagagaauccauuau

SEQ ID NO: 970013 - RNA, 19 nt, Homo sapiens
  misc_RNA (1)...(19): siRNA sense strand
acaugcagcucaacaaugg

SEQ ID NO: 970014 - RNA, 19 nt, Homo sapiens
  misc_RNA (1)...(19): siRNA sense strand
gcagcugguaugcaagaua

SEQ ID NO: 970015 - RNA, 19 nt, Homo sapiens
  misc_RNA (1)...(19): siRNA sense strand
ggagucaggaagacaagaa

SEQ ID NO: 970016 - RNA, 19 nt, Homo sapiens
  misc_RNA (1)...(19): siRNA sense strand
uugcagagaugcgagauga

SEQ ID NO: 970017 - RNA, 19 nt, Homo sapiens
  misc_RNA (1)...(19): siRNA sense strand
gagcuaaucaccuuugcau

SEQ ID NO: 970018 - RNA, 19 nt, Homo sapiens
  misc_RNA (1)...(19): siRNA sense strand
ccacaaucccagagaaaug

SEQ ID NO: 970019 - RNA, 19 nt, Homo sapiens
  misc_RNA (1)...(19): siRNA sense strand
acaagaacuucgcucaauc

SEQ ID NO: 970020 - RNA, 19 nt, Homo sapiens
  misc_RNA (1)...(19): siRNA sense strand
cuaaucaccuuugcaucuu

SEQ ID NO: 970021 - RNA, 19 nt, Homo sapiens
  misc_RNA (1)...(19): siRNA sense strand
ucggacaggugccggcuuu

SEQ ID NO: 970022 - RNA, 19 nt, Homo sapiens
  misc_RNA (1)...(19): siRNA sense strand
ggaccugcccaguuuggaa

SEQ ID NO: 970023 - RNA, 19 nt, Homo sapiens
  misc_RNA (1)...(19): siRNA sense strand
gaccguggagucugaauuc

SEQ ID NO: 970024 - RNA, 19 nt, Homo sapiens
  misc_RNA (1)...(19): siRNA sense strand
gcuggaggcagacaugcua

SEQ ID NO: 970025 - RNA, 19 nt, Homo sapiens
  misc_RNA (1)...(19): siRNA sense strand
ugacaggugcccauggauu

SEQ ID NO: 970026 - RNA, 19 nt, Homo sapiens
  misc_RNA (1)...(19): siRNA sense strand
cggcuuuacuggagucaga

SEQ ID NO: 970027 - RNA, 19 nt, Homo sapiens
  misc_RNA (1)...(19): siRNA sense strand
gaacccaugcagcugguau

SEQ ID NO: 970028 - RNA, 19 nt, Homo sapiens
  misc_RNA (1)...(19): siRNA sense strand
ccagagcaccacugaaauc

SEQ ID NO: 970029 - RNA, 19 nt, Homo sapiens
  misc_RNA (1)...(19): siRNA sense strand
caguggagguugcagagau

SEQ ID NO: 970030 - RNA, 19 nt, Homo sapiens
  misc_RNA (1)...(19): siRNA sense strand
gaggagcgagagccagaaa

SEQ ID NO: 970031 - RNA, 19 nt, Homo sapiens
  misc_RNA (1)...(19): siRNA sense strand
caagaacuucgcucaaucu

SEQ ID NO: 970032 - RNA, 19 nt, Homo sapiens
  misc_RNA (1)...(19): siRNA sense strand
acacggaagccaacucgaa

SEQ ID NO: 970033 - RNA, 19 nt, Homo sapiens
  misc_RNA (1)...(19): siRNA sense strand
aaagagaauccauuauugg

SEQ ID NO: 970034 - RNA, 19 nt, Homo sapiens
  misc_RNA (1)...(19): siRNA sense strand
gaagcaaggaagacucagu

SEQ ID NO: 970035 - RNA, 19 nt, Homo sapiens
  misc_RNA (1)...(19): siRNA sense strand
agaacuucgcucaaucuua

SEQ ID NO: 970036 - RNA, 19 nt, Homo sapiens
  misc_RNA (1)...(19): siRNA sense strand
gaucccugaugcccacuca

SEQ ID NO: 970037 - RNA, 19 nt, Homo sapiens
  misc_RNA (1)...(19): siRNA sense strand
caaagggucaguggagguu

SEQ ID NO: 970038 - RNA, 19 nt, Homo sapiens
  misc_RNA (1)...(19): siRNA sense strand
cacaaucccagagaaauga

SEQ ID NO: 970039 - RNA, 19 nt, Homo sapiens
  misc_RNA (1)...(19): siRNA sense strand
gggaagcaaggaagacuca

SEQ ID NO: 970040 - RNA, 19 nt, Homo sapiens
  misc_RNA (1)...(19): siRNA sense strand
gaucucccgccacccauug

SEQ ID NO: 970041 - RNA, 19 nt, Homo sapiens
  misc_RNA (1)...(19): siRNA sense strand
ggaguuucacggaggagaa

SEQ ID NO: 970042 - RNA, 19 nt, Homo sapiens
  misc_RNA (1)...(19): siRNA sense strand
uaagucaacaccagauaca

SEQ ID NO: 970043 - RNA, 19 nt, Homo sapiens
  misc_RNA (1)...(19): siRNA sense strand
ucaagagggccaccaucaa

SEQ ID NO: 970044 - RNA, 19 nt, Homo sapiens
  misc_RNA (1)...(19): siRNA sense strand
gagaugcgagaugacuuaa

SEQ ID NO: 970045 - RNA, 19 nt, Homo sapiens
  misc_RNA (1)...(19): siRNA sense strand
agccagagcaccacugaaa

SEQ ID NO: 970046 - RNA, 19 nt, Homo sapiens
  misc_RNA (1)...(19): siRNA sense strand
gaccugacagagcuaauca

SEQ ID NO: 970047 - RNA, 19 nt, Homo sapiens
  misc_RNA (1)...(19): siRNA sense strand
gucaacaccagauacaaga

SEQ ID NO: 970048 - RNA, 19 nt, Homo sapiens
  misc_RNA (1)...(19): siRNA sense strand
gcagagaugcgagaugacu

SEQ ID NO: 970049 - RNA, 19 nt, Homo sapiens
  misc_RNA (1)...(19): siRNA sense strand
ggagcuggaggcagacaug

SEQ ID NO: 970050 - RNA, 19 nt, Homo sapiens
  misc_RNA (1)...(19): siRNA sense strand
ggacaggugccggcuuuac

SEQ ID NO: 970051 - RNA, 19 nt, Homo sapiens
  misc_RNA (1)...(19): siRNA sense strand
uaaucaccuuugcaucuuc

SEQ ID NO: 970052 - RNA, 19 nt, Homo sapiens
  misc_RNA (1)...(19): siRNA sense strand
ggaggagaaccacgugucu

SEQ ID NO: 970053 - RNA, 19 nt, Homo sapiens
  misc_RNA (1)...(19): siRNA sense strand
ccaucaacaugcagcucaa

SEQ ID NO: 970054 - RNA, 19 nt, Homo sapiens
  misc_RNA (1)...(19): siRNA sense strand
gaaaagagaaagagaaucc

SEQ ID NO: 970055 - RNA, 19 nt, Homo sapiens
  misc_RNA (1)...(19): siRNA sense strand
uggaacacaugaugaaagc

SEQ ID NO: 970056 - RNA, 19 nt, Homo sapiens
  misc_RNA (1)...(19): siRNA sense strand
uuacuggagucagagcuau

SEQ ID NO: 970057 - RNA, 19 nt, Homo sapiens
  misc_RNA (1)...(19): siRNA sense strand
aagagaaagagaauccauu

SEQ ID NO: 970058 - RNA, 19 nt, Homo sapiens
  misc_RNA (1)...(19): siRNA sense strand
gaaaucuuggagucaggaa

SEQ ID NO: 970059 - RNA, 19 nt, Homo sapiens
  misc_RNA (1)...(19): siRNA sense strand
guuuggaacacaugaugaa

SEQ ID NO: 970060 - RNA, 19 nt, Homo sapiens
  misc_RNA (1)...(19): siRNA sense strand
ucaacaugcagcucaacaa

SEQ ID NO: 970061 - RNA, 19 nt, Homo sapiens
  misc_RNA (1)...(19): siRNA sense strand
caaucuuacuuugacuuca

SEQ ID NO: 970062 - RNA, 19 nt, Homo sapiens
  misc_RNA (1)...(19): siRNA sense strand
agacaagaacuucgcucaa

SEQ ID NO: 970063 - RNA, 19 nt, Homo sapiens
  misc_RNA (1)...(19): siRNA sense strand
ucagugcgcagaccuccaa

SEQ ID NO: 970064 - RNA, 19 nt, Homo sapiens
  misc_RNA (1)...(19): siRNA sense strand
gcagaagccccaacuccaa

SEQ ID NO: 970065 - RNA, 19 nt, Homo sapiens
  misc_RNA (1)...(19): siRNA sense strand
gcuauacccagcccucaag

SEQ ID NO: 970066 - RNA, 19 nt, Homo sapiens
  misc_RNA (1)...(19): siRNA sense strand
gaauagaacugaauguaga

SEQ ID NO: 970067 - RNA, 19 nt, Homo sapiens
  misc_RNA (1)...(19): siRNA sense strand
gaaaguagcugccgaaagc

SEQ ID NO: 970068 - RNA, 19 nt, Homo sapiens
  misc_RNA (1)...(19): siRNA sense strand
gaagaucagugcaaaauua

SEQ ID NO: 970069 - RNA, 19 nt, Homo sapiens
  misc_RNA (1)...(19): siRNA sense strand
gacaacaccugccuaauga

SEQ ID NO: 970070 - RNA, 19 nt, Homo sapiens
  misc_RNA (1)...(19): siRNA sense strand
acaaugcuauggacaauua

SEQ ID NO: 970071 - RNA, 19 nt, Homo sapiens
  misc_RNA (1)...(19): siRNA sense strand
gaagucggauugaagcuuu

SEQ ID NO: 970072 - RNA, 19 nt, Homo sapiens
  misc_RNA (1)...(19): siRNA sense strand
acacugacaugacgaauaa

SEQ ID NO: 970073 - RNA, 19 nt, Homo sapiens
  misc_RNA (1)...(19): siRNA sense strand
gacuggacauugugaaaua

SEQ ID NO: 970074 - RNA, 19 nt, Homo sapiens
  misc_RNA (1)...(19): siRNA sense strand
ggaaauagaacaaaguaug

SEQ ID NO: 970075 - RNA, 19 nt, Homo sapiens
  misc_RNA (1)...(19): siRNA sense strand
ugaaagagcugauaaaaug

SEQ ID NO: 970076 - RNA, 19 nt, Homo sapiens
  misc_RNA (1)...(19): siRNA sense strand
caaaugaccgugagaacua

SEQ ID NO: 970077 - RNA, 19 nt, Homo sapiens
  misc_RNA (1)...(19): siRNA sense strand
acaaggaucuucuucgauu

SEQ ID NO: 970078 - RNA, 19 nt, Homo sapiens
  misc_RNA (1)...(19): siRNA sense strand
gagaugcucuucauaugga

SEQ ID NO: 970079 - RNA, 19 nt, Homo sapiens
  misc_RNA (1)...(19): siRNA sense strand
ggaaacagugcccuucaua

SEQ ID NO: 970080 - RNA, 19 nt, Homo sapiens
  misc_RNA (1)...(19): siRNA sense strand
ccaagauggugauaacauu

SEQ ID NO: 970081 - RNA, 19 nt, Homo sapiens
  misc_RNA (1)...(19): siRNA sense strand
cgaagaagaucagugcaaa

SEQ ID NO: 970082 - RNA, 19 nt, Homo sapiens
  misc_RNA (1)...(19): siRNA sense strand
gggccuggcuggcuaugua

SEQ ID NO: 970083 - RNA, 19 nt, Homo sapiens
  misc_RNA (1)...(19): siRNA sense strand
cggauaauauggaauuuga

SEQ ID NO: 970084 - RNA, 19 nt, Homo sapiens
  misc_RNA (1)...(19): siRNA sense strand
agacauaccacuaucuaua

SEQ ID NO: 970085 - RNA, 19 nt, Homo sapiens
  misc_RNA (1)...(19): siRNA sense strand
ugaaugccguggacaauga

SEQ ID NO: 970086 - RNA, 19 nt, Homo sapiens
  misc_RNA (1)...(19): siRNA sense strand
ugaagaguuuguuggauuu

SEQ ID NO: 970087 - RNA, 19 nt, Homo sapiens
  misc_RNA (1)...(19): siRNA sense strand
cuguaaagcugaugucgua

SEQ ID NO: 970088 - RNA, 19 nt, Homo sapiens
  misc_RNA (1)...(19): siRNA sense strand
uuagagagguuccaagaug

SEQ ID NO: 970089 - RNA, 19 nt, Homo sapiens
  misc_RNA (1)...(19): siRNA sense strand
ccacaaggaucuucuucga

SEQ ID NO: 970090 - RNA, 19 nt, Homo sapiens
  misc_RNA (1)...(19): siRNA sense strand
aaacagugcccuucauauu

SEQ ID NO: 970091 - RNA, 19 nt, Homo sapiens
  misc_RNA (1)...(19): siRNA sense strand
gaagcugggcacauagaua

SEQ ID NO: 970092 - RNA, 19 nt, Homo sapiens
  misc_RNA (1)...(19): siRNA sense strand
uaaagcugaugucguagaa

SEQ ID NO: 970093 - RNA, 19 nt, Homo sapiens
  misc_RNA (1)...(19): siRNA sense strand
gaaacagugcccuucauau

SEQ ID NO: 970094 - RNA, 19 nt, Homo sapiens
  misc_RNA (1)...(19): siRNA sense strand
caucagcauugccaacaaa

SEQ ID NO: 970095 - RNA, 19 nt, Homo sapiens
  misc_RNA (1)...(19): siRNA sense strand
ggaauagaacugaauguag

SEQ ID NO: 970096 - RNA, 19 nt, Homo sapiens
  misc_RNA (1)...(19): siRNA sense strand
ugacaacaccugccuaaug

SEQ ID NO: 970097 - RNA, 19 nt, Homo sapiens
  misc_RNA (1)...(19): siRNA sense strand
gggaauagaacugaaugua

SEQ ID NO: 970098 - RNA, 19 nt, Homo sapiens
  misc_RNA (1)...(19): siRNA sense strand
acagugcccuucauauuau

SEQ ID NO: 970099 - RNA, 19 nt, Homo sapiens
  misc_RNA (1)...(19): siRNA sense strand
caaggaucuucuucgauuu

SEQ ID NO: 970100 - RNA, 19 nt, Homo sapiens
  misc_RNA (1)...(19): siRNA sense strand
ggugauaacauucucgaaa

SEQ ID NO: 970101 - RNA, 19 nt, Homo sapiens
  misc_RNA (1)...(19): siRNA sense strand
caacaccugccuaaugauu

SEQ ID NO: 970102 - RNA, 19 nt, Homo sapiens
  misc_RNA (1)...(19): siRNA sense strand
gagcaguucgggcuaauga

SEQ ID NO: 970103 - RNA, 19 nt, Homo sapiens
  misc_RNA (1)...(19): siRNA sense strand
gugaaauacuugguugaaa

SEQ ID NO: 970104 - RNA, 19 nt, Homo sapiens
  misc_RNA (1)...(19): siRNA sense strand
aacagugcccuucauauua

SEQ ID NO: 970105 - RNA, 19 nt, Homo sapiens
  misc_RNA (1)...(19): siRNA sense strand
gcagaucuacaaccugauu

SEQ ID NO: 970106 - RNA, 19 nt, Homo sapiens
  misc_RNA (1)...(19): siRNA sense strand
gaacuguuacucucucaug

SEQ ID NO: 970107 - RNA, 19 nt, Homo sapiens
  misc_RNA (1)...(19): siRNA sense strand
gacauaccacuaucuauau

SEQ ID NO: 970108 - RNA, 19 nt, Homo sapiens
  misc_RNA (1)...(19): siRNA sense strand
caaaguaugaacagaguga

SEQ ID NO: 970109 - RNA, 19 nt, Homo sapiens
  misc_RNA (1)...(19): siRNA sense strand
cauaaagacauaccacuau

SEQ ID NO: 970110 - RNA, 19 nt, Homo sapiens
  misc_RNA (1)...(19): siRNA sense strand
gaauaagacuccgcuagac

SEQ ID NO: 970111 - RNA, 19 nt, Homo sapiens
  misc_RNA (1)...(19): siRNA sense strand
ccaauacuccaguugauga

SEQ ID NO: 970112 - RNA, 19 nt, Homo sapiens
  misc_RNA (1)...(19): siRNA sense strand
gagccaacgugaaccauac

SEQ ID NO: 970113 - RNA, 19 nt, Homo sapiens
  misc_RNA (1)...(19): siRNA sense strand
caaguuuucucacaaauga

SEQ ID NO: 970114 - RNA, 19 nt, Homo sapiens
  misc_RNA (1)...(19): siRNA sense strand
gauugaagcuuuggaacuc

SEQ ID NO: 970115 - RNA, 19 nt, Homo sapiens
  misc_RNA (1)...(19): siRNA sense strand
cagcauugccaacaaauau

SEQ ID NO: 970116 - RNA, 19 nt, Homo sapiens
  misc_RNA (1)...(19): siRNA sense strand
ccacaaugcuauggacaau

SEQ ID NO: 970117 - RNA, 19 nt, Homo sapiens
  misc_RNA (1)...(19): siRNA sense strand
uugaagaguuuguuggauu

SEQ ID NO: 970118 - RNA, 19 nt, Homo sapiens
  misc_RNA (1)...(19): siRNA sense strand
caucaucauuagccuaguu

SEQ ID NO: 970119 - RNA, 19 nt, Homo sapiens
  misc_RNA (1)...(19): siRNA sense strand
ccagaacucgugaagguuu

SEQ ID NO: 970120 - RNA, 19 nt, Homo sapiens
  misc_RNA (1)...(19): siRNA sense strand
gauguggucagauaccuuu

SEQ ID NO: 970121 - RNA, 19 nt, Homo sapiens
  misc_RNA (1)...(19): siRNA sense strand
cgacggguaugucauugau

SEQ ID NO: 970122 - RNA, 19 nt, Homo sapiens
  misc_RNA (1)...(19): siRNA sense strand
gcauugccaacaaauauga

SEQ ID NO: 970123 - RNA, 19 nt, Homo sapiens
  misc_RNA (1)...(19): siRNA sense strand
ggagccaacgugaaccaua

SEQ ID NO: 970124 - RNA, 19 nt, Homo sapiens
  misc_RNA (1)...(19): siRNA sense strand
aaagacauaccacuaucua

SEQ ID NO: 970125 - RNA, 19 nt, Homo sapiens
  misc_RNA (1)...(19): siRNA sense strand
auacuccaguugaugauuu

SEQ ID NO: 970126 - RNA, 19 nt, Homo sapiens
  misc_RNA (1)...(19): siRNA sense strand
uuucucaucccaucauuua

SEQ ID NO: 970127 - RNA, 19 nt, Homo sapiens
  misc_RNA (1)...(19): siRNA sense strand
ggacauugugaaauacuug

SEQ ID NO: 970128 - RNA, 19 nt, Homo sapiens
  misc_RNA (1)...(19): siRNA sense strand
gaauuugagcaguguauca

SEQ ID NO: 970129 - RNA, 19 nt, Homo sapiens
  misc_RNA (1)...(19): siRNA sense strand
uauggaaggccuuauaguu

SEQ ID NO: 970130 - RNA, 19 nt, Homo sapiens
  misc_RNA (1)...(19): siRNA sense strand
ggugguacgcuugcucuua

SEQ ID NO: 970131 - RNA, 19 nt, Homo sapiens
  misc_RNA (1)...(19): siRNA sense strand
ucauaaagacauaccacua

SEQ ID NO: 970132 - RNA, 19 nt, Homo sapiens
  misc_RNA (1)...(19): siRNA sense strand
ccaaugacgucugcagcuu

SEQ ID NO: 970133 - RNA, 19 nt, Homo sapiens
  misc_RNA (1)...(19): siRNA sense strand
uguaaucucuauaccuuuc

SEQ ID NO: 970134 - RNA, 19 nt, Homo sapiens
  misc_RNA (1)...(19): siRNA sense strand
uuuaggugcugacaauauu

SEQ ID NO: 970135 - RNA, 19 nt, Homo sapiens
  misc_RNA (1)...(19): siRNA sense strand
ucauauggaaggccuuaua

SEQ ID NO: 970136 - RNA, 19 nt, Homo sapiens
  misc_RNA (1)...(19): siRNA sense strand
gccuaaugauugcggcaua

SEQ ID NO: 970137 - RNA, 19 nt, Homo sapiens
  misc_RNA (1)...(19): siRNA sense strand
cgaauaaacagaauaagac

SEQ ID NO: 970138 - RNA, 19 nt, Homo sapiens
  misc_RNA (1)...(19): siRNA sense strand
gugguacgcuugcucuuag

SEQ ID NO: 970139 - RNA, 19 nt, Homo sapiens
  misc_RNA (1)...(19): siRNA sense strand
gcaauggacacgcaaaggu

SEQ ID NO: 970140 - RNA, 19 nt, Homo sapiens
  misc_RNA (1)...(19): siRNA sense strand
agaacugaauguagaaauc

SEQ ID NO: 970141 - RNA, 19 nt, Homo sapiens
  misc_RNA (1)...(19): siRNA sense strand
ucagauaccuuuuagaaca

SEQ ID NO: 970142 - RNA, 19 nt, Homo sapiens
  misc_RNA (1)...(19): siRNA sense strand
ggaugacgccauugaaagu

SEQ ID NO: 970143 - RNA, 19 nt, Homo sapiens
  misc_RNA (1)...(19): siRNA sense strand
gcuaucugcuuggcuaugu

SEQ ID NO: 970144 - RNA, 19 nt, Homo sapiens
  misc_RNA (1)...(19): siRNA sense strand
agaauaagacuccgcuaga

SEQ ID NO: 970145 - RNA, 19 nt, Homo sapiens
  misc_RNA (1)...(19): siRNA sense strand
gggaaacagugcccuucau

SEQ ID NO: 970146 - RNA, 19 nt, Homo sapiens
  misc_RNA (1)...(19): siRNA sense strand
gucugcagcuuuccaaaug

SEQ ID NO: 970147 - RNA, 19 nt, Homo sapiens
  misc_RNA (1)...(19): siRNA sense strand
gaugacgccauugaaagua

SEQ ID NO: 970148 - RNA, 19 nt, Homo sapiens
  misc_RNA (1)...(19): siRNA sense strand
cgugaaccauaccacagua

SEQ ID NO: 970149 - RNA, 19 nt, Homo sapiens
  misc_RNA (1)...(19): siRNA sense strand
acaacaggcccaucaguga

SEQ ID NO: 970150 - RNA, 19 nt, Homo sapiens
  misc_RNA (1)...(19): siRNA sense strand
ggacaaugagggaaacagu

SEQ ID NO: 970151 - RNA, 19 nt, Homo sapiens
  misc_RNA (1)...(19): siRNA sense strand
uuaacaagcagaucuacaa

SEQ ID NO: 970152 - RNA, 19 nt, Homo sapiens
  misc_RNA (1)...(19): siRNA sense strand
gcugauguccacaaugcua

SEQ ID NO: 970153 - RNA, 19 nt, Homo sapiens
  misc_RNA (1)...(19): siRNA sense strand
cauauaagggacacacuga

SEQ ID NO: 970154 - RNA, 19 nt, Homo sapiens
  misc_RNA (1)...(19): siRNA sense strand
gaaaauaaugccaacauca

SEQ ID NO: 970155 - RNA, 19 nt, Homo sapiens
  misc_RNA (1)...(19): siRNA sense strand
acucuugggugccuccuuu

SEQ ID NO: 970156 - RNA, 19 nt, Homo sapiens
  misc_RNA (1)...(19): siRNA sense strand
gugauaacauucucgaaaa

SEQ ID NO: 970157 - RNA, 19 nt, Homo sapiens
  misc_RNA (1)...(19): siRNA sense strand
gcaaaugaccgugagaacu

SEQ ID NO: 970158 - RNA, 19 nt, Homo sapiens
  misc_RNA (1)...(19): siRNA sense strand
uaaugauugcggcauauaa

SEQ ID NO: 970159 - RNA, 19 nt, Homo sapiens
  misc_RNA (1)...(19): siRNA sense strand
ucccagaacucgugaaggu

SEQ ID NO: 970160 - RNA, 19 nt, Homo sapiens
  misc_RNA (1)...(19): siRNA sense strand
caaccugauucaccuugau

SEQ ID NO: 970161 - RNA, 19 nt, Homo sapiens
  misc_RNA (1)...(19): siRNA sense strand
gcgaagaagaucagugcaa

SEQ ID NO: 970162 - RNA, 19 nt, Homo sapiens
  misc_RNA (1)...(19): siRNA sense strand
cgugagaacuaugacauca

SEQ ID NO: 970163 - RNA, 19 nt, Homo sapiens
  misc_RNA (1)...(19): siRNA sense strand
gugccuccuuugcaaauga

SEQ ID NO: 970164 - RNA, 19 nt, Homo sapiens
  misc_RNA (1)...(19): siRNA sense strand
cgaagaagucggauugaag

SEQ ID NO: 970165 - RNA, 19 nt, Homo sapiens
  misc_RNA (1)...(19): siRNA sense strand
guaaagcugaugucguaga

SEQ ID NO: 970166 - RNA, 19 nt, Homo sapiens
  misc_RNA (1)...(19): siRNA sense strand
ggaagaacgugaagcugua

SEQ ID NO: 970167 - RNA, 19 nt, Homo sapiens
  misc_RNA (1)...(19): siRNA sense strand
ugacuacacuuucaaugug

SEQ ID NO: 970168 - RNA, 19 nt, Homo sapiens
  misc_RNA (1)...(19): siRNA sense strand
caaacacacuucccgaaag

SEQ ID NO: 970169 - RNA, 19 nt, Homo sapiens
  misc_RNA (1)...(19): siRNA sense strand
cccgaaagcuucacuaagu

SEQ ID NO: 970170 - RNA, 19 nt, Homo sapiens
  misc_RNA (1)...(19): siRNA sense strand
cggcagaucuggcaagaca

SEQ ID NO: 970171 - RNA, 19 nt, Homo sapiens
  misc_RNA (1)...(19): siRNA sense strand
ggagaccuuuggcgacuug

SEQ ID NO: 970172 - RNA, 19 nt, Homo sapiens
  misc_RNA (1)...(19): siRNA sense strand
ggaaggcugaggaaaggua

SEQ ID NO: 970173 - RNA, 19 nt, Homo sapiens
  misc_RNA (1)...(19): siRNA sense strand
ucaaggagcccaagaugga

SEQ ID NO: 970174 - RNA, 19 nt, Homo sapiens
  misc_RNA (1)...(19): siRNA sense strand
gcugcuggccgacgaauuu

SEQ ID NO: 970175 - RNA, 19 nt, Homo sapiens
  misc_RNA (1)...(19): siRNA sense strand
ucaaggccaucgagcaguu

SEQ ID NO: 970176 - RNA, 19 nt, Homo sapiens
  misc_RNA (1)...(19): siRNA sense strand
ccgaaagcuucacuaaguu

SEQ ID NO: 970177 - RNA, 19 nt, Homo sapiens
  misc_RNA (1)...(19): siRNA sense strand
ccaaacacacuucccgaaa

SEQ ID NO: 970178 - RNA, 19 nt, Homo sapiens
  misc_RNA (1)...(19): siRNA sense strand
caauguggaucagaaacuu

SEQ ID NO: 970179 - RNA, 19 nt, Homo sapiens
  misc_RNA (1)...(19): siRNA sense strand
cgaaagcuucacuaaguuu

SEQ ID NO: 970180 - RNA, 19 nt, Homo sapiens
  misc_RNA (1)...(19): siRNA sense strand
ccaagcagaggaacaagaa

SEQ ID NO: 970181 - RNA, 19 nt, Homo sapiens
  misc_RNA (1)...(19): siRNA sense strand
guggaugacuacacuuuca

SEQ ID NO: 970182 - RNA, 19 nt, Homo sapiens
  misc_RNA (1)...(19): siRNA sense strand
ccucuucgauggcuucuuc

SEQ ID NO: 970183 - RNA, 19 nt, Homo sapiens
  misc_RNA (1)...(19): siRNA sense strand
gcugccaucucuucaguca

SEQ ID NO: 970184 - RNA, 19 nt, Homo sapiens
  misc_RNA (1)...(19): siRNA sense strand
ugaaggagacccugaccaa

SEQ ID NO: 970185 - RNA, 19 nt, Homo sapiens
  misc_RNA (1)...(19): siRNA sense strand
gcccaagguuccggagaaa

SEQ ID NO: 970186 - RNA, 19 nt, Homo sapiens
  misc_RNA (1)...(19): siRNA sense strand
gagcaguuccagacagaga

SEQ ID NO: 970187 - RNA, 19 nt, Homo sapiens
  misc_RNA (1)...(19): siRNA sense strand
cgacgaauuugcccuugag

SEQ ID NO: 970188 - RNA, 19 nt, Homo sapiens
  misc_RNA (1)...(19): siRNA sense strand
ucgaugagcugcgggacaa

SEQ ID NO: 970189 - RNA, 19 nt, Homo sapiens
  misc_RNA (1)...(19): siRNA sense strand
gcggagaggcagugaagga

SEQ ID NO: 970190 - RNA, 19 nt, Homo sapiens
  misc_RNA (1)...(19): siRNA sense strand
guggugaugugcgucauga

SEQ ID NO: 970191 - RNA, 19 nt, Homo sapiens
  misc_RNA (1)...(19): siRNA sense strand
gguacaagaagcuggaaga

SEQ ID NO: 970192 - RNA, 19 nt, Homo sapiens
  misc_RNA (1)...(19): siRNA sense strand
gagcggagaggcagugaag

SEQ ID NO: 970193 - RNA, 19 nt, Homo sapiens
  misc_RNA (1)...(19): siRNA sense strand
cgacauggugcugcaguuu

SEQ ID NO: 970194 - RNA, 19 nt, Homo sapiens
  misc_RNA (1)...(19): siRNA sense strand
aaacacacuucccgaaagc

SEQ ID NO: 970195 - RNA, 19 nt, Homo sapiens
  misc_RNA (1)...(19): siRNA sense strand
acagccaggucuucaagga

SEQ ID NO: 970196 - RNA, 19 nt, Homo sapiens
  misc_RNA (1)...(19): siRNA sense strand
ucucuguccugcacaacuu

SEQ ID NO: 970197 - RNA, 19 nt, Homo sapiens
  misc_RNA (1)...(19): siRNA sense strand
ucgagcaguuccagacaga

SEQ ID NO: 970198 - RNA, 19 nt, Homo sapiens
  misc_RNA (1)...(19): siRNA sense strand
aaacugaagcugguuaugg

SEQ ID NO: 970199 - RNA, 19 nt, Homo sapiens
  misc_RNA (1)...(19): siRNA sense strand
gaugacuacacuuucaaug

SEQ ID NO: 970200 - RNA, 19 nt, Homo sapiens
  misc_RNA (1)...(19): siRNA sense strand
caacggcgaggaccugaag

SEQ ID NO: 970201 - RNA, 19 nt, Homo sapiens
  misc_RNA (1)...(19): siRNA sense strand
ccgacgaauuugcccuuga

SEQ ID NO: 970202 - RNA, 19 nt, Homo sapiens
  misc_RNA (1)...(19): siRNA sense strand
ucaccaagcagaggaacaa

SEQ ID NO: 970203 - RNA, 19 nt, Homo sapiens
  misc_RNA (1)...(19): siRNA sense strand
gcugaggaaagguacaaga

SEQ ID NO: 970204 - RNA, 19 nt, Homo sapiens
  misc_RNA (1)...(19): siRNA sense strand
ggaugacuacacuuucaau

SEQ ID NO: 970205 - RNA, 19 nt, Homo sapiens
  misc_RNA (1)...(19): siRNA sense strand
uguccaugauccuguguga

SEQ ID NO: 970206 - RNA, 19 nt, Homo sapiens
  misc_RNA (1)...(19): siRNA sense strand
agcaguacauccuggagaa

SEQ ID NO: 970207 - RNA, 19 nt, Homo sapiens
  misc_RNA (1)...(19): siRNA sense strand
gaggugaagcggcagaucu

SEQ ID NO: 970208 - RNA, 19 nt, Homo sapiens
  misc_RNA (1)...(19): siRNA sense strand
ugcccaagguuccggagaa

SEQ ID NO: 970209 - RNA, 19 nt, Homo sapiens
  misc_RNA (1)...(19): siRNA sense strand
gaaagccccagucucauau

SEQ ID NO: 970210 - RNA, 19 nt, Homo sapiens
  misc_RNA (1)...(19): siRNA sense strand
uguccuuccugguggauga

SEQ ID NO: 970211 - RNA, 19 nt, Homo sapiens
  misc_RNA (1)...(19): siRNA sense strand
gcagaucuggcaagacaac

SEQ ID NO: 970212 - RNA, 19 nt, Homo sapiens
  misc_RNA (1)...(19): siRNA sense strand
ugaugugcgucaugaagca

SEQ ID NO: 970213 - RNA, 19 nt, Homo sapiens
  misc_RNA (1)...(19): siRNA sense strand
agucucauauccaaacaca

SEQ ID NO: 970214 - RNA, 19 nt, Homo sapiens
  misc_RNA (1)...(19): siRNA sense strand
ggacccgugccacaaguuc

SEQ ID NO: 970215 - RNA, 19 nt, Homo sapiens
  misc_RNA (1)...(19): siRNA sense strand
aggagacccugaccaacug

SEQ ID NO: 970216 - RNA, 19 nt, Homo sapiens
  misc_RNA (1)...(19): siRNA sense strand
accagucgguauucgauga

SEQ ID NO: 970217 - RNA, 19 nt, Homo sapiens
  misc_RNA (1)...(19): siRNA sense strand
aauuugcccuugaggacuu

SEQ ID NO: 970218 - RNA, 19 nt, Homo sapiens
  misc_RNA (1)...(19): siRNA sense strand
gcaguuccagacagagaau

SEQ ID NO: 970219 - RNA, 19 nt, Homo sapiens
  misc_RNA (1)...(19): siRNA sense strand
gaucgacagccaggucuuc

SEQ ID NO: 970220 - RNA, 19 nt, Homo sapiens
  misc_RNA (1)...(19): siRNA sense strand
gaccuggacgugggugaaa

SEQ ID NO: 970221 - RNA, 19 nt, Homo sapiens
  misc_RNA (1)...(19): siRNA sense strand
gacauggugcugcaguuuc

SEQ ID NO: 970222 - RNA, 19 nt, Homo sapiens
  misc_RNA (1)...(19): siRNA sense strand
caagaagcuggaagaccuu

SEQ ID NO: 970223 - RNA, 19 nt, Homo sapiens
  misc_RNA (1)...(19): siRNA sense strand
cgacagccaggucuucaag

SEQ ID NO: 970224 - RNA, 19 nt, Homo sapiens
  misc_RNA (1)...(19): siRNA sense strand
ggugaugugcgucaugaag

SEQ ID NO: 970225 - RNA, 19 nt, Homo sapiens
  misc_RNA (1)...(19): siRNA sense strand
acgugaagcuguacgacau

SEQ ID NO: 970226 - RNA, 19 nt, Homo sapiens
  misc_RNA (1)...(19): siRNA sense strand
agaaagccccagucucaua

SEQ ID NO: 970227 - RNA, 19 nt, Homo sapiens
  misc_RNA (1)...(19): siRNA sense strand
cugaggaaagguacaagaa

SEQ ID NO: 970228 - RNA, 19 nt, Homo sapiens
  misc_RNA (1)...(19): siRNA sense strand
acauggugcugcaguuucu

SEQ ID NO: 970229 - RNA, 19 nt, Homo sapiens
  misc_RNA (1)...(19): siRNA sense strand
ggacugcacuuggagaauu

SEQ ID NO: 970230 - RNA, 19 nt, Homo sapiens
  misc_RNA (1)...(19): siRNA sense strand
uauaacaacuggacaaaug

SEQ ID NO: 970231 - RNA, 19 nt, Homo sapiens
  misc_RNA (1)...(19): siRNA sense strand
uggcauaucugcaagaauu

SEQ ID NO: 970232 - RNA, 19 nt, Homo sapiens
  misc_RNA (1)...(19): siRNA sense strand
ggccagaucuucauugugu

SEQ ID NO: 970233 - RNA, 19 nt, Homo sapiens
  misc_RNA (1)...(19): siRNA sense strand
ucaaacugcuguugucuga

SEQ ID NO: 970234 - RNA, 19 nt, Homo sapiens
  misc_RNA (1)...(19): siRNA sense strand
agacaaggcugaacugauc

SEQ ID NO: 970235 - RNA, 19 nt, Homo sapiens
  misc_RNA (1)...(19): siRNA sense strand
gacaagacaucauggaaca

SEQ ID NO: 970236 - RNA, 19 nt, Homo sapiens
  misc_RNA (1)...(19): siRNA sense strand
uaacauucauggaugcaaa

SEQ ID NO: 970237 - RNA, 19 nt, Homo sapiens
  misc_RNA (1)...(19): siRNA sense strand
cagauaaaguacagaaaga

SEQ ID NO: 970238 - RNA, 19 nt, Homo sapiens
  misc_RNA (1)...(19): siRNA sense strand
gaacugaaucccucaaaca

SEQ ID NO: 970239 - RNA, 19 nt, Homo sapiens
  misc_RNA (1)...(19): siRNA sense strand
gcucuucagucccuucaaa

SEQ ID NO: 970240 - RNA, 19 nt, Homo sapiens
  misc_RNA (1)...(19): siRNA sense strand
gaacugggcuaccuuaacc

SEQ ID NO: 970241 - RNA, 19 nt, Homo sapiens
  misc_RNA (1)...(19): siRNA sense strand
gcauugguauguucuccua

SEQ ID NO: 970242 - RNA, 19 nt, Homo sapiens
  misc_RNA (1)...(19): siRNA sense strand
ggaagugacuguggagcuu

SEQ ID NO: 970243 - RNA, 19 nt, Homo sapiens
  misc_RNA (1)...(19): siRNA sense strand
guucagaccuuucuuagac

SEQ ID NO: 970244 - RNA, 19 nt, Homo sapiens
  misc_RNA (1)...(19): siRNA sense strand
ggaggugacuuaugcaaac

SEQ ID NO: 970245 - RNA, 19 nt, Homo sapiens
  misc_RNA (1)...(19): siRNA sense strand
ggacaaaugggcuguaugg

SEQ ID NO: 970246 - RNA, 19 nt, Homo sapiens
  misc_RNA (1)...(19): siRNA sense strand
gcagcuuccugaugacuug

SEQ ID NO: 970247 - RNA, 19 nt, Homo sapiens
  misc_RNA (1)...(19): siRNA sense strand
gaacaaccacuccuaucug

SEQ ID NO: 970248 - RNA, 19 nt, Homo sapiens
  misc_RNA (1)...(19): siRNA sense strand
caacggacccugcaagcuu

SEQ ID NO: 970249 - RNA, 19 nt, Homo sapiens
  misc_RNA (1)...(19): siRNA sense strand
ccggauaagcuguguguua

SEQ ID NO: 970250 - RNA, 19 nt, Homo sapiens
  misc_RNA (1)...(19): siRNA sense strand
ccacuugacuggauguauc

SEQ ID NO: 970251 - RNA, 19 nt, Homo sapiens
  misc_RNA (1)...(19): siRNA sense strand
gcuuagcugucuuucguuu

SEQ ID NO: 970252 - RNA, 19 nt, Homo sapiens
  misc_RNA (1)...(19): siRNA sense strand
caaccacuccuaucuguau

SEQ ID NO: 970253 - RNA, 19 nt, Homo sapiens
  misc_RNA (1)...(19): siRNA sense strand
ccaaguauaaugucacuga

SEQ ID NO: 970254 - RNA, 19 nt, Homo sapiens
  misc_RNA (1)...(19): siRNA sense strand
gaccggaaauaccuugaug

SEQ ID NO: 970255 - RNA, 19 nt, Homo sapiens
  misc_RNA (1)...(19): siRNA sense strand
ccugaugacuuguaucuca

SEQ ID NO: 970256 - RNA, 19 nt, Homo sapiens
  misc_RNA (1)...(19): siRNA sense strand
gaucuacuuugauauuugg

SEQ ID NO: 970257 - RNA, 19 nt, Homo sapiens
  misc_RNA (1)...(19): siRNA sense strand
ccagaucuacuuugauauu

SEQ ID NO: 970258 - RNA, 19 nt, Homo sapiens
  misc_RNA (1)...(19): siRNA sense strand
gcccagcucagauaaagua

SEQ ID NO: 970259 - RNA, 19 nt, Homo sapiens
  misc_RNA (1)...(19): siRNA sense strand
ggccugugcuaccggauaa

SEQ ID NO: 970260 - RNA, 19 nt, Homo sapiens
  misc_RNA (1)...(19): siRNA sense strand
ggaacaaccacuccuaucu

SEQ ID NO: 970261 - RNA, 19 nt, Homo sapiens
  misc_RNA (1)...(19): siRNA sense strand
ggaaggaucaugcagacau

SEQ ID NO: 970262 - RNA, 19 nt, Homo sapiens
  misc_RNA (1)...(19): siRNA sense strand
aaacacggauucuucacau

SEQ ID NO: 970263 - RNA, 19 nt, Homo sapiens
  misc_RNA (1)...(19): siRNA sense strand
cgccgcagcuuccugauga

SEQ ID NO: 970264 - RNA, 19 nt, Homo sapiens
  misc_RNA (1)...(19): siRNA sense strand
ggucuucauugcagauuuc

SEQ ID NO: 970265 - RNA, 19 nt, Homo sapiens
  misc_RNA (1)...(19): siRNA sense strand
gacugcacuuggagaauuu

SEQ ID NO: 970266 - RNA, 19 nt, Homo sapiens
  misc_RNA (1)...(19): siRNA sense strand
gaaagacaaggcugaacug

SEQ ID NO: 970267 - RNA, 19 nt, Homo sapiens
  misc_RNA (1)...(19): siRNA sense strand
cugcaagaauuaaaggaaa

SEQ ID NO: 970268 - RNA, 19 nt, Homo sapiens
  misc_RNA (1)...(19): siRNA sense strand
ggaagcugguguccuacug

SEQ ID NO: 970269 - RNA, 19 nt, Homo sapiens
  misc_RNA (1)...(19): siRNA sense strand
ccauuggccuguucuuugu

SEQ ID NO: 970270 - RNA, 19 nt, Homo sapiens
  misc_RNA (1)...(19): siRNA sense strand
uaucuugucuacaccauca

SEQ ID NO: 970271 - RNA, 19 nt, Homo sapiens
  misc_RNA (1)...(19): siRNA sense strand
gaucuucauuguguacuuc

SEQ ID NO: 970272 - RNA, 19 nt, Homo sapiens
  misc_RNA (1)...(19): siRNA sense strand
guacgucuaugucaacacu

SEQ ID NO: 970273 - RNA, 19 nt, Homo sapiens
  misc_RNA (1)...(19): siRNA sense strand
acacugagguggucuucau

SEQ ID NO: 970274 - RNA, 19 nt, Homo sapiens
  misc_RNA (1)...(19): siRNA sense strand
caagauccauuggccuguu

SEQ ID NO: 970275 - RNA, 19 nt, Homo sapiens
  misc_RNA (1)...(19): siRNA sense strand
gaagaccugggcaacacua

SEQ ID NO: 970276 - RNA, 19 nt, Homo sapiens
  misc_RNA (1)...(19): siRNA sense strand
gugaguaccauaaggugua

SEQ ID NO: 970277 - RNA, 19 nt, Homo sapiens
  misc_RNA (1)...(19): siRNA sense strand
aacggacccugcaagcuua

SEQ ID NO: 970278 - RNA, 19 nt, Homo sapiens
  misc_RNA (1)...(19): siRNA sense strand
ggugacuuaugcaaacuug

SEQ ID NO: 970279 - RNA, 19 nt, Homo sapiens
  misc_RNA (1)...(19): siRNA sense strand
gauaaaguacagaaagaca

SEQ ID NO: 970280 - RNA, 19 nt, Homo sapiens
  misc_RNA (1)...(19): siRNA sense strand
agacuggguugaaggcuau

SEQ ID NO: 970281 - RNA, 19 nt, Homo sapiens
  misc_RNA (1)...(19): siRNA sense strand
ugcgaaagcucuaugucuu

SEQ ID NO: 970282 - RNA, 19 nt, Homo sapiens
  misc_RNA (1)...(19): siRNA sense strand
gcauaucugcaagaauuaa

SEQ ID NO: 970283 - RNA, 19 nt, Homo sapiens
  misc_RNA (1)...(19): siRNA sense strand
gcucagauaaaguacagaa

SEQ ID NO: 970284 - RNA, 19 nt, Homo sapiens
  misc_RNA (1)...(19): siRNA sense strand
guuguuggccuuucagcua

SEQ ID NO: 970285 - RNA, 19 nt, Homo sapiens
  misc_RNA (1)...(19): siRNA sense strand
ggacagccgaauagggaaa

SEQ ID NO: 970286 - RNA, 19 nt, Homo sapiens
  misc_RNA (1)...(19): siRNA sense strand
gguggagaauggaagugaa

SEQ ID NO: 970287 - RNA, 19 nt, Homo sapiens
  misc_RNA (1)...(19): siRNA sense strand
ggagcaagaccuggcauau

SEQ ID NO: 970288 - RNA, 19 nt, Homo sapiens
  misc_RNA (1)...(19): siRNA sense strand
gggccaaguuacaggaaau

SEQ ID NO: 970289 - RNA, 19 nt, Homo sapiens
  misc_RNA (1)...(19): siRNA sense strand
agcaagaccuggcauaucu

SEQ ID NO: 970290 - RNA, 19 nt, Homo sapiens
  misc_RNA (1)...(19): siRNA sense strand
gagaacugaaucccucaaa

SEQ ID NO: 970291 - RNA, 19 nt, Homo sapiens
  misc_RNA (1)...(19): siRNA sense strand
cucggaagcugguguccua

SEQ ID NO: 970292 - RNA, 19 nt, Homo sapiens
  misc_RNA (1)...(19): siRNA sense strand
cuaauccuccugagucaaa

SEQ ID NO: 970293 - RNA, 19 nt, Homo sapiens
  misc_RNA (1)...(19): siRNA sense strand
ccucaaacacggauucuuc

SEQ ID NO: 970294 - RNA, 19 nt, Homo sapiens
  misc_RNA (1)...(19): siRNA sense strand
ccccagaucuacuuugaua

SEQ ID NO: 970295 - RNA, 19 nt, Homo sapiens
  misc_RNA (1)...(19): siRNA sense strand
ugucaacacuacagagcuu

SEQ ID NO: 970296 - RNA, 19 nt, Homo sapiens
  misc_RNA (1)...(19): siRNA sense strand
gagcaagaccuggcauauc

SEQ ID NO: 970297 - RNA, 19 nt, Homo sapiens
  misc_RNA (1)...(19): siRNA sense strand
ccgaauagggaaacucuug

SEQ ID NO: 970298 - RNA, 19 nt, Homo sapiens
  misc_RNA (1)...(19): siRNA sense strand
acuuguaucucacuucgaa

SEQ ID NO: 970299 - RNA, 19 nt, Homo sapiens
  misc_RNA (1)...(19): siRNA sense strand
caaguuacaggaaaucaag

SEQ ID NO: 970300 - RNA, 19 nt, Homo sapiens
  misc_RNA (1)...(19): siRNA sense strand
uguuauuccugcugccaua

SEQ ID NO: 970301 - RNA, 19 nt, Homo sapiens
  misc_RNA (1)...(19): siRNA sense strand
gcuauaacaacuggacaaa

SEQ ID NO: 970302 - RNA, 19 nt, Homo sapiens
  misc_RNA (1)...(19): siRNA sense strand
gauauuugggucuccauca

SEQ ID NO: 970303 - RNA, 19 nt, Homo sapiens
  misc_RNA (1)...(19): siRNA sense strand
uuucuuagacgccaacaaa

SEQ ID NO: 970304 - RNA, 19 nt, Homo sapiens
  misc_RNA (1)...(19): siRNA sense strand
cauaagguguauacgacau

SEQ ID NO: 970305 - RNA, 19 nt, Homo sapiens
  misc_RNA (1)...(19): siRNA sense strand
ugucuacaccaucauguuu

SEQ ID NO: 970306 - RNA, 19 nt, Homo sapiens
  misc_RNA (1)...(19): siRNA sense strand
ucacuucgaaaucugauau

SEQ ID NO: 970307 - RNA, 19 nt, Homo sapiens
  misc_RNA (1)...(19): siRNA sense strand
ugcaugaauucccagcuuu

SEQ ID NO: 970308 - RNA, 19 nt, Homo sapiens
  misc_RNA (1)...(19): siRNA sense strand
aacaaccacuccuaucugu

SEQ ID NO: 970309 - RNA, 19 nt, Homo sapiens
  misc_RNA (1)...(19): siRNA sense strand
gccgccugcuucccaagua

SEQ ID NO: 970310 - RNA, 19 nt, Homo sapiens
  misc_RNA (1)...(19): siRNA sense strand
cagcucagauaaaguacag

SEQ ID NO: 970311 - RNA, 19 nt, Homo sapiens
  misc_RNA (1)...(19): siRNA sense strand
cccaggaggugacuuaugc

SEQ ID NO: 970312 - RNA, 19 nt, Homo sapiens
  misc_RNA (1)...(19): siRNA sense strand
ggagaauggaagugaaaca

SEQ ID NO: 970313 - RNA, 19 nt, Homo sapiens
  misc_RNA (1)...(19): siRNA sense strand
ggcauaucugcaagaauua

SEQ ID NO: 970314 - RNA, 19 nt, Homo sapiens
  misc_RNA (1)...(19): siRNA sense strand
ucagauaaaguacagaaag

SEQ ID NO: 970315 - RNA, 19 nt, Homo sapiens
  misc_RNA (1)...(19): siRNA sense strand
acacagagucggcgaugga

SEQ ID NO: 970316 - RNA, 19 nt, Homo sapiens
  misc_RNA (1)...(19): siRNA sense strand
caaacacggauucuucaca

SEQ ID NO: 970317 - RNA, 19 nt, Homo sapiens
  misc_RNA (1)...(19): siRNA sense strand
gacaucaccuagcccuucu

SEQ ID NO: 970318 - RNA, 19 nt, Homo sapiens
  misc_RNA (1)...(19): siRNA sense strand
uaagguguauacgacauca

SEQ ID NO: 970319 - RNA, 19 nt, Homo sapiens
  misc_RNA (1)...(19): siRNA sense strand
ucacugagccccagaucua

SEQ ID NO: 970320 - RNA, 19 nt, Homo sapiens
  misc_RNA (1)...(19): siRNA sense strand
guggccagaucuucauugu

SEQ ID NO: 970321 - RNA, 19 nt, Homo sapiens
  misc_RNA (1)...(19): siRNA sense strand
guaucucacuucgaaaucu

SEQ ID NO: 970322 - RNA, 19 nt, Homo sapiens
  misc_RNA (1)...(19): siRNA sense strand
gcgauucuuccgcuucuug

SEQ ID NO: 970323 - RNA, 19 nt, Homo sapiens
  misc_RNA (1)...(19): siRNA sense strand
uaaaguacagaaagacaag

SEQ ID NO: 970324 - RNA, 19 nt, Homo sapiens
  misc_RNA (1)...(19): siRNA sense strand
gccagaucuucauugugua

SEQ ID NO: 970325 - RNA, 19 nt, Homo sapiens
  misc_RNA (1)...(19): siRNA sense strand
cugcaugaauucccagcuu

SEQ ID NO: 970326 - RNA, 19 nt, Homo sapiens
  misc_RNA (1)...(19): siRNA sense strand
acacggauucuucacauuc

SEQ ID NO: 970327 - RNA, 19 nt, Homo sapiens
  misc_RNA (1)...(19): siRNA sense strand
gaugacuuguaucucacuu

SEQ ID NO: 970328 - RNA, 19 nt, Homo sapiens
  misc_RNA (1)...(19): siRNA sense strand
ggcgaacugggcuaccuua

SEQ ID NO: 970329 - RNA, 19 nt, Homo sapiens
  misc_RNA (1)...(19): siRNA sense strand
gaacugauguaaaugaaga

SEQ ID NO: 970330 - RNA, 19 nt, Homo sapiens
  misc_RNA (1)...(19): siRNA sense strand
caaagagacugguuaguga

SEQ ID NO: 970331 - RNA, 19 nt, Homo sapiens
  misc_RNA (1)...(19): siRNA sense strand
ggcaauggauuuagaagua

SEQ ID NO: 970332 - RNA, 19 nt, Homo sapiens
  misc_RNA (1)...(19): siRNA sense strand
gaauagcucugucucugaa

SEQ ID NO: 970333 - RNA, 19 nt, Homo sapiens
  misc_RNA (1)...(19): siRNA sense strand
gggaauacgugagaaugua

SEQ ID NO: 970334 - RNA, 19 nt, Homo sapiens
  misc_RNA (1)...(19): siRNA sense strand
gggcagaguucuugaggaa

SEQ ID NO: 970335 - RNA, 19 nt, Homo sapiens
  misc_RNA (1)...(19): siRNA sense strand
gaaggaagcacugaagauu

SEQ ID NO: 970336 - RNA, 19 nt, Homo sapiens
  misc_RNA (1)...(19): siRNA sense strand
gguuagugauccugcauua

SEQ ID NO: 970337 - RNA, 19 nt, Homo sapiens
  misc_RNA (1)...(19): siRNA sense strand
gaagugaaagccaaaguga

SEQ ID NO: 970338 - RNA, 19 nt, Homo sapiens
  misc_RNA (1)...(19): siRNA sense strand
gcaaagagacugguuagug

SEQ ID NO: 970339 - RNA, 19 nt, Homo sapiens
  misc_RNA (1)...(19): siRNA sense strand
ggaaagagacaccuaccaa

SEQ ID NO: 970340 - RNA, 19 nt, Homo sapiens
  misc_RNA (1)...(19): siRNA sense strand
ggagucaucuuugguggaa

SEQ ID NO: 970341 - RNA, 19 nt, Homo sapiens
  misc_RNA (1)...(19): siRNA sense strand
aggaagcacugaagauuga

SEQ ID NO: 970342 - RNA, 19 nt, Homo sapiens
  misc_RNA (1)...(19): siRNA sense strand
gugggucgauccaguguuu

SEQ ID NO: 970343 - RNA, 19 nt, Homo sapiens
  misc_RNA (1)...(19): siRNA sense strand
agagaugccucaagaagau

SEQ ID NO: 970344 - RNA, 19 nt, Homo sapiens
  misc_RNA (1)...(19): siRNA sense strand
gagagaugccucaagaaga

SEQ ID NO: 970345 - RNA, 19 nt, Homo sapiens
  misc_RNA (1)...(19): siRNA sense strand
ggagagaugccucaagaag

SEQ ID NO: 970346 - RNA, 19 nt, Homo sapiens
  misc_RNA (1)...(19): siRNA sense strand
cagagucaaugaaggaaau

SEQ ID NO: 970347 - RNA, 19 nt, Homo sapiens
  misc_RNA (1)...(19): siRNA sense strand
ggaaggaagcacugaagau

SEQ ID NO: 970348 - RNA, 19 nt, Homo sapiens
  misc_RNA (1)...(19): siRNA sense strand
ggaagggaauacgugagaa

SEQ ID NO: 970349 - RNA, 19 nt, Homo sapiens
  misc_RNA (1)...(19): siRNA sense strand
gaaggcaugucagcugcaa

SEQ ID NO: 970350 - RNA, 19 nt, Homo sapiens
  misc_RNA (1)...(19): siRNA sense strand
cagauuugcugucgcuuuc

SEQ ID NO: 970351 - RNA, 19 nt, Homo sapiens
  misc_RNA (1)...(19): siRNA sense strand
cauggcagguggaaagaga

SEQ ID NO: 970352 - RNA, 19 nt, Homo sapiens
  misc_RNA (1)...(19): siRNA sense strand
gcaauggauuuagaaguac

SEQ ID NO: 970353 - RNA, 19 nt, Homo sapiens
  misc_RNA (1)...(19): siRNA sense strand
accaacagcucaucaggaa

SEQ ID NO: 970354 - RNA, 19 nt, Homo sapiens
  misc_RNA (1)...(19): siRNA sense strand
ggaagugaaagccaaagug

SEQ ID NO: 970355 - RNA, 19 nt, Homo sapiens
  misc_RNA (1)...(19): siRNA sense strand
gaagggaauacgugagaau

SEQ ID NO: 970356 - RNA, 19 nt, Homo sapiens
  misc_RNA (1)...(19): siRNA sense strand
ugguggaacugauguaaau

SEQ ID NO: 970357 - RNA, 19 nt, Homo sapiens
  misc_RNA (1)...(19): siRNA sense strand
ucacagagucaaugaagga

SEQ ID NO: 970358 - RNA, 19 nt, Homo sapiens
  misc_RNA (1)...(19): siRNA sense strand
uuggagagaugccucaaga

SEQ ID NO: 970359 - RNA, 19 nt, Homo sapiens
  misc_RNA (1)...(19): siRNA sense strand
ggaaugcugccguggugaa

SEQ ID NO: 970360 - RNA, 19 nt, Homo sapiens
  misc_RNA (1)...(19): siRNA sense strand
agugaaagccaaagugaaa

SEQ ID NO: 970361 - RNA, 19 nt, Homo sapiens
  misc_RNA (1)...(19): siRNA sense strand
uuagugauccugcauuaga

SEQ ID NO: 970362 - RNA, 19 nt, Homo sapiens
  misc_RNA (1)...(19): siRNA sense strand
ggaugccuuugacuuugaa

SEQ ID NO: 970363 - RNA, 19 nt, Homo sapiens
  misc_RNA (1)...(19): siRNA sense strand
aaagagacaccuaccaaca

SEQ ID NO: 970364 - RNA, 19 nt, Homo sapiens
  misc_RNA (1)...(19): siRNA sense strand
ggaggcaauggauuuagaa

SEQ ID NO: 970365 - RNA, 19 nt, Homo sapiens
  misc_RNA (1)...(19): siRNA sense strand
caugucagcugcaauuuug

SEQ ID NO: 970366 - RNA, 19 nt, Homo sapiens
  misc_RNA (1)...(19): siRNA sense strand
guagugaacggaagggaau

SEQ ID NO: 970367 - RNA, 19 nt, Homo sapiens
  misc_RNA (1)...(19): siRNA sense strand
uggaacugauguaaaugaa

SEQ ID NO: 970368 - RNA, 19 nt, Homo sapiens
  misc_RNA (1)...(19): siRNA sense strand
uuugaaagccgaucugaga

SEQ ID NO: 970369 - RNA, 19 nt, Homo sapiens
  misc_RNA (1)...(19): siRNA sense strand
guggaacugauguaaauga

SEQ ID NO: 970370 - RNA, 19 nt, Homo sapiens
  misc_RNA (1)...(19): siRNA sense strand
gauugcaaaccucaucuug

SEQ ID NO: 970371 - RNA, 19 nt, Homo sapiens
  misc_RNA (1)...(19): siRNA sense strand
aaaaggaaaucguagugaa

SEQ ID NO: 970372 - RNA, 19 nt, Homo sapiens
  misc_RNA (1)...(19): siRNA sense strand
uggaggcaauggauuuaga

SEQ ID NO: 970373 - RNA, 19 nt, Homo sapiens
  misc_RNA (1)...(19): siRNA sense strand
uagugauccugcauuagaa

SEQ ID NO: 970374 - RNA, 19 nt, Homo sapiens
  misc_RNA (1)...(19): siRNA sense strand
ccagauuugcugucgcuuu

SEQ ID NO: 970375 - RNA, 19 nt, Homo sapiens
  misc_RNA (1)...(19): siRNA sense strand
ugaauagcucugucucuga

SEQ ID NO: 970376 - RNA, 19 nt, Homo sapiens
  misc_RNA (1)...(19): siRNA sense strand
acgcgguggugaagaauug

SEQ ID NO: 970377 - RNA, 19 nt, Homo sapiens
  misc_RNA (1)...(19): siRNA sense strand
gcuucgcgguggugaauag

SEQ ID NO: 970378 - RNA, 19 nt, Homo sapiens
  misc_RNA (1)...(19): siRNA sense strand
uaaaugaagaugccaacca

SEQ ID NO: 970379 - RNA, 19 nt, Homo sapiens
  misc_RNA (1)...(19): siRNA sense strand
caucuuugguggaacugau

SEQ ID NO: 970380 - RNA, 19 nt, Homo sapiens
  misc_RNA (1)...(19): siRNA sense strand
gaaaaggaaaucguaguga

SEQ ID NO: 970381 - RNA, 19 nt, Homo sapiens
  misc_RNA (1)...(19): siRNA sense strand
aggaugccuuugacuuuga

SEQ ID NO: 970382 - RNA, 19 nt, Homo sapiens
  misc_RNA (1)...(19): siRNA sense strand
ccucaggaguuuguucauc

SEQ ID NO: 970383 - RNA, 19 nt, Homo sapiens
  misc_RNA (1)...(19): siRNA sense strand
cggaagggaauacgugaga

SEQ ID NO: 970384 - RNA, 19 nt, Homo sapiens
  misc_RNA (1)...(19): siRNA sense strand
aaggaagcacugaagauug

SEQ ID NO: 970385 - RNA, 19 nt, Homo sapiens
  misc_RNA (1)...(19): siRNA sense strand
aggcaugucagcugcaauu

SEQ ID NO: 970386 - RNA, 19 nt, Homo sapiens
  misc_RNA (1)...(19): siRNA sense strand
ugcacgcgguggugaagaa

SEQ ID NO: 970387 - RNA, 19 nt, Homo sapiens
  misc_RNA (1)...(19): siRNA sense strand
ggaacugauguaaaugaag

SEQ ID NO: 970388 - RNA, 19 nt, Homo sapiens
  misc_RNA (1)...(19): siRNA sense strand
ucaggaguuuguucaucug

SEQ ID NO: 970389 - RNA, 19 nt, Homo sapiens
  misc_RNA (1)...(19): siRNA sense strand
gguauuggccaggaacauc

SEQ ID NO: 970390 - RNA, 19 nt, Homo sapiens
  misc_RNA (1)...(19): siRNA sense strand
ggaaagacaacaaauacua

SEQ ID NO: 970391 - RNA, 19 nt, Homo sapiens
  misc_RNA (1)...(19): siRNA sense strand
gcaggaaagacaacaaaua

SEQ ID NO: 970392 - RNA, 19 nt, Homo sapiens
  misc_RNA (1)...(19): siRNA sense strand
ccaccaaccugcuagaauu

SEQ ID NO: 970393 - RNA, 19 nt, Homo sapiens
  misc_RNA (1)...(19): siRNA sense strand
ucaaguggcuggacaucua

SEQ ID NO: 970394 - RNA, 19 nt, Homo sapiens
  misc_RNA (1)...(19): siRNA sense strand
ggaagaacccgaaagaugu

SEQ ID NO: 970395 - RNA, 19 nt, Homo sapiens
  misc_RNA (1)...(19): siRNA sense strand
gaacaaggagccgugcuuu

SEQ ID NO: 970396 - RNA, 19 nt, Homo sapiens
  misc_RNA (1)...(19): siRNA sense strand
gaaagacaacaaauacuac

SEQ ID NO: 970397 - RNA, 19 nt, Homo sapiens
  misc_RNA (1)...(19): siRNA sense strand
gaagaacccgaaagaugug

SEQ ID NO: 970398 - RNA, 19 nt, Homo sapiens
  misc_RNA (1)...(19): siRNA sense strand
cacgagggcuucaagacuu

SEQ ID NO: 970399 - RNA, 19 nt, Homo sapiens
  misc_RNA (1)...(19): siRNA sense strand
gcgacacccuggagcucua

SEQ ID NO: 970400 - RNA, 19 nt, Homo sapiens
  misc_RNA (1)...(19): siRNA sense strand
gcaacagccgcaugaacaa

SEQ ID NO: 970401 - RNA, 19 nt, Homo sapiens
  misc_RNA (1)...(19): siRNA sense strand
caaauggacagcuggugaa

SEQ ID NO: 970402 - RNA, 19 nt, Homo sapiens
  misc_RNA (1)...(19): siRNA sense strand
uggaagaacccgaaagaug

SEQ ID NO: 970403 - RNA, 19 nt, Homo sapiens
  misc_RNA (1)...(19): siRNA sense strand
ggagauccacuuccucaag

SEQ ID NO: 970404 - RNA, 19 nt, Homo sapiens
  misc_RNA (1)...(19): siRNA sense strand
caggaaagacaacaaauac

SEQ ID NO: 970405 - RNA, 19 nt, Homo sapiens
  misc_RNA (1)...(19): siRNA sense strand
acuaacugcucagccaaua

SEQ ID NO: 970406 - RNA, 19 nt, Homo sapiens
  misc_RNA (1)...(19): siRNA sense strand
uaacugcucagccaauauc

SEQ ID NO: 970407 - RNA, 19 nt, Homo sapiens
  misc_RNA (1)...(19): siRNA sense strand
gcucagccaauaucaacuu

SEQ ID NO: 970408 - RNA, 19 nt, Homo sapiens
  misc_RNA (1)...(19): siRNA sense strand
caccaaccugcuagaauuu

SEQ ID NO: 970409 - RNA, 19 nt, Homo sapiens
  misc_RNA (1)...(19): siRNA sense strand
gggacgugaccaccacuaa

SEQ ID NO: 970410 - RNA, 19 nt, Homo sapiens
  misc_RNA (1)...(19): siRNA sense strand
acgagggcuucaagacuuu

SEQ ID NO: 970411 - RNA, 19 nt, Homo sapiens
  misc_RNA (1)...(19): siRNA sense strand
cuacgaagaccgccucuac

SEQ ID NO: 970412 - RNA, 19 nt, Homo sapiens
  misc_RNA (1)...(19): siRNA sense strand
ugaaccacccggagaagug

SEQ ID NO: 970413 - RNA, 19 nt, Homo sapiens
  misc_RNA (1)...(19): siRNA sense strand
ggccagcuauccgccguau

SEQ ID NO: 970414 - RNA, 19 nt, Homo sapiens
  misc_RNA (1)...(19): siRNA sense strand
agacaacaaauacuacauc

SEQ ID NO: 970415 - RNA, 19 nt, Homo sapiens
  misc_RNA (1)...(19): siRNA sense strand
agaaggcccagaagccaaa

SEQ ID NO: 970416 - RNA, 19 nt, Homo sapiens
  misc_RNA (1)...(19): siRNA sense strand
guacggcaaggccagcuau

SEQ ID NO: 970417 - RNA, 19 nt, Homo sapiens
  misc_RNA (1)...(19): siRNA sense strand
gaccggcagccacaggaaa

SEQ ID NO: 970418 - RNA, 19 nt, Homo sapiens
  misc_RNA (1)...(19): siRNA sense strand
ggacgugaccaccacuaac

SEQ ID NO: 970419 - RNA, 19 nt, Homo sapiens
  misc_RNA (1)...(19): siRNA sense strand
cgcaacagccgcaugaaca

SEQ ID NO: 970420 - RNA, 19 nt, Homo sapiens
  misc_RNA (1)...(19): siRNA sense strand
aggaggagcgcacgcacua

SEQ ID NO: 970421 - RNA, 19 nt, Homo sapiens
  misc_RNA (1)...(19): siRNA sense strand
ucuggaagaacccgaaaga

SEQ ID NO: 970422 - RNA, 19 nt, Homo sapiens
  misc_RNA (1)...(19): siRNA sense strand
ccacgagggcuucaagacu

SEQ ID NO: 970423 - RNA, 19 nt, Homo sapiens
  misc_RNA (1)...(19): siRNA sense strand
ccagcuauccgccguaugc

SEQ ID NO: 970424 - RNA, 19 nt, Homo sapiens
  misc_RNA (1)...(19): siRNA sense strand
ucgcaggaaagacaacaaa

SEQ ID NO: 970425 - RNA, 19 nt, Homo sapiens
  misc_RNA (1)...(19): siRNA sense strand
gacgugaccaccacuaacu

SEQ ID NO: 970426 - RNA, 19 nt, Homo sapiens
  misc_RNA (1)...(19): siRNA sense strand
ugaacaaggagccgugcuu

SEQ ID NO: 970427 - RNA, 19 nt, Homo sapiens
  misc_RNA (1)...(19): siRNA sense strand
ucucaccccuggucaguuu

SEQ ID NO: 970428 - RNA, 19 nt, Homo sapiens
  misc_RNA (1)...(19): siRNA sense strand
ggaguggacuugauugaua

SEQ ID NO: 970429 - RNA, 19 nt, Homo sapiens
  misc_RNA (1)...(19): siRNA sense strand
guccucaucuccucucuua

SEQ ID NO: 970430 - RNA, 19 nt, Homo sapiens
  misc_RNA (1)...(19): siRNA sense strand
agacaucgcucccgggaaa

SEQ ID NO: 970431 - RNA, 19 nt, Homo sapiens
  misc_RNA (1)...(19): siRNA sense strand
cagaucagauugaccugua

SEQ ID NO: 970432 - RNA, 19 nt, Homo sapiens
  misc_RNA (1)...(19): siRNA sense strand
ggauuacagugacgcaauu

SEQ ID NO: 970433 - RNA, 19 nt, Homo sapiens
  misc_RNA (1)...(19): siRNA sense strand
gacccagaguucaacaaua

SEQ ID NO: 970434 - RNA, 19 nt, Homo sapiens
  misc_RNA (1)...(19): siRNA sense strand
uagacgagcugccguuuau

SEQ ID NO: 970435 - RNA, 19 nt, Homo sapiens
  misc_RNA (1)...(19): siRNA sense strand
agauugaccuguaugauga

SEQ ID NO: 970436 - RNA, 19 nt, Homo sapiens
  misc_RNA (1)...(19): siRNA sense strand
gaagccgaauuugaagaua

SEQ ID NO: 970437 - RNA, 19 nt, Homo sapiens
  misc_RNA (1)...(19): siRNA sense strand
caacaauacagaucagauu

SEQ ID NO: 970438 - RNA, 19 nt, Homo sapiens
  misc_RNA (1)...(19): siRNA sense strand
gcaaauggccaguccaaag

SEQ ID NO: 970439 - RNA, 19 nt, Homo sapiens
  misc_RNA (1)...(19): siRNA sense strand
gagugaagccgaauuugaa

SEQ ID NO: 970440 - RNA, 19 nt, Homo sapiens
  misc_RNA (1)...(19): siRNA sense strand
gaagaucggcaugaugauu

SEQ ID NO: 970441 - RNA, 19 nt, Homo sapiens
  misc_RNA (1)...(19): siRNA sense strand
gaguggacuugauugauau

SEQ ID NO: 970442 - RNA, 19 nt, Homo sapiens
  misc_RNA (1)...(19): siRNA sense strand
gcaugaugauuauuuccaa

SEQ ID NO: 970443 - RNA, 19 nt, Homo sapiens
  misc_RNA (1)...(19): siRNA sense strand
ucacagccauugcgguuau

SEQ ID NO: 970444 - RNA, 19 nt, Homo sapiens
  misc_RNA (1)...(19): siRNA sense strand
uacaguggccugcguaaua

SEQ ID NO: 970445 - RNA, 19 nt, Homo sapiens
  misc_RNA (1)...(19): siRNA sense strand
ugaaaacucuguccacaaa

SEQ ID NO: 970446 - RNA, 19 nt, Homo sapiens
  misc_RNA (1)...(19): siRNA sense strand
gaagcgaaacagagcaauu

SEQ ID NO: 970447 - RNA, 19 nt, Homo sapiens
  misc_RNA (1)...(19): siRNA sense strand
ggacugucuucauggcauu

SEQ ID NO: 970448 - RNA, 19 nt, Homo sapiens
  misc_RNA (1)...(19): siRNA sense strand
ccucacagcccucagauga

SEQ ID NO: 970449 - RNA, 19 nt, Homo sapiens
  misc_RNA (1)...(19): siRNA sense strand
cuuaaggacugucuucaug

SEQ ID NO: 970450 - RNA, 19 nt, Homo sapiens
  misc_RNA (1)...(19): siRNA sense strand
ccagugugcugcccuacuu

SEQ ID NO: 970451 - RNA, 19 nt, Homo sapiens
  misc_RNA (1)...(19): siRNA sense strand
guugaaauuugcagagaau

SEQ ID NO: 970452 - RNA, 19 nt, Homo sapiens
  misc_RNA (1)...(19): siRNA sense strand
gcauugaagccaaguccua

SEQ ID NO: 970453 - RNA, 19 nt, Homo sapiens
  misc_RNA (1)...(19): siRNA sense strand
ccauugcgguuaucaaaca

SEQ ID NO: 970454 - RNA, 19 nt, Homo sapiens
  misc_RNA (1)...(19): siRNA sense strand
cagggaaaguucuuaaugg

SEQ ID NO: 970455 - RNA, 19 nt, Homo sapiens
  misc_RNA (1)...(19): siRNA sense strand
ucgauuaccuccucaucuu

SEQ ID NO: 970456 - RNA, 19 nt, Homo sapiens
  misc_RNA (1)...(19): siRNA sense strand
gaguugaaauuugcagaga

SEQ ID NO: 970457 - RNA, 19 nt, Homo sapiens
  misc_RNA (1)...(19): siRNA sense strand
gaaccgggagcaugagaga

SEQ ID NO: 970458 - RNA, 19 nt, Homo sapiens
  misc_RNA (1)...(19): siRNA sense strand
gcagagaaucgagcaaaug

SEQ ID NO: 970459 - RNA, 19 nt, Homo sapiens
  misc_RNA (1)...(19): siRNA sense strand
aagaucggcaugaugauua

SEQ ID NO: 970460 - RNA, 19 nt, Homo sapiens
  misc_RNA (1)...(19): siRNA sense strand
cugcaauucuguauaccua

SEQ ID NO: 970461 - RNA, 19 nt, Homo sapiens
  misc_RNA (1)...(19): siRNA sense strand
caugagagacaccgggaua

SEQ ID NO: 970462 - RNA, 19 nt, Homo sapiens
  misc_RNA (1)...(19): siRNA sense strand
caucugcucguguggauaa

SEQ ID NO: 970463 - RNA, 19 nt, Homo sapiens
  misc_RNA (1)...(19): siRNA sense strand
ucuaugaugugguggaguu

SEQ ID NO: 970464 - RNA, 19 nt, Homo sapiens
  misc_RNA (1)...(19): siRNA sense strand
ucacagcccucagaugaca

SEQ ID NO: 970465 - RNA, 19 nt, Homo sapiens
  misc_RNA (1)...(19): siRNA sense strand
cagaaggaguggacuugau

SEQ ID NO: 970466 - RNA, 19 nt, Homo sapiens
  misc_RNA (1)...(19): siRNA sense strand
gagcaaauggccaguccaa

SEQ ID NO: 970467 - RNA, 19 nt, Homo sapiens
  misc_RNA (1)...(19): siRNA sense strand
gugguggaguugaaauuug

SEQ ID NO: 970468 - RNA, 19 nt, Homo sapiens
  misc_RNA (1)...(19): siRNA sense strand
ugagugaagccgaauuuga

SEQ ID NO: 970469 - RNA, 19 nt, Homo sapiens
  misc_RNA (1)...(19): siRNA sense strand
aaaggaaccgggagcauga

SEQ ID NO: 970470 - RNA, 19 nt, Homo sapiens
  misc_RNA (1)...(19): siRNA sense strand
accgggaucugcuucauaa

SEQ ID NO: 970471 - RNA, 19 nt, Homo sapiens
  misc_RNA (1)...(19): siRNA sense strand
gaaggaguggacuugauug

SEQ ID NO: 970472 - RNA, 19 nt, Homo sapiens
  misc_RNA (1)...(19): siRNA sense strand
ccuccacccucuacaguga

SEQ ID NO: 970473 - RNA, 19 nt, Homo sapiens
  misc_RNA (1)...(19): siRNA sense strand
cagauugaccuguaugaug

SEQ ID NO: 970474 - RNA, 19 nt, Homo sapiens
  misc_RNA (1)...(19): siRNA sense strand
caccagauacuuacaugaa

SEQ ID NO: 970475 - RNA, 19 nt, Homo sapiens
  misc_RNA (1)...(19): siRNA sense strand
ugaaccaccuccuccuguu

SEQ ID NO: 970476 - RNA, 19 nt, Homo sapiens
  misc_RNA (1)...(19): siRNA sense strand
ccagggaaaguucuuaaug

SEQ ID NO: 970477 - RNA, 19 nt, Homo sapiens
  misc_RNA (1)...(19): siRNA sense strand
ccagguuauucgcucuaua

SEQ ID NO: 970478 - RNA, 19 nt, Homo sapiens
  misc_RNA (1)...(19): siRNA sense strand
caacaagaccccugcaauu

SEQ ID NO: 970479 - RNA, 19 nt, Homo sapiens
  misc_RNA (1)...(19): siRNA sense strand
ggacccagaguucaacaau

SEQ ID NO: 970480 - RNA, 19 nt, Homo sapiens
  misc_RNA (1)...(19): siRNA sense strand
uaaugaagaucggcaugau

SEQ ID NO: 970481 - RNA, 19 nt, Homo sapiens
  misc_RNA (1)...(19): siRNA sense strand
gaaauuugcagagaaucga

SEQ ID NO: 970482 - RNA, 19 nt, Homo sapiens
  misc_RNA (1)...(19): siRNA sense strand
caaccaggacccagaguuc

SEQ ID NO: 970483 - RNA, 19 nt, Homo sapiens
  misc_RNA (1)...(19): siRNA sense strand
caaauuguuggaacuccua

SEQ ID NO: 970484 - RNA, 19 nt, Homo sapiens
  misc_RNA (1)...(19): siRNA sense strand
aagcgaaacagagcaauuu

SEQ ID NO: 970485 - RNA, 19 nt, Homo sapiens
  misc_RNA (1)...(19): siRNA sense strand
ggccuccaccagauacuua

SEQ ID NO: 970486 - RNA, 19 nt, Homo sapiens
  misc_RNA (1)...(19): siRNA sense strand
aagccgaauuugaagauau

SEQ ID NO: 970487 - RNA, 19 nt, Homo sapiens
  misc_RNA (1)...(19): siRNA sense strand
caccauggcagccgagauu

SEQ ID NO: 970488 - RNA, 19 nt, Homo sapiens
  misc_RNA (1)...(19): siRNA sense strand
ugaccuguaugaugaugug

SEQ ID NO: 970489 - RNA, 19 nt, Homo sapiens
  misc_RNA (1)...(19): siRNA sense strand
agaaggaguggacuugauu

SEQ ID NO: 970490 - RNA, 19 nt, Homo sapiens
  misc_RNA (1)...(19): siRNA sense strand
agggaaaguucuuaaugga

SEQ ID NO: 970491 - RNA, 19 nt, Homo sapiens
  misc_RNA (1)...(19): siRNA sense strand
caaauggccaguccaaagg

SEQ ID NO: 970492 - RNA, 19 nt, Homo sapiens
  misc_RNA (1)...(19): siRNA sense strand
cgaauuugaagauaucaug

SEQ ID NO: 970493 - RNA, 19 nt, Homo sapiens
  misc_RNA (1)...(19): siRNA sense strand
gugcugcccuacuucaauc

SEQ ID NO: 970494 - RNA, 19 nt, Homo sapiens
  misc_RNA (1)...(19): siRNA sense strand
acaguggccugcguaauag

SEQ ID NO: 970495 - RNA, 19 nt, Homo sapiens
  misc_RNA (1)...(19): siRNA sense strand
gcaccgggaucugcuucau

SEQ ID NO: 970496 - RNA, 19 nt, Homo sapiens
  misc_RNA (1)...(19): siRNA sense strand
acccagaguucaacaauac

SEQ ID NO: 970497 - RNA, 19 nt, Homo sapiens
  misc_RNA (1)...(19): siRNA sense strand
ccaccucucuccucaagcu

SEQ ID NO: 970498 - RNA, 19 nt, Homo sapiens
  misc_RNA (1)...(19): siRNA sense strand
aaaacucuguccacaaauu

SEQ ID NO: 970499 - RNA, 19 nt, Homo sapiens
  misc_RNA (1)...(19): siRNA sense strand
gacgagcugccguuuaugu

SEQ ID NO: 970500 - RNA, 19 nt, Homo sapiens
  misc_RNA (1)...(19): siRNA sense strand
aagauaucaugaagcgaaa

SEQ ID NO: 970501 - RNA, 19 nt, Homo sapiens
  misc_RNA (1)...(19): siRNA sense strand
cagcugauccagguuauuc

SEQ ID NO: 970502 - RNA, 19 nt, Homo sapiens
  misc_RNA (1)...(19): siRNA sense strand
aaacucuguccacaaauug

SEQ ID NO: 970503 - RNA, 19 nt, Homo sapiens
  misc_RNA (1)...(19): siRNA sense strand
gaucagauugaccuguaug

SEQ ID NO: 970504 - RNA, 19 nt, Homo sapiens
  misc_RNA (1)...(19): siRNA sense strand
caccaccucucuccucaag

SEQ ID NO: 970505 - RNA, 19 nt, Homo sapiens
  misc_RNA (1)...(19): siRNA sense strand
caccugcccuucaccucaa

SEQ ID NO: 970506 - RNA, 19 nt, Homo sapiens
  misc_RNA (1)...(19): siRNA sense strand
cagagaaucgagcaaaugg

SEQ ID NO: 970507 - RNA, 19 nt, Homo sapiens
  misc_RNA (1)...(19): siRNA sense strand
augaagaucggcaugauga

SEQ ID NO: 970508 - RNA, 19 nt, Homo sapiens
  misc_RNA (1)...(19): siRNA sense strand
ccucaucuccucucuuaag

SEQ ID NO: 970509 - RNA, 19 nt, Homo sapiens
  misc_RNA (1)...(19): siRNA sense strand
uaucaugaagcgaaacaga

SEQ ID NO: 970510 - RNA, 19 nt, Homo sapiens
  misc_RNA (1)...(19): siRNA sense strand
gauaucaugaagcgaaaca

SEQ ID NO: 970511 - RNA, 19 nt, Homo sapiens
  misc_RNA (1)...(19): siRNA sense strand
gggccacacccucugagaa

SEQ ID NO: 970512 - RNA, 19 nt, Homo sapiens
  misc_RNA (1)...(19): siRNA sense strand
cagguuauucgcucuauag

SEQ ID NO: 970513 - RNA, 19 nt, Homo sapiens
  misc_RNA (1)...(19): siRNA sense strand
gggauuacagugacgcaau

SEQ ID NO: 970514 - RNA, 19 nt, Homo sapiens
  misc_RNA (1)...(19): siRNA sense strand
ccacuaccagcaucucaug

SEQ ID NO: 970515 - RNA, 19 nt, Homo sapiens
  misc_RNA (1)...(19): siRNA sense strand
cgggaucugcuucauaaug

SEQ ID NO: 970516 - RNA, 19 nt, Homo sapiens
  misc_RNA (1)...(19): siRNA sense strand
agagacaccgggauagaga

SEQ ID NO: 970517 - RNA, 19 nt, Homo sapiens
  misc_RNA (1)...(19): siRNA sense strand
ccucucuccucaagcuuug

SEQ ID NO: 970518 - RNA, 19 nt, Homo sapiens
  misc_RNA (1)...(19): siRNA sense strand
gaacuccuaccagggaaag

SEQ ID NO: 970519 - RNA, 19 nt, Homo sapiens
  misc_RNA (1)...(19): siRNA sense strand
gagagacaccgggauagag

SEQ ID NO: 970520 - RNA, 19 nt, Homo sapiens
  misc_RNA (1)...(19): siRNA sense strand
ugagagacaccgggauaga

SEQ ID NO: 970521 - RNA, 19 nt, Homo sapiens
  misc_RNA (1)...(19): siRNA sense strand
agaucggcaugaugauuau

SEQ ID NO: 970522 - RNA, 19 nt, Homo sapiens
  misc_RNA (1)...(19): siRNA sense strand
guucaacaauacagaucag

SEQ ID NO: 970523 - RNA, 19 nt, Homo sapiens
  misc_RNA (1)...(19): siRNA sense strand
gagacaccgggauagagaa

SEQ ID NO: 970524 - RNA, 19 nt, Homo sapiens
  misc_RNA (1)...(19): siRNA sense strand
caccgggaucugcuucaua

SEQ ID NO: 970525 - RNA, 19 nt, Homo sapiens
  misc_RNA (1)...(19): siRNA sense strand
agucccggguugccaauga

SEQ ID NO: 970526 - RNA, 19 nt, Homo sapiens
  misc_RNA (1)...(19): siRNA sense strand
ugaagccgaauuugaagau

SEQ ID NO: 970527 - RNA, 19 nt, Homo sapiens
  misc_RNA (1)...(19): siRNA sense strand
ggaacuccuaccagggaaa

SEQ ID NO: 970528 - RNA, 19 nt, Homo sapiens
  misc_RNA (1)...(19): siRNA sense strand
gcugggaaccuacucauua

SEQ ID NO: 970529 - RNA, 19 nt, Homo sapiens
  misc_RNA (1)...(19): siRNA sense strand
gcaccaggacgcuuugauu

SEQ ID NO: 970530 - RNA, 19 nt, Homo sapiens
  misc_RNA (1)...(19): siRNA sense strand
caccaggacgcuuugauua

SEQ ID NO: 970531 - RNA, 19 nt, Homo sapiens
  misc_RNA (1)...(19): siRNA sense strand
gggaaccuacucauuauug

SEQ ID NO: 970532 - RNA, 19 nt, Homo sapiens
  misc_RNA (1)...(19): siRNA sense strand
cgacaaccucccacucuuu

SEQ ID NO: 970533 - RNA, 19 nt, Homo sapiens
  misc_RNA (1)...(19): siRNA sense strand
ccaggacgcuuugauuaca

SEQ ID NO: 970534 - RNA, 19 nt, Homo sapiens
  misc_RNA (1)...(19): siRNA sense strand
ggagagagggcagagaaga

SEQ ID NO: 970535 - RNA, 19 nt, Homo sapiens
  misc_RNA (1)...(19): siRNA sense strand
cauuauugcugcuuucaca

SEQ ID NO: 970536 - RNA, 19 nt, Homo sapiens
  misc_RNA (1)...(19): siRNA sense strand
aggcagugcuggcugauau

SEQ ID NO: 970537 - RNA, 19 nt, Homo sapiens
  misc_RNA (1)...(19): siRNA sense strand
ugacgaggagcccagauuu

SEQ ID NO: 970538 - RNA, 19 nt, Homo sapiens
  misc_RNA (1)...(19): siRNA sense strand
gggccacagccaccaguua

SEQ ID NO: 970539 - RNA, 19 nt, Homo sapiens
  misc_RNA (1)...(19): siRNA sense strand
cacaggagccuucgccuau

SEQ ID NO: 970540 - RNA, 19 nt, Homo sapiens
  misc_RNA (1)...(19): siRNA sense strand
ggaaccuacucauuauugc

SEQ ID NO: 970541 - RNA, 19 nt, Homo sapiens
  misc_RNA (1)...(19): siRNA sense strand
cugggaaccuacucauuau

SEQ ID NO: 970542 - RNA, 19 nt, Homo sapiens
  misc_RNA (1)...(19): siRNA sense strand
ccacagccaccaguuauuc

SEQ ID NO: 970543 - RNA, 19 nt, Homo sapiens
  misc_RNA (1)...(19): siRNA sense strand
caggagagagggcagagaa

SEQ ID NO: 970544 - RNA, 19 nt, Homo sapiens
  misc_RNA (1)...(19): siRNA sense strand
gaugggaguggaagaagug

SEQ ID NO: 970545 - RNA, 19 nt, Homo sapiens
  misc_RNA (1)...(19): siRNA sense strand
ggccacagccaccaguuau

SEQ ID NO: 970546 - RNA, 19 nt, Homo sapiens
  misc_RNA (1)...(19): siRNA sense strand
gacgaggagcccagauuug

SEQ ID NO: 970547 - RNA, 19 nt, Homo sapiens
  misc_RNA (1)...(19): siRNA sense strand
ccaguuauuccacaucugu

SEQ ID NO: 970548 - RNA, 19 nt, Homo sapiens
  misc_RNA (1)...(19): siRNA sense strand
guacccaggccaaacaaca

SEQ ID NO: 970549 - RNA, 19 nt, Homo sapiens
  misc_RNA (1)...(19): siRNA sense strand
ggacuggcagagugugaga

SEQ ID NO: 970550 - RNA, 19 nt, Homo sapiens
  misc_RNA (1)...(19): siRNA sense strand
ggcugcagcugggaaccua

SEQ ID NO: 970551 - RNA, 19 nt, Homo sapiens
  misc_RNA (1)...(19): siRNA sense strand
ucgacaaccucccacucuu

SEQ ID NO: 970552 - RNA, 19 nt, Homo sapiens
  misc_RNA (1)...(19): siRNA sense strand
gagagagggcagagaagag

SEQ ID NO: 970553 - RNA, 19 nt, Homo sapiens
  misc_RNA (1)...(19): siRNA sense strand
gcaugcgccacaucugcua

SEQ ID NO: 970554 - RNA, 19 nt, Homo sapiens
  misc_RNA (1)...(19): siRNA sense strand
caucucagccuggaaccaa

SEQ ID NO: 970555 - RNA, 19 nt, Homo sapiens
  misc_RNA (1)...(19): siRNA sense strand
gcucacuggcuuccucuuc

SEQ ID NO: 970556 - RNA, 19 nt, Homo sapiens
  misc_RNA (1)...(19): siRNA sense strand
ccaccugcaccaguucuuu

SEQ ID NO: 970557 - RNA, 19 nt, Homo sapiens
  misc_RNA (1)...(19): siRNA sense strand
caccaguuauuccacaucu

SEQ ID NO: 970558 - RNA, 19 nt, Homo sapiens
  misc_RNA (1)...(19): siRNA sense strand
gaggcagugcuggcugaua

SEQ ID NO: 970559 - RNA, 19 nt, Homo sapiens
  misc_RNA (1)...(19): siRNA sense strand
ugaugggaguggaagaagu

SEQ ID NO: 970560 - RNA, 19 nt, Homo sapiens
  misc_RNA (1)...(19): siRNA sense strand
gaaccuacucauuauugcu

SEQ ID NO: 970561 - RNA, 19 nt, Homo sapiens
  misc_RNA (1)...(19): siRNA sense strand
ccucccaccugccugaaag

SEQ ID NO: 970562 - RNA, 19 nt, Homo sapiens
  misc_RNA (1)...(19): siRNA sense strand
ccagagcacagaaugaacu

SEQ ID NO: 970563 - RNA, 19 nt, Homo sapiens
  misc_RNA (1)...(19): siRNA sense strand
cacagaagcugguuuacua

SEQ ID NO: 970564 - RNA, 19 nt, Homo sapiens
  misc_RNA (1)...(19): siRNA sense strand
ggacaaacccugacacguu

SEQ ID NO: 970565 - RNA, 19 nt, Homo sapiens
  misc_RNA (1)...(19): siRNA sense strand
gcacaaggauaagaaggaa

SEQ ID NO: 970566 - RNA, 19 nt, Homo sapiens
  misc_RNA (1)...(19): siRNA sense strand
gaaaugaaggaaaugagaa

SEQ ID NO: 970567 - RNA, 19 nt, Homo sapiens
  misc_RNA (1)...(19): siRNA sense strand
gaaagaaagaaaugaagga

SEQ ID NO: 970568 - RNA, 19 nt, Homo sapiens
  misc_RNA (1)...(19): siRNA sense strand
gcacagccauggccuggau

SEQ ID NO: 970569 - RNA, 19 nt, Homo sapiens
  misc_RNA (1)...(19): siRNA sense strand
gcaaguacuucucaaaaga

SEQ ID NO: 970570 - RNA, 19 nt, Homo sapiens
  misc_RNA (1)...(19): siRNA sense strand
ggaagaaagaaagaaauga

SEQ ID NO: 970571 - RNA, 19 nt, Homo sapiens
  misc_RNA (1)...(19): siRNA sense strand
ggucagaaacaaugaguau

SEQ ID NO: 970572 - RNA, 19 nt, Homo sapiens
  misc_RNA (1)...(19): siRNA sense strand
cagaagagaagcagcacua

SEQ ID NO: 970573 - RNA, 19 nt, Homo sapiens
  misc_RNA (1)...(19): siRNA sense strand
gcaguucuuuggccucugu

SEQ ID NO: 970574 - RNA, 19 nt, Homo sapiens
  misc_RNA (1)...(19): siRNA sense strand
gaaagaaaugaaggaaaug

SEQ ID NO: 970575 - RNA, 19 nt, Homo sapiens
  misc_RNA (1)...(19): siRNA sense strand
gggcacggcaccuguacua

SEQ ID NO: 970576 - RNA, 19 nt, Homo sapiens
  misc_RNA (1)...(19): siRNA sense strand
caacguggcgagcaucaga

SEQ ID NO: 970577 - RNA, 19 nt, Homo sapiens
  misc_RNA (1)...(19): siRNA sense strand
caagagguccagcaacugu

SEQ ID NO: 970578 - RNA, 19 nt, Homo sapiens
  misc_RNA (1)...(19): siRNA sense strand
cacaguggaucaucaccaa

SEQ ID NO: 970579 - RNA, 19 nt, Homo sapiens
  misc_RNA (1)...(19): siRNA sense strand
ggaggaggcagaagagaag

SEQ ID NO: 970580 - RNA, 19 nt, Homo sapiens
  misc_RNA (1)...(19): siRNA sense strand
gggaggaggcagaagagaa

SEQ ID NO: 970581 - RNA, 19 nt, Homo sapiens
  misc_RNA (1)...(19): siRNA sense strand
gcacagaagcugguuuacu

SEQ ID NO: 970582 - RNA, 19 nt, Homo sapiens
  misc_RNA (1)...(19): siRNA sense strand
caccagauccaggaaauga

SEQ ID NO: 970583 - RNA, 19 nt, Homo sapiens
  misc_RNA (1)...(19): siRNA sense strand
cagagacgcgcaguucuuu

SEQ ID NO: 970584 - RNA, 19 nt, Homo sapiens
  misc_RNA (1)...(19): siRNA sense strand
caucagagacgcgcaguuc

SEQ ID NO: 970585 - RNA, 19 nt, Homo sapiens
  misc_RNA (1)...(19): siRNA sense strand
uaccgggaguccuauauca

SEQ ID NO: 970586 - RNA, 19 nt, Homo sapiens
  misc_RNA (1)...(19): siRNA sense strand
agaaaugaaggaaaugaga

SEQ ID NO: 970587 - RNA, 19 nt, Homo sapiens
  misc_RNA (1)...(19): siRNA sense strand
gcgauggccucggaacaca

SEQ ID NO: 970588 - RNA, 19 nt, Homo sapiens
  misc_RNA (1)...(19): siRNA sense strand
gcacaucuaccagggaaag

SEQ ID NO: 970589 - RNA, 19 nt, Homo sapiens
  misc_RNA (1)...(19): siRNA sense strand
gcucagcaaguacuucuca

SEQ ID NO: 970590 - RNA, 19 nt, Homo sapiens
  misc_RNA (1)...(19): siRNA sense strand
caaaagauuggaagaaaga

SEQ ID NO: 970591 - RNA, 19 nt, Homo sapiens
  misc_RNA (1)...(19): siRNA sense strand
gaaaacggaagggucauaa

SEQ ID NO: 970592 - RNA, 19 nt, Homo sapiens
  misc_RNA (1)...(19): siRNA sense strand
gccauggccuggaugacau

SEQ ID NO: 970593 - RNA, 19 nt, Homo sapiens
  misc_RNA (1)...(19): siRNA sense strand
guacuacugccacuugaag

SEQ ID NO: 970594 - RNA, 19 nt, Homo sapiens
  misc_RNA (1)...(19): siRNA sense strand
gcacggcaccuguacuacu

SEQ ID NO: 970595 - RNA, 19 nt, Homo sapiens
  misc_RNA (1)...(19): siRNA sense strand
ucagagacgcgcaguucuu

SEQ ID NO: 970596 - RNA, 19 nt, Homo sapiens
  misc_RNA (1)...(19): siRNA sense strand
agcaaaagcucagcaagua

SEQ ID NO: 970597 - RNA, 19 nt, Homo sapiens
  misc_RNA (1)...(19): siRNA sense strand
uggaagaaagaaagaaaug

SEQ ID NO: 970598 - RNA, 19 nt, Homo sapiens
  misc_RNA (1)...(19): siRNA sense strand
ccaccucacucagccauac

SEQ ID NO: 970599 - RNA, 19 nt, Homo sapiens
  misc_RNA (1)...(19): siRNA sense strand
cagggaauccagagagaug

SEQ ID NO: 970600 - RNA, 19 nt, Homo sapiens
  misc_RNA (1)...(19): siRNA sense strand
gagacgcgcaguucuuugg

SEQ ID NO: 970601 - RNA, 19 nt, Homo sapiens
  misc_RNA (1)...(19): siRNA sense strand
ucagcaaguacuucucaaa

SEQ ID NO: 970602 - RNA, 19 nt, Homo sapiens
  misc_RNA (1)...(19): siRNA sense strand
uccacgggcuccaugagaa

SEQ ID NO: 970603 - RNA, 19 nt, Homo sapiens
  misc_RNA (1)...(19): siRNA sense strand
cacggcaccuguacuacug

SEQ ID NO: 970604 - RNA, 19 nt, Homo sapiens
  misc_RNA (1)...(19): siRNA sense strand
ccugacacguucccuccuu

SEQ ID NO: 970605 - RNA, 19 nt, Homo sapiens
  misc_RNA (1)...(19): siRNA sense strand
gcaagagguccagcaacug

SEQ ID NO: 970606 - RNA, 19 nt, Homo sapiens
  misc_RNA (1)...(19): siRNA sense strand
ucaggcugcacaaggauaa

SEQ ID NO: 970607 - RNA, 19 nt, Homo sapiens
  misc_RNA (1)...(19): siRNA sense strand
ggaacacagggauguccuu

SEQ ID NO: 970608 - RNA, 19 nt, Homo sapiens
  misc_RNA (1)...(19): siRNA sense strand
ggaaaacggaagggucaua

SEQ ID NO: 970609 - RNA, 19 nt, Homo sapiens
  misc_RNA (1)...(19): siRNA sense strand
caguggaucaucaccaaga

SEQ ID NO: 970610 - RNA, 19 nt, Homo sapiens
  misc_RNA (1)...(19): siRNA sense strand
gcaccagauccaggaaaug

SEQ ID NO: 970611 - RNA, 19 nt, Homo sapiens
  misc_RNA (1)...(19): siRNA sense strand
aguccuauaucagcgauga

SEQ ID NO: 970612 - RNA, 19 nt, Homo sapiens
  misc_RNA (1)...(19): siRNA sense strand
ucuucaggcugcacaagga

SEQ ID NO: 970613 - RNA, 19 nt, Homo sapiens
  misc_RNA (1)...(19): siRNA sense strand
ccagauccaggaaaugaca

SEQ ID NO: 970614 - RNA, 19 nt, Homo sapiens
  misc_RNA (1)...(19): siRNA sense strand
gcacuaccgggaguccuau

SEQ ID NO: 970615 - RNA, 19 nt, Homo sapiens
  misc_RNA (1)...(19): siRNA sense strand
gucagaaacaaugaguaua

SEQ ID NO: 970616 - RNA, 19 nt, Homo sapiens
  misc_RNA (1)...(19): siRNA sense strand
agcaagagguccagcaacu

SEQ ID NO: 970617 - RNA, 19 nt, Homo sapiens
  misc_RNA (1)...(19): siRNA sense strand
ucacaaaccuggaagauua

SEQ ID NO: 970618 - RNA, 19 nt, Homo sapiens
  misc_RNA (1)...(19): siRNA sense strand
gcagagaaauguccaaauc

SEQ ID NO: 970619 - RNA, 19 nt, Homo sapiens
  misc_RNA (1)...(19): siRNA sense strand
ggaugaagaugaagaugaa

SEQ ID NO: 970620 - RNA, 19 nt, Homo sapiens
  misc_RNA (1)...(19): siRNA sense strand
gagaaauguccaaaucuua

SEQ ID NO: 970621 - RNA, 19 nt, Homo sapiens
  misc_RNA (1)...(19): siRNA sense strand
gaaacgagaugcugaagac

SEQ ID NO: 970622 - RNA, 19 nt, Homo sapiens
  misc_RNA (1)...(19): siRNA sense strand
aagaagaaauucaggauga

SEQ ID NO: 970623 - RNA, 19 nt, Homo sapiens
  misc_RNA (1)...(19): siRNA sense strand
gcaaaucacauacuuagau

SEQ ID NO: 970624 - RNA, 19 nt, Homo sapiens
  misc_RNA (1)...(19): siRNA sense strand
ggagcuuagugauaauaua

SEQ ID NO: 970625 - RNA, 19 nt, Homo sapiens
  misc_RNA (1)...(19): siRNA sense strand
gagaugaagaagaagauua

SEQ ID NO: 970626 - RNA, 19 nt, Homo sapiens
  misc_RNA (1)...(19): siRNA sense strand
gaguauggcuaauguggaa

SEQ ID NO: 970627 - RNA, 19 nt, Homo sapiens
  misc_RNA (1)...(19): siRNA sense strand
ggaugaggaugaagaugaa

SEQ ID NO: 970628 - RNA, 19 nt, Homo sapiens
  misc_RNA (1)...(19): siRNA sense strand
ggaagaagaggaagaagga

SEQ ID NO: 970629 - RNA, 19 nt, Homo sapiens
  misc_RNA (1)...(19): siRNA sense strand
caaaucacauacuuagaug

SEQ ID NO: 970630 - RNA, 19 nt, Homo sapiens
  misc_RNA (1)...(19): siRNA sense strand
ugacagaguuaguccuuga

SEQ ID NO: 970631 - RNA, 19 nt, Homo sapiens
  misc_RNA (1)...(19): siRNA sense strand
gauaauugccuguguguca

SEQ ID NO: 970632 - RNA, 19 nt, Homo sapiens
  misc_RNA (1)...(19): siRNA sense strand
gaaagaagaaauucaggau

SEQ ID NO: 970633 - RNA, 19 nt, Homo sapiens
  misc_RNA (1)...(19): siRNA sense strand
ugaagacgauggagaggaa

SEQ ID NO: 970634 - RNA, 19 nt, Homo sapiens
  misc_RNA (1)...(19): siRNA sense strand
gaacuacugcagcaaauca

SEQ ID NO: 970635 - RNA, 19 nt, Homo sapiens
  misc_RNA (1)...(19): siRNA sense strand
ucacauacuuagauggauu

SEQ ID NO: 970636 - RNA, 19 nt, Homo sapiens
  misc_RNA (1)...(19): siRNA sense strand
ggaaggauaugaggaagag

SEQ ID NO: 970637 - RNA, 19 nt, Homo sapiens
  misc_RNA (1)...(19): siRNA sense strand
ccuggaagauuauagagaa

SEQ ID NO: 970638 - RNA, 19 nt, Homo sapiens
  misc_RNA (1)...(19): siRNA sense strand
gauuugaucaggaggauaa

SEQ ID NO: 970639 - RNA, 19 nt, Homo sapiens
  misc_RNA (1)...(19): siRNA sense strand
gaaauugaaggccugaaug

SEQ ID NO: 970640 - RNA, 19 nt, Homo sapiens
  misc_RNA (1)...(19): siRNA sense strand
gcagcaaaucacauacuua

SEQ ID NO: 970641 - RNA, 19 nt, Homo sapiens
  misc_RNA (1)...(19): siRNA sense strand
gaaaagucuugaccuguuu

SEQ ID NO: 970642 - RNA, 19 nt, Homo sapiens
  misc_RNA (1)...(19): siRNA sense strand
aauuggagcuuagugauaa

SEQ ID NO: 970643 - RNA, 19 nt, Homo sapiens
  misc_RNA (1)...(19): siRNA sense strand
cagaguuaguccuugauaa

SEQ ID NO: 970644 - RNA, 19 nt, Homo sapiens
  misc_RNA (1)...(19): siRNA sense strand
ggaagauuauagagaaagu

SEQ ID NO: 970645 - RNA, 19 nt, Homo sapiens
  misc_RNA (1)...(19): siRNA sense strand
agagaaauguccaaaucuu

SEQ ID NO: 970646 - RNA, 19 nt, Homo sapiens
  misc_RNA (1)...(19): siRNA sense strand
ugaagaugaugaagaggaa

SEQ ID NO: 970647 - RNA, 19 nt, Homo sapiens
  misc_RNA (1)...(19): siRNA sense strand
ggaagaagaggaagaagag

SEQ ID NO: 970648 - RNA, 19 nt, Homo sapiens
  misc_RNA (1)...(19): siRNA sense strand
agaagaugaugaugacuau

SEQ ID NO: 970649 - RNA, 19 nt, Homo sapiens
  misc_RNA (1)...(19): siRNA sense strand
cggaggaggugacagaguu

SEQ ID NO: 970650 - RNA, 19 nt, Homo sapiens
  misc_RNA (1)...(19): siRNA sense strand
ggauggcgaugaagaugau

SEQ ID NO: 970651 - RNA, 19 nt, Homo sapiens
  misc_RNA (1)...(19): siRNA sense strand
cgaugaagaugaugaagag

SEQ ID NO: 970652 - RNA, 19 nt, Homo sapiens
  misc_RNA (1)...(19): siRNA sense strand
gagaagaggaaacgagaug

SEQ ID NO: 970653 - RNA, 19 nt, Homo sapiens
  misc_RNA (1)...(19): siRNA sense strand
ugaagaagaugaugaugac

SEQ ID NO: 970654 - RNA, 19 nt, Homo sapiens
  misc_RNA (1)...(19): siRNA sense strand
caaucugaguggaaacaaa

SEQ ID NO: 970655 - RNA, 19 nt, Homo sapiens
  misc_RNA (1)...(19): siRNA sense strand
gaagugggccucucauacu

SEQ ID NO: 970656 - RNA, 19 nt, Homo sapiens
  misc_RNA (1)...(19): siRNA sense strand
ggaugaggaugaggaugaa

SEQ ID NO: 970657 - RNA, 19 nt, Homo sapiens
  misc_RNA (1)...(19): siRNA sense strand
ggaaauugaaggccugaau

SEQ ID NO: 970658 - RNA, 19 nt, Homo sapiens
  misc_RNA (1)...(19): siRNA sense strand
ggaggaggugacagaguua

SEQ ID NO: 970659 - RNA, 19 nt, Homo sapiens
  misc_RNA (1)...(19): siRNA sense strand
ugaugacuauguugaagaa

SEQ ID NO: 970660 - RNA, 19 nt, Homo sapiens
  misc_RNA (1)...(19): siRNA sense strand
ggaagugggccucucauac

SEQ ID NO: 970661 - RNA, 19 nt, Homo sapiens
  misc_RNA (1)...(19): siRNA sense strand
cggcuucccagcuuaaaua

SEQ ID NO: 970662 - RNA, 19 nt, Homo sapiens
  misc_RNA (1)...(19): siRNA sense strand
gggaagaagaggaagaaga

SEQ ID NO: 970663 - RNA, 19 nt, Homo sapiens
  misc_RNA (1)...(19): siRNA sense strand
gaugaugacuauguugaag

SEQ ID NO: 970664 - RNA, 19 nt, Homo sapiens
  misc_RNA (1)...(19): siRNA sense strand
aaucuuaccuaccucaauc

SEQ ID NO: 970665 - RNA, 19 nt, Homo sapiens
  misc_RNA (1)...(19): siRNA sense strand
cagcaaaucacauacuuag

SEQ ID NO: 970666 - RNA, 19 nt, Homo sapiens
  misc_RNA (1)...(19): siRNA sense strand
cagcuuaaauaaacuucga

SEQ ID NO: 970667 - RNA, 19 nt, Homo sapiens
  misc_RNA (1)...(19): siRNA sense strand
ggaaacgagaugcugaaga

SEQ ID NO: 970668 - RNA, 19 nt, Homo sapiens
  misc_RNA (1)...(19): siRNA sense strand
gugggccucucauacuuaa

SEQ ID NO: 970669 - RNA, 19 nt, Homo sapiens
  misc_RNA (1)...(19): siRNA sense strand
gaguuaguccuugauaauu

SEQ ID NO: 970670 - RNA, 19 nt, Homo sapiens
  misc_RNA (1)...(19): siRNA sense strand
uaaaagaucucaguacagu

SEQ ID NO: 970671 - RNA, 19 nt, Homo sapiens
  misc_RNA (1)...(19): siRNA sense strand
gaaaauuggagcuuaguga

SEQ ID NO: 970672 - RNA, 19 nt, Homo sapiens
  misc_RNA (1)...(19): siRNA sense strand
gagaggaagaagaugacua

SEQ ID NO: 970673 - RNA, 19 nt, Homo sapiens
  misc_RNA (1)...(19): siRNA sense strand
ggaagaggaggaugaggau

SEQ ID NO: 970674 - RNA, 19 nt, Homo sapiens
  misc_RNA (1)...(19): siRNA sense strand
ugaugaggauggcgaugaa

SEQ ID NO: 970675 - RNA, 19 nt, Homo sapiens
  misc_RNA (1)...(19): siRNA sense strand
aaauuggagcuuagugaua

SEQ ID NO: 970676 - RNA, 19 nt, Homo sapiens
  misc_RNA (1)...(19): siRNA sense strand
ggaaguccuggcagagaaa

SEQ ID NO: 970677 - RNA, 19 nt, Homo sapiens
  misc_RNA (1)...(19): siRNA sense strand
ggaugaagaagaugaugau

SEQ ID NO: 970678 - RNA, 19 nt, Homo sapiens
  misc_RNA (1)...(19): siRNA sense strand
gcgaugaagaugaugaaga

SEQ ID NO: 970679 - RNA, 19 nt, Homo sapiens
  misc_RNA (1)...(19): siRNA sense strand
guccaaaucuuaccuaccu

SEQ ID NO: 970680 - RNA, 19 nt, Homo sapiens
  misc_RNA (1)...(19): siRNA sense strand
auugaaggccugaaugaua

SEQ ID NO: 970681 - RNA, 19 nt, Homo sapiens
  misc_RNA (1)...(19): siRNA sense strand
aaagaucucaguacaguag

SEQ ID NO: 970682 - RNA, 19 nt, Homo sapiens
  misc_RNA (1)...(19): siRNA sense strand
gaggaaacgagaugcugaa

SEQ ID NO: 970683 - RNA, 19 nt, Homo sapiens
  misc_RNA (1)...(19): siRNA sense strand
ugaaaagucuugaccuguu

SEQ ID NO: 970684 - RNA, 19 nt, Homo sapiens
  misc_RNA (1)...(19): siRNA sense strand
uggaaguccuggcagagaa

SEQ ID NO: 970685 - RNA, 19 nt, Homo sapiens
  misc_RNA (1)...(19): siRNA sense strand
aagaagaugaugaugacua

SEQ ID NO: 970686 - RNA, 19 nt, Homo sapiens
  misc_RNA (1)...(19): siRNA sense strand
aaauugaaggccugaauga

SEQ ID NO: 970687 - RNA, 19 nt, Homo sapiens
  misc_RNA (1)...(19): siRNA sense strand
aguuaguccuugauaauug

SEQ ID NO: 970688 - RNA, 19 nt, Homo sapiens
  misc_RNA (1)...(19): siRNA sense strand
gaucacaaaccuggaagau

SEQ ID NO: 970689 - RNA, 19 nt, Homo sapiens
  misc_RNA (1)...(19): siRNA sense strand
cugaagaggaggaugauga

SEQ ID NO: 970690 - RNA, 19 nt, Homo sapiens
  misc_RNA (1)...(19): siRNA sense strand
agaggaggaugaugaggau

SEQ ID NO: 970691 - RNA, 19 nt, Homo sapiens
  misc_RNA (1)...(19): siRNA sense strand
cuucccagcuuaaauaaac

SEQ ID NO: 970692 - RNA, 19 nt, Homo sapiens
  misc_RNA (1)...(19): siRNA sense strand
uugaaggccugaaugauac

SEQ ID NO: 970693 - RNA, 19 nt, Homo sapiens
  misc_RNA (1)...(19): siRNA sense strand
gggccucucauacuuaaug

SEQ ID NO: 970694 - RNA, 19 nt, Homo sapiens
  misc_RNA (1)...(19): siRNA sense strand
aagaggaggaugaggauga

SEQ ID NO: 970695 - RNA, 19 nt, Homo sapiens
  misc_RNA (1)...(19): siRNA sense strand
ggagaugaagaagaagauu

SEQ ID NO: 970696 - RNA, 19 nt, Homo sapiens
  misc_RNA (1)...(19): siRNA sense strand
gaagcucugcaaaaucuua

SEQ ID NO: 970697 - RNA, 19 nt, Homo sapiens
  misc_RNA (1)...(19): siRNA sense strand
gucuugaccuguuuaacug

SEQ ID NO: 970698 - RNA, 19 nt, Homo sapiens
  misc_RNA (1)...(19): siRNA sense strand
aaaccuggaagauuauaga

SEQ ID NO: 970699 - RNA, 19 nt, Homo sapiens
  misc_RNA (1)...(19): siRNA sense strand
agaguuaguccuugauaau

SEQ ID NO: 970700 - RNA, 19 nt, Homo sapiens
  misc_RNA (1)...(19): siRNA sense strand
agaugaugaugacuauguu

SEQ ID NO: 970701 - RNA, 19 nt, Homo sapiens
  misc_RNA (1)...(19): siRNA sense strand
gggagagggagaagaggaa

SEQ ID NO: 970702 - RNA, 19 nt, Homo sapiens
  misc_RNA (1)...(19): siRNA sense strand
uagaagcucugcaaaaucu

SEQ ID NO: 970703 - RNA, 19 nt, Homo sapiens
  misc_RNA (1)...(19): siRNA sense strand
agaagaggaagaagaggaa

SEQ ID NO: 970704 - RNA, 19 nt, Homo sapiens
  misc_RNA (1)...(19): siRNA sense strand
gaugaugaugacuauguug

SEQ ID NO: 970705 - RNA, 19 nt, Homo sapiens
  misc_RNA (1)...(19): siRNA sense strand
ggugacagaguuaguccuu

SEQ ID NO: 970706 - RNA, 19 nt, Homo sapiens
  misc_RNA (1)...(19): siRNA sense strand
acagaguuaguccuugaua

SEQ ID NO: 970707 - RNA, 19 nt, Homo sapiens
  misc_RNA (1)...(19): siRNA sense strand
uggcuaauguggaacuaag

SEQ ID NO: 970708 - RNA, 19 nt, Homo sapiens
  misc_RNA (1)...(19): siRNA sense strand
aagaugaugaugacuaugu

SEQ ID NO: 970709 - RNA, 19 nt, Homo sapiens
  misc_RNA (1)...(19): siRNA sense strand
aggaugaggaugaagauga

SEQ ID NO: 970710 - RNA, 19 nt, Homo sapiens
  misc_RNA (1)...(19): siRNA sense strand
ugaugaagaggaagaggaa

SEQ ID NO: 970711 - RNA, 19 nt, Homo sapiens
  misc_RNA (1)...(19): siRNA sense strand
gaggauggcgaugaagaug

SEQ ID NO: 970712 - RNA, 19 nt, Homo sapiens
  misc_RNA (1)...(19): siRNA sense strand
ugagaucacaaaccuggaa

SEQ ID NO: 970713 - RNA, 19 nt, Homo sapiens
  misc_RNA (1)...(19): siRNA sense strand
agaggaagaagaugacuag

SEQ ID NO: 970714 - RNA, 19 nt, Homo sapiens
  misc_RNA (1)...(19): siRNA sense strand
cgauggagaggaagaagau

SEQ ID NO: 970715 - RNA, 19 nt, Homo sapiens
  misc_RNA (1)...(19): siRNA sense strand
ugcagcaaaucacauacuu

SEQ ID NO: 970716 - RNA, 19 nt, Homo sapiens
  misc_RNA (1)...(19): siRNA sense strand
gaagaggaaacgagaugcu

SEQ ID NO: 970717 - RNA, 19 nt, Homo sapiens
  misc_RNA (1)...(19): siRNA sense strand
gcacagaaguuuaacaauc

SEQ ID NO: 970718 - RNA, 19 nt, Homo sapiens
  misc_RNA (1)...(19): siRNA sense strand
gaaugaaugccaaaucuua

SEQ ID NO: 970719 - RNA, 19 nt, Homo sapiens
  misc_RNA (1)...(19): siRNA sense strand
uaacgaaacucaacaaagu

SEQ ID NO: 970720 - RNA, 19 nt, Homo sapiens
  misc_RNA (1)...(19): siRNA sense strand
gugaaacucuuggaaauaa

SEQ ID NO: 970721 - RNA, 19 nt, Homo sapiens
  misc_RNA (1)...(19): siRNA sense strand
ucaaggaacuccaucauca

SEQ ID NO: 970722 - RNA, 19 nt, Homo sapiens
  misc_RNA (1)...(19): siRNA sense strand
ggaacaacauggagcaguu

SEQ ID NO: 970723 - RNA, 19 nt, Homo sapiens
  misc_RNA (1)...(19): siRNA sense strand
guagaagccuggauguuug

SEQ ID NO: 970724 - RNA, 19 nt, Homo sapiens
  misc_RNA (1)...(19): siRNA sense strand
ggaacuccaucaucagaaa

SEQ ID NO: 970725 - RNA, 19 nt, Homo sapiens
  misc_RNA (1)...(19): siRNA sense strand
gcagaacacuggaguaaac

SEQ ID NO: 970726 - RNA, 19 nt, Homo sapiens
  misc_RNA (1)...(19): siRNA sense strand
gagaaugaaugccaaaucu

SEQ ID NO: 970727 - RNA, 19 nt, Homo sapiens
  misc_RNA (1)...(19): siRNA sense strand
gcaauacccaguucaauau

SEQ ID NO: 970728 - RNA, 19 nt, Homo sapiens
  misc_RNA (1)...(19): siRNA sense strand
ugaagaaacugagccauga

SEQ ID NO: 970729 - RNA, 19 nt, Homo sapiens
  misc_RNA (1)...(19): siRNA sense strand
gagaacaccgcacaaguuu

SEQ ID NO: 970730 - RNA, 19 nt, Homo sapiens
  misc_RNA (1)...(19): siRNA sense strand
gaaauaauggagucgguuu

SEQ ID NO: 970731 - RNA, 19 nt, Homo sapiens
  misc_RNA (1)...(19): siRNA sense strand
ggauuaccauugccuuauu

SEQ ID NO: 970732 - RNA, 19 nt, Homo sapiens
  misc_RNA (1)...(19): siRNA sense strand
gaacaacauggagcaguua

SEQ ID NO: 970733 - RNA, 19 nt, Homo sapiens
  misc_RNA (1)...(19): siRNA sense strand
cagcuuugcuagagaauga

SEQ ID NO: 970734 - RNA, 19 nt, Homo sapiens
  misc_RNA (1)...(19): siRNA sense strand
gagaagccaauucagauaa

SEQ ID NO: 970735 - RNA, 19 nt, Homo sapiens
  misc_RNA (1)...(19): siRNA sense strand
gaacaggugaagaaacuga

SEQ ID NO: 970736 - RNA, 19 nt, Homo sapiens
  misc_RNA (1)...(19): siRNA sense strand
uaagaaagcuugcaauacc

SEQ ID NO: 970737 - RNA, 19 nt, Homo sapiens
  misc_RNA (1)...(19): siRNA sense strand
gcaaagaaaguagaaaugu

SEQ ID NO: 970738 - RNA, 19 nt, Homo sapiens
  misc_RNA (1)...(19): siRNA sense strand
gaauagcagccaucaaguu

SEQ ID NO: 970739 - RNA, 19 nt, Homo sapiens
  misc_RNA (1)...(19): siRNA sense strand
caagagaagccaauucaga

SEQ ID NO: 970740 - RNA, 19 nt, Homo sapiens
  misc_RNA (1)...(19): siRNA sense strand
uaucuggacccuaggauua

SEQ ID NO: 970741 - RNA, 19 nt, Homo sapiens
  misc_RNA (1)...(19): siRNA sense strand
gaaaagcucuuaggggaaa

SEQ ID NO: 970742 - RNA, 19 nt, Homo sapiens
  misc_RNA (1)...(19): siRNA sense strand
uaucagaaaucucagaaag

SEQ ID NO: 970743 - RNA, 19 nt, Homo sapiens
  misc_RNA (1)...(19): siRNA sense strand
auaaugaagugucggcuaa

SEQ ID NO: 970744 - RNA, 19 nt, Homo sapiens
  misc_RNA (1)...(19): siRNA sense strand
agacauaagugaaacucuu

SEQ ID NO: 970745 - RNA, 19 nt, Homo sapiens
  misc_RNA (1)...(19): siRNA sense strand
ggccagcucugcuaaguca

SEQ ID NO: 970746 - RNA, 19 nt, Homo sapiens
  misc_RNA (1)...(19): siRNA sense strand
aauagcagccaucaaguua

SEQ ID NO: 970747 - RNA, 19 nt, Homo sapiens
  misc_RNA (1)...(19): siRNA sense strand
gacuuaauguucaagaaga

SEQ ID NO: 970748 - RNA, 19 nt, Homo sapiens
  misc_RNA (1)...(19): siRNA sense strand
cagaaagacauaagugaaa

SEQ ID NO: 970749 - RNA, 19 nt, Homo sapiens
  misc_RNA (1)...(19): siRNA sense strand
caacauggagcaguuacua

SEQ ID NO: 970750 - RNA, 19 nt, Homo sapiens
  misc_RNA (1)...(19): siRNA sense strand
gaaaagaaacagcagauga

SEQ ID NO: 970751 - RNA, 19 nt, Homo sapiens
  misc_RNA (1)...(19): siRNA sense strand
caauauucauguugcaaga

SEQ ID NO: 970752 - RNA, 19 nt, Homo sapiens
  misc_RNA (1)...(19): siRNA sense strand
gaacaagcaagcaaugaag

SEQ ID NO: 970753 - RNA, 19 nt, Homo sapiens
  misc_RNA (1)...(19): siRNA sense strand
aaacccagccaaauaauga

SEQ ID NO: 970754 - RNA, 19 nt, Homo sapiens
  misc_RNA (1)...(19): siRNA sense strand
uaucagaggacuugacaaa

SEQ ID NO: 970755 - RNA, 19 nt, Homo sapiens
  misc_RNA (1)...(19): siRNA sense strand
uaucagaggacuugacaaa

SEQ ID NO: 970756 - RNA, 19 nt, Homo sapiens
  misc_RNA (1)...(19): siRNA sense strand
uaagugaaacucuuggaaa

SEQ ID NO: 970757 - RNA, 19 nt, Homo sapiens
  misc_RNA (1)...(19): siRNA sense strand
cuggauguuugucuuaaua

SEQ ID NO: 970758 - RNA, 19 nt, Homo sapiens
  misc_RNA (1)...(19): siRNA sense strand
cacagaaguuuaacaaucu

SEQ ID NO: 970759 - RNA, 19 nt, Homo sapiens
  misc_RNA (1)...(19): siRNA sense strand
gaaaauaucagaggacuug

SEQ ID NO: 970760 - RNA, 19 nt, Homo sapiens
  misc_RNA (1)...(19): siRNA sense strand
gaaaauaucagaggacuug

SEQ ID NO: 970761 - RNA, 19 nt, Homo sapiens
  misc_RNA (1)...(19): siRNA sense strand
gagaaagaagacaaugaaa

SEQ ID NO: 970762 - RNA, 19 nt, Homo sapiens
  misc_RNA (1)...(19): siRNA sense strand
agaagccaauucagauaaa

SEQ ID NO: 970763 - RNA, 19 nt, Homo sapiens
  misc_RNA (1)...(19): siRNA sense strand
gaaacucuuggaaauaaug

SEQ ID NO: 970764 - RNA, 19 nt, Homo sapiens
  misc_RNA (1)...(19): siRNA sense strand
gagaaagaagacaaugaaa

SEQ ID NO: 970765 - RNA, 19 nt, Homo sapiens
  misc_RNA (1)...(19): siRNA sense strand
gagaugauauuggaaacca

SEQ ID NO: 970766 - RNA, 19 nt, Homo sapiens
  misc_RNA (1)...(19): siRNA sense strand
agaaacagcagaugauaau

SEQ ID NO: 970767 - RNA, 19 nt, Homo sapiens
  misc_RNA (1)...(19): siRNA sense strand
ugagaacaccgcacaaguu

SEQ ID NO: 970768 - RNA, 19 nt, Homo sapiens
  misc_RNA (1)...(19): siRNA sense strand
gaacaacagacugcacaga

SEQ ID NO: 970769 - RNA, 19 nt, Homo sapiens
  misc_RNA (1)...(19): siRNA sense strand
ccaguucaauauucauguu

SEQ ID NO: 970770 - RNA, 19 nt, Homo sapiens
  misc_RNA (1)...(19): siRNA sense strand
gauggcagcuuugcuagag

SEQ ID NO: 970771 - RNA, 19 nt, Homo sapiens
  misc_RNA (1)...(19): siRNA sense strand
gaaaucucagaaagacaua

SEQ ID NO: 970772 - RNA, 19 nt, Homo sapiens
  misc_RNA (1)...(19): siRNA sense strand
aaagaaacagcagaugaua

SEQ ID NO: 970773 - RNA, 19 nt, Homo sapiens
  misc_RNA (1)...(19): siRNA sense strand
gaaacaggagaugauauug

SEQ ID NO: 970774 - RNA, 19 nt, Homo sapiens
  misc_RNA (1)...(19): siRNA sense strand
agaaacaggagaugauauu

SEQ ID NO: 970775 - RNA, 19 nt, Homo sapiens
  misc_RNA (1)...(19): siRNA sense strand
aaagaaacaggagaugaua

SEQ ID NO: 970776 - RNA, 19 nt, Homo sapiens
  misc_RNA (1)...(19): siRNA sense strand
agacugcacagaaguuuaa

SEQ ID NO: 970777 - RNA, 19 nt, Homo sapiens
  misc_RNA (1)...(19): siRNA sense strand
ucagaaaucucagaaagac

SEQ ID NO: 970778 - RNA, 19 nt, Homo sapiens
  misc_RNA (1)...(19): siRNA sense strand
gauuaccauugccuuauuc

SEQ ID NO: 970779 - RNA, 19 nt, Homo sapiens
  misc_RNA (1)...(19): siRNA sense strand
ugcaauacccaguucaaua

SEQ ID NO: 970780 - RNA, 19 nt, Homo sapiens
  misc_RNA (1)...(19): siRNA sense strand
uguagaagccuggauguuu

SEQ ID NO: 970781 - RNA, 19 nt, Homo sapiens
  misc_RNA (1)...(19): siRNA sense strand
gcagaacaagcaagcaaug

SEQ ID NO: 970782 - RNA, 19 nt, Homo sapiens
  misc_RNA (1)...(19): siRNA sense strand
gaaagaagacaaugaaaag

SEQ ID NO: 970783 - RNA, 19 nt, Homo sapiens
  misc_RNA (1)...(19): siRNA sense strand
gaaagaagacaaugaaaag

SEQ ID NO: 970784 - RNA, 19 nt, Homo sapiens
  misc_RNA (1)...(19): siRNA sense strand
gaggaaaccaauauuacug

SEQ ID NO: 970785 - RNA, 19 nt, Homo sapiens
  misc_RNA (1)...(19): siRNA sense strand
gaagcagaacacuggagua

SEQ ID NO: 970786 - RNA, 19 nt, Homo sapiens
  misc_RNA (1)...(19): siRNA sense strand
cagcagaugauaauggaaa

SEQ ID NO: 970787 - RNA, 19 nt, Homo sapiens
  misc_RNA (1)...(19): siRNA sense strand
agagaaagaagacaaugaa

SEQ ID NO: 970788 - RNA, 19 nt, Homo sapiens
  misc_RNA (1)...(19): siRNA sense strand
agagaaagaagacaaugaa

SEQ ID NO: 970789 - RNA, 19 nt, Homo sapiens
  misc_RNA (1)...(19): siRNA sense strand
aacaggagaugauauugga

SEQ ID NO: 970790 - RNA, 19 nt, Homo sapiens
  misc_RNA (1)...(19): siRNA sense strand
cagcugagaugcccaccau

SEQ ID NO: 970791 - RNA, 19 nt, Homo sapiens
  misc_RNA (1)...(19): siRNA sense strand
ucagaaagacauaagugaa

SEQ ID NO: 970792 - RNA, 19 nt, Homo sapiens
  misc_RNA (1)...(19): siRNA sense strand
aagugaaacucuuggaaau

SEQ ID NO: 970793 - RNA, 19 nt, Homo sapiens
  misc_RNA (1)...(19): siRNA sense strand
uagcagccaucaaguuaca

SEQ ID NO: 970794 - RNA, 19 nt, Homo sapiens
  misc_RNA (1)...(19): siRNA sense strand
cagacuuaauguucaagaa

SEQ ID NO: 970795 - RNA, 19 nt, Homo sapiens
  misc_RNA (1)...(19): siRNA sense strand
ggaggaacaggugaagaaa

SEQ ID NO: 970796 - RNA, 19 nt, Homo sapiens
  misc_RNA (1)...(19): siRNA sense strand
gacccuaggauuaccauug

SEQ ID NO: 970797 - RNA, 19 nt, Homo sapiens
  misc_RNA (1)...(19): siRNA sense strand
agagaagccaauucagaua

SEQ ID NO: 970798 - RNA, 19 nt, Homo sapiens
  misc_RNA (1)...(19): siRNA sense strand
caauauuacugaggaugug

SEQ ID NO: 970799 - RNA, 19 nt, Homo sapiens
  misc_RNA (1)...(19): siRNA sense strand
guugauggcagcuuugcua

SEQ ID NO: 970800 - RNA, 19 nt, Homo sapiens
  misc_RNA (1)...(19): siRNA sense strand
gccaucaaguuacagaaca

SEQ ID NO: 970801 - RNA, 19 nt, Homo sapiens
  misc_RNA (1)...(19): siRNA sense strand
cagagaaagaagacaauga

SEQ ID NO: 970802 - RNA, 19 nt, Homo sapiens
  misc_RNA (1)...(19): siRNA sense strand
ucagaggacuugacaaaau

SEQ ID NO: 970803 - RNA, 19 nt, Homo sapiens
  misc_RNA (1)...(19): siRNA sense strand
caauauuacugaggaugug

SEQ ID NO: 970804 - RNA, 19 nt, Homo sapiens
  misc_RNA (1)...(19): siRNA sense strand
gaaaagaaacaggagauga

SEQ ID NO: 970805 - RNA, 19 nt, Homo sapiens
  misc_RNA (1)...(19): siRNA sense strand
cagagaaagaagacaauga

SEQ ID NO: 970806 - RNA, 19 nt, Homo sapiens
  misc_RNA (1)...(19): siRNA sense strand
ucagaggacuugacaaaau

SEQ ID NO: 970807 - RNA, 19 nt, Homo sapiens
  misc_RNA (1)...(19): siRNA sense strand
aagcagaacacuggaguaa

SEQ ID NO: 970808 - RNA, 19 nt, Homo sapiens
  misc_RNA (1)...(19): siRNA sense strand
caucagaagcaaagaaagu

SEQ ID NO: 970809 - RNA, 19 nt, Homo sapiens
  misc_RNA (1)...(19): siRNA sense strand
gacauaagugaaacucuug

SEQ ID NO: 970810 - RNA, 19 nt, Homo sapiens
  misc_RNA (1)...(19): siRNA sense strand
aagaauagcagccaucaag

SEQ ID NO: 970811 - RNA, 19 nt, Homo sapiens
  misc_RNA (1)...(19): siRNA sense strand
cagcuagcagccuaagaua

SEQ ID NO: 970812 - RNA, 19 nt, Homo sapiens
  misc_RNA (1)...(19): siRNA sense strand
caaguuacagaacaacaga

SEQ ID NO: 970813 - RNA, 19 nt, Homo sapiens
  misc_RNA (1)...(19): siRNA sense strand
uuccaaacccagccaaaua

SEQ ID NO: 970814 - RNA, 19 nt, Homo sapiens
  misc_RNA (1)...(19): siRNA sense strand
guucaagaagaaacuauga

SEQ ID NO: 970815 - RNA, 19 nt, Homo sapiens
  misc_RNA (1)...(19): siRNA sense strand
caacagacugcacagaagu

SEQ ID NO: 970816 - RNA, 19 nt, Homo sapiens
  misc_RNA (1)...(19): siRNA sense strand
gaagcaaagaaaguagaaa

SEQ ID NO: 970817 - RNA, 19 nt, Homo sapiens
  misc_RNA (1)...(19): siRNA sense strand
ggauuaauguggaugugaa

SEQ ID NO: 970818 - RNA, 19 nt, Homo sapiens
  misc_RNA (1)...(19): siRNA sense strand
gcaaggacgacaagaaaga

SEQ ID NO: 970819 - RNA, 19 nt, Homo sapiens
  misc_RNA (1)...(19): siRNA sense strand
gaggacaagucgaguuuca

SEQ ID NO: 970820 - RNA, 19 nt, Homo sapiens
  misc_RNA (1)...(19): siRNA sense strand
gcaaacauguucgcagauc

SEQ ID NO: 970821 - RNA, 19 nt, Homo sapiens
  misc_RNA (1)...(19): siRNA sense strand
ggugugcacuccucgcuaa

SEQ ID NO: 970822 - RNA, 19 nt, Homo sapiens
  misc_RNA (1)...(19): siRNA sense strand
gcacgaacuggccacauuu

SEQ ID NO: 970823 - RNA, 19 nt, Homo sapiens
  misc_RNA (1)...(19): siRNA sense strand
gggcaaggacgacaagaaa

SEQ ID NO: 970824 - RNA, 19 nt, Homo sapiens
  misc_RNA (1)...(19): siRNA sense strand
caaucaaggugcugaagau

SEQ ID NO: 970825 - RNA, 19 nt, Homo sapiens
  misc_RNA (1)...(19): siRNA sense strand
ggcacgaacuggccacauu

SEQ ID NO: 970826 - RNA, 19 nt, Homo sapiens
  misc_RNA (1)...(19): siRNA sense strand
ggacaagucgaguuucaag

SEQ ID NO: 970827 - RNA, 19 nt, Homo sapiens
  misc_RNA (1)...(19): siRNA sense strand
aaacccggcucggauaaga

SEQ ID NO: 970828 - RNA, 19 nt, Homo sapiens
  misc_RNA (1)...(19): siRNA sense strand
gccaaccgccugccaauca

SEQ ID NO: 970829 - RNA, 19 nt, Homo sapiens
  misc_RNA (1)...(19): siRNA sense strand
gcuuuaugcucccuaacga

SEQ ID NO: 970830 - RNA, 19 nt, Homo sapiens
  misc_RNA (1)...(19): siRNA sense strand
ccaaacccggcucggauaa

SEQ ID NO: 970831 - RNA, 19 nt, Homo sapiens
  misc_RNA (1)...(19): siRNA sense strand
ccggauacccgcuggugua

SEQ ID NO: 970832 - RNA, 19 nt, Homo sapiens
  misc_RNA (1)...(19): siRNA sense strand
ccaaccgccugccaaucaa

SEQ ID NO: 970833 - RNA, 19 nt, Homo sapiens
  misc_RNA (1)...(19): siRNA sense strand
ucaaggugcugaagaugcu

SEQ ID NO: 970834 - RNA, 19 nt, Homo sapiens
  misc_RNA (1)...(19): siRNA sense strand
cgagcucgaugccaagaag

SEQ ID NO: 970835 - RNA, 19 nt, Homo sapiens
  misc_RNA (1)...(19): siRNA sense strand
ccaaucaaggugcugaaga

SEQ ID NO: 970836 - RNA, 19 nt, Homo sapiens
  misc_RNA (1)...(19): siRNA sense strand
gcgacaaggacaccaaauc

SEQ ID NO: 970837 - RNA, 19 nt, Homo sapiens
  misc_RNA (1)...(19): siRNA sense strand
cgacaaggacaccaaaucg

SEQ ID NO: 970838 - RNA, 19 nt, Homo sapiens
  misc_RNA (1)...(19): siRNA sense strand
ucucugggcugcaguaagc

SEQ ID NO: 970839 - RNA, 19 nt, Homo sapiens
  misc_RNA (1)...(19): siRNA sense strand
uggaggacaagucgaguuu

SEQ ID NO: 970840 - RNA, 19 nt, Homo sapiens
  misc_RNA (1)...(19): siRNA sense strand
gcggacccauacggcauuu

SEQ ID NO: 970841 - RNA, 19 nt, Homo sapiens
  misc_RNA (1)...(19): siRNA sense strand
gggauuaauguggauguga

SEQ ID NO: 970842 - RNA, 19 nt, Homo sapiens
  misc_RNA (1)...(19): siRNA sense strand
cgucggagaagucgggauu

SEQ ID NO: 970843 - RNA, 19 nt, Homo sapiens
  misc_RNA (1)...(19): siRNA sense strand
gcauuucccgggacagaca

SEQ ID NO: 970844 - RNA, 19 nt, Homo sapiens
  misc_RNA (1)...(19): siRNA sense strand
gggcgacaaggacaccaaa

SEQ ID NO: 970845 - RNA, 19 nt, Homo sapiens
  misc_RNA (1)...(19): siRNA sense strand
gugaugacagccaguuugu

SEQ ID NO: 970846 - RNA, 19 nt, Homo sapiens
  misc_RNA (1)...(19): siRNA sense strand
guuugugccgggacccuua

SEQ ID NO: 970847 - RNA, 19 nt, Homo sapiens
  misc_RNA (1)...(19): siRNA sense strand
ggacaccuauauccucaaa

SEQ ID NO: 970848 - RNA, 19 nt, Homo sapiens
  misc_RNA (1)...(19): siRNA sense strand
caacaacgaugccggauac

SEQ ID NO: 970849 - RNA, 19 nt, Homo sapiens
  misc_RNA (1)...(19): siRNA sense strand
ggaauccucuucgauguug

SEQ ID NO: 970850 - RNA, 19 nt, Homo sapiens
  misc_RNA (1)...(19): siRNA sense strand
gcccuucucuaccauuaua

SEQ ID NO: 970851 - RNA, 19 nt, Homo sapiens
  misc_RNA (1)...(19): siRNA sense strand
uggcagagcuguuugacuu

SEQ ID NO: 970852 - RNA, 19 nt, Homo sapiens
  misc_RNA (1)...(19): siRNA sense strand
caggcuacgugcacauuua

SEQ ID NO: 970853 - RNA, 19 nt, Homo sapiens
  misc_RNA (1)...(19): siRNA sense strand
caacaauguccaaggauuu

SEQ ID NO: 970854 - RNA, 19 nt, Homo sapiens
  misc_RNA (1)...(19): siRNA sense strand
cuucagaucccagaaauua

SEQ ID NO: 970855 - RNA, 19 nt, Homo sapiens
  misc_RNA (1)...(19): siRNA sense strand
gcagagcuguuugacuuga

SEQ ID NO: 970856 - RNA, 19 nt, Homo sapiens
  misc_RNA (1)...(19): siRNA sense strand
ucaacaagcuguaugugau

SEQ ID NO: 970857 - RNA, 19 nt, Homo sapiens
  misc_RNA (1)...(19): siRNA sense strand
caacaacuucguauacuug

SEQ ID NO: 970858 - RNA, 19 nt, Homo sapiens
  misc_RNA (1)...(19): siRNA sense strand
ugaaagagacacacugcua

SEQ ID NO: 970859 - RNA, 19 nt, Homo sapiens
  misc_RNA (1)...(19): siRNA sense strand
gggcccuucucuaccauua

SEQ ID NO: 970860 - RNA, 19 nt, Homo sapiens
  misc_RNA (1)...(19): siRNA sense strand
caacuucguauacuugauu

SEQ ID NO: 970861 - RNA, 19 nt, Homo sapiens
  misc_RNA (1)...(19): siRNA sense strand
gcaacaacgaugccggaua

SEQ ID NO: 970862 - RNA, 19 nt, Homo sapiens
  misc_RNA (1)...(19): siRNA sense strand
acaacaauguccaaggauu

SEQ ID NO: 970863 - RNA, 19 nt, Homo sapiens
  misc_RNA (1)...(19): siRNA sense strand
ucaacaacuucguauacuu

SEQ ID NO: 970864 - RNA, 19 nt, Homo sapiens
  misc_RNA (1)...(19): siRNA sense strand
ucacccagcucugcaaguu

SEQ ID NO: 970865 - RNA, 19 nt, Homo sapiens
  misc_RNA (1)...(19): siRNA sense strand
uggcaacccuccucaacaa

SEQ ID NO: 970866 - RNA, 19 nt, Homo sapiens
  misc_RNA (1)...(19): siRNA sense strand
gcggaauccucuucgaugu

SEQ ID NO: 970867 - RNA, 19 nt, Homo sapiens
  misc_RNA (1)...(19): siRNA sense strand
gcaucgcggugcucaacaa

SEQ ID NO: 970868 - RNA, 19 nt, Homo sapiens
  misc_RNA (1)...(19): siRNA sense strand
gaccaggccaaguaucuaa

SEQ ID NO: 970869 - RNA, 19 nt, Homo sapiens
  misc_RNA (1)...(19): siRNA sense strand
gaggauuaccugaaagaga

SEQ ID NO: 970870 - RNA, 19 nt, Homo sapiens
  misc_RNA (1)...(19): siRNA sense strand
ggacagcggaauccucuuc

SEQ ID NO: 970871 - RNA, 19 nt, Homo sapiens
  misc_RNA (1)...(19): siRNA sense strand
gcauugcugugcuggacaa

SEQ ID NO: 970872 - RNA, 19 nt, Homo sapiens
  misc_RNA (1)...(19): siRNA sense strand
caaagcuccuugagacagu

SEQ ID NO: 970873 - RNA, 19 nt, Homo sapiens
  misc_RNA (1)...(19): siRNA sense strand
guccugcgauuacuucaga

SEQ ID NO: 970874 - RNA, 19 nt, Homo sapiens
  misc_RNA (1)...(19): siRNA sense strand
gagcaacuggacaccuaua

SEQ ID NO: 970875 - RNA, 19 nt, Homo sapiens
  misc_RNA (1)...(19): siRNA sense strand
gcucaacaacuucguauac

SEQ ID NO: 970876 - RNA, 19 nt, Homo sapiens
  misc_RNA (1)...(19): siRNA sense strand
cagcaacacuuggcacaca

SEQ ID NO: 970877 - RNA, 19 nt, Homo sapiens
  misc_RNA (1)...(19): siRNA sense strand
gacaacaggaucuaugugu

SEQ ID NO: 970878 - RNA, 19 nt, Homo sapiens
  misc_RNA (1)...(19): siRNA sense strand
cugagcaacuggacaccua

SEQ ID NO: 970879 - RNA, 19 nt, Homo sapiens
  misc_RNA (1)...(19): siRNA sense strand
ggugcaggcugaccagauc

SEQ ID NO: 970880 - RNA, 19 nt, Homo sapiens
  misc_RNA (1)...(19): siRNA sense strand
gguguguccuacaaugcua

SEQ ID NO: 970881 - RNA, 19 nt, Homo sapiens
  misc_RNA (1)...(19): siRNA sense strand
ggccgugacuaccacaaug

SEQ ID NO: 970882 - RNA, 19 nt, Homo sapiens
  misc_RNA (1)...(19): siRNA sense strand
gaaggagauggaacaggaa

SEQ ID NO: 970883 - RNA, 19 nt, Homo sapiens
  misc_RNA (1)...(19): siRNA sense strand
gcgagaccgagguauauga

SEQ ID NO: 970884 - RNA, 19 nt, Homo sapiens
  misc_RNA (1)...(19): siRNA sense strand
ucagcgaccaggccaagua

SEQ ID NO: 970885 - RNA, 19 nt, Homo sapiens
  misc_RNA (1)...(19): siRNA sense strand
ggacaacaggaucuaugug

SEQ ID NO: 970886 - RNA, 19 nt, Homo sapiens
  misc_RNA (1)...(19): siRNA sense strand
ucgcggugcucaacaacuu

SEQ ID NO: 970887 - RNA, 19 nt, Homo sapiens
  misc_RNA (1)...(19): siRNA sense strand
cuaccacaaugaccugaau

SEQ ID NO: 970888 - RNA, 19 nt, Homo sapiens
  misc_RNA (1)...(19): siRNA sense strand
caacuccagugaggacuag

SEQ ID NO: 970889 - RNA, 19 nt, Homo sapiens
  misc_RNA (1)...(19): siRNA sense strand
gcaacuggacaccuauauc

SEQ ID NO: 970890 - RNA, 19 nt, Homo sapiens
  misc_RNA (1)...(19): siRNA sense strand
gaaggacugcugggaggaa

SEQ ID NO: 970891 - RNA, 19 nt, Homo sapiens
  misc_RNA (1)...(19): siRNA sense strand
gcgauuacuucagaggaau

SEQ ID NO: 970892 - RNA, 19 nt, Homo sapiens
  misc_RNA (1)...(19): siRNA sense strand
gauccaggcagcaacacuu

SEQ ID NO: 970893 - RNA, 19 nt, Homo sapiens
  misc_RNA (1)...(19): siRNA sense strand
gggaggauuaccugaaaga

SEQ ID NO: 970894 - RNA, 19 nt, Homo sapiens
  misc_RNA (1)...(19): siRNA sense strand
gcugugauuuccucauguc

SEQ ID NO: 970895 - RNA, 19 nt, Homo sapiens
  misc_RNA (1)...(19): siRNA sense strand
gcacggugagccuggcauu

SEQ ID NO: 970896 - RNA, 19 nt, Homo sapiens
  misc_RNA (1)...(19): siRNA sense strand
caacaagcuguaugugauc

SEQ ID NO: 970897 - RNA, 19 nt, Homo sapiens
  misc_RNA (1)...(19): siRNA sense strand
uuacuucagaggaauguuu

SEQ ID NO: 970898 - RNA, 19 nt, Homo sapiens
  misc_RNA (1)...(19): siRNA sense strand
acaaugcuaugugccaaau

SEQ ID NO: 970899 - RNA, 19 nt, Homo sapiens
  misc_RNA (1)...(19): siRNA sense strand
ggacuuccagugcguugug

SEQ ID NO: 970900 - RNA, 19 nt, Homo sapiens
  misc_RNA (1)...(19): siRNA sense strand
ucagaucccagaaauuauc

SEQ ID NO: 970901 - RNA, 19 nt, Homo sapiens
  misc_RNA (1)...(19): siRNA sense strand
gcuacgacccugccaccaa

SEQ ID NO: 970902 - RNA, 19 nt, Homo sapiens
  misc_RNA (1)...(19): siRNA sense strand
gauugaaggagauggaaca

SEQ ID NO: 970903 - RNA, 19 nt, Homo sapiens
  misc_RNA (1)...(19): siRNA sense strand
ccugagcaauguacaagag

SEQ ID NO: 970904 - RNA, 19 nt, Homo sapiens
  misc_RNA (1)...(19): siRNA sense strand
ugacaaguaccgccagcuu

SEQ ID NO: 970905 - RNA, 19 nt, Homo sapiens
  misc_RNA (1)...(19): siRNA sense strand
ucucucggacugacaagua

SEQ ID NO: 970906 - RNA, 19 nt, Homo sapiens
  misc_RNA (1)...(19): siRNA sense strand
caacuggacaccuauaucc

SEQ ID NO: 970907 - RNA, 19 nt, Homo sapiens
  misc_RNA (1)...(19): siRNA sense strand
cagcuucagaucccagaaa

SEQ ID NO: 970908 - RNA, 19 nt, Homo sapiens
  misc_RNA (1)...(19): siRNA sense strand
caggaucuauguguuaggu

SEQ ID NO: 970909 - RNA, 19 nt, Homo sapiens
  misc_RNA (1)...(19): siRNA sense strand
ccagcgcccucauguacca

SEQ ID NO: 970910 - RNA, 19 nt, Homo sapiens
  misc_RNA (1)...(19): siRNA sense strand
ggagauggaacaggaagag

SEQ ID NO: 970911 - RNA, 19 nt, Homo sapiens
  misc_RNA (1)...(19): siRNA sense strand
cacgguguguccuacaaug

SEQ ID NO: 970912 - RNA, 19 nt, Homo sapiens
  misc_RNA (1)...(19): siRNA sense strand
gagcaauguacaagagaca

SEQ ID NO: 970913 - RNA, 19 nt, Homo sapiens
  misc_RNA (1)...(19): siRNA sense strand
uuuacgauguggagaagga

SEQ ID NO: 970914 - RNA, 19 nt, Homo sapiens
  misc_RNA (1)...(19): siRNA sense strand
ugcgauuacuucagaggaa

SEQ ID NO: 970915 - RNA, 19 nt, Homo sapiens
  misc_RNA (1)...(19): siRNA sense strand
gaccuguccguguguguug

SEQ ID NO: 970916 - RNA, 19 nt, Homo sapiens
  misc_RNA (1)...(19): siRNA sense strand
ccacacugcgugaacaaca

SEQ ID NO: 970917 - RNA, 19 nt, Homo sapiens
  misc_RNA (1)...(19): siRNA sense strand
ccugcgagaccgagguaua

SEQ ID NO: 970918 - RNA, 19 nt, Homo sapiens
  misc_RNA (1)...(19): siRNA sense strand
guaccgccagcuuccauug

SEQ ID NO: 970919 - RNA, 19 nt, Homo sapiens
  misc_RNA (1)...(19): siRNA sense strand
cugcugugauuuccucaug

SEQ ID NO: 970920 - RNA, 19 nt, Homo sapiens
  misc_RNA (1)...(19): siRNA sense strand
auccauuucugcugugauu

SEQ ID NO: 970921 - RNA, 19 nt, Homo sapiens
  misc_RNA (1)...(19): siRNA sense strand
cgaccaggccaaguaucua

SEQ ID NO: 970922 - RNA, 19 nt, Homo sapiens
  misc_RNA (1)...(19): siRNA sense strand
ccauuucugcugugauuuc

SEQ ID NO: 970923 - RNA, 19 nt, Homo sapiens
  misc_RNA (1)...(19): siRNA sense strand
caacccuccucaacaagcu

SEQ ID NO: 970924 - RNA, 19 nt, Homo sapiens
  misc_RNA (1)...(19): siRNA sense strand
gcgaccaggccaaguaucu

SEQ ID NO: 970925 - RNA, 19 nt, Homo sapiens
  misc_RNA (1)...(19): siRNA sense strand
gaacagagagcaugacaaa

SEQ ID NO: 970926 - RNA, 19 nt, Homo sapiens
  misc_RNA (1)...(19): siRNA sense strand
ugaagaggaugaucaauuu

SEQ ID NO: 970927 - RNA, 19 nt, Homo sapiens
  misc_RNA (1)...(19): siRNA sense strand
ucaacaagcucucuaguga

SEQ ID NO: 970928 - RNA, 19 nt, Homo sapiens
  misc_RNA (1)...(19): siRNA sense strand
gaagaagaguccagaguuc

SEQ ID NO: 970929 - RNA, 19 nt, Homo sapiens
  misc_RNA (1)...(19): siRNA sense strand
caacuaguauuucggauga

SEQ ID NO: 970930 - RNA, 19 nt, Homo sapiens
  misc_RNA (1)...(19): siRNA sense strand
gaaggaaggaggauaauau

SEQ ID NO: 970931 - RNA, 19 nt, Homo sapiens
  misc_RNA (1)...(19): siRNA sense strand
gaaggaggauaauauuuca

SEQ ID NO: 970932 - RNA, 19 nt, Homo sapiens
  misc_RNA (1)...(19): siRNA sense strand
gacaagaucugugcuguga

SEQ ID NO: 970933 - RNA, 19 nt, Homo sapiens
  misc_RNA (1)...(19): siRNA sense strand
gaugaagucugauaaugug

SEQ ID NO: 970934 - RNA, 19 nt, Homo sapiens
  misc_RNA (1)...(19): siRNA sense strand
gagaugaagucugauaaug

SEQ ID NO: 970935 - RNA, 19 nt, Homo sapiens
  misc_RNA (1)...(19): siRNA sense strand
cauagugucuggaauaaau

SEQ ID NO: 970936 - RNA, 19 nt, Homo sapiens
  misc_RNA (1)...(19): siRNA sense strand
ggaaggaggauaauauuuc

SEQ ID NO: 970937 - RNA, 19 nt, Homo sapiens
  misc_RNA (1)...(19): siRNA sense strand
gccagagacuccagaaauu

SEQ ID NO: 970938 - RNA, 19 nt, Homo sapiens
  misc_RNA (1)...(19): siRNA sense strand
uagaggagacgcugaaaua

SEQ ID NO: 970939 - RNA, 19 nt, Homo sapiens
  misc_RNA (1)...(19): siRNA sense strand
gaaggaagaauugaaagaa

SEQ ID NO: 970940 - RNA, 19 nt, Homo sapiens
  misc_RNA (1)...(19): siRNA sense strand
gaaacgacaacaucagaaa

SEQ ID NO: 970941 - RNA, 19 nt, Homo sapiens
  misc_RNA (1)...(19): siRNA sense strand
aaacagagacugagauuuc

SEQ ID NO: 970942 - RNA, 19 nt, Homo sapiens
  misc_RNA (1)...(19): siRNA sense strand
agacugagauuuccacuag

SEQ ID NO: 970943 - RNA, 19 nt, Homo sapiens
  misc_RNA (1)...(19): siRNA sense strand
ccaacauccucaagaauga

SEQ ID NO: 970944 - RNA, 19 nt, Homo sapiens
  misc_RNA (1)...(19): siRNA sense strand
uaacagcaguggaacuaga

SEQ ID NO: 970945 - RNA, 19 nt, Homo sapiens
  misc_RNA (1)...(19): siRNA sense strand
gaggagacgcugaaauaaa

SEQ ID NO: 970946 - RNA, 19 nt, Homo sapiens
  misc_RNA (1)...(19): siRNA sense strand
ggagaagcaugguggacuu

SEQ ID NO: 970947 - RNA, 19 nt, Homo sapiens
  misc_RNA (1)...(19): siRNA sense strand
cugauaaugugaaggauaa

SEQ ID NO: 970948 - RNA, 19 nt, Homo sapiens
  misc_RNA (1)...(19): siRNA sense strand
acacaauucugacaaugaa

SEQ ID NO: 970949 - RNA, 19 nt, Homo sapiens
  misc_RNA (1)...(19): siRNA sense strand
ugaagggccucuacacaga

SEQ ID NO: 970950 - RNA, 19 nt, Homo sapiens
  misc_RNA (1)...(19): siRNA sense strand
uggagcagcugaucaaaga

SEQ ID NO: 970951 - RNA, 19 nt, Homo sapiens
  misc_RNA (1)...(19): siRNA sense strand
ucucaggaauuggauaaua

SEQ ID NO: 970952 - RNA, 19 nt, Homo sapiens
  misc_RNA (1)...(19): siRNA sense strand
gcaugagccugaaagaaca

SEQ ID NO: 970953 - RNA, 19 nt, Homo sapiens
  misc_RNA (1)...(19): siRNA sense strand
gaaggagcgaucucucuuu

SEQ ID NO: 970954 - RNA, 19 nt, Homo sapiens
  misc_RNA (1)...(19): siRNA sense strand
caucagaaauaggaacaaa

SEQ ID NO: 970955 - RNA, 19 nt, Homo sapiens
  misc_RNA (1)...(19): siRNA sense strand
ggaaggaaggaggauaaua

SEQ ID NO: 970956 - RNA, 19 nt, Homo sapiens
  misc_RNA (1)...(19): siRNA sense strand
ggacagacggagagugaaa

SEQ ID NO: 970957 - RNA, 19 nt, Homo sapiens
  misc_RNA (1)...(19): siRNA sense strand
cacuagagcuuccaaguca

SEQ ID NO: 970958 - RNA, 19 nt, Homo sapiens
  misc_RNA (1)...(19): siRNA sense strand
cuccagaaauuccuaauga

SEQ ID NO: 970959 - RNA, 19 nt, Homo sapiens
  misc_RNA (1)...(19): siRNA sense strand
ggagcgaucucucuuugag

SEQ ID NO: 970960 - RNA, 19 nt, Homo sapiens
  misc_RNA (1)...(19): siRNA sense strand
caagaucugugcugugaag

SEQ ID NO: 970961 - RNA, 19 nt, Homo sapiens
  misc_RNA (1)...(19): siRNA sense strand
gaaaacagaaggaagaauu

SEQ ID NO: 970962 - RNA, 19 nt, Homo sapiens
  misc_RNA (1)...(19): siRNA sense strand
gucagaaauugaaauggua

SEQ ID NO: 970963 - RNA, 19 nt, Homo sapiens
  misc_RNA (1)...(19): siRNA sense strand
ggaaaaugcugucucaaca

SEQ ID NO: 970964 - RNA, 19 nt, Homo sapiens
  misc_RNA (1)...(19): siRNA sense strand
gaucucaggaauuggauaa

SEQ ID NO: 970965 - RNA, 19 nt, Homo sapiens
  misc_RNA (1)...(19): siRNA sense strand
ggagagagagagagccaaa

SEQ ID NO: 970966 - RNA, 19 nt, Homo sapiens
  misc_RNA (1)...(19): siRNA sense strand
ggaagaucauggacuacau

SEQ ID NO: 970967 - RNA, 19 nt, Homo sapiens
  misc_RNA (1)...(19): siRNA sense strand
gagcuuucauccaacauca

SEQ ID NO: 970968 - RNA, 19 nt, Homo sapiens
  misc_RNA (1)...(19): siRNA sense strand
ggaaagagaaggagagacu

SEQ ID NO: 970969 - RNA, 19 nt, Homo sapiens
  misc_RNA (1)...(19): siRNA sense strand
agaaggacaucguuuccaa

SEQ ID NO: 970970 - RNA, 19 nt, Homo sapiens
  misc_RNA (1)...(19): siRNA sense strand
ucacugaccucaagaucuc

SEQ ID NO: 970971 - RNA, 19 nt, Homo sapiens
  misc_RNA (1)...(19): siRNA sense strand
gguaacagcaguggaacua

SEQ ID NO: 970972 - RNA, 19 nt, Homo sapiens
  misc_RNA (1)...(19): siRNA sense strand
gacaacaucagaaauagga

SEQ ID NO: 970973 - RNA, 19 nt, Homo sapiens
  misc_RNA (1)...(19): siRNA sense strand
gaaggaaggaaggaggaua

SEQ ID NO: 970974 - RNA, 19 nt, Homo sapiens
  misc_RNA (1)...(19): siRNA sense strand
ggaaacagacacagagaag

SEQ ID NO: 970975 - RNA, 19 nt, Homo sapiens
  misc_RNA (1)...(19): siRNA sense strand
ccauagacgugguuguaau

SEQ ID NO: 970976 - RNA, 19 nt, Homo sapiens
  misc_RNA (1)...(19): siRNA sense strand
cgaagaaagauuaugagaa

SEQ ID NO: 970977 - RNA, 19 nt, Homo sapiens
  misc_RNA (1)...(19): siRNA sense strand
gaagcaugguggacuugug

SEQ ID NO: 970978 - RNA, 19 nt, Homo sapiens
  misc_RNA (1)...(19): siRNA sense strand
uaacucaacuaguauuucg

SEQ ID NO: 970979 - RNA, 19 nt, Homo sapiens
  misc_RNA (1)...(19): siRNA sense strand
cucaagaucucaggaauug

SEQ ID NO: 970980 - RNA, 19 nt, Homo sapiens
  misc_RNA (1)...(19): siRNA sense strand
cucaggaauuggauaauaa

SEQ ID NO: 970981 - RNA, 19 nt, Homo sapiens
  misc_RNA (1)...(19): siRNA sense strand
ucaaagaccagcaagacaa

SEQ ID NO: 970982 - RNA, 19 nt, Homo sapiens
  misc_RNA (1)...(19): siRNA sense strand
agacgaagaaagauuauga

SEQ ID NO: 970983 - RNA, 19 nt, Homo sapiens
  misc_RNA (1)...(19): siRNA sense strand
gaugauaauucagcuaguc

SEQ ID NO: 970984 - RNA, 19 nt, Homo sapiens
  misc_RNA (1)...(19): siRNA sense strand
gaggauaauauuucagcua

SEQ ID NO: 970985 - RNA, 19 nt, Homo sapiens
  misc_RNA (1)...(19): siRNA sense strand
ugauuagaaugacugguuu

SEQ ID NO: 970986 - RNA, 19 nt, Homo sapiens
  misc_RNA (1)...(19): siRNA sense strand
ggagaauggcggaaacaga

SEQ ID NO: 970987 - RNA, 19 nt, Homo sapiens
  misc_RNA (1)...(19): siRNA sense strand
gaaacagagacugagauuu

SEQ ID NO: 970988 - RNA, 19 nt, Homo sapiens
  misc_RNA (1)...(19): siRNA sense strand
ccaaggagauagagaagcu

SEQ ID NO: 970989 - RNA, 19 nt, Homo sapiens
  misc_RNA (1)...(19): siRNA sense strand
gcauggaggcgcuacaaau

SEQ ID NO: 970990 - RNA, 19 nt, Homo sapiens
  misc_RNA (1)...(19): siRNA sense strand
ggaaacgacaacaucagaa

SEQ ID NO: 970991 - RNA, 19 nt, Homo sapiens
  misc_RNA (1)...(19): siRNA sense strand
ggagagaagggagaaguga

SEQ ID NO: 970992 - RNA, 19 nt, Homo sapiens
  misc_RNA (1)...(19): siRNA sense strand
uggaugccaugcagaauga

SEQ ID NO: 970993 - RNA, 19 nt, Homo sapiens
  misc_RNA (1)...(19): siRNA sense strand
ggaagaaggagaaggacau

SEQ ID NO: 970994 - RNA, 19 nt, Homo sapiens
  misc_RNA (1)...(19): siRNA sense strand
gaagaggaugaucaauuug

SEQ ID NO: 970995 - RNA, 19 nt, Homo sapiens
  misc_RNA (1)...(19): siRNA sense strand
cagcuagucugcgguguga

SEQ ID NO: 970996 - RNA, 19 nt, Homo sapiens
  misc_RNA (1)...(19): siRNA sense strand
caagaucucaggaauugga

SEQ ID NO: 970997 - RNA, 19 nt, Homo sapiens
  misc_RNA (1)...(19): siRNA sense strand
gaaggagaaggacaucguu

SEQ ID NO: 970998 - RNA, 19 nt, Homo sapiens
  misc_RNA (1)...(19): siRNA sense strand
gaagucugauaaugugaag

SEQ ID NO: 970999 - RNA, 19 nt, Homo sapiens
  misc_RNA (1)...(19): siRNA sense strand
ggccauagacgugguugua

SEQ ID NO: 971000 - RNA, 19 nt, Homo sapiens
  misc_RNA (1)...(19): siRNA sense strand
agacagagagaaagaguga

SEQ ID NO: 971001 - RNA, 19 nt, Homo sapiens
  misc_RNA (1)...(19): siRNA sense strand
aggaagaauugaaagaaga

SEQ ID NO: 971002 - RNA, 19 nt, Homo sapiens
  misc_RNA (1)...(19): siRNA sense strand
uaauaagaaugugcgagaa

SEQ ID NO: 971003 - RNA, 19 nt, Homo sapiens
  misc_RNA (1)...(19): siRNA sense strand
gccaacauccucaagaaug

SEQ ID NO: 971004 - RNA, 19 nt, Homo sapiens
  misc_RNA (1)...(19): siRNA sense strand
caguggaacuagaagaaga

SEQ ID NO: 971005 - RNA, 19 nt, Homo sapiens
  misc_RNA (1)...(19): siRNA sense strand
gagcaugacaaaccugaga

SEQ ID NO: 971006 - RNA, 19 nt, Homo sapiens
  misc_RNA (1)...(19): siRNA sense strand
agaaggagacagagagaaa

SEQ ID NO: 971007 - RNA, 19 nt, Homo sapiens
  misc_RNA (1)...(19): siRNA sense strand
ggauagaggagacgcugaa

SEQ ID NO: 971008 - RNA, 19 nt, Homo sapiens
  misc_RNA (1)...(19): siRNA sense strand
ccacagagaagcagaaagg

SEQ ID NO: 971009 - RNA, 19 nt, Homo sapiens
  misc_RNA (1)...(19): siRNA sense strand
aaggagcgaucucucuuug

SEQ ID NO: 971010 - RNA, 19 nt, Homo sapiens
  misc_RNA (1)...(19): siRNA sense strand
uggagacgaagaaagauua

SEQ ID NO: 971011 - RNA, 19 nt, Homo sapiens
  misc_RNA (1)...(19): siRNA sense strand
agaaauuccuaaugagcuu

SEQ ID NO: 971012 - RNA, 19 nt, Homo sapiens
  misc_RNA (1)...(19): siRNA sense strand
gagaagaagaguccagagu

SEQ ID NO: 971013 - RNA, 19 nt, Homo sapiens
  misc_RNA (1)...(19): siRNA sense strand
ugucagaaauugaaauggu

SEQ ID NO: 971014 - RNA, 19 nt, Homo sapiens
  misc_RNA (1)...(19): siRNA sense strand
ugaaacagagacugagauu

SEQ ID NO: 971015 - RNA, 19 nt, Homo sapiens
  misc_RNA (1)...(19): siRNA sense strand
ggagaaggccaaggagaau

SEQ ID NO: 971016 - RNA, 19 nt, Homo sapiens
  misc_RNA (1)...(19): siRNA sense strand
aaagagagaaguacaagca

SEQ ID NO: 971017 - RNA, 19 nt, Homo sapiens
  misc_RNA (1)...(19): siRNA sense strand
ucacacaauucugacaaug

SEQ ID NO: 971018 - RNA, 19 nt, Homo sapiens
  misc_RNA (1)...(19): siRNA sense strand
agacaacgagcgacagaaa

SEQ ID NO: 971019 - RNA, 19 nt, Homo sapiens
  misc_RNA (1)...(19): siRNA sense strand
acagaaggaagaauugaaa

SEQ ID NO: 971020 - RNA, 19 nt, Homo sapiens
  misc_RNA (1)...(19): siRNA sense strand
caccagugaugcagaagga

SEQ ID NO: 971021 - RNA, 19 nt, Homo sapiens
  misc_RNA (1)...(19): siRNA sense strand
gaagaucauggacuacauc

SEQ ID NO: 971022 - RNA, 19 nt, Homo sapiens
  misc_RNA (1)...(19): siRNA sense strand
acgccgagaugaagucuga

SEQ ID NO: 971023 - RNA, 19 nt, Homo sapiens
  misc_RNA (1)...(19): siRNA sense strand
gugauuagaaugacugguu

SEQ ID NO: 971024 - RNA, 19 nt, Homo sapiens
  misc_RNA (1)...(19): siRNA sense strand
uuacagagucacacaauuc

SEQ ID NO: 971025 - RNA, 19 nt, Homo sapiens
  misc_RNA (1)...(19): siRNA sense strand
gaaagaaacuggucagaaa

SEQ ID NO: 971026 - RNA, 19 nt, Homo sapiens
  misc_RNA (1)...(19): siRNA sense strand
caaaugagauucccacuaa

SEQ ID NO: 971027 - RNA, 19 nt, Homo sapiens
  misc_RNA (1)...(19): siRNA sense strand
gcaaacauguacaucaaua

SEQ ID NO: 971028 - RNA, 19 nt, Homo sapiens
  misc_RNA (1)...(19): siRNA sense strand
ggacaaggauagugggaaa

SEQ ID NO: 971029 - RNA, 19 nt, Homo sapiens
  misc_RNA (1)...(19): siRNA sense strand
guacauaugucauccugaa

SEQ ID NO: 971030 - RNA, 19 nt, Homo sapiens
  misc_RNA (1)...(19): siRNA sense strand
gagcaucuccugugaauga

SEQ ID NO: 971031 - RNA, 19 nt, Homo sapiens
  misc_RNA (1)...(19): siRNA sense strand
gcaguaccaugaagagaaa

SEQ ID NO: 971032 - RNA, 19 nt, Homo sapiens
  misc_RNA (1)...(19): siRNA sense strand
caugacaacugcacauaaa

SEQ ID NO: 971033 - RNA, 19 nt, Homo sapiens
  misc_RNA (1)...(19): siRNA sense strand
ggaauauguuggccaagaa

SEQ ID NO: 971034 - RNA, 19 nt, Homo sapiens
  misc_RNA (1)...(19): siRNA sense strand
gagccacuauuuaaacaaa

SEQ ID NO: 971035 - RNA, 19 nt, Homo sapiens
  misc_RNA (1)...(19): siRNA sense strand
gcagucauccuaaauauag

SEQ ID NO: 971036 - RNA, 19 nt, Homo sapiens
  misc_RNA (1)...(19): siRNA sense strand
ggaaauaugaauucugcua

SEQ ID NO: 971037 - RNA, 19 nt, Homo sapiens
  misc_RNA (1)...(19): siRNA sense strand
uaaaggcccuaauccaaga

SEQ ID NO: 971038 - RNA, 19 nt, Homo sapiens
  misc_RNA (1)...(19): siRNA sense strand
caacccacauauccaaauu

SEQ ID NO: 971039 - RNA, 19 nt, Homo sapiens
  misc_RNA (1)...(19): siRNA sense strand
ggacauggaaccaagaaga

SEQ ID NO: 971040 - RNA, 19 nt, Homo sapiens
  misc_RNA (1)...(19): siRNA sense strand
gaauacugcuagagcuuau

SEQ ID NO: 971041 - RNA, 19 nt, Homo sapiens
  misc_RNA (1)...(19): siRNA sense strand
ccuacagaauugagucuua

SEQ ID NO: 971042 - RNA, 19 nt, Homo sapiens
  misc_RNA (1)...(19): siRNA sense strand
gggaauauguuggccaaga

SEQ ID NO: 971043 - RNA, 19 nt, Homo sapiens
  misc_RNA (1)...(19): siRNA sense strand
gaaaacacauucggcagua

SEQ ID NO: 971044 - RNA, 19 nt, Homo sapiens
  misc_RNA (1)...(19): siRNA sense strand
gaaccaagaagagcauauu

SEQ ID NO: 971045 - RNA, 19 nt, Homo sapiens
  misc_RNA (1)...(19): siRNA sense strand
ggacaacccacauauccaa

SEQ ID NO: 971046 - RNA, 19 nt, Homo sapiens
  misc_RNA (1)...(19): siRNA sense strand
gagccucacuccugucaau

SEQ ID NO: 971047 - RNA, 19 nt, Homo sapiens
  misc_RNA (1)...(19): siRNA sense strand
ccacauauccaaauugaca

SEQ ID NO: 971048 - RNA, 19 nt, Homo sapiens
  misc_RNA (1)...(19): siRNA sense strand
ccucacuccugucaauaua

SEQ ID NO: 971049 - RNA, 19 nt, Homo sapiens
  misc_RNA (1)...(19): siRNA sense strand
ugauauaacugacaaacca

SEQ ID NO: 971050 - RNA, 19 nt, Homo sapiens
  misc_RNA (1)...(19): siRNA sense strand
ucaggauggugucacauuu

SEQ ID NO: 971051 - RNA, 19 nt, Homo sapiens
  misc_RNA (1)...(19): siRNA sense strand
ccaagaagagcauauugaa

SEQ ID NO: 971052 - RNA, 19 nt, Homo sapiens
  misc_RNA (1)...(19): siRNA sense strand
gugcagucauccuaaauau

SEQ ID NO: 971053 - RNA, 19 nt, Homo sapiens
  misc_RNA (1)...(19): siRNA sense strand
ucacuccugucaauauauu

SEQ ID NO: 971054 - RNA, 19 nt, Homo sapiens
  misc_RNA (1)...(19): siRNA sense strand
gccaggaucuccauuuaag

SEQ ID NO: 971055 - RNA, 19 nt, Homo sapiens
  misc_RNA (1)...(19): siRNA sense strand
cagagcaucuccugugaau

SEQ ID NO: 971056 - RNA, 19 nt, Homo sapiens
  misc_RNA (1)...(19): siRNA sense strand
caaagcaguuguuccuaca

SEQ ID NO: 971057 - RNA, 19 nt, Homo sapiens
  misc_RNA (1)...(19): siRNA sense strand
aagaagagcauauugaaug

SEQ ID NO: 971058 - RNA, 19 nt, Homo sapiens
  misc_RNA (1)...(19): siRNA sense strand
aaauauagguucagagcau

SEQ ID NO: 971059 - RNA, 19 nt, Homo sapiens
  misc_RNA (1)...(19): siRNA sense strand
caacuaaagaagagagauu

SEQ ID NO: 971060 - RNA, 19 nt, Homo sapiens
  misc_RNA (1)...(19): siRNA sense strand
ggagaaauaaagaggaaga

SEQ ID NO: 971061 - RNA, 19 nt, Homo sapiens
  misc_RNA (1)...(19): siRNA sense strand
uaagaagaauacugcuaga

SEQ ID NO: 971062 - RNA, 19 nt, Homo sapiens
  misc_RNA (1)...(19): siRNA sense strand
cgaaguaugucauggaaaa

SEQ ID NO: 971063 - RNA, 19 nt, Homo sapiens
  misc_RNA (1)...(19): siRNA sense strand
gguugaaucuccagugauc

SEQ ID NO: 971064 - RNA, 19 nt, Homo sapiens
  misc_RNA (1)...(19): siRNA sense strand
uaggagaaauaaagaggaa

SEQ ID NO: 971065 - RNA, 19 nt, Homo sapiens
  misc_RNA (1)...(19): siRNA sense strand
ggagcagcaggaagaaaua

SEQ ID NO: 971066 - RNA, 19 nt, Homo sapiens
  misc_RNA (1)...(19): siRNA sense strand
cugccaggaucuccauuua

SEQ ID NO: 971067 - RNA, 19 nt, Homo sapiens
  misc_RNA (1)...(19): siRNA sense strand
uauaaaggcccuaauccaa

SEQ ID NO: 971068 - RNA, 19 nt, Homo sapiens
  misc_RNA (1)...(19): siRNA sense strand
uggcaaacauguacaucaa

SEQ ID NO: 971069 - RNA, 19 nt, Homo sapiens
  misc_RNA (1)...(19): siRNA sense strand
gaacgagaagcagaagaaa

SEQ ID NO: 971070 - RNA, 19 nt, Homo sapiens
  misc_RNA (1)...(19): siRNA sense strand
gcagcaggaagaaauacua

SEQ ID NO: 971071 - RNA, 19 nt, Homo sapiens
  misc_RNA (1)...(19): siRNA sense strand
ugaaugggcuaagaagaau

SEQ ID NO: 971072 - RNA, 19 nt, Homo sapiens
  misc_RNA (1)...(19): siRNA sense strand
caaauugacagaugaccaa

SEQ ID NO: 971073 - RNA, 19 nt, Homo sapiens
  misc_RNA (1)...(19): siRNA sense strand
uauccaaauugacagauga

SEQ ID NO: 971074 - RNA, 19 nt, Homo sapiens
  misc_RNA (1)...(19): siRNA sense strand
agaauugagucuuauugga

SEQ ID NO: 971075 - RNA, 19 nt, Homo sapiens
  misc_RNA (1)...(19): siRNA sense strand
uaugucauccugaaucuaa

SEQ ID NO: 971076 - RNA, 19 nt, Homo sapiens
  misc_RNA (1)...(19): siRNA sense strand
cuacagaauugagucuuau

SEQ ID NO: 971077 - RNA, 19 nt, Homo sapiens
  misc_RNA (1)...(19): siRNA sense strand
cauauugaaugggcuaaga

SEQ ID NO: 971078 - RNA, 19 nt, Homo sapiens
  misc_RNA (1)...(19): siRNA sense strand
acaagucgauugcuauugg

SEQ ID NO: 971079 - RNA, 19 nt, Homo sapiens
  misc_RNA (1)...(19): siRNA sense strand
gcuaagaagaauacugcua

SEQ ID NO: 971080 - RNA, 19 nt, Homo sapiens
  misc_RNA (1)...(19): siRNA sense strand
aaucuccagugaucuguaa

SEQ ID NO: 971081 - RNA, 19 nt, Homo sapiens
  misc_RNA (1)...(19): siRNA sense strand
gacaacugcacauaaagaa

SEQ ID NO: 971082 - RNA, 19 nt, Homo sapiens
  misc_RNA (1)...(19): siRNA sense strand
ucagaugacaccauacuau

SEQ ID NO: 971083 - RNA, 19 nt, Homo sapiens
  misc_RNA (1)...(19): siRNA sense strand
ugacaacugcacauaaaga

SEQ ID NO: 971084 - RNA, 19 nt, Homo sapiens
  misc_RNA (1)...(19): siRNA sense strand
gaugguacccagacaguca

SEQ ID NO: 971085 - RNA, 19 nt, Homo sapiens
  misc_RNA (1)...(19): siRNA sense strand
ccacaagucgauugcuauu

SEQ ID NO: 971086 - RNA, 19 nt, Homo sapiens
  misc_RNA (1)...(19): siRNA sense strand
caagaagagcauauugaau

SEQ ID NO: 971087 - RNA, 19 nt, Homo sapiens
  misc_RNA (1)...(19): siRNA sense strand
gaaacuggucagaaaauaa

SEQ ID NO: 971088 - RNA, 19 nt, Homo sapiens
  misc_RNA (1)...(19): siRNA sense strand
ccagugaucuguaaaaucu

SEQ ID NO: 971089 - RNA, 19 nt, Homo sapiens
  misc_RNA (1)...(19): siRNA sense strand
ugcuagagcuuaucaucuu

SEQ ID NO: 971090 - RNA, 19 nt, Homo sapiens
  misc_RNA (1)...(19): siRNA sense strand
ucaaaugagauucccacua

SEQ ID NO: 971091 - RNA, 19 nt, Homo sapiens
  misc_RNA (1)...(19): siRNA sense strand
guacuaccuugggaauaug

SEQ ID NO: 971092 - RNA, 19 nt, Homo sapiens
  misc_RNA (1)...(19): siRNA sense strand
gggaaaugguacaccuugu

SEQ ID NO: 971093 - RNA, 19 nt, Homo sapiens
  misc_RNA (1)...(19): siRNA sense strand
ggcaguaccaugaagagaa

SEQ ID NO: 971094 - RNA, 19 nt, Homo sapiens
  misc_RNA (1)...(19): siRNA sense strand
gcuagagcuuaucaucuuc

SEQ ID NO: 971095 - RNA, 19 nt, Homo sapiens
  misc_RNA (1)...(19): siRNA sense strand
gaaugggcuaagaagaaua

SEQ ID NO: 971096 - RNA, 19 nt, Homo sapiens
  misc_RNA (1)...(19): siRNA sense strand
ugaauucugcuauggcaaa

SEQ ID NO: 971097 - RNA, 19 nt, Homo sapiens
  misc_RNA (1)...(19): siRNA sense strand
gcaggaagaaauacuaagg

SEQ ID NO: 971098 - RNA, 19 nt, Homo sapiens
  misc_RNA (1)...(19): siRNA sense strand
cagcaggaagaaauacuaa

SEQ ID NO: 971099 - RNA, 19 nt, Homo sapiens
  misc_RNA (1)...(19): siRNA sense strand
aguacuaccuugggaauau

SEQ ID NO: 971100 - RNA, 19 nt, Homo sapiens
  misc_RNA (1)...(19): siRNA sense strand
uacgaaguaugucauggaa

SEQ ID NO: 971101 - RNA, 19 nt, Homo sapiens
  misc_RNA (1)...(19): siRNA sense strand
agaagagcauauugaaugg

SEQ ID NO: 971102 - RNA, 19 nt, Homo sapiens
  misc_RNA (1)...(19): siRNA sense strand
acccacauauccaaauuga

SEQ ID NO: 971103 - RNA, 19 nt, Homo sapiens
  misc_RNA (1)...(19): siRNA sense strand
agaaagaaacuggucagaa

SEQ ID NO: 971104 - RNA, 19 nt, Homo sapiens
  misc_RNA (1)...(19): siRNA sense strand
gcaguuguuccuacagaau

SEQ ID NO: 971105 - RNA, 19 nt, Homo sapiens
  misc_RNA (1)...(19): siRNA sense strand
agaauacugcuagagcuua

SEQ ID NO: 971106 - RNA, 19 nt, Homo sapiens
  misc_RNA (1)...(19): siRNA sense strand
cauaugucauccugaaucu

SEQ ID NO: 971107 - RNA, 19 nt, Homo sapiens
  misc_RNA (1)...(19): siRNA sense strand
agaacgagaagcagaagaa

SEQ ID NO: 971108 - RNA, 19 nt, Homo sapiens
  misc_RNA (1)...(19): siRNA sense strand
aaaugagauucccacuaaa

SEQ ID NO: 971109 - RNA, 19 nt, Homo sapiens
  misc_RNA (1)...(19): siRNA sense strand
cucaugcuguuacuguaua

SEQ ID NO: 971110 - RNA, 19 nt, Homo sapiens
  misc_RNA (1)...(19): siRNA sense strand
caacugcacauaaagaaaa

SEQ ID NO: 971111 - RNA, 19 nt, Homo sapiens
  misc_RNA (1)...(19): siRNA sense strand
uagugguucuuacugcuuu

SEQ ID NO: 971112 - RNA, 19 nt, Homo sapiens
  misc_RNA (1)...(19): siRNA sense strand
aagcaguuguuccuacaga

SEQ ID NO: 971113 - RNA, 19 nt, Homo sapiens
  misc_RNA (1)...(19): siRNA sense strand
ucaugacaacugcacauaa

SEQ ID NO: 971114 - RNA, 19 nt, Homo sapiens
  misc_RNA (1)...(19): siRNA sense strand
agauucaccucaugcuguu

SEQ ID NO: 971115 - RNA, 19 nt, Homo sapiens
  misc_RNA (1)...(19): siRNA sense strand
gagaaagaaacuggucaga

SEQ ID NO: 971116 - RNA, 19 nt, Homo sapiens
  misc_RNA (1)...(19): siRNA sense strand
gaaucuccagugaucugua

SEQ ID NO: 971117 - RNA, 19 nt, Homo sapiens
  misc_RNA (1)...(19): siRNA sense strand
uugaaugggcuaagaagaa

SEQ ID NO: 971118 - RNA, 19 nt, Homo sapiens
  misc_RNA (1)...(19): siRNA sense strand
uccugugaaugacauauuu

SEQ ID NO: 971119 - RNA, 19 nt, Homo sapiens
  misc_RNA (1)...(19): siRNA sense strand
cauacuauccugugggaau

SEQ ID NO: 971120 - RNA, 19 nt, Homo sapiens
  misc_RNA (1)...(19): siRNA sense strand
ggaaccaagaagagcauau

SEQ ID NO: 971121 - RNA, 19 nt, Homo sapiens
  misc_RNA (1)...(19): siRNA sense strand
aaaauggacuucuuucucu

SEQ ID NO: 971122 - RNA, 19 nt, Homo sapiens
  misc_RNA (1)...(19): siRNA sense strand
uaaagugcaaagaaucaga

SEQ ID NO: 971123 - RNA, 19 nt, Homo sapiens
  misc_RNA (1)...(19): siRNA sense strand
ucaauaccaugaggacaag

SEQ ID NO: 971124 - RNA, 19 nt, Homo sapiens
  misc_RNA (1)...(19): siRNA sense strand
gauauaacugacaaaccaa

SEQ ID NO: 971125 - RNA, 19 nt, Homo sapiens
  misc_RNA (1)...(19): siRNA sense strand
ccaaauaccugaagauaaa

SEQ ID NO: 971126 - RNA, 19 nt, Homo sapiens
  misc_RNA (1)...(19): siRNA sense strand
ggugaaggcugaaguguua

SEQ ID NO: 971127 - RNA, 19 nt, Homo sapiens
  misc_RNA (1)...(19): siRNA sense strand
gaauagcccugauggcaua

SEQ ID NO: 971128 - RNA, 19 nt, Homo sapiens
  misc_RNA (1)...(19): siRNA sense strand
ggaaauaucaacaauccua

SEQ ID NO: 971129 - RNA, 19 nt, Homo sapiens
  misc_RNA (1)...(19): siRNA sense strand
cuacaacccuggugagaaa

SEQ ID NO: 971130 - RNA, 19 nt, Homo sapiens
  misc_RNA (1)...(19): siRNA sense strand
gauaaugcauuugaugaug

SEQ ID NO: 971131 - RNA, 19 nt, Homo sapiens
  misc_RNA (1)...(19): siRNA sense strand
gaugaauaccugaaaugua

SEQ ID NO: 971132 - RNA, 19 nt, Homo sapiens
  misc_RNA (1)...(19): siRNA sense strand
ugaagaccauggugagaaa

SEQ ID NO: 971133 - RNA, 19 nt, Homo sapiens
  misc_RNA (1)...(19): siRNA sense strand
ugaagaccauggugugaaa

SEQ ID NO: 971134 - RNA, 19 nt, Homo sapiens
  misc_RNA (1)...(19): siRNA sense strand
gcacuucauuuacauuugg

SEQ ID NO: 971135 - RNA, 19 nt, Homo sapiens
  misc_RNA (1)...(19): siRNA sense strand
cauggcagauaaugcauuu

SEQ ID NO: 971136 - RNA, 19 nt, Homo sapiens
  misc_RNA (1)...(19): siRNA sense strand
gaugaugaauaccugaaau

SEQ ID NO: 971137 - RNA, 19 nt, Homo sapiens
  misc_RNA (1)...(19): siRNA sense strand
ggacaggauggaaauuaaa

SEQ ID NO: 971138 - RNA, 19 nt, Homo sapiens
  misc_RNA (1)...(19): siRNA sense strand
ggauggaaauuaaauacgu

SEQ ID NO: 971139 - RNA, 19 nt, Homo sapiens
  misc_RNA (1)...(19): siRNA sense strand
cggacaggauggaaauuaa

SEQ ID NO: 971140 - RNA, 19 nt, Homo sapiens
  misc_RNA (1)...(19): siRNA sense strand
aacaagaccugcagccauu

SEQ ID NO: 971141 - RNA, 19 nt, Homo sapiens
  misc_RNA (1)...(19): siRNA sense strand
ugaagaccauagugagaaa

SEQ ID NO: 971142 - RNA, 19 nt, Homo sapiens
  misc_RNA (1)...(19): siRNA sense strand
uguuagacauggcagauaa

SEQ ID NO: 971143 - RNA, 19 nt, Homo sapiens
  misc_RNA (1)...(19): siRNA sense strand
gcuauaaaucucuuuguug

SEQ ID NO: 971144 - RNA, 19 nt, Homo sapiens
  misc_RNA (1)...(19): siRNA sense strand
gcagauaaugcauuugaug

SEQ ID NO: 971145 - RNA, 19 nt, Homo sapiens
  misc_RNA (1)...(19): siRNA sense strand
gaacaagccagggcacuuc

SEQ ID NO: 971146 - RNA, 19 nt, Homo sapiens
  misc_RNA (1)...(19): siRNA sense strand
ccagggcacuucauuuaca

SEQ ID NO: 971147 - RNA, 19 nt, Homo sapiens
  misc_RNA (1)...(19): siRNA sense strand
acacaugccuuggaguuga

SEQ ID NO: 971148 - RNA, 19 nt, Homo sapiens
  misc_RNA (1)...(19): siRNA sense strand
gcccugauggcauauauuu

SEQ ID NO: 971149 - RNA, 19 nt, Homo sapiens
  misc_RNA (1)...(19): siRNA sense strand
aaucaguguuucugcuaua

SEQ ID NO: 971150 - RNA, 19 nt, Homo sapiens
  misc_RNA (1)...(19): siRNA sense strand
ucaaaucuuucucccuaug

SEQ ID NO: 971151 - RNA, 19 nt, Homo sapiens
  misc_RNA (1)...(19): siRNA sense strand
cuucaaagcauaaacaaga

SEQ ID NO: 971152 - RNA, 19 nt, Homo sapiens
  misc_RNA (1)...(19): siRNA sense strand
cagauaaugcauuugauga

SEQ ID NO: 971153 - RNA, 19 nt, Homo sapiens
  misc_RNA (1)...(19): siRNA sense strand
cagugaagcugugaagaug

SEQ ID NO: 971154 - RNA, 19 nt, Homo sapiens
  misc_RNA (1)...(19): siRNA sense strand
uaaggauaaccauggaaua

SEQ ID NO: 971155 - RNA, 19 nt, Homo sapiens
  misc_RNA (1)...(19): siRNA sense strand
caagagcccugcaguugcu

SEQ ID NO: 971156 - RNA, 19 nt, Homo sapiens
  misc_RNA (1)...(19): siRNA sense strand
ccaaaacugugguauauag

SEQ ID NO: 971157 - RNA, 19 nt, Homo sapiens
  misc_RNA (1)...(19): siRNA sense strand
augaauaccugaaauguac

SEQ ID NO: 971158 - RNA, 19 nt, Homo sapiens
  misc_RNA (1)...(19): siRNA sense strand
ccaaaccucaggcugcuaa

SEQ ID NO: 971159 - RNA, 19 nt, Homo sapiens
  misc_RNA (1)...(19): siRNA sense strand
cacaagagcccugcaguug

SEQ ID NO: 971160 - RNA, 19 nt, Homo sapiens
  misc_RNA (1)...(19): siRNA sense strand
gggcacuucauuuacauuu

SEQ ID NO: 971161 - RNA, 19 nt, Homo sapiens
  misc_RNA (1)...(19): siRNA sense strand
gaagauaaaagucaaggaa

SEQ ID NO: 971162 - RNA, 19 nt, Homo sapiens
  misc_RNA (1)...(19): siRNA sense strand
guacggacaggauggaaau

SEQ ID NO: 971163 - RNA, 19 nt, Homo sapiens
  misc_RNA (1)...(19): siRNA sense strand
gcccugcaguugcugagaa

SEQ ID NO: 971164 - RNA, 19 nt, Homo sapiens
  misc_RNA (1)...(19): siRNA sense strand
caguguuucugcuauaaau

SEQ ID NO: 971165 - RNA, 19 nt, Homo sapiens
  misc_RNA (1)...(19): siRNA sense strand
agccagggcacuucauuua

SEQ ID NO: 971166 - RNA, 19 nt, Homo sapiens
  misc_RNA (1)...(19): siRNA sense strand
ccacccaaauaccugaaga

SEQ ID NO: 971167 - RNA, 19 nt, Homo sapiens
  misc_RNA (1)...(19): siRNA sense strand
gcaagccaccagcaauuag

SEQ ID NO: 971168 - RNA, 19 nt, Homo sapiens
  misc_RNA (1)...(19): siRNA sense strand
cccaaauaccugaagauaa

SEQ ID NO: 971169 - RNA, 19 nt, Homo sapiens
  misc_RNA (1)...(19): siRNA sense strand
ccuuauccuucaaagcaua

SEQ ID NO: 971170 - RNA, 19 nt, Homo sapiens
  misc_RNA (1)...(19): siRNA sense strand
ucacuguguuauccaucua

SEQ ID NO: 971171 - RNA, 19 nt, Homo sapiens
  misc_RNA (1)...(19): siRNA sense strand
gacaggauggaaauuaaau

SEQ ID NO: 971172 - RNA, 19 nt, Homo sapiens
  misc_RNA (1)...(19): siRNA sense strand
uaaucaguguuucugcuau

SEQ ID NO: 971173 - RNA, 19 nt, Homo sapiens
  misc_RNA (1)...(19): siRNA sense strand
ccuugaacccacccaaaua

SEQ ID NO: 971174 - RNA, 19 nt, Homo sapiens
  misc_RNA (1)...(19): siRNA sense strand
cuaaugaccagcucacugu

SEQ ID NO: 971175 - RNA, 19 nt, Homo sapiens
  misc_RNA (1)...(19): siRNA sense strand
ucacaagagcccugcaguu

SEQ ID NO: 971176 - RNA, 19 nt, Homo sapiens
  misc_RNA (1)...(19): siRNA sense strand
uuuaccaucuguucaguga

SEQ ID NO: 971177 - RNA, 19 nt, Homo sapiens
  misc_RNA (1)...(19): siRNA sense strand
uggcagauaaugcauuuga

SEQ ID NO: 971178 - RNA, 19 nt, Homo sapiens
  misc_RNA (1)...(19): siRNA sense strand
cuacacaugccuuggaguu

SEQ ID NO: 971179 - RNA, 19 nt, Homo sapiens
  misc_RNA (1)...(19): siRNA sense strand
caaaucuuucucccuauga

SEQ ID NO: 971180 - RNA, 19 nt, Homo sapiens
  misc_RNA (1)...(19): siRNA sense strand
ggcacuucauuuacauuug

SEQ ID NO: 971181 - RNA, 19 nt, Homo sapiens
  misc_RNA (1)...(19): siRNA sense strand
aaggaaauaucaacaaucc

SEQ ID NO: 971182 - RNA, 19 nt, Homo sapiens
  misc_RNA (1)...(19): siRNA sense strand
ccuuggaguugacauugaa

SEQ ID NO: 971183 - RNA, 19 nt, Homo sapiens
  misc_RNA (1)...(19): siRNA sense strand
gccuuggaguugacauuga

SEQ ID NO: 971184 - RNA, 19 nt, Homo sapiens
  misc_RNA (1)...(19): siRNA sense strand
uuaugagugugcauuucua

SEQ ID NO: 971185 - RNA, 19 nt, Homo sapiens
  misc_RNA (1)...(19): siRNA sense strand
cugcagccauuaugagugu

SEQ ID NO: 971186 - RNA, 19 nt, Homo sapiens
  misc_RNA (1)...(19): siRNA sense strand
aaaucuuucucccuaugaa

SEQ ID NO: 971187 - RNA, 19 nt, Homo sapiens
  misc_RNA (1)...(19): siRNA sense strand
caaggaaauaucaacaauc

SEQ ID NO: 971188 - RNA, 19 nt, Homo sapiens
  misc_RNA (1)...(19): siRNA sense strand
ugaaauguacggacaggau

SEQ ID NO: 971189 - RNA, 19 nt, Homo sapiens
  misc_RNA (1)...(19): siRNA sense strand
caagccagggcacuucauu

SEQ ID NO: 971190 - RNA, 19 nt, Homo sapiens
  misc_RNA (1)...(19): siRNA sense strand
agacauggcagauaaugca

SEQ ID NO: 971191 - RNA, 19 nt, Homo sapiens
  misc_RNA (1)...(19): siRNA sense strand
ucagugaagcugugaagau

SEQ ID NO: 971192 - RNA, 19 nt, Homo sapiens
  misc_RNA (1)...(19): siRNA sense strand
aagcaagccaccagcaauu

SEQ ID NO: 971193 - RNA, 19 nt, Homo sapiens
  misc_RNA (1)...(19): siRNA sense strand
ccagaagcuugaagaccau

SEQ ID NO: 971194 - RNA, 19 nt, Homo sapiens
  misc_RNA (1)...(19): siRNA sense strand
ccagaagcuugaagaccau

SEQ ID NO: 971195 - RNA, 19 nt, Homo sapiens
  misc_RNA (1)...(19): siRNA sense strand
aaacugugguauauagaac

SEQ ID NO: 971196 - RNA, 19 nt, Homo sapiens
  misc_RNA (1)...(19): siRNA sense strand
caagccaccagcaauuaga

SEQ ID NO: 971197 - RNA, 19 nt, Homo sapiens
  misc_RNA (1)...(19): siRNA sense strand
caacccaucuaugucuaca

SEQ ID NO: 971198 - RNA, 19 nt, Homo sapiens
  misc_RNA (1)...(19): siRNA sense strand
aaacuguauugagaaccua

SEQ ID NO: 971199 - RNA, 19 nt, Homo sapiens
  misc_RNA (1)...(19): siRNA sense strand
gcauuucuagguggacuaa

SEQ ID NO: 971200 - RNA, 19 nt, Homo sapiens
  misc_RNA (1)...(19): siRNA sense strand
uagcccugauggcauauau

SEQ ID NO: 971201 - RNA, 19 nt, Homo sapiens
  misc_RNA (1)...(19): siRNA sense strand
aaccucaggcugcuaauga

SEQ ID NO: 971202 - RNA, 19 nt, Homo sapiens
  misc_RNA (1)...(19): siRNA sense strand
cauuaugagugugcauuuc

SEQ ID NO: 971203 - RNA, 19 nt, Homo sapiens
  misc_RNA (1)...(19): siRNA sense strand
ccauuaugagugugcauuu

SEQ ID NO: 971204 - RNA, 19 nt, Homo sapiens
  misc_RNA (1)...(19): siRNA sense strand
caagaccugcagccauuau

SEQ ID NO: 971205 - RNA, 19 nt, Homo sapiens
  misc_RNA (1)...(19): siRNA sense strand
uuuaauaccucugaaugag

SEQ ID NO: 971206 - RNA, 19 nt, Homo sapiens
  misc_RNA (1)...(19): siRNA sense strand
uguuauccaucuacacaug

SEQ ID NO: 971207 - RNA, 19 nt, Homo sapiens
  misc_RNA (1)...(19): siRNA sense strand
caccagcaauuagauacug

SEQ ID NO: 971208 - RNA, 19 nt, Homo sapiens
  misc_RNA (1)...(19): siRNA sense strand
ggcagauaaugcauuugau

SEQ ID NO: 971209 - RNA, 19 nt, Homo sapiens
  misc_RNA (1)...(19): siRNA sense strand
ggaaaaugcaaaagccaaa

SEQ ID NO: 971210 - RNA, 19 nt, Homo sapiens
  misc_RNA (1)...(19): siRNA sense strand
acggacaggauggaaauua

SEQ ID NO: 971211 - RNA, 19 nt, Homo sapiens
  misc_RNA (1)...(19): siRNA sense strand
uggcaaccaugauucuagu

SEQ ID NO: 971212 - RNA, 19 nt, Homo sapiens
  misc_RNA (1)...(19): siRNA sense strand
ugaccagcucacuguguua

SEQ ID NO: 971213 - RNA, 19 nt, Homo sapiens
  misc_RNA (1)...(19): siRNA sense strand
gaccagcucacuguguuau

SEQ ID NO: 971214 - RNA, 19 nt, Homo sapiens
  misc_RNA (1)...(19): siRNA sense strand
uuaaucaguguuucugcua

SEQ ID NO: 971215 - RNA, 19 nt, Homo sapiens
  misc_RNA (1)...(19): siRNA sense strand
aaagcaagccaccagcaau

SEQ ID NO: 971216 - RNA, 19 nt, Homo sapiens
  misc_RNA (1)...(19): siRNA sense strand
ugcauuugaugaugaauac

SEQ ID NO: 971217 - RNA, 19 nt, Homo sapiens
  misc_RNA (1)...(19): siRNA sense strand
gaagacgggacauuuugaa

SEQ ID NO: 971218 - RNA, 19 nt, Homo sapiens
  misc_RNA (1)...(19): siRNA sense strand
acccaaauaccugaagaua

SEQ ID NO: 971219 - RNA, 19 nt, Homo sapiens
  misc_RNA (1)...(19): siRNA sense strand
uaaauacguuccccaacug

SEQ ID NO: 971220 - RNA, 19 nt, Homo sapiens
  misc_RNA (1)...(19): siRNA sense strand
aaccuuauccuucaaagca

SEQ ID NO: 971221 - RNA, 19 nt, Homo sapiens
  misc_RNA (1)...(19): siRNA sense strand
ggaguugacauugaaaauu

SEQ ID NO: 971222 - RNA, 19 nt, Homo sapiens
  misc_RNA (1)...(19): siRNA sense strand
caucuacacaugccuugga

SEQ ID NO: 971223 - RNA, 19 nt, Homo sapiens
  misc_RNA (1)...(19): siRNA sense strand
caggauggaaauuaaauac

SEQ ID NO: 971224 - RNA, 19 nt, Homo sapiens
  misc_RNA (1)...(19): siRNA sense strand
gaagcuugaagaccauagu

SEQ ID NO: 971225 - RNA, 19 nt, Homo sapiens
  misc_RNA (1)...(19): siRNA sense strand
gcagagaucucacuauaaa

SEQ ID NO: 971226 - RNA, 19 nt, Homo sapiens
  misc_RNA (1)...(19): siRNA sense strand
caaagagaaucacgaauua

SEQ ID NO: 971227 - RNA, 19 nt, Homo sapiens
  misc_RNA (1)...(19): siRNA sense strand
gaaaagcacggaacaauua

SEQ ID NO: 971228 - RNA, 19 nt, Homo sapiens
  misc_RNA (1)...(19): siRNA sense strand
ugauguggcuccuuauaua

SEQ ID NO: 971229 - RNA, 19 nt, Homo sapiens
  misc_RNA (1)...(19): siRNA sense strand
ggauugaugucaccacuga

SEQ ID NO: 971230 - RNA, 19 nt, Homo sapiens
  misc_RNA (1)...(19): siRNA sense strand
gaguaaagccucaggauau

SEQ ID NO: 971231 - RNA, 19 nt, Homo sapiens
  misc_RNA (1)...(19): siRNA sense strand
ggaguaaagccucaggaua

SEQ ID NO: 971232 - RNA, 19 nt, Homo sapiens
  misc_RNA (1)...(19): siRNA sense strand
ugauucaccuuaucuauga

SEQ ID NO: 971233 - RNA, 19 nt, Homo sapiens
  misc_RNA (1)...(19): siRNA sense strand
acgcagagaucucacuaua

SEQ ID NO: 971234 - RNA, 19 nt, Homo sapiens
  misc_RNA (1)...(19): siRNA sense strand
gcagugagggauuuauuaa

SEQ ID NO: 971235 - RNA, 19 nt, Homo sapiens
  misc_RNA (1)...(19): siRNA sense strand
ucaaagagaaucacgaauu

SEQ ID NO: 971236 - RNA, 19 nt, Homo sapiens
  misc_RNA (1)...(19): siRNA sense strand
gaaacccuaucaagacuuc

SEQ ID NO: 971237 - RNA, 19 nt, Homo sapiens
  misc_RNA (1)...(19): siRNA sense strand
gguugaagaucgcgaaaga

SEQ ID NO: 971238 - RNA, 19 nt, Homo sapiens
  misc_RNA (1)...(19): siRNA sense strand
uggaagacaugcugaggua

SEQ ID NO: 971239 - RNA, 19 nt, Homo sapiens
  misc_RNA (1)...(19): siRNA sense strand
gagaaucacgaauuaagaa

SEQ ID NO: 971240 - RNA, 19 nt, Homo sapiens
  misc_RNA (1)...(19): siRNA sense strand
caacuacucguguauguga

SEQ ID NO: 971241 - RNA, 19 nt, Homo sapiens
  misc_RNA (1)...(19): siRNA sense strand
ggauucggaugauaaacaa

SEQ ID NO: 971242 - RNA, 19 nt, Homo sapiens
  misc_RNA (1)...(19): siRNA sense strand
gcacuuuauuugacuacuu

SEQ ID NO: 971243 - RNA, 19 nt, Homo sapiens
  misc_RNA (1)...(19): siRNA sense strand
gaggagcagugagggauuu

SEQ ID NO: 971244 - RNA, 19 nt, Homo sapiens
  misc_RNA (1)...(19): siRNA sense strand
ggauuuggguggaacugaa

SEQ ID NO: 971245 - RNA, 19 nt, Homo sapiens
  misc_RNA (1)...(19): siRNA sense strand
gaacgcagagaucucacua

SEQ ID NO: 971246 - RNA, 19 nt, Homo sapiens
  misc_RNA (1)...(19): siRNA sense strand
aaccuuggcuuauuuauag

SEQ ID NO: 971247 - RNA, 19 nt, Homo sapiens
  misc_RNA (1)...(19): siRNA sense strand
gaagacaugcugagguaga

SEQ ID NO: 971248 - RNA, 19 nt, Homo sapiens
  misc_RNA (1)...(19): siRNA sense strand
gcaaaaggcuuggcuggaa

SEQ ID NO: 971249 - RNA, 19 nt, Homo sapiens
  misc_RNA (1)...(19): siRNA sense strand
aguaaagccucaggauaua

SEQ ID NO: 971250 - RNA, 19 nt, Homo sapiens
  misc_RNA (1)...(19): siRNA sense strand
gagguagaauuuacaacug

SEQ ID NO: 971251 - RNA, 19 nt, Homo sapiens
  misc_RNA (1)...(19): siRNA sense strand
gcuggaauaucaggagaaa

SEQ ID NO: 971252 - RNA, 19 nt, Homo sapiens
  misc_RNA (1)...(19): siRNA sense strand
aggcuuggcuggaauauca

SEQ ID NO: 971253 - RNA, 19 nt, Homo sapiens
  misc_RNA (1)...(19): siRNA sense strand
gagaauacaagaggauuau

SEQ ID NO: 971254 - RNA, 19 nt, Homo sapiens
  misc_RNA (1)...(19): siRNA sense strand
gagcagugagggauuuauu

SEQ ID NO: 971255 - RNA, 19 nt, Homo sapiens
  misc_RNA (1)...(19): siRNA sense strand
gauaaacaacagaggagaa

SEQ ID NO: 971256 - RNA, 19 nt, Homo sapiens
  misc_RNA (1)...(19): siRNA sense strand
caccuuaucuaugaucuug

SEQ ID NO: 971257 - RNA, 19 nt, Homo sapiens
  misc_RNA (1)...(19): siRNA sense strand
caacugacuggcagaaaga

SEQ ID NO: 971258 - RNA, 19 nt, Homo sapiens
  misc_RNA (1)...(19): siRNA sense strand
gaauacaagaggauuaucu

SEQ ID NO: 971259 - RNA, 19 nt, Homo sapiens
  misc_RNA (1)...(19): siRNA sense strand
cuucugaguuacauaaaga

SEQ ID NO: 971260 - RNA, 19 nt, Homo sapiens
  misc_RNA (1)...(19): siRNA sense strand
gaaaguuagauuuguugga

SEQ ID NO: 971261 - RNA, 19 nt, Homo sapiens
  misc_RNA (1)...(19): siRNA sense strand
cuacucaaaugaaggagau

SEQ ID NO: 971262 - RNA, 19 nt, Homo sapiens
  misc_RNA (1)...(19): siRNA sense strand
uaaagcaacagauaguuca

SEQ ID NO: 971263 - RNA, 19 nt, Homo sapiens
  misc_RNA (1)...(19): siRNA sense strand
ugucaccacugauggaaga

SEQ ID NO: 971264 - RNA, 19 nt, Homo sapiens
  misc_RNA (1)...(19): siRNA sense strand
gcugggauucggaugauaa

SEQ ID NO: 971265 - RNA, 19 nt, Homo sapiens
  misc_RNA (1)...(19): siRNA sense strand
ggaagcaauugcagaaaau

SEQ ID NO: 971266 - RNA, 19 nt, Homo sapiens
  misc_RNA (1)...(19): siRNA sense strand
ugaugcaacuacucgugua

SEQ ID NO: 971267 - RNA, 19 nt, Homo sapiens
  misc_RNA (1)...(19): siRNA sense strand
ucaaaugaaggagauguuu

SEQ ID NO: 971268 - RNA, 19 nt, Homo sapiens
  misc_RNA (1)...(19): siRNA sense strand
caaaguacaagaugauguc

SEQ ID NO: 971269 - RNA, 19 nt, Homo sapiens
  misc_RNA (1)...(19): siRNA sense strand
uaucuaugaucuugaugug

SEQ ID NO: 971270 - RNA, 19 nt, Homo sapiens
  misc_RNA (1)...(19): siRNA sense strand
uuacuacacuacggauuga

SEQ ID NO: 971271 - RNA, 19 nt, Homo sapiens
  misc_RNA (1)...(19): siRNA sense strand
guugcagucucccgaauuc

SEQ ID NO: 971272 - RNA, 19 nt, Homo sapiens
  misc_RNA (1)...(19): siRNA sense strand
agagaauacaagaggauua

SEQ ID NO: 971273 - RNA, 19 nt, Homo sapiens
  misc_RNA (1)...(19): siRNA sense strand
caaaugaaggagauguuuc

SEQ ID NO: 971274 - RNA, 19 nt, Homo sapiens
  misc_RNA (1)...(19): siRNA sense strand
guaaguggccaugacauca

SEQ ID NO: 971275 - RNA, 19 nt, Homo sapiens
  misc_RNA (1)...(19): siRNA sense strand
uaaagccucaggauauaga

SEQ ID NO: 971276 - RNA, 19 nt, Homo sapiens
  misc_RNA (1)...(19): siRNA sense strand
ggacaugcuaaacagagaa

SEQ ID NO: 971277 - RNA, 19 nt, Homo sapiens
  misc_RNA (1)...(19): siRNA sense strand
gggauucggaugauaaaca

SEQ ID NO: 971278 - RNA, 19 nt, Homo sapiens
  misc_RNA (1)...(19): siRNA sense strand
uacaagaugaugucacaaa

SEQ ID NO: 971279 - RNA, 19 nt, Homo sapiens
  misc_RNA (1)...(19): siRNA sense strand
cuaaacagagaauacaaga

SEQ ID NO: 971280 - RNA, 19 nt, Homo sapiens
  misc_RNA (1)...(19): siRNA sense strand
gagaucucacuauaaauuc

SEQ ID NO: 971281 - RNA, 19 nt, Homo sapiens
  misc_RNA (1)...(19): siRNA sense strand
acaacugacuggcagaaag

SEQ ID NO: 971282 - RNA, 19 nt, Homo sapiens
  misc_RNA (1)...(19): siRNA sense strand
agguagaauuuacaacuga

SEQ ID NO: 971283 - RNA, 19 nt, Homo sapiens
  misc_RNA (1)...(19): siRNA sense strand
ugaguuacauaaagaagac

SEQ ID NO: 971284 - RNA, 19 nt, Homo sapiens
  misc_RNA (1)...(19): siRNA sense strand
uagggaaccugaugcaacu

SEQ ID NO: 971285 - RNA, 19 nt, Homo sapiens
  misc_RNA (1)...(19): siRNA sense strand
accaugauccugagacuuu

SEQ ID NO: 971286 - RNA, 19 nt, Homo sapiens
  misc_RNA (1)...(19): siRNA sense strand
gacaugcugagguagaauu

SEQ ID NO: 971287 - RNA, 19 nt, Homo sapiens
  misc_RNA (1)...(19): siRNA sense strand
aguacaagaugaugucaca

SEQ ID NO: 971288 - RNA, 19 nt, Homo sapiens
  misc_RNA (1)...(19): siRNA sense strand
agaaaggauuuggguggaa

SEQ ID NO: 971289 - RNA, 19 nt, Homo sapiens
  misc_RNA (1)...(19): siRNA sense strand
gauggcacuuuauuugacu

SEQ ID NO: 971290 - RNA, 19 nt, Homo sapiens
  misc_RNA (1)...(19): siRNA sense strand
gauguggcuccuuauauag

SEQ ID NO: 971291 - RNA, 19 nt, Homo sapiens
  misc_RNA (1)...(19): siRNA sense strand
gguaaccauguaaaucauu

SEQ ID NO: 971292 - RNA, 19 nt, Homo sapiens
  misc_RNA (1)...(19): siRNA sense strand
caccaaagccagugacucu

SEQ ID NO: 971293 - RNA, 19 nt, Homo sapiens
  misc_RNA (1)...(19): siRNA sense strand
ggaggagcagugagggauu

SEQ ID NO: 971294 - RNA, 19 nt, Homo sapiens
  misc_RNA (1)...(19): siRNA sense strand
gcuaaacagagaauacaag

SEQ ID NO: 971295 - RNA, 19 nt, Homo sapiens
  misc_RNA (1)...(19): siRNA sense strand
ggccucauuauucaaagua

SEQ ID NO: 971296 - RNA, 19 nt, Homo sapiens
  misc_RNA (1)...(19): siRNA sense strand
ugucaaagagaaucacgaa

SEQ ID NO: 971297 - RNA, 19 nt, Homo sapiens
  misc_RNA (1)...(19): siRNA sense strand
gugguccauuccuccauuu

SEQ ID NO: 971298 - RNA, 19 nt, Homo sapiens
  misc_RNA (1)...(19): siRNA sense strand
gaauaucaggagaaaggau

SEQ ID NO: 971299 - RNA, 19 nt, Homo sapiens
  misc_RNA (1)...(19): siRNA sense strand
agagaaucacgaauuaaga

SEQ ID NO: 971300 - RNA, 19 nt, Homo sapiens
  misc_RNA (1)...(19): siRNA sense strand
aagacaugcugagguagaa

SEQ ID NO: 971301 - RNA, 19 nt, Homo sapiens
  misc_RNA (1)...(19): siRNA sense strand
agaaauuggggcucuauua

SEQ ID NO: 971302 - RNA, 19 nt, Homo sapiens
  misc_RNA (1)...(19): siRNA sense strand
uuugauggcacuuuauuug

SEQ ID NO: 971303 - RNA, 19 nt, Homo sapiens
  misc_RNA (1)...(19): siRNA sense strand
gagaaaagcacggaacaau

SEQ ID NO: 971304 - RNA, 19 nt, Homo sapiens
  misc_RNA (1)...(19): siRNA sense strand
gugggcauuucuucaggaa

SEQ ID NO: 971305 - RNA, 19 nt, Homo sapiens
  misc_RNA (1)...(19): siRNA sense strand
uuaaagcaacagauaguuc

SEQ ID NO: 971306 - RNA, 19 nt, Homo sapiens
  misc_RNA (1)...(19): siRNA sense strand
acaagaugaugucacaaaa

SEQ ID NO: 971307 - RNA, 19 nt, Homo sapiens
  misc_RNA (1)...(19): siRNA sense strand
ccuuaucuaugaucuugau

SEQ ID NO: 971308 - RNA, 19 nt, Homo sapiens
  misc_RNA (1)...(19): siRNA sense strand
gauuuggguggaacugaaa

SEQ ID NO: 971309 - RNA, 19 nt, Homo sapiens
  misc_RNA (1)...(19): siRNA sense strand
uggaauaucaggagaaagg

SEQ ID NO: 971310 - RNA, 19 nt, Homo sapiens
  misc_RNA (1)...(19): siRNA sense strand
gaauuccagucacuuuuca

SEQ ID NO: 971311 - RNA, 19 nt, Homo sapiens
  misc_RNA (1)...(19): siRNA sense strand
auaaacaacagaggagaaa

SEQ ID NO: 971312 - RNA, 19 nt, Homo sapiens
  misc_RNA (1)...(19): siRNA sense strand
gcggaacgcagagaucuca

SEQ ID NO: 971313 - RNA, 19 nt, Homo sapiens
  misc_RNA (1)...(19): siRNA sense strand
auuccuccauuuccuguaa

SEQ ID NO: 971314 - RNA, 19 nt, Homo sapiens
  misc_RNA (1)...(19): siRNA sense strand
ugcaacuacucguguaugu

SEQ ID NO: 971315 - RNA, 19 nt, Homo sapiens
  misc_RNA (1)...(19): siRNA sense strand
aagagaaucacgaauuaag

SEQ ID NO: 971316 - RNA, 19 nt, Homo sapiens
  misc_RNA (1)...(19): siRNA sense strand
agcagugagggauuuauua

SEQ ID NO: 971317 - RNA, 19 nt, Homo sapiens
  misc_RNA (1)...(19): siRNA sense strand
ucaaaguacaagaugaugu

SEQ ID NO: 971318 - RNA, 19 nt, Homo sapiens
  misc_RNA (1)...(19): siRNA sense strand
ugauggcacuuuauuugac

SEQ ID NO: 971319 - RNA, 19 nt, Homo sapiens
  misc_RNA (1)...(19): siRNA sense strand
ccaugauccugagacuuug

SEQ ID NO: 971320 - RNA, 19 nt, Homo sapiens
  misc_RNA (1)...(19): siRNA sense strand
gaaauuggggcucuauuac

SEQ ID NO: 971321 - RNA, 19 nt, Homo sapiens
  misc_RNA (1)...(19): siRNA sense strand
gcaaguuuagaagaauuug

SEQ ID NO: 971322 - RNA, 19 nt, Homo sapiens
  misc_RNA (1)...(19): siRNA sense strand
ucauuugauucaccuuauc

SEQ ID NO: 971323 - RNA, 19 nt, Homo sapiens
  misc_RNA (1)...(19): siRNA sense strand
aauaucaggagaaaggauu

SEQ ID NO: 971324 - RNA, 19 nt, Homo sapiens
  misc_RNA (1)...(19): siRNA sense strand
caaaaggcuuggcuggaau

SEQ ID NO: 971325 - RNA, 19 nt, Homo sapiens
  misc_RNA (1)...(19): siRNA sense strand
gagaggagcucgaguauau

SEQ ID NO: 971326 - RNA, 19 nt, Homo sapiens
  misc_RNA (1)...(19): siRNA sense strand
gaagacagcagauggcuuu

SEQ ID NO: 971327 - RNA, 19 nt, Homo sapiens
  misc_RNA (1)...(19): siRNA sense strand
ggaaggagacagccaaaga

SEQ ID NO: 971328 - RNA, 19 nt, Homo sapiens
  misc_RNA (1)...(19): siRNA sense strand
caucaaggauaguaaaugu

SEQ ID NO: 971329 - RNA, 19 nt, Homo sapiens
  misc_RNA (1)...(19): siRNA sense strand
aaacuggaccugucugaua

SEQ ID NO: 971330 - RNA, 19 nt, Homo sapiens
  misc_RNA (1)...(19): siRNA sense strand
gaggagcucgaguauauuu

SEQ ID NO: 971331 - RNA, 19 nt, Homo sapiens
  misc_RNA (1)...(19): siRNA sense strand
gaaaagcaccuccacguuu

SEQ ID NO: 971332 - RNA, 19 nt, Homo sapiens
  misc_RNA (1)...(19): siRNA sense strand
ggaccugucugauacuaag

SEQ ID NO: 971333 - RNA, 19 nt, Homo sapiens
  misc_RNA (1)...(19): siRNA sense strand
aacagaaggucuugagauu

SEQ ID NO: 971334 - RNA, 19 nt, Homo sapiens
  misc_RNA (1)...(19): siRNA sense strand
caacaaugcaggagugaug

SEQ ID NO: 971335 - RNA, 19 nt, Homo sapiens
  misc_RNA (1)...(19): siRNA sense strand
gcacaucaccugggaagga

SEQ ID NO: 971336 - RNA, 19 nt, Homo sapiens
  misc_RNA (1)...(19): siRNA sense strand
uagagaaacuaaaggaauc

SEQ ID NO: 971337 - RNA, 19 nt, Homo sapiens
  misc_RNA (1)...(19): siRNA sense strand
uaacccaucugcugcuaga

SEQ ID NO: 971338 - RNA, 19 nt, Homo sapiens
  misc_RNA (1)...(19): siRNA sense strand
guucggcacucaucuuuca

SEQ ID NO: 971339 - RNA, 19 nt, Homo sapiens
  misc_RNA (1)...(19): siRNA sense strand
ucagagaggagcucgagua

SEQ ID NO: 971340 - RNA, 19 nt, Homo sapiens
  misc_RNA (1)...(19): siRNA sense strand
cuaaaaggcucuggcguua

SEQ ID NO: 971341 - RNA, 19 nt, Homo sapiens
  misc_RNA (1)...(19): siRNA sense strand
gaaggucuugagauucuaa

SEQ ID NO: 971342 - RNA, 19 nt, Homo sapiens
  misc_RNA (1)...(19): siRNA sense strand
cuaagucuauucgagcuuu

SEQ ID NO: 971343 - RNA, 19 nt, Homo sapiens
  misc_RNA (1)...(19): siRNA sense strand
uaacagaaggucuugagau

SEQ ID NO: 971344 - RNA, 19 nt, Homo sapiens
  misc_RNA (1)...(19): siRNA sense strand
ggaaacuggaccugucuga

SEQ ID NO: 971345 - RNA, 19 nt, Homo sapiens
  misc_RNA (1)...(19): siRNA sense strand
gcucgaguauauuuagcuu

SEQ ID NO: 971346 - RNA, 19 nt, Homo sapiens
  misc_RNA (1)...(19): siRNA sense strand
agauggaugugguggcuuu

SEQ ID NO: 971347 - RNA, 19 nt, Homo sapiens
  misc_RNA (1)...(19): siRNA sense strand
gaaggagacagccaaagag

SEQ ID NO: 971348 - RNA, 19 nt, Homo sapiens
  misc_RNA (1)...(19): siRNA sense strand
gacagcagauggcuuugag

SEQ ID NO: 971349 - RNA, 19 nt, Homo sapiens
  misc_RNA (1)...(19): siRNA sense strand
uacaucaacuguucagcuu

SEQ ID NO: 971350 - RNA, 19 nt, Homo sapiens
  misc_RNA (1)...(19): siRNA sense strand
aguccaaucugaacugguu

SEQ ID NO: 971351 - RNA, 19 nt, Homo sapiens
  misc_RNA (1)...(19): siRNA sense strand
ucaaggauaguaaaugugu

SEQ ID NO: 971352 - RNA, 19 nt, Homo sapiens
  misc_RNA (1)...(19): siRNA sense strand
gugggaaucauuucaguga

SEQ ID NO: 971353 - RNA, 19 nt, Homo sapiens
  misc_RNA (1)...(19): siRNA sense strand
ugucuucccucgcacauca

SEQ ID NO: 971354 - RNA, 19 nt, Homo sapiens
  misc_RNA (1)...(19): siRNA sense strand
guguguacaucaacuguuc

SEQ ID NO: 971355 - RNA, 19 nt, Homo sapiens
  misc_RNA (1)...(19): siRNA sense strand
gcuuugagaugcacauagg

SEQ ID NO: 971356 - RNA, 19 nt, Homo sapiens
  misc_RNA (1)...(19): siRNA sense strand
gggaaucauuucagugacu

SEQ ID NO: 971357 - RNA, 19 nt, Homo sapiens
  misc_RNA (1)...(19): siRNA sense strand
cuagagaaacuaaaggaau

SEQ ID NO: 971358 - RNA, 19 nt, Homo sapiens
  misc_RNA (1)...(19): siRNA sense strand
ggagcucgaguauauuuag

SEQ ID NO: 971359 - RNA, 19 nt, Homo sapiens
  misc_RNA (1)...(19): siRNA sense strand
uguccaagcucguaaugag

SEQ ID NO: 971360 - RNA, 19 nt, Homo sapiens
  misc_RNA (1)...(19): siRNA sense strand
acagcaagcuagccaacau

SEQ ID NO: 971361 - RNA, 19 nt, Homo sapiens
  misc_RNA (1)...(19): siRNA sense strand
cauaggagucaaccacuug

SEQ ID NO: 971362 - RNA, 19 nt, Homo sapiens
  misc_RNA (1)...(19): siRNA sense strand
ugucugauacuaagucuau

SEQ ID NO: 971363 - RNA, 19 nt, Homo sapiens
  misc_RNA (1)...(19): siRNA sense strand
ggucacaggagcuaauaca

SEQ ID NO: 971364 - RNA, 19 nt, Homo sapiens
  misc_RNA (1)...(19): siRNA sense strand
gcuagagaaacuaaaggaa

SEQ ID NO: 971365 - RNA, 19 nt, Homo sapiens
  misc_RNA (1)...(19): siRNA sense strand
cuucugcccuuccuucugu

SEQ ID NO: 971366 - RNA, 19 nt, Homo sapiens
  misc_RNA (1)...(19): siRNA sense strand
uugggucacuuccuccuaa

SEQ ID NO: 971367 - RNA, 19 nt, Homo sapiens
  misc_RNA (1)...(19): siRNA sense strand
gagaugcacauaggaguca

SEQ ID NO: 971368 - RNA, 19 nt, Homo sapiens
  misc_RNA (1)...(19): siRNA sense strand
acauaggagucaaccacuu

SEQ ID NO: 971369 - RNA, 19 nt, Homo sapiens
  misc_RNA (1)...(19): siRNA sense strand
cagagaggagcucgaguau

SEQ ID NO: 971370 - RNA, 19 nt, Homo sapiens
  misc_RNA (1)...(19): siRNA sense strand
ggucuugagauucuaagug

SEQ ID NO: 971371 - RNA, 19 nt, Homo sapiens
  misc_RNA (1)...(19): siRNA sense strand
gaaacuggaccugucugau

SEQ ID NO: 971372 - RNA, 19 nt, Homo sapiens
  misc_RNA (1)...(19): siRNA sense strand
ggaaaagcaccuccacguu

SEQ ID NO: 971373 - RNA, 19 nt, Homo sapiens
  misc_RNA (1)...(19): siRNA sense strand
gggccucccaauagacuaa

SEQ ID NO: 971374 - RNA, 19 nt, Homo sapiens
  misc_RNA (1)...(19): siRNA sense strand
ggauaguaaaugugucuuc

SEQ ID NO: 971375 - RNA, 19 nt, Homo sapiens
  misc_RNA (1)...(19): siRNA sense strand
cagcagauggcuuugagau

SEQ ID NO: 971376 - RNA, 19 nt, Homo sapiens
  misc_RNA (1)...(19): siRNA sense strand
gugaugauguguccguacu

SEQ ID NO: 971377 - RNA, 19 nt, Homo sapiens
  misc_RNA (1)...(19): siRNA sense strand
ugauguguccguacucgaa

SEQ ID NO: 971378 - RNA, 19 nt, Homo sapiens
  misc_RNA (1)...(19): siRNA sense strand
ugugggacgucaguuguga

SEQ ID NO: 971379 - RNA, 19 nt, Homo sapiens
  misc_RNA (1)...(19): siRNA sense strand
uaaccugcagggcgagaaa

SEQ ID NO: 971380 - RNA, 19 nt, Homo sapiens
  misc_RNA (1)...(19): siRNA sense strand
cccaucugcugcuagagaa

SEQ ID NO: 971381 - RNA, 19 nt, Homo sapiens
  misc_RNA (1)...(19): siRNA sense strand
ccuaacccaucugcugcua

SEQ ID NO: 971382 - RNA, 19 nt, Homo sapiens
  misc_RNA (1)...(19): siRNA sense strand
gcucguaaugagacuauag

SEQ ID NO: 971383 - RNA, 19 nt, Homo sapiens
  misc_RNA (1)...(19): siRNA sense strand
ugcccuuccuucuguauau

SEQ ID NO: 971384 - RNA, 19 nt, Homo sapiens
  misc_RNA (1)...(19): siRNA sense strand
cagauggcuuugagaugca

SEQ ID NO: 971385 - RNA, 19 nt, Homo sapiens
  misc_RNA (1)...(19): siRNA sense strand
gcacaguccaaucugaacu

SEQ ID NO: 971386 - RNA, 19 nt, Homo sapiens
  misc_RNA (1)...(19): siRNA sense strand
gcucauguucccgcuguug

SEQ ID NO: 971387 - RNA, 19 nt, Homo sapiens
  misc_RNA (1)...(19): siRNA sense strand
agagaggagcucgaguaua

SEQ ID NO: 971388 - RNA, 19 nt, Homo sapiens
  misc_RNA (1)...(19): siRNA sense strand
cuaagugggaaucauuuca

SEQ ID NO: 971389 - RNA, 19 nt, Homo sapiens
  misc_RNA (1)...(19): siRNA sense strand
cacaucaccugggaaggau

SEQ ID NO: 971390 - RNA, 19 nt, Homo sapiens
  misc_RNA (1)...(19): siRNA sense strand
gagcucgaguauauuuagc

SEQ ID NO: 971391 - RNA, 19 nt, Homo sapiens
  misc_RNA (1)...(19): siRNA sense strand
gcacacaacuacuacaauu

SEQ ID NO: 971392 - RNA, 19 nt, Homo sapiens
  misc_RNA (1)...(19): siRNA sense strand
ccaacgaccuguuugagaa

SEQ ID NO: 971393 - RNA, 19 nt, Homo sapiens
  misc_RNA (1)...(19): siRNA sense strand
ucaaggccaucaccaagua

SEQ ID NO: 971394 - RNA, 19 nt, Homo sapiens
  misc_RNA (1)...(19): siRNA sense strand
gaacaucggcaacuucauc

SEQ ID NO: 971395 - RNA, 19 nt, Homo sapiens
  misc_RNA (1)...(19): siRNA sense strand
cagccgagguuaagaacaa

SEQ ID NO: 971396 - RNA, 19 nt, Homo sapiens
  misc_RNA (1)...(19): siRNA sense strand
gcagaugggcaccaacaaa

SEQ ID NO: 971397 - RNA, 19 nt, Homo sapiens
  misc_RNA (1)...(19): siRNA sense strand
ggaccaagcggcagaucuu

SEQ ID NO: 971398 - RNA, 19 nt, Homo sapiens
  misc_RNA (1)...(19): siRNA sense strand
ggagugaaguacgcagaga

SEQ ID NO: 971399 - RNA, 19 nt, Homo sapiens
  misc_RNA (1)...(19): siRNA sense strand
gaagaagaucaaugaguca

SEQ ID NO: 971400 - RNA, 19 nt, Homo sapiens
  misc_RNA (1)...(19): siRNA sense strand
gaagggcggaacaucauug

SEQ ID NO: 971401 - RNA, 19 nt, Homo sapiens
  misc_RNA (1)...(19): siRNA sense strand
gagaacaucggcaacuuca

SEQ ID NO: 971402 - RNA, 19 nt, Homo sapiens
  misc_RNA (1)...(19): siRNA sense strand
gagaagggcggaacaucau

SEQ ID NO: 971403 - RNA, 19 nt, Homo sapiens
  misc_RNA (1)...(19): siRNA sense strand
ggagaacaucggcaacuuc

SEQ ID NO: 971404 - RNA, 19 nt, Homo sapiens
  misc_RNA (1)...(19): siRNA sense strand
gcgaauucaucaauaagcu

SEQ ID NO: 971405 - RNA, 19 nt, Homo sapiens
  misc_RNA (1)...(19): siRNA sense strand
ggcaccagcuggagaacau

SEQ ID NO: 971406 - RNA, 19 nt, Homo sapiens
  misc_RNA (1)...(19): siRNA sense strand
gcagaugggcagcaacaag

SEQ ID NO: 971407 - RNA, 19 nt, Homo sapiens
  misc_RNA (1)...(19): siRNA sense strand
gagcaggagcugagagagu

SEQ ID NO: 971408 - RNA, 19 nt, Homo sapiens
  misc_RNA (1)...(19): siRNA sense strand
gaagacgaaaggaaacaag

SEQ ID NO: 971409 - RNA, 19 nt, Homo sapiens
  misc_RNA (1)...(19): siRNA sense strand
cgaaaggaaacaaggugaa

SEQ ID NO: 971410 - RNA, 19 nt, Homo sapiens
  misc_RNA (1)...(19): siRNA sense strand
gaugggcaccaacaaagga

SEQ ID NO: 971411 - RNA, 19 nt, Homo sapiens
  misc_RNA (1)...(19): siRNA sense strand
gaacgugggagugaaguac

SEQ ID NO: 971412 - RNA, 19 nt, Homo sapiens
  misc_RNA (1)...(19): siRNA sense strand
uggcgaagacgaaaggaaa

SEQ ID NO: 971413 - RNA, 19 nt, Homo sapiens
  misc_RNA (1)...(19): siRNA sense strand
gaagcaggagcggaaauuc

SEQ ID NO: 971414 - RNA, 19 nt, Homo sapiens
  misc_RNA (1)...(19): siRNA sense strand
gaaaggaaacaaggugaac

SEQ ID NO: 971415 - RNA, 19 nt, Homo sapiens
  misc_RNA (1)...(19): siRNA sense strand
gccaacgaccuguuugaga

SEQ ID NO: 971416 - RNA, 19 nt, Homo sapiens
  misc_RNA (1)...(19): siRNA sense strand
uuugagaacaccaaccaua

SEQ ID NO: 971417 - RNA, 19 nt, Homo sapiens
  misc_RNA (1)...(19): siRNA sense strand
cuucauggacggccucaaa

SEQ ID NO: 971418 - RNA, 19 nt, Homo sapiens
  misc_RNA (1)...(19): siRNA sense strand
agagaagggcggaacauca

SEQ ID NO: 971419 - RNA, 19 nt, Homo sapiens
  misc_RNA (1)...(19): siRNA sense strand
ccgugaagaagaucaauga

SEQ ID NO: 971420 - RNA, 19 nt, Homo sapiens
  misc_RNA (1)...(19): siRNA sense strand
gugaagaagaucaaugagu

SEQ ID NO: 971421 - RNA, 19 nt, Homo sapiens
  misc_RNA (1)...(19): siRNA sense strand
aguccacccuccuggcuuu

SEQ ID NO: 971422 - RNA, 19 nt, Homo sapiens
  misc_RNA (1)...(19): siRNA sense strand
gcacugcgacacgcucaau

SEQ ID NO: 971423 - RNA, 19 nt, Homo sapiens
  misc_RNA (1)...(19): siRNA sense strand
uggagaacaucggcaacuu

SEQ ID NO: 971424 - RNA, 19 nt, Homo sapiens
  misc_RNA (1)...(19): siRNA sense strand
gggagcaggagcugagaga

SEQ ID NO: 971425 - RNA, 19 nt, Homo sapiens
  misc_RNA (1)...(19): siRNA sense strand
gagugaaguacgcagagaa

SEQ ID NO: 971426 - RNA, 19 nt, Homo sapiens
  misc_RNA (1)...(19): siRNA sense strand
cuuugcgaauucaucaaua

SEQ ID NO: 971427 - RNA, 19 nt, Homo sapiens
  misc_RNA (1)...(19): siRNA sense strand
cagaugggcaccaacaaag

SEQ ID NO: 971428 - RNA, 19 nt, Homo sapiens
  misc_RNA (1)...(19): siRNA sense strand
gagaagcaggagcggaaau

SEQ ID NO: 971429 - RNA, 19 nt, Homo sapiens
  misc_RNA (1)...(19): siRNA sense strand
ugagaacaccaaccauaca

SEQ ID NO: 971430 - RNA, 19 nt, Homo sapiens
  misc_RNA (1)...(19): siRNA sense strand
ugaggccaacgaccuguuu

SEQ ID NO: 971431 - RNA, 19 nt, Homo sapiens
  misc_RNA (1)...(19): siRNA sense strand
ccaccacgcacacaacuac

SEQ ID NO: 971432 - RNA, 19 nt, Homo sapiens
  misc_RNA (1)...(19): siRNA sense strand
agaagcaggagcggaaauu

SEQ ID NO: 971433 - RNA, 19 nt, Homo sapiens
  misc_RNA (1)...(19): siRNA sense strand
ugaaguacgcagagaagca

SEQ ID NO: 971434 - RNA, 19 nt, Homo sapiens
  misc_RNA (1)...(19): siRNA sense strand
caggcuccgugaagaagau

SEQ ID NO: 971435 - RNA, 19 nt, Homo sapiens
  misc_RNA (1)...(19): siRNA sense strand
cagcauggcgaagacgaaa

SEQ ID NO: 971436 - RNA, 19 nt, Homo sapiens
  misc_RNA (1)...(19): siRNA sense strand
cauggacggccucaaagau

SEQ ID NO: 971437 - RNA, 19 nt, Homo sapiens
  misc_RNA (1)...(19): siRNA sense strand
gagcaaguguccacagcau

SEQ ID NO: 971438 - RNA, 19 nt, Homo sapiens
  misc_RNA (1)...(19): siRNA sense strand
ccaaguccgugucuguuuc

SEQ ID NO: 971439 - RNA, 19 nt, Homo sapiens
  misc_RNA (1)...(19): siRNA sense strand
cacuuugacuggcuucuuu

SEQ ID NO: 971440 - RNA, 19 nt, Homo sapiens
  misc_RNA (1)...(19): siRNA sense strand
cucaaugacuggcugcuuu

SEQ ID NO: 971441 - RNA, 19 nt, Homo sapiens
  misc_RNA (1)...(19): siRNA sense strand
ucaaugacuggcugcuuua

SEQ ID NO: 971442 - RNA, 19 nt, Homo sapiens
  misc_RNA (1)...(19): siRNA sense strand
uuucaagggucuccugcua

SEQ ID NO: 971443 - RNA, 19 nt, Homo sapiens
  misc_RNA (1)...(19): siRNA sense strand
uagggcagcucuccaugga

SEQ ID NO: 971444 - RNA, 19 nt, Homo sapiens
  misc_RNA (1)...(19): siRNA sense strand
cuucuuggacuucaucuuu

SEQ ID NO: 971445 - RNA, 19 nt, Homo sapiens
  misc_RNA (1)...(19): siRNA sense strand
gcuuuaccuucuucuugga

SEQ ID NO: 971446 - RNA, 19 nt, Homo sapiens
  misc_RNA (1)...(19): siRNA sense strand
ucucccuccugguggauuu

SEQ ID NO: 971447 - RNA, 19 nt, Homo sapiens
  misc_RNA (1)...(19): siRNA sense strand
gaacuggacucgcugauga

SEQ ID NO: 971448 - RNA, 19 nt, Homo sapiens
  misc_RNA (1)...(19): siRNA sense strand
ggacaugcccuuucuauga

SEQ ID NO: 971449 - RNA, 19 nt, Homo sapiens
  misc_RNA (1)...(19): siRNA sense strand
aaccagagcuccagucuua

SEQ ID NO: 971450 - RNA, 19 nt, Homo sapiens
  misc_RNA (1)...(19): siRNA sense strand
gcucaaaccuucugaaaca

SEQ ID NO: 971451 - RNA, 19 nt, Homo sapiens
  misc_RNA (1)...(19): siRNA sense strand
gaagaacuccugauuguga

SEQ ID NO: 971452 - RNA, 19 nt, Homo sapiens
  misc_RNA (1)...(19): siRNA sense strand
gagagaagcccuauaaaug

SEQ ID NO: 971453 - RNA, 19 nt, Homo sapiens
  misc_RNA (1)...(19): siRNA sense strand
gagagaagccguauaaaug

SEQ ID NO: 971454 - RNA, 19 nt, Homo sapiens
  misc_RNA (1)...(19): siRNA sense strand
caaugaagaugcugucaaa

SEQ ID NO: 971455 - RNA, 19 nt, Homo sapiens
  misc_RNA (1)...(19): siRNA sense strand
gagagaagcccuacaaaug

SEQ ID NO: 971456 - RNA, 19 nt, Homo sapiens
  misc_RNA (1)...(19): siRNA sense strand
gaagagaccaggcccuuaa

SEQ ID NO: 971457 - RNA, 19 nt, Homo sapiens
  misc_RNA (1)...(19): siRNA sense strand
ggagaaacuuuaugagugu

SEQ ID NO: 971458 - RNA, 19 nt, Homo sapiens
  misc_RNA (1)...(19): siRNA sense strand
uaagagcucugcccucauu

SEQ ID NO: 971459 - RNA, 19 nt, Homo sapiens
  misc_RNA (1)...(19): siRNA sense strand
gagagaagccguauaagug

SEQ ID NO: 971460 - RNA, 19 nt, Homo sapiens
  misc_RNA (1)...(19): siRNA sense strand
caacaacaguucccacuuc

SEQ ID NO: 971461 - RNA, 19 nt, Homo sapiens
  misc_RNA (1)...(19): siRNA sense strand
gcauugaccuggagggauu

SEQ ID NO: 971462 - RNA, 19 nt, Homo sapiens
  misc_RNA (1)...(19): siRNA sense strand
gggaaaagcuucaguaaga

SEQ ID NO: 971463 - RNA, 19 nt, Homo sapiens
  misc_RNA (1)...(19): siRNA sense strand
ggagaaacccuacaagugu

SEQ ID NO: 971464 - RNA, 19 nt, Homo sapiens
  misc_RNA (1)...(19): siRNA sense strand
agaaggagcucuguaaaga

SEQ ID NO: 971465 - RNA, 19 nt, Homo sapiens
  misc_RNA (1)...(19): siRNA sense strand
guucuaaccucauuacuca

SEQ ID NO: 971466 - RNA, 19 nt, Homo sapiens
  misc_RNA (1)...(19): siRNA sense strand
ggagagaagcccuauaaau

SEQ ID NO: 971467 - RNA, 19 nt, Homo sapiens
  misc_RNA (1)...(19): siRNA sense strand
ggagagaagccguauaaau

SEQ ID NO: 971468 - RNA, 19 nt, Homo sapiens
  misc_RNA (1)...(19): siRNA sense strand
gcaaagacuucaacaacag

SEQ ID NO: 971469 - RNA, 19 nt, Homo sapiens
  misc_RNA (1)...(19): siRNA sense strand
ggagagaaaccauaugaau

SEQ ID NO: 971470 - RNA, 19 nt, Homo sapiens
  misc_RNA (1)...(19): siRNA sense strand
gcccugaccuucccaauca

SEQ ID NO: 971471 - RNA, 19 nt, Homo sapiens
  misc_RNA (1)...(19): siRNA sense strand
agagacagcuccugaacaa

SEQ ID NO: 971472 - RNA, 19 nt, Homo sapiens
  misc_RNA (1)...(19): siRNA sense strand
gggcugggauccugaagaa

SEQ ID NO: 971473 - RNA, 19 nt, Homo sapiens
  misc_RNA (1)...(19): siRNA sense strand
gcuccaagcucaucacaca

SEQ ID NO: 971474 - RNA, 19 nt, Homo sapiens
  misc_RNA (1)...(19): siRNA sense strand
gagcuccagucuuauuauu

SEQ ID NO: 971475 - RNA, 19 nt, Homo sapiens
  misc_RNA (1)...(19): siRNA sense strand
gcaaacaugcugagaagga

SEQ ID NO: 971476 - RNA, 19 nt, Homo sapiens
  misc_RNA (1)...(19): siRNA sense strand
gaacaaccucaaaguauca

SEQ ID NO: 971477 - RNA, 19 nt, Homo sapiens
  misc_RNA (1)...(19): siRNA sense strand
gcucugcccucauuaguca

SEQ ID NO: 971478 - RNA, 19 nt, Homo sapiens
  misc_RNA (1)...(19): siRNA sense strand
gugagaagcccuacaaaug

SEQ ID NO: 971479 - RNA, 19 nt, Homo sapiens
  misc_RNA (1)...(19): siRNA sense strand
gagagaaaccauaugaaug

SEQ ID NO: 971480 - RNA, 19 nt, Homo sapiens
  misc_RNA (1)...(19): siRNA sense strand
ggguuugccuggagccuua

SEQ ID NO: 971481 - RNA, 19 nt, Homo sapiens
  misc_RNA (1)...(19): siRNA sense strand
gcuccagucuuauuauuca

SEQ ID NO: 971482 - RNA, 19 nt, Homo sapiens
  misc_RNA (1)...(19): siRNA sense strand
ggagagaagccguauaagu

SEQ ID NO: 971483 - RNA, 19 nt, Homo sapiens
  misc_RNA (1)...(19): siRNA sense strand
ggagagaagcccuacaaau

SEQ ID NO: 971484 - RNA, 19 nt, Homo sapiens
  misc_RNA (1)...(19): siRNA sense strand
gaaaagcccuauaaaugug

SEQ ID NO: 971485 - RNA, 19 nt, Homo sapiens
  misc_RNA (1)...(19): siRNA sense strand
ggcaaagacuucaacaaca

SEQ ID NO: 971486 - RNA, 19 nt, Homo sapiens
  misc_RNA (1)...(19): siRNA sense strand
cuauaaauguggagaaugu

SEQ ID NO: 971487 - RNA, 19 nt, Homo sapiens
  misc_RNA (1)...(19): siRNA sense strand
cugaagaacuccugauugu

SEQ ID NO: 971488 - RNA, 19 nt, Homo sapiens
  misc_RNA (1)...(19): siRNA sense strand
gagaagccguauaaaugug

SEQ ID NO: 971489 - RNA, 19 nt, Homo sapiens
  misc_RNA (1)...(19): siRNA sense strand
gagugaaucuccuuucucu

SEQ ID NO: 971490 - RNA, 19 nt, Homo sapiens
  misc_RNA (1)...(19): siRNA sense strand
ggaauugcauacagaagag

SEQ ID NO: 971491 - RNA, 19 nt, Homo sapiens
  misc_RNA (1)...(19): siRNA sense strand
ggacuggaauugcauacag

SEQ ID NO: 971492 - RNA, 19 nt, Homo sapiens
  misc_RNA (1)...(19): siRNA sense strand
gcagauuacagccuggaua

SEQ ID NO: 971493 - RNA, 19 nt, Homo sapiens
  misc_RNA (1)...(19): siRNA sense strand
cuacaaaugccuugaaugu

SEQ ID NO: 971494 - RNA, 19 nt, Homo sapiens
  misc_RNA (1)...(19): siRNA sense strand
caggaacaguggcaagaaa

SEQ ID NO: 971495 - RNA, 19 nt, Homo sapiens
  misc_RNA (1)...(19): siRNA sense strand
gugaaucuccuuucucuga

SEQ ID NO: 971496 - RNA, 19 nt, Homo sapiens
  misc_RNA (1)...(19): siRNA sense strand
gagcucaaaccuucugaaa

SEQ ID NO: 971497 - RNA, 19 nt, Homo sapiens
  misc_RNA (1)...(19): siRNA sense strand
gggagaaacccuacaagug

SEQ ID NO: 971498 - RNA, 19 nt, Homo sapiens
  misc_RNA (1)...(19): siRNA sense strand
ugaacaaccucaaaguauc

SEQ ID NO: 971499 - RNA, 19 nt, Homo sapiens
  misc_RNA (1)...(19): siRNA sense strand
caaguaauaccuccgagaa

SEQ ID NO: 971500 - RNA, 19 nt, Homo sapiens
  misc_RNA (1)...(19): siRNA sense strand
gggaaaagcccuauaaaug

SEQ ID NO: 971501 - RNA, 19 nt, Homo sapiens
  misc_RNA (1)...(19): siRNA sense strand
aaaggagcacugcagauua

SEQ ID NO: 971502 - RNA, 19 nt, Homo sapiens
  misc_RNA (1)...(19): siRNA sense strand
gugcuggccuggucaaugu

SEQ ID NO: 971503 - RNA, 19 nt, Homo sapiens
  misc_RNA (1)...(19): siRNA sense strand
ggaaaagcccuauaaaugu

SEQ ID NO: 971504 - RNA, 19 nt, Homo sapiens
  misc_RNA (1)...(19): siRNA sense strand
gaacaguggcaagaaaguu

SEQ ID NO: 971505 - RNA, 19 nt, Homo sapiens
  misc_RNA (1)...(19): siRNA sense strand
cugaagaaauggcagaaga

SEQ ID NO: 971506 - RNA, 19 nt, Homo sapiens
  misc_RNA (1)...(19): siRNA sense strand
guauaaauguguggacugu

SEQ ID NO: 971507 - RNA, 19 nt, Homo sapiens
  misc_RNA (1)...(19): siRNA sense strand
ggagcagugucgcuacaga

SEQ ID NO: 971508 - RNA, 19 nt, Homo sapiens
  misc_RNA (1)...(19): siRNA sense strand
agagaaaccauaugaaugu

SEQ ID NO: 971509 - RNA, 19 nt, Homo sapiens
  misc_RNA (1)...(19): siRNA sense strand
caaaccuucugaaacauca

SEQ ID NO: 971510 - RNA, 19 nt, Homo sapiens
  misc_RNA (1)...(19): siRNA sense strand
acacaugcaugaagagcuu

SEQ ID NO: 971511 - RNA, 19 nt, Homo sapiens
  misc_RNA (1)...(19): siRNA sense strand
gagaaggagcucuguaaag

SEQ ID NO: 971512 - RNA, 19 nt, Homo sapiens
  misc_RNA (1)...(19): siRNA sense strand
cgggagagaagccguauaa

SEQ ID NO: 971513 - RNA, 19 nt, Homo sapiens
  misc_RNA (1)...(19): siRNA sense strand
gagccugggaggaacaaua

SEQ ID NO: 971514 - RNA, 19 nt, Homo sapiens
  misc_RNA (1)...(19): siRNA sense strand
cagauuacagccuggauaa

SEQ ID NO: 971515 - RNA, 19 nt, Homo sapiens
  misc_RNA (1)...(19): siRNA sense strand
gacaugcccuuucuaugag

SEQ ID NO: 971516 - RNA, 19 nt, Homo sapiens
  misc_RNA (1)...(19): siRNA sense strand
gagaccaggcccuuaaaga

SEQ ID NO: 971517 - RNA, 19 nt, Homo sapiens
  misc_RNA (1)...(19): siRNA sense strand
ggagacgacugugggaaca

SEQ ID NO: 971518 - RNA, 19 nt, Homo sapiens
  misc_RNA (1)...(19): siRNA sense strand
cuacaaaugccuugagugu

SEQ ID NO: 971519 - RNA, 19 nt, Homo sapiens
  misc_RNA (1)...(19): siRNA sense strand
gagaaaccauaugaaugug

SEQ ID NO: 971520 - RNA, 19 nt, Homo sapiens
  misc_RNA (1)...(19): siRNA sense strand
ccucauuagucaccaaaga

SEQ ID NO: 971521 - RNA, 19 nt, Homo sapiens
  misc_RNA (1)...(19): siRNA sense strand
ucaguaaggacuugaauuc

SEQ ID NO: 971522 - RNA, 19 nt, Homo sapiens
  misc_RNA (1)...(19): siRNA sense strand
ggagcaaugucgcuauagg

SEQ ID NO: 971523 - RNA, 19 nt, Homo sapiens
  misc_RNA (1)...(19): siRNA sense strand
ccagagcuccagucuuauu

SEQ ID NO: 971524 - RNA, 19 nt, Homo sapiens
  misc_RNA (1)...(19): siRNA sense strand
gcagagagugugggaaaug

SEQ ID NO: 971525 - RNA, 19 nt, Homo sapiens
  misc_RNA (1)...(19): siRNA sense strand
gagcaguuccugacaaucu

SEQ ID NO: 971526 - RNA, 19 nt, Homo sapiens
  misc_RNA (1)...(19): siRNA sense strand
caaccucaaaguaucagua

SEQ ID NO: 971527 - RNA, 19 nt, Homo sapiens
  misc_RNA (1)...(19): siRNA sense strand
auucuaaucucaucacuca

SEQ ID NO: 971528 - RNA, 19 nt, Homo sapiens
  misc_RNA (1)...(19): siRNA sense strand
agaaauggcagaagacugu

SEQ ID NO: 971529 - RNA, 19 nt, Homo sapiens
  misc_RNA (1)...(19): siRNA sense strand
gaauacaugcccugaccuu

SEQ ID NO: 971530 - RNA, 19 nt, Homo sapiens
  misc_RNA (1)...(19): siRNA sense strand
gcugggauccugaagaaau

SEQ ID NO: 971531 - RNA, 19 nt, Homo sapiens
  misc_RNA (1)...(19): siRNA sense strand
guaauaccuccgagaaaga

SEQ ID NO: 971532 - RNA, 19 nt, Homo sapiens
  misc_RNA (1)...(19): siRNA sense strand
caacaguucccacuucagu

SEQ ID NO: 971533 - RNA, 19 nt, Homo sapiens
  misc_RNA (1)...(19): siRNA sense strand
gcucaucacacaccagaga

SEQ ID NO: 971534 - RNA, 19 nt, Homo sapiens
  misc_RNA (1)...(19): siRNA sense strand
gaagagacagcuccugaac

SEQ ID NO: 971535 - RNA, 19 nt, Homo sapiens
  misc_RNA (1)...(19): siRNA sense strand
gagaagacagugaaaauga

SEQ ID NO: 971536 - RNA, 19 nt, Homo sapiens
  misc_RNA (1)...(19): siRNA sense strand
agacauggguuuugaaaug

SEQ ID NO: 971537 - RNA, 19 nt, Homo sapiens
  misc_RNA (1)...(19): siRNA sense strand
ccagguauaucgggccauu

SEQ ID NO: 971538 - RNA, 19 nt, Homo sapiens
  misc_RNA (1)...(19): siRNA sense strand
agucggagcucccacuuca

SEQ ID NO: 971539 - RNA, 19 nt, Homo sapiens
  misc_RNA (1)...(19): siRNA sense strand
gccuguaccuugcggagaa

SEQ ID NO: 971540 - RNA, 19 nt, Homo sapiens
  misc_RNA (1)...(19): siRNA sense strand
gaggaugaagaccagauuu

SEQ ID NO: 971541 - RNA, 19 nt, Homo sapiens
  misc_RNA (1)...(19): siRNA sense strand
cagagcuccagucuuauua

SEQ ID NO: 971542 - RNA, 19 nt, Homo sapiens
  misc_RNA (1)...(19): siRNA sense strand
gugcagagagugugggaaa

SEQ ID NO: 971543 - RNA, 19 nt, Homo sapiens
  misc_RNA (1)...(19): siRNA sense strand
gaccaggcccuuaaagaca

SEQ ID NO: 971544 - RNA, 19 nt, Homo sapiens
  misc_RNA (1)...(19): siRNA sense strand
ggugagaagcccuacaaau

SEQ ID NO: 971545 - RNA, 19 nt, Homo sapiens
  misc_RNA (1)...(19): siRNA sense strand
gaagaugcugucaaaccuu

SEQ ID NO: 971546 - RNA, 19 nt, Homo sapiens
  misc_RNA (1)...(19): siRNA sense strand
ccugaacaaccucaaagua

SEQ ID NO: 971547 - RNA, 19 nt, Homo sapiens
  misc_RNA (1)...(19): siRNA sense strand
ugacagagcccgagcaaag

SEQ ID NO: 971548 - RNA, 19 nt, Homo sapiens
  misc_RNA (1)...(19): siRNA sense strand
aaagagagcucaaaaccaa

SEQ ID NO: 971549 - RNA, 19 nt, Homo sapiens
  misc_RNA (1)...(19): siRNA sense strand
ccacucgacuucugaacug

SEQ ID NO: 971550 - RNA, 19 nt, Homo sapiens
  misc_RNA (1)...(19): siRNA sense strand
ccacaugccaggacagaga

SEQ ID NO: 971551 - RNA, 19 nt, Homo sapiens
  misc_RNA (1)...(19): siRNA sense strand
auuggaggcugaaauugua

SEQ ID NO: 971552 - RNA, 19 nt, Homo sapiens
  misc_RNA (1)...(19): siRNA sense strand
agagcuggcuugauguuca

SEQ ID NO: 971553 - RNA, 19 nt, Homo sapiens
  misc_RNA (1)...(19): siRNA sense strand
acaaucaaguccaaagucu

SEQ ID NO: 971554 - RNA, 19 nt, Homo sapiens
  misc_RNA (1)...(19): siRNA sense strand
cuucugaacuggaggaucu

SEQ ID NO: 971555 - RNA, 19 nt, Homo sapiens
  misc_RNA (1)...(19): siRNA sense strand
gaaucccacucgacuucug

SEQ ID NO: 971556 - RNA, 19 nt, Homo sapiens
  misc_RNA (1)...(19): siRNA sense strand
guacuagcagccaaagaga

SEQ ID NO: 971557 - RNA, 19 nt, Homo sapiens
  misc_RNA (1)...(19): siRNA sense strand
cagcugcucuguccaccau

SEQ ID NO: 971558 - RNA, 19 nt, Homo sapiens
  misc_RNA (1)...(19): siRNA sense strand
gcacucucaucugcaggaa

SEQ ID NO: 971559 - RNA, 19 nt, Homo sapiens
  misc_RNA (1)...(19): siRNA sense strand
gacagagcccgagcaaaga

SEQ ID NO: 971560 - RNA, 19 nt, Homo sapiens
  misc_RNA (1)...(19): siRNA sense strand
gacaaucaaguccaaaguc

SEQ ID NO: 971561 - RNA, 19 nt, Homo sapiens
  misc_RNA (1)...(19): siRNA sense strand
aaucaaguccaaagucuca

SEQ ID NO: 971562 - RNA, 19 nt, Homo sapiens
  misc_RNA (1)...(19): siRNA sense strand
ccacguacuagcagccaaa

SEQ ID NO: 971563 - RNA, 19 nt, Homo sapiens
  misc_RNA (1)...(19): siRNA sense strand
cuccaacaccuaugugaaa

SEQ ID NO: 971564 - RNA, 19 nt, Homo sapiens
  misc_RNA (1)...(19): siRNA sense strand
aaccaaacucacuaaauug

SEQ ID NO: 971565 - RNA, 19 nt, Homo sapiens
  misc_RNA (1)...(19): siRNA sense strand
gagcuggcuugauguucag

SEQ ID NO: 971566 - RNA, 19 nt, Homo sapiens
  misc_RNA (1)...(19): siRNA sense strand
ugguagggcugagacagaa

SEQ ID NO: 971567 - RNA, 19 nt, Homo sapiens
  misc_RNA (1)...(19): siRNA sense strand
cuaaauuggaggcugaaau

SEQ ID NO: 971568 - RNA, 19 nt, Homo sapiens
  misc_RNA (1)...(19): siRNA sense strand
guggggaacucaagaggaa

SEQ ID NO: 971569 - RNA, 19 nt, Homo sapiens
  misc_RNA (1)...(19): siRNA sense strand
gcuguaaccucuucaucua

SEQ ID NO: 971570 - RNA, 19 nt, Homo sapiens
  misc_RNA (1)...(19): siRNA sense strand
ccgacacgcucuacaauaa

SEQ ID NO: 971571 - RNA, 19 nt, Homo sapiens
  misc_RNA (1)...(19): siRNA sense strand
gagcaaguguuuuggguuu

SEQ ID NO: 971572 - RNA, 19 nt, Homo sapiens
  misc_RNA (1)...(19): siRNA sense strand
gagccguugucucugcuaa

SEQ ID NO: 971573 - RNA, 19 nt, Homo sapiens
  misc_RNA (1)...(19): siRNA sense strand
gcugugccuuugugaaguu

SEQ ID NO: 971574 - RNA, 19 nt, Homo sapiens
  misc_RNA (1)...(19): siRNA sense strand
ccaaccagagcaaguguuu

SEQ ID NO: 971575 - RNA, 19 nt, Homo sapiens
  misc_RNA (1)...(19): siRNA sense strand
gcucaccggccuccacaaa

SEQ ID NO: 971576 - RNA, 19 nt, Homo sapiens
  misc_RNA (1)...(19): siRNA sense strand
ccacuacgcagcagccuau

SEQ ID NO: 971577 - RNA, 19 nt, Homo sapiens
  misc_RNA (1)...(19): siRNA sense strand
gcucaaggcccagcuaaag

SEQ ID NO: 971578 - RNA, 19 nt, Homo sapiens
  misc_RNA (1)...(19): siRNA sense strand
agacauuccugcccuuugg

SEQ ID NO: 971579 - RNA, 19 nt, Homo sapiens
  misc_RNA (1)...(19): siRNA sense strand
gagaggaccgaaagcuguu

SEQ ID NO: 971580 - RNA, 19 nt, Homo sapiens
  misc_RNA (1)...(19): siRNA sense strand
gcugugccuuccucaccua

SEQ ID NO: 971581 - RNA, 19 nt, Homo sapiens
  misc_RNA (1)...(19): siRNA sense strand
ggaccacgacgccaucaag

SEQ ID NO: 971582 - RNA, 19 nt, Homo sapiens
  misc_RNA (1)...(19): siRNA sense strand
uguaaccucuucaucuauc

SEQ ID NO: 971583 - RNA, 19 nt, Homo sapiens
  misc_RNA (1)...(19): siRNA sense strand
acgcugggaugcaccacua

SEQ ID NO: 971584 - RNA, 19 nt, Homo sapiens
  misc_RNA (1)...(19): siRNA sense strand
ucaccggccuccacaaagg

SEQ ID NO: 971585 - RNA, 19 nt, Homo sapiens
  misc_RNA (1)...(19): siRNA sense strand
guaaccucuucaucuauca

SEQ ID NO: 971586 - RNA, 19 nt, Homo sapiens
  misc_RNA (1)...(19): siRNA sense strand
ccucaggaguuuggugaug

SEQ ID NO: 971587 - RNA, 19 nt, Homo sapiens
  misc_RNA (1)...(19): siRNA sense strand
gcuccgacacgcucuacaa

SEQ ID NO: 971588 - RNA, 19 nt, Homo sapiens
  misc_RNA (1)...(19): siRNA sense strand
auaacgggcucuccccuua

SEQ ID NO: 971589 - RNA, 19 nt, Homo sapiens
  misc_RNA (1)...(19): siRNA sense strand
gaacucauacagacauucc

SEQ ID NO: 971590 - RNA, 19 nt, Homo sapiens
  misc_RNA (1)...(19): siRNA sense strand
ggacgagcaggaccucaag

SEQ ID NO: 971591 - RNA, 19 nt, Homo sapiens
  misc_RNA (1)...(19): siRNA sense strand
gccguugucucugcuaaag

SEQ ID NO: 971592 - RNA, 19 nt, Homo sapiens
  misc_RNA (1)...(19): siRNA sense strand
gaugcggaacucauacaga

SEQ ID NO: 971593 - RNA, 19 nt, Homo sapiens
  misc_RNA (1)...(19): siRNA sense strand
cguugucucugcuaaaguc

SEQ ID NO: 971594 - RNA, 19 nt, Homo sapiens
  misc_RNA (1)...(19): siRNA sense strand
guccugacggcaccaguaa

SEQ ID NO: 971595 - RNA, 19 nt, Homo sapiens
  misc_RNA (1)...(19): siRNA sense strand
cggaacucauacagacauu

SEQ ID NO: 971596 - RNA, 19 nt, Homo sapiens
  misc_RNA (1)...(19): siRNA sense strand
gacacgcucuacaauaacg

SEQ ID NO: 971597 - RNA, 19 nt, Homo sapiens
  misc_RNA (1)...(19): siRNA sense strand
ccgggacucugcucucaag

SEQ ID NO: 971598 - RNA, 19 nt, Homo sapiens
  misc_RNA (1)...(19): siRNA sense strand
gguagcugcgccucuguug

SEQ ID NO: 971599 - RNA, 19 nt, Homo sapiens
  misc_RNA (1)...(19): siRNA sense strand
ugaagccagcugccaguga

SEQ ID NO: 971600 - RNA, 19 nt, Homo sapiens
  misc_RNA (1)...(19): siRNA sense strand
ggaccgaaagcuguuugug

SEQ ID NO: 971601 - RNA, 19 nt, Homo sapiens
  misc_RNA (1)...(19): siRNA sense strand
gcagauauauuaccaaaga

SEQ ID NO: 971602 - RNA, 19 nt, Homo sapiens
  misc_RNA (1)...(19): siRNA sense strand
ccacggagcucuuuguuca

SEQ ID NO: 971603 - RNA, 19 nt, Homo sapiens
  misc_RNA (1)...(19): siRNA sense strand
ggaagaagaugaggagaau

SEQ ID NO: 971604 - RNA, 19 nt, Homo sapiens
  misc_RNA (1)...(19): siRNA sense strand
ugaugaagcugacuccuaa

SEQ ID NO: 971605 - RNA, 19 nt, Homo sapiens
  misc_RNA (1)...(19): siRNA sense strand
gcacagcaaucagaaacuu

SEQ ID NO: 971606 - RNA, 19 nt, Homo sapiens
  misc_RNA (1)...(19): siRNA sense strand
gaaaaugcuuaaagaggaa

SEQ ID NO: 971607 - RNA, 19 nt, Homo sapiens
  misc_RNA (1)...(19): siRNA sense strand
gaggagaaugacaaugaua

SEQ ID NO: 971608 - RNA, 19 nt, Homo sapiens
  misc_RNA (1)...(19): siRNA sense strand
ucaguuucuugcagauaua

SEQ ID NO: 971609 - RNA, 19 nt, Homo sapiens
  misc_RNA (1)...(19): siRNA sense strand
gggaagaagaugaggagaa

SEQ ID NO: 971610 - RNA, 19 nt, Homo sapiens
  misc_RNA (1)...(19): siRNA sense strand
aagaagaugaggagaauga

SEQ ID NO: 971611 - RNA, 19 nt, Homo sapiens
  misc_RNA (1)...(19): siRNA sense strand
gagaaugacaaugauaaug

SEQ ID NO: 971612 - RNA, 19 nt, Homo sapiens
  misc_RNA (1)...(19): siRNA sense strand
ggagaaugacaaugauaau

SEQ ID NO: 971613 - RNA, 19 nt, Homo sapiens
  misc_RNA (1)...(19): siRNA sense strand
guaaauaccugaaaaugcu

SEQ ID NO: 971614 - RNA, 19 nt, Homo sapiens
  misc_RNA (1)...(19): siRNA sense strand
acacggcaguggaaaggaa

SEQ ID NO: 971615 - RNA, 19 nt, Homo sapiens
  misc_RNA (1)...(19): siRNA sense strand
ggucguggguaaagacaag

SEQ ID NO: 971616 - RNA, 19 nt, Homo sapiens
  misc_RNA (1)...(19): siRNA sense strand
gcuaguaaauaccugaaaa

SEQ ID NO: 971617 - RNA, 19 nt, Homo sapiens
  misc_RNA (1)...(19): siRNA sense strand
gaagaugaggagaaugaca

SEQ ID NO: 971618 - RNA, 19 nt, Homo sapiens
  misc_RNA (1)...(19): siRNA sense strand
ugaggagaaugacaaugau

SEQ ID NO: 971619 - RNA, 19 nt, Homo sapiens
  misc_RNA (1)...(19): siRNA sense strand
uuacagugauuuagcaaac

SEQ ID NO: 971620 - RNA, 19 nt, Homo sapiens
  misc_RNA (1)...(19): siRNA sense strand
ggagcucuuuguucaaugc

SEQ ID NO: 971621 - RNA, 19 nt, Homo sapiens
  misc_RNA (1)...(19): siRNA sense strand
gcaaacacugcacagcaau

SEQ ID NO: 971622 - RNA, 19 nt, Homo sapiens
  misc_RNA (1)...(19): siRNA sense strand
ggacguggucguggguaaa

SEQ ID NO: 971623 - RNA, 19 nt, Homo sapiens
  misc_RNA (1)...(19): siRNA sense strand
gacuuacagugauuuagca

SEQ ID NO: 971624 - RNA, 19 nt, Homo sapiens
  misc_RNA (1)...(19): siRNA sense strand
aggagaaugacaaugauaa

SEQ ID NO: 971625 - RNA, 19 nt, Homo sapiens
  misc_RNA (1)...(19): siRNA sense strand
ccaaagaagauuuuagcua

SEQ ID NO: 971626 - RNA, 19 nt, Homo sapiens
  misc_RNA (1)...(19): siRNA sense strand
agcaaacacugcacagcaa

SEQ ID NO: 971627 - RNA, 19 nt, Homo sapiens
  misc_RNA (1)...(19): siRNA sense strand
gaaaagagggaagaagaug

SEQ ID NO: 971628 - RNA, 19 nt, Homo sapiens
  misc_RNA (1)...(19): siRNA sense strand
acacugcacagcaaucaga

SEQ ID NO: 971629 - RNA, 19 nt, Homo sapiens
  misc_RNA (1)...(19): siRNA sense strand
augaggagaaugacaauga

SEQ ID NO: 971630 - RNA, 19 nt, Homo sapiens
  misc_RNA (1)...(19): siRNA sense strand
cggacguggucguggguaa

SEQ ID NO: 971631 - RNA, 19 nt, Homo sapiens
  misc_RNA (1)...(19): siRNA sense strand
ucaucucgcugccucuauc

SEQ ID NO: 971632 - RNA, 19 nt, Homo sapiens
  misc_RNA (1)...(19): siRNA sense strand
aagaugaggagaaugacaa

SEQ ID NO: 971633 - RNA, 19 nt, Homo sapiens
  misc_RNA (1)...(19): siRNA sense strand
caaggccacggagcucuuu

SEQ ID NO: 971634 - RNA, 19 nt, Homo sapiens
  misc_RNA (1)...(19): siRNA sense strand
uucaaugccuagccaccua

SEQ ID NO: 971635 - RNA, 19 nt, Homo sapiens
  misc_RNA (1)...(19): siRNA sense strand
aaacacugcacagcaauca

SEQ ID NO: 971636 - RNA, 19 nt, Homo sapiens
  misc_RNA (1)...(19): siRNA sense strand
gcucaucucgcugccucua

SEQ ID NO: 971637 - RNA, 19 nt, Homo sapiens
  misc_RNA (1)...(19): siRNA sense strand
gaagaagaugaggagaaug

SEQ ID NO: 971638 - RNA, 19 nt, Homo sapiens
  misc_RNA (1)...(19): siRNA sense strand
uucaguuucuugcagauau

SEQ ID NO: 971639 - RNA, 19 nt, Homo sapiens
  misc_RNA (1)...(19): siRNA sense strand
acggagcucuuuguucaau

SEQ ID NO: 971640 - RNA, 19 nt, Homo sapiens
  misc_RNA (1)...(19): siRNA sense strand
ggaaaagagggaagaagau

SEQ ID NO: 971641 - RNA, 19 nt, Homo sapiens
  misc_RNA (1)...(19): siRNA sense strand
ccaccuauuccuacagaca

SEQ ID NO: 971642 - RNA, 19 nt, Homo sapiens
  misc_RNA (1)...(19): siRNA sense strand
gauuugaaguuccugaaua

SEQ ID NO: 971643 - RNA, 19 nt, Homo sapiens
  misc_RNA (1)...(19): siRNA sense strand
gaaagacgcucaggagaag

SEQ ID NO: 971644 - RNA, 19 nt, Homo sapiens
  misc_RNA (1)...(19): siRNA sense strand
ggagcgagcugcugguguu

SEQ ID NO: 971645 - RNA, 19 nt, Homo sapiens
  misc_RNA (1)...(19): siRNA sense strand
gcaacaaccugcucaucga

SEQ ID NO: 971646 - RNA, 19 nt, Homo sapiens
  misc_RNA (1)...(19): siRNA sense strand
gcaggugcauggucuucaa

SEQ ID NO: 971647 - RNA, 19 nt, Homo sapiens
  misc_RNA (1)...(19): siRNA sense strand
gcagaagaaggcacagauu

SEQ ID NO: 971648 - RNA, 19 nt, Homo sapiens
  misc_RNA (1)...(19): siRNA sense strand
ugaaagacgcucaggagaa

SEQ ID NO: 971649 - RNA, 19 nt, Homo sapiens
  misc_RNA (1)...(19): siRNA sense strand
caacgugccugagcucauc

SEQ ID NO: 971650 - RNA, 19 nt, Homo sapiens
  misc_RNA (1)...(19): siRNA sense strand
gcaugcaggccaaggagua

SEQ ID NO: 971651 - RNA, 19 nt, Homo sapiens
  misc_RNA (1)...(19): siRNA sense strand
gaguuugucugccucaagu

SEQ ID NO: 971652 - RNA, 19 nt, Homo sapiens
  misc_RNA (1)...(19): siRNA sense strand
gcacagauucgggccaaug

SEQ ID NO: 971653 - RNA, 19 nt, Homo sapiens
  misc_RNA (1)...(19): siRNA sense strand
cugaguacccggagccuua

SEQ ID NO: 971654 - RNA, 19 nt, Homo sapiens
  misc_RNA (1)...(19): siRNA sense strand
ugaaguuccugaauaacca

SEQ ID NO: 971655 - RNA, 19 nt, Homo sapiens
  misc_RNA (1)...(19): siRNA sense strand
cagaagaaggcacagauuc

SEQ ID NO: 971656 - RNA, 19 nt, Homo sapiens
  misc_RNA (1)...(19): siRNA sense strand
caacaaccugcucaucgaa

SEQ ID NO: 971657 - RNA, 19 nt, Homo sapiens
  misc_RNA (1)...(19): siRNA sense strand
gccgugccaucaagucuga

SEQ ID NO: 971658 - RNA, 19 nt, Homo sapiens
  misc_RNA (1)...(19): siRNA sense strand
gcugcaagaucgacaagac

SEQ ID NO: 971659 - RNA, 19 nt, Homo sapiens
  misc_RNA (1)...(19): siRNA sense strand
gcaccugggcaacgagaug

SEQ ID NO: 971660 - RNA, 19 nt, Homo sapiens
  misc_RNA (1)...(19): siRNA sense strand
cagccuggauuugaaguuc

SEQ ID NO: 971661 - RNA, 19 nt, Homo sapiens
  misc_RNA (1)...(19): siRNA sense strand
ggugcauggucuucaagga

SEQ ID NO: 971662 - RNA, 19 nt, Homo sapiens
  misc_RNA (1)...(19): siRNA sense strand
acaaccugcucaucgaaau

SEQ ID NO: 971663 - RNA, 19 nt, Homo sapiens
  misc_RNA (1)...(19): siRNA sense strand
gcgagcugcugguguucga

SEQ ID NO: 971664 - RNA, 19 nt, Homo sapiens
  misc_RNA (1)...(19): siRNA sense strand
ucaaguucaucauccucuu

SEQ ID NO: 971665 - RNA, 19 nt, Homo sapiens
  misc_RNA (1)...(19): siRNA sense strand
gagcugcaagggcuucuuc

SEQ ID NO: 971666 - RNA, 19 nt, Homo sapiens
  misc_RNA (1)...(19): siRNA sense strand
acaagcaccugggcaacga

SEQ ID NO: 971667 - RNA, 19 nt, Homo sapiens
  misc_RNA (1)...(19): siRNA sense strand
ggauuugaaguuccugaau

SEQ ID NO: 971668 - RNA, 19 nt, Homo sapiens
  misc_RNA (1)...(19): siRNA sense strand
cgcaagcgcugucccuucu

SEQ ID NO: 971669 - RNA, 19 nt, Homo sapiens
  misc_RNA (1)...(19): siRNA sense strand
gagguggccgaccagauga

SEQ ID NO: 971670 - RNA, 19 nt, Homo sapiens
  misc_RNA (1)...(19): siRNA sense strand
gcacugcggggacaaauuc

SEQ ID NO: 971671 - RNA, 19 nt, Homo sapiens
  misc_RNA (1)...(19): siRNA sense strand
gcccugaaacagcagaaga

SEQ ID NO: 971672 - RNA, 19 nt, Homo sapiens
  misc_RNA (1)...(19): siRNA sense strand
caaccugcucaucgaaaug

SEQ ID NO: 971673 - RNA, 19 nt, Homo sapiens
  misc_RNA (1)...(19): siRNA sense strand
gguguucgaccacaucuac

SEQ ID NO: 971674 - RNA, 19 nt, Homo sapiens
  misc_RNA (1)...(19): siRNA sense strand
ggccuccugugcagaaugg

SEQ ID NO: 971675 - RNA, 19 nt, Homo sapiens
  misc_RNA (1)...(19): siRNA sense strand
caaguucaucauccucuuc

SEQ ID NO: 971676 - RNA, 19 nt, Homo sapiens
  misc_RNA (1)...(19): siRNA sense strand
cuaccucuacccugccuuu

SEQ ID NO: 971677 - RNA, 19 nt, Homo sapiens
  misc_RNA (1)...(19): siRNA sense strand
gaauggccgaccagaccuu

SEQ ID NO: 971678 - RNA, 19 nt, Homo sapiens
  misc_RNA (1)...(19): siRNA sense strand
gaagcaauccucaccauuu

SEQ ID NO: 971679 - RNA, 19 nt, Homo sapiens
  misc_RNA (1)...(19): siRNA sense strand
agaagaagauguugaagug

SEQ ID NO: 971680 - RNA, 19 nt, Homo sapiens
  misc_RNA (1)...(19): siRNA sense strand
agaaaccucucacuuacga

SEQ ID NO: 971681 - RNA, 19 nt, Homo sapiens
  misc_RNA (1)...(19): siRNA sense strand
ccacuguguuugaccacua

SEQ ID NO: 971682 - RNA, 19 nt, Homo sapiens
  misc_RNA (1)...(19): siRNA sense strand
gagaagaagauguugaagu

SEQ ID NO: 971683 - RNA, 19 nt, Homo sapiens
  misc_RNA (1)...(19): siRNA sense strand
ucguaaacccugccucuua

SEQ ID NO: 971684 - RNA, 19 nt, Homo sapiens
  misc_RNA (1)...(19): siRNA sense strand
gaucugcuucucugucgua

SEQ ID NO: 971685 - RNA, 19 nt, Homo sapiens
  misc_RNA (1)...(19): siRNA sense strand
gcaacgacgagaagaagau

SEQ ID NO: 971686 - RNA, 19 nt, Homo sapiens
  misc_RNA (1)...(19): siRNA sense strand
gcaugccucacgugccuua

SEQ ID NO: 971687 - RNA, 19 nt, Homo sapiens
  misc_RNA (1)...(19): siRNA sense strand
aggaauacgugcccacugu

SEQ ID NO: 971688 - RNA, 19 nt, Homo sapiens
  misc_RNA (1)...(19): siRNA sense strand
ucauagggacccagauuga

SEQ ID NO: 971689 - RNA, 19 nt, Homo sapiens
  misc_RNA (1)...(19): siRNA sense strand
agaagauguugaagugugu

SEQ ID NO: 971690 - RNA, 19 nt, Homo sapiens
  misc_RNA (1)...(19): siRNA sense strand
gaauacgugcccacugugu

SEQ ID NO: 971691 - RNA, 19 nt, Homo sapiens
  misc_RNA (1)...(19): siRNA sense strand
gaagaagauguugaagugu

SEQ ID NO: 971692 - RNA, 19 nt, Homo sapiens
  misc_RNA (1)...(19): siRNA sense strand
aaaccugccugcugaugag

SEQ ID NO: 971693 - RNA, 19 nt, Homo sapiens
  misc_RNA (1)...(19): siRNA sense strand
ccucauagggacccagauu

SEQ ID NO: 971694 - RNA, 19 nt, Homo sapiens
  misc_RNA (1)...(19): siRNA sense strand
cccguuugcuguauaugaa

SEQ ID NO: 971695 - RNA, 19 nt, Homo sapiens
  misc_RNA (1)...(19): siRNA sense strand
uuacgagcauggugugaag

SEQ ID NO: 971696 - RNA, 19 nt, Homo sapiens
  misc_RNA (1)...(19): siRNA sense strand
aagcaauccucaccauuuu

SEQ ID NO: 971697 - RNA, 19 nt, Homo sapiens
  misc_RNA (1)...(19): siRNA sense strand
auacgugcccacuguguuu

SEQ ID NO: 971698 - RNA, 19 nt, Homo sapiens
  misc_RNA (1)...(19): siRNA sense strand
gacgagaagaagauguuga

SEQ ID NO: 971699 - RNA, 19 nt, Homo sapiens
  misc_RNA (1)...(19): siRNA sense strand
cugcuucucugucguaaac

SEQ ID NO: 971700 - RNA, 19 nt, Homo sapiens
  misc_RNA (1)...(19): siRNA sense strand
uuugaccacuaugcaguua

SEQ ID NO: 971701 - RNA, 19 nt, Homo sapiens
  misc_RNA (1)...(19): siRNA sense strand
gcccguuugcuguauauga

SEQ ID NO: 971702 - RNA, 19 nt, Homo sapiens
  misc_RNA (1)...(19): siRNA sense strand
gacaggaggacuacaacca

SEQ ID NO: 971703 - RNA, 19 nt, Homo sapiens
  misc_RNA (1)...(19): siRNA sense strand
ugaagcaauccucaccauu

SEQ ID NO: 971704 - RNA, 19 nt, Homo sapiens
  misc_RNA (1)...(19): siRNA sense strand
ugcuguauaugaaagagaa

SEQ ID NO: 971705 - RNA, 19 nt, Homo sapiens
  misc_RNA (1)...(19): siRNA sense strand
caacgacgagaagaagaug

SEQ ID NO: 971706 - RNA, 19 nt, Homo sapiens
  misc_RNA (1)...(19): siRNA sense strand
acgagaagaagauguugaa

SEQ ID NO: 971707 - RNA, 19 nt, Homo sapiens
  misc_RNA (1)...(19): siRNA sense strand
ugaccacuaugcaguuacu

SEQ ID NO: 971708 - RNA, 19 nt, Homo sapiens
  misc_RNA (1)...(19): siRNA sense strand
gggcaacgacgagaagaag

SEQ ID NO: 971709 - RNA, 19 nt, Homo sapiens
  misc_RNA (1)...(19): siRNA sense strand
ugccucacgugccuuaugu

SEQ ID NO: 971710 - RNA, 19 nt, Homo sapiens
  misc_RNA (1)...(19): siRNA sense strand
ucaccuacaugcacaucua

SEQ ID NO: 971711 - RNA, 19 nt, Homo sapiens
  misc_RNA (1)...(19): siRNA sense strand
gggacaaccugcaccagau

SEQ ID NO: 971712 - RNA, 19 nt, Homo sapiens
  misc_RNA (1)...(19): siRNA sense strand
ccagaucgacgccguggaa

SEQ ID NO: 971713 - RNA, 19 nt, Homo sapiens
  misc_RNA (1)...(19): siRNA sense strand
gccgggacugccacuauua

SEQ ID NO: 971714 - RNA, 19 nt, Homo sapiens
  misc_RNA (1)...(19): siRNA sense strand
ggacaaccugcaccagauc

SEQ ID NO: 971715 - RNA, 19 nt, Homo sapiens
  misc_RNA (1)...(19): siRNA sense strand
ccgagaaccugagcaagcu

SEQ ID NO: 971716 - RNA, 19 nt, Homo sapiens
  misc_RNA (1)...(19): siRNA sense strand
ugaagaagcugccggaacu

SEQ ID NO: 971717 - RNA, 19 nt, Homo sapiens
  misc_RNA (1)...(19): siRNA sense strand
ccauaaagaugaagaagcu

SEQ ID NO: 971718 - RNA, 19 nt, Homo sapiens
  misc_RNA (1)...(19): siRNA sense strand
cagcggcagugaagaaaga

SEQ ID NO: 971719 - RNA, 19 nt, Homo sapiens
  misc_RNA (1)...(19): siRNA sense strand
gccaggcgccucuccauaa

SEQ ID NO: 971720 - RNA, 19 nt, Homo sapiens
  misc_RNA (1)...(19): siRNA sense strand
ccaggcgccucuccauaaa

SEQ ID NO: 971721 - RNA, 19 nt, Homo sapiens
  misc_RNA (1)...(19): siRNA sense strand
cuccagaugucgcgccuua

SEQ ID NO: 971722 - RNA, 19 nt, Homo sapiens
  misc_RNA (1)...(19): siRNA sense strand
ccucaaggauuaucuucga

SEQ ID NO: 971723 - RNA, 19 nt, Homo sapiens
  misc_RNA (1)...(19): siRNA sense strand
gaagugcguugggcagauc

SEQ ID NO: 971724 - RNA, 19 nt, Homo sapiens
  misc_RNA (1)...(19): siRNA sense strand
gcaccugaaucucaaagac

SEQ ID NO: 971725 - RNA, 19 nt, Homo sapiens
  misc_RNA (1)...(19): siRNA sense strand
gcucagcggcagugaagaa

SEQ ID NO: 971726 - RNA, 19 nt, Homo sapiens
  misc_RNA (1)...(19): siRNA sense strand
ggauuaucuucgagaguug

SEQ ID NO: 971727 - RNA, 19 nt, Homo sapiens
  misc_RNA (1)...(19): siRNA sense strand
ggacuguaccgucuuugug

SEQ ID NO: 971728 - RNA, 19 nt, Homo sapiens
  misc_RNA (1)...(19): siRNA sense strand
aggauuaucuucgagaguu

SEQ ID NO: 971729 - RNA, 19 nt, Homo sapiens
  misc_RNA (1)...(19): siRNA sense strand
ccagugcaguggacuucaa

SEQ ID NO: 971730 - RNA, 19 nt, Homo sapiens
  misc_RNA (1)...(19): siRNA sense strand
gugggacuguaccgucuuu

SEQ ID NO: 971731 - RNA, 19 nt, Homo sapiens
  misc_RNA (1)...(19): siRNA sense strand
ggacuucaagcaccacauc

SEQ ID NO: 971732 - RNA, 19 nt, Homo sapiens
  misc_RNA (1)...(19): siRNA sense strand
cgauaucaaugucaucacu

SEQ ID NO: 971733 - RNA, 19 nt, Homo sapiens
  misc_RNA (1)...(19): siRNA sense strand
ucagcugccugccagaugu

SEQ ID NO: 971734 - RNA, 19 nt, Homo sapiens
  misc_RNA (1)...(19): siRNA sense strand
aggcgccucuccauaaaga

SEQ ID NO: 971735 - RNA, 19 nt, Homo sapiens
  misc_RNA (1)...(19): siRNA sense strand
ccgagccgcuacucaggaa

SEQ ID NO: 971736 - RNA, 19 nt, Homo sapiens
  misc_RNA (1)...(19): siRNA sense strand
ucacccagccccuguauaa

SEQ ID NO: 971737 - RNA, 19 nt, Homo sapiens
  misc_RNA (1)...(19): siRNA sense strand
ggaccucugcugccuacug

SEQ ID NO: 971738 - RNA, 19 nt, Homo sapiens
  misc_RNA (1)...(19): siRNA sense strand
agaugucgcgccuuacuug

SEQ ID NO: 971739 - RNA, 19 nt, Homo sapiens
  misc_RNA (1)...(19): siRNA sense strand
aaucaacgugugccucuga

SEQ ID NO: 971740 - RNA, 19 nt, Homo sapiens
  misc_RNA (1)...(19): siRNA sense strand
uccuggaucuggagagaga

SEQ ID NO: 971741 - RNA, 19 nt, Homo sapiens
  misc_RNA (1)...(19): siRNA sense strand
gcgccucuccauaaagaug

SEQ ID NO: 971742 - RNA, 19 nt, Homo sapiens
  misc_RNA (1)...(19): siRNA sense strand
gccucagccugcaccugua

SEQ ID NO: 971743 - RNA, 19 nt, Homo sapiens
  misc_RNA (1)...(19): siRNA sense strand
agacuucgacgcccucauc

SEQ ID NO: 971744 - RNA, 19 nt, Homo sapiens
  misc_RNA (1)...(19): siRNA sense strand
gaacagauccuggaagcua

SEQ ID NO: 971745 - RNA, 19 nt, Homo sapiens
  misc_RNA (1)...(19): siRNA sense strand
uagaagagcucauccuuuc

SEQ ID NO: 971746 - RNA, 19 nt, Homo sapiens
  misc_RNA (1)...(19): siRNA sense strand
gcaaauggcuacucugaac

SEQ ID NO: 971747 - RNA, 19 nt, Homo sapiens
  misc_RNA (1)...(19): siRNA sense strand
gaacauaccauccgagaca

SEQ ID NO: 971748 - RNA, 19 nt, Homo sapiens
  misc_RNA (1)...(19): siRNA sense strand
ggaaugaguucugaaaugg

SEQ ID NO: 971749 - RNA, 19 nt, Homo sapiens
  misc_RNA (1)...(19): siRNA sense strand
caggagagaugguagaaga

SEQ ID NO: 971750 - RNA, 19 nt, Homo sapiens
  misc_RNA (1)...(19): siRNA sense strand
gcaggugaauccaaucuuc

SEQ ID NO: 971751 - RNA, 19 nt, Homo sapiens
  misc_RNA (1)...(19): siRNA sense strand
gggauccgcucuacgugua

SEQ ID NO: 971752 - RNA, 19 nt, Homo sapiens
  misc_RNA (1)...(19): siRNA sense strand
cacaggcucuucugacuuu

SEQ ID NO: 971753 - RNA, 19 nt, Homo sapiens
  misc_RNA (1)...(19): siRNA sense strand
gggcugacaucaucaaagu

SEQ ID NO: 971754 - RNA, 19 nt, Homo sapiens
  misc_RNA (1)...(19): siRNA sense strand
uggcuacucugaacacuuu

SEQ ID NO: 971755 - RNA, 19 nt, Homo sapiens
  misc_RNA (1)...(19): siRNA sense strand
aaauggccaugaagaagua

SEQ ID NO: 971756 - RNA, 19 nt, Homo sapiens
  misc_RNA (1)...(19): siRNA sense strand
uacaagcucuucuauggaa

SEQ ID NO: 971757 - RNA, 19 nt, Homo sapiens
  misc_RNA (1)...(19): siRNA sense strand
gaaauggccaugaagaagu

SEQ ID NO: 971758 - RNA, 19 nt, Homo sapiens
  misc_RNA (1)...(19): siRNA sense strand
guucugaaauggccaugaa

SEQ ID NO: 971759 - RNA, 19 nt, Homo sapiens
  misc_RNA (1)...(19): siRNA sense strand
uggccaagguucucuguaa

SEQ ID NO: 971760 - RNA, 19 nt, Homo sapiens
  misc_RNA (1)...(19): siRNA sense strand
ggaacucaaagcagacaua

SEQ ID NO: 971761 - RNA, 19 nt, Homo sapiens
  misc_RNA (1)...(19): siRNA sense strand
ccucaaaggccacaucauu

SEQ ID NO: 971762 - RNA, 19 nt, Homo sapiens
  misc_RNA (1)...(19): siRNA sense strand
gaaacuggacuucaaggau

SEQ ID NO: 971763 - RNA, 19 nt, Homo sapiens
  misc_RNA (1)...(19): siRNA sense strand
guagaagagcucauccuuu

SEQ ID NO: 971764 - RNA, 19 nt, Homo sapiens
  misc_RNA (1)...(19): siRNA sense strand
gggcguggcugaguacaga

SEQ ID NO: 971765 - RNA, 19 nt, Homo sapiens
  misc_RNA (1)...(19): siRNA sense strand
uggaaugaguucugaaaug

SEQ ID NO: 971766 - RNA, 19 nt, Homo sapiens
  misc_RNA (1)...(19): siRNA sense strand
ccaagguucucuguaaguu

SEQ ID NO: 971767 - RNA, 19 nt, Homo sapiens
  misc_RNA (1)...(19): siRNA sense strand
caggagaacuaccuucauc

SEQ ID NO: 971768 - RNA, 19 nt, Homo sapiens
  misc_RNA (1)...(19): siRNA sense strand
cgagagggauggcaagaag

SEQ ID NO: 971769 - RNA, 19 nt, Homo sapiens
  misc_RNA (1)...(19): siRNA sense strand
ugacaacgaugugaaacug

SEQ ID NO: 971770 - RNA, 19 nt, Homo sapiens
  misc_RNA (1)...(19): siRNA sense strand
ggaaagacaguggaaguuc

SEQ ID NO: 971771 - RNA, 19 nt, Homo sapiens
  misc_RNA (1)...(19): siRNA sense strand
gaagagcucauccuuucug

SEQ ID NO: 971772 - RNA, 19 nt, Homo sapiens
  misc_RNA (1)...(19): siRNA sense strand
uaaguucucucucuucacu

SEQ ID NO: 971773 - RNA, 19 nt, Homo sapiens
  misc_RNA (1)...(19): siRNA sense strand
gcucuucuauggaaugagu

SEQ ID NO: 971774 - RNA, 19 nt, Homo sapiens
  misc_RNA (1)...(19): siRNA sense strand
aguacaagcucuucuaugg

SEQ ID NO: 971775 - RNA, 19 nt, Homo sapiens
  misc_RNA (1)...(19): siRNA sense strand
gggccaggcucugugugua

SEQ ID NO: 971776 - RNA, 19 nt, Homo sapiens
  misc_RNA (1)...(19): siRNA sense strand
cccaaacgcaguacccuua

SEQ ID NO: 971777 - RNA, 19 nt, Homo sapiens
  misc_RNA (1)...(19): siRNA sense strand
ucaaaggccacaucauuuc

SEQ ID NO: 971778 - RNA, 19 nt, Homo sapiens
  misc_RNA (1)...(19): siRNA sense strand
gcacaggcucuucugacuu

SEQ ID NO: 971779 - RNA, 19 nt, Homo sapiens
  misc_RNA (1)...(19): siRNA sense strand
agaguuugcuggccagaau

SEQ ID NO: 971780 - RNA, 19 nt, Homo sapiens
  misc_RNA (1)...(19): siRNA sense strand
ggagggauccgcucuacgu

SEQ ID NO: 971781 - RNA, 19 nt, Homo sapiens
  misc_RNA (1)...(19): siRNA sense strand
gguaacaggagagauggua

SEQ ID NO: 971782 - RNA, 19 nt, Homo sapiens
  misc_RNA (1)...(19): siRNA sense strand
cacaagauccuuuucauuu

SEQ ID NO: 971783 - RNA, 19 nt, Homo sapiens
  misc_RNA (1)...(19): siRNA sense strand
gguagaagagcucauccuu

SEQ ID NO: 971784 - RNA, 19 nt, Homo sapiens
  misc_RNA (1)...(19): siRNA sense strand
guacaagcucuucuaugga

SEQ ID NO: 971785 - RNA, 19 nt, Homo sapiens
  misc_RNA (1)...(19): siRNA sense strand
uguaaguucucucucuuca

SEQ ID NO: 971786 - RNA, 19 nt, Homo sapiens
  misc_RNA (1)...(19): siRNA sense strand
gggaaagacaguggaaguu

SEQ ID NO: 971787 - RNA, 19 nt, Homo sapiens
  misc_RNA (1)...(19): siRNA sense strand
caaaggccacaucauuuca

SEQ ID NO: 971788 - RNA, 19 nt, Homo sapiens
  misc_RNA (1)...(19): siRNA sense strand
agagggauggcaagaagua

SEQ ID NO: 971789 - RNA, 19 nt, Homo sapiens
  misc_RNA (1)...(19): siRNA sense strand
uaacaggagagaugguaga

SEQ ID NO: 971790 - RNA, 19 nt, Homo sapiens
  misc_RNA (1)...(19): siRNA sense strand
ccaaacgcaguacccuuaa

SEQ ID NO: 971791 - RNA, 19 nt, Homo sapiens
  misc_RNA (1)...(19): siRNA sense strand
caaacgcaguacccuuaag

SEQ ID NO: 971792 - RNA, 19 nt, Homo sapiens
  misc_RNA (1)...(19): siRNA sense strand
gagcugacuucgugaugcu

SEQ ID NO: 971793 - RNA, 19 nt, Homo sapiens
  misc_RNA (1)...(19): siRNA sense strand
uaagcacuauagccucguu

SEQ ID NO: 971794 - RNA, 19 nt, Homo sapiens
  misc_RNA (1)...(19): siRNA sense strand
gggauguggccaaggcuuu

SEQ ID NO: 971795 - RNA, 19 nt, Homo sapiens
  misc_RNA (1)...(19): siRNA sense strand
cucaaaggccacaucauuu

SEQ ID NO: 971796 - RNA, 19 nt, Homo sapiens
  misc_RNA (1)...(19): siRNA sense strand
ccacagcucagcgcaguga

SEQ ID NO: 971797 - RNA, 19 nt, Homo sapiens
  misc_RNA (1)...(19): siRNA sense strand
ggccaagguucucuguaag

SEQ ID NO: 971798 - RNA, 19 nt, Homo sapiens
  misc_RNA (1)...(19): siRNA sense strand
ucuauggaaugaguucuga

SEQ ID NO: 971799 - RNA, 19 nt, Homo sapiens
  misc_RNA (1)...(19): siRNA sense strand
gaacucaaagcagacauac

SEQ ID NO: 971800 - RNA, 19 nt, Homo sapiens
  misc_RNA (1)...(19): siRNA sense strand
uugagcagcuggaacagau

SEQ ID NO: 971801 - RNA, 19 nt, Homo sapiens
  misc_RNA (1)...(19): siRNA sense strand
uggcaaauggcuacucuga

SEQ ID NO: 971802 - RNA, 19 nt, Homo sapiens
  misc_RNA (1)...(19): siRNA sense strand
gaauugggccaggcucugu

SEQ ID NO: 971803 - RNA, 19 nt, Homo sapiens
  misc_RNA (1)...(19): siRNA sense strand
gcucuacguguaccuaugu

SEQ ID NO: 971804 - RNA, 19 nt, Homo sapiens
  misc_RNA (1)...(19): siRNA sense strand
uauggaaugaguucugaaa

SEQ ID NO: 971805 - RNA, 19 nt, Homo sapiens
  misc_RNA (1)...(19): siRNA sense strand
ggcacaggcucuucugacu

SEQ ID NO: 971806 - RNA, 19 nt, Homo sapiens
  misc_RNA (1)...(19): siRNA sense strand
cugccaauauggauacugu

SEQ ID NO: 971807 - RNA, 19 nt, Homo sapiens
  misc_RNA (1)...(19): siRNA sense strand
ugaaauggccaugaagaag

SEQ ID NO: 971808 - RNA, 19 nt, Homo sapiens
  misc_RNA (1)...(19): siRNA sense strand
gccuggauguggcaaaugg

SEQ ID NO: 971809 - RNA, 19 nt, Homo sapiens
  misc_RNA (1)...(19): siRNA sense strand
gcaggagaacuaccuucau

SEQ ID NO: 971810 - RNA, 19 nt, Homo sapiens
  misc_RNA (1)...(19): siRNA sense strand
ucuguaaguucucucucuu

SEQ ID NO: 971811 - RNA, 19 nt, Homo sapiens
  misc_RNA (1)...(19): siRNA sense strand
gggauggcaagaaguacaa

SEQ ID NO: 971812 - RNA, 19 nt, Homo sapiens
  misc_RNA (1)...(19): siRNA sense strand
acccuuaagucucgaagug

SEQ ID NO: 971813 - RNA, 19 nt, Homo sapiens
  misc_RNA (1)...(19): siRNA sense strand
gugauggagugugcagaug

SEQ ID NO: 971814 - RNA, 19 nt, Homo sapiens
  misc_RNA (1)...(19): siRNA sense strand
ggcagggaaugugguaaca

SEQ ID NO: 971815 - RNA, 19 nt, Homo sapiens
  misc_RNA (1)...(19): siRNA sense strand
cccagcaggugaauccaau

SEQ ID NO: 971816 - RNA, 19 nt, Homo sapiens
  misc_RNA (1)...(19): siRNA sense strand
cauccgagacauccuagga

SEQ ID NO: 971817 - RNA, 19 nt, Homo sapiens
  misc_RNA (1)...(19): siRNA sense strand
acucaaagcagacauacuc

SEQ ID NO: 971818 - RNA, 19 nt, Homo sapiens
  misc_RNA (1)...(19): siRNA sense strand
gauggagugugcagaugcu

SEQ ID NO: 971819 - RNA, 19 nt, Homo sapiens
  misc_RNA (1)...(19): siRNA sense strand
caucaucaaagugggaauu

SEQ ID NO: 971820 - RNA, 19 nt, Homo sapiens
  misc_RNA (1)...(19): siRNA sense strand
guauauaugccuggaugug

SEQ ID NO: 971821 - RNA, 19 nt, Homo sapiens
  misc_RNA (1)...(19): siRNA sense strand
aagguucucuguaaguucu

SEQ ID NO: 971822 - RNA, 19 nt, Homo sapiens
  misc_RNA (1)...(19): siRNA sense strand
cugaaauggccaugaagaa

SEQ ID NO: 971823 - RNA, 19 nt, Homo sapiens
  misc_RNA (1)...(19): siRNA sense strand
ggcaaauggcuacucugaa

SEQ ID NO: 971824 - RNA, 19 nt, Homo sapiens
  misc_RNA (1)...(19): siRNA sense strand
aacagauccuggaagcuau

SEQ ID NO: 971825 - RNA, 19 nt, Homo sapiens
  misc_RNA (1)...(19): siRNA sense strand
aaacgcaguacccuuaagu

SEQ ID NO: 971826 - RNA, 19 nt, Homo sapiens
  misc_RNA (1)...(19): siRNA sense strand
caucauggcagggaaugug

SEQ ID NO: 971827 - RNA, 19 nt, Homo sapiens
  misc_RNA (1)...(19): siRNA sense strand
caaauggcuacucugaaca

SEQ ID NO: 971828 - RNA, 19 nt, Homo sapiens
  misc_RNA (1)...(19): siRNA sense strand
gauacugugggcaccuuug

SEQ ID NO: 971829 - RNA, 19 nt, Homo sapiens
  misc_RNA (1)...(19): siRNA sense strand
caagcucuucuauggaaug

SEQ ID NO: 971830 - RNA, 19 nt, Homo sapiens
  misc_RNA (1)...(19): siRNA sense strand
acaagauccuuuucauuuc

SEQ ID NO: 971831 - RNA, 19 nt, Homo sapiens
  misc_RNA (1)...(19): siRNA sense strand
caacauguaugcuguaaau

SEQ ID NO: 971832 - RNA, 19 nt, Homo sapiens
  misc_RNA (1)...(19): siRNA sense strand
ggucaaggcugaugagaga

SEQ ID NO: 971833 - RNA, 19 nt, Homo sapiens
  misc_RNA (1)...(19): siRNA sense strand
gcaaugcucugcacuucuu

SEQ ID NO: 971834 - RNA, 19 nt, Homo sapiens
  misc_RNA (1)...(19): siRNA sense strand
gaaccagugucucccagaa

SEQ ID NO: 971835 - RNA, 19 nt, Homo sapiens
  misc_RNA (1)...(19): siRNA sense strand
gaagggagcugcguuucug

SEQ ID NO: 971836 - RNA, 19 nt, Homo sapiens
  misc_RNA (1)...(19): siRNA sense strand
gaagaagcgggaaggguuu

SEQ ID NO: 971837 - RNA, 19 nt, Homo sapiens
  misc_RNA (1)...(19): siRNA sense strand
uaucagcgcuacccggauu

SEQ ID NO: 971838 - RNA, 19 nt, Homo sapiens
  misc_RNA (1)...(19): siRNA sense strand
gcacuucuucuccaggaua

SEQ ID NO: 971839 - RNA, 19 nt, Homo sapiens
  misc_RNA (1)...(19): siRNA sense strand
ggaugaggccauucagaaa

SEQ ID NO: 971840 - RNA, 19 nt, Homo sapiens
  misc_RNA (1)...(19): siRNA sense strand
gugauucgcuacaguguca

SEQ ID NO: 971841 - RNA, 19 nt, Homo sapiens
  misc_RNA (1)...(19): siRNA sense strand
aagaggaggugcugaggaa

SEQ ID NO: 971842 - RNA, 19 nt, Homo sapiens
  misc_RNA (1)...(19): siRNA sense strand
gguuugagcuagucaugga

SEQ ID NO: 971843 - RNA, 19 nt, Homo sapiens
  misc_RNA (1)...(19): siRNA sense strand
gcaggagaguccagauuac

SEQ ID NO: 971844 - RNA, 19 nt, Homo sapiens
  misc_RNA (1)...(19): siRNA sense strand
ggaggcaauugcugaugug

SEQ ID NO: 971845 - RNA, 19 nt, Homo sapiens
  misc_RNA (1)...(19): siRNA sense strand
ggacaaguucuacgaugug

SEQ ID NO: 971846 - RNA, 19 nt, Homo sapiens
  misc_RNA (1)...(19): siRNA sense strand
gaguccagauuaccacgaa

SEQ ID NO: 971847 - RNA, 19 nt, Homo sapiens
  misc_RNA (1)...(19): siRNA sense strand
ucaaggagcgcauggugaa

SEQ ID NO: 971848 - RNA, 19 nt, Homo sapiens
  misc_RNA (1)...(19): siRNA sense strand
acgaaaggcugucaaaggu

SEQ ID NO: 971849 - RNA, 19 nt, Homo sapiens
  misc_RNA (1)...(19): siRNA sense strand
gggaaggguuugagcuagu

SEQ ID NO: 971850 - RNA, 19 nt, Homo sapiens
  misc_RNA (1)...(19): siRNA sense strand
cauguaugcuguaaaucug

SEQ ID NO: 971851 - RNA, 19 nt, Homo sapiens
  misc_RNA (1)...(19): siRNA sense strand
ucauggagccugaguuugu

SEQ ID NO: 971852 - RNA, 19 nt, Homo sapiens
  misc_RNA (1)...(19): siRNA sense strand
ggaaggguuugagcuaguc

SEQ ID NO: 971853 - RNA, 19 nt, Homo sapiens
  misc_RNA (1)...(19): siRNA sense strand
ccagaagggagcugcguuu

SEQ ID NO: 971854 - RNA, 19 nt, Homo sapiens
  misc_RNA (1)...(19): siRNA sense strand
gcucuucucuggguuggau

SEQ ID NO: 971855 - RNA, 19 nt, Homo sapiens
  misc_RNA (1)...(19): siRNA sense strand
gagccugaguuugucaaug

SEQ ID NO: 971856 - RNA, 19 nt, Homo sapiens
  misc_RNA (1)...(19): siRNA sense strand
ucacaucgaaggaguguca

SEQ ID NO: 971857 - RNA, 19 nt, Homo sapiens
  misc_RNA (1)...(19): siRNA sense strand
ccaguacacauaugaaauc

SEQ ID NO: 971858 - RNA, 19 nt, Homo sapiens
  misc_RNA (1)...(19): siRNA sense strand
caacuucuuccgugugguu

SEQ ID NO: 971859 - RNA, 19 nt, Homo sapiens
  misc_RNA (1)...(19): siRNA sense strand
ggagcguccugcugucaca

SEQ ID NO: 971860 - RNA, 19 nt, Homo sapiens
  misc_RNA (1)...(19): siRNA sense strand
gcgggaaggguuugagcua

SEQ ID NO: 971861 - RNA, 19 nt, Homo sapiens
  misc_RNA (1)...(19): siRNA sense strand
gcgcaucgaccaggccuuu

SEQ ID NO: 971862 - RNA, 19 nt, Homo sapiens
  misc_RNA (1)...(19): siRNA sense strand
cgaccaggccuuuguccuu

SEQ ID NO: 971863 - RNA, 19 nt, Homo sapiens
  misc_RNA (1)...(19): siRNA sense strand
gaugaggccauucagaaag

SEQ ID NO: 971864 - RNA, 19 nt, Homo sapiens
  misc_RNA (1)...(19): siRNA sense strand
acaccagccaguacacaua

SEQ ID NO: 971865 - RNA, 19 nt, Homo sapiens
  misc_RNA (1)...(19): siRNA sense strand
uggaugaggccauucagaa

SEQ ID NO: 971866 - RNA, 19 nt, Homo sapiens
  misc_RNA (1)...(19): siRNA sense strand
gaaggcacagggcgaucaa

SEQ ID NO: 971867 - RNA, 19 nt, Homo sapiens
  misc_RNA (1)...(19): siRNA sense strand
agcaggagaguccagauua

SEQ ID NO: 971868 - RNA, 19 nt, Homo sapiens
  misc_RNA (1)...(19): siRNA sense strand
agccugaguuugucaaugu

SEQ ID NO: 971869 - RNA, 19 nt, Homo sapiens
  misc_RNA (1)...(19): siRNA sense strand
ggaaggcacagggcgauca

SEQ ID NO: 971870 - RNA, 19 nt, Homo sapiens
  misc_RNA (1)...(19): siRNA sense strand
cugaagcuguggcucaugu

SEQ ID NO: 971871 - RNA, 19 nt, Homo sapiens
  misc_RNA (1)...(19): siRNA sense strand
uggaggcaauugcugaugu

SEQ ID NO: 971872 - RNA, 19 nt, Homo sapiens
  misc_RNA (1)...(19): siRNA sense strand
agucauggagccugaguuu

SEQ ID NO: 971873 - RNA, 19 nt, Homo sapiens
  misc_RNA (1)...(19): siRNA sense strand
gccaguacacauaugaaau

SEQ ID NO: 971874 - RNA, 19 nt, Homo sapiens
  misc_RNA (1)...(19): siRNA sense strand
gcaucgaccaggccuuugu

SEQ ID NO: 971875 - RNA, 19 nt, Homo sapiens
  misc_RNA (1)...(19): siRNA sense strand
gcaggacaaguucuacgau

SEQ ID NO: 971876 - RNA, 19 nt, Homo sapiens
  misc_RNA (1)...(19): siRNA sense strand
gaugugugccagcgucaug

SEQ ID NO: 971877 - RNA, 19 nt, Homo sapiens
  misc_RNA (1)...(19): siRNA sense strand
ggacccaguggcuguggaa

SEQ ID NO: 971878 - RNA, 19 nt, Homo sapiens
  misc_RNA (1)...(19): siRNA sense strand
uguuugugcucauggaaga

SEQ ID NO: 971879 - RNA, 19 nt, Homo sapiens
  misc_RNA (1)...(19): siRNA sense strand
aggacaaguucuacgaugu

SEQ ID NO: 971880 - RNA, 19 nt, Homo sapiens
  misc_RNA (1)...(19): siRNA sense strand
cuggagaggcagauuggua

SEQ ID NO: 971881 - RNA, 19 nt, Homo sapiens
  misc_RNA (1)...(19): siRNA sense strand
gaaaaugguccccgaggau

SEQ ID NO: 971882 - RNA, 19 nt, Homo sapiens
  misc_RNA (1)...(19): siRNA sense strand
uccaacauguaugcuguaa

SEQ ID NO: 971883 - RNA, 19 nt, Homo sapiens
  misc_RNA (1)...(19): siRNA sense strand
ccagccaguacacauauga

SEQ ID NO: 971884 - RNA, 19 nt, Homo sapiens
  misc_RNA (1)...(19): siRNA sense strand
ggagaggcagauugguaug

SEQ ID NO: 971885 - RNA, 19 nt, Homo sapiens
  misc_RNA (1)...(19): siRNA sense strand
cagaaaggaaccagugucu

SEQ ID NO: 971886 - RNA, 19 nt, Homo sapiens
  misc_RNA (1)...(19): siRNA sense strand
guggccaacucugcacuga

SEQ ID NO: 971887 - RNA, 19 nt, Homo sapiens
  misc_RNA (1)...(19): siRNA sense strand
cacgaaaggcugucaaagg

SEQ ID NO: 971888 - RNA, 19 nt, Homo sapiens
  misc_RNA (1)...(19): siRNA sense strand
gcgagucacagaagcagau

SEQ ID NO: 971889 - RNA, 19 nt, Homo sapiens
  misc_RNA (1)...(19): siRNA sense strand
gguaccugguggaggaaau

SEQ ID NO: 971890 - RNA, 19 nt, Homo sapiens
  misc_RNA (1)...(19): siRNA sense strand
ucacuacuccauccagaag

SEQ ID NO: 971891 - RNA, 19 nt, Homo sapiens
  misc_RNA (1)...(19): siRNA sense strand
caccagccaguacacauau

SEQ ID NO: 971892 - RNA, 19 nt, Homo sapiens
  misc_RNA (1)...(19): siRNA sense strand
gaagcaggagaguccagau

SEQ ID NO: 971893 - RNA, 19 nt, Homo sapiens
  misc_RNA (1)...(19): siRNA sense strand
uggagaggcagauugguau

SEQ ID NO: 971894 - RNA, 19 nt, Homo sapiens
  misc_RNA (1)...(19): siRNA sense strand
gaugagagagggaaaaugg

SEQ ID NO: 971895 - RNA, 19 nt, Homo sapiens
  misc_RNA (1)...(19): siRNA sense strand
ggcuccaucuccaacaugu

SEQ ID NO: 971896 - RNA, 19 nt, Homo sapiens
  misc_RNA (1)...(19): siRNA sense strand
ccaaggaggugcacuauaa

SEQ ID NO: 971897 - RNA, 19 nt, Homo sapiens
  misc_RNA (1)...(19): siRNA sense strand
gaaaugcuuugacaaguuc

SEQ ID NO: 971898 - RNA, 19 nt, Homo sapiens
  misc_RNA (1)...(19): siRNA sense strand
ugaaaugcuuugacaaguu

SEQ ID NO: 971899 - RNA, 19 nt, Homo sapiens
  misc_RNA (1)...(19): siRNA sense strand
caucacaucuggaggaauc

SEQ ID NO: 971900 - RNA, 19 nt, Homo sapiens
  misc_RNA (1)...(19): siRNA sense strand
aaagacugcuucaccugua

SEQ ID NO: 971901 - RNA, 19 nt, Homo sapiens
  misc_RNA (1)...(19): siRNA sense strand
uguguuaccugcucuaaga

SEQ ID NO: 971902 - RNA, 19 nt, Homo sapiens
  misc_RNA (1)...(19): siRNA sense strand
ccagugugguggccuauga

SEQ ID NO: 971903 - RNA, 19 nt, Homo sapiens
  misc_RNA (1)...(19): siRNA sense strand
gggaagaaguaugugcaaa

SEQ ID NO: 971904 - RNA, 19 nt, Homo sapiens
  misc_RNA (1)...(19): siRNA sense strand
caacaaggccaucacaucu

SEQ ID NO: 971905 - RNA, 19 nt, Homo sapiens
  misc_RNA (1)...(19): siRNA sense strand
gcaacaaggccaucacauc

SEQ ID NO: 971906 - RNA, 19 nt, Homo sapiens
  misc_RNA (1)...(19): siRNA sense strand
acaacaagauccugugcaa

SEQ ID NO: 971907 - RNA, 19 nt, Homo sapiens
  misc_RNA (1)...(19): siRNA sense strand
gcaugccgauugcuuugug

SEQ ID NO: 971908 - RNA, 19 nt, Homo sapiens
  misc_RNA (1)...(19): siRNA sense strand
gaaguuugacugccacuac

SEQ ID NO: 971909 - RNA, 19 nt, Homo sapiens
  misc_RNA (1)...(19): siRNA sense strand
ccgugaaucuggccaacaa

SEQ ID NO: 971910 - RNA, 19 nt, Homo sapiens
  misc_RNA (1)...(19): siRNA sense strand
gaagaaguaugugcaaaag

SEQ ID NO: 971911 - RNA, 19 nt, Homo sapiens
  misc_RNA (1)...(19): siRNA sense strand
aggaaucacuuaccaggau

SEQ ID NO: 971912 - RNA, 19 nt, Homo sapiens
  misc_RNA (1)...(19): siRNA sense strand
gacaaguucugugccaaca

SEQ ID NO: 971913 - RNA, 19 nt, Homo sapiens
  misc_RNA (1)...(19): siRNA sense strand
ggaagaaguaugugcaaaa

SEQ ID NO: 971914 - RNA, 19 nt, Homo sapiens
  misc_RNA (1)...(19): siRNA sense strand
caucuggaggaaucacuua

SEQ ID NO: 971915 - RNA, 19 nt, Homo sapiens
  misc_RNA (1)...(19): siRNA sense strand
caccacugcugccugaaau

SEQ ID NO: 971916 - RNA, 19 nt, Homo sapiens
  misc_RNA (1)...(19): siRNA sense strand
agaccaaguuugccaagca

SEQ ID NO: 971917 - RNA, 19 nt, Homo sapiens
  misc_RNA (1)...(19): siRNA sense strand
gccaagaagugugcuggau

SEQ ID NO: 971918 - RNA, 19 nt, Homo sapiens
  misc_RNA (1)...(19): siRNA sense strand
gaccaaguuugccaagcau

SEQ ID NO: 971919 - RNA, 19 nt, Homo sapiens
  misc_RNA (1)...(19): siRNA sense strand
ccaaguuugccaagcauug

SEQ ID NO: 971920 - RNA, 19 nt, Homo sapiens
  misc_RNA (1)...(19): siRNA sense strand
acaagauccugugcaacaa

SEQ ID NO: 971921 - RNA, 19 nt, Homo sapiens
  misc_RNA (1)...(19): siRNA sense strand
agaacuuuguggccaagaa

SEQ ID NO: 971922 - RNA, 19 nt, Homo sapiens
  misc_RNA (1)...(19): siRNA sense strand
ggacuucuacugcgugacu

SEQ ID NO: 971923 - RNA, 19 nt, Homo sapiens
  misc_RNA (1)...(19): siRNA sense strand
gaacuuuguggccaagaag

SEQ ID NO: 971924 - RNA, 19 nt, Homo sapiens
  misc_RNA (1)...(19): siRNA sense strand
cuguggaggaccaguauua

SEQ ID NO: 971925 - RNA, 19 nt, Homo sapiens
  misc_RNA (1)...(19): siRNA sense strand
agaaguaugugcaaaagga

SEQ ID NO: 971926 - RNA, 19 nt, Homo sapiens
  misc_RNA (1)...(19): siRNA sense strand
ggauugcuacaagaacuuu

SEQ ID NO: 971927 - RNA, 19 nt, Homo sapiens
  misc_RNA (1)...(19): siRNA sense strand
aacaagauccugugcaaca

SEQ ID NO: 971928 - RNA, 19 nt, Homo sapiens
  misc_RNA (1)...(19): siRNA sense strand
ccaccaggagcaaguguau

SEQ ID NO: 971929 - RNA, 19 nt, Homo sapiens
  misc_RNA (1)...(19): siRNA sense strand
ccaccacugcugccugaaa

SEQ ID NO: 971930 - RNA, 19 nt, Homo sapiens
  misc_RNA (1)...(19): siRNA sense strand
ggaggugcacuauaagaac

SEQ ID NO: 971931 - RNA, 19 nt, Homo sapiens
  misc_RNA (1)...(19): siRNA sense strand
gccaucacaucuggaggaa

SEQ ID NO: 971932 - RNA, 19 nt, Homo sapiens
  misc_RNA (1)...(19): siRNA sense strand
uaacugcaagcaagucauc

SEQ ID NO: 971933 - RNA, 19 nt, Homo sapiens
  misc_RNA (1)...(19): siRNA sense strand
gguggccuaugaaggacaa

SEQ ID NO: 971934 - RNA, 19 nt, Homo sapiens
  misc_RNA (1)...(19): siRNA sense strand
ugccugaaaugcuuugaca

SEQ ID NO: 971935 - RNA, 19 nt, Homo sapiens
  misc_RNA (1)...(19): siRNA sense strand
ccgauugcuuugugugugu

SEQ ID NO: 971936 - RNA, 19 nt, Homo sapiens
  misc_RNA (1)...(19): siRNA sense strand
ugacuugccaugagaccaa

SEQ ID NO: 971937 - RNA, 19 nt, Homo sapiens
  misc_RNA (1)...(19): siRNA sense strand
gggaccgucuggcacaaag

SEQ ID NO: 971938 - RNA, 19 nt, Homo sapiens
  misc_RNA (1)...(19): siRNA sense strand
ucacuggguuugguaaagg

SEQ ID NO: 971939 - RNA, 19 nt, Homo sapiens
  misc_RNA (1)...(19): siRNA sense strand
cugaaaugcuuugacaagu

SEQ ID NO: 971940 - RNA, 19 nt, Homo sapiens
  misc_RNA (1)...(19): siRNA sense strand
guggauugcuacaagaacu

SEQ ID NO: 971941 - RNA, 19 nt, Homo sapiens
  misc_RNA (1)...(19): siRNA sense strand
gacaauccuggcacgacua

SEQ ID NO: 971942 - RNA, 19 nt, Homo sapiens
  misc_RNA (1)...(19): siRNA sense strand
gccaugagaccaaguuugc

SEQ ID NO: 971943 - RNA, 19 nt, Homo sapiens
  misc_RNA (1)...(19): siRNA sense strand
cugcguggauugcuacaag

SEQ ID NO: 971944 - RNA, 19 nt, Homo sapiens
  misc_RNA (1)...(19): siRNA sense strand
ccugaaaugcuuugacaag

SEQ ID NO: 971945 - RNA, 19 nt, Homo sapiens
  misc_RNA (1)...(19): siRNA sense strand
ugugguggccuaugaagga

SEQ ID NO: 971946 - RNA, 19 nt, Homo sapiens
  misc_RNA (1)...(19): siRNA sense strand
ggccaaggacaacaagauc

SEQ ID NO: 971947 - RNA, 19 nt, Homo sapiens
  misc_RNA (1)...(19): siRNA sense strand
accaggagcaaguguauug

SEQ ID NO: 971948 - RNA, 19 nt, Homo sapiens
  misc_RNA (1)...(19): siRNA sense strand
ccagucagcuccaguauaa

SEQ ID NO: 971949 - RNA, 19 nt, Homo sapiens
  misc_RNA (1)...(19): siRNA sense strand
gcaugaaugugagauguua

SEQ ID NO: 971950 - RNA, 19 nt, Homo sapiens
  misc_RNA (1)...(19): siRNA sense strand
uaagggagcuggaugcaau

SEQ ID NO: 971951 - RNA, 19 nt, Homo sapiens
  misc_RNA (1)...(19): siRNA sense strand
gaacauggaaauacuggaa

SEQ ID NO: 971952 - RNA, 19 nt, Homo sapiens
  misc_RNA (1)...(19): siRNA sense strand
caucagagcuggaaagacu

SEQ ID NO: 971953 - RNA, 19 nt, Homo sapiens
  misc_RNA (1)...(19): siRNA sense strand
ggagcuagcccagcaagua

SEQ ID NO: 971954 - RNA, 19 nt, Homo sapiens
  misc_RNA (1)...(19): siRNA sense strand
gaccgaggcucuagaacug

SEQ ID NO: 971955 - RNA, 19 nt, Homo sapiens
  misc_RNA (1)...(19): siRNA sense strand
gcaagccagucucagaugu

SEQ ID NO: 971956 - RNA, 19 nt, Homo sapiens
  misc_RNA (1)...(19): siRNA sense strand
cagccgaccugacugugua

SEQ ID NO: 971957 - RNA, 19 nt, Homo sapiens
  misc_RNA (1)...(19): siRNA sense strand
gaaacuacaggagauggua

SEQ ID NO: 971958 - RNA, 19 nt, Homo sapiens
  misc_RNA (1)...(19): siRNA sense strand
gaaaucuugugcagagagu

SEQ ID NO: 971959 - RNA, 19 nt, Homo sapiens
  misc_RNA (1)...(19): siRNA sense strand
caaaggaggguccaugugu

SEQ ID NO: 971960 - RNA, 19 nt, Homo sapiens
  misc_RNA (1)...(19): siRNA sense strand
gcaaguacucuacaugcaa

SEQ ID NO: 971961 - RNA, 19 nt, Homo sapiens
  misc_RNA (1)...(19): siRNA sense strand
uugcagaccuggaaucaga

SEQ ID NO: 971962 - RNA, 19 nt, Homo sapiens
  misc_RNA (1)...(19): siRNA sense strand
gaaagcaucagagcuggaa

SEQ ID NO: 971963 - RNA, 19 nt, Homo sapiens
  misc_RNA (1)...(19): siRNA sense strand
guauaaacgucuggagaug

SEQ ID NO: 971964 - RNA, 19 nt, Homo sapiens
  misc_RNA (1)...(19): siRNA sense strand
accaugcccuuuaaacaua

SEQ ID NO: 971965 - RNA, 19 nt, Homo sapiens
  misc_RNA (1)...(19): siRNA sense strand
acacacaccucagucuuug

SEQ ID NO: 971966 - RNA, 19 nt, Homo sapiens
  misc_RNA (1)...(19): siRNA sense strand
cgaccuugauugccuguug

SEQ ID NO: 971967 - RNA, 19 nt, Homo sapiens
  misc_RNA (1)...(19): siRNA sense strand
auaaacgucuggagaugaa

SEQ ID NO: 971968 - RNA, 19 nt, Homo sapiens
  misc_RNA (1)...(19): siRNA sense strand
gcaggaauguaagcacugu

SEQ ID NO: 971969 - RNA, 19 nt, Homo sapiens
  misc_RNA (1)...(19): siRNA sense strand
gcuagguugugaacugcua

SEQ ID NO: 971970 - RNA, 19 nt, Homo sapiens
  misc_RNA (1)...(19): siRNA sense strand
cagcaacccucugcacuuc

SEQ ID NO: 971971 - RNA, 19 nt, Homo sapiens
  misc_RNA (1)...(19): siRNA sense strand
ccagccaucuacugcaauu

SEQ ID NO: 971972 - RNA, 19 nt, Homo sapiens
  misc_RNA (1)...(19): siRNA sense strand
gaagccacgugagauuaau

SEQ ID NO: 971973 - RNA, 19 nt, Homo sapiens
  misc_RNA (1)...(19): siRNA sense strand
ucagaagccagccaaguuu

SEQ ID NO: 971974 - RNA, 19 nt, Homo sapiens
  misc_RNA (1)...(19): siRNA sense strand
gaucagagcccuagauacc

SEQ ID NO: 971975 - RNA, 19 nt, Homo sapiens
  misc_RNA (1)...(19): siRNA sense strand
caacagggaaagcaucaga

SEQ ID NO: 971976 - RNA, 19 nt, Homo sapiens
  misc_RNA (1)...(19): siRNA sense strand
uacaggagaugguauugug

SEQ ID NO: 971977 - RNA, 19 nt, Homo sapiens
  misc_RNA (1)...(19): siRNA sense strand
ggcagaaacuacaggagau

SEQ ID NO: 971978 - RNA, 19 nt, Homo sapiens
  misc_RNA (1)...(19): siRNA sense strand
uaaaggggcugaauguguu

SEQ ID NO: 971979 - RNA, 19 nt, Homo sapiens
  misc_RNA (1)...(19): siRNA sense strand
agagcuggcugcuucaguu

SEQ ID NO: 971980 - RNA, 19 nt, Homo sapiens
  misc_RNA (1)...(19): siRNA sense strand
gaggcucggucuccaguca

SEQ ID NO: 971981 - RNA, 19 nt, Homo sapiens
  misc_RNA (1)...(19): siRNA sense strand
cuacaacgcgaccuugauu

SEQ ID NO: 971982 - RNA, 19 nt, Homo sapiens
  misc_RNA (1)...(19): siRNA sense strand
ccaaaagccuggcaugaau

SEQ ID NO: 971983 - RNA, 19 nt, Homo sapiens
  misc_RNA (1)...(19): siRNA sense strand
cgugaugcaucugccuuua

SEQ ID NO: 971984 - RNA, 19 nt, Homo sapiens
  misc_RNA (1)...(19): siRNA sense strand
gcucuugcuggaacuguua

SEQ ID NO: 971985 - RNA, 19 nt, Homo sapiens
  misc_RNA (1)...(19): siRNA sense strand
agagagggcugcugcugau

SEQ ID NO: 971986 - RNA, 19 nt, Homo sapiens
  misc_RNA (1)...(19): siRNA sense strand
ggaaauacuggaagaacag

SEQ ID NO: 971987 - RNA, 19 nt, Homo sapiens
  misc_RNA (1)...(19): siRNA sense strand
ggccagccaucuacugcaa

SEQ ID NO: 971988 - RNA, 19 nt, Homo sapiens
  misc_RNA (1)...(19): siRNA sense strand
ugaagccacgugagauuaa

SEQ ID NO: 971989 - RNA, 19 nt, Homo sapiens
  misc_RNA (1)...(19): siRNA sense strand
gaagcaacugcaggugaua

SEQ ID NO: 971990 - RNA, 19 nt, Homo sapiens
  misc_RNA (1)...(19): siRNA sense strand
ucacagagauuuucgucuu

SEQ ID NO: 971991 - RNA, 19 nt, Homo sapiens
  misc_RNA (1)...(19): siRNA sense strand
gcucccaccaugcccuuua

SEQ ID NO: 971992 - RNA, 19 nt, Homo sapiens
  misc_RNA (1)...(19): siRNA sense strand
gagucgcgcucucuugagu

SEQ ID NO: 971993 - RNA, 19 nt, Homo sapiens
  misc_RNA (1)...(19): siRNA sense strand
cagcugugggcaagucuua

SEQ ID NO: 971994 - RNA, 19 nt, Homo sapiens
  misc_RNA (1)...(19): siRNA sense strand
ggaaucagaacagcuuuua

SEQ ID NO: 971995 - RNA, 19 nt, Homo sapiens
  misc_RNA (1)...(19): siRNA sense strand
agaagcaacugcaggugau

SEQ ID NO: 971996 - RNA, 19 nt, Homo sapiens
  misc_RNA (1)...(19): siRNA sense strand
gugcagagaguauccugaa

SEQ ID NO: 971997 - RNA, 19 nt, Homo sapiens
  misc_RNA (1)...(19): siRNA sense strand
ggacgcgagcagugaugua

SEQ ID NO: 971998 - RNA, 19 nt, Homo sapiens
  misc_RNA (1)...(19): siRNA sense strand
gggcaagucuuagcaaucc

SEQ ID NO: 971999 - RNA, 19 nt, Homo sapiens
  misc_RNA (1)...(19): siRNA sense strand
uaucccaggcuauguauga

SEQ ID NO: 972000 - RNA, 19 nt, Homo sapiens
  misc_RNA (1)...(19): siRNA sense strand
uggaaauacuggaagaaca

SEQ ID NO: 972001 - RNA, 19 nt, Homo sapiens
  misc_RNA (1)...(19): siRNA sense strand
gucagaagccagccaaguu

SEQ ID NO: 972002 - RNA, 19 nt, Homo sapiens
  misc_RNA (1)...(19): siRNA sense strand
aagaucagagcccuagaua

SEQ ID NO: 972003 - RNA, 19 nt, Homo sapiens
  misc_RNA (1)...(19): siRNA sense strand
gagcuggcugcuucaguuu

SEQ ID NO: 972004 - RNA, 19 nt, Homo sapiens
  misc_RNA (1)...(19): siRNA sense strand
cagagucuagugcuucuuu

SEQ ID NO: 972005 - RNA, 19 nt, Homo sapiens
  misc_RNA (1)...(19): siRNA sense strand
gaaauacuggaagaacaga

SEQ ID NO: 972006 - RNA, 19 nt, Homo sapiens
  misc_RNA (1)...(19): siRNA sense strand
caugaagccacgugagauu

SEQ ID NO: 972007 - RNA, 19 nt, Homo sapiens
  misc_RNA (1)...(19): siRNA sense strand
cagaaccugcugccacuuu

SEQ ID NO: 972008 - RNA, 19 nt, Homo sapiens
  misc_RNA (1)...(19): siRNA sense strand
cgaugcugcuguuccagaa

SEQ ID NO: 972009 - RNA, 19 nt, Homo sapiens
  misc_RNA (1)...(19): siRNA sense strand
gcagagaguauccugaacu

SEQ ID NO: 972010 - RNA, 19 nt, Homo sapiens
  misc_RNA (1)...(19): siRNA sense strand
uggcagacuucaccacuag

SEQ ID NO: 972011 - RNA, 19 nt, Homo sapiens
  misc_RNA (1)...(19): siRNA sense strand
gcugcgugcucauugugaa

SEQ ID NO: 972012 - RNA, 19 nt, Homo sapiens
  misc_RNA (1)...(19): siRNA sense strand
guuagaagggcagaaacua

SEQ ID NO: 972013 - RNA, 19 nt, Homo sapiens
  misc_RNA (1)...(19): siRNA sense strand
gauugacaguguggagcua

SEQ ID NO: 972014 - RNA, 19 nt, Homo sapiens
  misc_RNA (1)...(19): siRNA sense strand
ccaccaugcccuuuaaaca

SEQ ID NO: 972015 - RNA, 19 nt, Homo sapiens
  misc_RNA (1)...(19): siRNA sense strand
ugacgaugcugcuguucca

SEQ ID NO: 972016 - RNA, 19 nt, Homo sapiens
  misc_RNA (1)...(19): siRNA sense strand
gcaacccucugcacuucag

SEQ ID NO: 972017 - RNA, 19 nt, Homo sapiens
  misc_RNA (1)...(19): siRNA sense strand
acauggaaauacuggaaga

SEQ ID NO: 972018 - RNA, 19 nt, Homo sapiens
  misc_RNA (1)...(19): siRNA sense strand
gaaagcaggaauguaagca

SEQ ID NO: 972019 - RNA, 19 nt, Homo sapiens
  misc_RNA (1)...(19): siRNA sense strand
cacacacaccucagucuuu

SEQ ID NO: 972020 - RNA, 19 nt, Homo sapiens
  misc_RNA (1)...(19): siRNA sense strand
ccaaguuucugcggaacau

SEQ ID NO: 972021 - RNA, 19 nt, Homo sapiens
  misc_RNA (1)...(19): siRNA sense strand
gaaugugcccagcucgaau

SEQ ID NO: 972022 - RNA, 19 nt, Homo sapiens
  misc_RNA (1)...(19): siRNA sense strand
cggcagcucuauggaacaa

SEQ ID NO: 972023 - RNA, 19 nt, Homo sapiens
  misc_RNA (1)...(19): siRNA sense strand
uuucgucuuuggcuuauug

SEQ ID NO: 972024 - RNA, 19 nt, Homo sapiens
  misc_RNA (1)...(19): siRNA sense strand
uggcaggaccuaaagauca

SEQ ID NO: 972025 - RNA, 19 nt, Homo sapiens
  misc_RNA (1)...(19): siRNA sense strand
ccacagcaagccagucuca

SEQ ID NO: 972026 - RNA, 19 nt, Homo sapiens
  misc_RNA (1)...(19): siRNA sense strand
gcagaaacuacaggagaug

SEQ ID NO: 972027 - RNA, 19 nt, Homo sapiens
  misc_RNA (1)...(19): siRNA sense strand
gcaagcaacagggaaagca

SEQ ID NO: 972028 - RNA, 19 nt, Homo sapiens
  misc_RNA (1)...(19): siRNA sense strand
gaccagcugugggcaaguc

SEQ ID NO: 972029 - RNA, 19 nt, Homo sapiens
  misc_RNA (1)...(19): siRNA sense strand
ggacccagucucaguugug

SEQ ID NO: 972030 - RNA, 19 nt, Homo sapiens
  misc_RNA (1)...(19): siRNA sense strand
ccagcugcgugcucauugu

SEQ ID NO: 972031 - RNA, 19 nt, Homo sapiens
  misc_RNA (1)...(19): siRNA sense strand
uauaaacgucuggagauga

SEQ ID NO: 972032 - RNA, 19 nt, Homo sapiens
  misc_RNA (1)...(19): siRNA sense strand
ccacacacaccucagucuu

SEQ ID NO: 972033 - RNA, 19 nt, Homo sapiens
  misc_RNA (1)...(19): siRNA sense strand
cugauuagccucacacaag

SEQ ID NO: 972034 - RNA, 19 nt, Homo sapiens
  misc_RNA (1)...(19): siRNA sense strand
caccaugcccuuuaaacau

SEQ ID NO: 972035 - RNA, 19 nt, Homo sapiens
  misc_RNA (1)...(19): siRNA sense strand
ggcaggaccuaaagaucag

SEQ ID NO: 972036 - RNA, 19 nt, Homo sapiens
  misc_RNA (1)...(19): siRNA sense strand
gucuggagaugaacagcaa

SEQ ID NO: 972037 - RNA, 19 nt, Homo sapiens
  misc_RNA (1)...(19): siRNA sense strand
acuguugguucguuacuug

SEQ ID NO: 972038 - RNA, 19 nt, Homo sapiens
  misc_RNA (1)...(19): siRNA sense strand
uggagucacugcaggaucu

SEQ ID NO: 972039 - RNA, 19 nt, Homo sapiens
  misc_RNA (1)...(19): siRNA sense strand
gagcuagcccagcaaguac

SEQ ID NO: 972040 - RNA, 19 nt, Homo sapiens
  misc_RNA (1)...(19): siRNA sense strand
ggaauguaagcacuguuca

SEQ ID NO: 972041 - RNA, 19 nt, Homo sapiens
  misc_RNA (1)...(19): siRNA sense strand
gcaugaagccacgugagau

SEQ ID NO: 972042 - RNA, 19 nt, Homo sapiens
  misc_RNA (1)...(19): siRNA sense strand
ggaauggccaugguaaagg

SEQ ID NO: 972043 - RNA, 19 nt, Homo sapiens
  misc_RNA (1)...(19): siRNA sense strand
uagaagggcagaaacuaca

SEQ ID NO: 972044 - RNA, 19 nt, Homo sapiens
  misc_RNA (1)...(19): siRNA sense strand
ccagcacaguccacagcaa

SEQ ID NO: 972045 - RNA, 19 nt, Homo sapiens
  misc_RNA (1)...(19): siRNA sense strand
ggcaacgccuagugcaagu

SEQ ID NO: 972046 - RNA, 19 nt, Homo sapiens
  misc_RNA (1)...(19): siRNA sense strand
uggcaugaaugugagaugu

SEQ ID NO: 972047 - RNA, 19 nt, Homo sapiens
  misc_RNA (1)...(19): siRNA sense strand
cagcacuccaugccuguuu

SEQ ID NO: 972048 - RNA, 19 nt, Homo sapiens
  misc_RNA (1)...(19): siRNA sense strand
gaagacccaugccaagaaa

SEQ ID NO: 972049 - RNA, 19 nt, Homo sapiens
  misc_RNA (1)...(19): siRNA sense strand
ccacagaccucagcuuaag

SEQ ID NO: 972050 - RNA, 19 nt, Homo sapiens
  misc_RNA (1)...(19): siRNA sense strand
ggccacagaccucagcuua

SEQ ID NO: 972051 - RNA, 19 nt, Homo sapiens
  misc_RNA (1)...(19): siRNA sense strand
ugaggaggaucgaaugaga

SEQ ID NO: 972052 - RNA, 19 nt, Homo sapiens
  misc_RNA (1)...(19): siRNA sense strand
ccagaaaccucgggacuac

SEQ ID NO: 972053 - RNA, 19 nt, Homo sapiens
  misc_RNA (1)...(19): siRNA sense strand
uagccaagcucuuaagcau

SEQ ID NO: 972054 - RNA, 19 nt, Homo sapiens
  misc_RNA (1)...(19): siRNA sense strand
cgaagacccaugccaagaa

SEQ ID NO: 972055 - RNA, 19 nt, Homo sapiens
  misc_RNA (1)...(19): siRNA sense strand
caucguggccuucgcuuau

SEQ ID NO: 972056 - RNA, 19 nt, Homo sapiens
  misc_RNA (1)...(19): siRNA sense strand
ccaagaaacaguguccaaa

SEQ ID NO: 972057 - RNA, 19 nt, Homo sapiens
  misc_RNA (1)...(19): siRNA sense strand
ugaggagagucccaagguu

SEQ ID NO: 972058 - RNA, 19 nt, Homo sapiens
  misc_RNA (1)...(19): siRNA sense strand
aaacagcccaggccacaga

SEQ ID NO: 972059 - RNA, 19 nt, Homo sapiens
  misc_RNA (1)...(19): siRNA sense strand
gauucugucugagagugua

SEQ ID NO: 972060 - RNA, 19 nt, Homo sapiens
  misc_RNA (1)...(19): siRNA sense strand
aaccagaagugagcaaaga

SEQ ID NO: 972061 - RNA, 19 nt, Homo sapiens
  misc_RNA (1)...(19): siRNA sense strand
gcagccagcagcucugaga

SEQ ID NO: 972062 - RNA, 19 nt, Homo sapiens
  misc_RNA (1)...(19): siRNA sense strand
cagcagcucugagaucucu

SEQ ID NO: 972063 - RNA, 19 nt, Homo sapiens
  misc_RNA (1)...(19): siRNA sense strand
ccggguagccaagcucuua

SEQ ID NO: 972064 - RNA, 19 nt, Homo sapiens
  misc_RNA (1)...(19): siRNA sense strand
gaggaggaucgaaugagaa

SEQ ID NO: 972065 - RNA, 19 nt, Homo sapiens
  misc_RNA (1)...(19): siRNA sense strand
caagaaacaguguccaaac

SEQ ID NO: 972066 - RNA, 19 nt, Homo sapiens
  misc_RNA (1)...(19): siRNA sense strand
gccagcagcucugagaucu

SEQ ID NO: 972067 - RNA, 19 nt, Homo sapiens
  misc_RNA (1)...(19): siRNA sense strand
gcugucaugucccggaaca

SEQ ID NO: 972068 - RNA, 19 nt, Homo sapiens
  misc_RNA (1)...(19): siRNA sense strand
gcagcucugagaucucuga

SEQ ID NO: 972069 - RNA, 19 nt, Homo sapiens
  misc_RNA (1)...(19): siRNA sense strand
gccacagaccucagcuuaa

SEQ ID NO: 972070 - RNA, 19 nt, Homo sapiens
  misc_RNA (1)...(19): siRNA sense strand
gccaagaaacaguguccaa

SEQ ID NO: 972071 - RNA, 19 nt, Homo sapiens
  misc_RNA (1)...(19): siRNA sense strand
ucaacuuaggcguguauaa

SEQ ID NO: 972072 - RNA, 19 nt, Homo sapiens
  misc_RNA (1)...(19): siRNA sense strand
caagccagcccuucaacca

SEQ ID NO: 972073 - RNA, 19 nt, Homo sapiens
  misc_RNA (1)...(19): siRNA sense strand
caaaccagaagugagcaaa

SEQ ID NO: 972074 - RNA, 19 nt, Homo sapiens
  misc_RNA (1)...(19): siRNA sense strand
ccuccugcgucaucaacuu

SEQ ID NO: 972075 - RNA, 19 nt, Homo sapiens
  misc_RNA (1)...(19): siRNA sense strand
gggaaucaaaggccaacug

SEQ ID NO: 972076 - RNA, 19 nt, Homo sapiens
  misc_RNA (1)...(19): siRNA sense strand
caucaacuuaggcguguau

SEQ ID NO: 972077 - RNA, 19 nt, Homo sapiens
  misc_RNA (1)...(19): siRNA sense strand
gcagcugguugaggaggau

SEQ ID NO: 972078 - RNA, 19 nt, Homo sapiens
  misc_RNA (1)...(19): siRNA sense strand
ccccugagauucugucuga

SEQ ID NO: 972079 - RNA, 19 nt, Homo sapiens
  misc_RNA (1)...(19): siRNA sense strand
cgaaugagaagggcacaca

SEQ ID NO: 972080 - RNA, 19 nt, Homo sapiens
  misc_RNA (1)...(19): siRNA sense strand
ccugagauucugucugaga

SEQ ID NO: 972081 - RNA, 19 nt, Homo sapiens
  misc_RNA (1)...(19): siRNA sense strand
gggaaaagcaagagaaugg

SEQ ID NO: 972082 - RNA, 19 nt, Homo sapiens
  misc_RNA (1)...(19): siRNA sense strand
gcacucagcugcaagauug

SEQ ID NO: 972083 - RNA, 19 nt, Homo sapiens
  misc_RNA (1)...(19): siRNA sense strand
gcaagauuguggccuuuau

SEQ ID NO: 972084 - RNA, 19 nt, Homo sapiens
  misc_RNA (1)...(19): siRNA sense strand
acaaggaccucaagaagug

SEQ ID NO: 972085 - RNA, 19 nt, Homo sapiens
  misc_RNA (1)...(19): siRNA sense strand
guacugcuaggacugauua

SEQ ID NO: 972086 - RNA, 19 nt, Homo sapiens
  misc_RNA (1)...(19): siRNA sense strand
acgcugggcuucaugcuua

SEQ ID NO: 972087 - RNA, 19 nt, Homo sapiens
  misc_RNA (1)...(19): siRNA sense strand
gugggcaccuacaaguuua

SEQ ID NO: 972088 - RNA, 19 nt, Homo sapiens
  misc_RNA (1)...(19): siRNA sense strand
ccagagaacccuacugugu

SEQ ID NO: 972089 - RNA, 19 nt, Homo sapiens
  misc_RNA (1)...(19): siRNA sense strand
caacaaggaccucaagaag

SEQ ID NO: 972090 - RNA, 19 nt, Homo sapiens
  misc_RNA (1)...(19): siRNA sense strand
gcaagcugcuccucuucga

SEQ ID NO: 972091 - RNA, 19 nt, Homo sapiens
  misc_RNA (1)...(19): siRNA sense strand
gaggaccagugcaucuuug

SEQ ID NO: 972092 - RNA, 19 nt, Homo sapiens
  misc_RNA (1)...(19): siRNA sense strand
ggaggaccagugcaucuuu

SEQ ID NO: 972093 - RNA, 19 nt, Homo sapiens
  misc_RNA (1)...(19): siRNA sense strand
agagaacccuacuguguca

SEQ ID NO: 972094 - RNA, 19 nt, Homo sapiens
  misc_RNA (1)...(19): siRNA sense strand
gaacccuacugugucaugu

SEQ ID NO: 972095 - RNA, 19 nt, Homo sapiens
  misc_RNA (1)...(19): siRNA sense strand
ucaacaaggaccucaagaa

SEQ ID NO: 972096 - RNA, 19 nt, Homo sapiens
  misc_RNA (1)...(19): siRNA sense strand
uaucgucaccgcaagauga

SEQ ID NO: 972097 - RNA, 19 nt, Homo sapiens
  misc_RNA (1)...(19): siRNA sense strand
cgcaucagcuuaugugaag

SEQ ID NO: 972098 - RNA, 19 nt, Homo sapiens
  misc_RNA (1)...(19): siRNA sense strand
uauguuggcugugcucaug

SEQ ID NO: 972099 - RNA, 19 nt, Homo sapiens
  misc_RNA (1)...(19): siRNA sense strand
ggccuucccaccugucuuu

SEQ ID NO: 972100 - RNA, 19 nt, Homo sapiens
  misc_RNA (1)...(19): siRNA sense strand
cgugggcaccuacaaguuu

SEQ ID NO: 972101 - RNA, 19 nt, Homo sapiens
  misc_RNA (1)...(19): siRNA sense strand
cgccacggcucuucaugga

SEQ ID NO: 972102 - RNA, 19 nt, Homo sapiens
  misc_RNA (1)...(19): siRNA sense strand
caagauuguggccuuuaug

SEQ ID NO: 972103 - RNA, 19 nt, Homo sapiens
  misc_RNA (1)...(19): siRNA sense strand
gaugaagccagugcagaug

SEQ ID NO: 972104 - RNA, 19 nt, Homo sapiens
  misc_RNA (1)...(19): siRNA sense strand
gcaccuacaaguuuauucg

SEQ ID NO: 972105 - RNA, 19 nt, Homo sapiens
  misc_RNA (1)...(19): siRNA sense strand
cgaucacacugcucuuucu

SEQ ID NO: 972106 - RNA, 19 nt, Homo sapiens
  misc_RNA (1)...(19): siRNA sense strand
gccaagcgcaugacacucu

SEQ ID NO: 972107 - RNA, 19 nt, Homo sapiens
  misc_RNA (1)...(19): siRNA sense strand
ucaacccaauugucugcuu

SEQ ID NO: 972108 - RNA, 19 nt, Homo sapiens
  misc_RNA (1)...(19): siRNA sense strand
gaggaggaccagugcaucu

SEQ ID NO: 972109 - RNA, 19 nt, Homo sapiens
  misc_RNA (1)...(19): siRNA sense strand
gggcuucaugcuuauguug

SEQ ID NO: 972110 - RNA, 19 nt, Homo sapiens
  misc_RNA (1)...(19): siRNA sense strand
gcgaucacacugcucuuuc

SEQ ID NO: 972111 - RNA, 19 nt, Homo sapiens
  misc_RNA (1)...(19): siRNA sense strand
cugcuaggacugauuaugu

SEQ ID NO: 972112 - RNA, 19 nt, Homo sapiens
  misc_RNA (1)...(19): siRNA sense strand
acccuacugugucauguga

SEQ ID NO: 972113 - RNA, 19 nt, Homo sapiens
  misc_RNA (1)...(19): siRNA sense strand
gcggguaacgccaucuugu

SEQ ID NO: 972114 - RNA, 19 nt, Homo sapiens
  misc_RNA (1)...(19): siRNA sense strand
ccuuugugcuggcuucugu

SEQ ID NO: 972115 - RNA, 19 nt, Homo sapiens
  misc_RNA (1)...(19): siRNA sense strand
ccacugcuguuuggaugag

SEQ ID NO: 972116 - RNA, 19 nt, Homo sapiens
  misc_RNA (1)...(19): siRNA sense strand
ccgcaucagcuuaugugaa

SEQ ID NO: 972117 - RNA, 19 nt, Homo sapiens
  misc_RNA (1)...(19): siRNA sense strand
gcucaacaaggaccucaag

SEQ ID NO: 972118 - RNA, 19 nt, Homo sapiens
  misc_RNA (1)...(19): siRNA sense strand
gaguaucgucaccgcaaga

SEQ ID NO: 972119 - RNA, 19 nt, Homo sapiens
  misc_RNA (1)...(19): siRNA sense strand
ggaggaagcaggacuaugg

SEQ ID NO: 972120 - RNA, 19 nt, Homo sapiens
  misc_RNA (1)...(19): siRNA sense strand
ggaggaagaagccgaguug

SEQ ID NO: 972121 - RNA, 19 nt, Homo sapiens
  misc_RNA (1)...(19): siRNA sense strand
ggaaacagaagcuaaagac

SEQ ID NO: 972122 - RNA, 19 nt, Homo sapiens
  misc_RNA (1)...(19): siRNA sense strand
ggagcugucggcugaguuu

SEQ ID NO: 972123 - RNA, 19 nt, Homo sapiens
  misc_RNA (1)...(19): siRNA sense strand
ccaccgugcuguccaugug

SEQ ID NO: 972124 - RNA, 19 nt, Homo sapiens
  misc_RNA (1)...(19): siRNA sense strand
ggagguggccauccccuua

SEQ ID NO: 972125 - RNA, 19 nt, Homo sapiens
  misc_RNA (1)...(19): siRNA sense strand
ccagggaagacccguguga

SEQ ID NO: 972126 - RNA, 19 nt, Homo sapiens
  misc_RNA (1)...(19): siRNA sense strand
gcaggacuauggccccaaa

SEQ ID NO: 972127 - RNA, 19 nt, Homo sapiens
  misc_RNA (1)...(19): siRNA sense strand
caggagugaugcugaucga

SEQ ID NO: 972128 - RNA, 19 nt, Homo sapiens
  misc_RNA (1)...(19): siRNA sense strand
gcugaucgaggacuuugug

SEQ ID NO: 972129 - RNA, 19 nt, Homo sapiens
  misc_RNA (1)...(19): siRNA sense strand
ggaucgcccucuccuucca

SEQ ID NO: 972130 - RNA, 19 nt, Homo sapiens
  misc_RNA (1)...(19): siRNA sense strand
gacggaggaagcaggacua

SEQ ID NO: 972131 - RNA, 19 nt, Homo sapiens
  misc_RNA (1)...(19): siRNA sense strand
aacauaccguuucauuuac

SEQ ID NO: 972132 - RNA, 19 nt, Homo sapiens
  misc_RNA (1)...(19): siRNA sense strand
guaaagaccugcuguacug

SEQ ID NO: 972133 - RNA, 19 nt, Homo sapiens
  misc_RNA (1)...(19): siRNA sense strand
caaugaaccugcugauguu

SEQ ID NO: 972134 - RNA, 19 nt, Homo sapiens
  misc_RNA (1)...(19): siRNA sense strand
gaucuucucagccauguuu

SEQ ID NO: 972135 - RNA, 19 nt, Homo sapiens
  misc_RNA (1)...(19): siRNA sense strand
gcaagaccuucuccuuugu

SEQ ID NO: 972136 - RNA, 19 nt, Homo sapiens
  misc_RNA (1)...(19): siRNA sense strand
gguauugggagcuguauuu

SEQ ID NO: 972137 - RNA, 19 nt, Homo sapiens
  misc_RNA (1)...(19): siRNA sense strand
cgcaagaccuucuccuuug

SEQ ID NO: 972138 - RNA, 19 nt, Homo sapiens
  misc_RNA (1)...(19): siRNA sense strand
cgaaacauccgcaccaaga

SEQ ID NO: 972139 - RNA, 19 nt, Homo sapiens
  misc_RNA (1)...(19): siRNA sense strand
uggaagagaucccuuugga

SEQ ID NO: 972140 - RNA, 19 nt, Homo sapiens
  misc_RNA (1)...(19): siRNA sense strand
cuacaugagugcccuggaa

SEQ ID NO: 972141 - RNA, 19 nt, Homo sapiens
  misc_RNA (1)...(19): siRNA sense strand
ccagggcuauggcuauuau

SEQ ID NO: 972142 - RNA, 19 nt, Homo sapiens
  misc_RNA (1)...(19): siRNA sense strand
ggaguaaagaccugcugua

SEQ ID NO: 972143 - RNA, 19 nt, Homo sapiens
  misc_RNA (1)...(19): siRNA sense strand
gcugcccucugguuccuua

SEQ ID NO: 972144 - RNA, 19 nt, Homo sapiens
  misc_RNA (1)...(19): siRNA sense strand
ggguaacagugaccaguga

SEQ ID NO: 972145 - RNA, 19 nt, Homo sapiens
  misc_RNA (1)...(19): siRNA sense strand
ggaagguccugcggaagug

SEQ ID NO: 972146 - RNA, 19 nt, Homo sapiens
  misc_RNA (1)...(19): siRNA sense strand
acaaugaaccugcugaugu

SEQ ID NO: 972147 - RNA, 19 nt, Homo sapiens
  misc_RNA (1)...(19): siRNA sense strand
caucauugguggaagagau

SEQ ID NO: 972148 - RNA, 19 nt, Homo sapiens
  misc_RNA (1)...(19): siRNA sense strand
gcucuccacugguuaccuu

SEQ ID NO: 972149 - RNA, 19 nt, Homo sapiens
  misc_RNA (1)...(19): siRNA sense strand
gaccuucuccuuugucaug

SEQ ID NO: 972150 - RNA, 19 nt, Homo sapiens
  misc_RNA (1)...(19): siRNA sense strand
gcagccagucggcagcuua

SEQ ID NO: 972151 - RNA, 19 nt, Homo sapiens
  misc_RNA (1)...(19): siRNA sense strand
cuggguggcugaagugauu

SEQ ID NO: 972152 - RNA, 19 nt, Homo sapiens
  misc_RNA (1)...(19): siRNA sense strand
gccauggccuguugcuguu

SEQ ID NO: 972153 - RNA, 19 nt, Homo sapiens
  misc_RNA (1)...(19): siRNA sense strand
caucucaguuuggcacuug

SEQ ID NO: 972154 - RNA, 19 nt, Homo sapiens
  misc_RNA (1)...(19): siRNA sense strand
ucgcaagaccuucuccuuu

SEQ ID NO: 972155 - RNA, 19 nt, Homo sapiens
  misc_RNA (1)...(19): siRNA sense strand
cagccuguauuacuucaau

SEQ ID NO: 972156 - RNA, 19 nt, Homo sapiens
  misc_RNA (1)...(19): siRNA sense strand
gcuaucagcaaguuuguca

SEQ ID NO: 972157 - RNA, 19 nt, Homo sapiens
  misc_RNA (1)...(19): siRNA sense strand
gaaacauccgcaccaagau

SEQ ID NO: 972158 - RNA, 19 nt, Homo sapiens
  misc_RNA (1)...(19): siRNA sense strand
gaagugguuugagccaucu

SEQ ID NO: 972159 - RNA, 19 nt, Homo sapiens
  misc_RNA (1)...(19): siRNA sense strand
gggaagguccugcggaagu

SEQ ID NO: 972160 - RNA, 19 nt, Homo sapiens
  misc_RNA (1)...(19): siRNA sense strand
gcuauuaucgcacugugau

SEQ ID NO: 972161 - RNA, 19 nt, Homo sapiens
  misc_RNA (1)...(19): siRNA sense strand
cugguuaccuugugguguu

SEQ ID NO: 972162 - RNA, 19 nt, Homo sapiens
  misc_RNA (1)...(19): siRNA sense strand
gcccucugguuccuuaaug

SEQ ID NO: 972163 - RNA, 19 nt, Homo sapiens
  misc_RNA (1)...(19): siRNA sense strand
ugaaccugcugauguugga

SEQ ID NO: 972164 - RNA, 19 nt, Homo sapiens
  misc_RNA (1)...(19): siRNA sense strand
gcaccauugccaagcacua

SEQ ID NO: 972165 - RNA, 19 nt, Homo sapiens
  misc_RNA (1)...(19): siRNA sense strand
gcaccucccacgccauugu

SEQ ID NO: 972166 - RNA, 19 nt, Homo sapiens
  misc_RNA (1)...(19): siRNA sense strand
ugggagcuguauuugguuu

SEQ ID NO: 972167 - RNA, 19 nt, Homo sapiens
  misc_RNA (1)...(19): siRNA sense strand
ggacagucagcccuuguag

SEQ ID NO: 972168 - RNA, 19 nt, Homo sapiens
  misc_RNA (1)...(19): siRNA sense strand
agagaucccuuuggacaag

SEQ ID NO: 972169 - RNA, 19 nt, Homo sapiens
  misc_RNA (1)...(19): siRNA sense strand
ggagcuguauuugguuucu

SEQ ID NO: 972170 - RNA, 19 nt, Homo sapiens
  misc_RNA (1)...(19): siRNA sense strand
uauuugguuucuccucgua

SEQ ID NO: 972171 - RNA, 19 nt, Homo sapiens
  misc_RNA (1)...(19): siRNA sense strand
ugggugcucuccacugguu

SEQ ID NO: 972172 - RNA, 19 nt, Homo sapiens
  misc_RNA (1)...(19): siRNA sense strand
ggccaguucuuccuuaucc

SEQ ID NO: 972173 - RNA, 19 nt, Homo sapiens
  misc_RNA (1)...(19): siRNA sense strand
gucggcagcuuaugcuauc

SEQ ID NO: 972174 - RNA, 19 nt, Homo sapiens
  misc_RNA (1)...(19): siRNA sense strand
gaguaaagaccugcuguac

SEQ ID NO: 972175 - RNA, 19 nt, Homo sapiens
  misc_RNA (1)...(19): siRNA sense strand
gguggaagagaucccuuug

SEQ ID NO: 972176 - RNA, 19 nt, Homo sapiens
  misc_RNA (1)...(19): siRNA sense strand
agucauagccaacgagagu

SEQ ID NO: 972177 - RNA, 19 nt, Homo sapiens
  misc_RNA (1)...(19): siRNA sense strand
caugagugcccuggaaguu

SEQ ID NO: 972178 - RNA, 19 nt, Homo sapiens
  misc_RNA (1)...(19): siRNA sense strand
acagucagcccuuguaggu

SEQ ID NO: 972179 - RNA, 19 nt, Homo sapiens
  misc_RNA (1)...(19): siRNA sense strand
cuugugguguuuggaguaa

SEQ ID NO: 972180 - RNA, 19 nt, Homo sapiens
  misc_RNA (1)...(19): siRNA sense strand
auugggagcuguauuuggu

SEQ ID NO: 972181 - RNA, 19 nt, Homo sapiens
  misc_RNA (1)...(19): siRNA sense strand
gccuguugcuguucaugau

SEQ ID NO: 972182 - RNA, 19 nt, Homo sapiens
  misc_RNA (1)...(19): siRNA sense strand
ugccaucauugguggaaga

SEQ ID NO: 972183 - RNA, 19 nt, Homo sapiens
  misc_RNA (1)...(19): siRNA sense strand
gcucuggauccugguauug

SEQ ID NO: 972184 - RNA, 19 nt, Homo sapiens
  misc_RNA (1)...(19): siRNA sense strand
gguugucuccuuccucugu

SEQ ID NO: 972185 - RNA, 19 nt, Homo sapiens
  misc_RNA (1)...(19): siRNA sense strand
ccuggucaacauauucuuu

SEQ ID NO: 972186 - RNA, 19 nt, Homo sapiens
  misc_RNA (1)...(19): siRNA sense strand
ucagcaccauugccaagca

SEQ ID NO: 972187 - RNA, 19 nt, Homo sapiens
  misc_RNA (1)...(19): siRNA sense strand
ucaaauggcugguauaauu

SEQ ID NO: 972188 - RNA, 19 nt, Homo sapiens
  misc_RNA (1)...(19): siRNA sense strand
gaacagaucguugugauga

SEQ ID NO: 972189 - RNA, 19 nt, Homo sapiens
  misc_RNA (1)...(19): siRNA sense strand
uggaagaucugacuaaaga

SEQ ID NO: 972190 - RNA, 19 nt, Homo sapiens
  misc_RNA (1)...(19): siRNA sense strand
gaaagaugguguucuacau

SEQ ID NO: 972191 - RNA, 19 nt, Homo sapiens
  misc_RNA (1)...(19): siRNA sense strand
ggacuacacuggagaggau

SEQ ID NO: 972192 - RNA, 19 nt, Homo sapiens
  misc_RNA (1)...(19): siRNA sense strand
ccauggaucuacuggaaua

SEQ ID NO: 972193 - RNA, 19 nt, Homo sapiens
  misc_RNA (1)...(19): siRNA sense strand
gaccauggaucuacuggaa

SEQ ID NO: 972194 - RNA, 19 nt, Homo sapiens
  misc_RNA (1)...(19): siRNA sense strand
caaauggcugguauaauua

SEQ ID NO: 972195 - RNA, 19 nt, Homo sapiens
  misc_RNA (1)...(19): siRNA sense strand
ugacauugcuuacucugaa

SEQ ID NO: 972196 - RNA, 19 nt, Homo sapiens
  misc_RNA (1)...(19): siRNA sense strand
guaaaggaccugaaugaga

SEQ ID NO: 972197 - RNA, 19 nt, Homo sapiens
  misc_RNA (1)...(19): siRNA sense strand
ggaaacugaugaacaccaa

SEQ ID NO: 972198 - RNA, 19 nt, Homo sapiens
  misc_RNA (1)...(19): siRNA sense strand
ugaaccaccugccggauaa

SEQ ID NO: 972199 - RNA, 19 nt, Homo sapiens
  misc_RNA (1)...(19): siRNA sense strand
gaguaugcguugagacauu

SEQ ID NO: 972200 - RNA, 19 nt, Homo sapiens
  misc_RNA (1)...(19): siRNA sense strand
gaagaucugacuaaagaga

SEQ ID NO: 972201 - RNA, 19 nt, Homo sapiens
  misc_RNA (1)...(19): siRNA sense strand
gagaggcgaugcagaagca

SEQ ID NO: 972202 - RNA, 19 nt, Homo sapiens
  misc_RNA (1)...(19): siRNA sense strand
aggaucacguguucauuua

SEQ ID NO: 972203 - RNA, 19 nt, Homo sapiens
  misc_RNA (1)...(19): siRNA sense strand
gaccauccauuacauguac

SEQ ID NO: 972204 - RNA, 19 nt, Homo sapiens
  misc_RNA (1)...(19): siRNA sense strand
ccaugaaagugaugcaguu

SEQ ID NO: 972205 - RNA, 19 nt, Homo sapiens
  misc_RNA (1)...(19): siRNA sense strand
ggaagacucggacguggaa

SEQ ID NO: 972206 - RNA, 19 nt, Homo sapiens
  misc_RNA (1)...(19): siRNA sense strand
gaucguggcagguucaaau

SEQ ID NO: 972207 - RNA, 19 nt, Homo sapiens
  misc_RNA (1)...(19): siRNA sense strand
gggcauaggauccggcaaa

SEQ ID NO: 972208 - RNA, 19 nt, Homo sapiens
  misc_RNA (1)...(19): siRNA sense strand
guacgaguaugcguugaga

SEQ ID NO: 972209 - RNA, 19 nt, Homo sapiens
  misc_RNA (1)...(19): siRNA sense strand
cuaaagagacccugcacaa

SEQ ID NO: 972210 - RNA, 19 nt, Homo sapiens
  misc_RNA (1)...(19): siRNA sense strand
gagucuggguccaugauga

SEQ ID NO: 972211 - RNA, 19 nt, Homo sapiens
  misc_RNA (1)...(19): siRNA sense strand
caggaucacguguucauuu

SEQ ID NO: 972212 - RNA, 19 nt, Homo sapiens
  misc_RNA (1)...(19): siRNA sense strand
aaaggaaacugaugaacac

SEQ ID NO: 972213 - RNA, 19 nt, Homo sapiens
  misc_RNA (1)...(19): siRNA sense strand
aaaacaaucuccaccauga

SEQ ID NO: 972214 - RNA, 19 nt, Homo sapiens
  misc_RNA (1)...(19): siRNA sense strand
aagaugguguucuacauug

SEQ ID NO: 972215 - RNA, 19 nt, Homo sapiens
  misc_RNA (1)...(19): siRNA sense strand
uuacuucacugaccaugga

SEQ ID NO: 972216 - RNA, 19 nt, Homo sapiens
  misc_RNA (1)...(19): siRNA sense strand
gaucacguguucauuuacu

SEQ ID NO: 972217 - RNA, 19 nt, Homo sapiens
  misc_RNA (1)...(19): siRNA sense strand
guucaaauggcugguauaa

SEQ ID NO: 972218 - RNA, 19 nt, Homo sapiens
  misc_RNA (1)...(19): siRNA sense strand
caaucccacuccaggaauu

SEQ ID NO: 972219 - RNA, 19 nt, Homo sapiens
  misc_RNA (1)...(19): siRNA sense strand
ccagccacgucaugcagua

SEQ ID NO: 972220 - RNA, 19 nt, Homo sapiens
  misc_RNA (1)...(19): siRNA sense strand
gauguuaccccacaaaauu

SEQ ID NO: 972221 - RNA, 19 nt, Homo sapiens
  misc_RNA (1)...(19): siRNA sense strand
ggucaaccuuugugagaag

SEQ ID NO: 972222 - RNA, 19 nt, Homo sapiens
  misc_RNA (1)...(19): siRNA sense strand
uauagaugauccugaagau

SEQ ID NO: 972223 - RNA, 19 nt, Homo sapiens
  misc_RNA (1)...(19): siRNA sense strand
cagaggcccugcugcacuu

SEQ ID NO: 972224 - RNA, 19 nt, Homo sapiens
  misc_RNA (1)...(19): siRNA sense strand
caugcaguauggaaacaaa

SEQ ID NO: 972225 - RNA, 19 nt, Homo sapiens
  misc_RNA (1)...(19): siRNA sense strand
gacaaucccacuccaggaa

SEQ ID NO: 972226 - RNA, 19 nt, Homo sapiens
  misc_RNA (1)...(19): siRNA sense strand
accgaaagaugguguucua

SEQ ID NO: 972227 - RNA, 19 nt, Homo sapiens
  misc_RNA (1)...(19): siRNA sense strand
guugagaggcgaugcagaa

SEQ ID NO: 972228 - RNA, 19 nt, Homo sapiens
  misc_RNA (1)...(19): siRNA sense strand
aaagaugguguucuacauu

SEQ ID NO: 972229 - RNA, 19 nt, Homo sapiens
  misc_RNA (1)...(19): siRNA sense strand
cauaggauccggcaaaguc

SEQ ID NO: 972230 - RNA, 19 nt, Homo sapiens
  misc_RNA (1)...(19): siRNA sense strand
cguggaagaucugacuaaa

SEQ ID NO: 972231 - RNA, 19 nt, Homo sapiens
  misc_RNA (1)...(19): siRNA sense strand
uccauuacauguacaaaca

SEQ ID NO: 972232 - RNA, 19 nt, Homo sapiens
  misc_RNA (1)...(19): siRNA sense strand
caaugggauuccugacgaa

SEQ ID NO: 972233 - RNA, 19 nt, Homo sapiens
  misc_RNA (1)...(19): siRNA sense strand
aaauuuccuugcuguguug

SEQ ID NO: 972234 - RNA, 19 nt, Homo sapiens
  misc_RNA (1)...(19): siRNA sense strand
gaagucagugcguaagauc

SEQ ID NO: 972235 - RNA, 19 nt, Homo sapiens
  misc_RNA (1)...(19): siRNA sense strand
gagaagucagugcguaaga

SEQ ID NO: 972236 - RNA, 19 nt, Homo sapiens
  misc_RNA (1)...(19): siRNA sense strand
caacaccagccacgucaug

SEQ ID NO: 972237 - RNA, 19 nt, Homo sapiens
  misc_RNA (1)...(19): siRNA sense strand
ccagaucauucaccgcaau

SEQ ID NO: 972238 - RNA, 19 nt, Homo sapiens
  misc_RNA (1)...(19): siRNA sense strand
guccuacgccuguuacuau

SEQ ID NO: 972239 - RNA, 19 nt, Homo sapiens
  misc_RNA (1)...(19): siRNA sense strand
caauggcacagaugucuau

SEQ ID NO: 972240 - RNA, 19 nt, Homo sapiens
  misc_RNA (1)...(19): siRNA sense strand
cgaaagaugguguucuaca

SEQ ID NO: 972241 - RNA, 19 nt, Homo sapiens
  misc_RNA (1)...(19): siRNA sense strand
gugccuuggucacuacuga

SEQ ID NO: 972242 - RNA, 19 nt, Homo sapiens
  misc_RNA (1)...(19): siRNA sense strand
gcagugaagggcauaggau

SEQ ID NO: 972243 - RNA, 19 nt, Homo sapiens
  misc_RNA (1)...(19): siRNA sense strand
aagagacccugcacaagca

SEQ ID NO: 972244 - RNA, 19 nt, Homo sapiens
  misc_RNA (1)...(19): siRNA sense strand
gagaccauccauuacaugu

SEQ ID NO: 972245 - RNA, 19 nt, Homo sapiens
  misc_RNA (1)...(19): siRNA sense strand
acagaucguugugaugaug

SEQ ID NO: 972246 - RNA, 19 nt, Homo sapiens
  misc_RNA (1)...(19): siRNA sense strand
ggauaaaauuguccaugga

SEQ ID NO: 972247 - RNA, 19 nt, Homo sapiens
  misc_RNA (1)...(19): siRNA sense strand
gaugaacaccaaugaucug

SEQ ID NO: 972248 - RNA, 19 nt, Homo sapiens
  misc_RNA (1)...(19): siRNA sense strand
caucaauguuuaugcaacu

SEQ ID NO: 972249 - RNA, 19 nt, Homo sapiens
  misc_RNA (1)...(19): siRNA sense strand
gaugguguucuacauugaa

SEQ ID NO: 972250 - RNA, 19 nt, Homo sapiens
  misc_RNA (1)...(19): siRNA sense strand
ugaugcaguuucaggguau

SEQ ID NO: 972251 - RNA, 19 nt, Homo sapiens
  misc_RNA (1)...(19): siRNA sense strand
uccuauagaugauccugaa

SEQ ID NO: 972252 - RNA, 19 nt, Homo sapiens
  misc_RNA (1)...(19): siRNA sense strand
aguaugcguugagacauuu

SEQ ID NO: 972253 - RNA, 19 nt, Homo sapiens
  misc_RNA (1)...(19): siRNA sense strand
ggacguggaagaucugacu

SEQ ID NO: 972254 - RNA, 19 nt, Homo sapiens
  misc_RNA (1)...(19): siRNA sense strand
gguacagcgucaacuggau

SEQ ID NO: 972255 - RNA, 19 nt, Homo sapiens
  misc_RNA (1)...(19): siRNA sense strand
caaaauguaccgaaagaug

SEQ ID NO: 972256 - RNA, 19 nt, Homo sapiens
  misc_RNA (1)...(19): siRNA sense strand
aaacugaugaacaccaaug

SEQ ID NO: 972257 - RNA, 19 nt, Homo sapiens
  misc_RNA (1)...(19): siRNA sense strand
agaagucagugcguaagau

SEQ ID NO: 972258 - RNA, 19 nt, Homo sapiens
  misc_RNA (1)...(19): siRNA sense strand
cauuacauguacaaacaca

SEQ ID NO: 972259 - RNA, 19 nt, Homo sapiens
  misc_RNA (1)...(19): siRNA sense strand
cuacgccuguuacuaugau

SEQ ID NO: 972260 - RNA, 19 nt, Homo sapiens
  misc_RNA (1)...(19): siRNA sense strand
uguacgaugacauugcuua

SEQ ID NO: 972261 - RNA, 19 nt, Homo sapiens
  misc_RNA (1)...(19): siRNA sense strand
cauugaagccugugagucu

SEQ ID NO: 972262 - RNA, 19 nt, Homo sapiens
  misc_RNA (1)...(19): siRNA sense strand
cacaaaauguaccgaaaga

SEQ ID NO: 972263 - RNA, 19 nt, Homo sapiens
  misc_RNA (1)...(19): siRNA sense strand
ugccaugccuaccagauca

SEQ ID NO: 972264 - RNA, 19 nt, Homo sapiens
  misc_RNA (1)...(19): siRNA sense strand
aacaaucuccaccaugaaa

SEQ ID NO: 972265 - RNA, 19 nt, Homo sapiens
  misc_RNA (1)...(19): siRNA sense strand
agaugguguucuacauuga

SEQ ID NO: 972266 - RNA, 19 nt, Homo sapiens
  misc_RNA (1)...(19): siRNA sense strand
gacauugcuuacucugaag

SEQ ID NO: 972267 - RNA, 19 nt, Homo sapiens
  misc_RNA (1)...(19): siRNA sense strand
ugcguaagaucgucuccuu

SEQ ID NO: 972268 - RNA, 19 nt, Homo sapiens
  misc_RNA (1)...(19): siRNA sense strand
aaacaaucuccaccaugaa

SEQ ID NO: 972269 - RNA, 19 nt, Homo sapiens
  misc_RNA (1)...(19): siRNA sense strand
uaaagagacccugcacaag

SEQ ID NO: 972270 - RNA, 19 nt, Homo sapiens
  misc_RNA (1)...(19): siRNA sense strand
ccaauggcacagaugucua

SEQ ID NO: 972271 - RNA, 19 nt, Homo sapiens
  misc_RNA (1)...(19): siRNA sense strand
caugaaagugaugcaguuu

SEQ ID NO: 972272 - RNA, 19 nt, Homo sapiens
  misc_RNA (1)...(19): siRNA sense strand
cuauagaugauccugaaga

SEQ ID NO: 972273 - RNA, 19 nt, Homo sapiens
  misc_RNA (1)...(19): siRNA sense strand
acgaugacauugcuuacuc

SEQ ID NO: 972274 - RNA, 19 nt, Homo sapiens
  misc_RNA (1)...(19): siRNA sense strand
uggcacagaugucuaucag

SEQ ID NO: 972275 - RNA, 19 nt, Homo sapiens
  misc_RNA (1)...(19): siRNA sense strand
gugaugauguacgaugaca

SEQ ID NO: 972276 - RNA, 19 nt, Homo sapiens
  misc_RNA (1)...(19): siRNA sense strand
aaaauuuccuugcuguguu

SEQ ID NO: 972277 - RNA, 19 nt, Homo sapiens
  misc_RNA (1)...(19): siRNA sense strand
guaagaucgucuccuugcu

SEQ ID NO: 972278 - RNA, 19 nt, Homo sapiens
  misc_RNA (1)...(19): siRNA sense strand
gaaacgcaaagccaguucu

SEQ ID NO: 972279 - RNA, 19 nt, Homo sapiens
  misc_RNA (1)...(19): siRNA sense strand
gugaucaacaggcccaaug

SEQ ID NO: 972280 - RNA, 19 nt, Homo sapiens
  misc_RNA (1)...(19): siRNA sense strand
ggcauaggauccggcaaag

SEQ ID NO: 972281 - RNA, 19 nt, Homo sapiens
  misc_RNA (1)...(19): siRNA sense strand
cuccaggaauugugaucaa

SEQ ID NO: 972282 - RNA, 19 nt, Homo sapiens
  misc_RNA (1)...(19): siRNA sense strand
agaugauccugaagaugga

SEQ ID NO: 972283 - RNA, 19 nt, Homo sapiens
  misc_RNA (1)...(19): siRNA sense strand
uuuggaaaguagcuguauu

SEQ ID NO: 972284 - RNA, 19 nt, Homo sapiens
  misc_RNA (1)...(19): siRNA sense strand
cgaugacauugcuuacucu

SEQ ID NO: 972285 - RNA, 19 nt, Homo sapiens
  misc_RNA (1)...(19): siRNA sense strand
caggaauugugaucaacag

SEQ ID NO: 972286 - RNA, 19 nt, Homo sapiens
  misc_RNA (1)...(19): siRNA sense strand
gugccucucaccaucauga

SEQ ID NO: 972287 - RNA, 19 nt, Homo sapiens
  misc_RNA (1)...(19): siRNA sense strand
gaacaaucaccaaugaauu

SEQ ID NO: 972288 - RNA, 19 nt, Homo sapiens
  misc_RNA (1)...(19): siRNA sense strand
gcaaccagccggucuuauu

SEQ ID NO: 972289 - RNA, 19 nt, Homo sapiens
  misc_RNA (1)...(19): siRNA sense strand
ccagaugcaucaccuucua

SEQ ID NO: 972290 - RNA, 19 nt, Homo sapiens
  misc_RNA (1)...(19): siRNA sense strand
aaguaaagaugaaggauug

SEQ ID NO: 972291 - RNA, 19 nt, Homo sapiens
  misc_RNA (1)...(19): siRNA sense strand
ggaacaaucaccaaugaau

SEQ ID NO: 972292 - RNA, 19 nt, Homo sapiens
  misc_RNA (1)...(19): siRNA sense strand
gguuauugcuuugauugua

SEQ ID NO: 972293 - RNA, 19 nt, Homo sapiens
  misc_RNA (1)...(19): siRNA sense strand
uaacaacaccaaacacaga

SEQ ID NO: 972294 - RNA, 19 nt, Homo sapiens
  misc_RNA (1)...(19): siRNA sense strand
aaggaacaaucaccaauga

SEQ ID NO: 972295 - RNA, 19 nt, Homo sapiens
  misc_RNA (1)...(19): siRNA sense strand
gacaauuucucaugagucu

SEQ ID NO: 972296 - RNA, 19 nt, Homo sapiens
  misc_RNA (1)...(19): siRNA sense strand
ugaagcuucuuaccguuaa

SEQ ID NO: 972297 - RNA, 19 nt, Homo sapiens
  misc_RNA (1)...(19): siRNA sense strand
agaggcagcuaauaauuca

SEQ ID NO: 972298 - RNA, 19 nt, Homo sapiens
  misc_RNA (1)...(19): siRNA sense strand
ucucugaugucaacagcua

SEQ ID NO: 972299 - RNA, 19 nt, Homo sapiens
  misc_RNA (1)...(19): siRNA sense strand
caaguaaagaugaaggauu

SEQ ID NO: 972300 - RNA, 19 nt, Homo sapiens
  misc_RNA (1)...(19): siRNA sense strand
cucacagucucaaguaaua

SEQ ID NO: 972301 - RNA, 19 nt, Homo sapiens
  misc_RNA (1)...(19): siRNA sense strand
caacuggaacaacuccuaa

SEQ ID NO: 972302 - RNA, 19 nt, Homo sapiens
  misc_RNA (1)...(19): siRNA sense strand
cacagaaucauuacagaaa

SEQ ID NO: 972303 - RNA, 19 nt, Homo sapiens
  misc_RNA (1)...(19): siRNA sense strand
gauccgggcacaccagaaa

SEQ ID NO: 972304 - RNA, 19 nt, Homo sapiens
  misc_RNA (1)...(19): siRNA sense strand
aaacguaacaguaacaagu

SEQ ID NO: 972305 - RNA, 19 nt, Homo sapiens
  misc_RNA (1)...(19): siRNA sense strand
gugaagcuucuuaccguua

SEQ ID NO: 972306 - RNA, 19 nt, Homo sapiens
  misc_RNA (1)...(19): siRNA sense strand
ccaguuacaauuccagaaa

SEQ ID NO: 972307 - RNA, 19 nt, Homo sapiens
  misc_RNA (1)...(19): siRNA sense strand
guuccaaacccaagacuga

SEQ ID NO: 972308 - RNA, 19 nt, Homo sapiens
  misc_RNA (1)...(19): siRNA sense strand
caaccagccggucuuauuc

SEQ ID NO: 972309 - RNA, 19 nt, Homo sapiens
  misc_RNA (1)...(19): siRNA sense strand
guuaagacaauuucucaug

SEQ ID NO: 972310 - RNA, 19 nt, Homo sapiens
  misc_RNA (1)...(19): siRNA sense strand
uaaaaugucucugauguca

SEQ ID NO: 972311 - RNA, 19 nt, Homo sapiens
  misc_RNA (1)...(19): siRNA sense strand
ugagcacucugcacaagga

SEQ ID NO: 972312 - RNA, 19 nt, Homo sapiens
  misc_RNA (1)...(19): siRNA sense strand
uaagacaauuucucaugag

SEQ ID NO: 972313 - RNA, 19 nt, Homo sapiens
  misc_RNA (1)...(19): siRNA sense strand
cccaguauuugcagcagua

SEQ ID NO: 972314 - RNA, 19 nt, Homo sapiens
  misc_RNA (1)...(19): siRNA sense strand
accaaacacagaaucauua

SEQ ID NO: 972315 - RNA, 19 nt, Homo sapiens
  misc_RNA (1)...(19): siRNA sense strand
uaaaggaacaaucaccaau

SEQ ID NO: 972316 - RNA, 19 nt, Homo sapiens
  misc_RNA (1)...(19): siRNA sense strand
caccaaacacagaaucauu

SEQ ID NO: 972317 - RNA, 19 nt, Homo sapiens
  misc_RNA (1)...(19): siRNA sense strand
gagagcgugaagcuucuua

SEQ ID NO: 972318 - RNA, 19 nt, Homo sapiens
  misc_RNA (1)...(19): siRNA sense strand
ucaauaccaguuacaauuc

SEQ ID NO: 972319 - RNA, 19 nt, Homo sapiens
  misc_RNA (1)...(19): siRNA sense strand
ugaaagccacaaccacuga

SEQ ID NO: 972320 - RNA, 19 nt, Homo sapiens
  misc_RNA (1)...(19): siRNA sense strand
ggugguuauugcuuugauu

SEQ ID NO: 972321 - RNA, 19 nt, Homo sapiens
  misc_RNA (1)...(19): siRNA sense strand
guaaagaugaaggauugaa

SEQ ID NO: 972322 - RNA, 19 nt, Homo sapiens
  misc_RNA (1)...(19): siRNA sense strand
ggaaaugaucaaccucagu

SEQ ID NO: 972323 - RNA, 19 nt, Homo sapiens
  misc_RNA (1)...(19): siRNA sense strand
ggugagcacucugcacaag

SEQ ID NO: 972324 - RNA, 19 nt, Homo sapiens
  misc_RNA (1)...(19): siRNA sense strand
acacagaaucauuacagaa

SEQ ID NO: 972325 - RNA, 19 nt, Homo sapiens
  misc_RNA (1)...(19): siRNA sense strand
uauuuguucugguggguuu

SEQ ID NO: 972326 - RNA, 19 nt, Homo sapiens
  misc_RNA (1)...(19): siRNA sense strand
cucaauaccaguuacaauu

SEQ ID NO: 972327 - RNA, 19 nt, Homo sapiens
  misc_RNA (1)...(19): siRNA sense strand
cuccaucauuucaaacgua

SEQ ID NO: 972328 - RNA, 19 nt, Homo sapiens
  misc_RNA (1)...(19): siRNA sense strand
aaaugucucugaugucaac

SEQ ID NO: 972329 - RNA, 19 nt, Homo sapiens
  misc_RNA (1)...(19): siRNA sense strand
aaacacagaaucauuacag

SEQ ID NO: 972330 - RNA, 19 nt, Homo sapiens
  misc_RNA (1)...(19): siRNA sense strand
ggucuuauuccaguauuau

SEQ ID NO: 972331 - RNA, 19 nt, Homo sapiens
  misc_RNA (1)...(19): siRNA sense strand
uagaggcagcuaauaauuc

SEQ ID NO: 972332 - RNA, 19 nt, Homo sapiens
  misc_RNA (1)...(19): siRNA sense strand
aaaggaacaaucaccaaug

SEQ ID NO: 972333 - RNA, 19 nt, Homo sapiens
  misc_RNA (1)...(19): siRNA sense strand
uauaacaacaccaaacaca

SEQ ID NO: 972334 - RNA, 19 nt, Homo sapiens
  misc_RNA (1)...(19): siRNA sense strand
cagcaaccagccggucuua

SEQ ID NO: 972335 - RNA, 19 nt, Homo sapiens
  misc_RNA (1)...(19): siRNA sense strand
caacaccaaacacagaauc

SEQ ID NO: 972336 - RNA, 19 nt, Homo sapiens
  misc_RNA (1)...(19): siRNA sense strand
gcaagcacuucagcaacca

SEQ ID NO: 972337 - RNA, 19 nt, Homo sapiens
  misc_RNA (1)...(19): siRNA sense strand
uccaucauuucaaacguaa

SEQ ID NO: 972338 - RNA, 19 nt, Homo sapiens
  misc_RNA (1)...(19): siRNA sense strand
caaaguuccaaacccaaga

SEQ ID NO: 972339 - RNA, 19 nt, Homo sapiens
  misc_RNA (1)...(19): siRNA sense strand
cauuucaaacguaacagua

SEQ ID NO: 972340 - RNA, 19 nt, Homo sapiens
  misc_RNA (1)...(19): siRNA sense strand
cuucaagugaccauucuuu

SEQ ID NO: 972341 - RNA, 19 nt, Homo sapiens
  misc_RNA (1)...(19): siRNA sense strand
uuucuucugcccaguauuu

SEQ ID NO: 972342 - RNA, 19 nt, Homo sapiens
  misc_RNA (1)...(19): siRNA sense strand
aaauggaaaugaucaaccu

SEQ ID NO: 972343 - RNA, 19 nt, Homo sapiens
  misc_RNA (1)...(19): siRNA sense strand
caccucacagucucaagua

SEQ ID NO: 972344 - RNA, 19 nt, Homo sapiens
  misc_RNA (1)...(19): siRNA sense strand
caacaaaaccaucuauaac

SEQ ID NO: 972345 - RNA, 19 nt, Homo sapiens
  misc_RNA (1)...(19): siRNA sense strand
ugccggugguuauugcuuu

SEQ ID NO: 972346 - RNA, 19 nt, Homo sapiens
  misc_RNA (1)...(19): siRNA sense strand
cggucuuauuccaguauua

SEQ ID NO: 972347 - RNA, 19 nt, Homo sapiens
  misc_RNA (1)...(19): siRNA sense strand
uacauuaaccucaauacca

SEQ ID NO: 972348 - RNA, 19 nt, Homo sapiens
  misc_RNA (1)...(19): siRNA sense strand
cagaugcaucaccuucuaa

SEQ ID NO: 972349 - RNA, 19 nt, Homo sapiens
  misc_RNA (1)...(19): siRNA sense strand
gaaagccacaaccacugau

SEQ ID NO: 972350 - RNA, 19 nt, Homo sapiens
  misc_RNA (1)...(19): siRNA sense strand
cuaaaggaacaaucaccaa

SEQ ID NO: 972351 - RNA, 19 nt, Homo sapiens
  misc_RNA (1)...(19): siRNA sense strand
caauaccaguuacaauucc

SEQ ID NO: 972352 - RNA, 19 nt, Homo sapiens
  misc_RNA (1)...(19): siRNA sense strand
aaagaugaaggauugaaag

SEQ ID NO: 972353 - RNA, 19 nt, Homo sapiens
  misc_RNA (1)...(19): siRNA sense strand
aagacaauuucucaugagu

SEQ ID NO: 972354 - RNA, 19 nt, Homo sapiens
  misc_RNA (1)...(19): siRNA sense strand
cagcacagguguuuuagag

SEQ ID NO: 972355 - RNA, 19 nt, Homo sapiens
  misc_RNA (1)...(19): siRNA sense strand
aacacagaaucauuacaga

SEQ ID NO: 972356 - RNA, 19 nt, Homo sapiens
  misc_RNA (1)...(19): siRNA sense strand
caucauuucaaacguaaca

SEQ ID NO: 972357 - RNA, 19 nt, Homo sapiens
  misc_RNA (1)...(19): siRNA sense strand
gccggugguuauugcuuug

SEQ ID NO: 972358 - RNA, 19 nt, Homo sapiens
  misc_RNA (1)...(19): siRNA sense strand
ccaaacacagaaucauuac

SEQ ID NO: 972359 - RNA, 19 nt, Homo sapiens
  misc_RNA (1)...(19): siRNA sense strand
caacauuacaaaguuccaa

SEQ ID NO: 972360 - RNA, 19 nt, Homo sapiens
  misc_RNA (1)...(19): siRNA sense strand
ugaugucaacagcuacuuu

SEQ ID NO: 972361 - RNA, 19 nt, Homo sapiens
  misc_RNA (1)...(19): siRNA sense strand
gugguuauugcuuugauug

SEQ ID NO: 972362 - RNA, 19 nt, Homo sapiens
  misc_RNA (1)...(19): siRNA sense strand
acaacuggaacaacuccua

SEQ ID NO: 972363 - RNA, 19 nt, Homo sapiens
  misc_RNA (1)...(19): siRNA sense strand
cuuaaaaugucucugaugu

SEQ ID NO: 972364 - RNA, 19 nt, Homo sapiens
  misc_RNA (1)...(19): siRNA sense strand
ggauugaaagccacaacca

SEQ ID NO: 972365 - RNA, 19 nt, Homo sapiens
  misc_RNA (1)...(19): siRNA sense strand
ucuauaacaacaccaaaca

SEQ ID NO: 972366 - RNA, 19 nt, Homo sapiens
  misc_RNA (1)...(19): siRNA sense strand
uaaagagagcgugaagcuu

SEQ ID NO: 972367 - RNA, 19 nt, Homo sapiens
  misc_RNA (1)...(19): siRNA sense strand
acugguacauuaaccucaa

SEQ ID NO: 972368 - RNA, 19 nt, Homo sapiens
  misc_RNA (1)...(19): siRNA sense strand
ggaaguaguuagaaacaaa

SEQ ID NO: 972369 - RNA, 19 nt, Homo sapiens
  misc_RNA (1)...(19): siRNA sense strand
guacauauuucccgggaua

SEQ ID NO: 972370 - RNA, 19 nt, Homo sapiens
  misc_RNA (1)...(19): siRNA sense strand
ggacgagauuucuauaaga

SEQ ID NO: 972371 - RNA, 19 nt, Homo sapiens
  misc_RNA (1)...(19): siRNA sense strand
gagcgaagcuauggaagaa

SEQ ID NO: 972372 - RNA, 19 nt, Homo sapiens
  misc_RNA (1)...(19): siRNA sense strand
gagaggagaugauuuguac

SEQ ID NO: 972373 - RNA, 19 nt, Homo sapiens
  misc_RNA (1)...(19): siRNA sense strand
ucaaacagcuacugaaaca

SEQ ID NO: 972374 - RNA, 19 nt, Homo sapiens
  misc_RNA (1)...(19): siRNA sense strand
acaauggacugcaaggaua

SEQ ID NO: 972375 - RNA, 19 nt, Homo sapiens
  misc_RNA (1)...(19): siRNA sense strand
gaagaaggauuaaaagaug

SEQ ID NO: 972376 - RNA, 19 nt, Homo sapiens
  misc_RNA (1)...(19): siRNA sense strand
cgaaugcccuaaugucaaa

SEQ ID NO: 972377 - RNA, 19 nt, Homo sapiens
  misc_RNA (1)...(19): siRNA sense strand
gaaaggagaggagaugauu

SEQ ID NO: 972378 - RNA, 19 nt, Homo sapiens
  misc_RNA (1)...(19): siRNA sense strand
gaagaaguauaugcaggaa

SEQ ID NO: 972379 - RNA, 19 nt, Homo sapiens
  misc_RNA (1)...(19): siRNA sense strand
agacagaaauauuccaaga

SEQ ID NO: 972380 - RNA, 19 nt, Homo sapiens
  misc_RNA (1)...(19): siRNA sense strand
guacgauacuuauggugaa

SEQ ID NO: 972381 - RNA, 19 nt, Homo sapiens
  misc_RNA (1)...(19): siRNA sense strand
ggucacaagguacauauuu

SEQ ID NO: 972382 - RNA, 19 nt, Homo sapiens
  misc_RNA (1)...(19): siRNA sense strand
gaaucaaaguugucaagca

SEQ ID NO: 972383 - RNA, 19 nt, Homo sapiens
  misc_RNA (1)...(19): siRNA sense strand
ccaagaggaagugauauua

SEQ ID NO: 972384 - RNA, 19 nt, Homo sapiens
  misc_RNA (1)...(19): siRNA sense strand
agaaguauaugcaggaaau

SEQ ID NO: 972385 - RNA, 19 nt, Homo sapiens
  misc_RNA (1)...(19): siRNA sense strand
ccugggcgcuuccaaauga

SEQ ID NO: 972386 - RNA, 19 nt, Homo sapiens
  misc_RNA (1)...(19): siRNA sense strand
gacgagauuucuauaagau

SEQ ID NO: 972387 - RNA, 19 nt, Homo sapiens
  misc_RNA (1)...(19): siRNA sense strand
cgaagugccucuauaaagg

SEQ ID NO: 972388 - RNA, 19 nt, Homo sapiens
  misc_RNA (1)...(19): siRNA sense strand
gaaacuagcccugcagcuu

SEQ ID NO: 972389 - RNA, 19 nt, Homo sapiens
  misc_RNA (1)...(19): siRNA sense strand
gagagaagguaucaaacag

SEQ ID NO: 972390 - RNA, 19 nt, Homo sapiens
  misc_RNA (1)...(19): siRNA sense strand
ggauauuacucacuuggau

SEQ ID NO: 972391 - RNA, 19 nt, Homo sapiens
  misc_RNA (1)...(19): siRNA sense strand
ggagaggagaugauuugua

SEQ ID NO: 972392 - RNA, 19 nt, Homo sapiens
  misc_RNA (1)...(19): siRNA sense strand
caagggcucuuugauaauc

SEQ ID NO: 972393 - RNA, 19 nt, Homo sapiens
  misc_RNA (1)...(19): siRNA sense strand
gcgaagcuauggaagaaag

SEQ ID NO: 972394 - RNA, 19 nt, Homo sapiens
  misc_RNA (1)...(19): siRNA sense strand
ggucagugcagaagguaua

SEQ ID NO: 972395 - RNA, 19 nt, Homo sapiens
  misc_RNA (1)...(19): siRNA sense strand
gaacccugaugauccacaa

SEQ ID NO: 972396 - RNA, 19 nt, Homo sapiens
  misc_RNA (1)...(19): siRNA sense strand
gguauacaauggacugcaa

SEQ ID NO: 972397 - RNA, 19 nt, Homo sapiens
  misc_RNA (1)...(19): siRNA sense strand
gaacgaacgcuggaaguag

SEQ ID NO: 972398 - RNA, 19 nt, Homo sapiens
  misc_RNA (1)...(19): siRNA sense strand
aaacggaagugcaauuguc

SEQ ID NO: 972399 - RNA, 19 nt, Homo sapiens
  misc_RNA (1)...(19): siRNA sense strand
gugagaaacggaaacagua

SEQ ID NO: 972400 - RNA, 19 nt, Homo sapiens
  misc_RNA (1)...(19): siRNA sense strand
aaacggaaacaguacgaua

SEQ ID NO: 972401 - RNA, 19 nt, Homo sapiens
  misc_RNA (1)...(19): siRNA sense strand
gcuuugagauggauauuac

SEQ ID NO: 972402 - RNA, 19 nt, Homo sapiens
  misc_RNA (1)...(19): siRNA sense strand
gcaaacggaagugcaauug

SEQ ID NO: 972403 - RNA, 19 nt, Homo sapiens
  misc_RNA (1)...(19): siRNA sense strand
cagcaagacagaaauauuc

SEQ ID NO: 972404 - RNA, 19 nt, Homo sapiens
  misc_RNA (1)...(19): siRNA sense strand
caagaggaagugauauuau

SEQ ID NO: 972405 - RNA, 19 nt, Homo sapiens
  misc_RNA (1)...(19): siRNA sense strand
gaagugccucuauaaagga

SEQ ID NO: 972406 - RNA, 19 nt, Homo sapiens
  misc_RNA (1)...(19): siRNA sense strand
uaacagaggaagcgagaga

SEQ ID NO: 972407 - RNA, 19 nt, Homo sapiens
  misc_RNA (1)...(19): siRNA sense strand
uaucaaacagcuacugaaa

SEQ ID NO: 972408 - RNA, 19 nt, Homo sapiens
  misc_RNA (1)...(19): siRNA sense strand
ggaucugggugcugcuuau

SEQ ID NO: 972409 - RNA, 19 nt, Homo sapiens
  misc_RNA (1)...(19): siRNA sense strand
caaaagaacaguuaacaga

SEQ ID NO: 972410 - RNA, 19 nt, Homo sapiens
  misc_RNA (1)...(19): siRNA sense strand
ugucaagcacccaauauuu

SEQ ID NO: 972411 - RNA, 19 nt, Homo sapiens
  misc_RNA (1)...(19): siRNA sense strand
ucaaacuagugaaugaaga

SEQ ID NO: 972412 - RNA, 19 nt, Homo sapiens
  misc_RNA (1)...(19): siRNA sense strand
gcaauugucggcaagagau

SEQ ID NO: 972413 - RNA, 19 nt, Homo sapiens
  misc_RNA (1)...(19): siRNA sense strand
caaacuagugaaugaagaa

SEQ ID NO: 972414 - RNA, 19 nt, Homo sapiens
  misc_RNA (1)...(19): siRNA sense strand
ggauuuugguuucauguuu

SEQ ID NO: 972415 - RNA, 19 nt, Homo sapiens
  misc_RNA (1)...(19): siRNA sense strand
ggagcgaagcuauggaaga

SEQ ID NO: 972416 - RNA, 19 nt, Homo sapiens
  misc_RNA (1)...(19): siRNA sense strand
uauuguagaucuagaaguc

SEQ ID NO: 972417 - RNA, 19 nt, Homo sapiens
  misc_RNA (1)...(19): siRNA sense strand
gucaagcacccaauauuug

SEQ ID NO: 972418 - RNA, 19 nt, Homo sapiens
  misc_RNA (1)...(19): siRNA sense strand
ccucgaagugccucuauaa

SEQ ID NO: 972419 - RNA, 19 nt, Homo sapiens
  misc_RNA (1)...(19): siRNA sense strand
ggaagugauauuauuguag

SEQ ID NO: 972420 - RNA, 19 nt, Homo sapiens
  misc_RNA (1)...(19): siRNA sense strand
gcagaagguauacaaugga

SEQ ID NO: 972421 - RNA, 19 nt, Homo sapiens
  misc_RNA (1)...(19): siRNA sense strand
cgagagaagguaucaaaca

SEQ ID NO: 972422 - RNA, 19 nt, Homo sapiens
  misc_RNA (1)...(19): siRNA sense strand
ugagagacggcauggagua

SEQ ID NO: 972423 - RNA, 19 nt, Homo sapiens
  misc_RNA (1)...(19): siRNA sense strand
cacaagcccaggagaaauu

SEQ ID NO: 972424 - RNA, 19 nt, Homo sapiens
  misc_RNA (1)...(19): siRNA sense strand
cggacgagauuucuauaag

SEQ ID NO: 972425 - RNA, 19 nt, Homo sapiens
  misc_RNA (1)...(19): siRNA sense strand
gcccuaaugucaaacuagu

SEQ ID NO: 972426 - RNA, 19 nt, Homo sapiens
  misc_RNA (1)...(19): siRNA sense strand
gacgaaugcccuaauguca

SEQ ID NO: 972427 - RNA, 19 nt, Homo sapiens
  misc_RNA (1)...(19): siRNA sense strand
caagacagaaauauuccaa

SEQ ID NO: 972428 - RNA, 19 nt, Homo sapiens
  misc_RNA (1)...(19): siRNA sense strand
gaggaagugauauuauugu

SEQ ID NO: 972429 - RNA, 19 nt, Homo sapiens
  misc_RNA (1)...(19): siRNA sense strand
cgauacuuauggugaagaa

SEQ ID NO: 972430 - RNA, 19 nt, Homo sapiens
  misc_RNA (1)...(19): siRNA sense strand
caacuuugacaacaacaau

SEQ ID NO: 972431 - RNA, 19 nt, Homo sapiens
  misc_RNA (1)...(19): siRNA sense strand
agauggauauuacucacuu

SEQ ID NO: 972432 - RNA, 19 nt, Homo sapiens
  misc_RNA (1)...(19): siRNA sense strand
aacgaacgcuggaaguaga

SEQ ID NO: 972433 - RNA, 19 nt, Homo sapiens
  misc_RNA (1)...(19): siRNA sense strand
ggagguggucugcgacgaa

SEQ ID NO: 972434 - RNA, 19 nt, Homo sapiens
  misc_RNA (1)...(19): siRNA sense strand
gugcagaagguauacaaug

SEQ ID NO: 972435 - RNA, 19 nt, Homo sapiens
  misc_RNA (1)...(19): siRNA sense strand
aaacagcuacugaaacaag

SEQ ID NO: 972436 - RNA, 19 nt, Homo sapiens
  misc_RNA (1)...(19): siRNA sense strand
gucacaagguacauauuuc

SEQ ID NO: 972437 - RNA, 19 nt, Homo sapiens
  misc_RNA (1)...(19): siRNA sense strand
cgucagcaagacagaaaua

SEQ ID NO: 972438 - RNA, 19 nt, Homo sapiens
  misc_RNA (1)...(19): siRNA sense strand
gguaucaaacagcuacuga

SEQ ID NO: 972439 - RNA, 19 nt, Homo sapiens
  misc_RNA (1)...(19): siRNA sense strand
gauggauauuacucacuug

SEQ ID NO: 972440 - RNA, 19 nt, Homo sapiens
  misc_RNA (1)...(19): siRNA sense strand
ucagcaagacagaaauauu

SEQ ID NO: 972441 - RNA, 19 nt, Homo sapiens
  misc_RNA (1)...(19): siRNA sense strand
gagguggucugcgacgaau

SEQ ID NO: 972442 - RNA, 19 nt, Homo sapiens
  misc_RNA (1)...(19): siRNA sense strand
gaagcgagagaagguauca

SEQ ID NO: 972443 - RNA, 19 nt, Homo sapiens
  misc_RNA (1)...(19): siRNA sense strand
ccuaaugucaaacuaguga

SEQ ID NO: 972444 - RNA, 19 nt, Homo sapiens
  misc_RNA (1)...(19): siRNA sense strand
aaggagaggagaugauuug

SEQ ID NO: 972445 - RNA, 19 nt, Homo sapiens
  misc_RNA (1)...(19): siRNA sense strand
gccucgaagugccucuaua

SEQ ID NO: 972446 - RNA, 19 nt, Homo sapiens
  misc_RNA (1)...(19): siRNA sense strand
gauggucacaagguacaua

SEQ ID NO: 972447 - RNA, 19 nt, Homo sapiens
  misc_RNA (1)...(19): siRNA sense strand
gugccucuauaaaggauau

SEQ ID NO: 972448 - RNA, 19 nt, Homo sapiens
  misc_RNA (1)...(19): siRNA sense strand
gggugcugcuuaugagguu

SEQ ID NO: 972449 - RNA, 19 nt, Homo sapiens
  misc_RNA (1)...(19): siRNA sense strand
ugcagaagguauacaaugg

SEQ ID NO: 972450 - RNA, 19 nt, Homo sapiens
  misc_RNA (1)...(19): siRNA sense strand
caauaucaagggcucuuug

SEQ ID NO: 972451 - RNA, 19 nt, Homo sapiens
  misc_RNA (1)...(19): siRNA sense strand
agaacgaacgcuggaagua

SEQ ID NO: 972452 - RNA, 19 nt, Homo sapiens
  misc_RNA (1)...(19): siRNA sense strand
cgacgaaugcccuaauguc

SEQ ID NO: 972453 - RNA, 19 nt, Homo sapiens
  misc_RNA (1)...(19): siRNA sense strand
gaaguauaugcaggaaauu

SEQ ID NO: 972454 - RNA, 19 nt, Homo sapiens
  misc_RNA (1)...(19): siRNA sense strand
agaggaagugauauuauug

SEQ ID NO: 972455 - RNA, 19 nt, Homo sapiens
  misc_RNA (1)...(19): siRNA sense strand
gugauugccggacgagauu

SEQ ID NO: 972456 - RNA, 19 nt, Homo sapiens
  misc_RNA (1)...(19): siRNA sense strand
gcagaaccugagcaccuuu

SEQ ID NO: 972457 - RNA, 19 nt, Homo sapiens
  misc_RNA (1)...(19): siRNA sense strand
cacccaauauuugaaagga

SEQ ID NO: 972458 - RNA, 19 nt, Homo sapiens
  misc_RNA (1)...(19): siRNA sense strand
gaaauuuuguggaaguagu

SEQ ID NO: 972459 - RNA, 19 nt, Homo sapiens
  misc_RNA (1)...(19): siRNA sense strand
ggcaaacggaagugcaauu

SEQ ID NO: 972460 - RNA, 19 nt, Homo sapiens
  misc_RNA (1)...(19): siRNA sense strand
ucgaagugccucuauaaag

SEQ ID NO: 972461 - RNA, 19 nt, Homo sapiens
  misc_RNA (1)...(19): siRNA sense strand
gaggaagcgagagaaggua

SEQ ID NO: 972462 - RNA, 19 nt, Homo sapiens
  misc_RNA (1)...(19): siRNA sense strand
ugacaacaacaauaucaag

SEQ ID NO: 972463 - RNA, 19 nt, Homo sapiens
  misc_RNA (1)...(19): siRNA sense strand
gaagggcuccccaacuuug

SEQ ID NO: 972464 - RNA, 19 nt, Homo sapiens
  misc_RNA (1)...(19): siRNA sense strand
gaacgcuggaaguagaaau

SEQ ID NO: 972465 - RNA, 19 nt, Homo sapiens
  misc_RNA (1)...(19): siRNA sense strand
gagauuuacgguuccgaau

SEQ ID NO: 972466 - RNA, 19 nt, Homo sapiens
  misc_RNA (1)...(19): siRNA sense strand
caauggacugcaaggauau

SEQ ID NO: 972467 - RNA, 19 nt, Homo sapiens
  misc_RNA (1)...(19): siRNA sense strand
gaccggaacccugaugauc

SEQ ID NO: 972468 - RNA, 19 nt, Homo sapiens
  misc_RNA (1)...(19): siRNA sense strand
gaaacucacugguggacaa

SEQ ID NO: 972469 - RNA, 19 nt, Homo sapiens
  misc_RNA (1)...(19): siRNA sense strand
ccaaagacaaucagaauuu

SEQ ID NO: 972470 - RNA, 19 nt, Homo sapiens
  misc_RNA (1)...(19): siRNA sense strand
caaagacaaucagaauuuc

SEQ ID NO: 972471 - RNA, 19 nt, Homo sapiens
  misc_RNA (1)...(19): siRNA sense strand
gaacugcuucugugacuug

SEQ ID NO: 972472 - RNA, 19 nt, Homo sapiens
  misc_RNA (1)...(19): siRNA sense strand
gaacggcaguggcauaacg

SEQ ID NO: 972473 - RNA, 19 nt, Homo sapiens
  misc_RNA (1)...(19): siRNA sense strand
cauaacgacugcuuuaacu

SEQ ID NO: 972474 - RNA, 19 nt, Homo sapiens
  misc_RNA (1)...(19): siRNA sense strand
gcagugcguucagugcaaa

SEQ ID NO: 972475 - RNA, 19 nt, Homo sapiens
  misc_RNA (1)...(19): siRNA sense strand
gaggaacggcaguggcaua

SEQ ID NO: 972476 - RNA, 19 nt, Homo sapiens
  misc_RNA (1)...(19): siRNA sense strand
gcgaugacuuugccuacug

SEQ ID NO: 972477 - RNA, 19 nt, Homo sapiens
  misc_RNA (1)...(19): siRNA sense strand
gaccggcacuggcaugaag

SEQ ID NO: 972478 - RNA, 19 nt, Homo sapiens
  misc_RNA (1)...(19): siRNA sense strand
uggcauaacgacugcuuua

SEQ ID NO: 972479 - RNA, 19 nt, Homo sapiens
  misc_RNA (1)...(19): siRNA sense strand
uaacgacugcuuuaacugu

SEQ ID NO: 972480 - RNA, 19 nt, Homo sapiens
  misc_RNA (1)...(19): siRNA sense strand
guacagacugcuauuccaa

SEQ ID NO: 972481 - RNA, 19 nt, Homo sapiens
  misc_RNA (1)...(19): siRNA sense strand
uaagaagugcucccucuca

SEQ ID NO: 972482 - RNA, 19 nt, Homo sapiens
  misc_RNA (1)...(19): siRNA sense strand
gcauaacgacugcuuuaac

SEQ ID NO: 972483 - RNA, 19 nt, Homo sapiens
  misc_RNA (1)...(19): siRNA sense strand
gcaacgaaucucucuuugg

SEQ ID NO: 972484 - RNA, 19 nt, Homo sapiens
  misc_RNA (1)...(19): siRNA sense strand
cugcuucugugacuuguau

SEQ ID NO: 972485 - RNA, 19 nt, Homo sapiens
  misc_RNA (1)...(19): siRNA sense strand
ugugugcccugcuaugaga

SEQ ID NO: 972486 - RNA, 19 nt, Homo sapiens
  misc_RNA (1)...(19): siRNA sense strand
ucacagcucgcgaugacuu

SEQ ID NO: 972487 - RNA, 19 nt, Homo sapiens
  misc_RNA (1)...(19): siRNA sense strand
aacgacugcuuuaacugua

SEQ ID NO: 972488 - RNA, 19 nt, Homo sapiens
  misc_RNA (1)...(19): siRNA sense strand
gaggaccagcugcucugua

SEQ ID NO: 972489 - RNA, 19 nt, Homo sapiens
  misc_RNA (1)...(19): siRNA sense strand
ugccaggaaugcaagaaga

SEQ ID NO: 972490 - RNA, 19 nt, Homo sapiens
  misc_RNA (1)...(19): siRNA sense strand
ccaagugccaggaaugcaa

SEQ ID NO: 972491 - RNA, 19 nt, Homo sapiens
  misc_RNA (1)...(19): siRNA sense strand
gcccugcuaugagaaacaa

SEQ ID NO: 972492 - RNA, 19 nt, Homo sapiens
  misc_RNA (1)...(19): siRNA sense strand
ucacagagagggacgacau

SEQ ID NO: 972493 - RNA, 19 nt, Homo sapiens
  misc_RNA (1)...(19): siRNA sense strand
ccuacugccugaacugcuu

SEQ ID NO: 972494 - RNA, 19 nt, Homo sapiens
  misc_RNA (1)...(19): siRNA sense strand
uugcaacgaaucucucuuu

SEQ ID NO: 972495 - RNA, 19 nt, Homo sapiens
  misc_RNA (1)...(19): siRNA sense strand
ggcauaacgacugcuuuaa

SEQ ID NO: 972496 - RNA, 19 nt, Homo sapiens
  misc_RNA (1)...(19): siRNA sense strand
cccgcaagauggaguacaa

SEQ ID NO: 972497 - RNA, 19 nt, Homo sapiens
  misc_RNA (1)...(19): siRNA sense strand
acgacugcuuuaacuguaa

SEQ ID NO: 972498 - RNA, 19 nt, Homo sapiens
  misc_RNA (1)...(19): siRNA sense strand
gaaugcaagaagaccauca

SEQ ID NO: 972499 - RNA, 19 nt, Homo sapiens
  misc_RNA (1)...(19): siRNA sense strand
cuucacagcucgcgaugac

SEQ ID NO: 972500 - RNA, 19 nt, Homo sapiens
  misc_RNA (1)...(19): siRNA sense strand
cgacugcuuuaacuguaag

SEQ ID NO: 972501 - RNA, 19 nt, Homo sapiens
  misc_RNA (1)...(19): siRNA sense strand
ugcuuuaacuguaagaagu

SEQ ID NO: 972502 - RNA, 19 nt, Homo sapiens
  misc_RNA (1)...(19): siRNA sense strand
ccaacgaguacucauccaa

SEQ ID NO: 972503 - RNA, 19 nt, Homo sapiens
  misc_RNA (1)...(19): siRNA sense strand
ugcaacgaaucucucuuug

SEQ ID NO: 972504 - RNA, 19 nt, Homo sapiens
  misc_RNA (1)...(19): siRNA sense strand
cccaaagacaaucagaauu

SEQ ID NO: 972505 - RNA, 19 nt, Homo sapiens
  misc_RNA (1)...(19): siRNA sense strand
gcacaaaauacaucuccuu

SEQ ID NO: 972506 - RNA, 19 nt, Homo sapiens
  misc_RNA (1)...(19): siRNA sense strand
guacccgcaagauggagua

SEQ ID NO: 972507 - RNA, 19 nt, Homo sapiens
  misc_RNA (1)...(19): siRNA sense strand
ucacagaccucucauuuau

SEQ ID NO: 972508 - RNA, 19 nt, Homo sapiens
  misc_RNA (1)...(19): siRNA sense strand
caucuauacugacaaguua

SEQ ID NO: 972509 - RNA, 19 nt, Homo sapiens
  misc_RNA (1)...(19): siRNA sense strand
gugaaagucugcaucauug

SEQ ID NO: 972510 - RNA, 19 nt, Homo sapiens
  misc_RNA (1)...(19): siRNA sense strand
ggccuucucugacagcaua

SEQ ID NO: 972511 - RNA, 19 nt, Homo sapiens
  misc_RNA (1)...(19): siRNA sense strand
gaccaaggaugacuuugug

SEQ ID NO: 972512 - RNA, 19 nt, Homo sapiens
  misc_RNA (1)...(19): siRNA sense strand
ggcgugagcucuacuacuu

SEQ ID NO: 972513 - RNA, 19 nt, Homo sapiens
  misc_RNA (1)...(19): siRNA sense strand
ggacaaagugggcgaacaa

SEQ ID NO: 972514 - RNA, 19 nt, Homo sapiens
  misc_RNA (1)...(19): siRNA sense strand
acagaccucucauuuaugu

SEQ ID NO: 972515 - RNA, 19 nt, Homo sapiens
  misc_RNA (1)...(19): siRNA sense strand
ggugaaagucugcaucauu

SEQ ID NO: 972516 - RNA, 19 nt, Homo sapiens
  misc_RNA (1)...(19): siRNA sense strand
ggaaccugcuggccaaaca

SEQ ID NO: 972517 - RNA, 19 nt, Homo sapiens
  misc_RNA (1)...(19): siRNA sense strand
acgaauggcugaccaagga

SEQ ID NO: 972518 - RNA, 19 nt, Homo sapiens
  misc_RNA (1)...(19): siRNA sense strand
gauuauuuccgcaucuaua

SEQ ID NO: 972519 - RNA, 19 nt, Homo sapiens
  misc_RNA (1)...(19): siRNA sense strand
ugugacagauuucauccua

SEQ ID NO: 972520 - RNA, 19 nt, Homo sapiens
  misc_RNA (1)...(19): siRNA sense strand
ugaaggugauuaaugugaa

SEQ ID NO: 972521 - RNA, 19 nt, Homo sapiens
  misc_RNA (1)...(19): siRNA sense strand
ccucacagaccucucauuu

SEQ ID NO: 972522 - RNA, 19 nt, Homo sapiens
  misc_RNA (1)...(19): siRNA sense strand
gcauaaggcgugagcucua

SEQ ID NO: 972523 - RNA, 19 nt, Homo sapiens
  misc_RNA (1)...(19): siRNA sense strand
cuacaacccuggccuggau

SEQ ID NO: 972524 - RNA, 19 nt, Homo sapiens
  misc_RNA (1)...(19): siRNA sense strand
gaggagggaucccagaaac

SEQ ID NO: 972525 - RNA, 19 nt, Homo sapiens
  misc_RNA (1)...(19): siRNA sense strand
ugacagauuucauccuaag

SEQ ID NO: 972526 - RNA, 19 nt, Homo sapiens
  misc_RNA (1)...(19): siRNA sense strand
ggagggaucccagaaacuu

SEQ ID NO: 972527 - RNA, 19 nt, Homo sapiens
  misc_RNA (1)...(19): siRNA sense strand
gcuacugcgucuccaaguu

SEQ ID NO: 972528 - RNA, 19 nt, Homo sapiens
  misc_RNA (1)...(19): siRNA sense strand
gcaucuauacugacaaguu

SEQ ID NO: 972529 - RNA, 19 nt, Homo sapiens
  misc_RNA (1)...(19): siRNA sense strand
ggacagcuacggagaggau

SEQ ID NO: 972530 - RNA, 19 nt, Homo sapiens
  misc_RNA (1)...(19): siRNA sense strand
guugaggccuucucugaca

SEQ ID NO: 972531 - RNA, 19 nt, Homo sapiens
  misc_RNA (1)...(19): siRNA sense strand
gaaggugauuaaugugaac

SEQ ID NO: 972532 - RNA, 19 nt, Homo sapiens
  misc_RNA (1)...(19): siRNA sense strand
gcccaguggucccaacgaa

SEQ ID NO: 972533 - RNA, 19 nt, Homo sapiens
  misc_RNA (1)...(19): siRNA sense strand
cuacugcgucuccaaguuu

SEQ ID NO: 972534 - RNA, 19 nt, Homo sapiens
  misc_RNA (1)...(19): siRNA sense strand
cuacggagaggauuauuuc

SEQ ID NO: 972535 - RNA, 19 nt, Homo sapiens
  misc_RNA (1)...(19): siRNA sense strand
cgugagcucuacuacuuug

SEQ ID NO: 972536 - RNA, 19 nt, Homo sapiens
  misc_RNA (1)...(19): siRNA sense strand
caagaacugcaaucugguu

SEQ ID NO: 972537 - RNA, 19 nt, Homo sapiens
  misc_RNA (1)...(19): siRNA sense strand
gcagaccacccuacuggau

SEQ ID NO: 972538 - RNA, 19 nt, Homo sapiens
  misc_RNA (1)...(19): siRNA sense strand
gugacagauuucauccuaa

SEQ ID NO: 972539 - RNA, 19 nt, Homo sapiens
  misc_RNA (1)...(19): siRNA sense strand
gcuacggagaggauuauuu

SEQ ID NO: 972540 - RNA, 19 nt, Homo sapiens
  misc_RNA (1)...(19): siRNA sense strand
ucacgcaugcgaaagcuuu

SEQ ID NO: 972541 - RNA, 19 nt, Homo sapiens
  misc_RNA (1)...(19): siRNA sense strand
gcguugaggccuucucuga

SEQ ID NO: 972542 - RNA, 19 nt, Homo sapiens
  misc_RNA (1)...(19): siRNA sense strand
gugaaggugauuaauguga

SEQ ID NO: 972543 - RNA, 19 nt, Homo sapiens
  misc_RNA (1)...(19): siRNA sense strand
gaaagucugcaucauugag

SEQ ID NO: 972544 - RNA, 19 nt, Homo sapiens
  misc_RNA (1)...(19): siRNA sense strand
ccaaggaugacuuugugaa

SEQ ID NO: 972545 - RNA, 19 nt, Homo sapiens
  misc_RNA (1)...(19): siRNA sense strand
ccaguggucccaacgaaug

SEQ ID NO: 972546 - RNA, 19 nt, Homo sapiens
  misc_RNA (1)...(19): siRNA sense strand
uugugaaggugauuaaugu

SEQ ID NO: 972547 - RNA, 19 nt, Homo sapiens
  misc_RNA (1)...(19): siRNA sense strand
gaggauuauuuccgcaucu

SEQ ID NO: 972548 - RNA, 19 nt, Homo sapiens
  misc_RNA (1)...(19): siRNA sense strand
gaacuaucggacagccauu

SEQ ID NO: 972549 - RNA, 19 nt, Homo sapiens
  misc_RNA (1)...(19): siRNA sense strand
cuacaucccucuggcuaag

SEQ ID NO: 972550 - RNA, 19 nt, Homo sapiens
  misc_RNA (1)...(19): siRNA sense strand
gcugaccaaggaugacuuu

SEQ ID NO: 972551 - RNA, 19 nt, Homo sapiens
  misc_RNA (1)...(19): siRNA sense strand
gaaccuggugggacugauc

SEQ ID NO: 972552 - RNA, 19 nt, Homo sapiens
  misc_RNA (1)...(19): siRNA sense strand
ugaccaaggaugacuuugu

SEQ ID NO: 972553 - RNA, 19 nt, Homo sapiens
  misc_RNA (1)...(19): siRNA sense strand
agaccacccuacuggaugu

SEQ ID NO: 972554 - RNA, 19 nt, Homo sapiens
  misc_RNA (1)...(19): siRNA sense strand
ucauugagccagggaacua

SEQ ID NO: 972555 - RNA, 19 nt, Homo sapiens
  misc_RNA (1)...(19): siRNA sense strand
auguaucgcugguucaaga

SEQ ID NO: 972556 - RNA, 19 nt, Homo sapiens
  misc_RNA (1)...(19): siRNA sense strand
agaccucucauuuauguau

SEQ ID NO: 972557 - RNA, 19 nt, Homo sapiens
  misc_RNA (1)...(19): siRNA sense strand
ucugggcccuggugaacaa

SEQ ID NO: 972558 - RNA, 19 nt, Homo sapiens
  misc_RNA (1)...(19): siRNA sense strand
gaugucaccaagagcgaaa

SEQ ID NO: 972559 - RNA, 19 nt, Homo sapiens
  misc_RNA (1)...(19): siRNA sense strand
gagcccagagucagagaug

SEQ ID NO: 972560 - RNA, 19 nt, Homo sapiens
  misc_RNA (1)...(19): siRNA sense strand
cagaaacuucagcgggaua

SEQ ID NO: 972561 - RNA, 19 nt, Homo sapiens
  misc_RNA (1)...(19): siRNA sense strand
cauaaggcgugagcucuac

SEQ ID NO: 972562 - RNA, 19 nt, Homo sapiens
  misc_RNA (1)...(19): siRNA sense strand
caaggaugacuuugugaag

SEQ ID NO: 972563 - RNA, 19 nt, Homo sapiens
  misc_RNA (1)...(19): siRNA sense strand
ugaggagggaucccagaaa

SEQ ID NO: 972564 - RNA, 19 nt, Homo sapiens
  misc_RNA (1)...(19): siRNA sense strand
ccgcaucuauacugacaag

SEQ ID NO: 972565 - RNA, 19 nt, Homo sapiens
  misc_RNA (1)...(19): siRNA sense strand
caagagcgaaagcaucaag

SEQ ID NO: 972566 - RNA, 19 nt, Homo sapiens
  misc_RNA (1)...(19): siRNA sense strand
cuaagccgguaccuuccaa

SEQ ID NO: 972567 - RNA, 19 nt, Homo sapiens
  misc_RNA (1)...(19): siRNA sense strand
ggagcaugcuauuguuucc

SEQ ID NO: 972568 - RNA, 19 nt, Homo sapiens
  misc_RNA (1)...(19): siRNA sense strand
cucacagaccucucauuua

SEQ ID NO: 972569 - RNA, 19 nt, Homo sapiens
  misc_RNA (1)...(19): siRNA sense strand
gggacaaagugggcgaaca

SEQ ID NO: 972570 - RNA, 19 nt, Homo sapiens
  misc_RNA (1)...(19): siRNA sense strand
ucagcgggauaccuccuau

SEQ ID NO: 972571 - RNA, 19 nt, Homo sapiens
  misc_RNA (1)...(19): siRNA sense strand
ugaaagucugcaucauuga

SEQ ID NO: 972572 - RNA, 19 nt, Homo sapiens
  misc_RNA (1)...(19): siRNA sense strand
acaucccucuggcuaaguu

SEQ ID NO: 972573 - RNA, 19 nt, Homo sapiens
  misc_RNA (1)...(19): siRNA sense strand
ggauuauuuccgcaucuau

SEQ ID NO: 972574 - RNA, 19 nt, Homo sapiens
  misc_RNA (1)...(19): siRNA sense strand
acagcuacggagaggauua

SEQ ID NO: 972575 - RNA, 19 nt, Homo sapiens
  misc_RNA (1)...(19): siRNA sense strand
uaaggcgugagcucuacua

SEQ ID NO: 972576 - RNA, 19 nt, Homo sapiens
  misc_RNA (1)...(19): siRNA sense strand
aggauuauuuccgcaucua

SEQ ID NO: 972577 - RNA, 19 nt, Homo sapiens
  misc_RNA (1)...(19): siRNA sense strand
gaccucucauuuauguauc

SEQ ID NO: 972578 - RNA, 19 nt, Homo sapiens
  misc_RNA (1)...(19): siRNA sense strand
gagggaucccagaaacuuc

SEQ ID NO: 972579 - RNA, 19 nt, Homo sapiens
  misc_RNA (1)...(19): siRNA sense strand
gcgugagcucuacuacuuu

SEQ ID NO: 972580 - RNA, 19 nt, Homo sapiens
  misc_RNA (1)...(19): siRNA sense strand
gcacagagacaccacauuu

SEQ ID NO: 972581 - RNA, 19 nt, Homo sapiens
  misc_RNA (1)...(19): siRNA sense strand
ggacaaaugccuccggaua

SEQ ID NO: 972582 - RNA, 19 nt, Homo sapiens
  misc_RNA (1)...(19): siRNA sense strand
gacacuggguccuuaguau

SEQ ID NO: 972583 - RNA, 19 nt, Homo sapiens
  misc_RNA (1)...(19): siRNA sense strand
gcuagugccuccuuugaca

SEQ ID NO: 972584 - RNA, 19 nt, Homo sapiens
  misc_RNA (1)...(19): siRNA sense strand
gacaaaugccuccggauau

SEQ ID NO: 972585 - RNA, 19 nt, Homo sapiens
  misc_RNA (1)...(19): siRNA sense strand
cagagaagguccuagacau

SEQ ID NO: 972586 - RNA, 19 nt, Homo sapiens
  misc_RNA (1)...(19): siRNA sense strand
cacagacacuggguccuua

SEQ ID NO: 972587 - RNA, 19 nt, Homo sapiens
  misc_RNA (1)...(19): siRNA sense strand
ccacgcggaugagguauau

SEQ ID NO: 972588 - RNA, 19 nt, Homo sapiens
  misc_RNA (1)...(19): siRNA sense strand
acaaaugccuccggauaug

SEQ ID NO: 972589 - RNA, 19 nt, Homo sapiens
  misc_RNA (1)...(19): siRNA sense strand
gaugagguauaugcuguug

SEQ ID NO: 972590 - RNA, 19 nt, Homo sapiens
  misc_RNA (1)...(19): siRNA sense strand
gagaagguccuagacauca

SEQ ID NO: 972591 - RNA, 19 nt, Homo sapiens
  misc_RNA (1)...(19): siRNA sense strand
acaccaagcucucaucaac

SEQ ID NO: 972592 - RNA, 19 nt, Homo sapiens
  misc_RNA (1)...(19): siRNA sense strand
ggacgggcuucucuacucu

SEQ ID NO: 972593 - RNA, 19 nt, Homo sapiens
  misc_RNA (1)...(19): siRNA sense strand
gccacaggcuaucuucaga

SEQ ID NO: 972594 - RNA, 19 nt, Homo sapiens
  misc_RNA (1)...(19): siRNA sense strand
cugcaagaauggccagauu

SEQ ID NO: 972595 - RNA, 19 nt, Homo sapiens
  misc_RNA (1)...(19): siRNA sense strand
gggacgggcuucucuacuc

SEQ ID NO: 972596 - RNA, 19 nt, Homo sapiens
  misc_RNA (1)...(19): siRNA sense strand
gugaggcagucauuucugu

SEQ ID NO: 972597 - RNA, 19 nt, Homo sapiens
  misc_RNA (1)...(19): siRNA sense strand
ggacaccaagcucucauca

SEQ ID NO: 972598 - RNA, 19 nt, Homo sapiens
  misc_RNA (1)...(19): siRNA sense strand
acacuggguccuuaguaua

SEQ ID NO: 972599 - RNA, 19 nt, Homo sapiens
  misc_RNA (1)...(19): siRNA sense strand
gaguccagauggccagaga

SEQ ID NO: 972600 - RNA, 19 nt, Homo sapiens
  misc_RNA (1)...(19): siRNA sense strand
gugcggaucugggacacaa

SEQ ID NO: 972601 - RNA, 19 nt, Homo sapiens
  misc_RNA (1)...(19): siRNA sense strand
agacagagaagguccuaga

SEQ ID NO: 972602 - RNA, 19 nt, Homo sapiens
  misc_RNA (1)...(19): siRNA sense strand
acagagacaccacauuuca

SEQ ID NO: 972603 - RNA, 19 nt, Homo sapiens
  misc_RNA (1)...(19): siRNA sense strand
ccgacgacuucaccuuauu

SEQ ID NO: 972604 - RNA, 19 nt, Homo sapiens
  misc_RNA (1)...(19): siRNA sense strand
caccacauuucacaugcaa

SEQ ID NO: 972605 - RNA, 19 nt, Homo sapiens
  misc_RNA (1)...(19): siRNA sense strand
gaaggugugggaugugaag

SEQ ID NO: 972606 - RNA, 19 nt, Homo sapiens
  misc_RNA (1)...(19): siRNA sense strand
ggagacagagaagguccua

SEQ ID NO: 972607 - RNA, 19 nt, Homo sapiens
  misc_RNA (1)...(19): siRNA sense strand
ugagguauaugcuguugac

SEQ ID NO: 972608 - RNA, 19 nt, Homo sapiens
  misc_RNA (1)...(19): siRNA sense strand
ggaccgcaccaucaaaguc

SEQ ID NO: 972609 - RNA, 19 nt, Homo sapiens
  misc_RNA (1)...(19): siRNA sense strand
uagugcaguuccaggauga

SEQ ID NO: 972610 - RNA, 19 nt, Homo sapiens
  misc_RNA (1)...(19): siRNA sense strand
agacacuggguccuuagua

SEQ ID NO: 972611 - RNA, 19 nt, Homo sapiens
  misc_RNA (1)...(19): siRNA sense strand
gaagguccuagacaucauc

SEQ ID NO: 972612 - RNA, 19 nt, Homo sapiens
  misc_RNA (1)...(19): siRNA sense strand
agacaccacauuucacaug

SEQ ID NO: 972613 - RNA, 19 nt, Homo sapiens
  misc_RNA (1)...(19): siRNA sense strand
cacaggcuaucuucagagu

SEQ ID NO: 972614 - RNA, 19 nt, Homo sapiens
  misc_RNA (1)...(19): siRNA sense strand
cugaaggugugggauguga

SEQ ID NO: 972615 - RNA, 19 nt, Homo sapiens
  misc_RNA (1)...(19): siRNA sense strand
acagugaggcagucauuuc

SEQ ID NO: 972616 - RNA, 19 nt, Homo sapiens
  misc_RNA (1)...(19): siRNA sense strand
ucaaccaggugcucuucuc

SEQ ID NO: 972617 - RNA, 19 nt, Homo sapiens
  misc_RNA (1)...(19): siRNA sense strand
cgacgacuucaccuuauuc

SEQ ID NO: 972618 - RNA, 19 nt, Homo sapiens
  misc_RNA (1)...(19): siRNA sense strand
cacuggguccuuaguauau

SEQ ID NO: 972619 - RNA, 19 nt, Homo sapiens
  misc_RNA (1)...(19): siRNA sense strand
cuccgacgacuucaccuua

SEQ ID NO: 972620 - RNA, 19 nt, Homo sapiens
  misc_RNA (1)...(19): siRNA sense strand
caacugcaggccgcuguga

SEQ ID NO: 972621 - RNA, 19 nt, Homo sapiens
  misc_RNA (1)...(19): siRNA sense strand
agagacaccacauuucaca

SEQ ID NO: 972622 - RNA, 19 nt, Homo sapiens
  misc_RNA (1)...(19): siRNA sense strand
ggaugagguauaugcuguu

SEQ ID NO: 972623 - RNA, 19 nt, Homo sapiens
  misc_RNA (1)...(19): siRNA sense strand
uguccacgaugcugagauc

SEQ ID NO: 972624 - RNA, 19 nt, Homo sapiens
  misc_RNA (1)...(19): siRNA sense strand
caaguggugggaaggacaa

SEQ ID NO: 972625 - RNA, 19 nt, Homo sapiens
  misc_RNA (1)...(19): siRNA sense strand
cccaggcaguggagacaga

SEQ ID NO: 972626 - RNA, 19 nt, Homo sapiens
  misc_RNA (1)...(19): siRNA sense strand
gaugacaggacaccaagcu

SEQ ID NO: 972627 - RNA, 19 nt, Homo sapiens
  misc_RNA (1)...(19): siRNA sense strand
ccaggaccgcaccaucaaa

SEQ ID NO: 972628 - RNA, 19 nt, Homo sapiens
  misc_RNA (1)...(19): siRNA sense strand
gaacccugagugccgcuau

SEQ ID NO: 972629 - RNA, 19 nt, Homo sapiens
  misc_RNA (1)...(19): siRNA sense strand
cgaagaaccuacucagaua

SEQ ID NO: 972630 - RNA, 19 nt, Homo sapiens
  misc_RNA (1)...(19): siRNA sense strand
gcauaaagauggcaguuug

SEQ ID NO: 972631 - RNA, 19 nt, Homo sapiens
  misc_RNA (1)...(19): siRNA sense strand
ucacaacgcuugaggaaug

SEQ ID NO: 972632 - RNA, 19 nt, Homo sapiens
  misc_RNA (1)...(19): siRNA sense strand
gaaccaguaucuacacuuc

SEQ ID NO: 972633 - RNA, 19 nt, Homo sapiens
  misc_RNA (1)...(19): siRNA sense strand
gauggcaguuugugaaauu

SEQ ID NO: 972634 - RNA, 19 nt, Homo sapiens
  misc_RNA (1)...(19): siRNA sense strand
gagcagcauuucuacauga

SEQ ID NO: 972635 - RNA, 19 nt, Homo sapiens
  misc_RNA (1)...(19): siRNA sense strand
guagugauauuccucuuga

SEQ ID NO: 972636 - RNA, 19 nt, Homo sapiens
  misc_RNA (1)...(19): siRNA sense strand
gauagccaaugccaaguuu

SEQ ID NO: 972637 - RNA, 19 nt, Homo sapiens
  misc_RNA (1)...(19): siRNA sense strand
ccucuacugugaccucuua

SEQ ID NO: 972638 - RNA, 19 nt, Homo sapiens
  misc_RNA (1)...(19): siRNA sense strand
ugaggaaugugugaagaua

SEQ ID NO: 972639 - RNA, 19 nt, Homo sapiens
  misc_RNA (1)...(19): siRNA sense strand
caacacaagaauggaauua

SEQ ID NO: 972640 - RNA, 19 nt, Homo sapiens
  misc_RNA (1)...(19): siRNA sense strand
gugcagagaacaugaauga

SEQ ID NO: 972641 - RNA, 19 nt, Homo sapiens
  misc_RNA (1)...(19): siRNA sense strand
gcagagaacaugaaugaag

SEQ ID NO: 972642 - RNA, 19 nt, Homo sapiens
  misc_RNA (1)...(19): siRNA sense strand
cagcaaccauuccugaaga

SEQ ID NO: 972643 - RNA, 19 nt, Homo sapiens
  misc_RNA (1)...(19): siRNA sense strand
gcaaaggaagcauaaagau

SEQ ID NO: 972644 - RNA, 19 nt, Homo sapiens
  misc_RNA (1)...(19): siRNA sense strand
agauagaccuguucacugu

SEQ ID NO: 972645 - RNA, 19 nt, Homo sapiens
  misc_RNA (1)...(19): siRNA sense strand
ggaauuuguucaccaugau

SEQ ID NO: 972646 - RNA, 19 nt, Homo sapiens
  misc_RNA (1)...(19): siRNA sense strand
caaaggaagcauaaagaug

SEQ ID NO: 972647 - RNA, 19 nt, Homo sapiens
  misc_RNA (1)...(19): siRNA sense strand
gcagacaacacaagaaugg

SEQ ID NO: 972648 - RNA, 19 nt, Homo sapiens
  misc_RNA (1)...(19): siRNA sense strand
acaagaugauguuugcaaa

SEQ ID NO: 972649 - RNA, 19 nt, Homo sapiens
  misc_RNA (1)...(19): siRNA sense strand
gagcaaaggaagcauaaag

SEQ ID NO: 972650 - RNA, 19 nt, Homo sapiens
  misc_RNA (1)...(19): siRNA sense strand
cagccucguugguuuguuu

SEQ ID NO: 972651 - RNA, 19 nt, Homo sapiens
  misc_RNA (1)...(19): siRNA sense strand
uaauggagauuuggcauca

SEQ ID NO: 972652 - RNA, 19 nt, Homo sapiens
  misc_RNA (1)...(19): siRNA sense strand
ggaaucuuauccuacuaug

SEQ ID NO: 972653 - RNA, 19 nt, Homo sapiens
  misc_RNA (1)...(19): siRNA sense strand
acagauucuuguagugaua

SEQ ID NO: 972654 - RNA, 19 nt, Homo sapiens
  misc_RNA (1)...(19): siRNA sense strand
cuacuaugauucacaagau

SEQ ID NO: 972655 - RNA, 19 nt, Homo sapiens
  misc_RNA (1)...(19): siRNA sense strand
aaagcauguuugacugaua

SEQ ID NO: 972656 - RNA, 19 nt, Homo sapiens
  misc_RNA (1)...(19): siRNA sense strand
ggcaguuugugaaauuaaa

SEQ ID NO: 972657 - RNA, 19 nt, Homo sapiens
  misc_RNA (1)...(19): siRNA sense strand
gagagcagcauuucuacau

SEQ ID NO: 972658 - RNA, 19 nt, Homo sapiens
  misc_RNA (1)...(19): siRNA sense strand
gaaccuacucagauacaga

SEQ ID NO: 972659 - RNA, 19 nt, Homo sapiens
  misc_RNA (1)...(19): siRNA sense strand
gcaccauccggaucccuua

SEQ ID NO: 972660 - RNA, 19 nt, Homo sapiens
  misc_RNA (1)...(19): siRNA sense strand
aaagauggcaguuugugaa

SEQ ID NO: 972661 - RNA, 19 nt, Homo sapiens
  misc_RNA (1)...(19): siRNA sense strand
guaauacauucaucacaac

SEQ ID NO: 972662 - RNA, 19 nt, Homo sapiens
  misc_RNA (1)...(19): siRNA sense strand
gggagcaaaggaagcauaa

SEQ ID NO: 972663 - RNA, 19 nt, Homo sapiens
  misc_RNA (1)...(19): siRNA sense strand
uaaagauggcaguuuguga

SEQ ID NO: 972664 - RNA, 19 nt, Homo sapiens
  misc_RNA (1)...(19): siRNA sense strand
uagccaaugccaaguuuaa

SEQ ID NO: 972665 - RNA, 19 nt, Homo sapiens
  misc_RNA (1)...(19): siRNA sense strand
caucacaacgcuugaggaa

SEQ ID NO: 972666 - RNA, 19 nt, Homo sapiens
  misc_RNA (1)...(19): siRNA sense strand
ccgaagaaccuacucagau

SEQ ID NO: 972667 - RNA, 19 nt, Homo sapiens
  misc_RNA (1)...(19): siRNA sense strand
gugaaucgcugaaaaccaa

SEQ ID NO: 972668 - RNA, 19 nt, Homo sapiens
  misc_RNA (1)...(19): siRNA sense strand
ccugaagaaagcagacuua

SEQ ID NO: 972669 - RNA, 19 nt, Homo sapiens
  misc_RNA (1)...(19): siRNA sense strand
cuacucagauacagauucu

SEQ ID NO: 972670 - RNA, 19 nt, Homo sapiens
  misc_RNA (1)...(19): siRNA sense strand
guacaaguggaccaacuau

SEQ ID NO: 972671 - RNA, 19 nt, Homo sapiens
  misc_RNA (1)...(19): siRNA sense strand
ugacugauacaaggacuaa

SEQ ID NO: 972672 - RNA, 19 nt, Homo sapiens
  misc_RNA (1)...(19): siRNA sense strand
cuuagugccacguguaaua

SEQ ID NO: 972673 - RNA, 19 nt, Homo sapiens
  misc_RNA (1)...(19): siRNA sense strand
cagcagacaacacaagaau

SEQ ID NO: 972674 - RNA, 19 nt, Homo sapiens
  misc_RNA (1)...(19): siRNA sense strand
gaagaaccuacucagauac

SEQ ID NO: 972675 - RNA, 19 nt, Homo sapiens
  misc_RNA (1)...(19): siRNA sense strand
aaucauucaucuccuagug

SEQ ID NO: 972676 - RNA, 19 nt, Homo sapiens
  misc_RNA (1)...(19): siRNA sense strand
aggaauuuguucaccauga

SEQ ID NO: 972677 - RNA, 19 nt, Homo sapiens
  misc_RNA (1)...(19): siRNA sense strand
ugucugaacuucgccucua

SEQ ID NO: 972678 - RNA, 19 nt, Homo sapiens
  misc_RNA (1)...(19): siRNA sense strand
ggcagugaaugcagcugaa

SEQ ID NO: 972679 - RNA, 19 nt, Homo sapiens
  misc_RNA (1)...(19): siRNA sense strand
gaaucuuauccuacuauga

SEQ ID NO: 972680 - RNA, 19 nt, Homo sapiens
  misc_RNA (1)...(19): siRNA sense strand
cuggagagcagcauuucua

SEQ ID NO: 972681 - RNA, 19 nt, Homo sapiens
  misc_RNA (1)...(19): siRNA sense strand
cuacugugaccucuuaaug

SEQ ID NO: 972682 - RNA, 19 nt, Homo sapiens
  misc_RNA (1)...(19): siRNA sense strand
agacaacacaagaauggaa

SEQ ID NO: 972683 - RNA, 19 nt, Homo sapiens
  misc_RNA (1)...(19): siRNA sense strand
acaaguggaccaacuaucu

SEQ ID NO: 972684 - RNA, 19 nt, Homo sapiens
  misc_RNA (1)...(19): siRNA sense strand
ccauccggaucccuuaguu

SEQ ID NO: 972685 - RNA, 19 nt, Homo sapiens
  misc_RNA (1)...(19): siRNA sense strand
gcagugaaugcagcugaaa

SEQ ID NO: 972686 - RNA, 19 nt, Homo sapiens
  misc_RNA (1)...(19): siRNA sense strand
gaauuuguucaccaugaug

SEQ ID NO: 972687 - RNA, 19 nt, Homo sapiens
  misc_RNA (1)...(19): siRNA sense strand
gcaaccauuccugaagaaa

SEQ ID NO: 972688 - RNA, 19 nt, Homo sapiens
  misc_RNA (1)...(19): siRNA sense strand
aauggaaucuuauccuacu

SEQ ID NO: 972689 - RNA, 19 nt, Homo sapiens
  misc_RNA (1)...(19): siRNA sense strand
aaccugagauguuucaacu

SEQ ID NO: 972690 - RNA, 19 nt, Homo sapiens
  misc_RNA (1)...(19): siRNA sense strand
agagcagcauuucuacaug

SEQ ID NO: 972691 - RNA, 19 nt, Homo sapiens
  misc_RNA (1)...(19): siRNA sense strand
cuuaguuucuccuguguca

SEQ ID NO: 972692 - RNA, 19 nt, Homo sapiens
  misc_RNA (1)...(19): siRNA sense strand
aagcauguuugacugauac

SEQ ID NO: 972693 - RNA, 19 nt, Homo sapiens
  misc_RNA (1)...(19): siRNA sense strand
ggagcuccaaagcauguuu

SEQ ID NO: 972694 - RNA, 19 nt, Homo sapiens
  misc_RNA (1)...(19): siRNA sense strand
gacaacacaagaauggaau

SEQ ID NO: 972695 - RNA, 19 nt, Homo sapiens
  misc_RNA (1)...(19): siRNA sense strand
caaccauuccugaagaaag

SEQ ID NO: 972696 - RNA, 19 nt, Homo sapiens
  misc_RNA (1)...(19): siRNA sense strand
acucagauacagauucuug

SEQ ID NO: 972697 - RNA, 19 nt, Homo sapiens
  misc_RNA (1)...(19): siRNA sense strand
caccuucuccuguucaaau

SEQ ID NO: 972698 - RNA, 19 nt, Homo sapiens
  misc_RNA (1)...(19): siRNA sense strand
ugugucaccuucuccuguu

SEQ ID NO: 972699 - RNA, 19 nt, Homo sapiens
  misc_RNA (1)...(19): siRNA sense strand
ggagagcagcauuucuaca

SEQ ID NO: 972700 - RNA, 19 nt, Homo sapiens
  misc_RNA (1)...(19): siRNA sense strand
cacaagaauggaauuaauc

SEQ ID NO: 972701 - RNA, 19 nt, Homo sapiens
  misc_RNA (1)...(19): siRNA sense strand
ggagauuuggcaucagcaa

SEQ ID NO: 972702 - RNA, 19 nt, Homo sapiens
  misc_RNA (1)...(19): siRNA sense strand
cacaagaugauguuugcaa

SEQ ID NO: 972703 - RNA, 19 nt, Homo sapiens
  misc_RNA (1)...(19): siRNA sense strand
uaaaagaaccaguaucuac

SEQ ID NO: 972704 - RNA, 19 nt, Homo sapiens
  misc_RNA (1)...(19): siRNA sense strand
acugugaccucuuaaugca

SEQ ID NO: 972705 - RNA, 19 nt, Homo sapiens
  misc_RNA (1)...(19): siRNA sense strand
cuacaugaaggcagugaau

SEQ ID NO: 972706 - RNA, 19 nt, Homo sapiens
  misc_RNA (1)...(19): siRNA sense strand
auagaccuguucacuguuc

SEQ ID NO: 972707 - RNA, 19 nt, Homo sapiens
  misc_RNA (1)...(19): siRNA sense strand
agacccagauagaccuguu

SEQ ID NO: 972708 - RNA, 19 nt, Homo sapiens
  misc_RNA (1)...(19): siRNA sense strand
caaaugaugaagcguucug

SEQ ID NO: 972709 - RNA, 19 nt, Homo sapiens
  misc_RNA (1)...(19): siRNA sense strand
acaggaauuuguucaccau

SEQ ID NO: 972710 - RNA, 19 nt, Homo sapiens
  misc_RNA (1)...(19): siRNA sense strand
aagaugauguuugcaaagg

SEQ ID NO: 972711 - RNA, 19 nt, Homo sapiens
  misc_RNA (1)...(19): siRNA sense strand
uaagugaaaccagugaauc

SEQ ID NO: 972712 - RNA, 19 nt, Homo sapiens
  misc_RNA (1)...(19): siRNA sense strand
ugaaugcagcugaaagaca

SEQ ID NO: 972713 - RNA, 19 nt, Homo sapiens
  misc_RNA (1)...(19): siRNA sense strand
caagaugauguuugcaaag

SEQ ID NO: 972714 - RNA, 19 nt, Homo sapiens
  misc_RNA (1)...(19): siRNA sense strand
gugugaagauagccaaugc

SEQ ID NO: 972715 - RNA, 19 nt, Homo sapiens
  misc_RNA (1)...(19): siRNA sense strand
ccagauagaccuguucacu

SEQ ID NO: 972716 - RNA, 19 nt, Homo sapiens
  misc_RNA (1)...(19): siRNA sense strand
cacccugguucuugcaguu

SEQ ID NO: 972717 - RNA, 19 nt, Homo sapiens
  misc_RNA (1)...(19): siRNA sense strand
gaggaaugugugaagauag

SEQ ID NO: 972718 - RNA, 19 nt, Homo sapiens
  misc_RNA (1)...(19): siRNA sense strand
uacacuuaauggagauuug

SEQ ID NO: 972719 - RNA, 19 nt, Homo sapiens
  misc_RNA (1)...(19): siRNA sense strand
gccgaagaaccuacucaga

SEQ ID NO: 972720 - RNA, 19 nt, Homo sapiens
  misc_RNA (1)...(19): siRNA sense strand
caaguuuaaaccugagaug

SEQ ID NO: 972721 - RNA, 19 nt, Homo sapiens
  misc_RNA (1)...(19): siRNA sense strand
uuaaugcagcaaguucaua

SEQ ID NO: 972722 - RNA, 19 nt, Homo sapiens
  misc_RNA (1)...(19): siRNA sense strand
gauagaccuguucacuguu

SEQ ID NO: 972723 - RNA, 19 nt, Homo sapiens
  misc_RNA (1)...(19): siRNA sense strand
ggagcaaaggaagcauaaa

SEQ ID NO: 972724 - RNA, 19 nt, Homo sapiens
  misc_RNA (1)...(19): siRNA sense strand
cauccggaucccuuaguuu

SEQ ID NO: 972725 - RNA, 19 nt, Homo sapiens
  misc_RNA (1)...(19): siRNA sense strand
cuggcagccucguugguuu

SEQ ID NO: 972726 - RNA, 19 nt, Homo sapiens
  misc_RNA (1)...(19): siRNA sense strand
aaauaagugaaaccaguga

SEQ ID NO: 972727 - RNA, 19 nt, Homo sapiens
  misc_RNA (1)...(19): siRNA sense strand
cauaaagauggcaguuugu

SEQ ID NO: 972728 - RNA, 19 nt, Homo sapiens
  misc_RNA (1)...(19): siRNA sense strand
gaaccuaccugacacauga

SEQ ID NO: 972729 - RNA, 19 nt, Homo sapiens
  misc_RNA (1)...(19): siRNA sense strand
gaaggaauauuucaucuag

SEQ ID NO: 972730 - RNA, 19 nt, Homo sapiens
  misc_RNA (1)...(19): siRNA sense strand
gagaaagggugaccaagaa

SEQ ID NO: 972731 - RNA, 19 nt, Homo sapiens
  misc_RNA (1)...(19): siRNA sense strand
caucaucacugguuauaaa

SEQ ID NO: 972732 - RNA, 19 nt, Homo sapiens
  misc_RNA (1)...(19): siRNA sense strand
gaucguggcuuucauuguc

SEQ ID NO: 972733 - RNA, 19 nt, Homo sapiens
  misc_RNA (1)...(19): siRNA sense strand
ggagaaagggugaccaaga

SEQ ID NO: 972734 - RNA, 19 nt, Homo sapiens
  misc_RNA (1)...(19): siRNA sense strand
ucagcagacucucuacuuu

SEQ ID NO: 972735 - RNA, 19 nt, Homo sapiens
  misc_RNA (1)...(19): siRNA sense strand
caaaggaaccuaccugaca

SEQ ID NO: 972736 - RNA, 19 nt, Homo sapiens
  misc_RNA (1)...(19): siRNA sense strand
ccaagucccucgucacugu

SEQ ID NO: 972737 - RNA, 19 nt, Homo sapiens
  misc_RNA (1)...(19): siRNA sense strand
gaguacaccugcucaaucu

SEQ ID NO: 972738 - RNA, 19 nt, Homo sapiens
  misc_RNA (1)...(19): siRNA sense strand
gccagaagcuguugcuaca

SEQ ID NO: 972739 - RNA, 19 nt, Homo sapiens
  misc_RNA (1)...(19): siRNA sense strand
gaucuucccuuuccucaac

SEQ ID NO: 972740 - RNA, 19 nt, Homo sapiens
  misc_RNA (1)...(19): siRNA sense strand
agagagcccuucgagauaa

SEQ ID NO: 972741 - RNA, 19 nt, Homo sapiens
  misc_RNA (1)...(19): siRNA sense strand
gguaaaaccuucacuguca

SEQ ID NO: 972742 - RNA, 19 nt, Homo sapiens
  misc_RNA (1)...(19): siRNA sense strand
ggacacggccaucaucaau

SEQ ID NO: 972743 - RNA, 19 nt, Homo sapiens
  misc_RNA (1)...(19): siRNA sense strand
ccacagaagcccaucauca

SEQ ID NO: 972744 - RNA, 19 nt, Homo sapiens
  misc_RNA (1)...(19): siRNA sense strand
ucggugacauuccagguua

SEQ ID NO: 972745 - RNA, 19 nt, Homo sapiens
  misc_RNA (1)...(19): siRNA sense strand
gcucaagugccaagugaaa

SEQ ID NO: 972746 - RNA, 19 nt, Homo sapiens
  misc_RNA (1)...(19): siRNA sense strand
gagcucagcaucagcauca

SEQ ID NO: 972747 - RNA, 19 nt, Homo sapiens
  misc_RNA (1)...(19): siRNA sense strand
gugcucaagugccaaguga

SEQ ID NO: 972748 - RNA, 19 nt, Homo sapiens
  misc_RNA (1)...(19): siRNA sense strand
caagaaggaauauuucauc

SEQ ID NO: 972749 - RNA, 19 nt, Homo sapiens
  misc_RNA (1)...(19): siRNA sense strand
aggaagaucccaaugguaa

SEQ ID NO: 972750 - RNA, 19 nt, Homo sapiens
  misc_RNA (1)...(19): siRNA sense strand
gcuaggaauuccacagaag

SEQ ID NO: 972751 - RNA, 19 nt, Homo sapiens
  misc_RNA (1)...(19): siRNA sense strand
gaagaugacccaggagagu

SEQ ID NO: 972752 - RNA, 19 nt, Homo sapiens
  misc_RNA (1)...(19): siRNA sense strand
ggaagaucccaaugguaaa

SEQ ID NO: 972753 - RNA, 19 nt, Homo sapiens
  misc_RNA (1)...(19): siRNA sense strand
caucacugguuauaaaucu

SEQ ID NO: 972754 - RNA, 19 nt, Homo sapiens
  misc_RNA (1)...(19): siRNA sense strand
aagagagcccuucgagaua

SEQ ID NO: 972755 - RNA, 19 nt, Homo sapiens
  misc_RNA (1)...(19): siRNA sense strand
cgacaagaaggaauauuuc

SEQ ID NO: 972756 - RNA, 19 nt, Homo sapiens
  misc_RNA (1)...(19): siRNA sense strand
gggacgacaagaaggaaua

SEQ ID NO: 972757 - RNA, 19 nt, Homo sapiens
  misc_RNA (1)...(19): siRNA sense strand
gcagcuacaaggccuacua

SEQ ID NO: 972758 - RNA, 19 nt, Homo sapiens
  misc_RNA (1)...(19): siRNA sense strand
uacuacacccucaauguua

SEQ ID NO: 972759 - RNA, 19 nt, Homo sapiens
  misc_RNA (1)...(19): siRNA sense strand
ggacucaucccugcaaugg

SEQ ID NO: 972760 - RNA, 19 nt, Homo sapiens
  misc_RNA (1)...(19): siRNA sense strand
ggagagugcccugaucuuc

SEQ ID NO: 972761 - RNA, 19 nt, Homo sapiens
  misc_RNA (1)...(19): siRNA sense strand
gaaccaugaaucucuaaag

SEQ ID NO: 972762 - RNA, 19 nt, Homo sapiens
  misc_RNA (1)...(19): siRNA sense strand
guacaccugcucaaucuuc

SEQ ID NO: 972763 - RNA, 19 nt, Homo sapiens
  misc_RNA (1)...(19): siRNA sense strand
gacaagaaggaauauuuca

SEQ ID NO: 972764 - RNA, 19 nt, Homo sapiens
  misc_RNA (1)...(19): siRNA sense strand
acuacacccucaauguuaa

SEQ ID NO: 972765 - RNA, 19 nt, Homo sapiens
  misc_RNA (1)...(19): siRNA sense strand
cuacuacacccucaauguu

SEQ ID NO: 972766 - RNA, 19 nt, Homo sapiens
  misc_RNA (1)...(19): siRNA sense strand
caacaugggcagcuacaag

SEQ ID NO: 972767 - RNA, 19 nt, Homo sapiens
  misc_RNA (1)...(19): siRNA sense strand
gagagcccuucgagauaau

SEQ ID NO: 972768 - RNA, 19 nt, Homo sapiens
  misc_RNA (1)...(19): siRNA sense strand
acaggaagaucccaauggu

SEQ ID NO: 972769 - RNA, 19 nt, Homo sapiens
  misc_RNA (1)...(19): siRNA sense strand
cagcagacucucuacuuug

SEQ ID NO: 972770 - RNA, 19 nt, Homo sapiens
  misc_RNA (1)...(19): siRNA sense strand
ugacagauccaccucucaa

SEQ ID NO: 972771 - RNA, 19 nt, Homo sapiens
  misc_RNA (1)...(19): siRNA sense strand
cagaagcuguugcuacacu

SEQ ID NO: 972772 - RNA, 19 nt, Homo sapiens
  misc_RNA (1)...(19): siRNA sense strand
gcagcucggugacauucca

SEQ ID NO: 972773 - RNA, 19 nt, Homo sapiens
  misc_RNA (1)...(19): siRNA sense strand
acgacaagaaggaauauuu

SEQ ID NO: 972774 - RNA, 19 nt, Homo sapiens
  misc_RNA (1)...(19): siRNA sense strand
acaccaacugcgaugauua

SEQ ID NO: 972775 - RNA, 19 nt, Homo sapiens
  misc_RNA (1)...(19): siRNA sense strand
ugugaaccaugaaucucua

SEQ ID NO: 972776 - RNA, 19 nt, Homo sapiens
  misc_RNA (1)...(19): siRNA sense strand
ggcaggagcaggauuugga

SEQ ID NO: 972777 - RNA, 19 nt, Homo sapiens
  misc_RNA (1)...(19): siRNA sense strand
ucggugggaucguggcuuu

SEQ ID NO: 972778 - RNA, 19 nt, Homo sapiens
  misc_RNA (1)...(19): siRNA sense strand
gaaagaucacgaggacuca

SEQ ID NO: 972779 - RNA, 19 nt, Homo sapiens
  misc_RNA (1)...(19): siRNA sense strand
cagccacccuaaacuguca

SEQ ID NO: 972780 - RNA, 19 nt, Homo sapiens
  misc_RNA (1)...(19): siRNA sense strand
gcaucagcaucagcaaugu

SEQ ID NO: 972781 - RNA, 19 nt, Homo sapiens
  misc_RNA (1)...(19): siRNA sense strand
ucaagugccaagugaaaga

SEQ ID NO: 972782 - RNA, 19 nt, Homo sapiens
  misc_RNA (1)...(19): siRNA sense strand
ggacgacaagaaggaauau

SEQ ID NO: 972783 - RNA, 19 nt, Homo sapiens
  misc_RNA (1)...(19): siRNA sense strand
ccagcaacaugggcagcua

SEQ ID NO: 972784 - RNA, 19 nt, Homo sapiens
  misc_RNA (1)...(19): siRNA sense strand
gcccugaucuucccuuucc

SEQ ID NO: 972785 - RNA, 19 nt, Homo sapiens
  misc_RNA (1)...(19): siRNA sense strand
caacccgcauacaggaaga

SEQ ID NO: 972786 - RNA, 19 nt, Homo sapiens
  misc_RNA (1)...(19): siRNA sense strand
gaaagggugaccaagaacu

SEQ ID NO: 972787 - RNA, 19 nt, Homo sapiens
  misc_RNA (1)...(19): siRNA sense strand
aaagacacagccacccuaa

SEQ ID NO: 972788 - RNA, 19 nt, Homo sapiens
  misc_RNA (1)...(19): siRNA sense strand
uaaagggagcugacagauc

SEQ ID NO: 972789 - RNA, 19 nt, Homo sapiens
  misc_RNA (1)...(19): siRNA sense strand
cgaguacaccugcucaauc

SEQ ID NO: 972790 - RNA, 19 nt, Homo sapiens
  misc_RNA (1)...(19): siRNA sense strand
acacggccaucaucaaugc

SEQ ID NO: 972791 - RNA, 19 nt, Homo sapiens
  misc_RNA (1)...(19): siRNA sense strand
gcaccuaccacgccaucau

SEQ ID NO: 972792 - RNA, 19 nt, Homo sapiens
  misc_RNA (1)...(19): siRNA sense strand
ccucgucacugugcuagga

SEQ ID NO: 972793 - RNA, 19 nt, Homo sapiens
  misc_RNA (1)...(19): siRNA sense strand
aaucgaauucagcugguua

SEQ ID NO: 972794 - RNA, 19 nt, Homo sapiens
  misc_RNA (1)...(19): siRNA sense strand
gcacagccaccagcaacau

SEQ ID NO: 972795 - RNA, 19 nt, Homo sapiens
  misc_RNA (1)...(19): siRNA sense strand
cacaccaacugcgaugauu

SEQ ID NO: 972796 - RNA, 19 nt, Homo sapiens
  misc_RNA (1)...(19): siRNA sense strand
caggaagaucccaauggua

SEQ ID NO: 972797 - RNA, 19 nt, Homo sapiens
  misc_RNA (1)...(19): siRNA sense strand
agacacagccacccuaaac

SEQ ID NO: 972798 - RNA, 19 nt, Homo sapiens
  misc_RNA (1)...(19): siRNA sense strand
ggaaccuaccugacacaug

SEQ ID NO: 972799 - RNA, 19 nt, Homo sapiens
  misc_RNA (1)...(19): siRNA sense strand
ggagaaccaacccgcauac

SEQ ID NO: 972800 - RNA, 19 nt, Homo sapiens
  misc_RNA (1)...(19): siRNA sense strand
aaccaugaaucucuaaagg

SEQ ID NO: 972801 - RNA, 19 nt, Homo sapiens
  misc_RNA (1)...(19): siRNA sense strand
gaagaucccaaugguaaaa

SEQ ID NO: 972802 - RNA, 19 nt, Homo sapiens
  misc_RNA (1)...(19): siRNA sense strand
ccugcucaaucuucacuau

SEQ ID NO: 972803 - RNA, 19 nt, Homo sapiens
  misc_RNA (1)...(19): siRNA sense strand
gaggacucaucccugcaau

SEQ ID NO: 972804 - RNA, 19 nt, Homo sapiens
  misc_RNA (1)...(19): siRNA sense strand
cggagaaccaacccgcaua

SEQ ID NO: 972805 - RNA, 19 nt, Homo sapiens
  misc_RNA (1)...(19): siRNA sense strand
gcucaucaugcucaucuuc

SEQ ID NO: 972806 - RNA, 19 nt, Homo sapiens
  misc_RNA (1)...(19): siRNA sense strand
gugcuaggaauuccacaga

SEQ ID NO: 972807 - RNA, 19 nt, Homo sapiens
  misc_RNA (1)...(19): siRNA sense strand
gcgaguacaccugcucaau

SEQ ID NO: 972808 - RNA, 19 nt, Homo sapiens
  misc_RNA (1)...(19): siRNA sense strand
gugcccugaucuucccuuu

SEQ ID NO: 972809 - RNA, 19 nt, Homo sapiens
  misc_RNA (1)...(19): siRNA sense strand
acacagccacccuaaacug

SEQ ID NO: 972810 - RNA, 19 nt, Homo sapiens
  misc_RNA (1)...(19): siRNA sense strand
ccuacuacacccucaaugu

SEQ ID NO: 972811 - RNA, 19 nt, Homo sapiens
  misc_RNA (1)...(19): siRNA sense strand
uaaucgaauucagcugguu

SEQ ID NO: 972812 - RNA, 19 nt, Homo sapiens
  misc_RNA (1)...(19): siRNA sense strand
gaagcuguugcuacacugu

SEQ ID NO: 972813 - RNA, 19 nt, Homo sapiens
  misc_RNA (1)...(19): siRNA sense strand
gaaguuuuauacacaccaa

SEQ ID NO: 972814 - RNA, 19 nt, Homo sapiens
  misc_RNA (1)...(19): siRNA sense strand
ucacugguuauaaaucuuc

SEQ ID NO: 972815 - RNA, 19 nt, Homo sapiens
  misc_RNA (1)...(19): siRNA sense strand
gacacggccaucaucaaug

SEQ ID NO: 972816 - RNA, 19 nt, Homo sapiens
  misc_RNA (1)...(19): siRNA sense strand
caccaacugcgaugauuag

SEQ ID NO: 972817 - RNA, 19 nt, Homo sapiens
  misc_RNA (1)...(19): siRNA sense strand
ucuaaagggagcugacaga

SEQ ID NO: 972818 - RNA, 19 nt, Homo sapiens
  misc_RNA (1)...(19): siRNA sense strand
ugugcucugugaaccauga

SEQ ID NO: 972819 - RNA, 19 nt, Homo sapiens
  misc_RNA (1)...(19): siRNA sense strand
aaaucuucauuacgggaaa

SEQ ID NO: 972820 - RNA, 19 nt, Homo sapiens
  misc_RNA (1)...(19): siRNA sense strand
gggaucguggcuuucauug

SEQ ID NO: 972821 - RNA, 19 nt, Homo sapiens
  misc_RNA (1)...(19): siRNA sense strand
gcaguacgcuugugucaaa

SEQ ID NO: 972822 - RNA, 19 nt, Homo sapiens
  misc_RNA (1)...(19): siRNA sense strand
gcaaugauccuguguuuga

SEQ ID NO: 972823 - RNA, 19 nt, Homo sapiens
  misc_RNA (1)...(19): siRNA sense strand
gaagacaccugaugacaag

SEQ ID NO: 972824 - RNA, 19 nt, Homo sapiens
  misc_RNA (1)...(19): siRNA sense strand
caacauccaugaacacugu

SEQ ID NO: 972825 - RNA, 19 nt, Homo sapiens
  misc_RNA (1)...(19): siRNA sense strand
gcagaucacucucaagaag

SEQ ID NO: 972826 - RNA, 19 nt, Homo sapiens
  misc_RNA (1)...(19): siRNA sense strand
ucaaagcccuggagaagga

SEQ ID NO: 972827 - RNA, 19 nt, Homo sapiens
  misc_RNA (1)...(19): siRNA sense strand
ccagcagucucauuacuuu

SEQ ID NO: 972828 - RNA, 19 nt, Homo sapiens
  misc_RNA (1)...(19): siRNA sense strand
gaaggacgaucuggauuuc

SEQ ID NO: 972829 - RNA, 19 nt, Homo sapiens
  misc_RNA (1)...(19): siRNA sense strand
gagagaagaucacagucau

SEQ ID NO: 972830 - RNA, 19 nt, Homo sapiens
  misc_RNA (1)...(19): siRNA sense strand
gagaagaucacagucauug

SEQ ID NO: 972831 - RNA, 19 nt, Homo sapiens
  misc_RNA (1)...(19): siRNA sense strand
uaagaaggcugagaagaag

SEQ ID NO: 972832 - RNA, 19 nt, Homo sapiens
  misc_RNA (1)...(19): siRNA sense strand
gaucauggcaaacaaggaa

SEQ ID NO: 972833 - RNA, 19 nt, Homo sapiens
  misc_RNA (1)...(19): siRNA sense strand
uaaagcaguuacucaggaa

SEQ ID NO: 972834 - RNA, 19 nt, Homo sapiens
  misc_RNA (1)...(19): siRNA sense strand
ucgcaaugauccuguguuu

SEQ ID NO: 972835 - RNA, 19 nt, Homo sapiens
  misc_RNA (1)...(19): siRNA sense strand
gggcagaucacucucaaga

SEQ ID NO: 972836 - RNA, 19 nt, Homo sapiens
  misc_RNA (1)...(19): siRNA sense strand
ccuccaaacuucaucauuc

SEQ ID NO: 972837 - RNA, 19 nt, Homo sapiens
  misc_RNA (1)...(19): siRNA sense strand
ggagagaagaucacaguca

SEQ ID NO: 972838 - RNA, 19 nt, Homo sapiens
  misc_RNA (1)...(19): siRNA sense strand
ggacaaaggagauggaacu

SEQ ID NO: 972839 - RNA, 19 nt, Homo sapiens
  misc_RNA (1)...(19): siRNA sense strand
gagaagaagacaccugaug

SEQ ID NO: 972840 - RNA, 19 nt, Homo sapiens
  misc_RNA (1)...(19): siRNA sense strand
gggcuucgcuguaagaacu

SEQ ID NO: 972841 - RNA, 19 nt, Homo sapiens
  misc_RNA (1)...(19): siRNA sense strand
cuaagcuggucaacgauaa

SEQ ID NO: 972842 - RNA, 19 nt, Homo sapiens
  misc_RNA (1)...(19): siRNA sense strand
aaaccaacauccaugaaca

SEQ ID NO: 972843 - RNA, 19 nt, Homo sapiens
  misc_RNA (1)...(19): siRNA sense strand
ggagaaggacgaucuggau

SEQ ID NO: 972844 - RNA, 19 nt, Homo sapiens
  misc_RNA (1)...(19): siRNA sense strand
ggcaagaucccaccugguu

SEQ ID NO: 972845 - RNA, 19 nt, Homo sapiens
  misc_RNA (1)...(19): siRNA sense strand
gcagagacucggcaaagug

SEQ ID NO: 972846 - RNA, 19 nt, Homo sapiens
  misc_RNA (1)...(19): siRNA sense strand
aaaguucugugaugucugu

SEQ ID NO: 972847 - RNA, 19 nt, Homo sapiens
  misc_RNA (1)...(19): siRNA sense strand
ggaagaggaagaggaagaa

SEQ ID NO: 972848 - RNA, 19 nt, Homo sapiens
  misc_RNA (1)...(19): siRNA sense strand
auaagaaggcugagaagaa

SEQ ID NO: 972849 - RNA, 19 nt, Homo sapiens
  misc_RNA (1)...(19): siRNA sense strand
gggauaagaaggcugagaa

SEQ ID NO: 972850 - RNA, 19 nt, Homo sapiens
  misc_RNA (1)...(19): siRNA sense strand
gcaagaucccaccugguuu

SEQ ID NO: 972851 - RNA, 19 nt, Homo sapiens
  misc_RNA (1)...(19): siRNA sense strand
caaauucaaagaucacuuc

SEQ ID NO: 972852 - RNA, 19 nt, Homo sapiens
  misc_RNA (1)...(19): siRNA sense strand
agaagaagacaccugauga

SEQ ID NO: 972853 - RNA, 19 nt, Homo sapiens
  misc_RNA (1)...(19): siRNA sense strand
gcaaacaaggaacggaaga

SEQ ID NO: 972854 - RNA, 19 nt, Homo sapiens
  misc_RNA (1)...(19): siRNA sense strand
gagaaggacgaucuggauu

SEQ ID NO: 972855 - RNA, 19 nt, Homo sapiens
  misc_RNA (1)...(19): siRNA sense strand
gaucccaccugguuuccau

SEQ ID NO: 972856 - RNA, 19 nt, Homo sapiens
  misc_RNA (1)...(19): siRNA sense strand
gauaagaaggcugagaaga

SEQ ID NO: 972857 - RNA, 19 nt, Homo sapiens
  misc_RNA (1)...(19): siRNA sense strand
gggacaggcagauaagaaa

SEQ ID NO: 972858 - RNA, 19 nt, Homo sapiens
  misc_RNA (1)...(19): siRNA sense strand
gcuuccagcagucucauua

SEQ ID NO: 972859 - RNA, 19 nt, Homo sapiens
  misc_RNA (1)...(19): siRNA sense strand
agaaggacgaucuggauuu

SEQ ID NO: 972860 - RNA, 19 nt, Homo sapiens
  misc_RNA (1)...(19): siRNA sense strand
ccaaaguucugugaugucu

SEQ ID NO: 972861 - RNA, 19 nt, Homo sapiens
  misc_RNA (1)...(19): siRNA sense strand
gaagggacaggcagauaag

SEQ ID NO: 972862 - RNA, 19 nt, Homo sapiens
  misc_RNA (1)...(19): siRNA sense strand
agaagggacaggcagauaa

SEQ ID NO: 972863 - RNA, 19 nt, Homo sapiens
  misc_RNA (1)...(19): siRNA sense strand
ugacuccaaugaagaaugg

SEQ ID NO: 972864 - RNA, 19 nt, Homo sapiens
  misc_RNA (1)...(19): siRNA sense strand
gcccaucuacuacaucuau

SEQ ID NO: 972865 - RNA, 19 nt, Homo sapiens
  misc_RNA (1)...(19): siRNA sense strand
gaagaagacaccugaugac

SEQ ID NO: 972866 - RNA, 19 nt, Homo sapiens
  misc_RNA (1)...(19): siRNA sense strand
cagagaugcuucggcaaga

SEQ ID NO: 972867 - RNA, 19 nt, Homo sapiens
  misc_RNA (1)...(19): siRNA sense strand
cuccuaagcuggucaacga

SEQ ID NO: 972868 - RNA, 19 nt, Homo sapiens
  misc_RNA (1)...(19): siRNA sense strand
caagaucccaccugguuuc

SEQ ID NO: 972869 - RNA, 19 nt, Homo sapiens
  misc_RNA (1)...(19): siRNA sense strand
gcagucucauuacuuugug

SEQ ID NO: 972870 - RNA, 19 nt, Homo sapiens
  misc_RNA (1)...(19): siRNA sense strand
caaugauccuguguuugaa

SEQ ID NO: 972871 - RNA, 19 nt, Homo sapiens
  misc_RNA (1)...(19): siRNA sense strand
guacgcuugugucaaagau

SEQ ID NO: 972872 - RNA, 19 nt, Homo sapiens
  misc_RNA (1)...(19): siRNA sense strand
aagccaaaguucugugaug

SEQ ID NO: 972873 - RNA, 19 nt, Homo sapiens
  misc_RNA (1)...(19): siRNA sense strand
gcggcuacgucaaggucua

SEQ ID NO: 972874 - RNA, 19 nt, Homo sapiens
  misc_RNA (1)...(19): siRNA sense strand
ugaggaagaggaagaggaa

SEQ ID NO: 972875 - RNA, 19 nt, Homo sapiens
  misc_RNA (1)...(19): siRNA sense strand
guucaaagcccuggagaag

SEQ ID NO: 972876 - RNA, 19 nt, Homo sapiens
  misc_RNA (1)...(19): siRNA sense strand
gaagaagggacaggcagau

SEQ ID NO: 972877 - RNA, 19 nt, Homo sapiens
  misc_RNA (1)...(19): siRNA sense strand
cuacaucuaugaggaagag

SEQ ID NO: 972878 - RNA, 19 nt, Homo sapiens
  misc_RNA (1)...(19): siRNA sense strand
agaagacaccugaugacaa

SEQ ID NO: 972879 - RNA, 19 nt, Homo sapiens
  misc_RNA (1)...(19): siRNA sense strand
gcaaaaccaacauccauga

SEQ ID NO: 972880 - RNA, 19 nt, Homo sapiens
  misc_RNA (1)...(19): siRNA sense strand
caaacaaggaacggaagaa

SEQ ID NO: 972881 - RNA, 19 nt, Homo sapiens
  misc_RNA (1)...(19): siRNA sense strand
ccuaagcuggucaacgaua

SEQ ID NO: 972882 - RNA, 19 nt, Homo sapiens
  misc_RNA (1)...(19): siRNA sense strand
agaucacucucaagaagga

SEQ ID NO: 972883 - RNA, 19 nt, Homo sapiens
  misc_RNA (1)...(19): siRNA sense strand
gggcccaucuacuacaucu

SEQ ID NO: 972884 - RNA, 19 nt, Homo sapiens
  misc_RNA (1)...(19): siRNA sense strand
uacagcggcuaaagcaguu

SEQ ID NO: 972885 - RNA, 19 nt, Homo sapiens
  misc_RNA (1)...(19): siRNA sense strand
caccgacuuucuagaggaa

SEQ ID NO: 972886 - RNA, 19 nt, Homo sapiens
  misc_RNA (1)...(19): siRNA sense strand
aguuugggcuucgcuguaa

SEQ ID NO: 972887 - RNA, 19 nt, Homo sapiens
  misc_RNA (1)...(19): siRNA sense strand
uagggcagaucacucucaa

SEQ ID NO: 972888 - RNA, 19 nt, Homo sapiens
  misc_RNA (1)...(19): siRNA sense strand
caggagagaagaucacagu

SEQ ID NO: 972889 - RNA, 19 nt, Homo sapiens
  misc_RNA (1)...(19): siRNA sense strand
ucaguccuauguggaaaug

SEQ ID NO: 972890 - RNA, 19 nt, Homo sapiens
  misc_RNA (1)...(19): siRNA sense strand
ugaugacuccaaugaagaa

SEQ ID NO: 972891 - RNA, 19 nt, Homo sapiens
  misc_RNA (1)...(19): siRNA sense strand
gcuguuucccaccgacuuu

SEQ ID NO: 972892 - RNA, 19 nt, Homo sapiens
  misc_RNA (1)...(19): siRNA sense strand
cccacaaauucaaagauca

SEQ ID NO: 972893 - RNA, 19 nt, Homo sapiens
  misc_RNA (1)...(19): siRNA sense strand
cagcagagacucggcaaag

SEQ ID NO: 972894 - RNA, 19 nt, Homo sapiens
  misc_RNA (1)...(19): siRNA sense strand
ggauaagaaggcugagaag

SEQ ID NO: 972895 - RNA, 19 nt, Homo sapiens
  misc_RNA (1)...(19): siRNA sense strand
aagaagggacaggcagaua

SEQ ID NO: 972896 - RNA, 19 nt, Homo sapiens
  misc_RNA (1)...(19): siRNA sense strand
cuacuacaucuaugaggaa

SEQ ID NO: 972897 - RNA, 19 nt, Homo sapiens
  misc_RNA (1)...(19): siRNA sense strand
gagaugcuucggcaagauc

SEQ ID NO: 972898 - RNA, 19 nt, Homo sapiens
  misc_RNA (1)...(19): siRNA sense strand
cuacagggacaaaggagau

SEQ ID NO: 972899 - RNA, 19 nt, Homo sapiens
  misc_RNA (1)...(19): siRNA sense strand
gggugaucauggcaaacaa

SEQ ID NO: 972900 - RNA, 19 nt, Homo sapiens
  misc_RNA (1)...(19): siRNA sense strand
gauaagccccacaaauuca

SEQ ID NO: 972901 - RNA, 19 nt, Homo sapiens
  misc_RNA (1)...(19): siRNA sense strand
ggacaggcagauaagaaaa

SEQ ID NO: 972902 - RNA, 19 nt, Homo sapiens
  misc_RNA (1)...(19): siRNA sense strand
cagcaguacgcuuguguca

SEQ ID NO: 972903 - RNA, 19 nt, Homo sapiens
  misc_RNA (1)...(19): siRNA sense strand
guucucaacaacaaguuug

SEQ ID NO: 972904 - RNA, 19 nt, Homo sapiens
  misc_RNA (1)...(19): siRNA sense strand
acgauaagccccacaaauu

SEQ ID NO: 972905 - RNA, 19 nt, Homo sapiens
  misc_RNA (1)...(19): siRNA sense strand
ccaucuacuacaucuauga

SEQ ID NO: 972906 - RNA, 19 nt, Homo sapiens
  misc_RNA (1)...(19): siRNA sense strand
uguaagaacugcaaaacca

SEQ ID NO: 972907 - RNA, 19 nt, Homo sapiens
  misc_RNA (1)...(19): siRNA sense strand
gaagccaaaguucugugau

SEQ ID NO: 972908 - RNA, 19 nt, Homo sapiens
  misc_RNA (1)...(19): siRNA sense strand
gcaaaccccaggauggaaa

SEQ ID NO: 972909 - RNA, 19 nt, Homo sapiens
  misc_RNA (1)...(19): siRNA sense strand
caucuaugaggaagaggaa

SEQ ID NO: 972910 - RNA, 19 nt, Homo sapiens
  misc_RNA (1)...(19): siRNA sense strand
cgacuuugccagagacuua

SEQ ID NO: 972911 - RNA, 19 nt, Homo sapiens
  misc_RNA (1)...(19): siRNA sense strand
ggaagauucucccgacgau

SEQ ID NO: 972912 - RNA, 19 nt, Homo sapiens
  misc_RNA (1)...(19): siRNA sense strand
agagacagaugaauuaugg

SEQ ID NO: 972913 - RNA, 19 nt, Homo sapiens
  misc_RNA (1)...(19): siRNA sense strand
gaugaucuguuucaacucu

SEQ ID NO: 972914 - RNA, 19 nt, Homo sapiens
  misc_RNA (1)...(19): siRNA sense strand
gaaaacaggcugccaagaa

SEQ ID NO: 972915 - RNA, 19 nt, Homo sapiens
  misc_RNA (1)...(19): siRNA sense strand
gcacagagaaagacaaugc

SEQ ID NO: 972916 - RNA, 19 nt, Homo sapiens
  misc_RNA (1)...(19): siRNA sense strand
ucgagagacagaugaauua

SEQ ID NO: 972917 - RNA, 19 nt, Homo sapiens
  misc_RNA (1)...(19): siRNA sense strand
ucacagcccugagcacaga

SEQ ID NO: 972918 - RNA, 19 nt, Homo sapiens
  misc_RNA (1)...(19): siRNA sense strand
ccaaggcaauucgagacua

SEQ ID NO: 972919 - RNA, 19 nt, Homo sapiens
  misc_RNA (1)...(19): siRNA sense strand
caggaaagccagucagaga

SEQ ID NO: 972920 - RNA, 19 nt, Homo sapiens
  misc_RNA (1)...(19): siRNA sense strand
acgcuaagaugccggugua

SEQ ID NO: 972921 - RNA, 19 nt, Homo sapiens
  misc_RNA (1)...(19): siRNA sense strand
gagacuggaaucagaaaga

SEQ ID NO: 972922 - RNA, 19 nt, Homo sapiens
  misc_RNA (1)...(19): siRNA sense strand
aagauucucccgacgauaa

SEQ ID NO: 972923 - RNA, 19 nt, Homo sapiens
  misc_RNA (1)...(19): siRNA sense strand
ggcggagacuggaaucaga

SEQ ID NO: 972924 - RNA, 19 nt, Homo sapiens
  misc_RNA (1)...(19): siRNA sense strand
aaaacaggcugccaagaaa

SEQ ID NO: 972925 - RNA, 19 nt, Homo sapiens
  misc_RNA (1)...(19): siRNA sense strand
gagaaauauuugcagaaac

SEQ ID NO: 972926 - RNA, 19 nt, Homo sapiens
  misc_RNA (1)...(19): siRNA sense strand
cacaggagcacgagucuug

SEQ ID NO: 972927 - RNA, 19 nt, Homo sapiens
  misc_RNA (1)...(19): siRNA sense strand
caagacgccuuaugaugcu

SEQ ID NO: 972928 - RNA, 19 nt, Homo sapiens
  misc_RNA (1)...(19): siRNA sense strand
gccaagacgccuuaugaug

SEQ ID NO: 972929 - RNA, 19 nt, Homo sapiens
  misc_RNA (1)...(19): siRNA sense strand
gacgcagagugaacgcuaa

SEQ ID NO: 972930 - RNA, 19 nt, Homo sapiens
  misc_RNA (1)...(19): siRNA sense strand
gagagacagaugaauuaug

SEQ ID NO: 972931 - RNA, 19 nt, Homo sapiens
  misc_RNA (1)...(19): siRNA sense strand
caaggcaauucgagacuac

SEQ ID NO: 972932 - RNA, 19 nt, Homo sapiens
  misc_RNA (1)...(19): siRNA sense strand
gggcuucggcucagaaauc

SEQ ID NO: 972933 - RNA, 19 nt, Homo sapiens
  misc_RNA (1)...(19): siRNA sense strand
gaagauucucccgacgaua

SEQ ID NO: 972934 - RNA, 19 nt, Homo sapiens
  misc_RNA (1)...(19): siRNA sense strand
gcagagugaacgcuaagau

SEQ ID NO: 972935 - RNA, 19 nt, Homo sapiens
  misc_RNA (1)...(19): siRNA sense strand
ggacaaaacccgaaaacag

SEQ ID NO: 972936 - RNA, 19 nt, Homo sapiens
  misc_RNA (1)...(19): siRNA sense strand
gcugauggccaaggcaauu

SEQ ID NO: 972937 - RNA, 19 nt, Homo sapiens
  misc_RNA (1)...(19): siRNA sense strand
uggccaagacgccuuauga

SEQ ID NO: 972938 - RNA, 19 nt, Homo sapiens
  misc_RNA (1)...(19): siRNA sense strand
ggaugcaggccaacuacga

SEQ ID NO: 972939 - RNA, 19 nt, Homo sapiens
  misc_RNA (1)...(19): siRNA sense strand
gcccagagccgagagaaag

SEQ ID NO: 972940 - RNA, 19 nt, Homo sapiens
  misc_RNA (1)...(19): siRNA sense strand
gagacuacaagggaagauu

SEQ ID NO: 972941 - RNA, 19 nt, Homo sapiens
  misc_RNA (1)...(19): siRNA sense strand
acgaucugcuguccgcuuu

SEQ ID NO: 972942 - RNA, 19 nt, Homo sapiens
  misc_RNA (1)...(19): siRNA sense strand
cagagugaacgcuaagaug

SEQ ID NO: 972943 - RNA, 19 nt, Homo sapiens
  misc_RNA (1)...(19): siRNA sense strand
gcggagacuggaaucagaa

SEQ ID NO: 972944 - RNA, 19 nt, Homo sapiens
  misc_RNA (1)...(19): siRNA sense strand
gcgaguagugaccacgaaa

SEQ ID NO: 972945 - RNA, 19 nt, Homo sapiens
  misc_RNA (1)...(19): siRNA sense strand
cgagagacagaugaauuau

SEQ ID NO: 972946 - RNA, 19 nt, Homo sapiens
  misc_RNA (1)...(19): siRNA sense strand
cccaggagcccaucucaca

SEQ ID NO: 972947 - RNA, 19 nt, Homo sapiens
  misc_RNA (1)...(19): siRNA sense strand
agacggacagcacgcagaa

SEQ ID NO: 972948 - RNA, 19 nt, Homo sapiens
  misc_RNA (1)...(19): siRNA sense strand
ggccaagacgccuuaugau

SEQ ID NO: 972949 - RNA, 19 nt, Homo sapiens
  misc_RNA (1)...(19): siRNA sense strand
aauuauggaggauucauug

SEQ ID NO: 972950 - RNA, 19 nt, Homo sapiens
  misc_RNA (1)...(19): siRNA sense strand
gaugcaggccaacuacgau

SEQ ID NO: 972951 - RNA, 19 nt, Homo sapiens
  misc_RNA (1)...(19): siRNA sense strand
gaaucagaaagacggugaa

SEQ ID NO: 972952 - RNA, 19 nt, Homo sapiens
  misc_RNA (1)...(19): siRNA sense strand
ggccgacagacaaagauga

SEQ ID NO: 972953 - RNA, 19 nt, Homo sapiens
  misc_RNA (1)...(19): siRNA sense strand
gaucugcuguccgcuuuug

SEQ ID NO: 972954 - RNA, 19 nt, Homo sapiens
  misc_RNA (1)...(19): siRNA sense strand
cagcaaagguggugauaaa

SEQ ID NO: 972955 - RNA, 19 nt, Homo sapiens
  misc_RNA (1)...(19): siRNA sense strand
auaaagugcuccugcauuu

SEQ ID NO: 972956 - RNA, 19 nt, Homo sapiens
  misc_RNA (1)...(19): siRNA sense strand
caaagguggugauaaagug

SEQ ID NO: 972957 - RNA, 19 nt, Homo sapiens
  misc_RNA (1)...(19): siRNA sense strand
gauaaagugcuccugcauu

SEQ ID NO: 972958 - RNA, 19 nt, Homo sapiens
  misc_RNA (1)...(19): siRNA sense strand
gcaaagguggugauaaagu

SEQ ID NO: 972959 - RNA, 19 nt, Homo sapiens
  misc_RNA (1)...(19): siRNA sense strand
acaaggagcuaggcuucaa

SEQ ID NO: 972960 - RNA, 19 nt, Homo sapiens
  misc_RNA (1)...(19): siRNA sense strand
gcgcgugcauccugaagca

SEQ ID NO: 972961 - RNA, 19 nt, Homo sapiens
  misc_RNA (1)...(19): siRNA sense strand
ggaagcccgugcgugaugu

SEQ ID NO: 972962 - RNA, 19 nt, Homo sapiens
  misc_RNA (1)...(19): siRNA sense strand
ucaagucgaugaccaauuu

SEQ ID NO: 972963 - RNA, 19 nt, Homo sapiens
  misc_RNA (1)...(19): siRNA sense strand
gccaugaucuucugccaua

SEQ ID NO: 972964 - RNA, 19 nt, Homo sapiens
  misc_RNA (1)...(19): siRNA sense strand
gaagaucagugagcagauu

SEQ ID NO: 972965 - RNA, 19 nt, Homo sapiens
  misc_RNA (1)...(19): siRNA sense strand
gaaagaggccagaagauca

SEQ ID NO: 972966 - RNA, 19 nt, Homo sapiens
  misc_RNA (1)...(19): siRNA sense strand
ggacgggaauccugacaau

SEQ ID NO: 972967 - RNA, 19 nt, Homo sapiens
  misc_RNA (1)...(19): siRNA sense strand
ucaacaagcugaucagaag

SEQ ID NO: 972968 - RNA, 19 nt, Homo sapiens
  misc_RNA (1)...(19): siRNA sense strand
cagcagagcucucaaaaga

SEQ ID NO: 972969 - RNA, 19 nt, Homo sapiens
  misc_RNA (1)...(19): siRNA sense strand
guucauugaucccaagaaa

SEQ ID NO: 972970 - RNA, 19 nt, Homo sapiens
  misc_RNA (1)...(19): siRNA sense strand
ggaaagaggccagaagauc

SEQ ID NO: 972971 - RNA, 19 nt, Homo sapiens
  misc_RNA (1)...(19): siRNA sense strand
gcuccaagcucaaguucau

SEQ ID NO: 972972 - RNA, 19 nt, Homo sapiens
  misc_RNA (1)...(19): siRNA sense strand
gcagaucaaggaagagaaa

SEQ ID NO: 972973 - RNA, 19 nt, Homo sapiens
  misc_RNA (1)...(19): siRNA sense strand
uaacacaaaccaaguggaa

SEQ ID NO: 972974 - RNA, 19 nt, Homo sapiens
  misc_RNA (1)...(19): siRNA sense strand
gaucagaagcaaccuuguu

SEQ ID NO: 972975 - RNA, 19 nt, Homo sapiens
  misc_RNA (1)...(19): siRNA sense strand
caaggaagagaaagucaaa

SEQ ID NO: 972976 - RNA, 19 nt, Homo sapiens
  misc_RNA (1)...(19): siRNA sense strand
gagaaagucaaagcagaua

SEQ ID NO: 972977 - RNA, 19 nt, Homo sapiens
  misc_RNA (1)...(19): siRNA sense strand
ugaggcugaugucaugaua

SEQ ID NO: 972978 - RNA, 19 nt, Homo sapiens
  misc_RNA (1)...(19): siRNA sense strand
gcaggaagcggcugucaag

SEQ ID NO: 972979 - RNA, 19 nt, Homo sapiens
  misc_RNA (1)...(19): siRNA sense strand
ggacgagauugagaaaaua

SEQ ID NO: 972980 - RNA, 19 nt, Homo sapiens
  misc_RNA (1)...(19): siRNA sense strand
acaagugucugucgucauc

SEQ ID NO: 972981 - RNA, 19 nt, Homo sapiens
  misc_RNA (1)...(19): siRNA sense strand
gaaguuugcccagaaagug

SEQ ID NO: 972982 - RNA, 19 nt, Homo sapiens
  misc_RNA (1)...(19): siRNA sense strand
gcaugaacauccugaacag

SEQ ID NO: 972983 - RNA, 19 nt, Homo sapiens
  misc_RNA (1)...(19): siRNA sense strand
uagaaagauuggacacaga

SEQ ID NO: 972984 - RNA, 19 nt, Homo sapiens
  misc_RNA (1)...(19): siRNA sense strand
gauuggacacagaugauuu

SEQ ID NO: 972985 - RNA, 19 nt, Homo sapiens
  misc_RNA (1)...(19): siRNA sense strand
gcagagcucucaaaagaag

SEQ ID NO: 972986 - RNA, 19 nt, Homo sapiens
  misc_RNA (1)...(19): siRNA sense strand
gugagcagauugucauugg

SEQ ID NO: 972987 - RNA, 19 nt, Homo sapiens
  misc_RNA (1)...(19): siRNA sense strand
caagguguuuguucuggau

SEQ ID NO: 972988 - RNA, 19 nt, Homo sapiens
  misc_RNA (1)...(19): siRNA sense strand
ccaauuugcagaucaagga

SEQ ID NO: 972989 - RNA, 19 nt, Homo sapiens
  misc_RNA (1)...(19): siRNA sense strand
cagaugauuuggacgagau

SEQ ID NO: 972990 - RNA, 19 nt, Homo sapiens
  misc_RNA (1)...(19): siRNA sense strand
ugaacauccugaacagaau

SEQ ID NO: 972991 - RNA, 19 nt, Homo sapiens
  misc_RNA (1)...(19): siRNA sense strand
guggaaguuugcccagaaa

SEQ ID NO: 972992 - RNA, 19 nt, Homo sapiens
  misc_RNA (1)...(19): siRNA sense strand
gcccaguccuuacucaaca

SEQ ID NO: 972993 - RNA, 19 nt, Homo sapiens
  misc_RNA (1)...(19): siRNA sense strand
ugaccaauuugcagaucaa

SEQ ID NO: 972994 - RNA, 19 nt, Homo sapiens
  misc_RNA (1)...(19): siRNA sense strand
aaacagaugaagaggagaa

SEQ ID NO: 972995 - RNA, 19 nt, Homo sapiens
  misc_RNA (1)...(19): siRNA sense strand
gaacagaauccaggagcau

SEQ ID NO: 972996 - RNA, 19 nt, Homo sapiens
  misc_RNA (1)...(19): siRNA sense strand
gaaguuccaggccuugugu

SEQ ID NO: 972997 - RNA, 19 nt, Homo sapiens
  misc_RNA (1)...(19): siRNA sense strand
agaggaugcugcccaggaa

SEQ ID NO: 972998 - RNA, 19 nt, Homo sapiens
  misc_RNA (1)...(19): siRNA sense strand
ggaagagaaagucaaagca

SEQ ID NO: 972999 - RNA, 19 nt, Homo sapiens
  misc_RNA (1)...(19): siRNA sense strand
cagaugaagaggagaaaga

SEQ ID NO: 973000 - RNA, 19 nt, Homo sapiens
  misc_RNA (1)...(19): siRNA sense strand
cagcagagacgagaaguuc

SEQ ID NO: 973001 - RNA, 19 nt, Homo sapiens
  misc_RNA (1)...(19): siRNA sense strand
gaacauccugaacagaauc

SEQ ID NO: 973002 - RNA, 19 nt, Homo sapiens
  misc_RNA (1)...(19): siRNA sense strand
gauccaaacuccccucugu

SEQ ID NO: 973003 - RNA, 19 nt, Homo sapiens
  misc_RNA (1)...(19): siRNA sense strand
ccaucaagcaguacuaugu

SEQ ID NO: 973004 - RNA, 19 nt, Homo sapiens
  misc_RNA (1)...(19): siRNA sense strand
ggaaguuugcccagaaagu

SEQ ID NO: 973005 - RNA, 19 nt, Homo sapiens
  misc_RNA (1)...(19): siRNA sense strand
ccaagaaaaucaagguguu

SEQ ID NO: 973006 - RNA, 19 nt, Homo sapiens
  misc_RNA (1)...(19): siRNA sense strand
ccagguggcucugcugagu

SEQ ID NO: 973007 - RNA, 19 nt, Homo sapiens
  misc_RNA (1)...(19): siRNA sense strand
uguggaaguuugcccagaa

SEQ ID NO: 973008 - RNA, 19 nt, Homo sapiens
  misc_RNA (1)...(19): siRNA sense strand
aaagauuggacacagauga

SEQ ID NO: 973009 - RNA, 19 nt, Homo sapiens
  misc_RNA (1)...(19): siRNA sense strand
gaugaccaauuugcagauc

SEQ ID NO: 973010 - RNA, 19 nt, Homo sapiens
  misc_RNA (1)...(19): siRNA sense strand
gaaagauuggacacagaug

SEQ ID NO: 973011 - RNA, 19 nt, Homo sapiens
  misc_RNA (1)...(19): siRNA sense strand
gcaagcacagcaugaacau

SEQ ID NO: 973012 - RNA, 19 nt, Homo sapiens
  misc_RNA (1)...(19): siRNA sense strand
acgggaauccugacaauga

SEQ ID NO: 973013 - RNA, 19 nt, Homo sapiens
  misc_RNA (1)...(19): siRNA sense strand
aaaucaagguguuuguucu

SEQ ID NO: 973014 - RNA, 19 nt, Homo sapiens
  misc_RNA (1)...(19): siRNA sense strand
gaucaaggaagagaaaguc

SEQ ID NO: 973015 - RNA, 19 nt, Homo sapiens
  misc_RNA (1)...(19): siRNA sense strand
agucaaagcagauaccaau

SEQ ID NO: 973016 - RNA, 19 nt, Homo sapiens
  misc_RNA (1)...(19): siRNA sense strand
ccacucagggccaccaaga

SEQ ID NO: 973017 - RNA, 19 nt, Homo sapiens
  misc_RNA (1)...(19): siRNA sense strand
acagaauccaggagcauuu

SEQ ID NO: 973018 - RNA, 19 nt, Homo sapiens
  misc_RNA (1)...(19): siRNA sense strand
ugaacaugguggacagcaa

SEQ ID NO: 973019 - RNA, 19 nt, Homo sapiens
  misc_RNA (1)...(19): siRNA sense strand
gaggccagaagaucaguga

SEQ ID NO: 973020 - RNA, 19 nt, Homo sapiens
  misc_RNA (1)...(19): siRNA sense strand
ucaaagcagauaccaaugg

SEQ ID NO: 973021 - RNA, 19 nt, Homo sapiens
  misc_RNA (1)...(19): siRNA sense strand
caaacugaagcgugaggaa

SEQ ID NO: 973022 - RNA, 19 nt, Homo sapiens
  misc_RNA (1)...(19): siRNA sense strand
gcagagacgagaaguucca

SEQ ID NO: 973023 - RNA, 19 nt, Homo sapiens
  misc_RNA (1)...(19): siRNA sense strand
gcagcagagacgagaaguu

SEQ ID NO: 973024 - RNA, 19 nt, Homo sapiens
  misc_RNA (1)...(19): siRNA sense strand
acacaaaccaaguggaagu

SEQ ID NO: 973025 - RNA, 19 nt, Homo sapiens
  misc_RNA (1)...(19): siRNA sense strand
gauagaaagauuggacaca

SEQ ID NO: 973026 - RNA, 19 nt, Homo sapiens
  misc_RNA (1)...(19): siRNA sense strand
gacagcaagcacagcauga

SEQ ID NO: 973027 - RNA, 19 nt, Homo sapiens
  misc_RNA (1)...(19): siRNA sense strand
gguauuaucaaaaccagua

SEQ ID NO: 973028 - RNA, 19 nt, Homo sapiens
  misc_RNA (1)...(19): siRNA sense strand
gcucaagccaugaucuucu

SEQ ID NO: 973029 - RNA, 19 nt, Homo sapiens
  misc_RNA (1)...(19): siRNA sense strand
gaaaaucaagguguuuguu

SEQ ID NO: 973030 - RNA, 19 nt, Homo sapiens
  misc_RNA (1)...(19): siRNA sense strand
ucaaggaagagaaagucaa

SEQ ID NO: 973031 - RNA, 19 nt, Homo sapiens
  misc_RNA (1)...(19): siRNA sense strand
ccaaugguauuaucaaaac

SEQ ID NO: 973032 - RNA, 19 nt, Homo sapiens
  misc_RNA (1)...(19): siRNA sense strand
gcccaggaacugccagaug

SEQ ID NO: 973033 - RNA, 19 nt, Homo sapiens
  misc_RNA (1)...(19): siRNA sense strand
caggagcauuuuaauaaga

SEQ ID NO: 973034 - RNA, 19 nt, Homo sapiens
  misc_RNA (1)...(19): siRNA sense strand
gagggcaaagagaagguuu

SEQ ID NO: 973035 - RNA, 19 nt, Homo sapiens
  misc_RNA (1)...(19): siRNA sense strand
cagagcugcccaguccuua

SEQ ID NO: 973036 - RNA, 19 nt, Homo sapiens
  misc_RNA (1)...(19): siRNA sense strand
gacucuguguggaaguuug

SEQ ID NO: 973037 - RNA, 19 nt, Homo sapiens
  misc_RNA (1)...(19): siRNA sense strand
ucagugagcagauugucau

SEQ ID NO: 973038 - RNA, 19 nt, Homo sapiens
  misc_RNA (1)...(19): siRNA sense strand
uccaggagcauuuuaauaa

SEQ ID NO: 973039 - RNA, 19 nt, Homo sapiens
  misc_RNA (1)...(19): siRNA sense strand
gaaagucaaagcagauacc

SEQ ID NO: 973040 - RNA, 19 nt, Homo sapiens
  misc_RNA (1)...(19): siRNA sense strand
gauuuggacgagauugaga

SEQ ID NO: 973041 - RNA, 19 nt, Homo sapiens
  misc_RNA (1)...(19): siRNA sense strand
agaaagauuggacacagau

SEQ ID NO: 973042 - RNA, 19 nt, Homo sapiens
  misc_RNA (1)...(19): siRNA sense strand
gaauccaggagcauuuuaa

SEQ ID NO: 973043 - RNA, 19 nt, Homo sapiens
  misc_RNA (1)...(19): siRNA sense strand
augaacauccugaacagaa

SEQ ID NO: 973044 - RNA, 19 nt, Homo sapiens
  misc_RNA (1)...(19): siRNA sense strand
ugucugucgucaucaacuu

SEQ ID NO: 973045 - RNA, 19 nt, Homo sapiens
  misc_RNA (1)...(19): siRNA sense strand
ggccuuguguaaccucuac

SEQ ID NO: 973046 - RNA, 19 nt, Homo sapiens
  misc_RNA (1)...(19): siRNA sense strand
agagaaagucaaagcagau

SEQ ID NO: 973047 - RNA, 19 nt, Homo sapiens
  misc_RNA (1)...(19): siRNA sense strand
aagcggcugucaagucgau

SEQ ID NO: 973048 - RNA, 19 nt, Homo sapiens
  misc_RNA (1)...(19): siRNA sense strand
agagcgaccuucccagaaa

SEQ ID NO: 973049 - RNA, 19 nt, Homo sapiens
  misc_RNA (1)...(19): siRNA sense strand
gcgcgcaccugaccuucaa

SEQ ID NO: 973050 - RNA, 19 nt, Homo sapiens
  misc_RNA (1)...(19): siRNA sense strand
caccugaccuucaacaagu

SEQ ID NO: 973051 - RNA, 19 nt, Homo sapiens
  misc_RNA (1)...(19): siRNA sense strand
aggucaagcucaagaagua

SEQ ID NO: 973052 - RNA, 19 nt, Homo sapiens
  misc_RNA (1)...(19): siRNA sense strand
ucaagaaguacaccaaguu

SEQ ID NO: 973053 - RNA, 19 nt, Homo sapiens
  misc_RNA (1)...(19): siRNA sense strand
ccagaucgacuacgacuuc

SEQ ID NO: 973054 - RNA, 19 nt, Homo sapiens
  misc_RNA (1)...(19): siRNA sense strand
cuacgaggccgacuuuguu

SEQ ID NO: 973055 - RNA, 19 nt, Homo sapiens
  misc_RNA (1)...(19): siRNA sense strand
ggaguucuaccgcaaguuc

SEQ ID NO: 973056 - RNA, 19 nt, Homo sapiens
  misc_RNA (1)...(19): siRNA sense strand
gcaccugaccuucaacaag

SEQ ID NO: 973057 - RNA, 19 nt, Homo sapiens
  misc_RNA (1)...(19): siRNA sense strand
ucaugaaggucaagcucaa

SEQ ID NO: 973058 - RNA, 19 nt, Homo sapiens
  misc_RNA (1)...(19): siRNA sense strand
caagaaguacaccaaguuc

SEQ ID NO: 973059 - RNA, 19 nt, Homo sapiens
  misc_RNA (1)...(19): siRNA sense strand
ccaaggagcgcgcauucga

SEQ ID NO: 973060 - RNA, 19 nt, Homo sapiens
  misc_RNA (1)...(19): siRNA sense strand
gaggaguucuaccgcaagu

SEQ ID NO: 973061 - RNA, 19 nt, Homo sapiens
  misc_RNA (1)...(19): siRNA sense strand
gagcgaccuucccagaaag

SEQ ID NO: 973062 - RNA, 19 nt, Homo sapiens
  misc_RNA (1)...(19): siRNA sense strand
gcagcuguauaaacucuac

SEQ ID NO: 973063 - RNA, 19 nt, Homo sapiens
  misc_RNA (1)...(19): siRNA sense strand
gaaggucaagcucaagaag

SEQ ID NO: 973064 - RNA, 19 nt, Homo sapiens
  misc_RNA (1)...(19): siRNA sense strand
acgaguuucuggacaaguu

SEQ ID NO: 973065 - RNA, 19 nt, Homo sapiens
  misc_RNA (1)...(19): siRNA sense strand
ucgccaacuucauccagua

SEQ ID NO: 973066 - RNA, 19 nt, Homo sapiens
  misc_RNA (1)...(19): siRNA sense strand
ucucagugcuggcgugaag

SEQ ID NO: 973067 - RNA, 19 nt, Homo sapiens
  misc_RNA (1)...(19): siRNA sense strand
ggccgacuuuguucucuuc

SEQ ID NO: 973068 - RNA, 19 nt, Homo sapiens
  misc_RNA (1)...(19): siRNA sense strand
guacaccaaguuccucuuc

SEQ ID NO: 973069 - RNA, 19 nt, Homo sapiens
  misc_RNA (1)...(19): siRNA sense strand
ggaagcgcgugaugaucgu

SEQ ID NO: 973070 - RNA, 19 nt, Homo sapiens
  misc_RNA (1)...(19): siRNA sense strand
caacuggaagcgcgugaug

SEQ ID NO: 973071 - RNA, 19 nt, Homo sapiens
  misc_RNA (1)...(19): siRNA sense strand
ggacugguucgccaagauc

SEQ ID NO: 973072 - RNA, 19 nt, Homo sapiens
  misc_RNA (1)...(19): siRNA sense strand
gcaaguucgagcuggagaa

SEQ ID NO: 973073 - RNA, 19 nt, Homo sapiens
  misc_RNA (1)...(19): siRNA sense strand
gaggacugguucgccaaga

SEQ ID NO: 973074 - RNA, 19 nt, Homo sapiens
  misc_RNA (1)...(19): siRNA sense strand
gcugggaggaggacugguu

SEQ ID NO: 973075 - RNA, 19 nt, Homo sapiens
  misc_RNA (1)...(19): siRNA sense strand
ucgacgaguuucuggacaa

SEQ ID NO: 973076 - RNA, 19 nt, Homo sapiens
  misc_RNA (1)...(19): siRNA sense strand
uugcacacguccuucucua

SEQ ID NO: 973077 - RNA, 19 nt, Homo sapiens
  misc_RNA (1)...(19): siRNA sense strand
cagagcgaccuucccagaa

SEQ ID NO: 973078 - RNA, 19 nt, Homo sapiens
  misc_RNA (1)...(19): siRNA sense strand
cgacgaguuucuggacaag

SEQ ID NO: 973079 - RNA, 19 nt, Homo sapiens
  misc_RNA (1)...(19): siRNA sense strand
ggaaggugaugcucgugau

SEQ ID NO: 973080 - RNA, 19 nt, Homo sapiens
  misc_RNA (1)...(19): siRNA sense strand
gugagucucugcucuacau

SEQ ID NO: 973081 - RNA, 19 nt, Homo sapiens
  misc_RNA (1)...(19): siRNA sense strand
aggcugggauggcgaguaa

SEQ ID NO: 973082 - RNA, 19 nt, Homo sapiens
  misc_RNA (1)...(19): siRNA sense strand
gaaggugaugcucgugauu

SEQ ID NO: 973083 - RNA, 19 nt, Homo sapiens
  misc_RNA (1)...(19): siRNA sense strand
uggaagaccuguccucacu

SEQ ID NO: 973084 - RNA, 19 nt, Homo sapiens
  misc_RNA (1)...(19): siRNA sense strand
ucuacaugcuggagaagug

SEQ ID NO: 973085 - RNA, 19 nt, Homo sapiens
  misc_RNA (1)...(19): siRNA sense strand
gugaugcucgugauugaug

SEQ ID NO: 973086 - RNA, 19 nt, Homo sapiens
  misc_RNA (1)...(19): siRNA sense strand
aggugaugcucgugauuga

SEQ ID NO: 973087 - RNA, 19 nt, Homo sapiens
  misc_RNA (1)...(19): siRNA sense strand
gcacucaguugaccuuauc

SEQ ID NO: 973088 - RNA, 19 nt, Homo sapiens
  misc_RNA (1)...(19): siRNA sense strand
gcacgcagauccucuacuc

SEQ ID NO: 973089 - RNA, 19 nt, Homo sapiens
  misc_RNA (1)...(19): siRNA sense strand
acgaggagcugaucaagga

SEQ ID NO: 973090 - RNA, 19 nt, Homo sapiens
  misc_RNA (1)...(19): siRNA sense strand
ccacagacaucgcccucau

SEQ ID NO: 973091 - RNA, 19 nt, Homo sapiens
  misc_RNA (1)...(19): siRNA sense strand
cgagguggcuggguguaug

SEQ ID NO: 973092 - RNA, 19 nt, Homo sapiens
  misc_RNA (1)...(19): siRNA sense strand
gccaucauccgcaccauug

SEQ ID NO: 973093 - RNA, 19 nt, Homo sapiens
  misc_RNA (1)...(19): siRNA sense strand
uaccugaccuuggccagaa

SEQ ID NO: 973094 - RNA, 19 nt, Homo sapiens
  misc_RNA (1)...(19): siRNA sense strand
ggcacucaguugaccuuau

SEQ ID NO: 973095 - RNA, 19 nt, Homo sapiens
  misc_RNA (1)...(19): siRNA sense strand
gcgcuucugcuccuucuca

SEQ ID NO: 973096 - RNA, 19 nt, Homo sapiens
  misc_RNA (1)...(19): siRNA sense strand
acagacaucgcccucauca

SEQ ID NO: 973097 - RNA, 19 nt, Homo sapiens
  misc_RNA (1)...(19): siRNA sense strand
cauacgaggagcugaucaa

SEQ ID NO: 973098 - RNA, 19 nt, Homo sapiens
  misc_RNA (1)...(19): siRNA sense strand
ggaggugacccugcucucu

SEQ ID NO: 973099 - RNA, 19 nt, Homo sapiens
  misc_RNA (1)...(19): siRNA sense strand
gcaggaagcucgggaucua

SEQ ID NO: 973100 - RNA, 19 nt, Homo sapiens
  misc_RNA (1)...(19): siRNA sense strand
gcacggaacauuacucgua

SEQ ID NO: 973101 - RNA, 19 nt, Homo sapiens
  misc_RNA (1)...(19): siRNA sense strand
gcagaggagugguacaaga

SEQ ID NO: 973102 - RNA, 19 nt, Homo sapiens
  misc_RNA (1)...(19): siRNA sense strand
aaacagaccuccucaacag

SEQ ID NO: 973103 - RNA, 19 nt, Homo sapiens
  misc_RNA (1)...(19): siRNA sense strand
ggagaaguauccagaugag

SEQ ID NO: 973104 - RNA, 19 nt, Homo sapiens
  misc_RNA (1)...(19): siRNA sense strand
acagaucgcuucaaugucu

SEQ ID NO: 973105 - RNA, 19 nt, Homo sapiens
  misc_RNA (1)...(19): siRNA sense strand
gaaacagaccuccucaaca

SEQ ID NO: 973106 - RNA, 19 nt, Homo sapiens
  misc_RNA (1)...(19): siRNA sense strand
gaacagacagaucgcuuca

SEQ ID NO: 973107 - RNA, 19 nt, Homo sapiens
  misc_RNA (1)...(19): siRNA sense strand
acagacagaucgcuucaau

SEQ ID NO: 973108 - RNA, 19 nt, Homo sapiens
  misc_RNA (1)...(19): siRNA sense strand
caacagauucauccugcua

SEQ ID NO: 973109 - RNA, 19 nt, Homo sapiens
  misc_RNA (1)...(19): siRNA sense strand
agacagaucgcuucaaugu

SEQ ID NO: 973110 - RNA, 19 nt, Homo sapiens
  misc_RNA (1)...(19): siRNA sense strand
ggaaacagaccuccucaac

SEQ ID NO: 973111 - RNA, 19 nt, Homo sapiens
  misc_RNA (1)...(19): siRNA sense strand
cgacaucagucugggagaa

SEQ ID NO: 973112 - RNA, 19 nt, Homo sapiens
  misc_RNA (1)...(19): siRNA sense strand
acaagggcacggaacauua

SEQ ID NO: 973113 - RNA, 19 nt, Homo sapiens
  misc_RNA (1)...(19): siRNA sense strand
gaucagcaacgucaagugu

SEQ ID NO: 973114 - RNA, 19 nt, Homo sapiens
  misc_RNA (1)...(19): siRNA sense strand
agaaguauccagaugagaa

SEQ ID NO: 973115 - RNA, 19 nt, Homo sapiens
  misc_RNA (1)...(19): siRNA sense strand
gcagaucacccacgagaac

SEQ ID NO: 973116 - RNA, 19 nt, Homo sapiens
  misc_RNA (1)...(19): siRNA sense strand
gaacaagggcacggaacau

SEQ ID NO: 973117 - RNA, 19 nt, Homo sapiens
  misc_RNA (1)...(19): siRNA sense strand
ucagcaacgucaagugugu

SEQ ID NO: 973118 - RNA, 19 nt, Homo sapiens
  misc_RNA (1)...(19): siRNA sense strand
gccgaagccuccagcuaug

SEQ ID NO: 973119 - RNA, 19 nt, Homo sapiens
  misc_RNA (1)...(19): siRNA sense strand
cacggaacauuacucguau

SEQ ID NO: 973120 - RNA, 19 nt, Homo sapiens
  misc_RNA (1)...(19): siRNA sense strand
aagcaaggcuacgugaaga

SEQ ID NO: 973121 - RNA, 19 nt, Homo sapiens
  misc_RNA (1)...(19): siRNA sense strand
acagauucauccugcuaaa

SEQ ID NO: 973122 - RNA, 19 nt, Homo sapiens
  misc_RNA (1)...(19): siRNA sense strand
gaaguauccagaugagaag

SEQ ID NO: 973123 - RNA, 19 nt, Homo sapiens
  misc_RNA (1)...(19): siRNA sense strand
gcaaggcuacgugaagaug

SEQ ID NO: 973124 - RNA, 19 nt, Homo sapiens
  misc_RNA (1)...(19): siRNA sense strand
gcaggcgguggccaucaua

SEQ ID NO: 973125 - RNA, 19 nt, Homo sapiens
  misc_RNA (1)...(19): siRNA sense strand
gguacaagacacuaucugu

SEQ ID NO: 973126 - RNA, 19 nt, Homo sapiens
  misc_RNA (1)...(19): siRNA sense strand
caagcaaggcuacgugaag

SEQ ID NO: 973127 - RNA, 19 nt, Homo sapiens
  misc_RNA (1)...(19): siRNA sense strand
cgggaugccacacgcuuua

SEQ ID NO: 973128 - RNA, 19 nt, Homo sapiens
  misc_RNA (1)...(19): siRNA sense strand
cagaccuccucaacagauu

SEQ ID NO: 973129 - RNA, 19 nt, Homo sapiens
  misc_RNA (1)...(19): siRNA sense strand
acugaugacucggcacgua

SEQ ID NO: 973130 - RNA, 19 nt, Homo sapiens
  misc_RNA (1)...(19): siRNA sense strand
ccacacgcuuuaccuucga

SEQ ID NO: 973131 - RNA, 19 nt, Homo sapiens
  misc_RNA (1)...(19): siRNA sense strand
aaggcuacgugaagaugaa

SEQ ID NO: 973132 - RNA, 19 nt, Homo sapiens
  misc_RNA (1)...(19): siRNA sense strand
cgccgaagccuccagcuau

SEQ ID NO: 973133 - RNA, 19 nt, Homo sapiens
  misc_RNA (1)...(19): siRNA sense strand
ggcgguggccaucauauuc

SEQ ID NO: 973134 - RNA, 19 nt, Homo sapiens
  misc_RNA (1)...(19): siRNA sense strand
gcgaccaauuucagugaca

SEQ ID NO: 973135 - RNA, 19 nt, Homo sapiens
  misc_RNA (1)...(19): siRNA sense strand
caagggcacggaacauuac

SEQ ID NO: 973136 - RNA, 19 nt, Homo sapiens
  misc_RNA (1)...(19): siRNA sense strand
caaggcuacgugaagauga

SEQ ID NO: 973137 - RNA, 19 nt, Homo sapiens
  misc_RNA (1)...(19): siRNA sense strand
caccugcgacucagagcua

SEQ ID NO: 973138 - RNA, 19 nt, Homo sapiens
  misc_RNA (1)...(19): siRNA sense strand
acgugaggcugcugaacaa

SEQ ID NO: 973139 - RNA, 19 nt, Homo sapiens
  misc_RNA (1)...(19): siRNA sense strand
uggcugguguuccggaaau

SEQ ID NO: 973140 - RNA, 19 nt, Homo sapiens
  misc_RNA (1)...(19): siRNA sense strand
ggugcagugugaacagaca

SEQ ID NO: 973141 - RNA, 19 nt, Homo sapiens
  misc_RNA (1)...(19): siRNA sense strand
gcgguggccaucauauuca

SEQ ID NO: 973142 - RNA, 19 nt, Homo sapiens
  misc_RNA (1)...(19): siRNA sense strand
ugcuggaaauggagaagaa

SEQ ID NO: 973143 - RNA, 19 nt, Homo sapiens
  misc_RNA (1)...(19): siRNA sense strand
aagcggguccugcuggaaa

SEQ ID NO: 973144 - RNA, 19 nt, Homo sapiens
  misc_RNA (1)...(19): siRNA sense strand
ugaacaagggcacggaaca

SEQ ID NO: 973145 - RNA, 19 nt, Homo sapiens
  misc_RNA (1)...(19): siRNA sense strand
gaagaaagcuugcaauuag

SEQ ID NO: 973146 - RNA, 19 nt, Homo sapiens
  misc_RNA (1)...(19): siRNA sense strand
ugaaugaacugacaacaau

SEQ ID NO: 973147 - RNA, 19 nt, Homo sapiens
  misc_RNA (1)...(19): siRNA sense strand
acacaaagccaaaccagua

SEQ ID NO: 973148 - RNA, 19 nt, Homo sapiens
  misc_RNA (1)...(19): siRNA sense strand
guuagaagcuacugggaaa

SEQ ID NO: 973149 - RNA, 19 nt, Homo sapiens
  misc_RNA (1)...(19): siRNA sense strand
acagucagcuucagagaaa

SEQ ID NO: 973150 - RNA, 19 nt, Homo sapiens
  misc_RNA (1)...(19): siRNA sense strand
ugaagaaagcuugcaauua

SEQ ID NO: 973151 - RNA, 19 nt, Homo sapiens
  misc_RNA (1)...(19): siRNA sense strand
gagaaaggaaucuguaguu

SEQ ID NO: 973152 - RNA, 19 nt, Homo sapiens
  misc_RNA (1)...(19): siRNA sense strand
gaaaggaaucuguaguuca

SEQ ID NO: 973153 - RNA, 19 nt, Homo sapiens
  misc_RNA (1)...(19): siRNA sense strand
cagugaugcugcccuguua

SEQ ID NO: 973154 - RNA, 19 nt, Homo sapiens
  misc_RNA (1)...(19): siRNA sense strand
guaaauuuccgacagagaa

SEQ ID NO: 973155 - RNA, 19 nt, Homo sapiens
  misc_RNA (1)...(19): siRNA sense strand
gauauuaccgaaaugaaga

SEQ ID NO: 973156 - RNA, 19 nt, Homo sapiens
  misc_RNA (1)...(19): siRNA sense strand
cuaccuacgugguguacua

SEQ ID NO: 973157 - RNA, 19 nt, Homo sapiens
  misc_RNA (1)...(19): siRNA sense strand
ccagaaaguuugggauguu

SEQ ID NO: 973158 - RNA, 19 nt, Homo sapiens
  misc_RNA (1)...(19): siRNA sense strand
caucagcaccagaaaguuu

SEQ ID NO: 973159 - RNA, 19 nt, Homo sapiens
  misc_RNA (1)...(19): siRNA sense strand
cagagaaacugaggagaau

SEQ ID NO: 973160 - RNA, 19 nt, Homo sapiens
  misc_RNA (1)...(19): siRNA sense strand
ggagaaugcagucuggauu

SEQ ID NO: 973161 - RNA, 19 nt, Homo sapiens
  misc_RNA (1)...(19): siRNA sense strand
ggucaggaguuagaagcua

SEQ ID NO: 973162 - RNA, 19 nt, Homo sapiens
  misc_RNA (1)...(19): siRNA sense strand
ccaaaccaguacaaaccua

SEQ ID NO: 973163 - RNA, 19 nt, Homo sapiens
  misc_RNA (1)...(19): siRNA sense strand
cagaaaguuugggauguuu

SEQ ID NO: 973164 - RNA, 19 nt, Homo sapiens
  misc_RNA (1)...(19): siRNA sense strand
gaggagaucauuuuagaua

SEQ ID NO: 973165 - RNA, 19 nt, Homo sapiens
  misc_RNA (1)...(19): siRNA sense strand
uaaaggaccaggugaagau

SEQ ID NO: 973166 - RNA, 19 nt, Homo sapiens
  misc_RNA (1)...(19): siRNA sense strand
aaaggaaucuguaguucag

SEQ ID NO: 973167 - RNA, 19 nt, Homo sapiens
  misc_RNA (1)...(19): siRNA sense strand
agaaaggaaucuguaguuc

SEQ ID NO: 973168 - RNA, 19 nt, Homo sapiens
  misc_RNA (1)...(19): siRNA sense strand
cgacaagaggagaucauuu

SEQ ID NO: 973169 - RNA, 19 nt, Homo sapiens
  misc_RNA (1)...(19): siRNA sense strand
gugaagauguugaccuuuu

SEQ ID NO: 973170 - RNA, 19 nt, Homo sapiens
  misc_RNA (1)...(19): siRNA sense strand
gcuucugggucaggaguua

SEQ ID NO: 973171 - RNA, 19 nt, Homo sapiens
  misc_RNA (1)...(19): siRNA sense strand
caacugcagacuguaaauu

SEQ ID NO: 973172 - RNA, 19 nt, Homo sapiens
  misc_RNA (1)...(19): siRNA sense strand
gcacuugauccaucugugu

SEQ ID NO: 973173 - RNA, 19 nt, Homo sapiens
  misc_RNA (1)...(19): siRNA sense strand
gaaaagcgugcaaguauca

SEQ ID NO: 973174 - RNA, 19 nt, Homo sapiens
  misc_RNA (1)...(19): siRNA sense strand
gacaagaggagaucauuuu

SEQ ID NO: 973175 - RNA, 19 nt, Homo sapiens
  misc_RNA (1)...(19): siRNA sense strand
guaaaggaccaggugaaga

SEQ ID NO: 973176 - RNA, 19 nt, Homo sapiens
  misc_RNA (1)...(19): siRNA sense strand
gaguaaaggaccaggugaa

SEQ ID NO: 973177 - RNA, 19 nt, Homo sapiens
  misc_RNA (1)...(19): siRNA sense strand
aaaaucaacugcagacugu

SEQ ID NO: 973178 - RNA, 19 nt, Homo sapiens
  misc_RNA (1)...(19): siRNA sense strand
gaaaaucuaccuccgacaa

SEQ ID NO: 973179 - RNA, 19 nt, Homo sapiens
  misc_RNA (1)...(19): siRNA sense strand
gcagucuggauucgaauug

SEQ ID NO: 973180 - RNA, 19 nt, Homo sapiens
  misc_RNA (1)...(19): siRNA sense strand
ggaaaagcgugcaaguauc

SEQ ID NO: 973181 - RNA, 19 nt, Homo sapiens
  misc_RNA (1)...(19): siRNA sense strand
ggaacacaguacacaaagc

SEQ ID NO: 973182 - RNA, 19 nt, Homo sapiens
  misc_RNA (1)...(19): siRNA sense strand
aaaucuaccuccgacaaga

SEQ ID NO: 973183 - RNA, 19 nt, Homo sapiens
  misc_RNA (1)...(19): siRNA sense strand
gacagucagcuucagagaa

SEQ ID NO: 973184 - RNA, 19 nt, Homo sapiens
  misc_RNA (1)...(19): siRNA sense strand
aaucaacugcagacuguaa

SEQ ID NO: 973185 - RNA, 19 nt, Homo sapiens
  misc_RNA (1)...(19): siRNA sense strand
gaaaauccccaugaaugaa

SEQ ID NO: 973186 - RNA, 19 nt, Homo sapiens
  misc_RNA (1)...(19): siRNA sense strand
aagaggagaucauuuuaga

SEQ ID NO: 973187 - RNA, 19 nt, Homo sapiens
  misc_RNA (1)...(19): siRNA sense strand
gagaaacugaggagaaugc

SEQ ID NO: 973188 - RNA, 19 nt, Homo sapiens
  misc_RNA (1)...(19): siRNA sense strand
ccuguuagacaucauuuau

SEQ ID NO: 973189 - RNA, 19 nt, Homo sapiens
  misc_RNA (1)...(19): siRNA sense strand
aaugcagucuggauucgaa

SEQ ID NO: 973190 - RNA, 19 nt, Homo sapiens
  misc_RNA (1)...(19): siRNA sense strand
caaagccaaaccaguacaa

SEQ ID NO: 973191 - RNA, 19 nt, Homo sapiens
  misc_RNA (1)...(19): siRNA sense strand
guugcugaguucaucaaga

SEQ ID NO: 973192 - RNA, 19 nt, Homo sapiens
  misc_RNA (1)...(19): siRNA sense strand
gaaaugaagaaagcuugca

SEQ ID NO: 973193 - RNA, 19 nt, Homo sapiens
  misc_RNA (1)...(19): siRNA sense strand
ugaaaauccccaugaauga

SEQ ID NO: 973194 - RNA, 19 nt, Homo sapiens
  misc_RNA (1)...(19): siRNA sense strand
uuaccgaaaugaagaaagc

SEQ ID NO: 973195 - RNA, 19 nt, Homo sapiens
  misc_RNA (1)...(19): siRNA sense strand
ugagacuguugcugaguuc

SEQ ID NO: 973196 - RNA, 19 nt, Homo sapiens
  misc_RNA (1)...(19): siRNA sense strand
gaggaaaagcgugcaagua

SEQ ID NO: 973197 - RNA, 19 nt, Homo sapiens
  misc_RNA (1)...(19): siRNA sense strand
gaugcugcccuguuagaca

SEQ ID NO: 973198 - RNA, 19 nt, Homo sapiens
  misc_RNA (1)...(19): siRNA sense strand
gaaugaacugacaacaauc

SEQ ID NO: 973199 - RNA, 19 nt, Homo sapiens
  misc_RNA (1)...(19): siRNA sense strand
gggaacacaguacacaaag

SEQ ID NO: 973200 - RNA, 19 nt, Homo sapiens
  misc_RNA (1)...(19): siRNA sense strand
aggaccaggugaagauguu

SEQ ID NO: 973201 - RNA, 19 nt, Homo sapiens
  misc_RNA (1)...(19): siRNA sense strand
acugcagacuguaaauuuc

SEQ ID NO: 973202 - RNA, 19 nt, Homo sapiens
  misc_RNA (1)...(19): siRNA sense strand
aacugcagacuguaaauuu

SEQ ID NO: 973203 - RNA, 19 nt, Homo sapiens
  misc_RNA (1)...(19): siRNA sense strand
uugcugaguucaucaagag

SEQ ID NO: 973204 - RNA, 19 nt, Homo sapiens
  misc_RNA (1)...(19): siRNA sense strand
ucagugaugcugcccuguu

SEQ ID NO: 973205 - RNA, 19 nt, Homo sapiens
  misc_RNA (1)...(19): siRNA sense strand
gaccaggugaagauguuga

SEQ ID NO: 973206 - RNA, 19 nt, Homo sapiens
  misc_RNA (1)...(19): siRNA sense strand
cacaguacacaaagccaaa

SEQ ID NO: 973207 - RNA, 19 nt, Homo sapiens
  misc_RNA (1)...(19): siRNA sense strand
gugaugcugcccuguuaga

SEQ ID NO: 973208 - RNA, 19 nt, Homo sapiens
  misc_RNA (1)...(19): siRNA sense strand
augaagaaagcuugcaauu

SEQ ID NO: 973209 - RNA, 19 nt, Homo sapiens
  misc_RNA (1)...(19): siRNA sense strand
gacuguugcugaguucauc

SEQ ID NO: 973210 - RNA, 19 nt, Homo sapiens
  misc_RNA (1)...(19): siRNA sense strand
aaucuguaguucagcacuu

SEQ ID NO: 973211 - RNA, 19 nt, Homo sapiens
  misc_RNA (1)...(19): siRNA sense strand
gcauugauauuuccgauua

SEQ ID NO: 973212 - RNA, 19 nt, Homo sapiens
  misc_RNA (1)...(19): siRNA sense strand
caaagaagaauuccaguuu

SEQ ID NO: 973213 - RNA, 19 nt, Homo sapiens
  misc_RNA (1)...(19): siRNA sense strand
ugugacaucuccagaaaua

SEQ ID NO: 973214 - RNA, 19 nt, Homo sapiens
  misc_RNA (1)...(19): siRNA sense strand
gaaccgagacaacuacauu

SEQ ID NO: 973215 - RNA, 19 nt, Homo sapiens
  misc_RNA (1)...(19): siRNA sense strand
gacuucagcucccagauuu

SEQ ID NO: 973216 - RNA, 19 nt, Homo sapiens
  misc_RNA (1)...(19): siRNA sense strand
gccagcaccuuguccauuu

SEQ ID NO: 973217 - RNA, 19 nt, Homo sapiens
  misc_RNA (1)...(19): siRNA sense strand
gcagagagcagaugagaag

SEQ ID NO: 973218 - RNA, 19 nt, Homo sapiens
  misc_RNA (1)...(19): siRNA sense strand
cgagacaacuacauucguu

SEQ ID NO: 973219 - RNA, 19 nt, Homo sapiens
  misc_RNA (1)...(19): siRNA sense strand
agacaagagugauuacaau

SEQ ID NO: 973220 - RNA, 19 nt, Homo sapiens
  misc_RNA (1)...(19): siRNA sense strand
ggcgccagcugcauugaua

SEQ ID NO: 973221 - RNA, 19 nt, Homo sapiens
  misc_RNA (1)...(19): siRNA sense strand
caagaaggccaccguguau

SEQ ID NO: 973222 - RNA, 19 nt, Homo sapiens
  misc_RNA (1)...(19): siRNA sense strand
guugugacaucuccagaaa

SEQ ID NO: 973223 - RNA, 19 nt, Homo sapiens
  misc_RNA (1)...(19): siRNA sense strand
aaagaagaauuccaguuuc

SEQ ID NO: 973224 - RNA, 19 nt, Homo sapiens
  misc_RNA (1)...(19): siRNA sense strand
ggaagcagagagcagauga

SEQ ID NO: 973225 - RNA, 19 nt, Homo sapiens
  misc_RNA (1)...(19): siRNA sense strand
cugcagcgauggcaacauu

SEQ ID NO: 973226 - RNA, 19 nt, Homo sapiens
  misc_RNA (1)...(19): siRNA sense strand
acaagaaggccaccgugua

SEQ ID NO: 973227 - RNA, 19 nt, Homo sapiens
  misc_RNA (1)...(19): siRNA sense strand
gccucaagcuagaauguga

SEQ ID NO: 973228 - RNA, 19 nt, Homo sapiens
  misc_RNA (1)...(19): siRNA sense strand
uguaugagguggucuacug

SEQ ID NO: 973229 - RNA, 19 nt, Homo sapiens
  misc_RNA (1)...(19): siRNA sense strand
gcggaaagguacccaucug

SEQ ID NO: 973230 - RNA, 19 nt, Homo sapiens
  misc_RNA (1)...(19): siRNA sense strand
gaaagguacccaucugcau

SEQ ID NO: 973231 - RNA, 19 nt, Homo sapiens
  misc_RNA (1)...(19): siRNA sense strand
ccagcugcauugauauuuc

SEQ ID NO: 973232 - RNA, 19 nt, Homo sapiens
  misc_RNA (1)...(19): siRNA sense strand
caucaggaccuuaugaaag

SEQ ID NO: 973233 - RNA, 19 nt, Homo sapiens
  misc_RNA (1)...(19): siRNA sense strand
aaagguacccaucugcauu

SEQ ID NO: 973234 - RNA, 19 nt, Homo sapiens
  misc_RNA (1)...(19): siRNA sense strand
ucaaagaagaauuccaguu

SEQ ID NO: 973235 - RNA, 19 nt, Homo sapiens
  misc_RNA (1)...(19): siRNA sense strand
cagcacuccugccuccaaa

SEQ ID NO: 973236 - RNA, 19 nt, Homo sapiens
  misc_RNA (1)...(19): siRNA sense strand
ugaaagcgacgaagacaag

SEQ ID NO: 973237 - RNA, 19 nt, Homo sapiens
  misc_RNA (1)...(19): siRNA sense strand
ggaaggacaaccugcucaa

SEQ ID NO: 973238 - RNA, 19 nt, Homo sapiens
  misc_RNA (1)...(19): siRNA sense strand
ggccagcccuucaaguucu

SEQ ID NO: 973239 - RNA, 19 nt, Homo sapiens
  misc_RNA (1)...(19): siRNA sense strand
ugacuucagcucccagauu

SEQ ID NO: 973240 - RNA, 19 nt, Homo sapiens
  misc_RNA (1)...(19): siRNA sense strand
gcgagaagacggaaaugca

SEQ ID NO: 973241 - RNA, 19 nt, Homo sapiens
  misc_RNA (1)...(19): siRNA sense strand
agaaggccaccguguauga

SEQ ID NO: 973242 - RNA, 19 nt, Homo sapiens
  misc_RNA (1)...(19): siRNA sense strand
cagcagcucugugguguac

SEQ ID NO: 973243 - RNA, 19 nt, Homo sapiens
  misc_RNA (1)...(19): siRNA sense strand
gcacuccugccuccaaauc

SEQ ID NO: 973244 - RNA, 19 nt, Homo sapiens
  misc_RNA (1)...(19): siRNA sense strand
gaagacaagagugauuaca

SEQ ID NO: 973245 - RNA, 19 nt, Homo sapiens
  misc_RNA (1)...(19): siRNA sense strand
uguauuaugagaugucgua

SEQ ID NO: 973246 - RNA, 19 nt, Homo sapiens
  misc_RNA (1)...(19): siRNA sense strand
gacgaagacaagagugauu

SEQ ID NO: 973247 - RNA, 19 nt, Homo sapiens
  misc_RNA (1)...(19): siRNA sense strand
ccagcaccuuguccauuug

SEQ ID NO: 973248 - RNA, 19 nt, Homo sapiens
  misc_RNA (1)...(19): siRNA sense strand
gagauugugaagcgucuga

SEQ ID NO: 973249 - RNA, 19 nt, Homo sapiens
  misc_RNA (1)...(19): siRNA sense strand
gcgaccgcaucaaagaaga

SEQ ID NO: 973250 - RNA, 19 nt, Homo sapiens
  misc_RNA (1)...(19): siRNA sense strand
acgaagacaagagugauua

SEQ ID NO: 973251 - RNA, 19 nt, Homo sapiens
  misc_RNA (1)...(19): siRNA sense strand
ugaagcgucugagcgguau

SEQ ID NO: 973252 - RNA, 19 nt, Homo sapiens
  misc_RNA (1)...(19): siRNA sense strand
cuccagaaauaacaaauac

SEQ ID NO: 973253 - RNA, 19 nt, Homo sapiens
  misc_RNA (1)...(19): siRNA sense strand
caagcuagaaugugagaag

SEQ ID NO: 973254 - RNA, 19 nt, Homo sapiens
  misc_RNA (1)...(19): siRNA sense strand
gcgacgaagacaagaguga

SEQ ID NO: 973255 - RNA, 19 nt, Homo sapiens
  misc_RNA (1)...(19): siRNA sense strand
gaaagcgacgaagacaaga

SEQ ID NO: 973256 - RNA, 19 nt, Homo sapiens
  misc_RNA (1)...(19): siRNA sense strand
ggagccaucaggaccuuau

SEQ ID NO: 973257 - RNA, 19 nt, Homo sapiens
  misc_RNA (1)...(19): siRNA sense strand
gcagcgauggcaacauugu

SEQ ID NO: 973258 - RNA, 19 nt, Homo sapiens
  misc_RNA (1)...(19): siRNA sense strand
ccaucaggaccuuaugaaa

SEQ ID NO: 973259 - RNA, 19 nt, Homo sapiens
  misc_RNA (1)...(19): siRNA sense strand
gcugcgugcugucccugaa

SEQ ID NO: 973260 - RNA, 19 nt, Homo sapiens
  misc_RNA (1)...(19): siRNA sense strand
ccgcaucaaagaagaauuc

SEQ ID NO: 973261 - RNA, 19 nt, Homo sapiens
  misc_RNA (1)...(19): siRNA sense strand
ugacaucuccagaaauaac

SEQ ID NO: 973262 - RNA, 19 nt, Homo sapiens
  misc_RNA (1)...(19): siRNA sense strand
agacuauggucaggcaguu

SEQ ID NO: 973263 - RNA, 19 nt, Homo sapiens
  misc_RNA (1)...(19): siRNA sense strand
gccaucaggaccuuaugaa

SEQ ID NO: 973264 - RNA, 19 nt, Homo sapiens
  misc_RNA (1)...(19): siRNA sense strand
ugcggacggugguuuguga

SEQ ID NO: 973265 - RNA, 19 nt, Homo sapiens
  misc_RNA (1)...(19): siRNA sense strand
gcaagccggagaaauacca

SEQ ID NO: 973266 - RNA, 19 nt, Homo sapiens
  misc_RNA (1)...(19): siRNA sense strand
aagacaagagugauuacaa

SEQ ID NO: 973267 - RNA, 19 nt, Homo sapiens
  misc_RNA (1)...(19): siRNA sense strand
ggccagcaccuuguccauu

SEQ ID NO: 973268 - RNA, 19 nt, Homo sapiens
  misc_RNA (1)...(19): siRNA sense strand
guaugagguggucuacuga

SEQ ID NO: 973269 - RNA, 19 nt, Homo sapiens
  misc_RNA (1)...(19): siRNA sense strand
gcauaagcaggcggagauu

SEQ ID NO: 973270 - RNA, 19 nt, Homo sapiens
  misc_RNA (1)...(19): siRNA sense strand
uacauucguuccugcaagu

SEQ ID NO: 973271 - RNA, 19 nt, Homo sapiens
  misc_RNA (1)...(19): siRNA sense strand
gaauggagaguagcaacgu

SEQ ID NO: 973272 - RNA, 19 nt, Homo sapiens
  misc_RNA (1)...(19): siRNA sense strand
ccagcgagaagacggaaau

SEQ ID NO: 973273 - RNA, 19 nt, Homo sapiens
  misc_RNA (1)...(19): siRNA sense strand
gccagcugcauugauauuu

SEQ ID NO: 973274 - RNA, 19 nt, Homo sapiens
  misc_RNA (1)...(19): siRNA sense strand
aagcagagagcagaugaga

SEQ ID NO: 973275 - RNA, 19 nt, Homo sapiens
  misc_RNA (1)...(19): siRNA sense strand
cuacagagccuuuaacuua

SEQ ID NO: 973276 - RNA, 19 nt, Homo sapiens
  misc_RNA (1)...(19): siRNA sense strand
ggaccgcacugauuacaaa

SEQ ID NO: 973277 - RNA, 19 nt, Homo sapiens
  misc_RNA (1)...(19): siRNA sense strand
gaauuggaccgcacugauu

SEQ ID NO: 973278 - RNA, 19 nt, Homo sapiens
  misc_RNA (1)...(19): siRNA sense strand
gagccaaagcuguccauuu

SEQ ID NO: 973279 - RNA, 19 nt, Homo sapiens
  misc_RNA (1)...(19): siRNA sense strand
agauaaggauguguucaua

SEQ ID NO: 973280 - RNA, 19 nt, Homo sapiens
  misc_RNA (1)...(19): siRNA sense strand
ugacugggccauugaauug

SEQ ID NO: 973281 - RNA, 19 nt, Homo sapiens
  misc_RNA (1)...(19): siRNA sense strand
gaucuuaucacgcuuucuu

SEQ ID NO: 973282 - RNA, 19 nt, Homo sapiens
  misc_RNA (1)...(19): siRNA sense strand
uguaugagccuuaaagcua

SEQ ID NO: 973283 - RNA, 19 nt, Homo sapiens
  misc_RNA (1)...(19): siRNA sense strand
uaacagugccgucuagugu

SEQ ID NO: 973284 - RNA, 19 nt, Homo sapiens
  misc_RNA (1)...(19): siRNA sense strand
ccuuaaagcuaccaacaug

SEQ ID NO: 973285 - RNA, 19 nt, Homo sapiens
  misc_RNA (1)...(19): siRNA sense strand
ccaguggaaucucuauuuc

SEQ ID NO: 973286 - RNA, 19 nt, Homo sapiens
  misc_RNA (1)...(19): siRNA sense strand
gaaacaccagcuucuaugu

SEQ ID NO: 973287 - RNA, 19 nt, Homo sapiens
  misc_RNA (1)...(19): siRNA sense strand
gaaucucuauuuccuggau

SEQ ID NO: 973288 - RNA, 19 nt, Homo sapiens
  misc_RNA (1)...(19): siRNA sense strand
gcuucuaugugacuuaaug

SEQ ID NO: 973289 - RNA, 19 nt, Homo sapiens
  misc_RNA (1)...(19): siRNA sense strand
cagcuucuaugugacuuaa

SEQ ID NO: 973290 - RNA, 19 nt, Homo sapiens
  misc_RNA (1)...(19): siRNA sense strand
aaacacuuccaucagaaua

SEQ ID NO: 973291 - RNA, 19 nt, Homo sapiens
  misc_RNA (1)...(19): siRNA sense strand
aacaccagcuucuauguga

SEQ ID NO: 973292 - RNA, 19 nt, Homo sapiens
  misc_RNA (1)...(19): siRNA sense strand
acaagugacugggccauug

SEQ ID NO: 973293 - RNA, 19 nt, Homo sapiens
  misc_RNA (1)...(19): siRNA sense strand
acacuuccaucagaauauu

SEQ ID NO: 973294 - RNA, 19 nt, Homo sapiens
  misc_RNA (1)...(19): siRNA sense strand
auaaggauguguucauaca

SEQ ID NO: 973295 - RNA, 19 nt, Homo sapiens
  misc_RNA (1)...(19): siRNA sense strand
ggcagaagaugacaaaaga

SEQ ID NO: 973296 - RNA, 19 nt, Homo sapiens
  misc_RNA (1)...(19): siRNA sense strand
acagagccuuuaacuuaga

SEQ ID NO: 973297 - RNA, 19 nt, Homo sapiens
  misc_RNA (1)...(19): siRNA sense strand
caaaacacuuccaucagaa

SEQ ID NO: 973298 - RNA, 19 nt, Homo sapiens
  misc_RNA (1)...(19): siRNA sense strand
ggucaguguaugagccuua

SEQ ID NO: 973299 - RNA, 19 nt, Homo sapiens
  misc_RNA (1)...(19): siRNA sense strand
acaaaacacuuccaucaga

SEQ ID NO: 973300 - RNA, 19 nt, Homo sapiens
  misc_RNA (1)...(19): siRNA sense strand
cacgcuuucuuucugguua

SEQ ID NO: 973301 - RNA, 19 nt, Homo sapiens
  misc_RNA (1)...(19): siRNA sense strand
agccaaagcuguccauuuu

SEQ ID NO: 973302 - RNA, 19 nt, Homo sapiens
  misc_RNA (1)...(19): siRNA sense strand
ccaggucuuugcagggaaa

SEQ ID NO: 973303 - RNA, 19 nt, Homo sapiens
  misc_RNA (1)...(19): siRNA sense strand
uacagagccuuuaacuuag

SEQ ID NO: 973304 - RNA, 19 nt, Homo sapiens
  misc_RNA (1)...(19): siRNA sense strand
gaucguguucuacuucaug

SEQ ID NO: 973305 - RNA, 19 nt, Homo sapiens
  misc_RNA (1)...(19): siRNA sense strand
aauuggaccgcacugauua

SEQ ID NO: 973306 - RNA, 19 nt, Homo sapiens
  misc_RNA (1)...(19): siRNA sense strand
ugaaacaccagcuucuaug

SEQ ID NO: 973307 - RNA, 19 nt, Homo sapiens
  misc_RNA (1)...(19): siRNA sense strand
aaacuucuacagagccuuu

SEQ ID NO: 973308 - RNA, 19 nt, Homo sapiens
  misc_RNA (1)...(19): siRNA sense strand
gagccuuuaacuuagauaa

SEQ ID NO: 973309 - RNA, 19 nt, Homo sapiens
  misc_RNA (1)...(19): siRNA sense strand
caagugacugggccauuga

SEQ ID NO: 973310 - RNA, 19 nt, Homo sapiens
  misc_RNA (1)...(19): siRNA sense strand
gcacugcuccaggucuuug

SEQ ID NO: 973311 - RNA, 19 nt, Homo sapiens
  misc_RNA (1)...(19): siRNA sense strand
cuguauggaucguguucua

SEQ ID NO: 973312 - RNA, 19 nt, Homo sapiens
  misc_RNA (1)...(19): siRNA sense strand
guuagcaggucaguguaug

SEQ ID NO: 973313 - RNA, 19 nt, Homo sapiens
  misc_RNA (1)...(19): siRNA sense strand
uuaagcugcugacccugaa

SEQ ID NO: 973314 - RNA, 19 nt, Homo sapiens
  misc_RNA (1)...(19): siRNA sense strand
ccagagaaagagagccaaa

SEQ ID NO: 973315 - RNA, 19 nt, Homo sapiens
  misc_RNA (1)...(19): siRNA sense strand
guucaauagccacaaguga

SEQ ID NO: 973316 - RNA, 19 nt, Homo sapiens
  misc_RNA (1)...(19): siRNA sense strand
gauaaggauguguucauac

SEQ ID NO: 973317 - RNA, 19 nt, Homo sapiens
  misc_RNA (1)...(19): siRNA sense strand
ccuuauaaacuucuacaga

SEQ ID NO: 973318 - RNA, 19 nt, Homo sapiens
  misc_RNA (1)...(19): siRNA sense strand
gucaguguaugagccuuaa

SEQ ID NO: 973319 - RNA, 19 nt, Homo sapiens
  misc_RNA (1)...(19): siRNA sense strand
gugacugggccauugaauu

SEQ ID NO: 973320 - RNA, 19 nt, Homo sapiens
  misc_RNA (1)...(19): siRNA sense strand
aucagaauauuccauccua

SEQ ID NO: 973321 - RNA, 19 nt, Homo sapiens
  misc_RNA (1)...(19): siRNA sense strand
ggaugugaacuacuugaag

SEQ ID NO: 973322 - RNA, 19 nt, Homo sapiens
  misc_RNA (1)...(19): siRNA sense strand
aaacaccagcuucuaugug

SEQ ID NO: 973323 - RNA, 19 nt, Homo sapiens
  misc_RNA (1)...(19): siRNA sense strand
ggacagaggggacccacaa

SEQ ID NO: 973324 - RNA, 19 nt, Homo sapiens
  misc_RNA (1)...(19): siRNA sense strand
gugacuuaauggaucuuau

SEQ ID NO: 973325 - RNA, 19 nt, Homo sapiens
  misc_RNA (1)...(19): siRNA sense strand
ccacaacacagcucacacu

SEQ ID NO: 973326 - RNA, 19 nt, Homo sapiens
  misc_RNA (1)...(19): siRNA sense strand
ggccaaccacccacuaaca

SEQ ID NO: 973327 - RNA, 19 nt, Homo sapiens
  misc_RNA (1)...(19): siRNA sense strand
uauggaucguguucuacuu

SEQ ID NO: 973328 - RNA, 19 nt, Homo sapiens
  misc_RNA (1)...(19): siRNA sense strand
ugacuuaauggaucuuauc

SEQ ID NO: 973329 - RNA, 19 nt, Homo sapiens
  misc_RNA (1)...(19): siRNA sense strand
caaugaaacaccagcuucu

SEQ ID NO: 973330 - RNA, 19 nt, Homo sapiens
  misc_RNA (1)...(19): siRNA sense strand
gccaagggaaacauccaaa

SEQ ID NO: 973331 - RNA, 19 nt, Homo sapiens
  misc_RNA (1)...(19): siRNA sense strand
uuaucacgcuuucuuucug

SEQ ID NO: 973332 - RNA, 19 nt, Homo sapiens
  misc_RNA (1)...(19): siRNA sense strand
gagaaagagagccaaagcu

SEQ ID NO: 973333 - RNA, 19 nt, Homo sapiens
  misc_RNA (1)...(19): siRNA sense strand
ugaauuggaccgcacugau

SEQ ID NO: 973334 - RNA, 19 nt, Homo sapiens
  misc_RNA (1)...(19): siRNA sense strand
guguggugaugggugauaa

SEQ ID NO: 973335 - RNA, 19 nt, Homo sapiens
  misc_RNA (1)...(19): siRNA sense strand
uagauaaggauguguucau

SEQ ID NO: 973336 - RNA, 19 nt, Homo sapiens
  misc_RNA (1)...(19): siRNA sense strand
gaagaugacaaaagaccuu

SEQ ID NO: 973337 - RNA, 19 nt, Homo sapiens
  misc_RNA (1)...(19): siRNA sense strand
gacuuaauggaucuuauca

SEQ ID NO: 973338 - RNA, 19 nt, Homo sapiens
  misc_RNA (1)...(19): siRNA sense strand
ucaccucugugucuucuua

SEQ ID NO: 973339 - RNA, 19 nt, Homo sapiens
  misc_RNA (1)...(19): siRNA sense strand
ugacugugauggccuauga

SEQ ID NO: 973340 - RNA, 19 nt, Homo sapiens
  misc_RNA (1)...(19): siRNA sense strand
gcaguuggauuguguugca

SEQ ID NO: 973341 - RNA, 19 nt, Homo sapiens
  misc_RNA (1)...(19): siRNA sense strand
gcaauucaccuucuucaag

SEQ ID NO: 973342 - RNA, 19 nt, Homo sapiens
  misc_RNA (1)...(19): siRNA sense strand
ucgauagcauguucauaua

SEQ ID NO: 973343 - RNA, 19 nt, Homo sapiens
  misc_RNA (1)...(19): siRNA sense strand
caucaucgauagcauguuc

SEQ ID NO: 973344 - RNA, 19 nt, Homo sapiens
  misc_RNA (1)...(19): siRNA sense strand
gacaugcuccugacuguga

SEQ ID NO: 973345 - RNA, 19 nt, Homo sapiens
  misc_RNA (1)...(19): siRNA sense strand
caagaugauuguggacaug

SEQ ID NO: 973346 - RNA, 19 nt, Homo sapiens
  misc_RNA (1)...(19): siRNA sense strand
ucaagaauguggaaaucuc

SEQ ID NO: 973347 - RNA, 19 nt, Homo sapiens
  misc_RNA (1)...(19): siRNA sense strand
auagcggagucaucucuua

SEQ ID NO: 973348 - RNA, 19 nt, Homo sapiens
  misc_RNA (1)...(19): siRNA sense strand
ccaagaugauuguggacau

SEQ ID NO: 973349 - RNA, 19 nt, Homo sapiens
  misc_RNA (1)...(19): siRNA sense strand
cagcugcgcaguuggauug

SEQ ID NO: 973350 - RNA, 19 nt, Homo sapiens
  misc_RNA (1)...(19): siRNA sense strand
ucugacagcaucaucgaua

SEQ ID NO: 973351 - RNA, 19 nt, Homo sapiens
  misc_RNA (1)...(19): siRNA sense strand
aagcuugccuguucugaca

SEQ ID NO: 973352 - RNA, 19 nt, Homo sapiens
  misc_RNA (1)...(19): siRNA sense strand
cagggauccuuuugucuua

SEQ ID NO: 973353 - RNA, 19 nt, Homo sapiens
  misc_RNA (1)...(19): siRNA sense strand
ccucugcacuacccaguca

SEQ ID NO: 973354 - RNA, 19 nt, Homo sapiens
  misc_RNA (1)...(19): siRNA sense strand
ggccacgguucccaagaug

SEQ ID NO: 973355 - RNA, 19 nt, Homo sapiens
  misc_RNA (1)...(19): siRNA sense strand
gaauguggaaaucucuaau

SEQ ID NO: 973356 - RNA, 19 nt, Homo sapiens
  misc_RNA (1)...(19): siRNA sense strand
cucugugucuucuuaguuu

SEQ ID NO: 973357 - RNA, 19 nt, Homo sapiens
  misc_RNA (1)...(19): siRNA sense strand
gcggagucaucucuuaugc

SEQ ID NO: 973358 - RNA, 19 nt, Homo sapiens
  misc_RNA (1)...(19): siRNA sense strand
cgauagcauguucauauau

SEQ ID NO: 973359 - RNA, 19 nt, Homo sapiens
  misc_RNA (1)...(19): siRNA sense strand
aagacaugcuccugacugu

SEQ ID NO: 973360 - RNA, 19 nt, Homo sapiens
  misc_RNA (1)...(19): siRNA sense strand
gcauagcggagucaucucu

SEQ ID NO: 973361 - RNA, 19 nt, Homo sapiens
  misc_RNA (1)...(19): siRNA sense strand
gcauguucauauauuucga

SEQ ID NO: 973362 - RNA, 19 nt, Homo sapiens
  misc_RNA (1)...(19): siRNA sense strand
cuucaagaauguggaaauc

SEQ ID NO: 973363 - RNA, 19 nt, Homo sapiens
  misc_RNA (1)...(19): siRNA sense strand
agaauguggaaaucucuaa

SEQ ID NO: 973364 - RNA, 19 nt, Homo sapiens
  misc_RNA (1)...(19): siRNA sense strand
cggccacgguucccaagau

SEQ ID NO: 973365 - RNA, 19 nt, Homo sapiens
  misc_RNA (1)...(19): siRNA sense strand
uuccuuagccuguuggauu

SEQ ID NO: 973366 - RNA, 19 nt, Homo sapiens
  misc_RNA (1)...(19): siRNA sense strand
ccacgguucccaagaugau

SEQ ID NO: 973367 - RNA, 19 nt, Homo sapiens
  misc_RNA (1)...(19): siRNA sense strand
cugcgcaguuggauugugu

SEQ ID NO: 973368 - RNA, 19 nt, Homo sapiens
  misc_RNA (1)...(19): siRNA sense strand
ggaagaagaggaagaguug

SEQ ID NO: 973369 - RNA, 19 nt, Homo sapiens
  misc_RNA (1)...(19): siRNA sense strand
gauacgagcccuucucuga

SEQ ID NO: 973370 - RNA, 19 nt, Homo sapiens
  misc_RNA (1)...(19): siRNA sense strand
gagcagguuuggagcaaga

SEQ ID NO: 973371 - RNA, 19 nt, Homo sapiens
  misc_RNA (1)...(19): siRNA sense strand
ggcaggagcccacaacuga

SEQ ID NO: 973372 - RNA, 19 nt, Homo sapiens
  misc_RNA (1)...(19): siRNA sense strand
ggaccgcgguguuguguac

SEQ ID NO: 973373 - RNA, 19 nt, Homo sapiens
  misc_RNA (1)...(19): siRNA sense strand
gagaggcgcuagauuuggu

SEQ ID NO: 973374 - RNA, 19 nt, Homo sapiens
  misc_RNA (1)...(19): siRNA sense strand
gcgggcaacuuccuguuug

SEQ ID NO: 973375 - RNA, 19 nt, Homo sapiens
  misc_RNA (1)...(19): siRNA sense strand
cacgggagguggugauuga

SEQ ID NO: 973376 - RNA, 19 nt, Homo sapiens
  misc_RNA (1)...(19): siRNA sense strand
aggaagaguuggaggaaga

SEQ ID NO: 973377 - RNA, 19 nt, Homo sapiens
  misc_RNA (1)...(19): siRNA sense strand
gagcagccuccgggacuua

SEQ ID NO: 973378 - RNA, 19 nt, Homo sapiens
  misc_RNA (1)...(19): siRNA sense strand
caacguggcagcgcgcuuu

SEQ ID NO: 973379 - RNA, 19 nt, Homo sapiens
  misc_RNA (1)...(19): siRNA sense strand
cggcccaaguucaccguua

SEQ ID NO: 973380 - RNA, 19 nt, Homo sapiens
  misc_RNA (1)...(19): siRNA sense strand
ggucaagggccucaucauc

SEQ ID NO: 973381 - RNA, 19 nt, Homo sapiens
  misc_RNA (1)...(19): siRNA sense strand
gaacgugguggccuucgau

SEQ ID NO: 973382 - RNA, 19 nt, Homo sapiens
  misc_RNA (1)...(19): siRNA sense strand
ucaagggccucaucaucca

SEQ ID NO: 973383 - RNA, 19 nt, Homo sapiens
  misc_RNA (1)...(19): siRNA sense strand
ggccuucgauguguacaau

SEQ ID NO: 973384 - RNA, 19 nt, Homo sapiens
  misc_RNA (1)...(19): siRNA sense strand
uggccucgguggagaugua

SEQ ID NO: 973385 - RNA, 19 nt, Homo sapiens
  misc_RNA (1)...(19): siRNA sense strand
ggcugucgcuuuccaugga

SEQ ID NO: 973386 - RNA, 19 nt, Homo sapiens
  misc_RNA (1)...(19): siRNA sense strand
uuggagaggcgcuagauuu

SEQ ID NO: 973387 - RNA, 19 nt, Homo sapiens
  misc_RNA (1)...(19): siRNA sense strand
cuuccugucuuacugcaaa

SEQ ID NO: 973388 - RNA, 19 nt, Homo sapiens
  misc_RNA (1)...(19): siRNA sense strand
caagagccacacccaggaa

SEQ ID NO: 973389 - RNA, 19 nt, Homo sapiens
  misc_RNA (1)...(19): siRNA sense strand
gugcuccagugacuacuuc

SEQ ID NO: 973390 - RNA, 19 nt, Homo sapiens
  misc_RNA (1)...(19): siRNA sense strand
cgagagggagggagagguu

SEQ ID NO: 973391 - RNA, 19 nt, Homo sapiens
  misc_RNA (1)...(19): siRNA sense strand
uacgaccgcuucugcuaug

SEQ ID NO: 973392 - RNA, 19 nt, Homo sapiens
  misc_RNA (1)...(19): siRNA sense strand
gcuacugggccuggcguua

SEQ ID NO: 973393 - RNA, 19 nt, Homo sapiens
  misc_RNA (1)...(19): siRNA sense strand
ccuucgauguguacaauca

SEQ ID NO: 973394 - RNA, 19 nt, Homo sapiens
  misc_RNA (1)...(19): siRNA sense strand
gcacgggagguggugauug

SEQ ID NO: 973395 - RNA, 19 nt, Homo sapiens
  misc_RNA (1)...(19): siRNA sense strand
gaccgagggcagcgaauuc

SEQ ID NO: 973396 - RNA, 19 nt, Homo sapiens
  misc_RNA (1)...(19): siRNA sense strand
ggcacacuguacagaguug

SEQ ID NO: 973397 - RNA, 19 nt, Homo sapiens
  misc_RNA (1)...(19): siRNA sense strand
uggagaggcgcuagauuug

SEQ ID NO: 973398 - RNA, 19 nt, Homo sapiens
  misc_RNA (1)...(19): siRNA sense strand
guuacuuccugucuuacug

SEQ ID NO: 973399 - RNA, 19 nt, Homo sapiens
  misc_RNA (1)...(19): siRNA sense strand
gguggucacggcccaaguu

SEQ ID NO: 973400 - RNA, 19 nt, Homo sapiens
  misc_RNA (1)...(19): siRNA sense strand
gcagccuccgggacuuaua

SEQ ID NO: 973401 - RNA, 19 nt, Homo sapiens
  misc_RNA (1)...(19): siRNA sense strand
gcgcagccuuacgcagcua

SEQ ID NO: 973402 - RNA, 19 nt, Homo sapiens
  misc_RNA (1)...(19): siRNA sense strand
cugcuggacuucaucuaca

SEQ ID NO: 973403 - RNA, 19 nt, Homo sapiens
  misc_RNA (1)...(19): siRNA sense strand
gugguggccuucgaugugu

SEQ ID NO: 973404 - RNA, 19 nt, Homo sapiens
  misc_RNA (1)...(19): siRNA sense strand
ggagaggcgcuagauuugg

SEQ ID NO: 973405 - RNA, 19 nt, Homo sapiens
  misc_RNA (1)...(19): siRNA sense strand
gcucugugggcgcuacuug

SEQ ID NO: 973406 - RNA, 19 nt, Homo sapiens
  misc_RNA (1)...(19): siRNA sense strand
cugccuggcugucgcuuuc

SEQ ID NO: 973407 - RNA, 19 nt, Homo sapiens
  misc_RNA (1)...(19): siRNA sense strand
cauccaggcccucaacuac

SEQ ID NO: 973408 - RNA, 19 nt, Homo sapiens
  misc_RNA (1)...(19): siRNA sense strand
ggcccaaguucaccguuac

SEQ ID NO: 973409 - RNA, 19 nt, Homo sapiens
  misc_RNA (1)...(19): siRNA sense strand
cuacgaccgcuucugcuau

SEQ ID NO: 973410 - RNA, 19 nt, Homo sapiens
  misc_RNA (1)...(19): siRNA sense strand
ccuacgaccgcuucugcua

SEQ ID NO: 973411 - RNA, 19 nt, Homo sapiens
  misc_RNA (1)...(19): siRNA sense strand
caucagagcuggugcguaa

SEQ ID NO: 973412 - RNA, 19 nt, Homo sapiens
  misc_RNA (1)...(19): siRNA sense strand
gaggaggacuucaucgaaa

SEQ ID NO: 973413 - RNA, 19 nt, Homo sapiens
  misc_RNA (1)...(19): siRNA sense strand
caacuucccugacaucauc

SEQ ID NO: 973414 - RNA, 19 nt, Homo sapiens
  misc_RNA (1)...(19): siRNA sense strand
gagacauacuccauugaaa

SEQ ID NO: 973415 - RNA, 19 nt, Homo sapiens
  misc_RNA (1)...(19): siRNA sense strand
gagaagacccugcgcaugu

SEQ ID NO: 973416 - RNA, 19 nt, Homo sapiens
  misc_RNA (1)...(19): siRNA sense strand
caggugagcuuguacaaca

SEQ ID NO: 973417 - RNA, 19 nt, Homo sapiens
  misc_RNA (1)...(19): siRNA sense strand
gcugagacauacuccauug

SEQ ID NO: 973418 - RNA, 19 nt, Homo sapiens
  misc_RNA (1)...(19): siRNA sense strand
caagaucgcugagacauac

SEQ ID NO: 973419 - RNA, 19 nt, Homo sapiens
  misc_RNA (1)...(19): siRNA sense strand
gccguaaccucaaccguuu

SEQ ID NO: 973420 - RNA, 19 nt, Homo sapiens
  misc_RNA (1)...(19): siRNA sense strand
gcaguggcuuccucucaaa

SEQ ID NO: 973421 - RNA, 19 nt, Homo sapiens
  misc_RNA (1)...(19): siRNA sense strand
agaaugaccucuuccagau

SEQ ID NO: 973422 - RNA, 19 nt, Homo sapiens
  misc_RNA (1)...(19): siRNA sense strand
gcaccaaccaugcugacua

SEQ ID NO: 973423 - RNA, 19 nt, Homo sapiens
  misc_RNA (1)...(19): siRNA sense strand
cuacacaaguucacuguca

SEQ ID NO: 973424 - RNA, 19 nt, Homo sapiens
  misc_RNA (1)...(19): siRNA sense strand
ggacgaggcagacggcauu

SEQ ID NO: 973425 - RNA, 19 nt, Homo sapiens
  misc_RNA (1)...(19): siRNA sense strand
gcaaggaauuccagaagcu

SEQ ID NO: 973426 - RNA, 19 nt, Homo sapiens
  misc_RNA (1)...(19): siRNA sense strand
ucaagcacaugaugcagaa

SEQ ID NO: 973427 - RNA, 19 nt, Homo sapiens
  misc_RNA (1)...(19): siRNA sense strand
gccgugagcucgacuucaa

SEQ ID NO: 973428 - RNA, 19 nt, Homo sapiens
  misc_RNA (1)...(19): siRNA sense strand
gccagcagauccucuucua

SEQ ID NO: 973429 - RNA, 19 nt, Homo sapiens
  misc_RNA (1)...(19): siRNA sense strand
gcucagcacuguggcauca

SEQ ID NO: 973430 - RNA, 19 nt, Homo sapiens
  misc_RNA (1)...(19): siRNA sense strand
gagcccaggugagcuugua

SEQ ID NO: 973431 - RNA, 19 nt, Homo sapiens
  misc_RNA (1)...(19): siRNA sense strand
caaauucaagggcaucaaa

SEQ ID NO: 973432 - RNA, 19 nt, Homo sapiens
  misc_RNA (1)...(19): siRNA sense strand
aaagcuacaucuccuacaa

SEQ ID NO: 973433 - RNA, 19 nt, Homo sapiens
  misc_RNA (1)...(19): siRNA sense strand
gcucuuuccugccucuuau

SEQ ID NO: 973434 - RNA, 19 nt, Homo sapiens
  misc_RNA (1)...(19): siRNA sense strand
gaagaucgcguggacacuu

SEQ ID NO: 973435 - RNA, 19 nt, Homo sapiens
  misc_RNA (1)...(19): siRNA sense strand
gaaaggccgagcccucuau

SEQ ID NO: 973436 - RNA, 19 nt, Homo sapiens
  misc_RNA (1)...(19): siRNA sense strand
agaagacccugcgcaugua

SEQ ID NO: 973437 - RNA, 19 nt, Homo sapiens
  misc_RNA (1)...(19): siRNA sense strand
gacaucauccaucuacaaa

SEQ ID NO: 973438 - RNA, 19 nt, Homo sapiens
  misc_RNA (1)...(19): siRNA sense strand
gcaguguggugggccguaa

SEQ ID NO: 973439 - RNA, 19 nt, Homo sapiens
  misc_RNA (1)...(19): siRNA sense strand
ccacaaaacagaccaaauu

SEQ ID NO: 973440 - RNA, 19 nt, Homo sapiens
  misc_RNA (1)...(19): siRNA sense strand
ggcaguggcuuccucucaa

SEQ ID NO: 973441 - RNA, 19 nt, Homo sapiens
  misc_RNA (1)...(19): siRNA sense strand
ugaggaggaugaugaugau

SEQ ID NO: 973442 - RNA, 19 nt, Homo sapiens
  misc_RNA (1)...(19): siRNA sense strand
cacuuugacuggcucuaua

SEQ ID NO: 973443 - RNA, 19 nt, Homo sapiens
  misc_RNA (1)...(19): siRNA sense strand
ccaagaucgcugagacaua

SEQ ID NO: 973444 - RNA, 19 nt, Homo sapiens
  misc_RNA (1)...(19): siRNA sense strand
gccgagcccucuaugacuu

SEQ ID NO: 973445 - RNA, 19 nt, Homo sapiens
  misc_RNA (1)...(19): siRNA sense strand
gaugaugacugggaugacu

SEQ ID NO: 973446 - RNA, 19 nt, Homo sapiens
  misc_RNA (1)...(19): siRNA sense strand
aaggagagccaacgcauga

SEQ ID NO: 973447 - RNA, 19 nt, Homo sapiens
  misc_RNA (1)...(19): siRNA sense strand
cugagcagcccaagaauga

SEQ ID NO: 973448 - RNA, 19 nt, Homo sapiens
  misc_RNA (1)...(19): siRNA sense strand
gagcuggugcguaaacaug

SEQ ID NO: 973449 - RNA, 19 nt, Homo sapiens
  misc_RNA (1)...(19): siRNA sense strand
uucaaggccuucaguaaga

SEQ ID NO: 973450 - RNA, 19 nt, Homo sapiens
  misc_RNA (1)...(19): siRNA sense strand
ggacuugcaggacguggaa

SEQ ID NO: 973451 - RNA, 19 nt, Homo sapiens
  misc_RNA (1)...(19): siRNA sense strand
agacauacuccauugaaau

SEQ ID NO: 973452 - RNA, 19 nt, Homo sapiens
  misc_RNA (1)...(19): siRNA sense strand
ggaggaugaugaugaugac

SEQ ID NO: 973453 - RNA, 19 nt, Homo sapiens
  misc_RNA (1)...(19): siRNA sense strand
ucaaggccuucaguaagaa

SEQ ID NO: 973454 - RNA, 19 nt, Homo sapiens
  misc_RNA (1)...(19): siRNA sense strand
aagaucgcguggacacuuu

SEQ ID NO: 973455 - RNA, 19 nt, Homo sapiens
  misc_RNA (1)...(19): siRNA sense strand
cgaggaggacuucaucgaa

SEQ ID NO: 973456 - RNA, 19 nt, Homo sapiens
  misc_RNA (1)...(19): siRNA sense strand
ugagacauacuccauugaa

SEQ ID NO: 973457 - RNA, 19 nt, Homo sapiens
  misc_RNA (1)...(19): siRNA sense strand
ugacaucauccaucuacaa

SEQ ID NO: 973458 - RNA, 19 nt, Homo sapiens
  misc_RNA (1)...(19): siRNA sense strand
gcuuugaggaggaugauga

SEQ ID NO: 973459 - RNA, 19 nt, Homo sapiens
  misc_RNA (1)...(19): siRNA sense strand
caaaacagaccaaauucaa

SEQ ID NO: 973460 - RNA, 19 nt, Homo sapiens
  misc_RNA (1)...(19): siRNA sense strand
ucagcugccuggaugacaa

SEQ ID NO: 973461 - RNA, 19 nt, Homo sapiens
  misc_RNA (1)...(19): siRNA sense strand
gaagacccugcgcauguau

SEQ ID NO: 973462 - RNA, 19 nt, Homo sapiens
  misc_RNA (1)...(19): siRNA sense strand
gaaugaccucuuccagaug

SEQ ID NO: 973463 - RNA, 19 nt, Homo sapiens
  misc_RNA (1)...(19): siRNA sense strand
ccucaacagugccauuucu

SEQ ID NO: 973464 - RNA, 19 nt, Homo sapiens
  misc_RNA (1)...(19): siRNA sense strand
gaugacaagcaguggaaga

SEQ ID NO: 973465 - RNA, 19 nt, Homo sapiens
  misc_RNA (1)...(19): siRNA sense strand
ccaccgagcaccaggacuu

SEQ ID NO: 973466 - RNA, 19 nt, Homo sapiens
  misc_RNA (1)...(19): siRNA sense strand
caccaaccaugcugacuac

SEQ ID NO: 973467 - RNA, 19 nt, Homo sapiens
  misc_RNA (1)...(19): siRNA sense strand
uaaccucaaccguuucuca

SEQ ID NO: 973468 - RNA, 19 nt, Homo sapiens
  misc_RNA (1)...(19): siRNA sense strand
uauaaccgccugcuacaca

SEQ ID NO: 973469 - RNA, 19 nt, Homo sapiens
  misc_RNA (1)...(19): siRNA sense strand
gggcaguggcuuccucuca

SEQ ID NO: 973470 - RNA, 19 nt, Homo sapiens
  misc_RNA (1)...(19): siRNA sense strand
cgacuucaagcacaugaug

SEQ ID NO: 973471 - RNA, 19 nt, Homo sapiens
  misc_RNA (1)...(19): siRNA sense strand
ucagcacuguggcaucaga

SEQ ID NO: 973472 - RNA, 19 nt, Homo sapiens
  misc_RNA (1)...(19): siRNA sense strand
acccugugcucucccagua

SEQ ID NO: 973473 - RNA, 19 nt, Homo sapiens
  misc_RNA (1)...(19): siRNA sense strand
gggcggagaaggaugagau

SEQ ID NO: 973474 - RNA, 19 nt, Homo sapiens
  misc_RNA (1)...(19): siRNA sense strand
ggagagccaacgcaugagu

SEQ ID NO: 973475 - RNA, 19 nt, Homo sapiens
  misc_RNA (1)...(19): siRNA sense strand
ucaagggcaucaaaagcua

SEQ ID NO: 973476 - RNA, 19 nt, Homo sapiens
  misc_RNA (1)...(19): siRNA sense strand
gagaacaaggaggaaauca

SEQ ID NO: 973477 - RNA, 19 nt, Homo sapiens
  misc_RNA (1)...(19): siRNA sense strand
gaacagccguggggagaca

SEQ ID NO: 973478 - RNA, 19 nt, Homo sapiens
  misc_RNA (1)...(19): siRNA sense strand
aaccguuucucaugcuuug

SEQ ID NO: 973479 - RNA, 19 nt, Homo sapiens
  misc_RNA (1)...(19): siRNA sense strand
gcuggugcguaaacaugug

SEQ ID NO: 973480 - RNA, 19 nt, Homo sapiens
  misc_RNA (1)...(19): siRNA sense strand
caaccguuucucaugcuuu

SEQ ID NO: 973481 - RNA, 19 nt, Homo sapiens
  misc_RNA (1)...(19): siRNA sense strand
aggccgagaugaaccacuu

SEQ ID NO: 973482 - RNA, 19 nt, Homo sapiens
  misc_RNA (1)...(19): siRNA sense strand
ccucuuauguggagaucgu

SEQ ID NO: 973483 - RNA, 19 nt, Homo sapiens
  misc_RNA (1)...(19): siRNA sense strand
ccagcuuccugcucaccuu

SEQ ID NO: 973484 - RNA, 19 nt, Homo sapiens
  misc_RNA (1)...(19): siRNA sense strand
aaaccaggguagcuuugag

SEQ ID NO: 973485 - RNA, 19 nt, Homo sapiens
  misc_RNA (1)...(19): siRNA sense strand
gugagaacaaggaggaaau

SEQ ID NO: 973486 - RNA, 19 nt, Homo sapiens
  misc_RNA (1)...(19): siRNA sense strand
gcucuauaaccgccugcua

SEQ ID NO: 973487 - RNA, 19 nt, Homo sapiens
  misc_RNA (1)...(19): siRNA sense strand
ugaaaggccgagcccucua

SEQ ID NO: 973488 - RNA, 19 nt, Homo sapiens
  misc_RNA (1)...(19): siRNA sense strand
ucaacagugccauuucuca

SEQ ID NO: 973489 - RNA, 19 nt, Homo sapiens
  misc_RNA (1)...(19): siRNA sense strand
uugaggaggaugaugauga

SEQ ID NO: 973490 - RNA, 19 nt, Homo sapiens
  misc_RNA (1)...(19): siRNA sense strand
gcccucaacagugccauuu

SEQ ID NO: 973491 - RNA, 19 nt, Homo sapiens
  misc_RNA (1)...(19): siRNA sense strand
gcaaugcccucuaucaaua

SEQ ID NO: 973492 - RNA, 19 nt, Homo sapiens
  misc_RNA (1)...(19): siRNA sense strand
agacagaggcuacguguuu

SEQ ID NO: 973493 - RNA, 19 nt, Homo sapiens
  misc_RNA (1)...(19): siRNA sense strand
ggaacaggaugacacaaca

SEQ ID NO: 973494 - RNA, 19 nt, Homo sapiens
  misc_RNA (1)...(19): siRNA sense strand
accgaaagcucuacaaguu

SEQ ID NO: 973495 - RNA, 19 nt, Homo sapiens
  misc_RNA (1)...(19): siRNA sense strand
gccgugggcucuccauuga

SEQ ID NO: 973496 - RNA, 19 nt, Homo sapiens
  misc_RNA (1)...(19): siRNA sense strand
ggagcaaccucggcgcaaa

SEQ ID NO: 973497 - RNA, 19 nt, Homo sapiens
  misc_RNA (1)...(19): siRNA sense strand
gaugcuagauggcaacagu

SEQ ID NO: 973498 - RNA, 19 nt, Homo sapiens
  misc_RNA (1)...(19): siRNA sense strand
acaaaggcgugguaucugu

SEQ ID NO: 973499 - RNA, 19 nt, Homo sapiens
  misc_RNA (1)...(19): siRNA sense strand
ggcauuaccucugcaggaa

SEQ ID NO: 973500 - RNA, 19 nt, Homo sapiens
  misc_RNA (1)...(19): siRNA sense strand
gacagaggcuacguguuug

SEQ ID NO: 973501 - RNA, 19 nt, Homo sapiens
  misc_RNA (1)...(19): siRNA sense strand
ggccuauccuuauguggaa

SEQ ID NO: 973502 - RNA, 19 nt, Homo sapiens
  misc_RNA (1)...(19): siRNA sense strand
agaggucccuuuccagaug

SEQ ID NO: 973503 - RNA, 19 nt, Homo sapiens
  misc_RNA (1)...(19): siRNA sense strand
gcaggaacaaguacuaugg

SEQ ID NO: 973504 - RNA, 19 nt, Homo sapiens
  misc_RNA (1)...(19): siRNA sense strand
gagaaccucaucagcauca

SEQ ID NO: 973505 - RNA, 19 nt, Homo sapiens
  misc_RNA (1)...(19): siRNA sense strand
ggaaagugagacuguggaa

SEQ ID NO: 973506 - RNA, 19 nt, Homo sapiens
  misc_RNA (1)...(19): siRNA sense strand
ucaagcaccuggacauggu

SEQ ID NO: 973507 - RNA, 19 nt, Homo sapiens
  misc_RNA (1)...(19): siRNA sense strand
aaagugagacuguggaaca

SEQ ID NO: 973508 - RNA, 19 nt, Homo sapiens
  misc_RNA (1)...(19): siRNA sense strand
guggauguccgcaugauug

SEQ ID NO: 973509 - RNA, 19 nt, Homo sapiens
  misc_RNA (1)...(19): siRNA sense strand
ccugcgacgugaccuguuu

SEQ ID NO: 973510 - RNA, 19 nt, Homo sapiens
  misc_RNA (1)...(19): siRNA sense strand
caugaugcguuacgacgau

SEQ ID NO: 973511 - RNA, 19 nt, Homo sapiens
  misc_RNA (1)...(19): siRNA sense strand
aucaauaucugcacaaugg

SEQ ID NO: 973512 - RNA, 19 nt, Homo sapiens
  misc_RNA (1)...(19): siRNA sense strand
ugaauacaaaggcguggua

SEQ ID NO: 973513 - RNA, 19 nt, Homo sapiens
  misc_RNA (1)...(19): siRNA sense strand
uggagaaccucaucagcau

SEQ ID NO: 973514 - RNA, 19 nt, Homo sapiens
  misc_RNA (1)...(19): siRNA sense strand
ccaaggaccgaaagcucua

SEQ ID NO: 973515 - RNA, 19 nt, Homo sapiens
  misc_RNA (1)...(19): siRNA sense strand
uuaguggccuauccuuaug

SEQ ID NO: 973516 - RNA, 19 nt, Homo sapiens
  misc_RNA (1)...(19): siRNA sense strand
guucccugcuugucaucua

SEQ ID NO: 973517 - RNA, 19 nt, Homo sapiens
  misc_RNA (1)...(19): siRNA sense strand
gagccuauccugagcaaac

SEQ ID NO: 973518 - RNA, 19 nt, Homo sapiens
  misc_RNA (1)...(19): siRNA sense strand
gaccgaaagcucuacaagu

SEQ ID NO: 973519 - RNA, 19 nt, Homo sapiens
  misc_RNA (1)...(19): siRNA sense strand
ccaguucccugcuugucau

SEQ ID NO: 973520 - RNA, 19 nt, Homo sapiens
  misc_RNA (1)...(19): siRNA sense strand
gcaacaguggcuugaguuc

SEQ ID NO: 973521 - RNA, 19 nt, Homo sapiens
  misc_RNA (1)...(19): siRNA sense strand
gaaccucaucagcaucaug

SEQ ID NO: 973522 - RNA, 19 nt, Homo sapiens
  misc_RNA (1)...(19): siRNA sense strand
ggaccgaaagcucuacaag

SEQ ID NO: 973523 - RNA, 19 nt, Homo sapiens
  misc_RNA (1)...(19): siRNA sense strand
gucccucccucccgaaaug

SEQ ID NO: 973524 - RNA, 19 nt, Homo sapiens
  misc_RNA (1)...(19): siRNA sense strand
cgugguaucugucuguuuu

SEQ ID NO: 973525 - RNA, 19 nt, Homo sapiens
  misc_RNA (1)...(19): siRNA sense strand
aagccagccugucccuuga

SEQ ID NO: 973526 - RNA, 19 nt, Homo sapiens
  misc_RNA (1)...(19): siRNA sense strand
gcccuucauccaccaagua

SEQ ID NO: 973527 - RNA, 19 nt, Homo sapiens
  misc_RNA (1)...(19): siRNA sense strand
cauuaccucugcaggaaca

SEQ ID NO: 973528 - RNA, 19 nt, Homo sapiens
  misc_RNA (1)...(19): siRNA sense strand
aacaguggcuugaguucug

SEQ ID NO: 973529 - RNA, 19 nt, Homo sapiens
  misc_RNA (1)...(19): siRNA sense strand
auccuuauguggaaaguga

SEQ ID NO: 973530 - RNA, 19 nt, Homo sapiens
  misc_RNA (1)...(19): siRNA sense strand
ucaagggcuuccgggauga

SEQ ID NO: 973531 - RNA, 19 nt, Homo sapiens
  misc_RNA (1)...(19): siRNA sense strand
uggagcggcaggccucuua

SEQ ID NO: 973532 - RNA, 19 nt, Homo sapiens
  misc_RNA (1)...(19): siRNA sense strand
cuuaguggccuauccuuau

SEQ ID NO: 973533 - RNA, 19 nt, Homo sapiens
  misc_RNA (1)...(19): siRNA sense strand
acucagaggucccuuucca

SEQ ID NO: 973534 - RNA, 19 nt, Homo sapiens
  misc_RNA (1)...(19): siRNA sense strand
gcucacaggaggcaaagag

SEQ ID NO: 973535 - RNA, 19 nt, Homo sapiens
  misc_RNA (1)...(19): siRNA sense strand
uggcaacaguggcuugagu

SEQ ID NO: 973536 - RNA, 19 nt, Homo sapiens
  misc_RNA (1)...(19): siRNA sense strand
gccagccugucccuugaga

SEQ ID NO: 973537 - RNA, 19 nt, Homo sapiens
  misc_RNA (1)...(19): siRNA sense strand
cuacuccaguucccugcuu

SEQ ID NO: 973538 - RNA, 19 nt, Homo sapiens
  misc_RNA (1)...(19): siRNA sense strand
ccgcaaugcccucuaucaa

SEQ ID NO: 973539 - RNA, 19 nt, Homo sapiens
  misc_RNA (1)...(19): siRNA sense strand
cgugggcucuccauugaag

SEQ ID NO: 973540 - RNA, 19 nt, Homo sapiens
  misc_RNA (1)...(19): siRNA sense strand
ccacucagaggucccuuuc

SEQ ID NO: 973541 - RNA, 19 nt, Homo sapiens
  misc_RNA (1)...(19): siRNA sense strand
gaacaggaugacacaacag

SEQ ID NO: 973542 - RNA, 19 nt, Homo sapiens
  misc_RNA (1)...(19): siRNA sense strand
ucccugagguggcgucauc

SEQ ID NO: 973543 - RNA, 19 nt, Homo sapiens
  misc_RNA (1)...(19): siRNA sense strand
cgcaaugcccucuaucaau

SEQ ID NO: 973544 - RNA, 19 nt, Homo sapiens
  misc_RNA (1)...(19): siRNA sense strand
caaugcccucuaucaauau

SEQ ID NO: 973545 - RNA, 19 nt, Homo sapiens
  misc_RNA (1)...(19): siRNA sense strand
ccgcaugauugacuuugca

SEQ ID NO: 973546 - RNA, 19 nt, Homo sapiens
  misc_RNA (1)...(19): siRNA sense strand
ggcaacaguggcuugaguu

SEQ ID NO: 973547 - RNA, 19 nt, Homo sapiens
  misc_RNA (1)...(19): siRNA sense strand
gauggcaacaguggcuuga

SEQ ID NO: 973548 - RNA, 19 nt, Homo sapiens
  misc_RNA (1)...(19): siRNA sense strand
acaguggcuugaguucuga

SEQ ID NO: 973549 - RNA, 19 nt, Homo sapiens
  misc_RNA (1)...(19): siRNA sense strand
uggaagagcugaacaagua

SEQ ID NO: 973550 - RNA, 19 nt, Homo sapiens
  misc_RNA (1)...(19): siRNA sense strand
caagguggcugaacagauc

SEQ ID NO: 973551 - RNA, 19 nt, Homo sapiens
  misc_RNA (1)...(19): siRNA sense strand
gcucauagaccgcaacuug

SEQ ID NO: 973552 - RNA, 19 nt, Homo sapiens
  misc_RNA (1)...(19): siRNA sense strand
gcgaauacgugacgauauc

SEQ ID NO: 973553 - RNA, 19 nt, Homo sapiens
  misc_RNA (1)...(19): siRNA sense strand
cgauaucgcucucugucua

SEQ ID NO: 973554 - RNA, 19 nt, Homo sapiens
  misc_RNA (1)...(19): siRNA sense strand
ccauagccgucuacucuuu

SEQ ID NO: 973555 - RNA, 19 nt, Homo sapiens
  misc_RNA (1)...(19): siRNA sense strand
guauuggguuucuauguga

SEQ ID NO: 973556 - RNA, 19 nt, Homo sapiens
  misc_RNA (1)...(19): siRNA sense strand
gcagcaugcuauuccacua

SEQ ID NO: 973557 - RNA, 19 nt, Homo sapiens
  misc_RNA (1)...(19): siRNA sense strand
gaccauagccgucuacucu

SEQ ID NO: 973558 - RNA, 19 nt, Homo sapiens
  misc_RNA (1)...(19): siRNA sense strand
ucuacaagcuccucuacaa

SEQ ID NO: 973559 - RNA, 19 nt, Homo sapiens
  misc_RNA (1)...(19): siRNA sense strand
ugaggaugaugacgacuuu

SEQ ID NO: 973560 - RNA, 19 nt, Homo sapiens
  misc_RNA (1)...(19): siRNA sense strand
gagcagagguacguguaug

SEQ ID NO: 973561 - RNA, 19 nt, Homo sapiens
  misc_RNA (1)...(19): siRNA sense strand
gaaauccgacuucaacaag

SEQ ID NO: 973562 - RNA, 19 nt, Homo sapiens
  misc_RNA (1)...(19): siRNA sense strand
agacaaaucagcucauaga

SEQ ID NO: 973563 - RNA, 19 nt, Homo sapiens
  misc_RNA (1)...(19): siRNA sense strand
gaugacgacuuugagacaa

SEQ ID NO: 973564 - RNA, 19 nt, Homo sapiens
  misc_RNA (1)...(19): siRNA sense strand
uguauuggguuucuaugug

SEQ ID NO: 973565 - RNA, 19 nt, Homo sapiens
  misc_RNA (1)...(19): siRNA sense strand
gaugaugacgacuuugaga

SEQ ID NO: 973566 - RNA, 19 nt, Homo sapiens
  misc_RNA (1)...(19): siRNA sense strand
gcaugcuauuccacuauga

SEQ ID NO: 973567 - RNA, 19 nt, Homo sapiens
  misc_RNA (1)...(19): siRNA sense strand
gggcgaauacgugacgaua

SEQ ID NO: 973568 - RNA, 19 nt, Homo sapiens
  misc_RNA (1)...(19): siRNA sense strand
ugggagacccggacaugua

SEQ ID NO: 973569 - RNA, 19 nt, Homo sapiens
  misc_RNA (1)...(19): siRNA sense strand
gaucaucaacccauuuggu

SEQ ID NO: 973570 - RNA, 19 nt, Homo sapiens
  misc_RNA (1)...(19): siRNA sense strand
caacccauuuggugaggau

SEQ ID NO: 973571 - RNA, 19 nt, Homo sapiens
  misc_RNA (1)...(19): siRNA sense strand
uggacgaaauguaccagaa

SEQ ID NO: 973572 - RNA, 19 nt, Homo sapiens
  misc_RNA (1)...(19): siRNA sense strand
ccgcugagaaggaccagua

SEQ ID NO: 973573 - RNA, 19 nt, Homo sapiens
  misc_RNA (1)...(19): siRNA sense strand
gcagaccucauucccuugu

SEQ ID NO: 973574 - RNA, 19 nt, Homo sapiens
  misc_RNA (1)...(19): siRNA sense strand
gguggacgcagguuucaug

SEQ ID NO: 973575 - RNA, 19 nt, Homo sapiens
  misc_RNA (1)...(19): siRNA sense strand
ccgcucagcagaccucauu

SEQ ID NO: 973576 - RNA, 19 nt, Homo sapiens
  misc_RNA (1)...(19): siRNA sense strand
cugcaguucuucuucuaug

SEQ ID NO: 973577 - RNA, 19 nt, Homo sapiens
  misc_RNA (1)...(19): siRNA sense strand
ucccuuguccuuuguauug

SEQ ID NO: 973578 - RNA, 19 nt, Homo sapiens
  misc_RNA (1)...(19): siRNA sense strand
ugccaaaccucagaagcuu

SEQ ID NO: 973579 - RNA, 19 nt, Homo sapiens
  misc_RNA (1)...(19): siRNA sense strand
cucauucccuuguccuuug

SEQ ID NO: 973580 - RNA, 19 nt, Homo sapiens
  misc_RNA (1)...(19): siRNA sense strand
ggacgaaauguaccagaac

SEQ ID NO: 973581 - RNA, 19 nt, Homo sapiens
  misc_RNA (1)...(19): siRNA sense strand
cagaucaucaacccauuug

SEQ ID NO: 973582 - RNA, 19 nt, Homo sapiens
  misc_RNA (1)...(19): siRNA sense strand
ccaagugcagcaugcuauu

SEQ ID NO: 973583 - RNA, 19 nt, Homo sapiens
  misc_RNA (1)...(19): siRNA sense strand
cgaaauguaccagaaccuu

SEQ ID NO: 973584 - RNA, 19 nt, Homo sapiens
  misc_RNA (1)...(19): siRNA sense strand
ggagcagagguacguguau

SEQ ID NO: 973585 - RNA, 19 nt, Homo sapiens
  misc_RNA (1)...(19): siRNA sense strand
gccaagugcagcaugcuau

SEQ ID NO: 973586 - RNA, 19 nt, Homo sapiens
  misc_RNA (1)...(19): siRNA sense strand
ugacccaggagcagaggua

SEQ ID NO: 973587 - RNA, 19 nt, Homo sapiens
  misc_RNA (1)...(19): siRNA sense strand
uuucauacacucucaaagu

SEQ ID NO: 973588 - RNA, 19 nt, Homo sapiens
  misc_RNA (1)...(19): siRNA sense strand
acagaucaucaacccauuu

SEQ ID NO: 973589 - RNA, 19 nt, Homo sapiens
  misc_RNA (1)...(19): siRNA sense strand
gccgucuacucuuucuuug

SEQ ID NO: 973590 - RNA, 19 nt, Homo sapiens
  misc_RNA (1)...(19): siRNA sense strand
acaaguaccgagccaagug

SEQ ID NO: 973591 - RNA, 19 nt, Homo sapiens
  misc_RNA (1)...(19): siRNA sense strand
cagcaugcuauuccacuau

SEQ ID NO: 973592 - RNA, 19 nt, Homo sapiens
  misc_RNA (1)...(19): siRNA sense strand
gagacaaaucagcucauag

SEQ ID NO: 973593 - RNA, 19 nt, Homo sapiens
  misc_RNA (1)...(19): siRNA sense strand
gcaucuacaagcuccucua

SEQ ID NO: 973594 - RNA, 19 nt, Homo sapiens
  misc_RNA (1)...(19): siRNA sense strand
gagccugaaauccgacuuc

SEQ ID NO: 973595 - RNA, 19 nt, Homo sapiens
  misc_RNA (1)...(19): siRNA sense strand
uggcugaacagaucaucaa

SEQ ID NO: 973596 - RNA, 19 nt, Homo sapiens
  misc_RNA (1)...(19): siRNA sense strand
ggcucaagguggcugaaca

SEQ ID NO: 973597 - RNA, 19 nt, Homo sapiens
  misc_RNA (1)...(19): siRNA sense strand
ggacgacgaugaggagcua

SEQ ID NO: 973598 - RNA, 19 nt, Homo sapiens
  misc_RNA (1)...(19): siRNA sense strand
gggaccacuuccuuuauga

SEQ ID NO: 973599 - RNA, 19 nt, Homo sapiens
  misc_RNA (1)...(19): siRNA sense strand
ggacgaauugcucccgaaa

SEQ ID NO: 973600 - RNA, 19 nt, Homo sapiens
  misc_RNA (1)...(19): siRNA sense strand
cggagaaguugcaaaugga

SEQ ID NO: 973601 - RNA, 19 nt, Homo sapiens
  misc_RNA (1)...(19): siRNA sense strand
gaaaggcgacgcggagaag

SEQ ID NO: 973602 - RNA, 19 nt, Homo sapiens
  misc_RNA (1)...(19): siRNA sense strand
ggauugggaccacuuccuu

SEQ ID NO: 973603 - RNA, 19 nt, Homo sapiens
  misc_RNA (1)...(19): siRNA sense strand
agacggagaaguugcaaau

SEQ ID NO: 973604 - RNA, 19 nt, Homo sapiens
  misc_RNA (1)...(19): siRNA sense strand
gauugggaccacuuccuuu

SEQ ID NO: 973605 - RNA, 19 nt, Homo sapiens
  misc_RNA (1)...(19): siRNA sense strand
acggagaaguugcaaaugg

SEQ ID NO: 973606 - RNA, 19 nt, Homo sapiens
  misc_RNA (1)...(19): siRNA sense strand
ugggaccacuuccuuuaug

SEQ ID NO: 973607 - RNA, 19 nt, Homo sapiens
  misc_RNA (1)...(19): siRNA sense strand
gaugaggagcuagaugaga

SEQ ID NO: 973608 - RNA, 19 nt, Homo sapiens
  misc_RNA (1)...(19): siRNA sense strand
acgaauugcucccgaaagg

SEQ ID NO: 973609 - RNA, 19 nt, Homo sapiens
  misc_RNA (1)...(19): siRNA sense strand
cagcagcggcagauacuuc

SEQ ID NO: 973610 - RNA, 19 nt, Homo sapiens
  misc_RNA (1)...(19): siRNA sense strand
cgaaaggcgacgcggagaa

SEQ ID NO: 973611 - RNA, 19 nt, Homo sapiens
  misc_RNA (1)...(19): siRNA sense strand
ggaggaggacgacgaugag

SEQ ID NO: 973612 - RNA, 19 nt, Homo sapiens
  misc_RNA (1)...(19): siRNA sense strand
acagggcucucaggaggaa

SEQ ID NO: 973613 - RNA, 19 nt, Homo sapiens
  misc_RNA (1)...(19): siRNA sense strand
ggaccacuuccuuuaugau

SEQ ID NO: 973614 - RNA, 19 nt, Homo sapiens
  misc_RNA (1)...(19): siRNA sense strand
gaccacuuccuuuaugauc

SEQ ID NO: 973615 - RNA, 19 nt, Homo sapiens
  misc_RNA (1)...(19): siRNA sense strand
uggaggaggacgacgauga

SEQ ID NO: 973616 - RNA, 19 nt, Homo sapiens
  misc_RNA (1)...(19): siRNA sense strand
acgaugaggagcuagauga

SEQ ID NO: 973617 - RNA, 19 nt, Homo sapiens
  misc_RNA (1)...(19): siRNA sense strand
ucuuugagacggagaaguu

SEQ ID NO: 973618 - RNA, 19 nt, Homo sapiens
  misc_RNA (1)...(19): siRNA sense strand
gggccugacggagauguuu

SEQ ID NO: 973619 - RNA, 19 nt, Homo sapiens
  misc_RNA (1)...(19): siRNA sense strand
gaauggagcuguuagaaau

SEQ ID NO: 973620 - RNA, 19 nt, Homo sapiens
  misc_RNA (1)...(19): siRNA sense strand
gaauagguguaucaaguaa

SEQ ID NO: 973621 - RNA, 19 nt, Homo sapiens
  misc_RNA (1)...(19): siRNA sense strand
gaaacaagccguggaauag

SEQ ID NO: 973622 - RNA, 19 nt, Homo sapiens
  misc_RNA (1)...(19): siRNA sense strand
ggaauagguguaucaagua

SEQ ID NO: 973623 - RNA, 19 nt, Homo sapiens
  misc_RNA (1)...(19): siRNA sense strand
gaagauggaacucgaaauc

SEQ ID NO: 973624 - RNA, 19 nt, Homo sapiens
  misc_RNA (1)...(19): siRNA sense strand
gaacaaccaacauugacuu

SEQ ID NO: 973625 - RNA, 19 nt, Homo sapiens
  misc_RNA (1)...(19): siRNA sense strand
uggaauagguguaucaagu

SEQ ID NO: 973626 - RNA, 19 nt, Homo sapiens
  misc_RNA (1)...(19): siRNA sense strand
agaaacaagccguggaaua

SEQ ID NO: 973627 - RNA, 19 nt, Homo sapiens
  misc_RNA (1)...(19): siRNA sense strand
cgaauggagcuguuagaaa

SEQ ID NO: 973628 - RNA, 19 nt, Homo sapiens
  misc_RNA (1)...(19): siRNA sense strand
guagcaaagccaauacaaa

SEQ ID NO: 973629 - RNA, 19 nt, Homo sapiens
  misc_RNA (1)...(19): siRNA sense strand
aaaccuacccagcaaagaa

SEQ ID NO: 973630 - RNA, 19 nt, Homo sapiens
  misc_RNA (1)...(19): siRNA sense strand
aacauugacuugccagcua

SEQ ID NO: 973631 - RNA, 19 nt, Homo sapiens
  misc_RNA (1)...(19): siRNA sense strand
gagaggcgcuacggguuca

SEQ ID NO: 973632 - RNA, 19 nt, Homo sapiens
  misc_RNA (1)...(19): siRNA sense strand
cagcuagucucagaacugu

SEQ ID NO: 973633 - RNA, 19 nt, Homo sapiens
  misc_RNA (1)...(19): siRNA sense strand
gcagauggagggacagauc

SEQ ID NO: 973634 - RNA, 19 nt, Homo sapiens
  misc_RNA (1)...(19): siRNA sense strand
ccaacuacgugaacgacau

SEQ ID NO: 973635 - RNA, 19 nt, Homo sapiens
  misc_RNA (1)...(19): siRNA sense strand
gaagcucucggucccauuc

SEQ ID NO: 973636 - RNA, 19 nt, Homo sapiens
  misc_RNA (1)...(19): siRNA sense strand
auagguguaucaaguaaug

SEQ ID NO: 973637 - RNA, 19 nt, Homo sapiens
  misc_RNA (1)...(19): siRNA sense strand
uauggacuguggauaccua

SEQ ID NO: 973638 - RNA, 19 nt, Homo sapiens
  misc_RNA (1)...(19): siRNA sense strand
agcgaaagcucuaggaaca

SEQ ID NO: 973639 - RNA, 19 nt, Homo sapiens
  misc_RNA (1)...(19): siRNA sense strand
aaagaaacaagccguggaa

SEQ ID NO: 973640 - RNA, 19 nt, Homo sapiens
  misc_RNA (1)...(19): siRNA sense strand
aaagguaacagaagaugga

SEQ ID NO: 973641 - RNA, 19 nt, Homo sapiens
  misc_RNA (1)...(19): siRNA sense strand
cuaaagcugccacagaaga

SEQ ID NO: 973642 - RNA, 19 nt, Homo sapiens
  misc_RNA (1)...(19): siRNA sense strand
gcagcgaaagcucuaggaa

SEQ ID NO: 973643 - RNA, 19 nt, Homo sapiens
  misc_RNA (1)...(19): siRNA sense strand
uagcaaagccaauacaaaa

SEQ ID NO: 973644 - RNA, 19 nt, Homo sapiens
  misc_RNA (1)...(19): siRNA sense strand
cgaaagcucuaggaacaac

SEQ ID NO: 973645 - RNA, 19 nt, Homo sapiens
  misc_RNA (1)...(19): siRNA sense strand
uaggaacaaccaacauuga

SEQ ID NO: 973646 - RNA, 19 nt, Homo sapiens
  misc_RNA (1)...(19): siRNA sense strand
gaggagcacagcagaugga

SEQ ID NO: 973647 - RNA, 19 nt, Homo sapiens
  misc_RNA (1)...(19): siRNA sense strand
ggaacucgaaaucccaaug

SEQ ID NO: 973648 - RNA, 19 nt, Homo sapiens
  misc_RNA (1)...(19): siRNA sense strand
cagaagauggaacucgaaa

SEQ ID NO: 973649 - RNA, 19 nt, Homo sapiens
  misc_RNA (1)...(19): siRNA sense strand
cuaggaacaaccaacauug

SEQ ID NO: 973650 - RNA, 19 nt, Homo sapiens
  misc_RNA (1)...(19): siRNA sense strand
cggaaaagguaacagaaga

SEQ ID NO: 973651 - RNA, 19 nt, Homo sapiens
  misc_RNA (1)...(19): siRNA sense strand
ggaacaaccaacauugacu

SEQ ID NO: 973652 - RNA, 19 nt, Homo sapiens
  misc_RNA (1)...(19): siRNA sense strand
caacuacgugaacgacaug

SEQ ID NO: 973653 - RNA, 19 nt, Homo sapiens
  misc_RNA (1)...(19): siRNA sense strand
caaugcagcgaaagcucua

SEQ ID NO: 973654 - RNA, 19 nt, Homo sapiens
  misc_RNA (1)...(19): siRNA sense strand
ccauauggacuguggauac

SEQ ID NO: 973655 - RNA, 19 nt, Homo sapiens
  misc_RNA (1)...(19): siRNA sense strand
gguaacagaagauggaacu

SEQ ID NO: 973656 - RNA, 19 nt, Homo sapiens
  misc_RNA (1)...(19): siRNA sense strand
ucuaggaacaaccaacauu

SEQ ID NO: 973657 - RNA, 19 nt, Homo sapiens
  misc_RNA (1)...(19): siRNA sense strand
gcucuaggaacaaccaaca

SEQ ID NO: 973658 - RNA, 19 nt, Homo sapiens
  misc_RNA (1)...(19): siRNA sense strand
gaucgaauggagcuguuag

SEQ ID NO: 973659 - RNA, 19 nt, Homo sapiens
  misc_RNA (1)...(19): siRNA sense strand
aauggagcuguuagaaaua

SEQ ID NO: 973660 - RNA, 19 nt, Homo sapiens
  misc_RNA (1)...(19): siRNA sense strand
gaaaagguaacagaagaug

SEQ ID NO: 973661 - RNA, 19 nt, Homo sapiens
  misc_RNA (1)...(19): siRNA sense strand
aacaagccguggaauaggu

SEQ ID NO: 973662 - RNA, 19 nt, Homo sapiens
  misc_RNA (1)...(19): siRNA sense strand
gcuuuggucgcacagugua

SEQ ID NO: 973663 - RNA, 19 nt, Homo sapiens
  misc_RNA (1)...(19): siRNA sense strand
gcacacagccuggccauca

SEQ ID NO: 973664 - RNA, 19 nt, Homo sapiens
  misc_RNA (1)...(19): siRNA sense strand
gcacagcgacuaccacauc

SEQ ID NO: 973665 - RNA, 19 nt, Homo sapiens
  misc_RNA (1)...(19): siRNA sense strand
gcacggaggcagcuauaug

SEQ ID NO: 973666 - RNA, 19 nt, Homo sapiens
  misc_RNA (1)...(19): siRNA sense strand
ucacuggcauccuccugua

SEQ ID NO: 973667 - RNA, 19 nt, Homo sapiens
  misc_RNA (1)...(19): siRNA sense strand
caucagcaccuuccucuuc

SEQ ID NO: 973668 - RNA, 19 nt, Homo sapiens
  misc_RNA (1)...(19): siRNA sense strand
gcaccuuccucuucuccau

SEQ ID NO: 973669 - RNA, 19 nt, Homo sapiens
  misc_RNA (1)...(19): siRNA sense strand
cuucaagccucaauacaag

SEQ ID NO: 973670 - RNA, 19 nt, Homo sapiens
  misc_RNA (1)...(19): siRNA sense strand
gaccgaugcagcccacuug

SEQ ID NO: 973671 - RNA, 19 nt, Homo sapiens
  misc_RNA (1)...(19): siRNA sense strand
agucugugccaaccuguua

SEQ ID NO: 973672 - RNA, 19 nt, Homo sapiens
  misc_RNA (1)...(19): siRNA sense strand
ccgagacguucuucgaauc

SEQ ID NO: 973673 - RNA, 19 nt, Homo sapiens
  misc_RNA (1)...(19): siRNA sense strand
ggaugugggcagcaugaug

SEQ ID NO: 973674 - RNA, 19 nt, Homo sapiens
  misc_RNA (1)...(19): siRNA sense strand
ccuccauccucaucuacuu

SEQ ID NO: 973675 - RNA, 19 nt, Homo sapiens
  misc_RNA (1)...(19): siRNA sense strand
cgaauccucauggaaggua

SEQ ID NO: 973676 - RNA, 19 nt, Homo sapiens
  misc_RNA (1)...(19): siRNA sense strand
gcggaugugggcagcauga

SEQ ID NO: 973677 - RNA, 19 nt, Homo sapiens
  misc_RNA (1)...(19): siRNA sense strand
uacgcucacuuaccauguu

SEQ ID NO: 973678 - RNA, 19 nt, Homo sapiens
  misc_RNA (1)...(19): siRNA sense strand
cugcacaccuggccaucga

SEQ ID NO: 973679 - RNA, 19 nt, Homo sapiens
  misc_RNA (1)...(19): siRNA sense strand
uaugcugccugugccguuu

SEQ ID NO: 973680 - RNA, 19 nt, Homo sapiens
  misc_RNA (1)...(19): siRNA sense strand
gccguuugcuuugucuuca

SEQ ID NO: 973681 - RNA, 19 nt, Homo sapiens
  misc_RNA (1)...(19): siRNA sense strand
uccgagacguucuucgaau

SEQ ID NO: 973682 - RNA, 19 nt, Homo sapiens
  misc_RNA (1)...(19): siRNA sense strand
caugaugggcagccucuuc

SEQ ID NO: 973683 - RNA, 19 nt, Homo sapiens
  misc_RNA (1)...(19): siRNA sense strand
cuccaccgcugacccugaa

SEQ ID NO: 973684 - RNA, 19 nt, Homo sapiens
  misc_RNA (1)...(19): siRNA sense strand
gggcccuuacgcucacuua

SEQ ID NO: 973685 - RNA, 19 nt, Homo sapiens
  misc_RNA (1)...(19): siRNA sense strand
cugcaccugugggcccuua

SEQ ID NO: 973686 - RNA, 19 nt, Homo sapiens
  misc_RNA (1)...(19): siRNA sense strand
gcaaagagcugcccaccaa

SEQ ID NO: 973687 - RNA, 19 nt, Homo sapiens
  misc_RNA (1)...(19): siRNA sense strand
ggacguggcucugcacuug

SEQ ID NO: 973688 - RNA, 19 nt, Homo sapiens
  misc_RNA (1)...(19): siRNA sense strand
ggacuacaguaacuacauu

SEQ ID NO: 973689 - RNA, 19 nt, Homo sapiens
  misc_RNA (1)...(19): siRNA sense strand
gcuaugagaucguggaugu

SEQ ID NO: 973690 - RNA, 19 nt, Homo sapiens
  misc_RNA (1)...(19): siRNA sense strand
caaccacacugaagaugaa

SEQ ID NO: 973691 - RNA, 19 nt, Homo sapiens
  misc_RNA (1)...(19): siRNA sense strand
uggaggagaucaacaauga

SEQ ID NO: 973692 - RNA, 19 nt, Homo sapiens
  misc_RNA (1)...(19): siRNA sense strand
ucacaauugucuccuguaa

SEQ ID NO: 973693 - RNA, 19 nt, Homo sapiens
  misc_RNA (1)...(19): siRNA sense strand
caacuuccucucccuauuu

SEQ ID NO: 973694 - RNA, 19 nt, Homo sapiens
  misc_RNA (1)...(19): siRNA sense strand
gcgaugagcugcgagacaa

SEQ ID NO: 973695 - RNA, 19 nt, Homo sapiens
  misc_RNA (1)...(19): siRNA sense strand
caagaggacuacaguaacu

SEQ ID NO: 973696 - RNA, 19 nt, Homo sapiens
  misc_RNA (1)...(19): siRNA sense strand
caauuugcaucuccuguau

SEQ ID NO: 973697 - RNA, 19 nt, Homo sapiens
  misc_RNA (1)...(19): siRNA sense strand
gcucugcacuuggagauug

SEQ ID NO: 973698 - RNA, 19 nt, Homo sapiens
  misc_RNA (1)...(19): siRNA sense strand
gcaaggaguaugaagugaa

SEQ ID NO: 973699 - RNA, 19 nt, Homo sapiens
  misc_RNA (1)...(19): siRNA sense strand
caaggaguaugaagugaag

SEQ ID NO: 973700 - RNA, 19 nt, Homo sapiens
  misc_RNA (1)...(19): siRNA sense strand
ucacggagcugggccacuu

SEQ ID NO: 973701 - RNA, 19 nt, Homo sapiens
  misc_RNA (1)...(19): siRNA sense strand
ugaagaacauccaagacau

SEQ ID NO: 973702 - RNA, 19 nt, Homo sapiens
  misc_RNA (1)...(19): siRNA sense strand
cagcaugaccuucuauuuc

SEQ ID NO: 973703 - RNA, 19 nt, Homo sapiens
  misc_RNA (1)...(19): siRNA sense strand
cuacgucucuauggcauuu

SEQ ID NO: 973704 - RNA, 19 nt, Homo sapiens
  misc_RNA (1)...(19): siRNA sense strand
ugccaggccugcccgaaua

SEQ ID NO: 973705 - RNA, 19 nt, Homo sapiens
  misc_RNA (1)...(19): siRNA sense strand
acacugaagaugaauauga

SEQ ID NO: 973706 - RNA, 19 nt, Homo sapiens
  misc_RNA (1)...(19): siRNA sense strand
gaagaacauccaagacauc

SEQ ID NO: 973707 - RNA, 19 nt, Homo sapiens
  misc_RNA (1)...(19): siRNA sense strand
cacugaagaugaauaugaa

SEQ ID NO: 973708 - RNA, 19 nt, Homo sapiens
  misc_RNA (1)...(19): siRNA sense strand
gcuacaugauccucuucua

SEQ ID NO: 973709 - RNA, 19 nt, Homo sapiens
  misc_RNA (1)...(19): siRNA sense strand
ccaacuuccucucccuauu

SEQ ID NO: 973710 - RNA, 19 nt, Homo sapiens
  misc_RNA (1)...(19): siRNA sense strand
gagcgucgccuccuacuac

SEQ ID NO: 973711 - RNA, 19 nt, Homo sapiens
  misc_RNA (1)...(19): siRNA sense strand
gcacuuccagacacccaua

SEQ ID NO: 973712 - RNA, 19 nt, Homo sapiens
  misc_RNA (1)...(19): siRNA sense strand
agcaugaccuucuauuuca

SEQ ID NO: 973713 - RNA, 19 nt, Homo sapiens
  misc_RNA (1)...(19): siRNA sense strand
gaggagaucaacaaugaca

SEQ ID NO: 973714 - RNA, 19 nt, Homo sapiens
  misc_RNA (1)...(19): siRNA sense strand
caacaacacgaucccuaug

SEQ ID NO: 973715 - RNA, 19 nt, Homo sapiens
  misc_RNA (1)...(19): siRNA sense strand
ccacacugaagaugaauau

SEQ ID NO: 973716 - RNA, 19 nt, Homo sapiens
  misc_RNA (1)...(19): siRNA sense strand
uccaagaggacuacaguaa

SEQ ID NO: 973717 - RNA, 19 nt, Homo sapiens
  misc_RNA (1)...(19): siRNA sense strand
caaccuccuucccauccaa

SEQ ID NO: 973718 - RNA, 19 nt, Homo sapiens
  misc_RNA (1)...(19): siRNA sense strand
cgcuggaacuggaucauug

SEQ ID NO: 973719 - RNA, 19 nt, Homo sapiens
  misc_RNA (1)...(19): siRNA sense strand
agugagaccuccugcuuca

SEQ ID NO: 973720 - RNA, 19 nt, Homo sapiens
  misc_RNA (1)...(19): siRNA sense strand
gaccaucugcucccuguuc

SEQ ID NO: 973721 - RNA, 19 nt, Homo sapiens
  misc_RNA (1)...(19): siRNA sense strand
ucagcaugaccuucuauuu

SEQ ID NO: 973722 - RNA, 19 nt, Homo sapiens
  misc_RNA (1)...(19): siRNA sense strand
gcauuuaucacgguacuca

SEQ ID NO: 973723 - RNA, 19 nt, Homo sapiens
  misc_RNA (1)...(19): siRNA sense strand
aaaagcaccugcaccaaga

SEQ ID NO: 973724 - RNA, 19 nt, Homo sapiens
  misc_RNA (1)...(19): siRNA sense strand
cgucugcgccuucaagaug

SEQ ID NO: 973725 - RNA, 19 nt, Homo sapiens
  misc_RNA (1)...(19): siRNA sense strand
acaauuugcaucuccugua

SEQ ID NO: 973726 - RNA, 19 nt, Homo sapiens
  misc_RNA (1)...(19): siRNA sense strand
gugcaaggaguaugaagug

SEQ ID NO: 973727 - RNA, 19 nt, Homo sapiens
  misc_RNA (1)...(19): siRNA sense strand
cuacaacgaggccaaguuc

SEQ ID NO: 973728 - RNA, 19 nt, Homo sapiens
  misc_RNA (1)...(19): siRNA sense strand
uguaccacuucuucaauga

SEQ ID NO: 973729 - RNA, 19 nt, Homo sapiens
  misc_RNA (1)...(19): siRNA sense strand
gauaggcuacaaccucaug

SEQ ID NO: 973730 - RNA, 19 nt, Homo sapiens
  misc_RNA (1)...(19): siRNA sense strand
gggcauuguucaccuuaac

SEQ ID NO: 973731 - RNA, 19 nt, Homo sapiens
  misc_RNA (1)...(19): siRNA sense strand
caacgaggccaaguucauc

SEQ ID NO: 973732 - RNA, 19 nt, Homo sapiens
  misc_RNA (1)...(19): siRNA sense strand
acaauugucuccuguaacc

SEQ ID NO: 973733 - RNA, 19 nt, Homo sapiens
  misc_RNA (1)...(19): siRNA sense strand
ucaaccacacugaagauga

SEQ ID NO: 973734 - RNA, 19 nt, Homo sapiens
  misc_RNA (1)...(19): siRNA sense strand
gcaggaccagccagagcua

SEQ ID NO: 973735 - RNA, 19 nt, Homo sapiens
  misc_RNA (1)...(19): siRNA sense strand
ucaugacuguggccaacuu

SEQ ID NO: 973736 - RNA, 19 nt, Homo sapiens
  misc_RNA (1)...(19): siRNA sense strand
ucaacaacacgaucccuau

SEQ ID NO: 973737 - RNA, 19 nt, Homo sapiens
  misc_RNA (1)...(19): siRNA sense strand
gcauuguucaccuuaacuu

SEQ ID NO: 973738 - RNA, 19 nt, Homo sapiens
  misc_RNA (1)...(19): siRNA sense strand
acaacacgaucccuauguc

SEQ ID NO: 973739 - RNA, 19 nt, Homo sapiens
  misc_RNA (1)...(19): siRNA sense strand
guaucgccgugcguucuuu

SEQ ID NO: 973740 - RNA, 19 nt, Homo sapiens
  misc_RNA (1)...(19): siRNA sense strand
cgaauaacgagugguccua

SEQ ID NO: 973741 - RNA, 19 nt, Homo sapiens
  misc_RNA (1)...(19): siRNA sense strand
cguguacucugcggucuau

SEQ ID NO: 973742 - RNA, 19 nt, Homo sapiens
  misc_RNA (1)...(19): siRNA sense strand
auccagggcuacaccauga

SEQ ID NO: 973743 - RNA, 19 nt, Homo sapiens
  misc_RNA (1)...(19): siRNA sense strand
ugugcuacaucuccaacaa

SEQ ID NO: 973744 - RNA, 19 nt, Homo sapiens
  misc_RNA (1)...(19): siRNA sense strand
gaucgucugcgccuucaag

SEQ ID NO: 973745 - RNA, 19 nt, Homo sapiens
  misc_RNA (1)...(19): siRNA sense strand
accagaacaugacgucaga

SEQ ID NO: 973746 - RNA, 19 nt, Homo sapiens
  misc_RNA (1)...(19): siRNA sense strand
ugcuacaucuccaacaaug

SEQ ID NO: 973747 - RNA, 19 nt, Homo sapiens
  misc_RNA (1)...(19): siRNA sense strand
ugaaggugauaggcuacaa

SEQ ID NO: 973748 - RNA, 19 nt, Homo sapiens
  misc_RNA (1)...(19): siRNA sense strand
uggccauccuggugauauu

SEQ ID NO: 973749 - RNA, 19 nt, Homo sapiens
  misc_RNA (1)...(19): siRNA sense strand
agagugagaccuccugcuu

SEQ ID NO: 973750 - RNA, 19 nt, Homo sapiens
  misc_RNA (1)...(19): siRNA sense strand
ggcagcugcuugaggagau

SEQ ID NO: 973751 - RNA, 19 nt, Homo sapiens
  misc_RNA (1)...(19): siRNA sense strand
gacuacaguaacuacauuu

SEQ ID NO: 973752 - RNA, 19 nt, Homo sapiens
  misc_RNA (1)...(19): siRNA sense strand
aguaugaagugaaggugau

SEQ ID NO: 973753 - RNA, 19 nt, Homo sapiens
  misc_RNA (1)...(19): siRNA sense strand
guaugaagugaaggugaua

SEQ ID NO: 973754 - RNA, 19 nt, Homo sapiens
  misc_RNA (1)...(19): siRNA sense strand
agcgacagcugaagaacau

SEQ ID NO: 973755 - RNA, 19 nt, Homo sapiens
  misc_RNA (1)...(19): siRNA sense strand
ccaugugcaaggaguauga

SEQ ID NO: 973756 - RNA, 19 nt, Homo sapiens
  misc_RNA (1)...(19): siRNA sense strand
cuauuucuccuuccacaga

SEQ ID NO: 973757 - RNA, 19 nt, Homo sapiens
  misc_RNA (1)...(19): siRNA sense strand
gagcugcccaccaacuaca

SEQ ID NO: 973758 - RNA, 19 nt, Homo sapiens
  misc_RNA (1)...(19): siRNA sense strand
gguuucagcuucgccuaca

SEQ ID NO: 973759 - RNA, 19 nt, Homo sapiens
  misc_RNA (1)...(19): siRNA sense strand
cugaagaacauccaagaca

SEQ ID NO: 973760 - RNA, 19 nt, Homo sapiens
  misc_RNA (1)...(19): siRNA sense strand
ggaccaccaaaucuucuuc

SEQ ID NO: 973761 - RNA, 19 nt, Homo sapiens
  misc_RNA (1)...(19): siRNA sense strand
cagcccaaccagaacauga

SEQ ID NO: 973762 - RNA, 19 nt, Homo sapiens
  misc_RNA (1)...(19): siRNA sense strand
ccaagaggacuacaguaac

SEQ ID NO: 973763 - RNA, 19 nt, Homo sapiens
  misc_RNA (1)...(19): siRNA sense strand
cuguaccacuucuucaaug

SEQ ID NO: 973764 - RNA, 19 nt, Homo sapiens
  misc_RNA (1)...(19): siRNA sense strand
ucgccuacaugggcaaaga

SEQ ID NO: 973765 - RNA, 19 nt, Homo sapiens
  misc_RNA (1)...(19): siRNA sense strand
caucugcucccuguucuuc

SEQ ID NO: 973766 - RNA, 19 nt, Homo sapiens
  misc_RNA (1)...(19): siRNA sense strand
cacugcugcugguggcaua

SEQ ID NO: 973767 - RNA, 19 nt, Homo sapiens
  misc_RNA (1)...(19): siRNA sense strand
ggaccagccagagcuauac

SEQ ID NO: 973768 - RNA, 19 nt, Homo sapiens
  misc_RNA (1)...(19): siRNA sense strand
cccaagaucacaauugucu

SEQ ID NO: 973769 - RNA, 19 nt, Homo sapiens
  misc_RNA (1)...(19): siRNA sense strand
acaugguggucccggugua

SEQ ID NO: 973770 - RNA, 19 nt, Homo sapiens
  misc_RNA (1)...(19): siRNA sense strand
gaacaucgauggcgccaaa

SEQ ID NO: 973771 - RNA, 19 nt, Homo sapiens
  misc_RNA (1)...(19): siRNA sense strand
ggaaguaaaccuuucauuu

SEQ ID NO: 973772 - RNA, 19 nt, Homo sapiens
  misc_RNA (1)...(19): siRNA sense strand
ggacggacaucuauuguuc

SEQ ID NO: 973773 - RNA, 19 nt, Homo sapiens
  misc_RNA (1)...(19): siRNA sense strand
gaaagauaccaaccaguua

SEQ ID NO: 973774 - RNA, 19 nt, Homo sapiens
  misc_RNA (1)...(19): siRNA sense strand
ggacaucuauuguucaucu

SEQ ID NO: 973775 - RNA, 19 nt, Homo sapiens
  misc_RNA (1)...(19): siRNA sense strand
ggaaagauaccaaccaguu

SEQ ID NO: 973776 - RNA, 19 nt, Homo sapiens
  misc_RNA (1)...(19): siRNA sense strand
gaauggcgauggguugaua

SEQ ID NO: 973777 - RNA, 19 nt, Homo sapiens
  misc_RNA (1)...(19): siRNA sense strand
caaauaaggaacaugguua

SEQ ID NO: 973778 - RNA, 19 nt, Homo sapiens
  misc_RNA (1)...(19): siRNA sense strand
cacaagaucuggaaaugaa

SEQ ID NO: 973779 - RNA, 19 nt, Homo sapiens
  misc_RNA (1)...(19): siRNA sense strand
ggaaacagaggauucauug

SEQ ID NO: 973780 - RNA, 19 nt, Homo sapiens
  misc_RNA (1)...(19): siRNA sense strand
guuccaagauugccgaaua

SEQ ID NO: 973781 - RNA, 19 nt, Homo sapiens
  misc_RNA (1)...(19): siRNA sense strand
gaaacauggugacuagaug

SEQ ID NO: 973782 - RNA, 19 nt, Homo sapiens
  misc_RNA (1)...(19): siRNA sense strand
caacaaggacggacaucua

SEQ ID NO: 973783 - RNA, 19 nt, Homo sapiens
  misc_RNA (1)...(19): siRNA sense strand
guggagauaucgagaacua

SEQ ID NO: 973784 - RNA, 19 nt, Homo sapiens
  misc_RNA (1)...(19): siRNA sense strand
ggacaaacugcauaaucua

SEQ ID NO: 973785 - RNA, 19 nt, Homo sapiens
  misc_RNA (1)...(19): siRNA sense strand
ugacagaauucaaguaugg

SEQ ID NO: 973786 - RNA, 19 nt, Homo sapiens
  misc_RNA (1)...(19): siRNA sense strand
ggauaaccaugacaaucaa

SEQ ID NO: 973787 - RNA, 19 nt, Homo sapiens
  misc_RNA (1)...(19): siRNA sense strand
ugauauugcucuugaaugu

SEQ ID NO: 973788 - RNA, 19 nt, Homo sapiens
  misc_RNA (1)...(19): siRNA sense strand
gaacuacaaugaugcuacu

SEQ ID NO: 973789 - RNA, 19 nt, Homo sapiens
  misc_RNA (1)...(19): siRNA sense strand
caagauugccgaauauaug

SEQ ID NO: 973790 - RNA, 19 nt, Homo sapiens
  misc_RNA (1)...(19): siRNA sense strand
gugacuagauguaacaaug

SEQ ID NO: 973791 - RNA, 19 nt, Homo sapiens
  misc_RNA (1)...(19): siRNA sense strand
gcacaagaucuggaaauga

SEQ ID NO: 973792 - RNA, 19 nt, Homo sapiens
  misc_RNA (1)...(19): siRNA sense strand
gacaaacugcauaaucuaa

SEQ ID NO: 973793 - RNA, 19 nt, Homo sapiens
  misc_RNA (1)...(19): siRNA sense strand
ugucauuucuggagauaaa

SEQ ID NO: 973794 - RNA, 19 nt, Homo sapiens
  misc_RNA (1)...(19): siRNA sense strand
gaugucauuucuggagaua

SEQ ID NO: 973795 - RNA, 19 nt, Homo sapiens
  misc_RNA (1)...(19): siRNA sense strand
gcacaguuauucgcaagug

SEQ ID NO: 973796 - RNA, 19 nt, Homo sapiens
  misc_RNA (1)...(19): siRNA sense strand
guucaggucucuccaccaa

SEQ ID NO: 973797 - RNA, 19 nt, Homo sapiens
  misc_RNA (1)...(19): siRNA sense strand
ugaaugugagcgauauuua

SEQ ID NO: 973798 - RNA, 19 nt, Homo sapiens
  misc_RNA (1)...(19): siRNA sense strand
uuagaaacauggugacuag

SEQ ID NO: 973799 - RNA, 19 nt, Homo sapiens
  misc_RNA (1)...(19): siRNA sense strand
caaggacggacaucuauug

SEQ ID NO: 973800 - RNA, 19 nt, Homo sapiens
  misc_RNA (1)...(19): siRNA sense strand
gcaaugacugggucuguga

SEQ ID NO: 973801 - RNA, 19 nt, Homo sapiens
  misc_RNA (1)...(19): siRNA sense strand
uuauguggaugcuguaauu

SEQ ID NO: 973802 - RNA, 19 nt, Homo sapiens
  misc_RNA (1)...(19): siRNA sense strand
ggguugauauugcucuuga

SEQ ID NO: 973803 - RNA, 19 nt, Homo sapiens
  misc_RNA (1)...(19): siRNA sense strand
ucaggucucuccaccaaau

SEQ ID NO: 973804 - RNA, 19 nt, Homo sapiens
  misc_RNA (1)...(19): siRNA sense strand
ccaaccaguuagcuauaaa

SEQ ID NO: 973805 - RNA, 19 nt, Homo sapiens
  misc_RNA (1)...(19): siRNA sense strand
gaaguggagauaucgagaa

SEQ ID NO: 973806 - RNA, 19 nt, Homo sapiens
  misc_RNA (1)...(19): siRNA sense strand
gaaguucuuucuguugcuu

SEQ ID NO: 973807 - RNA, 19 nt, Homo sapiens
  misc_RNA (1)...(19): siRNA sense strand
cuacucaggucagagauug

SEQ ID NO: 973808 - RNA, 19 nt, Homo sapiens
  misc_RNA (1)...(19): siRNA sense strand
caaguggaauggagagaag

SEQ ID NO: 973809 - RNA, 19 nt, Homo sapiens
  misc_RNA (1)...(19): siRNA sense strand
gaaugugagcgauauuuag

SEQ ID NO: 973810 - RNA, 19 nt, Homo sapiens
  misc_RNA (1)...(19): siRNA sense strand
caucgauggcgccaaauaa

SEQ ID NO: 973811 - RNA, 19 nt, Homo sapiens
  misc_RNA (1)...(19): siRNA sense strand
ggagacauaaaggcaauuu

SEQ ID NO: 973812 - RNA, 19 nt, Homo sapiens
  misc_RNA (1)...(19): siRNA sense strand
ggagauaucgagaacuaca

SEQ ID NO: 973813 - RNA, 19 nt, Homo sapiens
  misc_RNA (1)...(19): siRNA sense strand
ccaaauaaggaacaugguu

SEQ ID NO: 973814 - RNA, 19 nt, Homo sapiens
  misc_RNA (1)...(19): siRNA sense strand
ggugacagaauucaaguau

SEQ ID NO: 973815 - RNA, 19 nt, Homo sapiens
  misc_RNA (1)...(19): siRNA sense strand
auauugcucuugaauguga

SEQ ID NO: 973816 - RNA, 19 nt, Homo sapiens
  misc_RNA (1)...(19): siRNA sense strand
gagaggaaacagaggauuc

SEQ ID NO: 973817 - RNA, 19 nt, Homo sapiens
  misc_RNA (1)...(19): siRNA sense strand
caaacugcauaaucuaaac

SEQ ID NO: 973818 - RNA, 19 nt, Homo sapiens
  misc_RNA (1)...(19): siRNA sense strand
uggacaaacugcauaaucu

SEQ ID NO: 973819 - RNA, 19 nt, Homo sapiens
  misc_RNA (1)...(19): siRNA sense strand
gaccuuggugggaaagaua

SEQ ID NO: 973820 - RNA, 19 nt, Homo sapiens
  misc_RNA (1)...(19): siRNA sense strand
uaugugcguuccaagauug

SEQ ID NO: 973821 - RNA, 19 nt, Homo sapiens
  misc_RNA (1)...(19): siRNA sense strand
gauaccaaccaguuagcua

SEQ ID NO: 973822 - RNA, 19 nt, Homo sapiens
  misc_RNA (1)...(19): siRNA sense strand
ggagcaaccaaguggcuuu

SEQ ID NO: 973823 - RNA, 19 nt, Homo sapiens
  misc_RNA (1)...(19): siRNA sense strand
ccaagauugccgaauauau

SEQ ID NO: 973824 - RNA, 19 nt, Homo sapiens
  misc_RNA (1)...(19): siRNA sense strand
gcaaguggaauggagagaa

SEQ ID NO: 973825 - RNA, 19 nt, Homo sapiens
  misc_RNA (1)...(19): siRNA sense strand
gcaguaccuguggaaguua

SEQ ID NO: 973826 - RNA, 19 nt, Homo sapiens
  misc_RNA (1)...(19): siRNA sense strand
gaauucaaguauggugcaa

SEQ ID NO: 973827 - RNA, 19 nt, Homo sapiens
  misc_RNA (1)...(19): siRNA sense strand
cugcauaaucuaaacagua

SEQ ID NO: 973828 - RNA, 19 nt, Homo sapiens
  misc_RNA (1)...(19): siRNA sense strand
guugcaggguucagacuug

SEQ ID NO: 973829 - RNA, 19 nt, Homo sapiens
  misc_RNA (1)...(19): siRNA sense strand
gauuaugugcguuccaaga

SEQ ID NO: 973830 - RNA, 19 nt, Homo sapiens
  misc_RNA (1)...(19): siRNA sense strand
gcaggaaguaaaccuuuca

SEQ ID NO: 973831 - RNA, 19 nt, Homo sapiens
  misc_RNA (1)...(19): siRNA sense strand
caucuauuguucaucuguu

SEQ ID NO: 973832 - RNA, 19 nt, Homo sapiens
  misc_RNA (1)...(19): siRNA sense strand
uguggaugcuguaauuaau

SEQ ID NO: 973833 - RNA, 19 nt, Homo sapiens
  misc_RNA (1)...(19): siRNA sense strand
gacuggacauuuucuuuaa

SEQ ID NO: 973834 - RNA, 19 nt, Homo sapiens
  misc_RNA (1)...(19): siRNA sense strand
uggauaaccaugacaauca

SEQ ID NO: 973835 - RNA, 19 nt, Homo sapiens
  misc_RNA (1)...(19): siRNA sense strand
gaugguaaauguaaaacug

SEQ ID NO: 973836 - RNA, 19 nt, Homo sapiens
  misc_RNA (1)...(19): siRNA sense strand
uggaugcuguaauuaauca

SEQ ID NO: 973837 - RNA, 19 nt, Homo sapiens
  misc_RNA (1)...(19): siRNA sense strand
caagaucuggaaaugaaga

SEQ ID NO: 973838 - RNA, 19 nt, Homo sapiens
  misc_RNA (1)...(19): siRNA sense strand
gaaacagaggauucauugu

SEQ ID NO: 973839 - RNA, 19 nt, Homo sapiens
  misc_RNA (1)...(19): siRNA sense strand
gcagucccauauucuggau

SEQ ID NO: 973840 - RNA, 19 nt, Homo sapiens
  misc_RNA (1)...(19): siRNA sense strand
guuaauuuccgcaauguag

SEQ ID NO: 973841 - RNA, 19 nt, Homo sapiens
  misc_RNA (1)...(19): siRNA sense strand
agacacuacuuguggcaau

SEQ ID NO: 973842 - RNA, 19 nt, Homo sapiens
  misc_RNA (1)...(19): siRNA sense strand
uuaugugcguuccaagauu

SEQ ID NO: 973843 - RNA, 19 nt, Homo sapiens
  misc_RNA (1)...(19): siRNA sense strand
ggcgauggguugauauugc

SEQ ID NO: 973844 - RNA, 19 nt, Homo sapiens
  misc_RNA (1)...(19): siRNA sense strand
gcaggguucagacuugaug

SEQ ID NO: 973845 - RNA, 19 nt, Homo sapiens
  misc_RNA (1)...(19): siRNA sense strand
cacgaguaaugucaagcua

SEQ ID NO: 973846 - RNA, 19 nt, Homo sapiens
  misc_RNA (1)...(19): siRNA sense strand
gugacagaauucaaguaug

SEQ ID NO: 973847 - RNA, 19 nt, Homo sapiens
  misc_RNA (1)...(19): siRNA sense strand
aaagauaccaaccaguuag

SEQ ID NO: 973848 - RNA, 19 nt, Homo sapiens
  misc_RNA (1)...(19): siRNA sense strand
aauggcaguuggauuuaug

SEQ ID NO: 973849 - RNA, 19 nt, Homo sapiens
  misc_RNA (1)...(19): siRNA sense strand
uaaaggcaauuuuggacaa

SEQ ID NO: 973850 - RNA, 19 nt, Homo sapiens
  misc_RNA (1)...(19): siRNA sense strand
aagauugccgaauauauga

SEQ ID NO: 973851 - RNA, 19 nt, Homo sapiens
  misc_RNA (1)...(19): siRNA sense strand
aagauuaugugcguuccaa

SEQ ID NO: 973852 - RNA, 19 nt, Homo sapiens
  misc_RNA (1)...(19): siRNA sense strand
ggagaggaaacagaggauu

SEQ ID NO: 973853 - RNA, 19 nt, Homo sapiens
  misc_RNA (1)...(19): siRNA sense strand
caaacugguaugauaaugg

SEQ ID NO: 973854 - RNA, 19 nt, Homo sapiens
  misc_RNA (1)...(19): siRNA sense strand
acaaacugguaugauaaug

SEQ ID NO: 973855 - RNA, 19 nt, Homo sapiens
  misc_RNA (1)...(19): siRNA sense strand
ggaauggagagaagauguc

SEQ ID NO: 973856 - RNA, 19 nt, Homo sapiens
  misc_RNA (1)...(19): siRNA sense strand
caaccaguuagcuauaaau

SEQ ID NO: 973857 - RNA, 19 nt, Homo sapiens
  misc_RNA (1)...(19): siRNA sense strand
ugacuggacauuuucuuua

SEQ ID NO: 973858 - RNA, 19 nt, Homo sapiens
  misc_RNA (1)...(19): siRNA sense strand
gacacuacuuguggcaaug

SEQ ID NO: 973859 - RNA, 19 nt, Homo sapiens
  misc_RNA (1)...(19): siRNA sense strand
agcaguaccuguggaaguu

SEQ ID NO: 973860 - RNA, 19 nt, Homo sapiens
  misc_RNA (1)...(19): siRNA sense strand
gcgauggguugauauugcu

SEQ ID NO: 973861 - RNA, 19 nt, Homo sapiens
  misc_RNA (1)...(19): siRNA sense strand
cgauggcgccaaauaagga

SEQ ID NO: 973862 - RNA, 19 nt, Homo sapiens
  misc_RNA (1)...(19): siRNA sense strand
gagauaucgagaacuacaa

SEQ ID NO: 973863 - RNA, 19 nt, Homo sapiens
  misc_RNA (1)...(19): siRNA sense strand
uaccaaccaguuagcuaua

SEQ ID NO: 973864 - RNA, 19 nt, Homo sapiens
  misc_RNA (1)...(19): siRNA sense strand
ggauuuaugcuugcucauc

SEQ ID NO: 973865 - RNA, 19 nt, Homo sapiens
  misc_RNA (1)...(19): siRNA sense strand
gacaaucaacgaggacaug

SEQ ID NO: 973866 - RNA, 19 nt, Homo sapiens
  misc_RNA (1)...(19): siRNA sense strand
agaaacauggugacuagau

SEQ ID NO: 973867 - RNA, 19 nt, Homo sapiens
  misc_RNA (1)...(19): siRNA sense strand
ugcacaagaucuggaaaug

SEQ ID NO: 973868 - RNA, 19 nt, Homo sapiens
  misc_RNA (1)...(19): siRNA sense strand
auacugugaugucauuucu

SEQ ID NO: 973869 - RNA, 19 nt, Homo sapiens
  misc_RNA (1)...(19): siRNA sense strand
ugacuagauguaacaaugu

SEQ ID NO: 973870 - RNA, 19 nt, Homo sapiens
  misc_RNA (1)...(19): siRNA sense strand
caaaguagcuaacaucaua

SEQ ID NO: 973871 - RNA, 19 nt, Homo sapiens
  misc_RNA (1)...(19): siRNA sense strand
gggaaagaauguuaaguua

SEQ ID NO: 973872 - RNA, 19 nt, Homo sapiens
  misc_RNA (1)...(19): siRNA sense strand
ggacagacauguagaagau

SEQ ID NO: 973873 - RNA, 19 nt, Homo sapiens
  misc_RNA (1)...(19): siRNA sense strand
guacaaacauugcugaaga

SEQ ID NO: 973874 - RNA, 19 nt, Homo sapiens
  misc_RNA (1)...(19): siRNA sense strand
guuaauagaugcacaagaa

SEQ ID NO: 973875 - RNA, 19 nt, Homo sapiens
  misc_RNA (1)...(19): siRNA sense strand
uaacagaucccgccaauga

SEQ ID NO: 973876 - RNA, 19 nt, Homo sapiens
  misc_RNA (1)...(19): siRNA sense strand
aaacauugcugaagagcua

SEQ ID NO: 973877 - RNA, 19 nt, Homo sapiens
  misc_RNA (1)...(19): siRNA sense strand
acaagaagcugcugaacaa

SEQ ID NO: 973878 - RNA, 19 nt, Homo sapiens
  misc_RNA (1)...(19): siRNA sense strand
gagaagugcuccugaaauc

SEQ ID NO: 973879 - RNA, 19 nt, Homo sapiens
  misc_RNA (1)...(19): siRNA sense strand
aauagcagcuuuagaauug

SEQ ID NO: 973880 - RNA, 19 nt, Homo sapiens
  misc_RNA (1)...(19): siRNA sense strand
ugagaaagaucuagaaagu

SEQ ID NO: 973881 - RNA, 19 nt, Homo sapiens
  misc_RNA (1)...(19): siRNA sense strand
gugcacagauuguaauuga

SEQ ID NO: 973882 - RNA, 19 nt, Homo sapiens
  misc_RNA (1)...(19): siRNA sense strand
ggaauggugugaagccaaa

SEQ ID NO: 973883 - RNA, 19 nt, Homo sapiens
  misc_RNA (1)...(19): siRNA sense strand
uguagaagauggaaaugua

SEQ ID NO: 973884 - RNA, 19 nt, Homo sapiens
  misc_RNA (1)...(19): siRNA sense strand
gagaagcucuugacugucu

SEQ ID NO: 973885 - RNA, 19 nt, Homo sapiens
  misc_RNA (1)...(19): siRNA sense strand
gaaugaagcucuuguugcu

SEQ ID NO: 973886 - RNA, 19 nt, Homo sapiens
  misc_RNA (1)...(19): siRNA sense strand
ugaagaagcugaagauaac

SEQ ID NO: 973887 - RNA, 19 nt, Homo sapiens
  misc_RNA (1)...(19): siRNA sense strand
acagaaaugugucuuguug

SEQ ID NO: 973888 - RNA, 19 nt, Homo sapiens
  misc_RNA (1)...(19): siRNA sense strand
gcagagacuuacuguggaa

SEQ ID NO: 973889 - RNA, 19 nt, Homo sapiens
  misc_RNA (1)...(19): siRNA sense strand
acaaggaaguacaggauuu

SEQ ID NO: 973890 - RNA, 19 nt, Homo sapiens
  misc_RNA (1)...(19): siRNA sense strand
aaaugcagcucuuacagaa

SEQ ID NO: 973891 - RNA, 19 nt, Homo sapiens
  misc_RNA (1)...(19): siRNA sense strand
gugcuaaacuuguacagau

SEQ ID NO: 973892 - RNA, 19 nt, Homo sapiens
  misc_RNA (1)...(19): siRNA sense strand
gaagugcuccugaaaucaa

SEQ ID NO: 973893 - RNA, 19 nt, Homo sapiens
  misc_RNA (1)...(19): siRNA sense strand
ccagaaaugaugcaaauug

SEQ ID NO: 973894 - RNA, 19 nt, Homo sapiens
  misc_RNA (1)...(19): siRNA sense strand
agaagcugcugaacaauug

SEQ ID NO: 973895 - RNA, 19 nt, Homo sapiens
  misc_RNA (1)...(19): siRNA sense strand
gaacaugauaagagagaaa

SEQ ID NO: 973896 - RNA, 19 nt, Homo sapiens
  misc_RNA (1)...(19): siRNA sense strand
cagaaaugaugcaaauugu

SEQ ID NO: 973897 - RNA, 19 nt, Homo sapiens
  misc_RNA (1)...(19): siRNA sense strand
gggcagggcucuaggaaac

SEQ ID NO: 973898 - RNA, 19 nt, Homo sapiens
  misc_RNA (1)...(19): siRNA sense strand
uaugggaucugaaugucua

SEQ ID NO: 973899 - RNA, 19 nt, Homo sapiens
  misc_RNA (1)...(19): siRNA sense strand
guccugauaugugcucuua

SEQ ID NO: 973900 - RNA, 19 nt, Homo sapiens
  misc_RNA (1)...(19): siRNA sense strand
agauggaaauguaacagua

SEQ ID NO: 973901 - RNA, 19 nt, Homo sapiens
  misc_RNA (1)...(19): siRNA sense strand
uaacaucauagcagaagua

SEQ ID NO: 973902 - RNA, 19 nt, Homo sapiens
  misc_RNA (1)...(19): siRNA sense strand
gcaacuagugaacauguaa

SEQ ID NO: 973903 - RNA, 19 nt, Homo sapiens
  misc_RNA (1)...(19): siRNA sense strand
gaacaauugggaaagaaug

SEQ ID NO: 973904 - RNA, 19 nt, Homo sapiens
  misc_RNA (1)...(19): siRNA sense strand
aaagaacaguuugccagua

SEQ ID NO: 973905 - RNA, 19 nt, Homo sapiens
  misc_RNA (1)...(19): siRNA sense strand
guucagaucucaugguuuu

SEQ ID NO: 973906 - RNA, 19 nt, Homo sapiens
  misc_RNA (1)...(19): siRNA sense strand
ugagagaagugcuccugaa

SEQ ID NO: 973907 - RNA, 19 nt, Homo sapiens
  misc_RNA (1)...(19): siRNA sense strand
gaggauaguuuagaaggau

SEQ ID NO: 973908 - RNA, 19 nt, Homo sapiens
  misc_RNA (1)...(19): siRNA sense strand
uuagaaggaugcuuggauu

SEQ ID NO: 973909 - RNA, 19 nt, Homo sapiens
  misc_RNA (1)...(19): siRNA sense strand
gcaaagccaaaguagcuaa

SEQ ID NO: 973910 - RNA, 19 nt, Homo sapiens
  misc_RNA (1)...(19): siRNA sense strand
gcagagugguggcaucaag

SEQ ID NO: 973911 - RNA, 19 nt, Homo sapiens
  misc_RNA (1)...(19): siRNA sense strand
ggaaagaauguuaaguuag

SEQ ID NO: 973912 - RNA, 19 nt, Homo sapiens
  misc_RNA (1)...(19): siRNA sense strand
gguugaagcaggccuagua

SEQ ID NO: 973913 - RNA, 19 nt, Homo sapiens
  misc_RNA (1)...(19): siRNA sense strand
gagagaagugcuccugaaa

SEQ ID NO: 973914 - RNA, 19 nt, Homo sapiens
  misc_RNA (1)...(19): siRNA sense strand
gaaggaugcuuggauuguc

SEQ ID NO: 973915 - RNA, 19 nt, Homo sapiens
  misc_RNA (1)...(19): siRNA sense strand
ucucuuggaucccaucaaa

SEQ ID NO: 973916 - RNA, 19 nt, Homo sapiens
  misc_RNA (1)...(19): siRNA sense strand
ccugauaugugcucuuaug

SEQ ID NO: 973917 - RNA, 19 nt, Homo sapiens
  misc_RNA (1)...(19): siRNA sense strand
caauugggaaagaauguua

SEQ ID NO: 973918 - RNA, 19 nt, Homo sapiens
  misc_RNA (1)...(19): siRNA sense strand
uauaacagaucccgccaau

SEQ ID NO: 973919 - RNA, 19 nt, Homo sapiens
  misc_RNA (1)...(19): siRNA sense strand
gcugaacaauugggaaaga

SEQ ID NO: 973920 - RNA, 19 nt, Homo sapiens
  misc_RNA (1)...(19): siRNA sense strand
gccauuccaguuauaaaua

SEQ ID NO: 973921 - RNA, 19 nt, Homo sapiens
  misc_RNA (1)...(19): siRNA sense strand
gagaugaauccaugcagaa

SEQ ID NO: 973922 - RNA, 19 nt, Homo sapiens
  misc_RNA (1)...(19): siRNA sense strand
aaacuucgcagucaugaga

SEQ ID NO: 973923 - RNA, 19 nt, Homo sapiens
  misc_RNA (1)...(19): siRNA sense strand
gcuaaacuuguacagauuu

SEQ ID NO: 973924 - RNA, 19 nt, Homo sapiens
  misc_RNA (1)...(19): siRNA sense strand
guagaagauggaaauguaa

SEQ ID NO: 973925 - RNA, 19 nt, Homo sapiens
  misc_RNA (1)...(19): siRNA sense strand
caagacugaggauaguuua

SEQ ID NO: 973926 - RNA, 19 nt, Homo sapiens
  misc_RNA (1)...(19): siRNA sense strand
gcaugcugaugaacuauag

SEQ ID NO: 973927 - RNA, 19 nt, Homo sapiens
  misc_RNA (1)...(19): siRNA sense strand
gaugucguauccaaacuuc

SEQ ID NO: 973928 - RNA, 19 nt, Homo sapiens
  misc_RNA (1)...(19): siRNA sense strand
ugacaagacugaggauagu

SEQ ID NO: 973929 - RNA, 19 nt, Homo sapiens
  misc_RNA (1)...(19): siRNA sense strand
aaacuucugggaacauuaa

SEQ ID NO: 973930 - RNA, 19 nt, Homo sapiens
  misc_RNA (1)...(19): siRNA sense strand
ucagugauaccuugaagaa

SEQ ID NO: 973931 - RNA, 19 nt, Homo sapiens
  misc_RNA (1)...(19): siRNA sense strand
uggaauacuucagcuguuu

SEQ ID NO: 973932 - RNA, 19 nt, Homo sapiens
  misc_RNA (1)...(19): siRNA sense strand
ggauuuggcuuuucuagau

SEQ ID NO: 973933 - RNA, 19 nt, Homo sapiens
  misc_RNA (1)...(19): siRNA sense strand
gacugaggauaguuuagaa

SEQ ID NO: 973934 - RNA, 19 nt, Homo sapiens
  misc_RNA (1)...(19): siRNA sense strand
gcccuuauacgacacagua

SEQ ID NO: 973935 - RNA, 19 nt, Homo sapiens
  misc_RNA (1)...(19): siRNA sense strand
guauucauaugguagacaa

SEQ ID NO: 973936 - RNA, 19 nt, Homo sapiens
  misc_RNA (1)...(19): siRNA sense strand
gcaaauuguauucauaugg

SEQ ID NO: 973937 - RNA, 19 nt, Homo sapiens
  misc_RNA (1)...(19): siRNA sense strand
caaauaaccaccagcuaca

SEQ ID NO: 973938 - RNA, 19 nt, Homo sapiens
  misc_RNA (1)...(19): siRNA sense strand
gcucaaaacugguucagau

SEQ ID NO: 973939 - RNA, 19 nt, Homo sapiens
  misc_RNA (1)...(19): siRNA sense strand
augagaagcucuugacugu

SEQ ID NO: 973940 - RNA, 19 nt, Homo sapiens
  misc_RNA (1)...(19): siRNA sense strand
ucaaacuucugggaacauu

SEQ ID NO: 973941 - RNA, 19 nt, Homo sapiens
  misc_RNA (1)...(19): siRNA sense strand
ucuuggaucccaucaaaua

SEQ ID NO: 973942 - RNA, 19 nt, Homo sapiens
  misc_RNA (1)...(19): siRNA sense strand
cugaugaacuauagcaaug

SEQ ID NO: 973943 - RNA, 19 nt, Homo sapiens
  misc_RNA (1)...(19): siRNA sense strand
gaacuauagcaaugagaau

SEQ ID NO: 973944 - RNA, 19 nt, Homo sapiens
  misc_RNA (1)...(19): siRNA sense strand
guggcaugcugaugaacua

SEQ ID NO: 973945 - RNA, 19 nt, Homo sapiens
  misc_RNA (1)...(19): siRNA sense strand
uugaagaagcugaagauaa

SEQ ID NO: 973946 - RNA, 19 nt, Homo sapiens
  misc_RNA (1)...(19): siRNA sense strand
gcagaaugaagcucuuguu

SEQ ID NO: 973947 - RNA, 19 nt, Homo sapiens
  misc_RNA (1)...(19): siRNA sense strand
ggcaacuagugaacaugua

SEQ ID NO: 973948 - RNA, 19 nt, Homo sapiens
  misc_RNA (1)...(19): siRNA sense strand
gaacaguuugccaguacaa

SEQ ID NO: 973949 - RNA, 19 nt, Homo sapiens
  misc_RNA (1)...(19): siRNA sense strand
agaaaugugucuuguugca

SEQ ID NO: 973950 - RNA, 19 nt, Homo sapiens
  misc_RNA (1)...(19): siRNA sense strand
gggcagaagugcaguugac

SEQ ID NO: 973951 - RNA, 19 nt, Homo sapiens
  misc_RNA (1)...(19): siRNA sense strand
ggcaucaagcaucuaguua

SEQ ID NO: 973952 - RNA, 19 nt, Homo sapiens
  misc_RNA (1)...(19): siRNA sense strand
ucagaaaccuggccauucc

SEQ ID NO: 973953 - RNA, 19 nt, Homo sapiens
  misc_RNA (1)...(19): siRNA sense strand
ugccagaaaugaugcaaau

SEQ ID NO: 973954 - RNA, 19 nt, Homo sapiens
  misc_RNA (1)...(19): siRNA sense strand
gcagaaguuauuugaagga

SEQ ID NO: 973955 - RNA, 19 nt, Homo sapiens
  misc_RNA (1)...(19): siRNA sense strand
uuacagaaaugugucuugu

SEQ ID NO: 973956 - RNA, 19 nt, Homo sapiens
  misc_RNA (1)...(19): siRNA sense strand
guaauugaccauuuaaggu

SEQ ID NO: 973957 - RNA, 19 nt, Homo sapiens
  misc_RNA (1)...(19): siRNA sense strand
uguggaugcuggauugauu

SEQ ID NO: 973958 - RNA, 19 nt, Homo sapiens
  misc_RNA (1)...(19): siRNA sense strand
cugaaugucuacacaagga

SEQ ID NO: 973959 - RNA, 19 nt, Homo sapiens
  misc_RNA (1)...(19): siRNA sense strand
gcuccugaaaucaaauaua

SEQ ID NO: 973960 - RNA, 19 nt, Homo sapiens
  misc_RNA (1)...(19): siRNA sense strand
guaauaaugcagaaugaag

SEQ ID NO: 973961 - RNA, 19 nt, Homo sapiens
  misc_RNA (1)...(19): siRNA sense strand
aggaaaagguaguguauuu

SEQ ID NO: 973962 - RNA, 19 nt, Homo sapiens
  misc_RNA (1)...(19): siRNA sense strand
ugauauuacugagcucaaa

SEQ ID NO: 973963 - RNA, 19 nt, Homo sapiens
  misc_RNA (1)...(19): siRNA sense strand
gaugaacuauagcaaugag

SEQ ID NO: 973964 - RNA, 19 nt, Homo sapiens
  misc_RNA (1)...(19): siRNA sense strand
caaaggguacucucuugga

SEQ ID NO: 973965 - RNA, 19 nt, Homo sapiens
  misc_RNA (1)...(19): siRNA sense strand
gcugagaaagaucuagaaa

SEQ ID NO: 973966 - RNA, 19 nt, Homo sapiens
  misc_RNA (1)...(19): siRNA sense strand
ggcauuaauagcagcuuua

SEQ ID NO: 973967 - RNA, 19 nt, Homo sapiens
  misc_RNA (1)...(19): siRNA sense strand
ucaagcaucuaguuaccau

SEQ ID NO: 973968 - RNA, 19 nt, Homo sapiens
  misc_RNA (1)...(19): siRNA sense strand
uuaaguuaguggagcguuu

SEQ ID NO: 973969 - RNA, 19 nt, Homo sapiens
  misc_RNA (1)...(19): siRNA sense strand
uauccaaacuucgcaguca

SEQ ID NO: 973970 - RNA, 19 nt, Homo sapiens
  misc_RNA (1)...(19): siRNA sense strand
cuacuucucugacaacauc

SEQ ID NO: 973971 - RNA, 19 nt, Homo sapiens
  misc_RNA (1)...(19): siRNA sense strand
gacgugcuguucaaaguug

SEQ ID NO: 973972 - RNA, 19 nt, Homo sapiens
  misc_RNA (1)...(19): siRNA sense strand
ggacucaggcuacuucucu

SEQ ID NO: 973973 - RNA, 19 nt, Homo sapiens
  misc_RNA (1)...(19): siRNA sense strand
gggaugggagcuacaguuu

SEQ ID NO: 973974 - RNA, 19 nt, Homo sapiens
  misc_RNA (1)...(19): siRNA sense strand
ugaagaaccggaugcaguu

SEQ ID NO: 973975 - RNA, 19 nt, Homo sapiens
  misc_RNA (1)...(19): siRNA sense strand
cagaacaugcggaugauug

SEQ ID NO: 973976 - RNA, 19 nt, Homo sapiens
  misc_RNA (1)...(19): siRNA sense strand
ucuauaccgugcuguuuga

SEQ ID NO: 973977 - RNA, 19 nt, Homo sapiens
  misc_RNA (1)...(19): siRNA sense strand
ggacgugcuguucaaaguu

SEQ ID NO: 973978 - RNA, 19 nt, Homo sapiens
  misc_RNA (1)...(19): siRNA sense strand
ggaagccggaauacaagaa

SEQ ID NO: 973979 - RNA, 19 nt, Homo sapiens
  misc_RNA (1)...(19): siRNA sense strand
ccagcgccguggcuacaaa

SEQ ID NO: 973980 - RNA, 19 nt, Homo sapiens
  misc_RNA (1)...(19): siRNA sense strand
caacaucuugugccacuuc

SEQ ID NO: 973981 - RNA, 19 nt, Homo sapiens
  misc_RNA (1)...(19): siRNA sense strand
gggaacaccagccgaagug

SEQ ID NO: 973982 - RNA, 19 nt, Homo sapiens
  misc_RNA (1)...(19): siRNA sense strand
cccuggaccuggugaagaa

SEQ ID NO: 973983 - RNA, 19 nt, Homo sapiens
  misc_RNA (1)...(19): siRNA sense strand
ccaauccaagcaguucuua

SEQ ID NO: 973984 - RNA, 19 nt, Homo sapiens
  misc_RNA (1)...(19): siRNA sense strand
uuaacgcccugauucgaau

SEQ ID NO: 973985 - RNA, 19 nt, Homo sapiens
  misc_RNA (1)...(19): siRNA sense strand
uccaugcccucaccaguau

SEQ ID NO: 973986 - RNA, 19 nt, Homo sapiens
  misc_RNA (1)...(19): siRNA sense strand
gaagaaccggaugcaguug

SEQ ID NO: 973987 - RNA, 19 nt, Homo sapiens
  misc_RNA (1)...(19): siRNA sense strand
caucuauaccgugcuguuu

SEQ ID NO: 973988 - RNA, 19 nt, Homo sapiens
  misc_RNA (1)...(19): siRNA sense strand
gaacaugcggaugauugau

SEQ ID NO: 973989 - RNA, 19 nt, Homo sapiens
  misc_RNA (1)...(19): siRNA sense strand
ccaagacccgaauccagaa

SEQ ID NO: 973990 - RNA, 19 nt, Homo sapiens
  misc_RNA (1)...(19): siRNA sense strand
caggccaccuacaccacua

SEQ ID NO: 973991 - RNA, 19 nt, Homo sapiens
  misc_RNA (1)...(19): siRNA sense strand
gcaucuauaccgugcuguu

SEQ ID NO: 973992 - RNA, 19 nt, Homo sapiens
  misc_RNA (1)...(19): siRNA sense strand
uggacgugcuguucaaagu

SEQ ID NO: 973993 - RNA, 19 nt, Homo sapiens
  misc_RNA (1)...(19): siRNA sense strand
ucaaaguuguccgcuacga

SEQ ID NO: 973994 - RNA, 19 nt, Homo sapiens
  misc_RNA (1)...(19): siRNA sense strand
caucuugugccacuucugu

SEQ ID NO: 973995 - RNA, 19 nt, Homo sapiens
  misc_RNA (1)...(19): siRNA sense strand
gaugaacaaggccuacaag

SEQ ID NO: 973996 - RNA, 19 nt, Homo sapiens
  misc_RNA (1)...(19): siRNA sense strand
ucaccuucaucuucuugga

SEQ ID NO: 973997 - RNA, 19 nt, Homo sapiens
  misc_RNA (1)...(19): siRNA sense strand
guccucaccuucaucuucu

SEQ ID NO: 973998 - RNA, 19 nt, Homo sapiens
  misc_RNA (1)...(19): siRNA sense strand
agaacaugcggaugauuga

SEQ ID NO: 973999 - RNA, 19 nt, Homo sapiens
  misc_RNA (1)...(19): siRNA sense strand
caggcuacuucucugacaa

SEQ ID NO: 974000 - RNA, 19 nt, Homo sapiens
  misc_RNA (1)...(19): siRNA sense strand
gggaagccggaauacaaga

SEQ ID NO: 974001 - RNA, 19 nt, Homo sapiens
  misc_RNA (1)...(19): siRNA sense strand
ggcuggacgugcuguucaa

SEQ ID NO: 974002 - RNA, 19 nt, Homo sapiens
  misc_RNA (1)...(19): siRNA sense strand
gggcuggacgugcuguuca

SEQ ID NO: 974003 - RNA, 19 nt, Homo sapiens
  misc_RNA (1)...(19): siRNA sense strand
gggcuucacgccguacuau

SEQ ID NO: 974004 - RNA, 19 nt, Homo sapiens
  misc_RNA (1)...(19): siRNA sense strand
acaaggagaugguuucuga

SEQ ID NO: 974005 - RNA, 19 nt, Homo sapiens
  misc_RNA (1)...(19): siRNA sense strand
gaaagugacaucauccauu

SEQ ID NO: 974006 - RNA, 19 nt, Homo sapiens
  misc_RNA (1)...(19): siRNA sense strand
gcaacgcgauaccugcuaa

SEQ ID NO: 974007 - RNA, 19 nt, Homo sapiens
  misc_RNA (1)...(19): siRNA sense strand
ggacauagagaaagagaug

SEQ ID NO: 974008 - RNA, 19 nt, Homo sapiens
  misc_RNA (1)...(19): siRNA sense strand
ggagaugguuucugaguac

SEQ ID NO: 974009 - RNA, 19 nt, Homo sapiens
  misc_RNA (1)...(19): siRNA sense strand
aaagugacaucauccauuc

SEQ ID NO: 974010 - RNA, 19 nt, Homo sapiens
  misc_RNA (1)...(19): siRNA sense strand
gcaucaaguucuccaagga

SEQ ID NO: 974011 - RNA, 19 nt, Homo sapiens
  misc_RNA (1)...(19): siRNA sense strand
gcaucuauguguccaaagu

SEQ ID NO: 974012 - RNA, 19 nt, Homo sapiens
  misc_RNA (1)...(19): siRNA sense strand
ggagaauggcaucaaggua

SEQ ID NO: 974013 - RNA, 19 nt, Homo sapiens
  misc_RNA (1)...(19): siRNA sense strand
gggcaucuauguguccaaa

SEQ ID NO: 974014 - RNA, 19 nt, Homo sapiens
  misc_RNA (1)...(19): siRNA sense strand
cgcgauaccugcuaaggaa

SEQ ID NO: 974015 - RNA, 19 nt, Homo sapiens
  misc_RNA (1)...(19): siRNA sense strand
ccaagacgcugaugaaccu

SEQ ID NO: 974016 - RNA, 19 nt, Homo sapiens
  misc_RNA (1)...(19): siRNA sense strand
gacaccagcucagaagaug

SEQ ID NO: 974017 - RNA, 19 nt, Homo sapiens
  misc_RNA (1)...(19): siRNA sense strand
ggagaagugcgguucaaca

SEQ ID NO: 974018 - RNA, 19 nt, Homo sapiens
  misc_RNA (1)...(19): siRNA sense strand
gaagccaacagugaugaaa

SEQ ID NO: 974019 - RNA, 19 nt, Homo sapiens
  misc_RNA (1)...(19): siRNA sense strand
gcuccaagacgcugaugaa

SEQ ID NO: 974020 - RNA, 19 nt, Homo sapiens
  misc_RNA (1)...(19): siRNA sense strand
agagcuaucugaccuugug

SEQ ID NO: 974021 - RNA, 19 nt, Homo sapiens
  misc_RNA (1)...(19): siRNA sense strand
ggacgcgucauccucauca

SEQ ID NO: 974022 - RNA, 19 nt, Homo sapiens
  misc_RNA (1)...(19): siRNA sense strand
agccaacggugucagguuu

SEQ ID NO: 974023 - RNA, 19 nt, Homo sapiens
  misc_RNA (1)...(19): siRNA sense strand
aggagaugguuucugagua

SEQ ID NO: 974024 - RNA, 19 nt, Homo sapiens
  misc_RNA (1)...(19): siRNA sense strand
ccaacggugucagguuuga

SEQ ID NO: 974025 - RNA, 19 nt, Homo sapiens
  misc_RNA (1)...(19): siRNA sense strand
gagcauggccugggcaucu

SEQ ID NO: 974026 - RNA, 19 nt, Homo sapiens
  misc_RNA (1)...(19): siRNA sense strand
gagaagcagcagcggaaga

SEQ ID NO: 974027 - RNA, 19 nt, Homo sapiens
  misc_RNA (1)...(19): siRNA sense strand
cgaggagaauggcaucaag

SEQ ID NO: 974028 - RNA, 19 nt, Homo sapiens
  misc_RNA (1)...(19): siRNA sense strand
gcugaugaaccucuucuuc

SEQ ID NO: 974029 - RNA, 19 nt, Homo sapiens
  misc_RNA (1)...(19): siRNA sense strand
gcgcaucguccaccuauac

SEQ ID NO: 974030 - RNA, 19 nt, Homo sapiens
  misc_RNA (1)...(19): siRNA sense strand
gccuggacauagagaaaga

SEQ ID NO: 974031 - RNA, 19 nt, Homo sapiens
  misc_RNA (1)...(19): siRNA sense strand
gggcaucuucgucagcaaa

SEQ ID NO: 974032 - RNA, 19 nt, Homo sapiens
  misc_RNA (1)...(19): siRNA sense strand
gccgguauccugccuacaa

SEQ ID NO: 974033 - RNA, 19 nt, Homo sapiens
  misc_RNA (1)...(19): siRNA sense strand
gggccaaacgcacaucaug

SEQ ID NO: 974034 - RNA, 19 nt, Homo sapiens
  misc_RNA (1)...(19): siRNA sense strand
caucgaagccaacagugau

SEQ ID NO: 974035 - RNA, 19 nt, Homo sapiens
  misc_RNA (1)...(19): siRNA sense strand
ccaacagugaugaaaguga

SEQ ID NO: 974036 - RNA, 19 nt, Homo sapiens
  misc_RNA (1)...(19): siRNA sense strand
gcagagaggccuggacacu

SEQ ID NO: 974037 - RNA, 19 nt, Homo sapiens
  misc_RNA (1)...(19): siRNA sense strand
guggagaagugcgguucaa

SEQ ID NO: 974038 - RNA, 19 nt, Homo sapiens
  misc_RNA (1)...(19): siRNA sense strand
cgacaccagcucagaagau

SEQ ID NO: 974039 - RNA, 19 nt, Homo sapiens
  misc_RNA (1)...(19): siRNA sense strand
ggguggauguggugaaucg

SEQ ID NO: 974040 - RNA, 19 nt, Homo sapiens
  misc_RNA (1)...(19): siRNA sense strand
ccaccuaggcagcgacuca

SEQ ID NO: 974041 - RNA, 19 nt, Homo sapiens
  misc_RNA (1)...(19): siRNA sense strand
ggccugggcaucuaugugu

SEQ ID NO: 974042 - RNA, 19 nt, Homo sapiens
  misc_RNA (1)...(19): siRNA sense strand
agaagcagcagcggaagaa

SEQ ID NO: 974043 - RNA, 19 nt, Homo sapiens
  misc_RNA (1)...(19): siRNA sense strand
ccaucgaagccaacaguga

SEQ ID NO: 974044 - RNA, 19 nt, Homo sapiens
  misc_RNA (1)...(19): siRNA sense strand
gagaagugcgguucaacac

SEQ ID NO: 974045 - RNA, 19 nt, Homo sapiens
  misc_RNA (1)...(19): siRNA sense strand
agccaacagugaugaaagu

SEQ ID NO: 974046 - RNA, 19 nt, Homo sapiens
  misc_RNA (1)...(19): siRNA sense strand
guggguggauguggugaau

SEQ ID NO: 974047 - RNA, 19 nt, Homo sapiens
  misc_RNA (1)...(19): siRNA sense strand
cacaaccuccgacgacuuc

SEQ ID NO: 974048 - RNA, 19 nt, Homo sapiens
  misc_RNA (1)...(19): siRNA sense strand
gaaggugaccgcuuucauc

SEQ ID NO: 974049 - RNA, 19 nt, Homo sapiens
  misc_RNA (1)...(19): siRNA sense strand
gcacgugcccucuguguca

SEQ ID NO: 974050 - RNA, 19 nt, Homo sapiens
  misc_RNA (1)...(19): siRNA sense strand
uaccaagaauuacgucuga

SEQ ID NO: 974051 - RNA, 19 nt, Homo sapiens
  misc_RNA (1)...(19): siRNA sense strand
uguggaaggugaccgcuuu

SEQ ID NO: 974052 - RNA, 19 nt, Homo sapiens
  misc_RNA (1)...(19): siRNA sense strand
ccucugggauugucuuugu

SEQ ID NO: 974053 - RNA, 19 nt, Homo sapiens
  misc_RNA (1)...(19): siRNA sense strand
gggauugucuuugucaucu

SEQ ID NO: 974054 - RNA, 19 nt, Homo sapiens
  misc_RNA (1)...(19): siRNA sense strand
ugaguacccuaccaagaau

SEQ ID NO: 974055 - RNA, 19 nt, Homo sapiens
  misc_RNA (1)...(19): siRNA sense strand
gugcucaccucugggauug

SEQ ID NO: 974056 - RNA, 19 nt, Homo sapiens
  misc_RNA (1)...(19): siRNA sense strand
gauugucuuugucaucuca

SEQ ID NO: 974057 - RNA, 19 nt, Homo sapiens
  misc_RNA (1)...(19): siRNA sense strand
cugaguacccuaccaagaa

SEQ ID NO: 974058 - RNA, 19 nt, Homo sapiens
  misc_RNA (1)...(19): siRNA sense strand
ccaaguguaccaccugugu

SEQ ID NO: 974059 - RNA, 19 nt, Homo sapiens
  misc_RNA (1)...(19): siRNA sense strand
ggaaggugaccgcuuucau

SEQ ID NO: 974060 - RNA, 19 nt, Homo sapiens
  misc_RNA (1)...(19): siRNA sense strand
gcucaccucugggauuguc

SEQ ID NO: 974061 - RNA, 19 nt, Homo sapiens
  misc_RNA (1)...(19): siRNA sense strand
ugucaucgcccuccuugug

SEQ ID NO: 974062 - RNA, 19 nt, Homo sapiens
  misc_RNA (1)...(19): siRNA sense strand
cugcugggcugggugaaug

SEQ ID NO: 974063 - RNA, 19 nt, Homo sapiens
  misc_RNA (1)...(19): siRNA sense strand
aguacccuaccaagaauua

SEQ ID NO: 974064 - RNA, 19 nt, Homo sapiens
  misc_RNA (1)...(19): siRNA sense strand
ugggagggccuguggaugu

SEQ ID NO: 974065 - RNA, 19 nt, Homo sapiens
  misc_RNA (1)...(19): siRNA sense strand
cagaagcacucgcucuuua

SEQ ID NO: 974066 - RNA, 19 nt, Homo sapiens
  misc_RNA (1)...(19): siRNA sense strand
gagaucggcuucggcaauu

SEQ ID NO: 974067 - RNA, 19 nt, Homo sapiens
  misc_RNA (1)...(19): siRNA sense strand
aagccaacauccucacuaa

SEQ ID NO: 974068 - RNA, 19 nt, Homo sapiens
  misc_RNA (1)...(19): siRNA sense strand
ggagaucggcuucggcaau

SEQ ID NO: 974069 - RNA, 19 nt, Homo sapiens
  misc_RNA (1)...(19): siRNA sense strand
gccaacauccucacuaaca

SEQ ID NO: 974070 - RNA, 19 nt, Homo sapiens
  misc_RNA (1)...(19): siRNA sense strand
guacagccacuacgugcuu

SEQ ID NO: 974071 - RNA, 19 nt, Homo sapiens
  misc_RNA (1)...(19): siRNA sense strand
acacugugcucucgaaacu

SEQ ID NO: 974072 - RNA, 19 nt, Homo sapiens
  misc_RNA (1)...(19): siRNA sense strand
caacauccucacuaacaga

SEQ ID NO: 974073 - RNA, 19 nt, Homo sapiens
  misc_RNA (1)...(19): siRNA sense strand
ggacauguacagccacuac

SEQ ID NO: 974074 - RNA, 19 nt, Homo sapiens
  misc_RNA (1)...(19): siRNA sense strand
ccagaagcacucgcucuuu

SEQ ID NO: 974075 - RNA, 19 nt, Homo sapiens
  misc_RNA (1)...(19): siRNA sense strand
gcgaagaagaccuggaaca

SEQ ID NO: 974076 - RNA, 19 nt, Homo sapiens
  misc_RNA (1)...(19): siRNA sense strand
agaagcacucgcucuuuaa

SEQ ID NO: 974077 - RNA, 19 nt, Homo sapiens
  misc_RNA (1)...(19): siRNA sense strand
cauccucacuaacagauac

SEQ ID NO: 974078 - RNA, 19 nt, Homo sapiens
  misc_RNA (1)...(19): siRNA sense strand
ccaacauccucacuaacag

SEQ ID NO: 974079 - RNA, 19 nt, Homo sapiens
  misc_RNA (1)...(19): siRNA sense strand
gccacuacgugcuucucaa

SEQ ID NO: 974080 - RNA, 19 nt, Homo sapiens
  misc_RNA (1)...(19): siRNA sense strand
gaagcacucgcucuuuaac

SEQ ID NO: 974081 - RNA, 19 nt, Homo sapiens
  misc_RNA (1)...(19): siRNA sense strand
acugugcucucgaaacuca

SEQ ID NO: 974082 - RNA, 19 nt, Homo sapiens
  misc_RNA (1)...(19): siRNA sense strand
ucaaguccauccgcaacga

SEQ ID NO: 974083 - RNA, 19 nt, Homo sapiens
  misc_RNA (1)...(19): siRNA sense strand
cggcgaagaagaccuggaa

SEQ ID NO: 974084 - RNA, 19 nt, Homo sapiens
  misc_RNA (1)...(19): siRNA sense strand
aaagccaacauccucacua

SEQ ID NO: 974085 - RNA, 19 nt, Homo sapiens
  misc_RNA (1)...(19): siRNA sense strand
cgaagaagaccuggaacag

SEQ ID NO: 974086 - RNA, 19 nt, Homo sapiens
  misc_RNA (1)...(19): siRNA sense strand
gcucuuuaacgccaugaau

SEQ ID NO: 974087 - RNA, 19 nt, Homo sapiens
  misc_RNA (1)...(19): siRNA sense strand
ucacuaacagauacaagca

SEQ ID NO: 974088 - RNA, 19 nt, Homo sapiens
  misc_RNA (1)...(19): siRNA sense strand
gcgaggagcuucugcauuu

SEQ ID NO: 974089 - RNA, 19 nt, Homo sapiens
  misc_RNA (1)...(19): siRNA sense strand
ggacaaggccucugugaaa

SEQ ID NO: 974090 - RNA, 19 nt, Homo sapiens
  misc_RNA (1)...(19): siRNA sense strand
gggagaagcuggccgagaa

SEQ ID NO: 974091 - RNA, 19 nt, Homo sapiens
  misc_RNA (1)...(19): siRNA sense strand
gaaugcagcuggaagaucu

SEQ ID NO: 974092 - RNA, 19 nt, Homo sapiens
  misc_RNA (1)...(19): siRNA sense strand
gcagauggcugaggacaag

SEQ ID NO: 974093 - RNA, 19 nt, Homo sapiens
  misc_RNA (1)...(19): siRNA sense strand
aacaggaggugaucgauaa

SEQ ID NO: 974094 - RNA, 19 nt, Homo sapiens
  misc_RNA (1)...(19): siRNA sense strand
uggagaagcucgaucugaa

SEQ ID NO: 974095 - RNA, 19 nt, Homo sapiens
  misc_RNA (1)...(19): siRNA sense strand
gcagagggaguacagcaaa

SEQ ID NO: 974096 - RNA, 19 nt, Homo sapiens
  misc_RNA (1)...(19): siRNA sense strand
gcaccugccuucagaacag

SEQ ID NO: 974097 - RNA, 19 nt, Homo sapiens
  misc_RNA (1)...(19): siRNA sense strand
ggaagagccaacuguguga

SEQ ID NO: 974098 - RNA, 19 nt, Homo sapiens
  misc_RNA (1)...(19): siRNA sense strand
gcuggaagaucucaaacag

SEQ ID NO: 974099 - RNA, 19 nt, Homo sapiens
  misc_RNA (1)...(19): siRNA sense strand
aaacaggaggugaucgaua

SEQ ID NO: 974100 - RNA, 19 nt, Homo sapiens
  misc_RNA (1)...(19): siRNA sense strand
ggaaacugguggagagacu

SEQ ID NO: 974101 - RNA, 19 nt, Homo sapiens
  misc_RNA (1)...(19): siRNA sense strand
gagaagcucgaucugaaga

SEQ ID NO: 974102 - RNA, 19 nt, Homo sapiens
  misc_RNA (1)...(19): siRNA sense strand
gacaaggccucugugaaag

SEQ ID NO: 974103 - RNA, 19 nt, Homo sapiens
  misc_RNA (1)...(19): siRNA sense strand
ggcagcagaucaggacgua

SEQ ID NO: 974104 - RNA, 19 nt, Homo sapiens
  misc_RNA (1)...(19): siRNA sense strand
gcuuggaggcugccacuaa

SEQ ID NO: 974105 - RNA, 19 nt, Homo sapiens
  misc_RNA (1)...(19): siRNA sense strand
gcagcuggaagaucucaaa

SEQ ID NO: 974106 - RNA, 19 nt, Homo sapiens
  misc_RNA (1)...(19): siRNA sense strand
uggagcaccugaagagaug

SEQ ID NO: 974107 - RNA, 19 nt, Homo sapiens
  misc_RNA (1)...(19): siRNA sense strand
gaggaaugcagcuggaaga

SEQ ID NO: 974108 - RNA, 19 nt, Homo sapiens
  misc_RNA (1)...(19): siRNA sense strand
gaauacgacaaccacauca

SEQ ID NO: 974109 - RNA, 19 nt, Homo sapiens
  misc_RNA (1)...(19): siRNA sense strand
gaaucaagagcuccgagau

SEQ ID NO: 974110 - RNA, 19 nt, Homo sapiens
  misc_RNA (1)...(19): siRNA sense strand
cggcagagcaaccagauuc

SEQ ID NO: 974111 - RNA, 19 nt, Homo sapiens
  misc_RNA (1)...(19): siRNA sense strand
ggaucgaggacaugaggaa

SEQ ID NO: 974112 - RNA, 19 nt, Homo sapiens
  misc_RNA (1)...(19): siRNA sense strand
gaagcuggccgagaagaag

SEQ ID NO: 974113 - RNA, 19 nt, Homo sapiens
  misc_RNA (1)...(19): siRNA sense strand
ggagaagcucgaucugaag

SEQ ID NO: 974114 - RNA, 19 nt, Homo sapiens
  misc_RNA (1)...(19): siRNA sense strand
gggaguacagcaaacugaa

SEQ ID NO: 974115 - RNA, 19 nt, Homo sapiens
  misc_RNA (1)...(19): siRNA sense strand
ccaaacaggaggugaucga

SEQ ID NO: 974116 - RNA, 19 nt, Homo sapiens
  misc_RNA (1)...(19): siRNA sense strand
ugaaggcccaggcggauau

SEQ ID NO: 974117 - RNA, 19 nt, Homo sapiens
  misc_RNA (1)...(19): siRNA sense strand
ggaaugcagcuggaagauc

SEQ ID NO: 974118 - RNA, 19 nt, Homo sapiens
  misc_RNA (1)...(19): siRNA sense strand
ucauggagugcauugagua

SEQ ID NO: 974119 - RNA, 19 nt, Homo sapiens
  misc_RNA (1)...(19): siRNA sense strand
ggugaucgauaagcugaag

SEQ ID NO: 974120 - RNA, 19 nt, Homo sapiens
  misc_RNA (1)...(19): siRNA sense strand
ggaggcugccacuaaggaa

SEQ ID NO: 974121 - RNA, 19 nt, Homo sapiens
  misc_RNA (1)...(19): siRNA sense strand
aauaggcaccucuggaaga

SEQ ID NO: 974122 - RNA, 19 nt, Homo sapiens
  misc_RNA (1)...(19): siRNA sense strand
uauggacacccugcagaua

SEQ ID NO: 974123 - RNA, 19 nt, Homo sapiens
  misc_RNA (1)...(19): siRNA sense strand
ggacguacugggcgaagag

SEQ ID NO: 974124 - RNA, 19 nt, Homo sapiens
  misc_RNA (1)...(19): siRNA sense strand
ccaggcggauaucuacaag

SEQ ID NO: 974125 - RNA, 19 nt, Homo sapiens
  misc_RNA (1)...(19): siRNA sense strand
ggaguacagcaaacugaag

SEQ ID NO: 974126 - RNA, 19 nt, Homo sapiens
  misc_RNA (1)...(19): siRNA sense strand
agagggaggagaaggaguu

SEQ ID NO: 974127 - RNA, 19 nt, Homo sapiens
  misc_RNA (1)...(19): siRNA sense strand
ccgaggagccaccugacuu

SEQ ID NO: 974128 - RNA, 19 nt, Homo sapiens
  misc_RNA (1)...(19): siRNA sense strand
gagaagcuggccgagaaga

SEQ ID NO: 974129 - RNA, 19 nt, Homo sapiens
  misc_RNA (1)...(19): siRNA sense strand
aaucaagagcuccgagaug

SEQ ID NO: 974130 - RNA, 19 nt, Homo sapiens
  misc_RNA (1)...(19): siRNA sense strand
gucauggagugcauugagu

SEQ ID NO: 974131 - RNA, 19 nt, Homo sapiens
  misc_RNA (1)...(19): siRNA sense strand
cgaggagccaccugacuuc

SEQ ID NO: 974132 - RNA, 19 nt, Homo sapiens
  misc_RNA (1)...(19): siRNA sense strand
gagccaacugugugagaug

SEQ ID NO: 974133 - RNA, 19 nt, Homo sapiens
  misc_RNA (1)...(19): siRNA sense strand
guggagcaccugaagagau

SEQ ID NO: 974134 - RNA, 19 nt, Homo sapiens
  misc_RNA (1)...(19): siRNA sense strand
cgaggagcuucugcauuuc

SEQ ID NO: 974135 - RNA, 19 nt, Homo sapiens
  misc_RNA (1)...(19): siRNA sense strand
uggacacccugcagauaca

SEQ ID NO: 974136 - RNA, 19 nt, Homo sapiens
  misc_RNA (1)...(19): siRNA sense strand
agaaagggaucaugaacua

SEQ ID NO: 974137 - RNA, 19 nt, Homo sapiens
  misc_RNA (1)...(19): siRNA sense strand
cagaagccguucauuagaa

SEQ ID NO: 974138 - RNA, 19 nt, Homo sapiens
  misc_RNA (1)...(19): siRNA sense strand
caccagaagccguucauua

SEQ ID NO: 974139 - RNA, 19 nt, Homo sapiens
  misc_RNA (1)...(19): siRNA sense strand
ggucaacccuaccuuagug

SEQ ID NO: 974140 - RNA, 19 nt, Homo sapiens
  misc_RNA (1)...(19): siRNA sense strand
uuacuacccuuccaaaugu

SEQ ID NO: 974141 - RNA, 19 nt, Homo sapiens
  misc_RNA (1)...(19): siRNA sense strand
uaacacaagcucuucugua

SEQ ID NO: 974142 - RNA, 19 nt, Homo sapiens
  misc_RNA (1)...(19): siRNA sense strand
caacccaaauuccaucugu

SEQ ID NO: 974143 - RNA, 19 nt, Homo sapiens
  misc_RNA (1)...(19): siRNA sense strand
ugaagaaucuacuaaacag

SEQ ID NO: 974144 - RNA, 19 nt, Homo sapiens
  misc_RNA (1)...(19): siRNA sense strand
gcaccugacacuucugaaa

SEQ ID NO: 974145 - RNA, 19 nt, Homo sapiens
  misc_RNA (1)...(19): siRNA sense strand
caccuaaacauccagauaa

SEQ ID NO: 974146 - RNA, 19 nt, Homo sapiens
  misc_RNA (1)...(19): siRNA sense strand
uuacuucggucacuacuca

SEQ ID NO: 974147 - RNA, 19 nt, Homo sapiens
  misc_RNA (1)...(19): siRNA sense strand
gaccacagcugccccaauu

SEQ ID NO: 974148 - RNA, 19 nt, Homo sapiens
  misc_RNA (1)...(19): siRNA sense strand
caaauuccaucugugacuu

SEQ ID NO: 974149 - RNA, 19 nt, Homo sapiens
  misc_RNA (1)...(19): siRNA sense strand
cagaaggcaucaucaccaa

SEQ ID NO: 974150 - RNA, 19 nt, Homo sapiens
  misc_RNA (1)...(19): siRNA sense strand
gagaaaauguuaacacaag

SEQ ID NO: 974151 - RNA, 19 nt, Homo sapiens
  misc_RNA (1)...(19): siRNA sense strand
gaaggcaucaucaccaauc

SEQ ID NO: 974152 - RNA, 19 nt, Homo sapiens
  misc_RNA (1)...(19): siRNA sense strand
ccaccuaaacauccagaua

SEQ ID NO: 974153 - RNA, 19 nt, Homo sapiens
  misc_RNA (1)...(19): siRNA sense strand
cuauaaaugucugcacaaa

SEQ ID NO: 974154 - RNA, 19 nt, Homo sapiens
  misc_RNA (1)...(19): siRNA sense strand
agaagccguucauuagaaa

SEQ ID NO: 974155 - RNA, 19 nt, Homo sapiens
  misc_RNA (1)...(19): siRNA sense strand
cccaucagcuuccaccaaa

SEQ ID NO: 974156 - RNA, 19 nt, Homo sapiens
  misc_RNA (1)...(19): siRNA sense strand
gaucaugaacuacgucaca

SEQ ID NO: 974157 - RNA, 19 nt, Homo sapiens
  misc_RNA (1)...(19): siRNA sense strand
caucaccaaucacccaaau

SEQ ID NO: 974158 - RNA, 19 nt, Homo sapiens
  misc_RNA (1)...(19): siRNA sense strand
aacacaagcucuucuguag

SEQ ID NO: 974159 - RNA, 19 nt, Homo sapiens
  misc_RNA (1)...(19): siRNA sense strand
ccagaaugccaccaccaua

SEQ ID NO: 974160 - RNA, 19 nt, Homo sapiens
  misc_RNA (1)...(19): siRNA sense strand
ccagaagccguucauuaga

SEQ ID NO: 974161 - RNA, 19 nt, Homo sapiens
  misc_RNA (1)...(19): siRNA sense strand
gaagaaucuacuaaacaga

SEQ ID NO: 974162 - RNA, 19 nt, Homo sapiens
  misc_RNA (1)...(19): siRNA sense strand
cagaaugccaccaccauau

SEQ ID NO: 974163 - RNA, 19 nt, Homo sapiens
  misc_RNA (1)...(19): siRNA sense strand
gaaaguccuauaaaugucu

SEQ ID NO: 974164 - RNA, 19 nt, Homo sapiens
  misc_RNA (1)...(19): siRNA sense strand
cagaauuauugacgacaug

SEQ ID NO: 974165 - RNA, 19 nt, Homo sapiens
  misc_RNA (1)...(19): siRNA sense strand
auaaaugucugcacaaacg

SEQ ID NO: 974166 - RNA, 19 nt, Homo sapiens
  misc_RNA (1)...(19): siRNA sense strand
uacacaagcuccaccaucu

SEQ ID NO: 974167 - RNA, 19 nt, Homo sapiens
  misc_RNA (1)...(19): siRNA sense strand
ccacacaccagacuauuac

SEQ ID NO: 974168 - RNA, 19 nt, Homo sapiens
  misc_RNA (1)...(19): siRNA sense strand
agaaaguccuauaaauguc

SEQ ID NO: 974169 - RNA, 19 nt, Homo sapiens
  misc_RNA (1)...(19): siRNA sense strand
gagaaagggaucaugaacu

SEQ ID NO: 974170 - RNA, 19 nt, Homo sapiens
  misc_RNA (1)...(19): siRNA sense strand
cuacuaaacaaccaacuuc

SEQ ID NO: 974171 - RNA, 19 nt, Homo sapiens
  misc_RNA (1)...(19): siRNA sense strand
cagugaaggucgagaaagg

SEQ ID NO: 974172 - RNA, 19 nt, Homo sapiens
  misc_RNA (1)...(19): siRNA sense strand
cuuccaccuucaccuaaua

SEQ ID NO: 974173 - RNA, 19 nt, Homo sapiens
  misc_RNA (1)...(19): siRNA sense strand
cacuuugaauuaccacauu

SEQ ID NO: 974174 - RNA, 19 nt, Homo sapiens
  misc_RNA (1)...(19): siRNA sense strand
uacaccagcuccacuaucu

SEQ ID NO: 974175 - RNA, 19 nt, Homo sapiens
  misc_RNA (1)...(19): siRNA sense strand
uacauuagcaccagugaau

SEQ ID NO: 974176 - RNA, 19 nt, Homo sapiens
  misc_RNA (1)...(19): siRNA sense strand
acauuauccuggacugcua

SEQ ID NO: 974177 - RNA, 19 nt, Homo sapiens
  misc_RNA (1)...(19): siRNA sense strand
caugaacuacgucacagaa

SEQ ID NO: 974178 - RNA, 19 nt, Homo sapiens
  misc_RNA (1)...(19): siRNA sense strand
accuaaacauccagauaaa

SEQ ID NO: 974179 - RNA, 19 nt, Homo sapiens
  misc_RNA (1)...(19): siRNA sense strand
cccacacaccagacuauua

SEQ ID NO: 974180 - RNA, 19 nt, Homo sapiens
  misc_RNA (1)...(19): siRNA sense strand
gcacccacacaccagacua

SEQ ID NO: 974181 - RNA, 19 nt, Homo sapiens
  misc_RNA (1)...(19): siRNA sense strand
ccacaccuccugcaacuac

SEQ ID NO: 974182 - RNA, 19 nt, Homo sapiens
  misc_RNA (1)...(19): siRNA sense strand
ucaccaaucacccaaaucu

SEQ ID NO: 974183 - RNA, 19 nt, Homo sapiens
  misc_RNA (1)...(19): siRNA sense strand
acgacaugguggagcaaua

SEQ ID NO: 974184 - RNA, 19 nt, Homo sapiens
  misc_RNA (1)...(19): siRNA sense strand
cucaaacuacuacuacuaa

SEQ ID NO: 974185 - RNA, 19 nt, Homo sapiens
  misc_RNA (1)...(19): siRNA sense strand
gaaugccaccaccauaucu

SEQ ID NO: 974186 - RNA, 19 nt, Homo sapiens
  misc_RNA (1)...(19): siRNA sense strand
ggucacuacucaaacuacu

SEQ ID NO: 974187 - RNA, 19 nt, Homo sapiens
  misc_RNA (1)...(19): siRNA sense strand
cauuagcaccagugaauuc

SEQ ID NO: 974188 - RNA, 19 nt, Homo sapiens
  misc_RNA (1)...(19): siRNA sense strand
ccaccaccauaucuucaag

SEQ ID NO: 974189 - RNA, 19 nt, Homo sapiens
  misc_RNA (1)...(19): siRNA sense strand
uuaccacaccuaauucuuc

SEQ ID NO: 974190 - RNA, 19 nt, Homo sapiens
  misc_RNA (1)...(19): siRNA sense strand
gcuuccaccuucaccuaau

SEQ ID NO: 974191 - RNA, 19 nt, Homo sapiens
  misc_RNA (1)...(19): siRNA sense strand
caaacuacuacuacuaaac

SEQ ID NO: 974192 - RNA, 19 nt, Homo sapiens
  misc_RNA (1)...(19): siRNA sense strand
acucaaacuacuacuacua

SEQ ID NO: 974193 - RNA, 19 nt, Homo sapiens
  misc_RNA (1)...(19): siRNA sense strand
aaauuacuacccuuccaaa

SEQ ID NO: 974194 - RNA, 19 nt, Homo sapiens
  misc_RNA (1)...(19): siRNA sense strand
acugcuagcucaccagaag

SEQ ID NO: 974195 - RNA, 19 nt, Homo sapiens
  misc_RNA (1)...(19): siRNA sense strand
uacaccagcuccaccaucu

SEQ ID NO: 974196 - RNA, 19 nt, Homo sapiens
  misc_RNA (1)...(19): siRNA sense strand
uacaccagcuccaccaucu

SEQ ID NO: 974197 - RNA, 19 nt, Homo sapiens
  misc_RNA (1)...(19): siRNA sense strand
gucgagaaagggaucauga

SEQ ID NO: 974198 - RNA, 19 nt, Homo sapiens
  misc_RNA (1)...(19): siRNA sense strand
cgacaugguggagcaauag

SEQ ID NO: 974199 - RNA, 19 nt, Homo sapiens
  misc_RNA (1)...(19): siRNA sense strand
acagaauuauugacgacau

SEQ ID NO: 974200 - RNA, 19 nt, Homo sapiens
  misc_RNA (1)...(19): siRNA sense strand
caccagcuccacuaucuuc

SEQ ID NO: 974201 - RNA, 19 nt, Homo sapiens
  misc_RNA (1)...(19): siRNA sense strand
cacaagcuccaccaucuuc

SEQ ID NO: 974202 - RNA, 19 nt, Homo sapiens
  misc_RNA (1)...(19): siRNA sense strand
uguggucaacccuaccuua

SEQ ID NO: 974203 - RNA, 19 nt, Homo sapiens
  misc_RNA (1)...(19): siRNA sense strand
cuacucaaacuacuacuac

SEQ ID NO: 974204 - RNA, 19 nt, Homo sapiens
  misc_RNA (1)...(19): siRNA sense strand
acuauuacuucggucacua

SEQ ID NO: 974205 - RNA, 19 nt, Homo sapiens
  misc_RNA (1)...(19): siRNA sense strand
accagaagccguucauuag

SEQ ID NO: 974206 - RNA, 19 nt, Homo sapiens
  misc_RNA (1)...(19): siRNA sense strand
gcuacaacccaaauuccau

SEQ ID NO: 974207 - RNA, 19 nt, Homo sapiens
  misc_RNA (1)...(19): siRNA sense strand
cgagaaagggaucaugaac

SEQ ID NO: 974208 - RNA, 19 nt, Homo sapiens
  misc_RNA (1)...(19): siRNA sense strand
gaaagggaucaugaacuac

SEQ ID NO: 974209 - RNA, 19 nt, Homo sapiens
  misc_RNA (1)...(19): siRNA sense strand
gcuccuggccaaaauaaaa

SEQ ID NO: 974210 - RNA, 19 nt, Homo sapiens
  misc_RNA (1)...(19): siRNA sense strand
caccagcuccaccaucuuc

SEQ ID NO: 974211 - RNA, 19 nt, Homo sapiens
  misc_RNA (1)...(19): siRNA sense strand
caccagcuccaccaucuuc

SEQ ID NO: 974212 - RNA, 19 nt, Homo sapiens
  misc_RNA (1)...(19): siRNA sense strand
ccuaaaagcuguucacauu

SEQ ID NO: 974213 - RNA, 19 nt, Homo sapiens
  misc_RNA (1)...(19): siRNA sense strand
guugcuggguguauuauuu

SEQ ID NO: 974214 - RNA, 19 nt, Homo sapiens
  misc_RNA (1)...(19): siRNA sense strand
gcaguugcuggguguauua

SEQ ID NO: 974215 - RNA, 19 nt, Homo sapiens
  misc_RNA (1)...(19): siRNA sense strand
ggaaaacuauuaccaaaca

SEQ ID NO: 974216 - RNA, 19 nt, Homo sapiens
  misc_RNA (1)...(19): siRNA sense strand
guacccagcgcucgauuaa

SEQ ID NO: 974217 - RNA, 19 nt, Homo sapiens
  misc_RNA (1)...(19): siRNA sense strand
ucacauuguucaguucauu

SEQ ID NO: 974218 - RNA, 19 nt, Homo sapiens
  misc_RNA (1)...(19): siRNA sense strand
uaaaagcuguucacauugu

SEQ ID NO: 974219 - RNA, 19 nt, Homo sapiens
  misc_RNA (1)...(19): siRNA sense strand
uuauuucacucuugugguu

SEQ ID NO: 974220 - RNA, 19 nt, Homo sapiens
  misc_RNA (1)...(19): siRNA sense strand
acccagcgcucgauuaaca

SEQ ID NO: 974221 - RNA, 19 nt, Homo sapiens
  misc_RNA (1)...(19): siRNA sense strand
guguuacuauguuucacua

SEQ ID NO: 974222 - RNA, 19 nt, Homo sapiens
  misc_RNA (1)...(19): siRNA sense strand
gguguauuauuucacucuu

SEQ ID NO: 974223 - RNA, 19 nt, Homo sapiens
  misc_RNA (1)...(19): siRNA sense strand
guguauuauuucacucuug

SEQ ID NO: 974224 - RNA, 19 nt, Homo sapiens
  misc_RNA (1)...(19): siRNA sense strand
cauaugaucuccuaaaagc

SEQ ID NO: 974225 - RNA, 19 nt, Homo sapiens
  misc_RNA (1)...(19): siRNA sense strand
gcgcucgauuaacaaaaua

SEQ ID NO: 974226 - RNA, 19 nt, Homo sapiens
  misc_RNA (1)...(19): siRNA sense strand
ugggaaaacuauuaccaaa

SEQ ID NO: 974227 - RNA, 19 nt, Homo sapiens
  misc_RNA (1)...(19): siRNA sense strand
cacauuguucaguucauuu

SEQ ID NO: 974228 - RNA, 19 nt, Homo sapiens
  misc_RNA (1)...(19): siRNA sense strand
ccuaaaagcuguucacauu

SEQ ID NO: 974229 - RNA, 19 nt, Homo sapiens
  misc_RNA (1)...(19): siRNA sense strand
ggaaaacuauuaccaaaca

SEQ ID NO: 974230 - RNA, 19 nt, Homo sapiens
  misc_RNA (1)...(19): siRNA sense strand
guacccagcgcucgauuaa

SEQ ID NO: 974231 - RNA, 19 nt, Homo sapiens
  misc_RNA (1)...(19): siRNA sense strand
ucacauuguucaguucauu

SEQ ID NO: 974232 - RNA, 19 nt, Homo sapiens
  misc_RNA (1)...(19): siRNA sense strand
uaaaagcuguucacauugu

SEQ ID NO: 974233 - RNA, 19 nt, Homo sapiens
  misc_RNA (1)...(19): siRNA sense strand
acccagcgcucgauuaaca

SEQ ID NO: 974234 - RNA, 19 nt, Homo sapiens
  misc_RNA (1)...(19): siRNA sense strand
guguuacuauguuucacua

SEQ ID NO: 974235 - RNA, 19 nt, Homo sapiens
  misc_RNA (1)...(19): siRNA sense strand
cauaugaucuccuaaaagc

SEQ ID NO: 974236 - RNA, 19 nt, Homo sapiens
  misc_RNA (1)...(19): siRNA sense strand
gcgcucgauuaacaaaaua

SEQ ID NO: 974237 - RNA, 19 nt, Homo sapiens
  misc_RNA (1)...(19): siRNA sense strand
ugggaaaacuauuaccaaa

SEQ ID NO: 974238 - RNA, 19 nt, Homo sapiens
  misc_RNA (1)...(19): siRNA sense strand
cacauuguucaguucauuu

SEQ ID NO: 974239 - RNA, 19 nt, Homo sapiens
  misc_RNA (1)...(19): siRNA sense strand
ugaaugagguggugauuga

SEQ ID NO: 974240 - RNA, 19 nt, Homo sapiens
  misc_RNA (1)...(19): siRNA sense strand
gaugagaccuggaguuaca

SEQ ID NO: 974241 - RNA, 19 nt, Homo sapiens
  misc_RNA (1)...(19): siRNA sense strand
cagcauggguguccuuuga

SEQ ID NO: 974242 - RNA, 19 nt, Homo sapiens
  misc_RNA (1)...(19): siRNA sense strand
ggaagcaggccaugcagua

SEQ ID NO: 974243 - RNA, 19 nt, Homo sapiens
  misc_RNA (1)...(19): siRNA sense strand
ccaaagagcguccuuguca

SEQ ID NO: 974244 - RNA, 19 nt, Homo sapiens
  misc_RNA (1)...(19): siRNA sense strand
ccaaguuacucaggugaua

SEQ ID NO: 974245 - RNA, 19 nt, Homo sapiens
  misc_RNA (1)...(19): siRNA sense strand
gcgaugagaccuggaguua

SEQ ID NO: 974246 - RNA, 19 nt, Homo sapiens
  misc_RNA (1)...(19): siRNA sense strand
gaugacauuuccaaucaga

SEQ ID NO: 974247 - RNA, 19 nt, Homo sapiens
  misc_RNA (1)...(19): siRNA sense strand
ggagacagcaucagcauca

SEQ ID NO: 974248 - RNA, 19 nt, Homo sapiens
  misc_RNA (1)...(19): siRNA sense strand
caucauagccacuccuuug

SEQ ID NO: 974249 - RNA, 19 nt, Homo sapiens
  misc_RNA (1)...(19): siRNA sense strand
gaccaugaauaaggaauug

SEQ ID NO: 974250 - RNA, 19 nt, Homo sapiens
  misc_RNA (1)...(19): siRNA sense strand
ugacauuuccaaucagaua

SEQ ID NO: 974251 - RNA, 19 nt, Homo sapiens
  misc_RNA (1)...(19): siRNA sense strand
ggaagaagcaagcccacuu

SEQ ID NO: 974252 - RNA, 19 nt, Homo sapiens
  misc_RNA (1)...(19): siRNA sense strand
ggacggaagagacaagaga

SEQ ID NO: 974253 - RNA, 19 nt, Homo sapiens
  misc_RNA (1)...(19): siRNA sense strand
gcauggguguccuuugaug

SEQ ID NO: 974254 - RNA, 19 nt, Homo sapiens
  misc_RNA (1)...(19): siRNA sense strand
cgccagcgaugaaagcuuu

SEQ ID NO: 974255 - RNA, 19 nt, Homo sapiens
  misc_RNA (1)...(19): siRNA sense strand
ccuccuaccuguccaaugu

SEQ ID NO: 974256 - RNA, 19 nt, Homo sapiens
  misc_RNA (1)...(19): siRNA sense strand
ucagauagacuucaucauc

SEQ ID NO: 974257 - RNA, 19 nt, Homo sapiens
  misc_RNA (1)...(19): siRNA sense strand
acaaugggcugggugagaa

SEQ ID NO: 974258 - RNA, 19 nt, Homo sapiens
  misc_RNA (1)...(19): siRNA sense strand
cauagccacuccuuuguca

SEQ ID NO: 974259 - RNA, 19 nt, Homo sapiens
  misc_RNA (1)...(19): siRNA sense strand
gaagacggccgugcacaau

SEQ ID NO: 974260 - RNA, 19 nt, Homo sapiens
  misc_RNA (1)...(19): siRNA sense strand
gggcagugaagaagaaauu

SEQ ID NO: 974261 - RNA, 19 nt, Homo sapiens
  misc_RNA (1)...(19): siRNA sense strand
ccaaucagauagacuucau

SEQ ID NO: 974262 - RNA, 19 nt, Homo sapiens
  misc_RNA (1)...(19): siRNA sense strand
aaaugaccaugaauaagga

SEQ ID NO: 974263 - RNA, 19 nt, Homo sapiens
  misc_RNA (1)...(19): siRNA sense strand
aggagaacaugaucgugua

SEQ ID NO: 974264 - RNA, 19 nt, Homo sapiens
  misc_RNA (1)...(19): siRNA sense strand
guaccuuucgagaagauua

SEQ ID NO: 974265 - RNA, 19 nt, Homo sapiens
  misc_RNA (1)...(19): siRNA sense strand
aaaagaaagugcuagaaga

SEQ ID NO: 974266 - RNA, 19 nt, Homo sapiens
  misc_RNA (1)...(19): siRNA sense strand
gugagcgacugguuugaga

SEQ ID NO: 974267 - RNA, 19 nt, Homo sapiens
  misc_RNA (1)...(19): siRNA sense strand
caaagagcguccuugucau

SEQ ID NO: 974268 - RNA, 19 nt, Homo sapiens
  misc_RNA (1)...(19): siRNA sense strand
guccagacgcggcugcuua

SEQ ID NO: 974269 - RNA, 19 nt, Homo sapiens
  misc_RNA (1)...(19): siRNA sense strand
gacagcaucagcaucacua

SEQ ID NO: 974270 - RNA, 19 nt, Homo sapiens
  misc_RNA (1)...(19): siRNA sense strand
gaaaagaaagugcuagaag

SEQ ID NO: 974271 - RNA, 19 nt, Homo sapiens
  misc_RNA (1)...(19): siRNA sense strand
gagacgggacgcugcugua

SEQ ID NO: 974272 - RNA, 19 nt, Homo sapiens
  misc_RNA (1)...(19): siRNA sense strand
gagaagauuaugaugacau

SEQ ID NO: 974273 - RNA, 19 nt, Homo sapiens
  misc_RNA (1)...(19): siRNA sense strand
cccagugccugcauuggaa

SEQ ID NO: 974274 - RNA, 19 nt, Homo sapiens
  misc_RNA (1)...(19): siRNA sense strand
caugcccggugaccacuuu

SEQ ID NO: 974275 - RNA, 19 nt, Homo sapiens
  misc_RNA (1)...(19): siRNA sense strand
ggaggacacgcucucuuca

SEQ ID NO: 974276 - RNA, 19 nt, Homo sapiens
  misc_RNA (1)...(19): siRNA sense strand
cggcugacguggaacaagu

SEQ ID NO: 974277 - RNA, 19 nt, Homo sapiens
  misc_RNA (1)...(19): siRNA sense strand
aggacacgcucucuucaug

SEQ ID NO: 974278 - RNA, 19 nt, Homo sapiens
  misc_RNA (1)...(19): siRNA sense strand
ucgagaagauuaugaugac

SEQ ID NO: 974279 - RNA, 19 nt, Homo sapiens
  misc_RNA (1)...(19): siRNA sense strand
ggagaacaugaucguguau

SEQ ID NO: 974280 - RNA, 19 nt, Homo sapiens
  misc_RNA (1)...(19): siRNA sense strand
cugcaggccuggacaugga

SEQ ID NO: 974281 - RNA, 19 nt, Homo sapiens
  misc_RNA (1)...(19): siRNA sense strand
agacggccgugcacaaugg

SEQ ID NO: 974282 - RNA, 19 nt, Homo sapiens
  misc_RNA (1)...(19): siRNA sense strand
gcagucgagcugaagauca

SEQ ID NO: 974283 - RNA, 19 nt, Homo sapiens
  misc_RNA (1)...(19): siRNA sense strand
cagucgagcugaagaucau

SEQ ID NO: 974284 - RNA, 19 nt, Homo sapiens
  misc_RNA (1)...(19): siRNA sense strand
gcucugcacgcaccucaug

SEQ ID NO: 974285 - RNA, 19 nt, Homo sapiens
  misc_RNA (1)...(19): siRNA sense strand
ccauucagcuuugagaacu

SEQ ID NO: 974286 - RNA, 19 nt, Homo sapiens
  misc_RNA (1)...(19): siRNA sense strand
ugagcagguuggcacuuug

SEQ ID NO: 974287 - RNA, 19 nt, Homo sapiens
  misc_RNA (1)...(19): siRNA sense strand
gagagaugccagccuacug

SEQ ID NO: 974288 - RNA, 19 nt, Homo sapiens
  misc_RNA (1)...(19): siRNA sense strand
gaucaugcugucaccugaa

SEQ ID NO: 974289 - RNA, 19 nt, Homo sapiens
  misc_RNA (1)...(19): siRNA sense strand
aaagagcguccuugucauc

SEQ ID NO: 974290 - RNA, 19 nt, Homo sapiens
  misc_RNA (1)...(19): siRNA sense strand
gcccagugccugcauugga

SEQ ID NO: 974291 - RNA, 19 nt, Homo sapiens
  misc_RNA (1)...(19): siRNA sense strand
gaagcaaggaacacagcau

SEQ ID NO: 974292 - RNA, 19 nt, Homo sapiens
  misc_RNA (1)...(19): siRNA sense strand
uaugaugacauuuccaauc

SEQ ID NO: 974293 - RNA, 19 nt, Homo sapiens
  misc_RNA (1)...(19): siRNA sense strand
ugaccaugaauaaggaauu

SEQ ID NO: 974294 - RNA, 19 nt, Homo sapiens
  misc_RNA (1)...(19): siRNA sense strand
aaagaaagugcuagaagac

SEQ ID NO: 974295 - RNA, 19 nt, Homo sapiens
  misc_RNA (1)...(19): siRNA sense strand
caugaucguguauguggaa

SEQ ID NO: 974296 - RNA, 19 nt, Homo sapiens
  misc_RNA (1)...(19): siRNA sense strand
gagaacaugaucguguaug

SEQ ID NO: 974297 - RNA, 19 nt, Homo sapiens
  misc_RNA (1)...(19): siRNA sense strand
augagcagguuggcacuuu

SEQ ID NO: 974298 - RNA, 19 nt, Homo sapiens
  misc_RNA (1)...(19): siRNA sense strand
gaagcaggccaugcaguac

SEQ ID NO: 974299 - RNA, 19 nt, Homo sapiens
  misc_RNA (1)...(19): siRNA sense strand
aaucagauagacuucauca

SEQ ID NO: 974300 - RNA, 19 nt, Homo sapiens
  misc_RNA (1)...(19): siRNA sense strand
ccggacaggugcauguucu

SEQ ID NO: 974301 - RNA, 19 nt, Homo sapiens
  misc_RNA (1)...(19): siRNA sense strand
cagguggaaugagcagguu

SEQ ID NO: 974302 - RNA, 19 nt, Homo sapiens
  misc_RNA (1)...(19): siRNA sense strand
gaggacacgcucucuucau

SEQ ID NO: 974303 - RNA, 19 nt, Homo sapiens
  misc_RNA (1)...(19): siRNA sense strand
agaagacggccgugcacaa

SEQ ID NO: 974304 - RNA, 19 nt, Homo sapiens
  misc_RNA (1)...(19): siRNA sense strand
auucagcuuugagaacuuu

SEQ ID NO: 974305 - RNA, 19 nt, Homo sapiens
  misc_RNA (1)...(19): siRNA sense strand
cgagaagauuaugaugaca

SEQ ID NO: 974306 - RNA, 19 nt, Homo sapiens
  misc_RNA (1)...(19): siRNA sense strand
gcagguuggcacuuugcuu

SEQ ID NO: 974307 - RNA, 19 nt, Homo sapiens
  misc_RNA (1)...(19): siRNA sense strand
ggaaaagaaagugcuagaa

SEQ ID NO: 974308 - RNA, 19 nt, Homo sapiens
  misc_RNA (1)...(19): siRNA sense strand
cauuggaacguccggaaga

SEQ ID NO: 974309 - RNA, 19 nt, Homo sapiens
  misc_RNA (1)...(19): siRNA sense strand
ggacauacacugagaguca

SEQ ID NO: 974310 - RNA, 19 nt, Homo sapiens
  misc_RNA (1)...(19): siRNA sense strand
gagagucaguccuccuuaa

SEQ ID NO: 974311 - RNA, 19 nt, Homo sapiens
  misc_RNA (1)...(19): siRNA sense strand
gugacgagcuguacuguga

SEQ ID NO: 974312 - RNA, 19 nt, Homo sapiens
  misc_RNA (1)...(19): siRNA sense strand
ggacagcuccuuggaagug

SEQ ID NO: 974313 - RNA, 19 nt, Homo sapiens
  misc_RNA (1)...(19): siRNA sense strand
gugaggacauacacugaga

SEQ ID NO: 974314 - RNA, 19 nt, Homo sapiens
  misc_RNA (1)...(19): siRNA sense strand
gacgagcuguacugugaga

SEQ ID NO: 974315 - RNA, 19 nt, Homo sapiens
  misc_RNA (1)...(19): siRNA sense strand
ucaagaugcugcaggaaaa

SEQ ID NO: 974316 - RNA, 19 nt, Homo sapiens
  misc_RNA (1)...(19): siRNA sense strand
cuacaccugugccgacugu

SEQ ID NO: 974317 - RNA, 19 nt, Homo sapiens
  misc_RNA (1)...(19): siRNA sense strand
gacauaaucguggccauca

SEQ ID NO: 974318 - RNA, 19 nt, Homo sapiens
  misc_RNA (1)...(19): siRNA sense strand
ugagagucaguccuccuua

SEQ ID NO: 974319 - RNA, 19 nt, Homo sapiens
  misc_RNA (1)...(19): siRNA sense strand
acugugggcugaaccugaa

SEQ ID NO: 974320 - RNA, 19 nt, Homo sapiens
  misc_RNA (1)...(19): siRNA sense strand
ccuggaggcugaggagaga

SEQ ID NO: 974321 - RNA, 19 nt, Homo sapiens
  misc_RNA (1)...(19): siRNA sense strand
gaggacauacacugagagu

SEQ ID NO: 974322 - RNA, 19 nt, Homo sapiens
  misc_RNA (1)...(19): siRNA sense strand
cgacaguccagcuccuuuc

SEQ ID NO: 974323 - RNA, 19 nt, Homo sapiens
  misc_RNA (1)...(19): siRNA sense strand
agucaguccuccuuaaggu

SEQ ID NO: 974324 - RNA, 19 nt, Homo sapiens
  misc_RNA (1)...(19): siRNA sense strand
ggacauacacugagaguca

SEQ ID NO: 974325 - RNA, 19 nt, Homo sapiens
  misc_RNA (1)...(19): siRNA sense strand
gagagucaguccuccuuaa

SEQ ID NO: 974326 - RNA, 19 nt, Homo sapiens
  misc_RNA (1)...(19): siRNA sense strand
ggacagcuccuuggaagug

SEQ ID NO: 974327 - RNA, 19 nt, Homo sapiens
  misc_RNA (1)...(19): siRNA sense strand
gugaggacauacacugaga

SEQ ID NO: 974328 - RNA, 19 nt, Homo sapiens
  misc_RNA (1)...(19): siRNA sense strand
ucaagaugcugcaggaaaa

SEQ ID NO: 974329 - RNA, 19 nt, Homo sapiens
  misc_RNA (1)...(19): siRNA sense strand
cuacaccugugccgacugu

SEQ ID NO: 974330 - RNA, 19 nt, Homo sapiens
  misc_RNA (1)...(19): siRNA sense strand
gacauaaucguggccauca

SEQ ID NO: 974331 - RNA, 19 nt, Homo sapiens
  misc_RNA (1)...(19): siRNA sense strand
ugagagucaguccuccuua

SEQ ID NO: 974332 - RNA, 19 nt, Homo sapiens
  misc_RNA (1)...(19): siRNA sense strand
ccuggaggcugaggagaga

SEQ ID NO: 974333 - RNA, 19 nt, Homo sapiens
  misc_RNA (1)...(19): siRNA sense strand
gaggacauacacugagagu

SEQ ID NO: 974334 - RNA, 19 nt, Homo sapiens
  misc_RNA (1)...(19): siRNA sense strand
cgacaguccagcuccuuuc

SEQ ID NO: 974335 - RNA, 19 nt, Homo sapiens
  misc_RNA (1)...(19): siRNA sense strand
agucaguccuccuuaaggu

SEQ ID NO: 974336 - RNA, 19 nt, Homo sapiens
  misc_RNA (1)...(19): siRNA sense strand
gaagagagaugggcgauau

SEQ ID NO: 974337 - RNA, 19 nt, Homo sapiens
  misc_RNA (1)...(19): siRNA sense strand
aaagaaaucuggagaagug

SEQ ID NO: 974338 - RNA, 19 nt, Homo sapiens
  misc_RNA (1)...(19): siRNA sense strand
gaagcagaaucacuuaugu

SEQ ID NO: 974339 - RNA, 19 nt, Homo sapiens
  misc_RNA (1)...(19): siRNA sense strand
gaaggaagcagaaucacuu

SEQ ID NO: 974340 - RNA, 19 nt, Homo sapiens
  misc_RNA (1)...(19): siRNA sense strand
uaaugaagauccagaagga

SEQ ID NO: 974341 - RNA, 19 nt, Homo sapiens
  misc_RNA (1)...(19): siRNA sense strand
gaaaauguaucugcgauga

SEQ ID NO: 974342 - RNA, 19 nt, Homo sapiens
  misc_RNA (1)...(19): siRNA sense strand
gcacaagccaacuuaugaa

SEQ ID NO: 974343 - RNA, 19 nt, Homo sapiens
  misc_RNA (1)...(19): siRNA sense strand
ggaagcagaaucacuuaug

SEQ ID NO: 974344 - RNA, 19 nt, Homo sapiens
  misc_RNA (1)...(19): siRNA sense strand
gcaacagacaucaaaauua

SEQ ID NO: 974345 - RNA, 19 nt, Homo sapiens
  misc_RNA (1)...(19): siRNA sense strand
gaugaucgaggagguauuu

SEQ ID NO: 974346 - RNA, 19 nt, Homo sapiens
  misc_RNA (1)...(19): siRNA sense strand
ccagcagccuuaaugaaga

SEQ ID NO: 974347 - RNA, 19 nt, Homo sapiens
  misc_RNA (1)...(19): siRNA sense strand
caacagacaucaaaauuac

SEQ ID NO: 974348 - RNA, 19 nt, Homo sapiens
  misc_RNA (1)...(19): siRNA sense strand
gaaaagggcuucgcacaag

SEQ ID NO: 974349 - RNA, 19 nt, Homo sapiens
  misc_RNA (1)...(19): siRNA sense strand
gauuggauguggucuugau

SEQ ID NO: 974350 - RNA, 19 nt, Homo sapiens
  misc_RNA (1)...(19): siRNA sense strand
gaagucucauugucugaag

SEQ ID NO: 974351 - RNA, 19 nt, Homo sapiens
  misc_RNA (1)...(19): siRNA sense strand
ggagguauuugaggcaaca

SEQ ID NO: 974352 - RNA, 19 nt, Homo sapiens
  misc_RNA (1)...(19): siRNA sense strand
ccagaaggaagcagaauca

SEQ ID NO: 974353 - RNA, 19 nt, Homo sapiens
  misc_RNA (1)...(19): siRNA sense strand
uagaggcaaugaagucuca

SEQ ID NO: 974354 - RNA, 19 nt, Homo sapiens
  misc_RNA (1)...(19): siRNA sense strand
aaauguaucugcgaugauc

SEQ ID NO: 974355 - RNA, 19 nt, Homo sapiens
  misc_RNA (1)...(19): siRNA sense strand
gaaguggcuguucugaaga

SEQ ID NO: 974356 - RNA, 19 nt, Homo sapiens
  misc_RNA (1)...(19): siRNA sense strand
caaaagaaaucuggagaag

SEQ ID NO: 974357 - RNA, 19 nt, Homo sapiens
  misc_RNA (1)...(19): siRNA sense strand
ugaggcaacagacaucaaa

SEQ ID NO: 974358 - RNA, 19 nt, Homo sapiens
  misc_RNA (1)...(19): siRNA sense strand
cagcagccuuaaugaagau

SEQ ID NO: 974359 - RNA, 19 nt, Homo sapiens
  misc_RNA (1)...(19): siRNA sense strand
cgcacaagccaacuuauga

SEQ ID NO: 974360 - RNA, 19 nt, Homo sapiens
  misc_RNA (1)...(19): siRNA sense strand
gaucgucugcaaugggaaa

SEQ ID NO: 974361 - RNA, 19 nt, Homo sapiens
  misc_RNA (1)...(19): siRNA sense strand
ugaagaauggagucacuga

SEQ ID NO: 974362 - RNA, 19 nt, Homo sapiens
  misc_RNA (1)...(19): siRNA sense strand
gccaacuuaugaaaacuua

SEQ ID NO: 974363 - RNA, 19 nt, Homo sapiens
  misc_RNA (1)...(19): siRNA sense strand
ucgcaugggcgcugggaua

SEQ ID NO: 974364 - RNA, 19 nt, Homo sapiens
  misc_RNA (1)...(19): siRNA sense strand
uggcuguucugaagagaga

SEQ ID NO: 974365 - RNA, 19 nt, Homo sapiens
  misc_RNA (1)...(19): siRNA sense strand
gccagcagccuuaaugaag

SEQ ID NO: 974366 - RNA, 19 nt, Homo sapiens
  misc_RNA (1)...(19): siRNA sense strand
ggccagcagccuuaaugaa

SEQ ID NO: 974367 - RNA, 19 nt, Homo sapiens
  misc_RNA (1)...(19): siRNA sense strand
cacaagccaacuuaugaaa

SEQ ID NO: 974368 - RNA, 19 nt, Homo sapiens
  misc_RNA (1)...(19): siRNA sense strand
gaguuuagaggcaaugaag

SEQ ID NO: 974369 - RNA, 19 nt, Homo sapiens
  misc_RNA (1)...(19): siRNA sense strand
aggauuggauguggucuug

SEQ ID NO: 974370 - RNA, 19 nt, Homo sapiens
  misc_RNA (1)...(19): siRNA sense strand
aaggaagcagaaucacuua

SEQ ID NO: 974371 - RNA, 19 nt, Homo sapiens
  misc_RNA (1)...(19): siRNA sense strand
gaucgaggagguauuugag

SEQ ID NO: 974372 - RNA, 19 nt, Homo sapiens
  misc_RNA (1)...(19): siRNA sense strand
gauccagaaggaagcagaa

SEQ ID NO: 974373 - RNA, 19 nt, Homo sapiens
  misc_RNA (1)...(19): siRNA sense strand
cuucgcacaagccaacuua

SEQ ID NO: 974374 - RNA, 19 nt, Homo sapiens
  misc_RNA (1)...(19): siRNA sense strand
caagccaacuuaugaaaac

SEQ ID NO: 974375 - RNA, 19 nt, Homo sapiens
  misc_RNA (1)...(19): siRNA sense strand
ugaucgaggagguauuuga

SEQ ID NO: 974376 - RNA, 19 nt, Homo sapiens
  misc_RNA (1)...(19): siRNA sense strand
agaagaguuuagaggcaau

SEQ ID NO: 974377 - RNA, 19 nt, Homo sapiens
  misc_RNA (1)...(19): siRNA sense strand
gaagauccagaaggaagca

SEQ ID NO: 974378 - RNA, 19 nt, Homo sapiens
  misc_RNA (1)...(19): siRNA sense strand
gaagagcugguucuaaaga

SEQ ID NO: 974379 - RNA, 19 nt, Homo sapiens
  misc_RNA (1)...(19): siRNA sense strand
gagcaggauucgauucaga

SEQ ID NO: 974380 - RNA, 19 nt, Homo sapiens
  misc_RNA (1)...(19): siRNA sense strand
gaguucauuugguguagaa

SEQ ID NO: 974381 - RNA, 19 nt, Homo sapiens
  misc_RNA (1)...(19): siRNA sense strand
gaacuucucccugcugucu

SEQ ID NO: 974382 - RNA, 19 nt, Homo sapiens
  misc_RNA (1)...(19): siRNA sense strand
gaccggagcaggauucgau

SEQ ID NO: 974383 - RNA, 19 nt, Homo sapiens
  misc_RNA (1)...(19): siRNA sense strand
ccaacugguuuucuucuuu

SEQ ID NO: 974384 - RNA, 19 nt, Homo sapiens
  misc_RNA (1)...(19): siRNA sense strand
auucagagccaacugguuu

SEQ ID NO: 974385 - RNA, 19 nt, Homo sapiens
  misc_RNA (1)...(19): siRNA sense strand
agagcugguucuaaagaga

SEQ ID NO: 974386 - RNA, 19 nt, Homo sapiens
  misc_RNA (1)...(19): siRNA sense strand
caacugguuuucuucuuuc

SEQ ID NO: 974387 - RNA, 19 nt, Homo sapiens
  misc_RNA (1)...(19): siRNA sense strand
uucauugucuccugaguuc

SEQ ID NO: 974388 - RNA, 19 nt, Homo sapiens
  misc_RNA (1)...(19): siRNA sense strand
gaggaccggagcaggauuc

SEQ ID NO: 974389 - RNA, 19 nt, Homo sapiens
  misc_RNA (1)...(19): siRNA sense strand
ccacauugcauugcucaca

SEQ ID NO: 974390 - RNA, 19 nt, Homo sapiens
  misc_RNA (1)...(19): siRNA sense strand
cuggccgucuccuagguua

SEQ ID NO: 974391 - RNA, 19 nt, Homo sapiens
  misc_RNA (1)...(19): siRNA sense strand
ggagcaggauucgauucag

SEQ ID NO: 974392 - RNA, 19 nt, Homo sapiens
  misc_RNA (1)...(19): siRNA sense strand
acuucucccugcugucuuu

SEQ ID NO: 974393 - RNA, 19 nt, Homo sapiens
  misc_RNA (1)...(19): siRNA sense strand
ggaagauccuuuagaaauu

SEQ ID NO: 974394 - RNA, 19 nt, Homo sapiens
  misc_RNA (1)...(19): siRNA sense strand
ggagagaaguccuuugaau

SEQ ID NO: 974395 - RNA, 19 nt, Homo sapiens
  misc_RNA (1)...(19): siRNA sense strand
gagaaacccuucguaugua

SEQ ID NO: 974396 - RNA, 19 nt, Homo sapiens
  misc_RNA (1)...(19): siRNA sense strand
gggaaauccuucacuaauu

SEQ ID NO: 974397 - RNA, 19 nt, Homo sapiens
  misc_RNA (1)...(19): siRNA sense strand
gagagaagccuuaugaaug

SEQ ID NO: 974398 - RNA, 19 nt, Homo sapiens
  misc_RNA (1)...(19): siRNA sense strand
agaaauuccucaugccuua

SEQ ID NO: 974399 - RNA, 19 nt, Homo sapiens
  misc_RNA (1)...(19): siRNA sense strand
caacucaacuuacugaaca

SEQ ID NO: 974400 - RNA, 19 nt, Homo sapiens
  misc_RNA (1)...(19): siRNA sense strand
gaagauccuuuagaaauuc

SEQ ID NO: 974401 - RNA, 19 nt, Homo sapiens
  misc_RNA (1)...(19): siRNA sense strand
gagaaguccuuugaaugua

SEQ ID NO: 974402 - RNA, 19 nt, Homo sapiens
  misc_RNA (1)...(19): siRNA sense strand
gggaaagccuucacuagau

SEQ ID NO: 974403 - RNA, 19 nt, Homo sapiens
  misc_RNA (1)...(19): siRNA sense strand
ggauaugaguguuaccauu

SEQ ID NO: 974404 - RNA, 19 nt, Homo sapiens
  misc_RNA (1)...(19): siRNA sense strand
gauaugaguguuaccauuu

SEQ ID NO: 974405 - RNA, 19 nt, Homo sapiens
  misc_RNA (1)...(19): siRNA sense strand
caagacaacccuacaaaug

SEQ ID NO: 974406 - RNA, 19 nt, Homo sapiens
  misc_RNA (1)...(19): siRNA sense strand
gaauguggaagauccuuua

SEQ ID NO: 974407 - RNA, 19 nt, Homo sapiens
  misc_RNA (1)...(19): siRNA sense strand
gaaccuggccucuguggaa

SEQ ID NO: 974408 - RNA, 19 nt, Homo sapiens
  misc_RNA (1)...(19): siRNA sense strand
ggaaagccuucacuagauc

SEQ ID NO: 974409 - RNA, 19 nt, Homo sapiens
  misc_RNA (1)...(19): siRNA sense strand
ggagaaacccuaugaaugc

SEQ ID NO: 974410 - RNA, 19 nt, Homo sapiens
  misc_RNA (1)...(19): siRNA sense strand
agagaagccuuaugaaugu

SEQ ID NO: 974411 - RNA, 19 nt, Homo sapiens
  misc_RNA (1)...(19): siRNA sense strand
ggaaagccuucacuacauc

SEQ ID NO: 974412 - RNA, 19 nt, Homo sapiens
  misc_RNA (1)...(19): siRNA sense strand
ggaaagaaacccuaucagu

SEQ ID NO: 974413 - RNA, 19 nt, Homo sapiens
  misc_RNA (1)...(19): siRNA sense strand
gaggguaauuguuauggaa

SEQ ID NO: 974414 - RNA, 19 nt, Homo sapiens
  misc_RNA (1)...(19): siRNA sense strand
ggagagaagccuuaugaau

SEQ ID NO: 974415 - RNA, 19 nt, Homo sapiens
  misc_RNA (1)...(19): siRNA sense strand
gggaaagccuucacuacau

SEQ ID NO: 974416 - RNA, 19 nt, Homo sapiens
  misc_RNA (1)...(19): siRNA sense strand
gaaguccuuugaauguaaa

SEQ ID NO: 974417 - RNA, 19 nt, Homo sapiens
  misc_RNA (1)...(19): siRNA sense strand
ugagaaacucugugaauuu

SEQ ID NO: 974418 - RNA, 19 nt, Homo sapiens
  misc_RNA (1)...(19): siRNA sense strand
ggagagaaacccuucguau

SEQ ID NO: 974419 - RNA, 19 nt, Homo sapiens
  misc_RNA (1)...(19): siRNA sense strand
gaacucacacuggaauaaa

SEQ ID NO: 974420 - RNA, 19 nt, Homo sapiens
  misc_RNA (1)...(19): siRNA sense strand
agaaguccuuugaauguaa

SEQ ID NO: 974421 - RNA, 19 nt, Homo sapiens
  misc_RNA (1)...(19): siRNA sense strand
gaacauguaagaacucaca

SEQ ID NO: 974422 - RNA, 19 nt, Homo sapiens
  misc_RNA (1)...(19): siRNA sense strand
ucaacuuacugaacaugua

SEQ ID NO: 974423 - RNA, 19 nt, Homo sapiens
  misc_RNA (1)...(19): siRNA sense strand
gaucaacucaacuuacuga

SEQ ID NO: 974424 - RNA, 19 nt, Homo sapiens
  misc_RNA (1)...(19): siRNA sense strand
gagagaaacccuucguaug

SEQ ID NO: 974425 - RNA, 19 nt, Homo sapiens
  misc_RNA (1)...(19): siRNA sense strand
aaagaaacccuaucagugu

SEQ ID NO: 974426 - RNA, 19 nt, Homo sapiens
  misc_RNA (1)...(19): siRNA sense strand
gaaacucugugacuguaag

SEQ ID NO: 974427 - RNA, 19 nt, Homo sapiens
  misc_RNA (1)...(19): siRNA sense strand
gggagaaacccuaugaaug

SEQ ID NO: 974428 - RNA, 19 nt, Homo sapiens
  misc_RNA (1)...(19): siRNA sense strand
cuauauuccucacgccuua

SEQ ID NO: 974429 - RNA, 19 nt, Homo sapiens
  misc_RNA (1)...(19): siRNA sense strand
caagauaugugggaaagca

SEQ ID NO: 974430 - RNA, 19 nt, Homo sapiens
  misc_RNA (1)...(19): siRNA sense strand
uguggaagauccuuuagaa

SEQ ID NO: 974431 - RNA, 19 nt, Homo sapiens
  misc_RNA (1)...(19): siRNA sense strand
gagagaaguccuuugaaug

SEQ ID NO: 974432 - RNA, 19 nt, Homo sapiens
  misc_RNA (1)...(19): siRNA sense strand
ggaauacuucugaggguaa

SEQ ID NO: 974433 - RNA, 19 nt, Homo sapiens
  misc_RNA (1)...(19): siRNA sense strand
gaugagaaacucugugaau

SEQ ID NO: 974434 - RNA, 19 nt, Homo sapiens
  misc_RNA (1)...(19): siRNA sense strand
ggaauguggccaagccuuu

SEQ ID NO: 974435 - RNA, 19 nt, Homo sapiens
  misc_RNA (1)...(19): siRNA sense strand
gcaaggauaugaguguuac

SEQ ID NO: 974436 - RNA, 19 nt, Homo sapiens
  misc_RNA (1)...(19): siRNA sense strand
gggccuuucuauacacaua

SEQ ID NO: 974437 - RNA, 19 nt, Homo sapiens
  misc_RNA (1)...(19): siRNA sense strand
agaaacccuucguauguaa

SEQ ID NO: 974438 - RNA, 19 nt, Homo sapiens
  misc_RNA (1)...(19): siRNA sense strand
aagaaacccuaucagugua

SEQ ID NO: 974439 - RNA, 19 nt, Homo sapiens
  misc_RNA (1)...(19): siRNA sense strand
gcaagacaacccuacaaau

SEQ ID NO: 974440 - RNA, 19 nt, Homo sapiens
  misc_RNA (1)...(19): siRNA sense strand
uaaagaaugugggaaagca

SEQ ID NO: 974441 - RNA, 19 nt, Homo sapiens
  misc_RNA (1)...(19): siRNA sense strand
agagaaacccuucguaugu

SEQ ID NO: 974442 - RNA, 19 nt, Homo sapiens
  misc_RNA (1)...(19): siRNA sense strand
caggagagaagccuuauga

SEQ ID NO: 974443 - RNA, 19 nt, Homo sapiens
  misc_RNA (1)...(19): siRNA sense strand
gaaauacaaccuagaacca

SEQ ID NO: 974444 - RNA, 19 nt, Homo sapiens
  misc_RNA (1)...(19): siRNA sense strand
gaauaaaacccuaugaaug

SEQ ID NO: 974445 - RNA, 19 nt, Homo sapiens
  misc_RNA (1)...(19): siRNA sense strand
guacucgggccuuucuaua

SEQ ID NO: 974446 - RNA, 19 nt, Homo sapiens
  misc_RNA (1)...(19): siRNA sense strand
gccaagccuuugcucagua

SEQ ID NO: 974447 - RNA, 19 nt, Homo sapiens
  misc_RNA (1)...(19): siRNA sense strand
gaacaguuuugccuuaaga

SEQ ID NO: 974448 - RNA, 19 nt, Homo sapiens
  misc_RNA (1)...(19): siRNA sense strand
gcuguuuccucacgccuaa

SEQ ID NO: 974449 - RNA, 19 nt, Homo sapiens
  misc_RNA (1)...(19): siRNA sense strand
ucaaauauucagugggaua

SEQ ID NO: 974450 - RNA, 19 nt, Homo sapiens
  misc_RNA (1)...(19): siRNA sense strand
cuucugaggguaauuguua

SEQ ID NO: 974451 - RNA, 19 nt, Homo sapiens
  misc_RNA (1)...(19): siRNA sense strand
aauccacacugaugagaaa

SEQ ID NO: 974452 - RNA, 19 nt, Homo sapiens
  misc_RNA (1)...(19): siRNA sense strand
gaacucauaccggagagaa

SEQ ID NO: 974453 - RNA, 19 nt, Homo sapiens
  misc_RNA (1)...(19): siRNA sense strand
gcucaguacucgggccuuu

SEQ ID NO: 974454 - RNA, 19 nt, Homo sapiens
  misc_RNA (1)...(19): siRNA sense strand
uggaagauccuuuagaaau

SEQ ID NO: 974455 - RNA, 19 nt, Homo sapiens
  misc_RNA (1)...(19): siRNA sense strand
agagaaguccuuugaaugu

SEQ ID NO: 974456 - RNA, 19 nt, Homo sapiens
  misc_RNA (1)...(19): siRNA sense strand
gagaaacccuaugaaugca

SEQ ID NO: 974457 - RNA, 19 nt, Homo sapiens
  misc_RNA (1)...(19): siRNA sense strand
aauacaaccuagaaccaaa

SEQ ID NO: 974458 - RNA, 19 nt, Homo sapiens
  misc_RNA (1)...(19): siRNA sense strand
gaaccaaacggucaucacu

SEQ ID NO: 974459 - RNA, 19 nt, Homo sapiens
  misc_RNA (1)...(19): siRNA sense strand
gaauguaaagaauguggaa

SEQ ID NO: 974460 - RNA, 19 nt, Homo sapiens
  misc_RNA (1)...(19): siRNA sense strand
uggaaacucugugacugua

SEQ ID NO: 974461 - RNA, 19 nt, Homo sapiens
  misc_RNA (1)...(19): siRNA sense strand
gaaugggaaauacaaccua

SEQ ID NO: 974462 - RNA, 19 nt, Homo sapiens
  misc_RNA (1)...(19): siRNA sense strand
acaagaggcuacaguggau

SEQ ID NO: 974463 - RNA, 19 nt, Homo sapiens
  misc_RNA (1)...(19): siRNA sense strand
acacaggagagaagccuua

SEQ ID NO: 974464 - RNA, 19 nt, Homo sapiens
  misc_RNA (1)...(19): siRNA sense strand
uaagaaaugugggaaaucc

SEQ ID NO: 974465 - RNA, 19 nt, Homo sapiens
  misc_RNA (1)...(19): siRNA sense strand
acaugaaccuggccucugu

SEQ ID NO: 974466 - RNA, 19 nt, Homo sapiens
  misc_RNA (1)...(19): siRNA sense strand
gauaugugggaaagcauuu

SEQ ID NO: 974467 - RNA, 19 nt, Homo sapiens
  misc_RNA (1)...(19): siRNA sense strand
gaagucacaguggaaagaa

SEQ ID NO: 974468 - RNA, 19 nt, Homo sapiens
  misc_RNA (1)...(19): siRNA sense strand
gaaauuccucaugccuuaa

SEQ ID NO: 974469 - RNA, 19 nt, Homo sapiens
  misc_RNA (1)...(19): siRNA sense strand
ugugggaaauccuucacua

SEQ ID NO: 974470 - RNA, 19 nt, Homo sapiens
  misc_RNA (1)...(19): siRNA sense strand
ggucuucagggaacaguuu

SEQ ID NO: 974471 - RNA, 19 nt, Homo sapiens
  misc_RNA (1)...(19): siRNA sense strand
cuucguauguaaagaaugu

SEQ ID NO: 974472 - RNA, 19 nt, Homo sapiens
  misc_RNA (1)...(19): siRNA sense strand
ccucacgccuuaauguuca

SEQ ID NO: 974473 - RNA, 19 nt, Homo sapiens
  misc_RNA (1)...(19): siRNA sense strand
uagaucaacucaacuuacu

SEQ ID NO: 974474 - RNA, 19 nt, Homo sapiens
  misc_RNA (1)...(19): siRNA sense strand
gaauacuucugaggguaau

SEQ ID NO: 974475 - RNA, 19 nt, Homo sapiens
  misc_RNA (1)...(19): siRNA sense strand
caugagaguucagaaugga

SEQ ID NO: 974476 - RNA, 19 nt, Homo sapiens
  misc_RNA (1)...(19): siRNA sense strand
cagaauggagggaauacuu

SEQ ID NO: 974477 - RNA, 19 nt, Homo sapiens
  misc_RNA (1)...(19): siRNA sense strand
gaagccuuaugaauguguu

SEQ ID NO: 974478 - RNA, 19 nt, Homo sapiens
  misc_RNA (1)...(19): siRNA sense strand
ggaaacucugugacuguaa

SEQ ID NO: 974479 - RNA, 19 nt, Homo sapiens
  misc_RNA (1)...(19): siRNA sense strand
guucauacaggaaagaaau

SEQ ID NO: 974480 - RNA, 19 nt, Homo sapiens
  misc_RNA (1)...(19): siRNA sense strand
gaauaaaaccacacaagug

SEQ ID NO: 974481 - RNA, 19 nt, Homo sapiens
  misc_RNA (1)...(19): siRNA sense strand
cuaaguagacaugaaagaa

SEQ ID NO: 974482 - RNA, 19 nt, Homo sapiens
  misc_RNA (1)...(19): siRNA sense strand
gaaacccuucguauguaaa

SEQ ID NO: 974483 - RNA, 19 nt, Homo sapiens
  misc_RNA (1)...(19): siRNA sense strand
ggaauaaaacccuaugaau

SEQ ID NO: 974484 - RNA, 19 nt, Homo sapiens
  misc_RNA (1)...(19): siRNA sense strand
gaauccacacugaugagaa

SEQ ID NO: 974485 - RNA, 19 nt, Homo sapiens
  misc_RNA (1)...(19): siRNA sense strand
uaagaacucacacuggaau

SEQ ID NO: 974486 - RNA, 19 nt, Homo sapiens
  misc_RNA (1)...(19): siRNA sense strand
guaagaacucacacuggaa

SEQ ID NO: 974487 - RNA, 19 nt, Homo sapiens
  misc_RNA (1)...(19): siRNA sense strand
ugggaaagccuucacuaga

SEQ ID NO: 974488 - RNA, 19 nt, Homo sapiens
  misc_RNA (1)...(19): siRNA sense strand
aaagcaguguguagcaguu

SEQ ID NO: 974489 - RNA, 19 nt, Homo sapiens
  misc_RNA (1)...(19): siRNA sense strand
augagaaacucugugaauu

SEQ ID NO: 974490 - RNA, 19 nt, Homo sapiens
  misc_RNA (1)...(19): siRNA sense strand
gaauaugggagagcuguca

SEQ ID NO: 974491 - RNA, 19 nt, Homo sapiens
  misc_RNA (1)...(19): siRNA sense strand
gaauguggccaagccuuug

SEQ ID NO: 974492 - RNA, 19 nt, Homo sapiens
  misc_RNA (1)...(19): siRNA sense strand
cagcauacaagaauucaca

SEQ ID NO: 974493 - RNA, 19 nt, Homo sapiens
  misc_RNA (1)...(19): siRNA sense strand
ggagauguaugcaguguga

SEQ ID NO: 974494 - RNA, 19 nt, Homo sapiens
  misc_RNA (1)...(19): siRNA sense strand
ggagacagccacuaugaaa

SEQ ID NO: 974495 - RNA, 19 nt, Homo sapiens
  misc_RNA (1)...(19): siRNA sense strand
agagaaaccugaaacuaug

SEQ ID NO: 974496 - RNA, 19 nt, Homo sapiens
  misc_RNA (1)...(19): siRNA sense strand
cugccaagcuccucuauga

SEQ ID NO: 974497 - RNA, 19 nt, Homo sapiens
  misc_RNA (1)...(19): siRNA sense strand
cagagaaaccugaaacuau

SEQ ID NO: 974498 - RNA, 19 nt, Homo sapiens
  misc_RNA (1)...(19): siRNA sense strand
gcagugugacgccaaguuu

SEQ ID NO: 974499 - RNA, 19 nt, Homo sapiens
  misc_RNA (1)...(19): siRNA sense strand
ucaaggaggcggaguucua

SEQ ID NO: 974500 - RNA, 19 nt, Homo sapiens
  misc_RNA (1)...(19): siRNA sense strand
gcauguuccugcaguauac

SEQ ID NO: 974501 - RNA, 19 nt, Homo sapiens
  misc_RNA (1)...(19): siRNA sense strand
cuugucgucuuuccaauaa

SEQ ID NO: 974502 - RNA, 19 nt, Homo sapiens
  misc_RNA (1)...(19): siRNA sense strand
acuaugacuugucgucuuu

SEQ ID NO: 974503 - RNA, 19 nt, Homo sapiens
  misc_RNA (1)...(19): siRNA sense strand
gagaaaccugaaacuauga

SEQ ID NO: 974504 - RNA, 19 nt, Homo sapiens
  misc_RNA (1)...(19): siRNA sense strand
ggauggagacagccacuau

SEQ ID NO: 974505 - RNA, 19 nt, Homo sapiens
  misc_RNA (1)...(19): siRNA sense strand
uaaccagagauacuuguuu

SEQ ID NO: 974506 - RNA, 19 nt, Homo sapiens
  misc_RNA (1)...(19): siRNA sense strand
ccaauaaccagagauacuu

SEQ ID NO: 974507 - RNA, 19 nt, Homo sapiens
  misc_RNA (1)...(19): siRNA sense strand
cagccacuaugaaaucgaa

SEQ ID NO: 974508 - RNA, 19 nt, Homo sapiens
  misc_RNA (1)...(19): siRNA sense strand
ccaccuuccucgucacguu

SEQ ID NO: 974509 - RNA, 19 nt, Homo sapiens
  misc_RNA (1)...(19): siRNA sense strand
gccaagcuccucuaugaau

SEQ ID NO: 974510 - RNA, 19 nt, Homo sapiens
  misc_RNA (1)...(19): siRNA sense strand
gugcagauccucacagaag

SEQ ID NO: 974511 - RNA, 19 nt, Homo sapiens
  misc_RNA (1)...(19): siRNA sense strand
aaccagagauacuuguuuc

SEQ ID NO: 974512 - RNA, 19 nt, Homo sapiens
  misc_RNA (1)...(19): siRNA sense strand
ccaagcuccucuaugaauc

SEQ ID NO: 974513 - RNA, 19 nt, Homo sapiens
  misc_RNA (1)...(19): siRNA sense strand
caaggagugucggagaugu

SEQ ID NO: 974514 - RNA, 19 nt, Homo sapiens
  misc_RNA (1)...(19): siRNA sense strand
ccacuaugaaaucgaaauu

SEQ ID NO: 974515 - RNA, 19 nt, Homo sapiens
  misc_RNA (1)...(19): siRNA sense strand
cgacaagcagcucaaagug

SEQ ID NO: 974516 - RNA, 19 nt, Homo sapiens
  misc_RNA (1)...(19): siRNA sense strand
agacagccacuaugaaauc

SEQ ID NO: 974517 - RNA, 19 nt, Homo sapiens
  misc_RNA (1)...(19): siRNA sense strand
gagacagccacuaugaaau

SEQ ID NO: 974518 - RNA, 19 nt, Homo sapiens
  misc_RNA (1)...(19): siRNA sense strand
ggcauguuccugcaguaua

SEQ ID NO: 974519 - RNA, 19 nt, Homo sapiens
  misc_RNA (1)...(19): siRNA sense strand
ugacuugucgucuuuccaa

SEQ ID NO: 974520 - RNA, 19 nt, Homo sapiens
  misc_RNA (1)...(19): siRNA sense strand
caauaaccagagauacuug

SEQ ID NO: 974521 - RNA, 19 nt, Homo sapiens
  misc_RNA (1)...(19): siRNA sense strand
gaaaucgaaauuguacaca

SEQ ID NO: 974522 - RNA, 19 nt, Homo sapiens
  misc_RNA (1)...(19): siRNA sense strand
aaccugaaacuaugacuug

SEQ ID NO: 974523 - RNA, 19 nt, Homo sapiens
  misc_RNA (1)...(19): siRNA sense strand
aggcggaguucuacgacaa

SEQ ID NO: 974524 - RNA, 19 nt, Homo sapiens
  misc_RNA (1)...(19): siRNA sense strand
gauggagacagccacuaug

SEQ ID NO: 974525 - RNA, 19 nt, Homo sapiens
  misc_RNA (1)...(19): siRNA sense strand
ccgugcagauccucacaga

SEQ ID NO: 974526 - RNA, 19 nt, Homo sapiens
  misc_RNA (1)...(19): siRNA sense strand
caccagaaagcaccacugu

SEQ ID NO: 974527 - RNA, 19 nt, Homo sapiens
  misc_RNA (1)...(19): siRNA sense strand
gagauacuuguuucuggau

SEQ ID NO: 974528 - RNA, 19 nt, Homo sapiens
  misc_RNA (1)...(19): siRNA sense strand
gcaaaggcaucgucuauga

SEQ ID NO: 974529 - RNA, 19 nt, Homo sapiens
  misc_RNA (1)...(19): siRNA sense strand
ggaagacgguggaaaucaa

SEQ ID NO: 974530 - RNA, 19 nt, Homo sapiens
  misc_RNA (1)...(19): siRNA sense strand
ucgaggagauuaacaaagu

SEQ ID NO: 974531 - RNA, 19 nt, Homo sapiens
  misc_RNA (1)...(19): siRNA sense strand
gaacugaagacgagaggau

SEQ ID NO: 974532 - RNA, 19 nt, Homo sapiens
  misc_RNA (1)...(19): siRNA sense strand
gcagauggcguguccuaug

SEQ ID NO: 974533 - RNA, 19 nt, Homo sapiens
  misc_RNA (1)...(19): siRNA sense strand
gggcaaaggcaucgucuau

SEQ ID NO: 974534 - RNA, 19 nt, Homo sapiens
  misc_RNA (1)...(19): siRNA sense strand
gacacacccugcaaugaga

SEQ ID NO: 974535 - RNA, 19 nt, Homo sapiens
  misc_RNA (1)...(19): siRNA sense strand
ggacacacccugcaaugag

SEQ ID NO: 974536 - RNA, 19 nt, Homo sapiens
  misc_RNA (1)...(19): siRNA sense strand
gaaaggagcuggggaucau

SEQ ID NO: 974537 - RNA, 19 nt, Homo sapiens
  misc_RNA (1)...(19): siRNA sense strand
cgaggagauuaacaaaguu

SEQ ID NO: 974538 - RNA, 19 nt, Homo sapiens
  misc_RNA (1)...(19): siRNA sense strand
ucaagcaggguuucaaaga

SEQ ID NO: 974539 - RNA, 19 nt, Homo sapiens
  misc_RNA (1)...(19): siRNA sense strand
gagauuaacaaaguuggaa

SEQ ID NO: 974540 - RNA, 19 nt, Homo sapiens
  misc_RNA (1)...(19): siRNA sense strand
caagcaggguuucaaagac

SEQ ID NO: 974541 - RNA, 19 nt, Homo sapiens
  misc_RNA (1)...(19): siRNA sense strand
gaggagauuaacaaaguug

SEQ ID NO: 974542 - RNA, 19 nt, Homo sapiens
  misc_RNA (1)...(19): siRNA sense strand
aagcaggguuucaaagaca

SEQ ID NO: 974543 - RNA, 19 nt, Homo sapiens
  misc_RNA (1)...(19): siRNA sense strand
gaucaucccaaccaucauc

SEQ ID NO: 974544 - RNA, 19 nt, Homo sapiens
  misc_RNA (1)...(19): siRNA sense strand
cgacaaggccagaugacau

SEQ ID NO: 974545 - RNA, 19 nt, Homo sapiens
  misc_RNA (1)...(19): siRNA sense strand
gaagacgagaggauuugga

SEQ ID NO: 974546 - RNA, 19 nt, Homo sapiens
  misc_RNA (1)...(19): siRNA sense strand
uuaacaaaguuggaaagga

SEQ ID NO: 974547 - RNA, 19 nt, Homo sapiens
  misc_RNA (1)...(19): siRNA sense strand
cuucagagccgcaaucaag

SEQ ID NO: 974548 - RNA, 19 nt, Homo sapiens
  misc_RNA (1)...(19): siRNA sense strand
gauggcguguccuaugcuu

SEQ ID NO: 974549 - RNA, 19 nt, Homo sapiens
  misc_RNA (1)...(19): siRNA sense strand
gggaagacgguggaaauca

SEQ ID NO: 974550 - RNA, 19 nt, Homo sapiens
  misc_RNA (1)...(19): siRNA sense strand
cagggaagacgguggaaau

SEQ ID NO: 974551 - RNA, 19 nt, Homo sapiens
  misc_RNA (1)...(19): siRNA sense strand
ggagauuaacaaaguugga

SEQ ID NO: 974552 - RNA, 19 nt, Homo sapiens
  misc_RNA (1)...(19): siRNA sense strand
cagauggcguguccuaugc

SEQ ID NO: 974553 - RNA, 19 nt, Homo sapiens
  misc_RNA (1)...(19): siRNA sense strand
caaccuccacgcuguguuc

SEQ ID NO: 974554 - RNA, 19 nt, Homo sapiens
  misc_RNA (1)...(19): siRNA sense strand
aaucaagcaggguuucaaa

SEQ ID NO: 974555 - RNA, 19 nt, Homo sapiens
  misc_RNA (1)...(19): siRNA sense strand
gcaaucaagcaggguuuca

SEQ ID NO: 974556 - RNA, 19 nt, Homo sapiens
  misc_RNA (1)...(19): siRNA sense strand
cuucaucgccucacacauc

SEQ ID NO: 974557 - RNA, 19 nt, Homo sapiens
  misc_RNA (1)...(19): siRNA sense strand
gaagacgguggaaaucaac

SEQ ID NO: 974558 - RNA, 19 nt, Homo sapiens
  misc_RNA (1)...(19): siRNA sense strand
ucaaagggaagacuaccau

SEQ ID NO: 974559 - RNA, 19 nt, Homo sapiens
  misc_RNA (1)...(19): siRNA sense strand
uggcggacaugaagaacuc

SEQ ID NO: 974560 - RNA, 19 nt, Homo sapiens
  misc_RNA (1)...(19): siRNA sense strand
gcauugccacagggaagua

SEQ ID NO: 974561 - RNA, 19 nt, Homo sapiens
  misc_RNA (1)...(19): siRNA sense strand
cgagaggauuuggaggaau

SEQ ID NO: 974562 - RNA, 19 nt, Homo sapiens
  misc_RNA (1)...(19): siRNA sense strand
gauuaacaaaguuggaaag

SEQ ID NO: 974563 - RNA, 19 nt, Homo sapiens
  misc_RNA (1)...(19): siRNA sense strand
uugcagugcuuagcgaaug

SEQ ID NO: 974564 - RNA, 19 nt, Homo sapiens
  misc_RNA (1)...(19): siRNA sense strand
gcuuagcgaaugccacaga

SEQ ID NO: 974565 - RNA, 19 nt, Homo sapiens
  misc_RNA (1)...(19): siRNA sense strand
aaaggcaucgucuaugaca

SEQ ID NO: 974566 - RNA, 19 nt, Homo sapiens
  misc_RNA (1)...(19): siRNA sense strand
acgagaggauuuggaggaa

SEQ ID NO: 974567 - RNA, 19 nt, Homo sapiens
  misc_RNA (1)...(19): siRNA sense strand
ccucgaggagauuaacaaa

SEQ ID NO: 974568 - RNA, 19 nt, Homo sapiens
  misc_RNA (1)...(19): siRNA sense strand
ccucagcuguggcggacau

SEQ ID NO: 974569 - RNA, 19 nt, Homo sapiens
  misc_RNA (1)...(19): siRNA sense strand
uggcagauggcguguccua

SEQ ID NO: 974570 - RNA, 19 nt, Homo sapiens
  misc_RNA (1)...(19): siRNA sense strand
caaucaagcaggguuucaa

SEQ ID NO: 974571 - RNA, 19 nt, Homo sapiens
  misc_RNA (1)...(19): siRNA sense strand
ggaggccucagcaucaaag

SEQ ID NO: 974572 - RNA, 19 nt, Homo sapiens
  misc_RNA (1)...(19): siRNA sense strand
gcaaagaaguuucaucuga

SEQ ID NO: 974573 - RNA, 19 nt, Homo sapiens
  misc_RNA (1)...(19): siRNA sense strand
gcagggaucugguugauga

SEQ ID NO: 974574 - RNA, 19 nt, Homo sapiens
  misc_RNA (1)...(19): siRNA sense strand
ccaaagacauaaugacaaa

SEQ ID NO: 974575 - RNA, 19 nt, Homo sapiens
  misc_RNA (1)...(19): siRNA sense strand
ggacuaauguuacaccaau

SEQ ID NO: 974576 - RNA, 19 nt, Homo sapiens
  misc_RNA (1)...(19): siRNA sense strand
gaguagcccugcugaauga

SEQ ID NO: 974577 - RNA, 19 nt, Homo sapiens
  misc_RNA (1)...(19): siRNA sense strand
gacaagggcucgccuagga

SEQ ID NO: 974578 - RNA, 19 nt, Homo sapiens
  misc_RNA (1)...(19): siRNA sense strand
guaauucccugcuaaguag

SEQ ID NO: 974579 - RNA, 19 nt, Homo sapiens
  misc_RNA (1)...(19): siRNA sense strand
ggagugaucuacugucuag

SEQ ID NO: 974580 - RNA, 19 nt, Homo sapiens
  misc_RNA (1)...(19): siRNA sense strand
gacaaauacucaugcuaaa

SEQ ID NO: 974581 - RNA, 19 nt, Homo sapiens
  misc_RNA (1)...(19): siRNA sense strand
cuaaauccauccucaauuc

SEQ ID NO: 974582 - RNA, 19 nt, Homo sapiens
  misc_RNA (1)...(19): siRNA sense strand
gaugguaauucccugcuaa

SEQ ID NO: 974583 - RNA, 19 nt, Homo sapiens
  misc_RNA (1)...(19): siRNA sense strand
ugacaaauacucaugcuaa

SEQ ID NO: 974584 - RNA, 19 nt, Homo sapiens
  misc_RNA (1)...(19): siRNA sense strand
ggauaugacggcuugaaua

SEQ ID NO: 974585 - RNA, 19 nt, Homo sapiens
  misc_RNA (1)...(19): siRNA sense strand
gcaauacccucugugaugu

SEQ ID NO: 974586 - RNA, 19 nt, Homo sapiens
  misc_RNA (1)...(19): siRNA sense strand
gaaauacgacccucauaca

SEQ ID NO: 974587 - RNA, 19 nt, Homo sapiens
  misc_RNA (1)...(19): siRNA sense strand
ggaaggugccggacucgua

SEQ ID NO: 974588 - RNA, 19 nt, Homo sapiens
  misc_RNA (1)...(19): siRNA sense strand
gguaauucccugcuaagua

SEQ ID NO: 974589 - RNA, 19 nt, Homo sapiens
  misc_RNA (1)...(19): siRNA sense strand
aaacaagccugcugugagu

SEQ ID NO: 974590 - RNA, 19 nt, Homo sapiens
  misc_RNA (1)...(19): siRNA sense strand
ggugaagcaugccaagaaa

SEQ ID NO: 974591 - RNA, 19 nt, Homo sapiens
  misc_RNA (1)...(19): siRNA sense strand
gcgcuaugauccaaacauu

SEQ ID NO: 974592 - RNA, 19 nt, Homo sapiens
  misc_RNA (1)...(19): siRNA sense strand
ccagguauaucacagaugu

SEQ ID NO: 974593 - RNA, 19 nt, Homo sapiens
  misc_RNA (1)...(19): siRNA sense strand
gcuaugauccaaacauuga

SEQ ID NO: 974594 - RNA, 19 nt, Homo sapiens
  misc_RNA (1)...(19): siRNA sense strand
aagcaucacucguaagaga

SEQ ID NO: 974595 - RNA, 19 nt, Homo sapiens
  misc_RNA (1)...(19): siRNA sense strand
caaauacucaugcuaaauc

SEQ ID NO: 974596 - RNA, 19 nt, Homo sapiens
  misc_RNA (1)...(19): siRNA sense strand
guugaaaggugugaaacaa

SEQ ID NO: 974597 - RNA, 19 nt, Homo sapiens
  misc_RNA (1)...(19): siRNA sense strand
gggagacucuaugcaauug

SEQ ID NO: 974598 - RNA, 19 nt, Homo sapiens
  misc_RNA (1)...(19): siRNA sense strand
ugccuaaccugcuacagua

SEQ ID NO: 974599 - RNA, 19 nt, Homo sapiens
  misc_RNA (1)...(19): siRNA sense strand
gaagaauccuugccuaacc

SEQ ID NO: 974600 - RNA, 19 nt, Homo sapiens
  misc_RNA (1)...(19): siRNA sense strand
gauggccguucccgccuua

SEQ ID NO: 974601 - RNA, 19 nt, Homo sapiens
  misc_RNA (1)...(19): siRNA sense strand
gaccggaucuacgucauug

SEQ ID NO: 974602 - RNA, 19 nt, Homo sapiens
  misc_RNA (1)...(19): siRNA sense strand
ccauugaugugguagagaa

SEQ ID NO: 974603 - RNA, 19 nt, Homo sapiens
  misc_RNA (1)...(19): siRNA sense strand
gggaagaauccuugccuaa

SEQ ID NO: 974604 - RNA, 19 nt, Homo sapiens
  misc_RNA (1)...(19): siRNA sense strand
gagaaauacgacccucaua

SEQ ID NO: 974605 - RNA, 19 nt, Homo sapiens
  misc_RNA (1)...(19): siRNA sense strand
uaauagaugcugagccuuu

SEQ ID NO: 974606 - RNA, 19 nt, Homo sapiens
  misc_RNA (1)...(19): siRNA sense strand
gaguagagcagaaagacuu

SEQ ID NO: 974607 - RNA, 19 nt, Homo sapiens
  misc_RNA (1)...(19): siRNA sense strand
ggaguagcccugcugaaug

SEQ ID NO: 974608 - RNA, 19 nt, Homo sapiens
  misc_RNA (1)...(19): siRNA sense strand
uaugacggcuugaauaucu

SEQ ID NO: 974609 - RNA, 19 nt, Homo sapiens
  misc_RNA (1)...(19): siRNA sense strand
caagaaagagcgggaagaa

SEQ ID NO: 974610 - RNA, 19 nt, Homo sapiens
  misc_RNA (1)...(19): siRNA sense strand
guacagcccaccuuucuuc

SEQ ID NO: 974611 - RNA, 19 nt, Homo sapiens
  misc_RNA (1)...(19): siRNA sense strand
agaaagagcgggaagaauc

SEQ ID NO: 974612 - RNA, 19 nt, Homo sapiens
  misc_RNA (1)...(19): siRNA sense strand
gcaauugcaggauaugaug

SEQ ID NO: 974613 - RNA, 19 nt, Homo sapiens
  misc_RNA (1)...(19): siRNA sense strand
ccaagcaucacucguaaga

SEQ ID NO: 974614 - RNA, 19 nt, Homo sapiens
  misc_RNA (1)...(19): siRNA sense strand
cuaugucucuggaggcuuu

SEQ ID NO: 974615 - RNA, 19 nt, Homo sapiens
  misc_RNA (1)...(19): siRNA sense strand
ccaccuuucuuccguugaa

SEQ ID NO: 974616 - RNA, 19 nt, Homo sapiens
  misc_RNA (1)...(19): siRNA sense strand
cagccugucugcuucaguu

SEQ ID NO: 974617 - RNA, 19 nt, Homo sapiens
  misc_RNA (1)...(19): siRNA sense strand
gcuaaauccauccucaauu

SEQ ID NO: 974618 - RNA, 19 nt, Homo sapiens
  misc_RNA (1)...(19): siRNA sense strand
gguacagcaugaagaguuc

SEQ ID NO: 974619 - RNA, 19 nt, Homo sapiens
  misc_RNA (1)...(19): siRNA sense strand
cauacaacauucgcacuga

SEQ ID NO: 974620 - RNA, 19 nt, Homo sapiens
  misc_RNA (1)...(19): siRNA sense strand
ggccugaacuucggaguca

SEQ ID NO: 974621 - RNA, 19 nt, Homo sapiens
  misc_RNA (1)...(19): siRNA sense strand
gaauguacaagaacugcuu

SEQ ID NO: 974622 - RNA, 19 nt, Homo sapiens
  misc_RNA (1)...(19): siRNA sense strand
gcugggaagucgugacauc

SEQ ID NO: 974623 - RNA, 19 nt, Homo sapiens
  misc_RNA (1)...(19): siRNA sense strand
gcugaaugaccauauuuau

SEQ ID NO: 974624 - RNA, 19 nt, Homo sapiens
  misc_RNA (1)...(19): siRNA sense strand
gaugcaagcagcugagguu

SEQ ID NO: 974625 - RNA, 19 nt, Homo sapiens
  misc_RNA (1)...(19): siRNA sense strand
uuacuucugugccauguuc

SEQ ID NO: 974626 - RNA, 19 nt, Homo sapiens
  misc_RNA (1)...(19): siRNA sense strand
gauggaagcaggcgucaca

SEQ ID NO: 974627 - RNA, 19 nt, Homo sapiens
  misc_RNA (1)...(19): siRNA sense strand
gggugaagcaugccaagaa

SEQ ID NO: 974628 - RNA, 19 nt, Homo sapiens
  misc_RNA (1)...(19): siRNA sense strand
aaucaagugcgacgaaauu

SEQ ID NO: 974629 - RNA, 19 nt, Homo sapiens
  misc_RNA (1)...(19): siRNA sense strand
gaugguacagcccaccuuu

SEQ ID NO: 974630 - RNA, 19 nt, Homo sapiens
  misc_RNA (1)...(19): siRNA sense strand
ccaccacccugggagauau

SEQ ID NO: 974631 - RNA, 19 nt, Homo sapiens
  misc_RNA (1)...(19): siRNA sense strand
gacguuauguggccucagu

SEQ ID NO: 974632 - RNA, 19 nt, Homo sapiens
  misc_RNA (1)...(19): siRNA sense strand
ugaagcaugccaagaaaga

SEQ ID NO: 974633 - RNA, 19 nt, Homo sapiens
  misc_RNA (1)...(19): siRNA sense strand
uugaugugguagagaaaua

SEQ ID NO: 974634 - RNA, 19 nt, Homo sapiens
  misc_RNA (1)...(19): siRNA sense strand
cggcuugaauaucuuaaau

SEQ ID NO: 974635 - RNA, 19 nt, Homo sapiens
  misc_RNA (1)...(19): siRNA sense strand
caauuguguugaccugaug

SEQ ID NO: 974636 - RNA, 19 nt, Homo sapiens
  misc_RNA (1)...(19): siRNA sense strand
gcgcugugaugcugguguu

SEQ ID NO: 974637 - RNA, 19 nt, Homo sapiens
  misc_RNA (1)...(19): siRNA sense strand
ugccaagcaucacucguaa

SEQ ID NO: 974638 - RNA, 19 nt, Homo sapiens
  misc_RNA (1)...(19): siRNA sense strand
gcauuuuccugaaguggua

SEQ ID NO: 974639 - RNA, 19 nt, Homo sapiens
  misc_RNA (1)...(19): siRNA sense strand
ccuaggagccaaugaagug

SEQ ID NO: 974640 - RNA, 19 nt, Homo sapiens
  misc_RNA (1)...(19): siRNA sense strand
caguuggacccuucuaauu

SEQ ID NO: 974641 - RNA, 19 nt, Homo sapiens
  misc_RNA (1)...(19): siRNA sense strand
cuacacagcagaugaggau

SEQ ID NO: 974642 - RNA, 19 nt, Homo sapiens
  misc_RNA (1)...(19): siRNA sense strand
ccagcagucucccauugau

SEQ ID NO: 974643 - RNA, 19 nt, Homo sapiens
  misc_RNA (1)...(19): siRNA sense strand
ggaucugguugaugaagca

SEQ ID NO: 974644 - RNA, 19 nt, Homo sapiens
  misc_RNA (1)...(19): siRNA sense strand
ggaagaauccuugccuaac

SEQ ID NO: 974645 - RNA, 19 nt, Homo sapiens
  misc_RNA (1)...(19): siRNA sense strand
cuaaucaagugcgacgaaa

SEQ ID NO: 974646 - RNA, 19 nt, Homo sapiens
  misc_RNA (1)...(19): siRNA sense strand
gcuaaucaagugcgacgaa

SEQ ID NO: 974647 - RNA, 19 nt, Homo sapiens
  misc_RNA (1)...(19): siRNA sense strand
uggaaaagcuaaucaagug

SEQ ID NO: 974648 - RNA, 19 nt, Homo sapiens
  misc_RNA (1)...(19): siRNA sense strand
cgacgaaauucagguggau

SEQ ID NO: 974649 - RNA, 19 nt, Homo sapiens
  misc_RNA (1)...(19): siRNA sense strand
ugacggcuugaauaucuua

SEQ ID NO: 974650 - RNA, 19 nt, Homo sapiens
  misc_RNA (1)...(19): siRNA sense strand
ggagcgcuaugauccaaac

SEQ ID NO: 974651 - RNA, 19 nt, Homo sapiens
  misc_RNA (1)...(19): siRNA sense strand
gcaggcgucacaccaguau

SEQ ID NO: 974652 - RNA, 19 nt, Homo sapiens
  misc_RNA (1)...(19): siRNA sense strand
cuacgucauugguggcuau

SEQ ID NO: 974653 - RNA, 19 nt, Homo sapiens
  misc_RNA (1)...(19): siRNA sense strand
ugaaacaagccugcuguga

SEQ ID NO: 974654 - RNA, 19 nt, Homo sapiens
  misc_RNA (1)...(19): siRNA sense strand
gagcaauacccucugugau

SEQ ID NO: 974655 - RNA, 19 nt, Homo sapiens
  misc_RNA (1)...(19): siRNA sense strand
gaagcaaagaaguuucauc

SEQ ID NO: 974656 - RNA, 19 nt, Homo sapiens
  misc_RNA (1)...(19): siRNA sense strand
uuucauccgcuguaguuua

SEQ ID NO: 974657 - RNA, 19 nt, Homo sapiens
  misc_RNA (1)...(19): siRNA sense strand
gaagugguacagcaugaag

SEQ ID NO: 974658 - RNA, 19 nt, Homo sapiens
  misc_RNA (1)...(19): siRNA sense strand
acaauuguguugaccugau

SEQ ID NO: 974659 - RNA, 19 nt, Homo sapiens
  misc_RNA (1)...(19): siRNA sense strand
ugaugaagcaaagaaguuu

SEQ ID NO: 974660 - RNA, 19 nt, Homo sapiens
  misc_RNA (1)...(19): siRNA sense strand
aguggagaauguacaagaa

SEQ ID NO: 974661 - RNA, 19 nt, Homo sapiens
  misc_RNA (1)...(19): siRNA sense strand
uuacaccaauggccaccaa

SEQ ID NO: 974662 - RNA, 19 nt, Homo sapiens
  misc_RNA (1)...(19): siRNA sense strand
ucuggaggcuuugauggaa

SEQ ID NO: 974663 - RNA, 19 nt, Homo sapiens
  misc_RNA (1)...(19): siRNA sense strand
gaaagagcgggaagaaucc

SEQ ID NO: 974664 - RNA, 19 nt, Homo sapiens
  misc_RNA (1)...(19): siRNA sense strand
cugaagugguacagcauga

SEQ ID NO: 974665 - RNA, 19 nt, Homo sapiens
  misc_RNA (1)...(19): siRNA sense strand
aagcaaagaaguuucaucu

SEQ ID NO: 974666 - RNA, 19 nt, Homo sapiens
  misc_RNA (1)...(19): siRNA sense strand
gggaagucgugacauccau

SEQ ID NO: 974667 - RNA, 19 nt, Homo sapiens
  misc_RNA (1)...(19): siRNA sense strand
ugaauguuaugacccuauc

SEQ ID NO: 974668 - RNA, 19 nt, Homo sapiens
  misc_RNA (1)...(19): siRNA sense strand
auacaggacauuggacuaa

SEQ ID NO: 974669 - RNA, 19 nt, Homo sapiens
  misc_RNA (1)...(19): siRNA sense strand
gaggauaugacggcuugaa

SEQ ID NO: 974670 - RNA, 19 nt, Homo sapiens
  misc_RNA (1)...(19): siRNA sense strand
caaugaacucccucaggaa

SEQ ID NO: 974671 - RNA, 19 nt, Homo sapiens
  misc_RNA (1)...(19): siRNA sense strand
caucugaggccugaacuuc

SEQ ID NO: 974672 - RNA, 19 nt, Homo sapiens
  misc_RNA (1)...(19): siRNA sense strand
gaggagauguggagaauuu

SEQ ID NO: 974673 - RNA, 19 nt, Homo sapiens
  misc_RNA (1)...(19): siRNA sense strand
agacagagaugaaauugaa

SEQ ID NO: 974674 - RNA, 19 nt, Homo sapiens
  misc_RNA (1)...(19): siRNA sense strand
gaacagaagaucuuauugu

SEQ ID NO: 974675 - RNA, 19 nt, Homo sapiens
  misc_RNA (1)...(19): siRNA sense strand
gaauggagccucaaacaug

SEQ ID NO: 974676 - RNA, 19 nt, Homo sapiens
  misc_RNA (1)...(19): siRNA sense strand
gaugaugacuucccagaau

SEQ ID NO: 974677 - RNA, 19 nt, Homo sapiens
  misc_RNA (1)...(19): siRNA sense strand
cauuguggaucccauguua

SEQ ID NO: 974678 - RNA, 19 nt, Homo sapiens
  misc_RNA (1)...(19): siRNA sense strand
ggaacaaaccauagcauug

SEQ ID NO: 974679 - RNA, 19 nt, Homo sapiens
  misc_RNA (1)...(19): siRNA sense strand
aaacauggcuuugaauugg

SEQ ID NO: 974680 - RNA, 19 nt, Homo sapiens
  misc_RNA (1)...(19): siRNA sense strand
cagcagacaucaaucuaug

SEQ ID NO: 974681 - RNA, 19 nt, Homo sapiens
  misc_RNA (1)...(19): siRNA sense strand
caaugaugcugugagauuu

SEQ ID NO: 974682 - RNA, 19 nt, Homo sapiens
  misc_RNA (1)...(19): siRNA sense strand
gaacaaaccauagcauugg

SEQ ID NO: 974683 - RNA, 19 nt, Homo sapiens
  misc_RNA (1)...(19): siRNA sense strand
gauaggaaccaaggcuuua

SEQ ID NO: 974684 - RNA, 19 nt, Homo sapiens
  misc_RNA (1)...(19): siRNA sense strand
ccaauguagugaugaagaa

SEQ ID NO: 974685 - RNA, 19 nt, Homo sapiens
  misc_RNA (1)...(19): siRNA sense strand
cauguuagaucuggauauu

SEQ ID NO: 974686 - RNA, 19 nt, Homo sapiens
  misc_RNA (1)...(19): siRNA sense strand
ccaaugaugcugugagauu

SEQ ID NO: 974687 - RNA, 19 nt, Homo sapiens
  misc_RNA (1)...(19): siRNA sense strand
ccuggaccauugauaauaa

SEQ ID NO: 974688 - RNA, 19 nt, Homo sapiens
  misc_RNA (1)...(19): siRNA sense strand
gcgauagagugucugaaga

SEQ ID NO: 974689 - RNA, 19 nt, Homo sapiens
  misc_RNA (1)...(19): siRNA sense strand
gaagaaugauaggaaccaa

SEQ ID NO: 974690 - RNA, 19 nt, Homo sapiens
  misc_RNA (1)...(19): siRNA sense strand
gauagagugucugaagaug

SEQ ID NO: 974691 - RNA, 19 nt, Homo sapiens
  misc_RNA (1)...(19): siRNA sense strand
gaaaagugcaugcagaaaa

SEQ ID NO: 974692 - RNA, 19 nt, Homo sapiens
  misc_RNA (1)...(19): siRNA sense strand
cacaacagaugcccagguu

SEQ ID NO: 974693 - RNA, 19 nt, Homo sapiens
  misc_RNA (1)...(19): siRNA sense strand
guacugaaucccucucuga

SEQ ID NO: 974694 - RNA, 19 nt, Homo sapiens
  misc_RNA (1)...(19): siRNA sense strand
guagugaugaagaaugaua

SEQ ID NO: 974695 - RNA, 19 nt, Homo sapiens
  misc_RNA (1)...(19): siRNA sense strand
cccagaaucuacaggagua

SEQ ID NO: 974696 - RNA, 19 nt, Homo sapiens
  misc_RNA (1)...(19): siRNA sense strand
ugaggaggaugaugacuuc

SEQ ID NO: 974697 - RNA, 19 nt, Homo sapiens
  misc_RNA (1)...(19): siRNA sense strand
uguuagaucuggauauuca

SEQ ID NO: 974698 - RNA, 19 nt, Homo sapiens
  misc_RNA (1)...(19): siRNA sense strand
cugcgacgcuuccucauga

SEQ ID NO: 974699 - RNA, 19 nt, Homo sapiens
  misc_RNA (1)...(19): siRNA sense strand
gccaaugugugguccaaug

SEQ ID NO: 974700 - RNA, 19 nt, Homo sapiens
  misc_RNA (1)...(19): siRNA sense strand
gguccaauguagugaugaa

SEQ ID NO: 974701 - RNA, 19 nt, Homo sapiens
  misc_RNA (1)...(19): siRNA sense strand
cugaaucccucucugauca

SEQ ID NO: 974702 - RNA, 19 nt, Homo sapiens
  misc_RNA (1)...(19): siRNA sense strand
ggagacagagaugaaauug

SEQ ID NO: 974703 - RNA, 19 nt, Homo sapiens
  misc_RNA (1)...(19): siRNA sense strand
uggcguacccugugcguua

SEQ ID NO: 974704 - RNA, 19 nt, Homo sapiens
  misc_RNA (1)...(19): siRNA sense strand
ggaguugccugaggaggau

SEQ ID NO: 974705 - RNA, 19 nt, Homo sapiens
  misc_RNA (1)...(19): siRNA sense strand
aacagaagaucuuauugug

SEQ ID NO: 974706 - RNA, 19 nt, Homo sapiens
  misc_RNA (1)...(19): siRNA sense strand
caacauacccuuggaacag

SEQ ID NO: 974707 - RNA, 19 nt, Homo sapiens
  misc_RNA (1)...(19): siRNA sense strand
ggaacagaagaucuuauug

SEQ ID NO: 974708 - RNA, 19 nt, Homo sapiens
  misc_RNA (1)...(19): siRNA sense strand
uccaagcauuugugguuua

SEQ ID NO: 974709 - RNA, 19 nt, Homo sapiens
  misc_RNA (1)...(19): siRNA sense strand
gaucuuggucugcgauaga

SEQ ID NO: 974710 - RNA, 19 nt, Homo sapiens
  misc_RNA (1)...(19): siRNA sense strand
cauuugugguuuacuuuga

SEQ ID NO: 974711 - RNA, 19 nt, Homo sapiens
  misc_RNA (1)...(19): siRNA sense strand
aaucgggccuugauagugu

SEQ ID NO: 974712 - RNA, 19 nt, Homo sapiens
  misc_RNA (1)...(19): siRNA sense strand
gggagacagagaugaaauu

SEQ ID NO: 974713 - RNA, 19 nt, Homo sapiens
  misc_RNA (1)...(19): siRNA sense strand
gguggugcaucuaacacaa

SEQ ID NO: 974714 - RNA, 19 nt, Homo sapiens
  misc_RNA (1)...(19): siRNA sense strand
gaugguauaaaccgacaaa

SEQ ID NO: 974715 - RNA, 19 nt, Homo sapiens
  misc_RNA (1)...(19): siRNA sense strand
aagcauuugugguuuacuu

SEQ ID NO: 974716 - RNA, 19 nt, Homo sapiens
  misc_RNA (1)...(19): siRNA sense strand
ggucugcgauagagugucu

SEQ ID NO: 974717 - RNA, 19 nt, Homo sapiens
  misc_RNA (1)...(19): siRNA sense strand
guccaagcauuugugguuu

SEQ ID NO: 974718 - RNA, 19 nt, Homo sapiens
  misc_RNA (1)...(19): siRNA sense strand
gagacagagaugaaauuga

SEQ ID NO: 974719 - RNA, 19 nt, Homo sapiens
  misc_RNA (1)...(19): siRNA sense strand
cuacaggaguaaagcgaau

SEQ ID NO: 974720 - RNA, 19 nt, Homo sapiens
  misc_RNA (1)...(19): siRNA sense strand
uagagugucugaagauggu

SEQ ID NO: 974721 - RNA, 19 nt, Homo sapiens
  misc_RNA (1)...(19): siRNA sense strand
gaaaaucgggccuugauag

SEQ ID NO: 974722 - RNA, 19 nt, Homo sapiens
  misc_RNA (1)...(19): siRNA sense strand
gaucuuauuguggaaguga

SEQ ID NO: 974723 - RNA, 19 nt, Homo sapiens
  misc_RNA (1)...(19): siRNA sense strand
uggaacagaagaucuuauu

SEQ ID NO: 974724 - RNA, 19 nt, Homo sapiens
  misc_RNA (1)...(19): siRNA sense strand
aaagguggccaaagcauuc

SEQ ID NO: 974725 - RNA, 19 nt, Homo sapiens
  misc_RNA (1)...(19): siRNA sense strand
acauggcuuugaauuggua

SEQ ID NO: 974726 - RNA, 19 nt, Homo sapiens
  misc_RNA (1)...(19): siRNA sense strand
cagcagauaguacugaauc

SEQ ID NO: 974727 - RNA, 19 nt, Homo sapiens
  misc_RNA (1)...(19): siRNA sense strand
gcauuugugguuuacuuug

SEQ ID NO: 974728 - RNA, 19 nt, Homo sapiens
  misc_RNA (1)...(19): siRNA sense strand
gaauuagccagucuuacca

SEQ ID NO: 974729 - RNA, 19 nt, Homo sapiens
  misc_RNA (1)...(19): siRNA sense strand
gcuuuagccuucucaacuc

SEQ ID NO: 974730 - RNA, 19 nt, Homo sapiens
  misc_RNA (1)...(19): siRNA sense strand
ugaugaagaaugauaggaa

SEQ ID NO: 974731 - RNA, 19 nt, Homo sapiens
  misc_RNA (1)...(19): siRNA sense strand
caaugugugguccaaugua

SEQ ID NO: 974732 - RNA, 19 nt, Homo sapiens
  misc_RNA (1)...(19): siRNA sense strand
ggaugaugacuucccagaa

SEQ ID NO: 974733 - RNA, 19 nt, Homo sapiens
  misc_RNA (1)...(19): siRNA sense strand
ucaagaauggagccucaaa

SEQ ID NO: 974734 - RNA, 19 nt, Homo sapiens
  misc_RNA (1)...(19): siRNA sense strand
uauguguggugccaaacaa

SEQ ID NO: 974735 - RNA, 19 nt, Homo sapiens
  misc_RNA (1)...(19): siRNA sense strand
gaggaggagauguggagaa

SEQ ID NO: 974736 - RNA, 19 nt, Homo sapiens
  misc_RNA (1)...(19): siRNA sense strand
gaaucccucucugaucauc

SEQ ID NO: 974737 - RNA, 19 nt, Homo sapiens
  misc_RNA (1)...(19): siRNA sense strand
ugauaggaaccaaggcuuu

SEQ ID NO: 974738 - RNA, 19 nt, Homo sapiens
  misc_RNA (1)...(19): siRNA sense strand
agaucuggauauucaagaa

SEQ ID NO: 974739 - RNA, 19 nt, Homo sapiens
  misc_RNA (1)...(19): siRNA sense strand
cagcugcuccuccgucuuc

SEQ ID NO: 974740 - RNA, 19 nt, Homo sapiens
  misc_RNA (1)...(19): siRNA sense strand
gugccaaacaaauuucuug

SEQ ID NO: 974741 - RNA, 19 nt, Homo sapiens
  misc_RNA (1)...(19): siRNA sense strand
ccagguugauagcauugug

SEQ ID NO: 974742 - RNA, 19 nt, Homo sapiens
  misc_RNA (1)...(19): siRNA sense strand
acagaugcccagguugaua

SEQ ID NO: 974743 - RNA, 19 nt, Homo sapiens
  misc_RNA (1)...(19): siRNA sense strand
gucugaagaugguauaaac

SEQ ID NO: 974744 - RNA, 19 nt, Homo sapiens
  misc_RNA (1)...(19): siRNA sense strand
cgauagagugucugaagau

SEQ ID NO: 974745 - RNA, 19 nt, Homo sapiens
  misc_RNA (1)...(19): siRNA sense strand
gaaucuguccaagcauuug

SEQ ID NO: 974746 - RNA, 19 nt, Homo sapiens
  misc_RNA (1)...(19): siRNA sense strand
uguccaagcauuugugguu

SEQ ID NO: 974747 - RNA, 19 nt, Homo sapiens
  misc_RNA (1)...(19): siRNA sense strand
aggaggagauguggagaau

SEQ ID NO: 974748 - RNA, 19 nt, Homo sapiens
  misc_RNA (1)...(19): siRNA sense strand
gugcaucuaacacaacaga

SEQ ID NO: 974749 - RNA, 19 nt, Homo sapiens
  misc_RNA (1)...(19): siRNA sense strand
ggucagcagaucccuguca

SEQ ID NO: 974750 - RNA, 19 nt, Homo sapiens
  misc_RNA (1)...(19): siRNA sense strand
uggaacaaaccauagcauu

SEQ ID NO: 974751 - RNA, 19 nt, Homo sapiens
  misc_RNA (1)...(19): siRNA sense strand
ccaagcauuugugguuuac

SEQ ID NO: 974752 - RNA, 19 nt, Homo sapiens
  misc_RNA (1)...(19): siRNA sense strand
aagaauggagccucaaaca

SEQ ID NO: 974753 - RNA, 19 nt, Homo sapiens
  misc_RNA (1)...(19): siRNA sense strand
gaugaaauugaaggccuuu

SEQ ID NO: 974754 - RNA, 19 nt, Homo sapiens
  misc_RNA (1)...(19): siRNA sense strand
aacauacccuuggaacaga

SEQ ID NO: 974755 - RNA, 19 nt, Homo sapiens
  misc_RNA (1)...(19): siRNA sense strand
ucuuguuacugcagagauu

SEQ ID NO: 974756 - RNA, 19 nt, Homo sapiens
  misc_RNA (1)...(19): siRNA sense strand
auguagugaugaagaauga

SEQ ID NO: 974757 - RNA, 19 nt, Homo sapiens
  misc_RNA (1)...(19): siRNA sense strand
gugguccaauguagugaug

SEQ ID NO: 974758 - RNA, 19 nt, Homo sapiens
  misc_RNA (1)...(19): siRNA sense strand
uugauagugucuccucaug

SEQ ID NO: 974759 - RNA, 19 nt, Homo sapiens
  misc_RNA (1)...(19): siRNA sense strand
cuggaccauugauaauaaa

SEQ ID NO: 974760 - RNA, 19 nt, Homo sapiens
  misc_RNA (1)...(19): siRNA sense strand
cagaaaagguggccaaagc

SEQ ID NO: 974761 - RNA, 19 nt, Homo sapiens
  misc_RNA (1)...(19): siRNA sense strand
aaaagugcaugcagaaaag

SEQ ID NO: 974762 - RNA, 19 nt, Homo sapiens
  misc_RNA (1)...(19): siRNA sense strand
gacgcuuccucaugagcaa

SEQ ID NO: 974763 - RNA, 19 nt, Homo sapiens
  misc_RNA (1)...(19): siRNA sense strand
cagaugcccagguugauag

SEQ ID NO: 974764 - RNA, 19 nt, Homo sapiens
  misc_RNA (1)...(19): siRNA sense strand
gaugacuucccagaaucua

SEQ ID NO: 974765 - RNA, 19 nt, Homo sapiens
  misc_RNA (1)...(19): siRNA sense strand
ucagcagacaucaaucuau

SEQ ID NO: 974766 - RNA, 19 nt, Homo sapiens
  misc_RNA (1)...(19): siRNA sense strand
gaauugguagaacuuaguc

SEQ ID NO: 974767 - RNA, 19 nt, Homo sapiens
  misc_RNA (1)...(19): siRNA sense strand
gcuuugaauugguagaacu

SEQ ID NO: 974768 - RNA, 19 nt, Homo sapiens
  misc_RNA (1)...(19): siRNA sense strand
aaugugugguccaauguag

SEQ ID NO: 974769 - RNA, 19 nt, Homo sapiens
  misc_RNA (1)...(19): siRNA sense strand
agaagaucuuauuguggaa

SEQ ID NO: 974770 - RNA, 19 nt, Homo sapiens
  misc_RNA (1)...(19): siRNA sense strand
gcauuguggaucccauguu

SEQ ID NO: 974771 - RNA, 19 nt, Homo sapiens
  misc_RNA (1)...(19): siRNA sense strand
cuauucagcagacaucaau

SEQ ID NO: 974772 - RNA, 19 nt, Homo sapiens
  misc_RNA (1)...(19): siRNA sense strand
gcacaaaccuucagccaaa

SEQ ID NO: 974773 - RNA, 19 nt, Homo sapiens
  misc_RNA (1)...(19): siRNA sense strand
caacauaccugucuucguu

SEQ ID NO: 974774 - RNA, 19 nt, Homo sapiens
  misc_RNA (1)...(19): siRNA sense strand
gaagcacuguggcaacaua

SEQ ID NO: 974775 - RNA, 19 nt, Homo sapiens
  misc_RNA (1)...(19): siRNA sense strand
gacaguggcuuuguacaua

SEQ ID NO: 974776 - RNA, 19 nt, Homo sapiens
  misc_RNA (1)...(19): siRNA sense strand
caauguuccugcuuucuua

SEQ ID NO: 974777 - RNA, 19 nt, Homo sapiens
  misc_RNA (1)...(19): siRNA sense strand
gagaagaacgauaccauuu

SEQ ID NO: 974778 - RNA, 19 nt, Homo sapiens
  misc_RNA (1)...(19): siRNA sense strand
ucccagaacuucaccuuua

SEQ ID NO: 974779 - RNA, 19 nt, Homo sapiens
  misc_RNA (1)...(19): siRNA sense strand
gcgacaauauccucacuuu

SEQ ID NO: 974780 - RNA, 19 nt, Homo sapiens
  misc_RNA (1)...(19): siRNA sense strand
ugagggagcuggagaacuu

SEQ ID NO: 974781 - RNA, 19 nt, Homo sapiens
  misc_RNA (1)...(19): siRNA sense strand
cagcugcuauucauucuuu

SEQ ID NO: 974782 - RNA, 19 nt, Homo sapiens
  misc_RNA (1)...(19): siRNA sense strand
ggaggcaccuggcagaguu

SEQ ID NO: 974783 - RNA, 19 nt, Homo sapiens
  misc_RNA (1)...(19): siRNA sense strand
gacaauauccucacuuuag

SEQ ID NO: 974784 - RNA, 19 nt, Homo sapiens
  misc_RNA (1)...(19): siRNA sense strand
guucaaggcuacaacaaug

SEQ ID NO: 974785 - RNA, 19 nt, Homo sapiens
  misc_RNA (1)...(19): siRNA sense strand
guacaagggcagcugauaa

SEQ ID NO: 974786 - RNA, 19 nt, Homo sapiens
  misc_RNA (1)...(19): siRNA sense strand
uuacagaagucuaccaaug

SEQ ID NO: 974787 - RNA, 19 nt, Homo sapiens
  misc_RNA (1)...(19): siRNA sense strand
uaaggacaguggcuuugua

SEQ ID NO: 974788 - RNA, 19 nt, Homo sapiens
  misc_RNA (1)...(19): siRNA sense strand
gaagugaugucaggagcuu

SEQ ID NO: 974789 - RNA, 19 nt, Homo sapiens
  misc_RNA (1)...(19): siRNA sense strand
cauuaacacucaagccuuu

SEQ ID NO: 974790 - RNA, 19 nt, Homo sapiens
  misc_RNA (1)...(19): siRNA sense strand
auaccugucuucguuauua

SEQ ID NO: 974791 - RNA, 19 nt, Homo sapiens
  misc_RNA (1)...(19): siRNA sense strand
gaaccuucaggcaaacuua

SEQ ID NO: 974792 - RNA, 19 nt, Homo sapiens
  misc_RNA (1)...(19): siRNA sense strand
ggacugaacaugaaaagua

SEQ ID NO: 974793 - RNA, 19 nt, Homo sapiens
  misc_RNA (1)...(19): siRNA sense strand
ggacagauuagaacauaug

SEQ ID NO: 974794 - RNA, 19 nt, Homo sapiens
  misc_RNA (1)...(19): siRNA sense strand
caaugaugguucucucaaa

SEQ ID NO: 974795 - RNA, 19 nt, Homo sapiens
  misc_RNA (1)...(19): siRNA sense strand
gcacacgguugcugcuguu

SEQ ID NO: 974796 - RNA, 19 nt, Homo sapiens
  misc_RNA (1)...(19): siRNA sense strand
ggaaagccuucagguuguu

SEQ ID NO: 974797 - RNA, 19 nt, Homo sapiens
  misc_RNA (1)...(19): siRNA sense strand
guugaacucugucacaaau

SEQ ID NO: 974798 - RNA, 19 nt, Homo sapiens
  misc_RNA (1)...(19): siRNA sense strand
gcagagauuucuuuuguug

SEQ ID NO: 974799 - RNA, 19 nt, Homo sapiens
  misc_RNA (1)...(19): siRNA sense strand
uaagguaccugaggagaau

SEQ ID NO: 974800 - RNA, 19 nt, Homo sapiens
  misc_RNA (1)...(19): siRNA sense strand
ccaauaaucacauccaaug

SEQ ID NO: 974801 - RNA, 19 nt, Homo sapiens
  misc_RNA (1)...(19): siRNA sense strand
guucuggguucuauauuga

SEQ ID NO: 974802 - RNA, 19 nt, Homo sapiens
  misc_RNA (1)...(19): siRNA sense strand
uggaguaccugcgacaaua

SEQ ID NO: 974803 - RNA, 19 nt, Homo sapiens
  misc_RNA (1)...(19): siRNA sense strand
gaaauugugaugccaagga

SEQ ID NO: 974804 - RNA, 19 nt, Homo sapiens
  misc_RNA (1)...(19): siRNA sense strand
caggacaacuucaucuaga

SEQ ID NO: 974805 - RNA, 19 nt, Homo sapiens
  misc_RNA (1)...(19): siRNA sense strand
caucuuggguguugacaau

SEQ ID NO: 974806 - RNA, 19 nt, Homo sapiens
  misc_RNA (1)...(19): siRNA sense strand
aaggacagauuagaacaua

SEQ ID NO: 974807 - RNA, 19 nt, Homo sapiens
  misc_RNA (1)...(19): siRNA sense strand
caagaucuuaugcagguua

SEQ ID NO: 974808 - RNA, 19 nt, Homo sapiens
  misc_RNA (1)...(19): siRNA sense strand
gaggagcgcuuagccagau

SEQ ID NO: 974809 - RNA, 19 nt, Homo sapiens
  misc_RNA (1)...(19): siRNA sense strand
ugaacucugucacaaauuc

SEQ ID NO: 974810 - RNA, 19 nt, Homo sapiens
  misc_RNA (1)...(19): siRNA sense strand
uauccucacuuuaggugua

SEQ ID NO: 974811 - RNA, 19 nt, Homo sapiens
  misc_RNA (1)...(19): siRNA sense strand
cagauuagaacauaugcua

SEQ ID NO: 974812 - RNA, 19 nt, Homo sapiens
  misc_RNA (1)...(19): siRNA sense strand
ggaguucuguggaaguaca

SEQ ID NO: 974813 - RNA, 19 nt, Homo sapiens
  misc_RNA (1)...(19): siRNA sense strand
cgacaauauccucacuuua

SEQ ID NO: 974814 - RNA, 19 nt, Homo sapiens
  misc_RNA (1)...(19): siRNA sense strand
caugagggauaaugaagau

SEQ ID NO: 974815 - RNA, 19 nt, Homo sapiens
  misc_RNA (1)...(19): siRNA sense strand
acucaagccuuucuacaug

SEQ ID NO: 974816 - RNA, 19 nt, Homo sapiens
  misc_RNA (1)...(19): siRNA sense strand
ccuugacaguagagaauua

SEQ ID NO: 974817 - RNA, 19 nt, Homo sapiens
  misc_RNA (1)...(19): siRNA sense strand
gcaagcaucccagaacuuc

SEQ ID NO: 974818 - RNA, 19 nt, Homo sapiens
  misc_RNA (1)...(19): siRNA sense strand
ggacaguggcuuuguacau

SEQ ID NO: 974819 - RNA, 19 nt, Homo sapiens
  misc_RNA (1)...(19): siRNA sense strand
cgacagcugcuauucauuc

SEQ ID NO: 974820 - RNA, 19 nt, Homo sapiens
  misc_RNA (1)...(19): siRNA sense strand
gaacgauaccauuucuuag

SEQ ID NO: 974821 - RNA, 19 nt, Homo sapiens
  misc_RNA (1)...(19): siRNA sense strand
uaugauagaagcagagauu

SEQ ID NO: 974822 - RNA, 19 nt, Homo sapiens
  misc_RNA (1)...(19): siRNA sense strand
cacuuuagguguaggacua

SEQ ID NO: 974823 - RNA, 19 nt, Homo sapiens
  misc_RNA (1)...(19): siRNA sense strand
guacauauucauacuccaa

SEQ ID NO: 974824 - RNA, 19 nt, Homo sapiens
  misc_RNA (1)...(19): siRNA sense strand
ugacagccuucaagaucuu

SEQ ID NO: 974825 - RNA, 19 nt, Homo sapiens
  misc_RNA (1)...(19): siRNA sense strand
caguggagaucuuaaagca

SEQ ID NO: 974826 - RNA, 19 nt, Homo sapiens
  misc_RNA (1)...(19): siRNA sense strand
gacaguagagaauuaacuu

SEQ ID NO: 974827 - RNA, 19 nt, Homo sapiens
  misc_RNA (1)...(19): siRNA sense strand
gugcugaccuacggacuga

SEQ ID NO: 974828 - RNA, 19 nt, Homo sapiens
  misc_RNA (1)...(19): siRNA sense strand
gguucuauauugaggauuc

SEQ ID NO: 974829 - RNA, 19 nt, Homo sapiens
  misc_RNA (1)...(19): siRNA sense strand
uggaaagccuucagguugu

SEQ ID NO: 974830 - RNA, 19 nt, Homo sapiens
  misc_RNA (1)...(19): siRNA sense strand
ggaccuucgucgauuugga

SEQ ID NO: 974831 - RNA, 19 nt, Homo sapiens
  misc_RNA (1)...(19): siRNA sense strand
ugaagauguugaacucugu

SEQ ID NO: 974832 - RNA, 19 nt, Homo sapiens
  misc_RNA (1)...(19): siRNA sense strand
cuacaacaaugaugguucu

SEQ ID NO: 974833 - RNA, 19 nt, Homo sapiens
  misc_RNA (1)...(19): siRNA sense strand
uuacucaaguguuuaccuu

SEQ ID NO: 974834 - RNA, 19 nt, Homo sapiens
  misc_RNA (1)...(19): siRNA sense strand
ucacauccaaugacucuga

SEQ ID NO: 974835 - RNA, 19 nt, Homo sapiens
  misc_RNA (1)...(19): siRNA sense strand
acucaaguguuuaccuuug

SEQ ID NO: 974836 - RNA, 19 nt, Homo sapiens
  misc_RNA (1)...(19): siRNA sense strand
caagguuuccucauucaug

SEQ ID NO: 974837 - RNA, 19 nt, Homo sapiens
  misc_RNA (1)...(19): siRNA sense strand
uuagccagaucgggacuua

SEQ ID NO: 974838 - RNA, 19 nt, Homo sapiens
  misc_RNA (1)...(19): siRNA sense strand
ccuacggacugaacaugaa

SEQ ID NO: 974839 - RNA, 19 nt, Homo sapiens
  misc_RNA (1)...(19): siRNA sense strand
uacaagggcagcugauaaa

SEQ ID NO: 974840 - RNA, 19 nt, Homo sapiens
  misc_RNA (1)...(19): siRNA sense strand
ccagaaggaagucuuguuc

SEQ ID NO: 974841 - RNA, 19 nt, Homo sapiens
  misc_RNA (1)...(19): siRNA sense strand
aaaaguaccuggugaagca

SEQ ID NO: 974842 - RNA, 19 nt, Homo sapiens
  misc_RNA (1)...(19): siRNA sense strand
caaaauguccugaagaugu

SEQ ID NO: 974843 - RNA, 19 nt, Homo sapiens
  misc_RNA (1)...(19): siRNA sense strand
gaucuuaugcagguuauag

SEQ ID NO: 974844 - RNA, 19 nt, Homo sapiens
  misc_RNA (1)...(19): siRNA sense strand
ggaguaccugcgacaauau

SEQ ID NO: 974845 - RNA, 19 nt, Homo sapiens
  misc_RNA (1)...(19): siRNA sense strand
gugaagcacuguggcaaca

SEQ ID NO: 974846 - RNA, 19 nt, Homo sapiens
  misc_RNA (1)...(19): siRNA sense strand
caauaaucacauccaauga

SEQ ID NO: 974847 - RNA, 19 nt, Homo sapiens
  misc_RNA (1)...(19): siRNA sense strand
cguucuggguucuauauug

SEQ ID NO: 974848 - RNA, 19 nt, Homo sapiens
  misc_RNA (1)...(19): siRNA sense strand
ccaaugguaucuggaccuu

SEQ ID NO: 974849 - RNA, 19 nt, Homo sapiens
  misc_RNA (1)...(19): siRNA sense strand
ugaagcaguggagaucuua

SEQ ID NO: 974850 - RNA, 19 nt, Homo sapiens
  misc_RNA (1)...(19): siRNA sense strand
aagcagagauuucuuuugu

SEQ ID NO: 974851 - RNA, 19 nt, Homo sapiens
  misc_RNA (1)...(19): siRNA sense strand
acaguggcuuuguacauau

SEQ ID NO: 974852 - RNA, 19 nt, Homo sapiens
  misc_RNA (1)...(19): siRNA sense strand
gaagcaguggagaucuuaa

SEQ ID NO: 974853 - RNA, 19 nt, Homo sapiens
  misc_RNA (1)...(19): siRNA sense strand
ugggaguucuguggaagua

SEQ ID NO: 974854 - RNA, 19 nt, Homo sapiens
  misc_RNA (1)...(19): siRNA sense strand
gaagcgacagcugcuauuc

SEQ ID NO: 974855 - RNA, 19 nt, Homo sapiens
  misc_RNA (1)...(19): siRNA sense strand
gaacucugucacaaauuca

SEQ ID NO: 974856 - RNA, 19 nt, Homo sapiens
  misc_RNA (1)...(19): siRNA sense strand
cuacaugagggauaaugaa

SEQ ID NO: 974857 - RNA, 19 nt, Homo sapiens
  misc_RNA (1)...(19): siRNA sense strand
uaaagcaagcaucccagaa

SEQ ID NO: 974858 - RNA, 19 nt, Homo sapiens
  misc_RNA (1)...(19): siRNA sense strand
acaauauccucacuuuagg

SEQ ID NO: 974859 - RNA, 19 nt, Homo sapiens
  misc_RNA (1)...(19): siRNA sense strand
gauucaggccuugacagua

SEQ ID NO: 974860 - RNA, 19 nt, Homo sapiens
  misc_RNA (1)...(19): siRNA sense strand
caguggcuuuguacauauu

SEQ ID NO: 974861 - RNA, 19 nt, Homo sapiens
  misc_RNA (1)...(19): siRNA sense strand
agaagaacgauaccauuuc

SEQ ID NO: 974862 - RNA, 19 nt, Homo sapiens
  misc_RNA (1)...(19): siRNA sense strand
agagaagaacgauaccauu

SEQ ID NO: 974863 - RNA, 19 nt, Homo sapiens
  misc_RNA (1)...(19): siRNA sense strand
uaccugucuucguuauuaa

SEQ ID NO: 974864 - RNA, 19 nt, Homo sapiens
  misc_RNA (1)...(19): siRNA sense strand
auucaggccuugacaguag

SEQ ID NO: 974865 - RNA, 19 nt, Homo sapiens
  misc_RNA (1)...(19): siRNA sense strand
ggcagaguuuuauaugaua

SEQ ID NO: 974866 - RNA, 19 nt, Homo sapiens
  misc_RNA (1)...(19): siRNA sense strand
ucagguuguugcagauuca

SEQ ID NO: 974867 - RNA, 19 nt, Homo sapiens
  misc_RNA (1)...(19): siRNA sense strand
gacagcugcuauucauucu

SEQ ID NO: 974868 - RNA, 19 nt, Homo sapiens
  misc_RNA (1)...(19): siRNA sense strand
ucccaagguuuccucauuc

SEQ ID NO: 974869 - RNA, 19 nt, Homo sapiens
  misc_RNA (1)...(19): siRNA sense strand
cagugcaucuuggguguug

SEQ ID NO: 974870 - RNA, 19 nt, Homo sapiens
  misc_RNA (1)...(19): siRNA sense strand
gauguugaacucugucaca

SEQ ID NO: 974871 - RNA, 19 nt, Homo sapiens
  misc_RNA (1)...(19): siRNA sense strand
aggacaacuucaucuagaa

SEQ ID NO: 974872 - RNA, 19 nt, Homo sapiens
  misc_RNA (1)...(19): siRNA sense strand
gaacaucacggaagacuua

SEQ ID NO: 974873 - RNA, 19 nt, Homo sapiens
  misc_RNA (1)...(19): siRNA sense strand
agaaacagcugucaacauu

SEQ ID NO: 974874 - RNA, 19 nt, Homo sapiens
  misc_RNA (1)...(19): siRNA sense strand
ccacgaacguucugguuua

SEQ ID NO: 974875 - RNA, 19 nt, Homo sapiens
  misc_RNA (1)...(19): siRNA sense strand
ggacagauacaguacauuu

SEQ ID NO: 974876 - RNA, 19 nt, Homo sapiens
  misc_RNA (1)...(19): siRNA sense strand
agaauuaccucaacgugua

SEQ ID NO: 974877 - RNA, 19 nt, Homo sapiens
  misc_RNA (1)...(19): siRNA sense strand
gcaguuguaugacgaagaa

SEQ ID NO: 974878 - RNA, 19 nt, Homo sapiens
  misc_RNA (1)...(19): siRNA sense strand
ccaagagaguucugaguaa

SEQ ID NO: 974879 - RNA, 19 nt, Homo sapiens
  misc_RNA (1)...(19): siRNA sense strand
ggacauggacuguggauau

SEQ ID NO: 974880 - RNA, 19 nt, Homo sapiens
  misc_RNA (1)...(19): siRNA sense strand
gauaauaguucugcagguu

SEQ ID NO: 974881 - RNA, 19 nt, Homo sapiens
  misc_RNA (1)...(19): siRNA sense strand
ccaauuuccuuauacguuu

SEQ ID NO: 974882 - RNA, 19 nt, Homo sapiens
  misc_RNA (1)...(19): siRNA sense strand
gccagaacauggaggaaua

SEQ ID NO: 974883 - RNA, 19 nt, Homo sapiens
  misc_RNA (1)...(19): siRNA sense strand
agaaauacgugaaccgauu

SEQ ID NO: 974884 - RNA, 19 nt, Homo sapiens
  misc_RNA (1)...(19): siRNA sense strand
caagagaguucugaguaaa

SEQ ID NO: 974885 - RNA, 19 nt, Homo sapiens
  misc_RNA (1)...(19): siRNA sense strand
caaucgcgcugcucacuuu

SEQ ID NO: 974886 - RNA, 19 nt, Homo sapiens
  misc_RNA (1)...(19): siRNA sense strand
gcacuuugacagagaauaa

SEQ ID NO: 974887 - RNA, 19 nt, Homo sapiens
  misc_RNA (1)...(19): siRNA sense strand
ggaccuggcucaacuggau

SEQ ID NO: 974888 - RNA, 19 nt, Homo sapiens
  misc_RNA (1)...(19): siRNA sense strand
ccaaggcucugcugaacaa

SEQ ID NO: 974889 - RNA, 19 nt, Homo sapiens
  misc_RNA (1)...(19): siRNA sense strand
ggccuacgcucucgagaaa

SEQ ID NO: 974890 - RNA, 19 nt, Homo sapiens
  misc_RNA (1)...(19): siRNA sense strand
ugucugacgucuuugauuu

SEQ ID NO: 974891 - RNA, 19 nt, Homo sapiens
  misc_RNA (1)...(19): siRNA sense strand
cgagcugucugacgucuuu

SEQ ID NO: 974892 - RNA, 19 nt, Homo sapiens
  misc_RNA (1)...(19): siRNA sense strand
gagaugcagugcucccaaa

SEQ ID NO: 974893 - RNA, 19 nt, Homo sapiens
  misc_RNA (1)...(19): siRNA sense strand
ggacaaauuccucuuccuu

SEQ ID NO: 974894 - RNA, 19 nt, Homo sapiens
  misc_RNA (1)...(19): siRNA sense strand
gagcuugucuccgaauuca

SEQ ID NO: 974895 - RNA, 19 nt, Homo sapiens
  misc_RNA (1)...(19): siRNA sense strand
cagcugcaguuuacucauu

SEQ ID NO: 974896 - RNA, 19 nt, Homo sapiens
  misc_RNA (1)...(19): siRNA sense strand
gaccacagacuacuuauag

SEQ ID NO: 974897 - RNA, 19 nt, Homo sapiens
  misc_RNA (1)...(19): siRNA sense strand
ccaaugugcugcugaccaa

SEQ ID NO: 974898 - RNA, 19 nt, Homo sapiens
  misc_RNA (1)...(19): siRNA sense strand
ggaagacuuaggacagaua

SEQ ID NO: 974899 - RNA, 19 nt, Homo sapiens
  misc_RNA (1)...(19): siRNA sense strand
gccaagagaguucugagua

SEQ ID NO: 974900 - RNA, 19 nt, Homo sapiens
  misc_RNA (1)...(19): siRNA sense strand
ccgaugagaucaacgucua

SEQ ID NO: 974901 - RNA, 19 nt, Homo sapiens
  misc_RNA (1)...(19): siRNA sense strand
agaccaaccugcacuuguu

SEQ ID NO: 974902 - RNA, 19 nt, Homo sapiens
  misc_RNA (1)...(19): siRNA sense strand
ccagaccacagacuacuua

SEQ ID NO: 974903 - RNA, 19 nt, Homo sapiens
  misc_RNA (1)...(19): siRNA sense strand
gcucaagacuaccaaguac

SEQ ID NO: 974904 - RNA, 19 nt, Homo sapiens
  misc_RNA (1)...(19): siRNA sense strand
uuacuugacuugccugaug

SEQ ID NO: 974905 - RNA, 19 nt, Homo sapiens
  misc_RNA (1)...(19): siRNA sense strand
ccuuauacguuuccauuga

SEQ ID NO: 974906 - RNA, 19 nt, Homo sapiens
  misc_RNA (1)...(19): siRNA sense strand
ccagugguaucuaaucuuc

SEQ ID NO: 974907 - RNA, 19 nt, Homo sapiens
  misc_RNA (1)...(19): siRNA sense strand
acccaaagcugcuggagaa

SEQ ID NO: 974908 - RNA, 19 nt, Homo sapiens
  misc_RNA (1)...(19): siRNA sense strand
guuaaagcaugccaagugu

SEQ ID NO: 974909 - RNA, 19 nt, Homo sapiens
  misc_RNA (1)...(19): siRNA sense strand
ggagcaaaacucagaauua

SEQ ID NO: 974910 - RNA, 19 nt, Homo sapiens
  misc_RNA (1)...(19): siRNA sense strand
ccaaacaacgaccugagua

SEQ ID NO: 974911 - RNA, 19 nt, Homo sapiens
  misc_RNA (1)...(19): siRNA sense strand
gauaacguguggcuucagu

SEQ ID NO: 974912 - RNA, 19 nt, Homo sapiens
  misc_RNA (1)...(19): siRNA sense strand
gcaaagugagcaugagguu

SEQ ID NO: 974913 - RNA, 19 nt, Homo sapiens
  misc_RNA (1)...(19): siRNA sense strand
caaagcugcuggagaaggu

SEQ ID NO: 974914 - RNA, 19 nt, Homo sapiens
  misc_RNA (1)...(19): siRNA sense strand
cggagucccugaaacuauu

SEQ ID NO: 974915 - RNA, 19 nt, Homo sapiens
  misc_RNA (1)...(19): siRNA sense strand
caacguguacuuugucuuc

SEQ ID NO: 974916 - RNA, 19 nt, Homo sapiens
  misc_RNA (1)...(19): siRNA sense strand
gacauggacuguggauaug

SEQ ID NO: 974917 - RNA, 19 nt, Homo sapiens
  misc_RNA (1)...(19): siRNA sense strand
gaccaaccugcacuuguua

SEQ ID NO: 974918 - RNA, 19 nt, Homo sapiens
  misc_RNA (1)...(19): siRNA sense strand
ugaagacgauagaagacuu

SEQ ID NO: 974919 - RNA, 19 nt, Homo sapiens
  misc_RNA (1)...(19): siRNA sense strand
caagagaagaagucauuau

SEQ ID NO: 974920 - RNA, 19 nt, Homo sapiens
  misc_RNA (1)...(19): siRNA sense strand
ugacgucuuugauuucuuc

SEQ ID NO: 974921 - RNA, 19 nt, Homo sapiens
  misc_RNA (1)...(19): siRNA sense strand
cgaacguucugguuuaaca

SEQ ID NO: 974922 - RNA, 19 nt, Homo sapiens
  misc_RNA (1)...(19): siRNA sense strand
ggucgacgccucugcagaa

SEQ ID NO: 974923 - RNA, 19 nt, Homo sapiens
  misc_RNA (1)...(19): siRNA sense strand
gaaauacgugaaccgauuc

SEQ ID NO: 974924 - RNA, 19 nt, Homo sapiens
  misc_RNA (1)...(19): siRNA sense strand
gggagugucuuacaguucu

SEQ ID NO: 974925 - RNA, 19 nt, Homo sapiens
  misc_RNA (1)...(19): siRNA sense strand
aaacagcugucaacauugc

SEQ ID NO: 974926 - RNA, 19 nt, Homo sapiens
  misc_RNA (1)...(19): siRNA sense strand
gcgagaagccaaacaacga

SEQ ID NO: 974927 - RNA, 19 nt, Homo sapiens
  misc_RNA (1)...(19): siRNA sense strand
gaucccaauuuccuuauac

SEQ ID NO: 974928 - RNA, 19 nt, Homo sapiens
  misc_RNA (1)...(19): siRNA sense strand
ccaaugaugucagcaugau

SEQ ID NO: 974929 - RNA, 19 nt, Homo sapiens
  misc_RNA (1)...(19): siRNA sense strand
gcacucaccaucugcaaca

SEQ ID NO: 974930 - RNA, 19 nt, Homo sapiens
  misc_RNA (1)...(19): siRNA sense strand
ucaccguggcuuugauuua

SEQ ID NO: 974931 - RNA, 19 nt, Homo sapiens
  misc_RNA (1)...(19): siRNA sense strand
gaaacagcugucaacauug

SEQ ID NO: 974932 - RNA, 19 nt, Homo sapiens
  misc_RNA (1)...(19): siRNA sense strand
agucacagcugcaguuuac

SEQ ID NO: 974933 - RNA, 19 nt, Homo sapiens
  misc_RNA (1)...(19): siRNA sense strand
gcacugcugcccagauugu

SEQ ID NO: 974934 - RNA, 19 nt, Homo sapiens
  misc_RNA (1)...(19): siRNA sense strand
ccaacauggugcuguacuu

SEQ ID NO: 974935 - RNA, 19 nt, Homo sapiens
  misc_RNA (1)...(19): siRNA sense strand
ggcacccgcuuaccgauga

SEQ ID NO: 974936 - RNA, 19 nt, Homo sapiens
  misc_RNA (1)...(19): siRNA sense strand
caacaaguccagccacaag

SEQ ID NO: 974937 - RNA, 19 nt, Homo sapiens
  misc_RNA (1)...(19): siRNA sense strand
ccacagacuacuuauagga

SEQ ID NO: 974938 - RNA, 19 nt, Homo sapiens
  misc_RNA (1)...(19): siRNA sense strand
uuccuuaccuggccuacua

SEQ ID NO: 974939 - RNA, 19 nt, Homo sapiens
  misc_RNA (1)...(19): siRNA sense strand
agagaguucugaguaaaga

SEQ ID NO: 974940 - RNA, 19 nt, Homo sapiens
  misc_RNA (1)...(19): siRNA sense strand
gagcaaaacucagaauuac

SEQ ID NO: 974941 - RNA, 19 nt, Homo sapiens
  misc_RNA (1)...(19): siRNA sense strand
ccauugaaauuguuaaagc

SEQ ID NO: 974942 - RNA, 19 nt, Homo sapiens
  misc_RNA (1)...(19): siRNA sense strand
gacaaccggcucaagacua

SEQ ID NO: 974943 - RNA, 19 nt, Homo sapiens
  misc_RNA (1)...(19): siRNA sense strand
gaagaccaagggcaaagug

SEQ ID NO: 974944 - RNA, 19 nt, Homo sapiens
  misc_RNA (1)...(19): siRNA sense strand
gugaaccgauucuggaaag

SEQ ID NO: 974945 - RNA, 19 nt, Homo sapiens
  misc_RNA (1)...(19): siRNA sense strand
guucgugggccuccuguuu

SEQ ID NO: 974946 - RNA, 19 nt, Homo sapiens
  misc_RNA (1)...(19): siRNA sense strand
caucuacgcaggacaugaa

SEQ ID NO: 974947 - RNA, 19 nt, Homo sapiens
  misc_RNA (1)...(19): siRNA sense strand
cacgaacguucugguuuaa

SEQ ID NO: 974948 - RNA, 19 nt, Homo sapiens
  misc_RNA (1)...(19): siRNA sense strand
gaacccagagcaccaaguc

SEQ ID NO: 974949 - RNA, 19 nt, Homo sapiens
  misc_RNA (1)...(19): siRNA sense strand
ugacagagaauaagauggu

SEQ ID NO: 974950 - RNA, 19 nt, Homo sapiens
  misc_RNA (1)...(19): siRNA sense strand
ucaucgcgcugcucaacuu

SEQ ID NO: 974951 - RNA, 19 nt, Homo sapiens
  misc_RNA (1)...(19): siRNA sense strand
agaagagcaugguggugaa

SEQ ID NO: 974952 - RNA, 19 nt, Homo sapiens
  misc_RNA (1)...(19): siRNA sense strand
gccgaauccucccuggaaa

SEQ ID NO: 974953 - RNA, 19 nt, Homo sapiens
  misc_RNA (1)...(19): siRNA sense strand
gaucagccacgaacaaagg

SEQ ID NO: 974954 - RNA, 19 nt, Homo sapiens
  misc_RNA (1)...(19): siRNA sense strand
ugaucccaauuuccuuaua

SEQ ID NO: 974955 - RNA, 19 nt, Homo sapiens
  misc_RNA (1)...(19): siRNA sense strand
aaucuucccugcggacauu

SEQ ID NO: 974956 - RNA, 19 nt, Homo sapiens
  misc_RNA (1)...(19): siRNA sense strand
gaggaauaccggccacgaa

SEQ ID NO: 974957 - RNA, 19 nt, Homo sapiens
  misc_RNA (1)...(19): siRNA sense strand
cacugugucugguguagaa

SEQ ID NO: 974958 - RNA, 19 nt, Homo sapiens
  misc_RNA (1)...(19): siRNA sense strand
aaacuggcacuuugacaga

SEQ ID NO: 974959 - RNA, 19 nt, Homo sapiens
  misc_RNA (1)...(19): siRNA sense strand
cuuauacguuuccauugaa

SEQ ID NO: 974960 - RNA, 19 nt, Homo sapiens
  misc_RNA (1)...(19): siRNA sense strand
ucuccgaauucaauccuuu

SEQ ID NO: 974961 - RNA, 19 nt, Homo sapiens
  misc_RNA (1)...(19): siRNA sense strand
cagcccugcucuucaguug

SEQ ID NO: 974962 - RNA, 19 nt, Homo sapiens
  misc_RNA (1)...(19): siRNA sense strand
caacugggccucggagcuu

SEQ ID NO: 974963 - RNA, 19 nt, Homo sapiens
  misc_RNA (1)...(19): siRNA sense strand
gugccgagcucugaacauc

SEQ ID NO: 974964 - RNA, 19 nt, Homo sapiens
  misc_RNA (1)...(19): siRNA sense strand
accaggacaugcaguugua

SEQ ID NO: 974965 - RNA, 19 nt, Homo sapiens
  misc_RNA (1)...(19): siRNA sense strand
aaaccaaggcucugcugaa

SEQ ID NO: 974966 - RNA, 19 nt, Homo sapiens
  misc_RNA (1)...(19): siRNA sense strand
uaagaugguuuuccgaaga

SEQ ID NO: 974967 - RNA, 19 nt, Homo sapiens
  misc_RNA (1)...(19): siRNA sense strand
gcagggaagaaaagaaaua

SEQ ID NO: 974968 - RNA, 19 nt, Homo sapiens
  misc_RNA (1)...(19): siRNA sense strand
cgucuuugauuucuucauc

SEQ ID NO: 974969 - RNA, 19 nt, Homo sapiens
  misc_RNA (1)...(19): siRNA sense strand
cauaggugauggagccaau

SEQ ID NO: 974970 - RNA, 19 nt, Homo sapiens
  misc_RNA (1)...(19): siRNA sense strand
cugcacugcugcccagauu

SEQ ID NO: 974971 - RNA, 19 nt, Homo sapiens
  misc_RNA (1)...(19): siRNA sense strand
cuacaagaguggccagaac

SEQ ID NO: 974972 - RNA, 19 nt, Homo sapiens
  misc_RNA (1)...(19): siRNA sense strand
gaacuuaacugaaucuaga

SEQ ID NO: 974973 - RNA, 19 nt, Homo sapiens
  misc_RNA (1)...(19): siRNA sense strand
caugaaagcucaccuaauu

SEQ ID NO: 974974 - RNA, 19 nt, Homo sapiens
  misc_RNA (1)...(19): siRNA sense strand
gaggagaucugaagaauca

SEQ ID NO: 974975 - RNA, 19 nt, Homo sapiens
  misc_RNA (1)...(19): siRNA sense strand
caacaacaacuacgaaaua

SEQ ID NO: 974976 - RNA, 19 nt, Homo sapiens
  misc_RNA (1)...(19): siRNA sense strand
gcagagacaauaugguuua

SEQ ID NO: 974977 - RNA, 19 nt, Homo sapiens
  misc_RNA (1)...(19): siRNA sense strand
gaagaaugccuccaucuga

SEQ ID NO: 974978 - RNA, 19 nt, Homo sapiens
  misc_RNA (1)...(19): siRNA sense strand
gagaaaagcugauaugaug

SEQ ID NO: 974979 - RNA, 19 nt, Homo sapiens
  misc_RNA (1)...(19): siRNA sense strand
gggcucauauguacaaauu

SEQ ID NO: 974980 - RNA, 19 nt, Homo sapiens
  misc_RNA (1)...(19): siRNA sense strand
gaggauaaauacaguacaa

SEQ ID NO: 974981 - RNA, 19 nt, Homo sapiens
  misc_RNA (1)...(19): siRNA sense strand
gguaaagugucauauuguu

SEQ ID NO: 974982 - RNA, 19 nt, Homo sapiens
  misc_RNA (1)...(19): siRNA sense strand
gaacuguuauuggaauuga

SEQ ID NO: 974983 - RNA, 19 nt, Homo sapiens
  misc_RNA (1)...(19): siRNA sense strand
uauggaaacucaugugaaa

SEQ ID NO: 974984 - RNA, 19 nt, Homo sapiens
  misc_RNA (1)...(19): siRNA sense strand
gaacuucagauaacaagaa

SEQ ID NO: 974985 - RNA, 19 nt, Homo sapiens
  misc_RNA (1)...(19): siRNA sense strand
gagacaauaugguuuagau

SEQ ID NO: 974986 - RNA, 19 nt, Homo sapiens
  misc_RNA (1)...(19): siRNA sense strand
gugaagauauggaaacuca

SEQ ID NO: 974987 - RNA, 19 nt, Homo sapiens
  misc_RNA (1)...(19): siRNA sense strand
gauuggagcaugugaagua

SEQ ID NO: 974988 - RNA, 19 nt, Homo sapiens
  misc_RNA (1)...(19): siRNA sense strand
gaaaauuccugaaaaguag

SEQ ID NO: 974989 - RNA, 19 nt, Homo sapiens
  misc_RNA (1)...(19): siRNA sense strand
caauauggaacuucagaua

SEQ ID NO: 974990 - RNA, 19 nt, Homo sapiens
  misc_RNA (1)...(19): siRNA sense strand
aaaccgaacauuaugcuua

SEQ ID NO: 974991 - RNA, 19 nt, Homo sapiens
  misc_RNA (1)...(19): siRNA sense strand
ucaggaacauguugacuug

SEQ ID NO: 974992 - RNA, 19 nt, Homo sapiens
  misc_RNA (1)...(19): siRNA sense strand
aaacaaagcaugccaaucu

SEQ ID NO: 974993 - RNA, 19 nt, Homo sapiens
  misc_RNA (1)...(19): siRNA sense strand
gaacaaaggccuggauugg

SEQ ID NO: 974994 - RNA, 19 nt, Homo sapiens
  misc_RNA (1)...(19): siRNA sense strand
ugucaggugugaauuauga

SEQ ID NO: 974995 - RNA, 19 nt, Homo sapiens
  misc_RNA (1)...(19): siRNA sense strand
gcucauauguacaaauuac

SEQ ID NO: 974996 - RNA, 19 nt, Homo sapiens
  misc_RNA (1)...(19): siRNA sense strand
gaagauauggaaacucaug

SEQ ID NO: 974997 - RNA, 19 nt, Homo sapiens
  misc_RNA (1)...(19): siRNA sense strand
caucuaaaccuccuaucua

SEQ ID NO: 974998 - RNA, 19 nt, Homo sapiens
  misc_RNA (1)...(19): siRNA sense strand
cgaacauuaugcuuacuaa

SEQ ID NO: 974999 - RNA, 19 nt, Homo sapiens
  misc_RNA (1)...(19): siRNA sense strand
ggaagacugugaucaacca

SEQ ID NO: 975000 - RNA, 19 nt, Homo sapiens
  misc_RNA (1)...(19): siRNA sense strand
cauaagcaauaccagauau

SEQ ID NO: 975001 - RNA, 19 nt, Homo sapiens
  misc_RNA (1)...(19): siRNA sense strand
caacaacuacgaaauaugg

SEQ ID NO: 975002 - RNA, 19 nt, Homo sapiens
  misc_RNA (1)...(19): siRNA sense strand
acaauuggcucaccagcuu

SEQ ID NO: 975003 - RNA, 19 nt, Homo sapiens
  misc_RNA (1)...(19): siRNA sense strand
gagcagaauacacuugaaa

SEQ ID NO: 975004 - RNA, 19 nt, Homo sapiens
  misc_RNA (1)...(19): siRNA sense strand
gaagaaucaagacaagaaa

SEQ ID NO: 975005 - RNA, 19 nt, Homo sapiens
  misc_RNA (1)...(19): siRNA sense strand
gaaagaggagaucugaaga

SEQ ID NO: 975006 - RNA, 19 nt, Homo sapiens
  misc_RNA (1)...(19): siRNA sense strand
gcaagaagaagacagaaag

SEQ ID NO: 975007 - RNA, 19 nt, Homo sapiens
  misc_RNA (1)...(19): siRNA sense strand
gcagaauacacuugaaaga

SEQ ID NO: 975008 - RNA, 19 nt, Homo sapiens
  misc_RNA (1)...(19): siRNA sense strand
cuucauagguauuaucaga

SEQ ID NO: 975009 - RNA, 19 nt, Homo sapiens
  misc_RNA (1)...(19): siRNA sense strand
agaagggaguccaaaggua

SEQ ID NO: 975010 - RNA, 19 nt, Homo sapiens
  misc_RNA (1)...(19): siRNA sense strand
gaauacacuugaaagaaac

SEQ ID NO: 975011 - RNA, 19 nt, Homo sapiens
  misc_RNA (1)...(19): siRNA sense strand
ucgcuuauuugaauggaua

SEQ ID NO: 975012 - RNA, 19 nt, Homo sapiens
  misc_RNA (1)...(19): siRNA sense strand
uacacacccucgcuuauuu

SEQ ID NO: 975013 - RNA, 19 nt, Homo sapiens
  misc_RNA (1)...(19): siRNA sense strand
gcacagugaagauauggaa

SEQ ID NO: 975014 - RNA, 19 nt, Homo sapiens
  misc_RNA (1)...(19): siRNA sense strand
ggagcacagugaagauaug

SEQ ID NO: 975015 - RNA, 19 nt, Homo sapiens
  misc_RNA (1)...(19): siRNA sense strand
ggagauagaaguaaauagg

SEQ ID NO: 975016 - RNA, 19 nt, Homo sapiens
  misc_RNA (1)...(19): siRNA sense strand
acaagcuucucaagucuuu

SEQ ID NO: 975017 - RNA, 19 nt, Homo sapiens
  misc_RNA (1)...(19): siRNA sense strand
guacacacccucgcuuauu

SEQ ID NO: 975018 - RNA, 19 nt, Homo sapiens
  misc_RNA (1)...(19): siRNA sense strand
aagaaugccuccaucugaa

SEQ ID NO: 975019 - RNA, 19 nt, Homo sapiens
  misc_RNA (1)...(19): siRNA sense strand
gguaguguguacaucuaaa

SEQ ID NO: 975020 - RNA, 19 nt, Homo sapiens
  misc_RNA (1)...(19): siRNA sense strand
gagcaugugaaguauauau

SEQ ID NO: 975021 - RNA, 19 nt, Homo sapiens
  misc_RNA (1)...(19): siRNA sense strand
ugacuugcauuuggaagaa

SEQ ID NO: 975022 - RNA, 19 nt, Homo sapiens
  misc_RNA (1)...(19): siRNA sense strand
ucaagcaacuucggaaauc

SEQ ID NO: 975023 - RNA, 19 nt, Homo sapiens
  misc_RNA (1)...(19): siRNA sense strand
cgagaaaugcagaaauuau

SEQ ID NO: 975024 - RNA, 19 nt, Homo sapiens
  misc_RNA (1)...(19): siRNA sense strand
ggaacaaaggccuggauug

SEQ ID NO: 975025 - RNA, 19 nt, Homo sapiens
  misc_RNA (1)...(19): siRNA sense strand
uacgaaauauggagauaga

SEQ ID NO: 975026 - RNA, 19 nt, Homo sapiens
  misc_RNA (1)...(19): siRNA sense strand
ugaagaaucaagacaagaa

SEQ ID NO: 975027 - RNA, 19 nt, Homo sapiens
  misc_RNA (1)...(19): siRNA sense strand
cagaauacacuugaaagaa

SEQ ID NO: 975028 - RNA, 19 nt, Homo sapiens
  misc_RNA (1)...(19): siRNA sense strand
ucagaaugcugccacagau

SEQ ID NO: 975029 - RNA, 19 nt, Homo sapiens
  misc_RNA (1)...(19): siRNA sense strand
gaaauauggagauagaagu

SEQ ID NO: 975030 - RNA, 19 nt, Homo sapiens
  misc_RNA (1)...(19): siRNA sense strand
gaacauguugacuugcauu

SEQ ID NO: 975031 - RNA, 19 nt, Homo sapiens
  misc_RNA (1)...(19): siRNA sense strand
gauauggaaacucauguga

SEQ ID NO: 975032 - RNA, 19 nt, Homo sapiens
  misc_RNA (1)...(19): siRNA sense strand
gaggagcacagugaagaua

SEQ ID NO: 975033 - RNA, 19 nt, Homo sapiens
  misc_RNA (1)...(19): siRNA sense strand
gacgauugcuuaaaaggua

SEQ ID NO: 975034 - RNA, 19 nt, Homo sapiens
  misc_RNA (1)...(19): siRNA sense strand
ucaccuaauuguucacaug

SEQ ID NO: 975035 - RNA, 19 nt, Homo sapiens
  misc_RNA (1)...(19): siRNA sense strand
aggguaaagugucauauug

SEQ ID NO: 975036 - RNA, 19 nt, Homo sapiens
  misc_RNA (1)...(19): siRNA sense strand
uggagcaugugaaguauau

SEQ ID NO: 975037 - RNA, 19 nt, Homo sapiens
  misc_RNA (1)...(19): siRNA sense strand
auacaguccuccugaaugu

SEQ ID NO: 975038 - RNA, 19 nt, Homo sapiens
  misc_RNA (1)...(19): siRNA sense strand
cucgagaaaugcagaaauu

SEQ ID NO: 975039 - RNA, 19 nt, Homo sapiens
  misc_RNA (1)...(19): siRNA sense strand
gacaugaaagcucaccuaa

SEQ ID NO: 975040 - RNA, 19 nt, Homo sapiens
  misc_RNA (1)...(19): siRNA sense strand
cacccucgcuuauuugaau

SEQ ID NO: 975041 - RNA, 19 nt, Homo sapiens
  misc_RNA (1)...(19): siRNA sense strand
ggaagaaugccuccaucug

SEQ ID NO: 975042 - RNA, 19 nt, Homo sapiens
  misc_RNA (1)...(19): siRNA sense strand
gugaaacaguaaccucaga

SEQ ID NO: 975043 - RNA, 19 nt, Homo sapiens
  misc_RNA (1)...(19): siRNA sense strand
aaauagaggagcacaguga

SEQ ID NO: 975044 - RNA, 19 nt, Homo sapiens
  misc_RNA (1)...(19): siRNA sense strand
cuaucuaucuucagcauca

SEQ ID NO: 975045 - RNA, 19 nt, Homo sapiens
  misc_RNA (1)...(19): siRNA sense strand
guaaagugucauauuguug

SEQ ID NO: 975046 - RNA, 19 nt, Homo sapiens
  misc_RNA (1)...(19): siRNA sense strand
gguugugguuacagaaauu

SEQ ID NO: 975047 - RNA, 19 nt, Homo sapiens
  misc_RNA (1)...(19): siRNA sense strand
gaagacagaaagaggagau

SEQ ID NO: 975048 - RNA, 19 nt, Homo sapiens
  misc_RNA (1)...(19): siRNA sense strand
gaaagcucaccuaauuguu

SEQ ID NO: 975049 - RNA, 19 nt, Homo sapiens
  misc_RNA (1)...(19): siRNA sense strand
cauguugacuugcauuugg

SEQ ID NO: 975050 - RNA, 19 nt, Homo sapiens
  misc_RNA (1)...(19): siRNA sense strand
ggguguggcuuucuucagu

SEQ ID NO: 975051 - RNA, 19 nt, Homo sapiens
  misc_RNA (1)...(19): siRNA sense strand
aagcugauaugauggaauc

SEQ ID NO: 975052 - RNA, 19 nt, Homo sapiens
  misc_RNA (1)...(19): siRNA sense strand
gaaugccuccaucugaauu

SEQ ID NO: 975053 - RNA, 19 nt, Homo sapiens
  misc_RNA (1)...(19): siRNA sense strand
ugaaagcucaccuaauugu

SEQ ID NO: 975054 - RNA, 19 nt, Homo sapiens
  misc_RNA (1)...(19): siRNA sense strand
gugaucaaccacucuauga

SEQ ID NO: 975055 - RNA, 19 nt, Homo sapiens
  misc_RNA (1)...(19): siRNA sense strand
ccuaauuguucacauggaa

SEQ ID NO: 975056 - RNA, 19 nt, Homo sapiens
  misc_RNA (1)...(19): siRNA sense strand
guggaucacuuucauucau

SEQ ID NO: 975057 - RNA, 19 nt, Homo sapiens
  misc_RNA (1)...(19): siRNA sense strand
ucaaguauucuuucagguu

SEQ ID NO: 975058 - RNA, 19 nt, Homo sapiens
  misc_RNA (1)...(19): siRNA sense strand
aaacaacaacaacuacgaa

SEQ ID NO: 975059 - RNA, 19 nt, Homo sapiens
  misc_RNA (1)...(19): siRNA sense strand
aagaggagaucugaagaau

SEQ ID NO: 975060 - RNA, 19 nt, Homo sapiens
  misc_RNA (1)...(19): siRNA sense strand
caagaagaagacagaaaga

SEQ ID NO: 975061 - RNA, 19 nt, Homo sapiens
  misc_RNA (1)...(19): siRNA sense strand
gaaucaagacaagaaauag

SEQ ID NO: 975062 - RNA, 19 nt, Homo sapiens
  misc_RNA (1)...(19): siRNA sense strand
guccaaagguaguguguac

SEQ ID NO: 975063 - RNA, 19 nt, Homo sapiens
  misc_RNA (1)...(19): siRNA sense strand
gggccucucaacuuaauaa

SEQ ID NO: 975064 - RNA, 19 nt, Homo sapiens
  misc_RNA (1)...(19): siRNA sense strand
uuacgacgauugcuuaaaa

SEQ ID NO: 975065 - RNA, 19 nt, Homo sapiens
  misc_RNA (1)...(19): siRNA sense strand
uagaagaauuucagaagcu

SEQ ID NO: 975066 - RNA, 19 nt, Homo sapiens
  misc_RNA (1)...(19): siRNA sense strand
gagaagggaguccaaaggu

SEQ ID NO: 975067 - RNA, 19 nt, Homo sapiens
  misc_RNA (1)...(19): siRNA sense strand
ggugugaauuaugaugaaa

SEQ ID NO: 975068 - RNA, 19 nt, Homo sapiens
  misc_RNA (1)...(19): siRNA sense strand
ccucucaacuuaauaacag

SEQ ID NO: 975069 - RNA, 19 nt, Homo sapiens
  misc_RNA (1)...(19): siRNA sense strand
gauggaaucauuagcucuu

SEQ ID NO: 975070 - RNA, 19 nt, Homo sapiens
  misc_RNA (1)...(19): siRNA sense strand
uauuuguggugaaacagua

SEQ ID NO: 975071 - RNA, 19 nt, Homo sapiens
  misc_RNA (1)...(19): siRNA sense strand
caaguugucaggugugaau

SEQ ID NO: 975072 - RNA, 19 nt, Homo sapiens
  misc_RNA (1)...(19): siRNA sense strand
cgaguucgcuucuaauaug

SEQ ID NO: 975073 - RNA, 19 nt, Homo sapiens
  misc_RNA (1)...(19): siRNA sense strand
gcaucgagaucgcgaccua

SEQ ID NO: 975074 - RNA, 19 nt, Homo sapiens
  misc_RNA (1)...(19): siRNA sense strand
gagugaagcacaagaagga

SEQ ID NO: 975075 - RNA, 19 nt, Homo sapiens
  misc_RNA (1)...(19): siRNA sense strand
agaagcaggugaagaucug

SEQ ID NO: 975076 - RNA, 19 nt, Homo sapiens
  misc_RNA (1)...(19): siRNA sense strand
gaucgcgaccuaccugaau

SEQ ID NO: 975077 - RNA, 19 nt, Homo sapiens
  misc_RNA (1)...(19): siRNA sense strand
cgaggaugacgacgaauug

SEQ ID NO: 975078 - RNA, 19 nt, Homo sapiens
  misc_RNA (1)...(19): siRNA sense strand
uuucagaaccgccgaguga

SEQ ID NO: 975079 - RNA, 19 nt, Homo sapiens
  misc_RNA (1)...(19): siRNA sense strand
gacgacgaauugcccaugu

SEQ ID NO: 975080 - RNA, 19 nt, Homo sapiens
  misc_RNA (1)...(19): siRNA sense strand
gaguucgcuucuaauaugu

SEQ ID NO: 975081 - RNA, 19 nt, Homo sapiens
  misc_RNA (1)...(19): siRNA sense strand
gaaggacgaccgggaucuu

SEQ ID NO: 975082 - RNA, 19 nt, Homo sapiens
  misc_RNA (1)...(19): siRNA sense strand
gcaggugaagaucugguuu

SEQ ID NO: 975083 - RNA, 19 nt, Homo sapiens
  misc_RNA (1)...(19): siRNA sense strand
ccgagaagcaggugaagau

SEQ ID NO: 975084 - RNA, 19 nt, Homo sapiens
  misc_RNA (1)...(19): siRNA sense strand
gagaagcaggugaagaucu

SEQ ID NO: 975085 - RNA, 19 nt, Homo sapiens
  misc_RNA (1)...(19): siRNA sense strand
ccaagugcuccgaggauga

SEQ ID NO: 975086 - RNA, 19 nt, Homo sapiens
  misc_RNA (1)...(19): siRNA sense strand
ccgaggaugacgacgaauu

SEQ ID NO: 975087 - RNA, 19 nt, Homo sapiens
  misc_RNA (1)...(19): siRNA sense strand
aaggacgaccgggaucuua

SEQ ID NO: 975088 - RNA, 19 nt, Homo sapiens
  misc_RNA (1)...(19): siRNA sense strand
cuccgaggaugacgacgaa

SEQ ID NO: 975089 - RNA, 19 nt, Homo sapiens
  misc_RNA (1)...(19): siRNA sense strand
ggaacuagaggaacugaau

SEQ ID NO: 975090 - RNA, 19 nt, Homo sapiens
  misc_RNA (1)...(19): siRNA sense strand
gcaccucuuugcacucaug

SEQ ID NO: 975091 - RNA, 19 nt, Homo sapiens
  misc_RNA (1)...(19): siRNA sense strand
gaaguuguccugguugguu

SEQ ID NO: 975092 - RNA, 19 nt, Homo sapiens
  misc_RNA (1)...(19): siRNA sense strand
caagacagaccgcuacaag

SEQ ID NO: 975093 - RNA, 19 nt, Homo sapiens
  misc_RNA (1)...(19): siRNA sense strand
gcuacaagcaggaacuaga

SEQ ID NO: 975094 - RNA, 19 nt, Homo sapiens
  misc_RNA (1)...(19): siRNA sense strand
ggucaaguuugugcccauu

SEQ ID NO: 975095 - RNA, 19 nt, Homo sapiens
  misc_RNA (1)...(19): siRNA sense strand
gaacuagaggaacugaauc

SEQ ID NO: 975096 - RNA, 19 nt, Homo sapiens
  misc_RNA (1)...(19): siRNA sense strand
gcucguguuuguggccuuu

SEQ ID NO: 975097 - RNA, 19 nt, Homo sapiens
  misc_RNA (1)...(19): siRNA sense strand
agacagaccgcuacaagca

SEQ ID NO: 975098 - RNA, 19 nt, Homo sapiens
  misc_RNA (1)...(19): siRNA sense strand
ccuuugcccugcauuucua

SEQ ID NO: 975099 - RNA, 19 nt, Homo sapiens
  misc_RNA (1)...(19): siRNA sense strand
ggagagugaccacgaguac

SEQ ID NO: 975100 - RNA, 19 nt, Homo sapiens
  misc_RNA (1)...(19): siRNA sense strand
gggcaccuuucucuuccuu

SEQ ID NO: 975101 - RNA, 19 nt, Homo sapiens
  misc_RNA (1)...(19): siRNA sense strand
guggcuaccucccuuaguc

SEQ ID NO: 975102 - RNA, 19 nt, Homo sapiens
  misc_RNA (1)...(19): siRNA sense strand
uccacaaccucaacucugu

SEQ ID NO: 975103 - RNA, 19 nt, Homo sapiens
  misc_RNA (1)...(19): siRNA sense strand
aggugcagcuggagaguga

SEQ ID NO: 975104 - RNA, 19 nt, Homo sapiens
  misc_RNA (1)...(19): siRNA sense strand
gcuccuugguggcacacaa

SEQ ID NO: 975105 - RNA, 19 nt, Homo sapiens
  misc_RNA (1)...(19): siRNA sense strand
caagcaggaacuagaggaa

SEQ ID NO: 975106 - RNA, 19 nt, Homo sapiens
  misc_RNA (1)...(19): siRNA sense strand
ucaaguuugugcccauugg

SEQ ID NO: 975107 - RNA, 19 nt, Homo sapiens
  misc_RNA (1)...(19): siRNA sense strand
caacauccacaaccucaac

SEQ ID NO: 975108 - RNA, 19 nt, Homo sapiens
  misc_RNA (1)...(19): siRNA sense strand
ggagcugcaggcuguguga

SEQ ID NO: 975109 - RNA, 19 nt, Homo sapiens
  misc_RNA (1)...(19): siRNA sense strand
gcggcuaccuggaccucau

SEQ ID NO: 975110 - RNA, 19 nt, Homo sapiens
  misc_RNA (1)...(19): siRNA sense strand
ccaguggcuaccucccuua

SEQ ID NO: 975111 - RNA, 19 nt, Homo sapiens
  misc_RNA (1)...(19): siRNA sense strand
uugguugggucaaguuugu

SEQ ID NO: 975112 - RNA, 19 nt, Homo sapiens
  misc_RNA (1)...(19): siRNA sense strand
gauuugaccuccaguauaa

SEQ ID NO: 975113 - RNA, 19 nt, Homo sapiens
  misc_RNA (1)...(19): siRNA sense strand
ggacaaggguguauaaugc

SEQ ID NO: 975114 - RNA, 19 nt, Homo sapiens
  misc_RNA (1)...(19): siRNA sense strand
gcacauugguugaccuuug

SEQ ID NO: 975115 - RNA, 19 nt, Homo sapiens
  misc_RNA (1)...(19): siRNA sense strand
gcucacaucuucuguacaa

SEQ ID NO: 975116 - RNA, 19 nt, Homo sapiens
  misc_RNA (1)...(19): siRNA sense strand
ggagugagcaagaggaaua

SEQ ID NO: 975117 - RNA, 19 nt, Homo sapiens
  misc_RNA (1)...(19): siRNA sense strand
guaaagagauuagcaagca

SEQ ID NO: 975118 - RNA, 19 nt, Homo sapiens
  misc_RNA (1)...(19): siRNA sense strand
gcugugggcugcucaggua

SEQ ID NO: 975119 - RNA, 19 nt, Homo sapiens
  misc_RNA (1)...(19): siRNA sense strand
ccaaagcugucuugauuuc

SEQ ID NO: 975120 - RNA, 19 nt, Homo sapiens
  misc_RNA (1)...(19): siRNA sense strand
gacugaagcugcuaucgaa

SEQ ID NO: 975121 - RNA, 19 nt, Homo sapiens
  misc_RNA (1)...(19): siRNA sense strand
gaacucaucauccuuaugg

SEQ ID NO: 975122 - RNA, 19 nt, Homo sapiens
  misc_RNA (1)...(19): siRNA sense strand
caaaguaagagaacaguga

SEQ ID NO: 975123 - RNA, 19 nt, Homo sapiens
  misc_RNA (1)...(19): siRNA sense strand
gaaagugacagguccaaca

SEQ ID NO: 975124 - RNA, 19 nt, Homo sapiens
  misc_RNA (1)...(19): siRNA sense strand
auccaaagcugucuugauu

SEQ ID NO: 975125 - RNA, 19 nt, Homo sapiens
  misc_RNA (1)...(19): siRNA sense strand
gggaucagcuucgccaguu

SEQ ID NO: 975126 - RNA, 19 nt, Homo sapiens
  misc_RNA (1)...(19): siRNA sense strand
gcaagaggaauacgccaaa

SEQ ID NO: 975127 - RNA, 19 nt, Homo sapiens
  misc_RNA (1)...(19): siRNA sense strand
ccgaacagguccuuaaaca

SEQ ID NO: 975128 - RNA, 19 nt, Homo sapiens
  misc_RNA (1)...(19): siRNA sense strand
guucaacacuggcagauac

SEQ ID NO: 975129 - RNA, 19 nt, Homo sapiens
  misc_RNA (1)...(19): siRNA sense strand
uaagagaacagugaacauu

SEQ ID NO: 975130 - RNA, 19 nt, Homo sapiens
  misc_RNA (1)...(19): siRNA sense strand
gcagagagugucagggauu

SEQ ID NO: 975131 - RNA, 19 nt, Homo sapiens
  misc_RNA (1)...(19): siRNA sense strand
cuacgaagcucugggaaca

SEQ ID NO: 975132 - RNA, 19 nt, Homo sapiens
  misc_RNA (1)...(19): siRNA sense strand
gaacaggagcucuucuucu

SEQ ID NO: 975133 - RNA, 19 nt, Homo sapiens
  misc_RNA (1)...(19): siRNA sense strand
gcacuaguggcguuuauca

SEQ ID NO: 975134 - RNA, 19 nt, Homo sapiens
  misc_RNA (1)...(19): siRNA sense strand
uagcaagcauggcacagaa

SEQ ID NO: 975135 - RNA, 19 nt, Homo sapiens
  misc_RNA (1)...(19): siRNA sense strand
gaaagagcaaaguaagaga

SEQ ID NO: 975136 - RNA, 19 nt, Homo sapiens
  misc_RNA (1)...(19): siRNA sense strand
ccacuacaauuuucaguuu

SEQ ID NO: 975137 - RNA, 19 nt, Homo sapiens
  misc_RNA (1)...(19): siRNA sense strand
aacaggagcucuucuucuu

SEQ ID NO: 975138 - RNA, 19 nt, Homo sapiens
  misc_RNA (1)...(19): siRNA sense strand
gccaguuguucaaggauaa

SEQ ID NO: 975139 - RNA, 19 nt, Homo sapiens
  misc_RNA (1)...(19): siRNA sense strand
gaauggagaaccuuaugau

SEQ ID NO: 975140 - RNA, 19 nt, Homo sapiens
  misc_RNA (1)...(19): siRNA sense strand
ggucccaaaugccgaagaa

SEQ ID NO: 975141 - RNA, 19 nt, Homo sapiens
  misc_RNA (1)...(19): siRNA sense strand
caauucagcuugacuucca

SEQ ID NO: 975142 - RNA, 19 nt, Homo sapiens
  misc_RNA (1)...(19): siRNA sense strand
ggaaggaacaggagcucuu

SEQ ID NO: 975143 - RNA, 19 nt, Homo sapiens
  misc_RNA (1)...(19): siRNA sense strand
ggagggaggaagcagaauu

SEQ ID NO: 975144 - RNA, 19 nt, Homo sapiens
  misc_RNA (1)...(19): siRNA sense strand
ggacugaagcugcuaucga

SEQ ID NO: 975145 - RNA, 19 nt, Homo sapiens
  misc_RNA (1)...(19): siRNA sense strand
ggacaauucagcuugacuu

SEQ ID NO: 975146 - RNA, 19 nt, Homo sapiens
  misc_RNA (1)...(19): siRNA sense strand
gagggacaaggguguauaa

SEQ ID NO: 975147 - RNA, 19 nt, Homo sapiens
  misc_RNA (1)...(19): siRNA sense strand
ccuuuaagcuucacuugau

SEQ ID NO: 975148 - RNA, 19 nt, Homo sapiens
  misc_RNA (1)...(19): siRNA sense strand
gagauuugaccuccaguau

SEQ ID NO: 975149 - RNA, 19 nt, Homo sapiens
  misc_RNA (1)...(19): siRNA sense strand
gaccucaacucuggagaug

SEQ ID NO: 975150 - RNA, 19 nt, Homo sapiens
  misc_RNA (1)...(19): siRNA sense strand
gcagagcggcuuggccuuu

SEQ ID NO: 975151 - RNA, 19 nt, Homo sapiens
  misc_RNA (1)...(19): siRNA sense strand
cagagagugucagggauuu

SEQ ID NO: 975152 - RNA, 19 nt, Homo sapiens
  misc_RNA (1)...(19): siRNA sense strand
ggacagauuggaggacuga

SEQ ID NO: 975153 - RNA, 19 nt, Homo sapiens
  misc_RNA (1)...(19): siRNA sense strand
gagggaggaagcagaauug

SEQ ID NO: 975154 - RNA, 19 nt, Homo sapiens
  misc_RNA (1)...(19): siRNA sense strand
cagagacacugcagagagu

SEQ ID NO: 975155 - RNA, 19 nt, Homo sapiens
  misc_RNA (1)...(19): siRNA sense strand
caacagcaacaguauaugg

SEQ ID NO: 975156 - RNA, 19 nt, Homo sapiens
  misc_RNA (1)...(19): siRNA sense strand
gaacacgagggucccaaau

SEQ ID NO: 975157 - RNA, 19 nt, Homo sapiens
  misc_RNA (1)...(19): siRNA sense strand
gcucgguucuguggaaaga

SEQ ID NO: 975158 - RNA, 19 nt, Homo sapiens
  misc_RNA (1)...(19): siRNA sense strand
gccagaaagagcaaaguaa

SEQ ID NO: 975159 - RNA, 19 nt, Homo sapiens
  misc_RNA (1)...(19): siRNA sense strand
uggagaaccuuaugaucug

SEQ ID NO: 975160 - RNA, 19 nt, Homo sapiens
  misc_RNA (1)...(19): siRNA sense strand
ggccagaaagagcaaagua

SEQ ID NO: 975161 - RNA, 19 nt, Homo sapiens
  misc_RNA (1)...(19): siRNA sense strand
cagauacacucgcccucaa

SEQ ID NO: 975162 - RNA, 19 nt, Homo sapiens
  misc_RNA (1)...(19): siRNA sense strand
gggacaaggguguauaaug

SEQ ID NO: 975163 - RNA, 19 nt, Homo sapiens
  misc_RNA (1)...(19): siRNA sense strand
ggaacaggagcucuucuuc

SEQ ID NO: 975164 - RNA, 19 nt, Homo sapiens
  misc_RNA (1)...(19): siRNA sense strand
cccaaaugccgaagaaauu

SEQ ID NO: 975165 - RNA, 19 nt, Homo sapiens
  misc_RNA (1)...(19): siRNA sense strand
ggagcggauuugccaggaa

SEQ ID NO: 975166 - RNA, 19 nt, Homo sapiens
  misc_RNA (1)...(19): siRNA sense strand
ucacuugauugaggagaaa

SEQ ID NO: 975167 - RNA, 19 nt, Homo sapiens
  misc_RNA (1)...(19): siRNA sense strand
cagaaagagcaaaguaaga

SEQ ID NO: 975168 - RNA, 19 nt, Homo sapiens
  misc_RNA (1)...(19): siRNA sense strand
gcagagguccaaguacaga

SEQ ID NO: 975169 - RNA, 19 nt, Homo sapiens
  misc_RNA (1)...(19): siRNA sense strand
ccucaacucuggagauggu

SEQ ID NO: 975170 - RNA, 19 nt, Homo sapiens
  misc_RNA (1)...(19): siRNA sense strand
cugcagagguccaaguaca

SEQ ID NO: 975171 - RNA, 19 nt, Homo sapiens
  misc_RNA (1)...(19): siRNA sense strand
acacgagggucccaaaugc

SEQ ID NO: 975172 - RNA, 19 nt, Homo sapiens
  misc_RNA (1)...(19): siRNA sense strand
ucuauggaccuaagauuga

SEQ ID NO: 975173 - RNA, 19 nt, Homo sapiens
  misc_RNA (1)...(19): siRNA sense strand
gagauggugccuucuaugg

SEQ ID NO: 975174 - RNA, 19 nt, Homo sapiens
  misc_RNA (1)...(19): siRNA sense strand
uacaacagaucagcuggaa

SEQ ID NO: 975175 - RNA, 19 nt, Homo sapiens
  misc_RNA (1)...(19): siRNA sense strand
gguguauaaugcacuagug

SEQ ID NO: 975176 - RNA, 19 nt, Homo sapiens
  misc_RNA (1)...(19): siRNA sense strand
gagguccaaguacagaaua

SEQ ID NO: 975177 - RNA, 19 nt, Homo sapiens
  misc_RNA (1)...(19): siRNA sense strand
ggaucagcuucgccaguug

SEQ ID NO: 975178 - RNA, 19 nt, Homo sapiens
  misc_RNA (1)...(19): siRNA sense strand
gugggacaauucagcuuga

SEQ ID NO: 975179 - RNA, 19 nt, Homo sapiens
  misc_RNA (1)...(19): siRNA sense strand
cugcucagguaaagagauu

SEQ ID NO: 975180 - RNA, 19 nt, Homo sapiens
  misc_RNA (1)...(19): siRNA sense strand
cgccaguuguucaaggaua

SEQ ID NO: 975181 - RNA, 19 nt, Homo sapiens
  misc_RNA (1)...(19): siRNA sense strand
gauucuaccaggcauauca

SEQ ID NO: 975182 - RNA, 19 nt, Homo sapiens
  misc_RNA (1)...(19): siRNA sense strand
ccagaaagagcaaaguaag

SEQ ID NO: 975183 - RNA, 19 nt, Homo sapiens
  misc_RNA (1)...(19): siRNA sense strand
cagcuugcccacuacaauu

SEQ ID NO: 975184 - RNA, 19 nt, Homo sapiens
  misc_RNA (1)...(19): siRNA sense strand
ggagauggugccuucuaug

SEQ ID NO: 975185 - RNA, 19 nt, Homo sapiens
  misc_RNA (1)...(19): siRNA sense strand
gauccaaagcugucuugau

SEQ ID NO: 975186 - RNA, 19 nt, Homo sapiens
  misc_RNA (1)...(19): siRNA sense strand
agauuugaccuccaguaua

SEQ ID NO: 975187 - RNA, 19 nt, Homo sapiens
  misc_RNA (1)...(19): siRNA sense strand
aaagagcaaaguaagagaa

SEQ ID NO: 975188 - RNA, 19 nt, Homo sapiens
  misc_RNA (1)...(19): siRNA sense strand
ugaccuggaugcagacucu

SEQ ID NO: 975189 - RNA, 19 nt, Homo sapiens
  misc_RNA (1)...(19): siRNA sense strand
ucagggcacugggagcauu

SEQ ID NO: 975190 - RNA, 19 nt, Homo sapiens
  misc_RNA (1)...(19): siRNA sense strand
uggagauggugccuucuau

SEQ ID NO: 975191 - RNA, 19 nt, Homo sapiens
  misc_RNA (1)...(19): siRNA sense strand
ugaauggagaaccuuauga

SEQ ID NO: 975192 - RNA, 19 nt, Homo sapiens
  misc_RNA (1)...(19): siRNA sense strand
guuugugguuggccagaaa

SEQ ID NO: 975193 - RNA, 19 nt, Homo sapiens
  misc_RNA (1)...(19): siRNA sense strand
gaguaugcccaucgugguu

SEQ ID NO: 975194 - RNA, 19 nt, Homo sapiens
  misc_RNA (1)...(19): siRNA sense strand
uaaagagauuagcaagcau

SEQ ID NO: 975195 - RNA, 19 nt, Homo sapiens
  misc_RNA (1)...(19): siRNA sense strand
caagaggaauacgccaaag

SEQ ID NO: 975196 - RNA, 19 nt, Homo sapiens
  misc_RNA (1)...(19): siRNA sense strand
gagauccaaagcugucuug

SEQ ID NO: 975197 - RNA, 19 nt, Homo sapiens
  misc_RNA (1)...(19): siRNA sense strand
gaagcucugggaacaguca

SEQ ID NO: 975198 - RNA, 19 nt, Homo sapiens
  misc_RNA (1)...(19): siRNA sense strand
guacagaauauggcuuuua

SEQ ID NO: 975199 - RNA, 19 nt, Homo sapiens
  misc_RNA (1)...(19): siRNA sense strand
caacugccccugagauuug

SEQ ID NO: 975200 - RNA, 19 nt, Homo sapiens
  misc_RNA (1)...(19): siRNA sense strand
ggaccucaacucuggagau

SEQ ID NO: 975201 - RNA, 19 nt, Homo sapiens
  misc_RNA (1)...(19): siRNA sense strand
ggccgaacagguccuuaaa

SEQ ID NO: 975202 - RNA, 19 nt, Homo sapiens
  misc_RNA (1)...(19): siRNA sense strand
gaacugccccugcgacuag

SEQ ID NO: 975203 - RNA, 19 nt, Homo sapiens
  misc_RNA (1)...(19): siRNA sense strand
gguccaacagcaacaguau

SEQ ID NO: 975204 - RNA, 19 nt, Homo sapiens
  misc_RNA (1)...(19): siRNA sense strand
ggaaaggagaggacaaucc

SEQ ID NO: 975205 - RNA, 19 nt, Homo sapiens
  misc_RNA (1)...(19): siRNA sense strand
gaucagcuucgccaguugu

SEQ ID NO: 975206 - RNA, 19 nt, Homo sapiens
  misc_RNA (1)...(19): siRNA sense strand
gaacauucggacucgagau

SEQ ID NO: 975207 - RNA, 19 nt, Homo sapiens
  misc_RNA (1)...(19): siRNA sense strand
aaaguaagagaacagugaa

SEQ ID NO: 975208 - RNA, 19 nt, Homo sapiens
  misc_RNA (1)...(19): siRNA sense strand
gagcguccaguccucauuc

SEQ ID NO: 975209 - RNA, 19 nt, Homo sapiens
  misc_RNA (1)...(19): siRNA sense strand
cuaccaggcauaucacaga

SEQ ID NO: 975210 - RNA, 19 nt, Homo sapiens
  misc_RNA (1)...(19): siRNA sense strand
gcucuucuucuuccaugaa

SEQ ID NO: 975211 - RNA, 19 nt, Homo sapiens
  misc_RNA (1)...(19): siRNA sense strand
cauucggacucgagauaau

SEQ ID NO: 975212 - RNA, 19 nt, Homo sapiens
  misc_RNA (1)...(19): siRNA sense strand
gcacagaacccaguacuga

SEQ ID NO: 975213 - RNA, 19 nt, Homo sapiens
  misc_RNA (1)...(19): siRNA sense strand
gaucuuggcaguucaguuu

SEQ ID NO: 975214 - RNA, 19 nt, Homo sapiens
  misc_RNA (1)...(19): siRNA sense strand
ggacauacuuacagagcaa

SEQ ID NO: 975215 - RNA, 19 nt, Homo sapiens
  misc_RNA (1)...(19): siRNA sense strand
ccagaaagaugaaagaaaa

SEQ ID NO: 975216 - RNA, 19 nt, Homo sapiens
  misc_RNA (1)...(19): siRNA sense strand
gggaagaaacuaaauguca

SEQ ID NO: 975217 - RNA, 19 nt, Homo sapiens
  misc_RNA (1)...(19): siRNA sense strand
gagaagagaauguggacaa

SEQ ID NO: 975218 - RNA, 19 nt, Homo sapiens
  misc_RNA (1)...(19): siRNA sense strand
gaaagcacagaacccagua

SEQ ID NO: 975219 - RNA, 19 nt, Homo sapiens
  misc_RNA (1)...(19): siRNA sense strand
uaggauggcuugaggacuu

SEQ ID NO: 975220 - RNA, 19 nt, Homo sapiens
  misc_RNA (1)...(19): siRNA sense strand
ccaccacccucauccuuug

SEQ ID NO: 975221 - RNA, 19 nt, Homo sapiens
  misc_RNA (1)...(19): siRNA sense strand
cauccucccuggcaucuga

SEQ ID NO: 975222 - RNA, 19 nt, Homo sapiens
  misc_RNA (1)...(19): siRNA sense strand
ugagagaggugguggacau

SEQ ID NO: 975223 - RNA, 19 nt, Homo sapiens
  misc_RNA (1)...(19): siRNA sense strand
gaauuacacacccaaggaa

SEQ ID NO: 975224 - RNA, 19 nt, Homo sapiens
  misc_RNA (1)...(19): siRNA sense strand
gagcaccacucgccauguc

SEQ ID NO: 975225 - RNA, 19 nt, Homo sapiens
  misc_RNA (1)...(19): siRNA sense strand
ggacacagcaguggaucuu

SEQ ID NO: 975226 - RNA, 19 nt, Homo sapiens
  misc_RNA (1)...(19): siRNA sense strand
gaagaaacuaaaugucaca

SEQ ID NO: 975227 - RNA, 19 nt, Homo sapiens
  misc_RNA (1)...(19): siRNA sense strand
gaaggacacagcaguggau

SEQ ID NO: 975228 - RNA, 19 nt, Homo sapiens
  misc_RNA (1)...(19): siRNA sense strand
gaggugguggacauacuua

SEQ ID NO: 975229 - RNA, 19 nt, Homo sapiens
  misc_RNA (1)...(19): siRNA sense strand
gccagaaagaugaaagaaa

SEQ ID NO: 975230 - RNA, 19 nt, Homo sapiens
  misc_RNA (1)...(19): siRNA sense strand
agacuuuucuucacuauga

SEQ ID NO: 975231 - RNA, 19 nt, Homo sapiens
  misc_RNA (1)...(19): siRNA sense strand
gagaggugguggacauacu

SEQ ID NO: 975232 - RNA, 19 nt, Homo sapiens
  misc_RNA (1)...(19): siRNA sense strand
cgucaucccuaaguucaga

SEQ ID NO: 975233 - RNA, 19 nt, Homo sapiens
  misc_RNA (1)...(19): siRNA sense strand
guccuuccauuacuucuca

SEQ ID NO: 975234 - RNA, 19 nt, Homo sapiens
  misc_RNA (1)...(19): siRNA sense strand
gugggagaaugacaagguu

SEQ ID NO: 975235 - RNA, 19 nt, Homo sapiens
  misc_RNA (1)...(19): siRNA sense strand
gcaacugcgugacauucag

SEQ ID NO: 975236 - RNA, 19 nt, Homo sapiens
  misc_RNA (1)...(19): siRNA sense strand
gagagaggugguggacaua

SEQ ID NO: 975237 - RNA, 19 nt, Homo sapiens
  misc_RNA (1)...(19): siRNA sense strand
gagcaacugcgugacauuc

SEQ ID NO: 975238 - RNA, 19 nt, Homo sapiens
  misc_RNA (1)...(19): siRNA sense strand
gagccagaaagaugaaaga

SEQ ID NO: 975239 - RNA, 19 nt, Homo sapiens
  misc_RNA (1)...(19): siRNA sense strand
ucaccgucaucccuaaguu

SEQ ID NO: 975240 - RNA, 19 nt, Homo sapiens
  misc_RNA (1)...(19): siRNA sense strand
gaauguggacaacgguuca

SEQ ID NO: 975241 - RNA, 19 nt, Homo sapiens
  misc_RNA (1)...(19): siRNA sense strand
gagccgacccucacucucu

SEQ ID NO: 975242 - RNA, 19 nt, Homo sapiens
  misc_RNA (1)...(19): siRNA sense strand
caguggaucuuggcaguuc

SEQ ID NO: 975243 - RNA, 19 nt, Homo sapiens
  misc_RNA (1)...(19): siRNA sense strand
ccauguccuuccauuacuu

SEQ ID NO: 975244 - RNA, 19 nt, Homo sapiens
  misc_RNA (1)...(19): siRNA sense strand
aggccaggaugucuuguga

SEQ ID NO: 975245 - RNA, 19 nt, Homo sapiens
  misc_RNA (1)...(19): siRNA sense strand
aaugggagacuguauagga

SEQ ID NO: 975246 - RNA, 19 nt, Homo sapiens
  misc_RNA (1)...(19): siRNA sense strand
ggccauguccuuccauuac

SEQ ID NO: 975247 - RNA, 19 nt, Homo sapiens
  misc_RNA (1)...(19): siRNA sense strand
agaauuacacacccaagga

SEQ ID NO: 975248 - RNA, 19 nt, Homo sapiens
  misc_RNA (1)...(19): siRNA sense strand
acagaacccaguacugaga

SEQ ID NO: 975249 - RNA, 19 nt, Homo sapiens
  misc_RNA (1)...(19): siRNA sense strand
ucaaugggagacuguauag

SEQ ID NO: 975250 - RNA, 19 nt, Homo sapiens
  misc_RNA (1)...(19): siRNA sense strand
gaugucuugugagcagaaa

SEQ ID NO: 975251 - RNA, 19 nt, Homo sapiens
  misc_RNA (1)...(19): siRNA sense strand
gccaccacccucauccuuu

SEQ ID NO: 975252 - RNA, 19 nt, Homo sapiens
  misc_RNA (1)...(19): siRNA sense strand
gcuugaggacuucuugaug

SEQ ID NO: 975253 - RNA, 19 nt, Homo sapiens
  misc_RNA (1)...(19): siRNA sense strand
gacccucacucucuuugcu

SEQ ID NO: 975254 - RNA, 19 nt, Homo sapiens
  misc_RNA (1)...(19): siRNA sense strand
aaagaaaagugggagaaug

SEQ ID NO: 975255 - RNA, 19 nt, Homo sapiens
  misc_RNA (1)...(19): siRNA sense strand
acaucaccgucaucccuaa

SEQ ID NO: 975256 - RNA, 19 nt, Homo sapiens
  misc_RNA (1)...(19): siRNA sense strand
cagagcaacugcgugacau

SEQ ID NO: 975257 - RNA, 19 nt, Homo sapiens
  misc_RNA (1)...(19): siRNA sense strand
gccauguccuuccauuacu

SEQ ID NO: 975258 - RNA, 19 nt, Homo sapiens
  misc_RNA (1)...(19): siRNA sense strand
ugucacaacggccuggaaa

SEQ ID NO: 975259 - RNA, 19 nt, Homo sapiens
  misc_RNA (1)...(19): siRNA sense strand
guggccauguccuuccauu

SEQ ID NO: 975260 - RNA, 19 nt, Homo sapiens
  misc_RNA (1)...(19): siRNA sense strand
cucacucucuuugcuauga

SEQ ID NO: 975261 - RNA, 19 nt, Homo sapiens
  misc_RNA (1)...(19): siRNA sense strand
gaaagaaaagugggagaau

SEQ ID NO: 975262 - RNA, 19 nt, Homo sapiens
  misc_RNA (1)...(19): siRNA sense strand
ucucuuugcuaugacauca

SEQ ID NO: 975263 - RNA, 19 nt, Homo sapiens
  misc_RNA (1)...(19): siRNA sense strand
ccaauuggauauucucuua

SEQ ID NO: 975264 - RNA, 19 nt, Homo sapiens
  misc_RNA (1)...(19): siRNA sense strand
gcucaacuuucaccaauaa

SEQ ID NO: 975265 - RNA, 19 nt, Homo sapiens
  misc_RNA (1)...(19): siRNA sense strand
gcuauuacccugaugauaa

SEQ ID NO: 975266 - RNA, 19 nt, Homo sapiens
  misc_RNA (1)...(19): siRNA sense strand
gcacauuucugucaucauc

SEQ ID NO: 975267 - RNA, 19 nt, Homo sapiens
  misc_RNA (1)...(19): siRNA sense strand
caucaucucugcacucauu

SEQ ID NO: 975268 - RNA, 19 nt, Homo sapiens
  misc_RNA (1)...(19): siRNA sense strand
aaagaaaucguuuggguua

SEQ ID NO: 975269 - RNA, 19 nt, Homo sapiens
  misc_RNA (1)...(19): siRNA sense strand
gaucaucgauguggauaug

SEQ ID NO: 975270 - RNA, 19 nt, Homo sapiens
  misc_RNA (1)...(19): siRNA sense strand
ccaaguaucuauuugaaag

SEQ ID NO: 975271 - RNA, 19 nt, Homo sapiens
  misc_RNA (1)...(19): siRNA sense strand
caucugaagucuacucuug

SEQ ID NO: 975272 - RNA, 19 nt, Homo sapiens
  misc_RNA (1)...(19): siRNA sense strand
guucugggcugcagcaauu

SEQ ID NO: 975273 - RNA, 19 nt, Homo sapiens
  misc_RNA (1)...(19): siRNA sense strand
acucuuggcuugauaguuu

SEQ ID NO: 975274 - RNA, 19 nt, Homo sapiens
  misc_RNA (1)...(19): siRNA sense strand
gaaccuugccaccuaaauu

SEQ ID NO: 975275 - RNA, 19 nt, Homo sapiens
  misc_RNA (1)...(19): siRNA sense strand
ggaggaggguauaucaaug

SEQ ID NO: 975276 - RNA, 19 nt, Homo sapiens
  misc_RNA (1)...(19): siRNA sense strand
aaagaggccuuccuugaug

SEQ ID NO: 975277 - RNA, 19 nt, Homo sapiens
  misc_RNA (1)...(19): siRNA sense strand
gcugggaacuguugacuca

SEQ ID NO: 975278 - RNA, 19 nt, Homo sapiens
  misc_RNA (1)...(19): siRNA sense strand
gcacagcugaagcaguuua

SEQ ID NO: 975279 - RNA, 19 nt, Homo sapiens
  misc_RNA (1)...(19): siRNA sense strand
guucugaccuuguuuacau

SEQ ID NO: 975280 - RNA, 19 nt, Homo sapiens
  misc_RNA (1)...(19): siRNA sense strand
gaagaggcagacaugauuu

SEQ ID NO: 975281 - RNA, 19 nt, Homo sapiens
  misc_RNA (1)...(19): siRNA sense strand
ggucugggacugaagauaa

SEQ ID NO: 975282 - RNA, 19 nt, Homo sapiens
  misc_RNA (1)...(19): siRNA sense strand
uggcacagcugaagcaguu

SEQ ID NO: 975283 - RNA, 19 nt, Homo sapiens
  misc_RNA (1)...(19): siRNA sense strand
uagaugaacuugcacuugu

SEQ ID NO: 975284 - RNA, 19 nt, Homo sapiens
  misc_RNA (1)...(19): siRNA sense strand
gaccuuguuuacaucguua

SEQ ID NO: 975285 - RNA, 19 nt, Homo sapiens
  misc_RNA (1)...(19): siRNA sense strand
cagcuuuccuucagacaaa

SEQ ID NO: 975286 - RNA, 19 nt, Homo sapiens
  misc_RNA (1)...(19): siRNA sense strand
cggaacaucuaccagcuuu

SEQ ID NO: 975287 - RNA, 19 nt, Homo sapiens
  misc_RNA (1)...(19): siRNA sense strand
gcgcagcgaagccaucaua

SEQ ID NO: 975288 - RNA, 19 nt, Homo sapiens
  misc_RNA (1)...(19): siRNA sense strand
ggacugaagauaauuuaca

SEQ ID NO: 975289 - RNA, 19 nt, Homo sapiens
  misc_RNA (1)...(19): siRNA sense strand
ggauuuaccaugacagcua

SEQ ID NO: 975290 - RNA, 19 nt, Homo sapiens
  misc_RNA (1)...(19): siRNA sense strand
cagcgaagccaucauaguu

SEQ ID NO: 975291 - RNA, 19 nt, Homo sapiens
  misc_RNA (1)...(19): siRNA sense strand
caguuuauguaccagguua

SEQ ID NO: 975292 - RNA, 19 nt, Homo sapiens
  misc_RNA (1)...(19): siRNA sense strand
ucuccuaucuagccaagua

SEQ ID NO: 975293 - RNA, 19 nt, Homo sapiens
  misc_RNA (1)...(19): siRNA sense strand
ggccuacacugaugucguu

SEQ ID NO: 975294 - RNA, 19 nt, Homo sapiens
  misc_RNA (1)...(19): siRNA sense strand
uggccgagauauugguuua

SEQ ID NO: 975295 - RNA, 19 nt, Homo sapiens
  misc_RNA (1)...(19): siRNA sense strand
uaaagaggccuuccuugau

SEQ ID NO: 975296 - RNA, 19 nt, Homo sapiens
  misc_RNA (1)...(19): siRNA sense strand
cagcucaacuuucaccaau

SEQ ID NO: 975297 - RNA, 19 nt, Homo sapiens
  misc_RNA (1)...(19): siRNA sense strand
gcaagacacagugaagaaa

SEQ ID NO: 975298 - RNA, 19 nt, Homo sapiens
  misc_RNA (1)...(19): siRNA sense strand
uggaaggacugauagcuau

SEQ ID NO: 975299 - RNA, 19 nt, Homo sapiens
  misc_RNA (1)...(19): siRNA sense strand
gaacuguugacucaucuga

SEQ ID NO: 975300 - RNA, 19 nt, Homo sapiens
  misc_RNA (1)...(19): siRNA sense strand
guucagcucuuuugcauuu

SEQ ID NO: 975301 - RNA, 19 nt, Homo sapiens
  misc_RNA (1)...(19): siRNA sense strand
gauauucucuuagucugau

SEQ ID NO: 975302 - RNA, 19 nt, Homo sapiens
  misc_RNA (1)...(19): siRNA sense strand
gccgagauauugguuuauu

SEQ ID NO: 975303 - RNA, 19 nt, Homo sapiens
  misc_RNA (1)...(19): siRNA sense strand
gauaugcacauuucuguca

SEQ ID NO: 975304 - RNA, 19 nt, Homo sapiens
  misc_RNA (1)...(19): siRNA sense strand
gucagcaaguuccauguuu

SEQ ID NO: 975305 - RNA, 19 nt, Homo sapiens
  misc_RNA (1)...(19): siRNA sense strand
ugggagggcucuauucugu

SEQ ID NO: 975306 - RNA, 19 nt, Homo sapiens
  misc_RNA (1)...(19): siRNA sense strand
caauuguucugcaguaucu

SEQ ID NO: 975307 - RNA, 19 nt, Homo sapiens
  misc_RNA (1)...(19): siRNA sense strand
ggaaccagacugcauaugg

SEQ ID NO: 975308 - RNA, 19 nt, Homo sapiens
  misc_RNA (1)...(19): siRNA sense strand
agaagaggcagacaugauu

SEQ ID NO: 975309 - RNA, 19 nt, Homo sapiens
  misc_RNA (1)...(19): siRNA sense strand
auaaagaggccuuccuuga

SEQ ID NO: 975310 - RNA, 19 nt, Homo sapiens
  misc_RNA (1)...(19): siRNA sense strand
gaagaaaacauggauaaga

SEQ ID NO: 975311 - RNA, 19 nt, Homo sapiens
  misc_RNA (1)...(19): siRNA sense strand
ucagcaaguuccauguuug

SEQ ID NO: 975312 - RNA, 19 nt, Homo sapiens
  misc_RNA (1)...(19): siRNA sense strand
gacaugauuuuaccaauug

SEQ ID NO: 975313 - RNA, 19 nt, Homo sapiens
  misc_RNA (1)...(19): siRNA sense strand
gcacugaugggagaaaugu

SEQ ID NO: 975314 - RNA, 19 nt, Homo sapiens
  misc_RNA (1)...(19): siRNA sense strand
uuuauugguugguggauuu

SEQ ID NO: 975315 - RNA, 19 nt, Homo sapiens
  misc_RNA (1)...(19): siRNA sense strand
caauaaagaggccuuccuu

SEQ ID NO: 975316 - RNA, 19 nt, Homo sapiens
  misc_RNA (1)...(19): siRNA sense strand
aaccuugccaccuaaauua

SEQ ID NO: 975317 - RNA, 19 nt, Homo sapiens
  misc_RNA (1)...(19): siRNA sense strand
caugguuacaucauucuua

SEQ ID NO: 975318 - RNA, 19 nt, Homo sapiens
  misc_RNA (1)...(19): siRNA sense strand
agccauaucuguaucuuca

SEQ ID NO: 975319 - RNA, 19 nt, Homo sapiens
  misc_RNA (1)...(19): siRNA sense strand
agaaaucguuuggguuaug

SEQ ID NO: 975320 - RNA, 19 nt, Homo sapiens
  misc_RNA (1)...(19): siRNA sense strand
uaccaauuguucugcagua

SEQ ID NO: 975321 - RNA, 19 nt, Homo sapiens
  misc_RNA (1)...(19): siRNA sense strand
ggaaucccauggcaagcau

SEQ ID NO: 975322 - RNA, 19 nt, Homo sapiens
  misc_RNA (1)...(19): siRNA sense strand
uaagggaaccaacaccuau

SEQ ID NO: 975323 - RNA, 19 nt, Homo sapiens
  misc_RNA (1)...(19): siRNA sense strand
caguaucucugcccugugu

SEQ ID NO: 975324 - RNA, 19 nt, Homo sapiens
  misc_RNA (1)...(19): siRNA sense strand
gcauaugggcuuccagauc

SEQ ID NO: 975325 - RNA, 19 nt, Homo sapiens
  misc_RNA (1)...(19): siRNA sense strand
gagcaucaacagacuggaa

SEQ ID NO: 975326 - RNA, 19 nt, Homo sapiens
  misc_RNA (1)...(19): siRNA sense strand
ugaagcaguuuauguacca

SEQ ID NO: 975327 - RNA, 19 nt, Homo sapiens
  misc_RNA (1)...(19): siRNA sense strand
caacagccauggccuugcu

SEQ ID NO: 975328 - RNA, 19 nt, Homo sapiens
  misc_RNA (1)...(19): siRNA sense strand
gaaaucguuuggguuaugc

SEQ ID NO: 975329 - RNA, 19 nt, Homo sapiens
  misc_RNA (1)...(19): siRNA sense strand
gaucuucuacccuggcuau

SEQ ID NO: 975330 - RNA, 19 nt, Homo sapiens
  misc_RNA (1)...(19): siRNA sense strand
gcugcuuuguguacucuuu

SEQ ID NO: 975331 - RNA, 19 nt, Homo sapiens
  misc_RNA (1)...(19): siRNA sense strand
ccauguggaaggacugaua

SEQ ID NO: 975332 - RNA, 19 nt, Homo sapiens
  misc_RNA (1)...(19): siRNA sense strand
gaugaacuugcacuuguga

SEQ ID NO: 975333 - RNA, 19 nt, Homo sapiens
  misc_RNA (1)...(19): siRNA sense strand
uguauuugaugcuguuguu

SEQ ID NO: 975334 - RNA, 19 nt, Homo sapiens
  misc_RNA (1)...(19): siRNA sense strand
ccgagauauugguuuauug

SEQ ID NO: 975335 - RNA, 19 nt, Homo sapiens
  misc_RNA (1)...(19): siRNA sense strand
ucucugcccuguguauauu

SEQ ID NO: 975336 - RNA, 19 nt, Homo sapiens
  misc_RNA (1)...(19): siRNA sense strand
uagcuaucaucguguucua

SEQ ID NO: 975337 - RNA, 19 nt, Homo sapiens
  misc_RNA (1)...(19): siRNA sense strand
guggaaggacugauagcua

SEQ ID NO: 975338 - RNA, 19 nt, Homo sapiens
  misc_RNA (1)...(19): siRNA sense strand
ggauauucucuuagucuga

SEQ ID NO: 975339 - RNA, 19 nt, Homo sapiens
  misc_RNA (1)...(19): siRNA sense strand
gguaugugaccauguuaga

SEQ ID NO: 975340 - RNA, 19 nt, Homo sapiens
  misc_RNA (1)...(19): siRNA sense strand
gacugaagauaauuuacag

SEQ ID NO: 975341 - RNA, 19 nt, Homo sapiens
  misc_RNA (1)...(19): siRNA sense strand
caacauuugcaucuccuau

SEQ ID NO: 975342 - RNA, 19 nt, Homo sapiens
  misc_RNA (1)...(19): siRNA sense strand
ggagccauaucuguaucuu

SEQ ID NO: 975343 - RNA, 19 nt, Homo sapiens
  misc_RNA (1)...(19): siRNA sense strand
guuuauuccugcacugaug

SEQ ID NO: 975344 - RNA, 19 nt, Homo sapiens
  misc_RNA (1)...(19): siRNA sense strand
cagcugaagcaguuuaugu

SEQ ID NO: 975345 - RNA, 19 nt, Homo sapiens
  misc_RNA (1)...(19): siRNA sense strand
acccucagcucaacuuuca

SEQ ID NO: 975346 - RNA, 19 nt, Homo sapiens
  misc_RNA (1)...(19): siRNA sense strand
ggccucuuccugagaauaa

SEQ ID NO: 975347 - RNA, 19 nt, Homo sapiens
  misc_RNA (1)...(19): siRNA sense strand
ugaccuuguuuacaucguu

SEQ ID NO: 975348 - RNA, 19 nt, Homo sapiens
  misc_RNA (1)...(19): siRNA sense strand
cagaagaggcagacaugau

SEQ ID NO: 975349 - RNA, 19 nt, Homo sapiens
  misc_RNA (1)...(19): siRNA sense strand
caucccagccauacucauu

SEQ ID NO: 975350 - RNA, 19 nt, Homo sapiens
  misc_RNA (1)...(19): siRNA sense strand
uggcaagcauacuuucaga

SEQ ID NO: 975351 - RNA, 19 nt, Homo sapiens
  misc_RNA (1)...(19): siRNA sense strand
ugaugucguucagcucuuu

SEQ ID NO: 975352 - RNA, 19 nt, Homo sapiens
  misc_RNA (1)...(19): siRNA sense strand
gauuuuagguggccuguuc

SEQ ID NO: 975353 - RNA, 19 nt, Homo sapiens
  misc_RNA (1)...(19): siRNA sense strand
agccaaguaucuauuugaa

SEQ ID NO: 975354 - RNA, 19 nt, Homo sapiens
  misc_RNA (1)...(19): siRNA sense strand
uaaaacacuugccaugguu

SEQ ID NO: 975355 - RNA, 19 nt, Homo sapiens
  misc_RNA (1)...(19): siRNA sense strand
uuagacccguuucagcaaa

SEQ ID NO: 975356 - RNA, 19 nt, Homo sapiens
  misc_RNA (1)...(19): siRNA sense strand
uuagguggccuguucuuug

SEQ ID NO: 975357 - RNA, 19 nt, Homo sapiens
  misc_RNA (1)...(19): siRNA sense strand
agaagggucugggacugaa

SEQ ID NO: 975358 - RNA, 19 nt, Homo sapiens
  misc_RNA (1)...(19): siRNA sense strand
guugguggccgagauauug

SEQ ID NO: 975359 - RNA, 19 nt, Homo sapiens
  misc_RNA (1)...(19): siRNA sense strand
caaaaccuaugcguucaaa

SEQ ID NO: 975360 - RNA, 19 nt, Homo sapiens
  misc_RNA (1)...(19): siRNA sense strand
gcagcgaagccaucauagu

SEQ ID NO: 975361 - RNA, 19 nt, Homo sapiens
  misc_RNA (1)...(19): siRNA sense strand
cauaguugguggccgagau

SEQ ID NO: 975362 - RNA, 19 nt, Homo sapiens
  misc_RNA (1)...(19): siRNA sense strand
gaggaggguauaucaaugg

SEQ ID NO: 975363 - RNA, 19 nt, Homo sapiens
  misc_RNA (1)...(19): siRNA sense strand
gaacagggcugcacaccuu

SEQ ID NO: 975364 - RNA, 19 nt, Homo sapiens
  misc_RNA (1)...(19): siRNA sense strand
gaagaaaggcagaauauug

SEQ ID NO: 975365 - RNA, 19 nt, Homo sapiens
  misc_RNA (1)...(19): siRNA sense strand
ggaaauccuuguaaucuug

SEQ ID NO: 975366 - RNA, 19 nt, Homo sapiens
  misc_RNA (1)...(19): siRNA sense strand
ccacauauagccucaguua

SEQ ID NO: 975367 - RNA, 19 nt, Homo sapiens
  misc_RNA (1)...(19): siRNA sense strand
gaacaaggaacaucauaau

SEQ ID NO: 975368 - RNA, 19 nt, Homo sapiens
  misc_RNA (1)...(19): siRNA sense strand
ggaauggaccucaaaauua

SEQ ID NO: 975369 - RNA, 19 nt, Homo sapiens
  misc_RNA (1)...(19): siRNA sense strand
gcagaagcuucaccacaaa

SEQ ID NO: 975370 - RNA, 19 nt, Homo sapiens
  misc_RNA (1)...(19): siRNA sense strand
uacauuagcugcuuaugaa

SEQ ID NO: 975371 - RNA, 19 nt, Homo sapiens
  misc_RNA (1)...(19): siRNA sense strand
caaggaacaucauaaugga

SEQ ID NO: 975372 - RNA, 19 nt, Homo sapiens
  misc_RNA (1)...(19): siRNA sense strand
gaaggaaccauuucuuugu

SEQ ID NO: 975373 - RNA, 19 nt, Homo sapiens
  misc_RNA (1)...(19): siRNA sense strand
ggcagaagcuucaccacaa

SEQ ID NO: 975374 - RNA, 19 nt, Homo sapiens
  misc_RNA (1)...(19): siRNA sense strand
gaauggaccucaaaauuau

SEQ ID NO: 975375 - RNA, 19 nt, Homo sapiens
  misc_RNA (1)...(19): siRNA sense strand
ccagagacguguagcaaug

SEQ ID NO: 975376 - RNA, 19 nt, Homo sapiens
  misc_RNA (1)...(19): siRNA sense strand
ugaagaguaucaggaauuu

SEQ ID NO: 975377 - RNA, 19 nt, Homo sapiens
  misc_RNA (1)...(19): siRNA sense strand
uggauaggcuuaggaauuu

SEQ ID NO: 975378 - RNA, 19 nt, Homo sapiens
  misc_RNA (1)...(19): siRNA sense strand
gcuuauagcuacguauuau

SEQ ID NO: 975379 - RNA, 19 nt, Homo sapiens
  misc_RNA (1)...(19): siRNA sense strand
gaaccacccuauccugauc

SEQ ID NO: 975380 - RNA, 19 nt, Homo sapiens
  misc_RNA (1)...(19): siRNA sense strand
gagagcugccuccauauuu

SEQ ID NO: 975381 - RNA, 19 nt, Homo sapiens
  misc_RNA (1)...(19): siRNA sense strand
gggaagaaaggcagaauau

SEQ ID NO: 975382 - RNA, 19 nt, Homo sapiens
  misc_RNA (1)...(19): siRNA sense strand
gaagagaugcuggaacaug

SEQ ID NO: 975383 - RNA, 19 nt, Homo sapiens
  misc_RNA (1)...(19): siRNA sense strand
ggagacagccgcucauuac

SEQ ID NO: 975384 - RNA, 19 nt, Homo sapiens
  misc_RNA (1)...(19): siRNA sense strand
gugcaacccuaauuggaaa

SEQ ID NO: 975385 - RNA, 19 nt, Homo sapiens
  misc_RNA (1)...(19): siRNA sense strand
gaagagggcacugaaggaa

SEQ ID NO: 975386 - RNA, 19 nt, Homo sapiens
  misc_RNA (1)...(19): siRNA sense strand
gcacauaguggagcaaaug

SEQ ID NO: 975387 - RNA, 19 nt, Homo sapiens
  misc_RNA (1)...(19): siRNA sense strand
cugcacaccuuucugcuuu

SEQ ID NO: 975388 - RNA, 19 nt, Homo sapiens
  misc_RNA (1)...(19): siRNA sense strand
cagauuauuuguccagaug

SEQ ID NO: 975389 - RNA, 19 nt, Homo sapiens
  misc_RNA (1)...(19): siRNA sense strand
ggaagaaaggcagaauauu

SEQ ID NO: 975390 - RNA, 19 nt, Homo sapiens
  misc_RNA (1)...(19): siRNA sense strand
gcacaaaguuaugccaaac

SEQ ID NO: 975391 - RNA, 19 nt, Homo sapiens
  misc_RNA (1)...(19): siRNA sense strand
gcacaccuuucugcuuuau

SEQ ID NO: 975392 - RNA, 19 nt, Homo sapiens
  misc_RNA (1)...(19): siRNA sense strand
gacagccgcucauuaccuu

SEQ ID NO: 975393 - RNA, 19 nt, Homo sapiens
  misc_RNA (1)...(19): siRNA sense strand
ucauuaccuugcaguauuu

SEQ ID NO: 975394 - RNA, 19 nt, Homo sapiens
  misc_RNA (1)...(19): siRNA sense strand
gacacuuucugguaccuuu

SEQ ID NO: 975395 - RNA, 19 nt, Homo sapiens
  misc_RNA (1)...(19): siRNA sense strand
gauuauuuguccagaugaa

SEQ ID NO: 975396 - RNA, 19 nt, Homo sapiens
  misc_RNA (1)...(19): siRNA sense strand
ucaggaauuugaagagaug

SEQ ID NO: 975397 - RNA, 19 nt, Homo sapiens
  misc_RNA (1)...(19): siRNA sense strand
ggagggagcgggaagaaag

SEQ ID NO: 975398 - RNA, 19 nt, Homo sapiens
  misc_RNA (1)...(19): siRNA sense strand
gaugaagaguaucaggaau

SEQ ID NO: 975399 - RNA, 19 nt, Homo sapiens
  misc_RNA (1)...(19): siRNA sense strand
ugaaggaaccauuucuuug

SEQ ID NO: 975400 - RNA, 19 nt, Homo sapiens
  misc_RNA (1)...(19): siRNA sense strand
gcugcuugcugugcuuaua

SEQ ID NO: 975401 - RNA, 19 nt, Homo sapiens
  misc_RNA (1)...(19): siRNA sense strand
uauagccucaguuacauua

SEQ ID NO: 975402 - RNA, 19 nt, Homo sapiens
  misc_RNA (1)...(19): siRNA sense strand
ggaacaucauaauggaaau

SEQ ID NO: 975403 - RNA, 19 nt, Homo sapiens
  misc_RNA (1)...(19): siRNA sense strand
cucauuaccuugcaguauu

SEQ ID NO: 975404 - RNA, 19 nt, Homo sapiens
  misc_RNA (1)...(19): siRNA sense strand
ugaacaaggaacaucauaa

SEQ ID NO: 975405 - RNA, 19 nt, Homo sapiens
  misc_RNA (1)...(19): siRNA sense strand
uaucaggaauuugaagaga

SEQ ID NO: 975406 - RNA, 19 nt, Homo sapiens
  misc_RNA (1)...(19): siRNA sense strand
gcacugaaggaaccauuuc

SEQ ID NO: 975407 - RNA, 19 nt, Homo sapiens
  misc_RNA (1)...(19): siRNA sense strand
gaaauccuuguaaucuuga

SEQ ID NO: 975408 - RNA, 19 nt, Homo sapiens
  misc_RNA (1)...(19): siRNA sense strand
ggaauuuugucuucuguug

SEQ ID NO: 975409 - RNA, 19 nt, Homo sapiens
  misc_RNA (1)...(19): siRNA sense strand
uugaagagaugcuggaaca

SEQ ID NO: 975410 - RNA, 19 nt, Homo sapiens
  misc_RNA (1)...(19): siRNA sense strand
aagaguaucaggaauuuga

SEQ ID NO: 975411 - RNA, 19 nt, Homo sapiens
  misc_RNA (1)...(19): siRNA sense strand
gugcugaaccagaugauga

SEQ ID NO: 975412 - RNA, 19 nt, Homo sapiens
  misc_RNA (1)...(19): siRNA sense strand
uuaucuggguccacauaua

SEQ ID NO: 975413 - RNA, 19 nt, Homo sapiens
  misc_RNA (1)...(19): siRNA sense strand
ugaaccagaugaugaagag

SEQ ID NO: 975414 - RNA, 19 nt, Homo sapiens
  misc_RNA (1)...(19): siRNA sense strand
acauauagccucaguuaca

SEQ ID NO: 975415 - RNA, 19 nt, Homo sapiens
  misc_RNA (1)...(19): siRNA sense strand
gcuggaacaugcagagucu

SEQ ID NO: 975416 - RNA, 19 nt, Homo sapiens
  misc_RNA (1)...(19): siRNA sense strand
uggaaauccuuguaaucuu

SEQ ID NO: 975417 - RNA, 19 nt, Homo sapiens
  misc_RNA (1)...(19): siRNA sense strand
acaaaguuaugccaaacga

SEQ ID NO: 975418 - RNA, 19 nt, Homo sapiens
  misc_RNA (1)...(19): siRNA sense strand
acaaggaacaucauaaugg

SEQ ID NO: 975419 - RNA, 19 nt, Homo sapiens
  misc_RNA (1)...(19): siRNA sense strand
cuuguaaucuugaaggaau

SEQ ID NO: 975420 - RNA, 19 nt, Homo sapiens
  misc_RNA (1)...(19): siRNA sense strand
caacaguaugugcaacgua

SEQ ID NO: 975421 - RNA, 19 nt, Homo sapiens
  misc_RNA (1)...(19): siRNA sense strand
cauccuaucuaucauuaac

SEQ ID NO: 975422 - RNA, 19 nt, Homo sapiens
  misc_RNA (1)...(19): siRNA sense strand
agaagccauuucaggagua

SEQ ID NO: 975423 - RNA, 19 nt, Homo sapiens
  misc_RNA (1)...(19): siRNA sense strand
uggagcaaaugguggcuuu

SEQ ID NO: 975424 - RNA, 19 nt, Homo sapiens
  misc_RNA (1)...(19): siRNA sense strand
ggugcaacccuaauuggaa

SEQ ID NO: 975425 - RNA, 19 nt, Homo sapiens
  misc_RNA (1)...(19): siRNA sense strand
uauuugaucuggcuggaau

SEQ ID NO: 975426 - RNA, 19 nt, Homo sapiens
  misc_RNA (1)...(19): siRNA sense strand
aagaaaggcagaauauugu

SEQ ID NO: 975427 - RNA, 19 nt, Homo sapiens
  misc_RNA (1)...(19): siRNA sense strand
uuacauuagcugcuuauga

SEQ ID NO: 975428 - RNA, 19 nt, Homo sapiens
  misc_RNA (1)...(19): siRNA sense strand
cauauagccucaguuacau

SEQ ID NO: 975429 - RNA, 19 nt, Homo sapiens
  misc_RNA (1)...(19): siRNA sense strand
gcaaugaacaaggaacauc

SEQ ID NO: 975430 - RNA, 19 nt, Homo sapiens
  misc_RNA (1)...(19): siRNA sense strand
gagcaaaugguggcuuuca

SEQ ID NO: 975431 - RNA, 19 nt, Homo sapiens
  misc_RNA (1)...(19): siRNA sense strand
guguagcaaugaacaagga

SEQ ID NO: 975432 - RNA, 19 nt, Homo sapiens
  misc_RNA (1)...(19): siRNA sense strand
uguggaguaucaucucaaa

SEQ ID NO: 975433 - RNA, 19 nt, Homo sapiens
  misc_RNA (1)...(19): siRNA sense strand
ucaguuacauuagcugcuu

SEQ ID NO: 975434 - RNA, 19 nt, Homo sapiens
  misc_RNA (1)...(19): siRNA sense strand
gaccagagacguguagcaa

SEQ ID NO: 975435 - RNA, 19 nt, Homo sapiens
  misc_RNA (1)...(19): siRNA sense strand
cuggauaggcuuaggaauu

SEQ ID NO: 975436 - RNA, 19 nt, Homo sapiens
  misc_RNA (1)...(19): siRNA sense strand
aacaguaugugcaacguau

SEQ ID NO: 975437 - RNA, 19 nt, Homo sapiens
  misc_RNA (1)...(19): siRNA sense strand
cugaaggaaccauuucuuu

SEQ ID NO: 975438 - RNA, 19 nt, Homo sapiens
  misc_RNA (1)...(19): siRNA sense strand
agagcugccuccauauuuc

SEQ ID NO: 975439 - RNA, 19 nt, Homo sapiens
  misc_RNA (1)...(19): siRNA sense strand
caugguguguuacuucauc

SEQ ID NO: 975440 - RNA, 19 nt, Homo sapiens
  misc_RNA (1)...(19): siRNA sense strand
ugaaggaauggaccucaaa

SEQ ID NO: 975441 - RNA, 19 nt, Homo sapiens
  misc_RNA (1)...(19): siRNA sense strand
aaaguuaugccaaacgaau

SEQ ID NO: 975442 - RNA, 19 nt, Homo sapiens
  misc_RNA (1)...(19): siRNA sense strand
uggagacagccgcucauua

SEQ ID NO: 975443 - RNA, 19 nt, Homo sapiens
  misc_RNA (1)...(19): siRNA sense strand
caaugaacaaggaacauca

SEQ ID NO: 975444 - RNA, 19 nt, Homo sapiens
  misc_RNA (1)...(19): siRNA sense strand
caguuacauuagcugcuua

SEQ ID NO: 975445 - RNA, 19 nt, Homo sapiens
  misc_RNA (1)...(19): siRNA sense strand
caacguauagagaaacagu

SEQ ID NO: 975446 - RNA, 19 nt, Homo sapiens
  misc_RNA (1)...(19): siRNA sense strand
gcucauuaccuugcaguau

SEQ ID NO: 975447 - RNA, 19 nt, Homo sapiens
  misc_RNA (1)...(19): siRNA sense strand
gaaggagugcaucaacagu

SEQ ID NO: 975448 - RNA, 19 nt, Homo sapiens
  misc_RNA (1)...(19): siRNA sense strand
guuacuucauccuaucuau

SEQ ID NO: 975449 - RNA, 19 nt, Homo sapiens
  misc_RNA (1)...(19): siRNA sense strand
ggguaucgguacagcaauc

SEQ ID NO: 975450 - RNA, 19 nt, Homo sapiens
  misc_RNA (1)...(19): siRNA sense strand
aaggaaccauuucuuugug

SEQ ID NO: 975451 - RNA, 19 nt, Homo sapiens
  misc_RNA (1)...(19): siRNA sense strand
acaccuuucugcuuuaucu

SEQ ID NO: 975452 - RNA, 19 nt, Homo sapiens
  misc_RNA (1)...(19): siRNA sense strand
aggagugcaucaacaguau

SEQ ID NO: 975453 - RNA, 19 nt, Homo sapiens
  misc_RNA (1)...(19): siRNA sense strand
gagcugccuccauauuuca

SEQ ID NO: 975454 - RNA, 19 nt, Homo sapiens
  misc_RNA (1)...(19): siRNA sense strand
gugcuuauagcuacguauu

SEQ ID NO: 975455 - RNA, 19 nt, Homo sapiens
  misc_RNA (1)...(19): siRNA sense strand
aaccagaugaugaagagua

SEQ ID NO: 975456 - RNA, 19 nt, Homo sapiens
  misc_RNA (1)...(19): siRNA sense strand
auagcuacguauuauguug

SEQ ID NO: 975457 - RNA, 19 nt, Homo sapiens
  misc_RNA (1)...(19): siRNA sense strand
cagaggagaaaacuaaaua

SEQ ID NO: 975458 - RNA, 19 nt, Homo sapiens
  misc_RNA (1)...(19): siRNA sense strand
guacagaaaguuggauuuu

SEQ ID NO: 975459 - RNA, 19 nt, Homo sapiens
  misc_RNA (1)...(19): siRNA sense strand
ucguugucaugguguguua

SEQ ID NO: 975460 - RNA, 19 nt, Homo sapiens
  misc_RNA (1)...(19): siRNA sense strand
gaagccauuucaggaguac

SEQ ID NO: 975461 - RNA, 19 nt, Homo sapiens
  misc_RNA (1)...(19): siRNA sense strand
aaaguuggucguugucaug

SEQ ID NO: 975462 - RNA, 19 nt, Homo sapiens
  misc_RNA (1)...(19): siRNA sense strand
gucaugguguguuacuuca

SEQ ID NO: 975463 - RNA, 19 nt, Homo sapiens
  misc_RNA (1)...(19): siRNA sense strand
ggaccgcgcuuguguacca

SEQ ID NO: 975464 - RNA, 19 nt, Homo sapiens
  misc_RNA (1)...(19): siRNA sense strand
gcacagcccagaguaugua

SEQ ID NO: 975465 - RNA, 19 nt, Homo sapiens
  misc_RNA (1)...(19): siRNA sense strand
ccacuggccuuugaguuug

SEQ ID NO: 975466 - RNA, 19 nt, Homo sapiens
  misc_RNA (1)...(19): siRNA sense strand
gaagcuccuguaccucuua

SEQ ID NO: 975467 - RNA, 19 nt, Homo sapiens
  misc_RNA (1)...(19): siRNA sense strand
ggaggagucuguggcugaa

SEQ ID NO: 975468 - RNA, 19 nt, Homo sapiens
  misc_RNA (1)...(19): siRNA sense strand
ggugaacagugguauagca

SEQ ID NO: 975469 - RNA, 19 nt, Homo sapiens
  misc_RNA (1)...(19): siRNA sense strand
gagccucaguggaagaugu

SEQ ID NO: 975470 - RNA, 19 nt, Homo sapiens
  misc_RNA (1)...(19): siRNA sense strand
cuccagaccucgcccauga

SEQ ID NO: 975471 - RNA, 19 nt, Homo sapiens
  misc_RNA (1)...(19): siRNA sense strand
gcaggugaacagugguaua

SEQ ID NO: 975472 - RNA, 19 nt, Homo sapiens
  misc_RNA (1)...(19): siRNA sense strand
ggacugggaugugcaccau

SEQ ID NO: 975473 - RNA, 19 nt, Homo sapiens
  misc_RNA (1)...(19): siRNA sense strand
ggaagcuccuguaccucuu

SEQ ID NO: 975474 - RNA, 19 nt, Homo sapiens
  misc_RNA (1)...(19): siRNA sense strand
ggccucggcuucacuguca

SEQ ID NO: 975475 - RNA, 19 nt, Homo sapiens
  misc_RNA (1)...(19): siRNA sense strand
gccaacggguucugugugu

SEQ ID NO: 975476 - RNA, 19 nt, Homo sapiens
  misc_RNA (1)...(19): siRNA sense strand
caacgccggauaucacauu

SEQ ID NO: 975477 - RNA, 19 nt, Homo sapiens
  misc_RNA (1)...(19): siRNA sense strand
gauccaguaucucuuugag

SEQ ID NO: 975478 - RNA, 19 nt, Homo sapiens
  misc_RNA (1)...(19): siRNA sense strand
gcuggucucggcaggauuu

SEQ ID NO: 975479 - RNA, 19 nt, Homo sapiens
  misc_RNA (1)...(19): siRNA sense strand
caacaacguggccauagca

SEQ ID NO: 975480 - RNA, 19 nt, Homo sapiens
  misc_RNA (1)...(19): siRNA sense strand
caacggguucuguguguuc

SEQ ID NO: 975481 - RNA, 19 nt, Homo sapiens
  misc_RNA (1)...(19): siRNA sense strand
gggauccaguaucucuuug

SEQ ID NO: 975482 - RNA, 19 nt, Homo sapiens
  misc_RNA (1)...(19): siRNA sense strand
gcacaugccaagcagaaac

SEQ ID NO: 975483 - RNA, 19 nt, Homo sapiens
  misc_RNA (1)...(19): siRNA sense strand
cggcugcccuauccauguu

SEQ ID NO: 975484 - RNA, 19 nt, Homo sapiens
  misc_RNA (1)...(19): siRNA sense strand
gaugggaaacgcugacuac

SEQ ID NO: 975485 - RNA, 19 nt, Homo sapiens
  misc_RNA (1)...(19): siRNA sense strand
guucgacgccaucuacuuc

SEQ ID NO: 975486 - RNA, 19 nt, Homo sapiens
  misc_RNA (1)...(19): siRNA sense strand
ggccauagcagcugcacau

SEQ ID NO: 975487 - RNA, 19 nt, Homo sapiens
  misc_RNA (1)...(19): siRNA sense strand
cccacuggccuuugaguuu

SEQ ID NO: 975488 - RNA, 19 nt, Homo sapiens
  misc_RNA (1)...(19): siRNA sense strand
gcuaccaccuggagucacu

SEQ ID NO: 975489 - RNA, 19 nt, Homo sapiens
  misc_RNA (1)...(19): siRNA sense strand
guucaacaacguggccaua

SEQ ID NO: 975490 - RNA, 19 nt, Homo sapiens
  misc_RNA (1)...(19): siRNA sense strand
gggcaggugaacaguggua

SEQ ID NO: 975491 - RNA, 19 nt, Homo sapiens
  misc_RNA (1)...(19): siRNA sense strand
cagaaacacgggcuacaca

SEQ ID NO: 975492 - RNA, 19 nt, Homo sapiens
  misc_RNA (1)...(19): siRNA sense strand
gcccugacaacgccggaua

SEQ ID NO: 975493 - RNA, 19 nt, Homo sapiens
  misc_RNA (1)...(19): siRNA sense strand
ggaugggaaacgcugacua

SEQ ID NO: 975494 - RNA, 19 nt, Homo sapiens
  misc_RNA (1)...(19): siRNA sense strand
gugcuucgcccaccucaca

SEQ ID NO: 975495 - RNA, 19 nt, Homo sapiens
  misc_RNA (1)...(19): siRNA sense strand
ggauccaguaucucuuuga

SEQ ID NO: 975496 - RNA, 19 nt, Homo sapiens
  misc_RNA (1)...(19): siRNA sense strand
acuccuggcugcaaugcuu

SEQ ID NO: 975497 - RNA, 19 nt, Homo sapiens
  misc_RNA (1)...(19): siRNA sense strand
gaagagccuccagcagcaa

SEQ ID NO: 975498 - RNA, 19 nt, Homo sapiens
  misc_RNA (1)...(19): siRNA sense strand
ugacaacgccggauaucac

SEQ ID NO: 975499 - RNA, 19 nt, Homo sapiens
  misc_RNA (1)...(19): siRNA sense strand
ucacugcacuugggaagcu

SEQ ID NO: 975500 - RNA, 19 nt, Homo sapiens
  misc_RNA (1)...(19): siRNA sense strand
gugcacagcccagaguaug

SEQ ID NO: 975501 - RNA, 19 nt, Homo sapiens
  misc_RNA (1)...(19): siRNA sense strand
gguggacgcugugcucacu

SEQ ID NO: 975502 - RNA, 19 nt, Homo sapiens
  misc_RNA (1)...(19): siRNA sense strand
cagcagccacccuggaugu

SEQ ID NO: 975503 - RNA, 19 nt, Homo sapiens
  misc_RNA (1)...(19): siRNA sense strand
ucaacaacguggccauagc

SEQ ID NO: 975504 - RNA, 19 nt, Homo sapiens
  misc_RNA (1)...(19): siRNA sense strand
ugacgucauccaacaggaa

SEQ ID NO: 975505 - RNA, 19 nt, Homo sapiens
  misc_RNA (1)...(19): siRNA sense strand
ccaacggguucuguguguu

SEQ ID NO: 975506 - RNA, 19 nt, Homo sapiens
  misc_RNA (1)...(19): siRNA sense strand
gacaacgccggauaucaca

SEQ ID NO: 975507 - RNA, 19 nt, Homo sapiens
  misc_RNA (1)...(19): siRNA sense strand
gugcuggucucggcaggau

SEQ ID NO: 975508 - RNA, 19 nt, Homo sapiens
  misc_RNA (1)...(19): siRNA sense strand
gaacuccacaccccagcua

SEQ ID NO: 975509 - RNA, 19 nt, Homo sapiens
  misc_RNA (1)...(19): siRNA sense strand
caggugaacagugguauag

SEQ ID NO: 975510 - RNA, 19 nt, Homo sapiens
  misc_RNA (1)...(19): siRNA sense strand
gcuccuguaccucuuagau

SEQ ID NO: 975511 - RNA, 19 nt, Homo sapiens
  misc_RNA (1)...(19): siRNA sense strand
gcaaggagguuccaucuua

SEQ ID NO: 975512 - RNA, 19 nt, Homo sapiens
  misc_RNA (1)...(19): siRNA sense strand
ccaaagaccucaucuccaa

SEQ ID NO: 975513 - RNA, 19 nt, Homo sapiens
  misc_RNA (1)...(19): siRNA sense strand
gcacacaucuccagugaag

SEQ ID NO: 975514 - RNA, 19 nt, Homo sapiens
  misc_RNA (1)...(19): siRNA sense strand
caaagaguaugccgucaaa

SEQ ID NO: 975515 - RNA, 19 nt, Homo sapiens
  misc_RNA (1)...(19): siRNA sense strand
caggaaaguuugaagauau

SEQ ID NO: 975516 - RNA, 19 nt, Homo sapiens
  misc_RNA (1)...(19): siRNA sense strand
ccaggaaaguuugaagaua

SEQ ID NO: 975517 - RNA, 19 nt, Homo sapiens
  misc_RNA (1)...(19): siRNA sense strand
gaaaaggugucuccaguga

SEQ ID NO: 975518 - RNA, 19 nt, Homo sapiens
  misc_RNA (1)...(19): siRNA sense strand
aaaggugucuccagugaaa

SEQ ID NO: 975519 - RNA, 19 nt, Homo sapiens
  misc_RNA (1)...(19): siRNA sense strand
ggaugaaacugaacaacuc

SEQ ID NO: 975520 - RNA, 19 nt, Homo sapiens
  misc_RNA (1)...(19): siRNA sense strand
gcacgaagagaacgaacua

SEQ ID NO: 975521 - RNA, 19 nt, Homo sapiens
  misc_RNA (1)...(19): siRNA sense strand
gggcacacaucuccaguga

SEQ ID NO: 975522 - RNA, 19 nt, Homo sapiens
  misc_RNA (1)...(19): siRNA sense strand
gcccuugacuuccugcaua

SEQ ID NO: 975523 - RNA, 19 nt, Homo sapiens
  misc_RNA (1)...(19): siRNA sense strand
ggaaggcaaguaugaguuu

SEQ ID NO: 975524 - RNA, 19 nt, Homo sapiens
  misc_RNA (1)...(19): siRNA sense strand
uguacaagcugaccucuga

SEQ ID NO: 975525 - RNA, 19 nt, Homo sapiens
  misc_RNA (1)...(19): siRNA sense strand
gcacuucaaugagcgagaa

SEQ ID NO: 975526 - RNA, 19 nt, Homo sapiens
  misc_RNA (1)...(19): siRNA sense strand
caagcugaccucugaauug

SEQ ID NO: 975527 - RNA, 19 nt, Homo sapiens
  misc_RNA (1)...(19): siRNA sense strand
gaugcaaagcagagacuua

SEQ ID NO: 975528 - RNA, 19 nt, Homo sapiens
  misc_RNA (1)...(19): siRNA sense strand
caauggaccugacgcucuu

SEQ ID NO: 975529 - RNA, 19 nt, Homo sapiens
  misc_RNA (1)...(19): siRNA sense strand
gcaaagaguaugccgucaa

SEQ ID NO: 975530 - RNA, 19 nt, Homo sapiens
  misc_RNA (1)...(19): siRNA sense strand
gcagggcacagucggagua

SEQ ID NO: 975531 - RNA, 19 nt, Homo sapiens
  misc_RNA (1)...(19): siRNA sense strand
gcugaccucugaauugcuu

SEQ ID NO: 975532 - RNA, 19 nt, Homo sapiens
  misc_RNA (1)...(19): siRNA sense strand
gggagccuaugccaaaguu

SEQ ID NO: 975533 - RNA, 19 nt, Homo sapiens
  misc_RNA (1)...(19): siRNA sense strand
caaggagguuccaucuuag

SEQ ID NO: 975534 - RNA, 19 nt, Homo sapiens
  misc_RNA (1)...(19): siRNA sense strand
ggagcugauugaguucuuu

SEQ ID NO: 975535 - RNA, 19 nt, Homo sapiens
  misc_RNA (1)...(19): siRNA sense strand
agagggagccuaugccaaa

SEQ ID NO: 975536 - RNA, 19 nt, Homo sapiens
  misc_RNA (1)...(19): siRNA sense strand
aaacugaacaacuccugua

SEQ ID NO: 975537 - RNA, 19 nt, Homo sapiens
  misc_RNA (1)...(19): siRNA sense strand
gaagaugacacaagguuuu

SEQ ID NO: 975538 - RNA, 19 nt, Homo sapiens
  misc_RNA (1)...(19): siRNA sense strand
gaaacaagcagggcacagu

SEQ ID NO: 975539 - RNA, 19 nt, Homo sapiens
  misc_RNA (1)...(19): siRNA sense strand
gaaggcaaguaugaguuuc

SEQ ID NO: 975540 - RNA, 19 nt, Homo sapiens
  misc_RNA (1)...(19): siRNA sense strand
ccagcuaucucagcacgaa

SEQ ID NO: 975541 - RNA, 19 nt, Homo sapiens
  misc_RNA (1)...(19): siRNA sense strand
ucacggaccaggccacauu

SEQ ID NO: 975542 - RNA, 19 nt, Homo sapiens
  misc_RNA (1)...(19): siRNA sense strand
gacaaggacugggcacaca

SEQ ID NO: 975543 - RNA, 19 nt, Homo sapiens
  misc_RNA (1)...(19): siRNA sense strand
gccgugagccuacagaaug

SEQ ID NO: 975544 - RNA, 19 nt, Homo sapiens
  misc_RNA (1)...(19): siRNA sense strand
gacaggaggaggaagaaga

SEQ ID NO: 975545 - RNA, 19 nt, Homo sapiens
  misc_RNA (1)...(19): siRNA sense strand
cagggaaacaagaacauuu

SEQ ID NO: 975546 - RNA, 19 nt, Homo sapiens
  misc_RNA (1)...(19): siRNA sense strand
gaaaaucugugacuuugac

SEQ ID NO: 975547 - RNA, 19 nt, Homo sapiens
  misc_RNA (1)...(19): siRNA sense strand
cuauagagaugggcaguag

SEQ ID NO: 975548 - RNA, 19 nt, Homo sapiens
  misc_RNA (1)...(19): siRNA sense strand
caucuccagugaagccaaa

SEQ ID NO: 975549 - RNA, 19 nt, Homo sapiens
  misc_RNA (1)...(19): siRNA sense strand
ccauguggcucugcagaau

SEQ ID NO: 975550 - RNA, 19 nt, Homo sapiens
  misc_RNA (1)...(19): siRNA sense strand
ggaccaggccacauucuac

SEQ ID NO: 975551 - RNA, 19 nt, Homo sapiens
  misc_RNA (1)...(19): siRNA sense strand
gcccuuaaccgccagcuau

SEQ ID NO: 975552 - RNA, 19 nt, Homo sapiens
  misc_RNA (1)...(19): siRNA sense strand
uuacuuggucuuugagaaa

SEQ ID NO: 975553 - RNA, 19 nt, Homo sapiens
  misc_RNA (1)...(19): siRNA sense strand
aguaugaguuuccugacaa

SEQ ID NO: 975554 - RNA, 19 nt, Homo sapiens
  misc_RNA (1)...(19): siRNA sense strand
gagccuaugccaaaguuca

SEQ ID NO: 975555 - RNA, 19 nt, Homo sapiens
  misc_RNA (1)...(19): siRNA sense strand
gaaacaagaacauuuugga

SEQ ID NO: 975556 - RNA, 19 nt, Homo sapiens
  misc_RNA (1)...(19): siRNA sense strand
gugaaaaucugugacuuug

SEQ ID NO: 975557 - RNA, 19 nt, Homo sapiens
  misc_RNA (1)...(19): siRNA sense strand
aggaaaguuugaagauaug

SEQ ID NO: 975558 - RNA, 19 nt, Homo sapiens
  misc_RNA (1)...(19): siRNA sense strand
gcccacauccagaagcaaa

SEQ ID NO: 975559 - RNA, 19 nt, Homo sapiens
  misc_RNA (1)...(19): siRNA sense strand
gcugaggccaucgcccuua

SEQ ID NO: 975560 - RNA, 19 nt, Homo sapiens
  misc_RNA (1)...(19): siRNA sense strand
ugaagaugacacaagguuu

SEQ ID NO: 975561 - RNA, 19 nt, Homo sapiens
  misc_RNA (1)...(19): siRNA sense strand
uacagaauggcaaagagua

SEQ ID NO: 975562 - RNA, 19 nt, Homo sapiens
  misc_RNA (1)...(19): siRNA sense strand
cgaagagaacgaacuagca

SEQ ID NO: 975563 - RNA, 19 nt, Homo sapiens
  misc_RNA (1)...(19): siRNA sense strand
ggugacaggaggaggaaga

SEQ ID NO: 975564 - RNA, 19 nt, Homo sapiens
  misc_RNA (1)...(19): siRNA sense strand
gcugauugaguucuuugaa

SEQ ID NO: 975565 - RNA, 19 nt, Homo sapiens
  misc_RNA (1)...(19): siRNA sense strand
gagagguggagacgcugua

SEQ ID NO: 975566 - RNA, 19 nt, Homo sapiens
  misc_RNA (1)...(19): siRNA sense strand
cugaggccaucgcccuuaa

SEQ ID NO: 975567 - RNA, 19 nt, Homo sapiens
  misc_RNA (1)...(19): siRNA sense strand
gggaugaaacugaacaacu

SEQ ID NO: 975568 - RNA, 19 nt, Homo sapiens
  misc_RNA (1)...(19): siRNA sense strand
uugaagauauguacaagcu

SEQ ID NO: 975569 - RNA, 19 nt, Homo sapiens
  misc_RNA (1)...(19): siRNA sense strand
gagcugauugaguucuuug

SEQ ID NO: 975570 - RNA, 19 nt, Homo sapiens
  misc_RNA (1)...(19): siRNA sense strand
cauguggcucugcagaaua

SEQ ID NO: 975571 - RNA, 19 nt, Homo sapiens
  misc_RNA (1)...(19): siRNA sense strand
guaugaguuuccugacaag

SEQ ID NO: 975572 - RNA, 19 nt, Homo sapiens
  misc_RNA (1)...(19): siRNA sense strand
gccaggaaaguuugaagau

SEQ ID NO: 975573 - RNA, 19 nt, Homo sapiens
  misc_RNA (1)...(19): siRNA sense strand
gagccuacagaauggcaaa

SEQ ID NO: 975574 - RNA, 19 nt, Homo sapiens
  misc_RNA (1)...(19): siRNA sense strand
ggaacagcagcacaaugga

SEQ ID NO: 975575 - RNA, 19 nt, Homo sapiens
  misc_RNA (1)...(19): siRNA sense strand
gguaucuucucaaaaguug

SEQ ID NO: 975576 - RNA, 19 nt, Homo sapiens
  misc_RNA (1)...(19): siRNA sense strand
acaggaggaggaagaagaa

SEQ ID NO: 975577 - RNA, 19 nt, Homo sapiens
  misc_RNA (1)...(19): siRNA sense strand
gagggagccuaugccaaag

SEQ ID NO: 975578 - RNA, 19 nt, Homo sapiens
  misc_RNA (1)...(19): siRNA sense strand
aaucugugacuuugacuug

SEQ ID NO: 975579 - RNA, 19 nt, Homo sapiens
  misc_RNA (1)...(19): siRNA sense strand
aggcauugcucaucgugau

SEQ ID NO: 975580 - RNA, 19 nt, Homo sapiens
  misc_RNA (1)...(19): siRNA sense strand
cugauugaguucuuugaag

SEQ ID NO: 975581 - RNA, 19 nt, Homo sapiens
  misc_RNA (1)...(19): siRNA sense strand
aagcugaccucugaauugc

SEQ ID NO: 975582 - RNA, 19 nt, Homo sapiens
  misc_RNA (1)...(19): siRNA sense strand
ucaaaaucaucgagaaaca

SEQ ID NO: 975583 - RNA, 19 nt, Homo sapiens
  misc_RNA (1)...(19): siRNA sense strand
aaguaugaguuuccugaca

SEQ ID NO: 975584 - RNA, 19 nt, Homo sapiens
  misc_RNA (1)...(19): siRNA sense strand
cuacagaauggcaaagagu

SEQ ID NO: 975585 - RNA, 19 nt, Homo sapiens
  misc_RNA (1)...(19): siRNA sense strand
acagaauggcaaagaguau

SEQ ID NO: 975586 - RNA, 19 nt, Homo sapiens
  misc_RNA (1)...(19): siRNA sense strand
acaagcugaccucugaauu

SEQ ID NO: 975587 - RNA, 19 nt, Homo sapiens
  misc_RNA (1)...(19): siRNA sense strand
cauccaggaaggcaaguau

SEQ ID NO: 975588 - RNA, 19 nt, Homo sapiens
  misc_RNA (1)...(19): siRNA sense strand
ggcgugguccucuacauca

SEQ ID NO: 975589 - RNA, 19 nt, Homo sapiens
  misc_RNA (1)...(19): siRNA sense strand
ucagggaaacaagaacauu

SEQ ID NO: 975590 - RNA, 19 nt, Homo sapiens
  misc_RNA (1)...(19): siRNA sense strand
guggagacgcuguaucagu

SEQ ID NO: 975591 - RNA, 19 nt, Homo sapiens
  misc_RNA (1)...(19): siRNA sense strand
gcaaggagguuccaucuua

SEQ ID NO: 975592 - RNA, 19 nt, Homo sapiens
  misc_RNA (1)...(19): siRNA sense strand
ccaaagaccucaucuccaa

SEQ ID NO: 975593 - RNA, 19 nt, Homo sapiens
  misc_RNA (1)...(19): siRNA sense strand
gcacacaucuccagugaag

SEQ ID NO: 975594 - RNA, 19 nt, Homo sapiens
  misc_RNA (1)...(19): siRNA sense strand
caaagaguaugccgucaaa

SEQ ID NO: 975595 - RNA, 19 nt, Homo sapiens
  misc_RNA (1)...(19): siRNA sense strand
caggaaaguuugaagauau

SEQ ID NO: 975596 - RNA, 19 nt, Homo sapiens
  misc_RNA (1)...(19): siRNA sense strand
ccaggaaaguuugaagaua

SEQ ID NO: 975597 - RNA, 19 nt, Homo sapiens
  misc_RNA (1)...(19): siRNA sense strand
gaaaaggugucuccaguga

SEQ ID NO: 975598 - RNA, 19 nt, Homo sapiens
  misc_RNA (1)...(19): siRNA sense strand
aaaggugucuccagugaaa

SEQ ID NO: 975599 - RNA, 19 nt, Homo sapiens
  misc_RNA (1)...(19): siRNA sense strand
ggaugaaacugaacaacuc

SEQ ID NO: 975600 - RNA, 19 nt, Homo sapiens
  misc_RNA (1)...(19): siRNA sense strand
gggcacacaucuccaguga

SEQ ID NO: 975601 - RNA, 19 nt, Homo sapiens
  misc_RNA (1)...(19): siRNA sense strand
gcccuugacuuccugcaua

SEQ ID NO: 975602 - RNA, 19 nt, Homo sapiens
  misc_RNA (1)...(19): siRNA sense strand
ggaaggcaaguaugaguuu

SEQ ID NO: 975603 - RNA, 19 nt, Homo sapiens
  misc_RNA (1)...(19): siRNA sense strand
uguacaagcugaccucuga

SEQ ID NO: 975604 - RNA, 19 nt, Homo sapiens
  misc_RNA (1)...(19): siRNA sense strand
gcacuucaaugagcgagaa

SEQ ID NO: 975605 - RNA, 19 nt, Homo sapiens
  misc_RNA (1)...(19): siRNA sense strand
caagcugaccucugaauug

SEQ ID NO: 975606 - RNA, 19 nt, Homo sapiens
  misc_RNA (1)...(19): siRNA sense strand
gaugcaaagcagagacuua

SEQ ID NO: 975607 - RNA, 19 nt, Homo sapiens
  misc_RNA (1)...(19): siRNA sense strand
caauggaccugacgcucuu

SEQ ID NO: 975608 - RNA, 19 nt, Homo sapiens
  misc_RNA (1)...(19): siRNA sense strand
gcaaagaguaugccgucaa

SEQ ID NO: 975609 - RNA, 19 nt, Homo sapiens
  misc_RNA (1)...(19): siRNA sense strand
gcagggcacagucggagua

SEQ ID NO: 975610 - RNA, 19 nt, Homo sapiens
  misc_RNA (1)...(19): siRNA sense strand
gcugaccucugaauugcuu

SEQ ID NO: 975611 - RNA, 19 nt, Homo sapiens
  misc_RNA (1)...(19): siRNA sense strand
gggagccuaugccaaaguu

SEQ ID NO: 975612 - RNA, 19 nt, Homo sapiens
  misc_RNA (1)...(19): siRNA sense strand
caaggagguuccaucuuag

SEQ ID NO: 975613 - RNA, 19 nt, Homo sapiens
  misc_RNA (1)...(19): siRNA sense strand
ggagcugauugaguucuuu

SEQ ID NO: 975614 - RNA, 19 nt, Homo sapiens
  misc_RNA (1)...(19): siRNA sense strand
agagggagccuaugccaaa

SEQ ID NO: 975615 - RNA, 19 nt, Homo sapiens
  misc_RNA (1)...(19): siRNA sense strand
aaacugaacaacuccugua

SEQ ID NO: 975616 - RNA, 19 nt, Homo sapiens
  misc_RNA (1)...(19): siRNA sense strand
gaagaugacacaagguuuu

SEQ ID NO: 975617 - RNA, 19 nt, Homo sapiens
  misc_RNA (1)...(19): siRNA sense strand
gaaacaagcagggcacagu

SEQ ID NO: 975618 - RNA, 19 nt, Homo sapiens
  misc_RNA (1)...(19): siRNA sense strand
gaaggcaaguaugaguuuc

SEQ ID NO: 975619 - RNA, 19 nt, Homo sapiens
  misc_RNA (1)...(19): siRNA sense strand
ucacggaccaggccacauu

SEQ ID NO: 975620 - RNA, 19 nt, Homo sapiens
  misc_RNA (1)...(19): siRNA sense strand
gacaaggacugggcacaca

SEQ ID NO: 975621 - RNA, 19 nt, Homo sapiens
  misc_RNA (1)...(19): siRNA sense strand
gacaggaggaggaagaaga

SEQ ID NO: 975622 - RNA, 19 nt, Homo sapiens
  misc_RNA (1)...(19): siRNA sense strand
cagggaaacaagaacauuu

SEQ ID NO: 975623 - RNA, 19 nt, Homo sapiens
  misc_RNA (1)...(19): siRNA sense strand
gccgugagccuacagaaug

SEQ ID NO: 975624 - RNA, 19 nt, Homo sapiens
  misc_RNA (1)...(19): siRNA sense strand
gaaaaucugugacuuugac

SEQ ID NO: 975625 - RNA, 19 nt, Homo sapiens
  misc_RNA (1)...(19): siRNA sense strand
cuauagagaugggcaguag

SEQ ID NO: 975626 - RNA, 19 nt, Homo sapiens
  misc_RNA (1)...(19): siRNA sense strand
caucuccagugaagccaaa

SEQ ID NO: 975627 - RNA, 19 nt, Homo sapiens
  misc_RNA (1)...(19): siRNA sense strand
ccauguggcucugcagaau

SEQ ID NO: 975628 - RNA, 19 nt, Homo sapiens
  misc_RNA (1)...(19): siRNA sense strand
ggaccaggccacauucuac

SEQ ID NO: 975629 - RNA, 19 nt, Homo sapiens
  misc_RNA (1)...(19): siRNA sense strand
uuacuuggucuuugagaaa

SEQ ID NO: 975630 - RNA, 19 nt, Homo sapiens
  misc_RNA (1)...(19): siRNA sense strand
aguaugaguuuccugacaa

SEQ ID NO: 975631 - RNA, 19 nt, Homo sapiens
  misc_RNA (1)...(19): siRNA sense strand
gagccuaugccaaaguuca

SEQ ID NO: 975632 - RNA, 19 nt, Homo sapiens
  misc_RNA (1)...(19): siRNA sense strand
gaaacaagaacauuuugga

SEQ ID NO: 975633 - RNA, 19 nt, Homo sapiens
  misc_RNA (1)...(19): siRNA sense strand
gugaaaaucugugacuuug

SEQ ID NO: 975634 - RNA, 19 nt, Homo sapiens
  misc_RNA (1)...(19): siRNA sense strand
aggaaaguuugaagauaug

SEQ ID NO: 975635 - RNA, 19 nt, Homo sapiens
  misc_RNA (1)...(19): siRNA sense strand
gcccacauccagaagcaaa

SEQ ID NO: 975636 - RNA, 19 nt, Homo sapiens
  misc_RNA (1)...(19): siRNA sense strand
ugaagaugacacaagguuu

SEQ ID NO: 975637 - RNA, 19 nt, Homo sapiens
  misc_RNA (1)...(19): siRNA sense strand
uacagaauggcaaagagua

SEQ ID NO: 975638 - RNA, 19 nt, Homo sapiens
  misc_RNA (1)...(19): siRNA sense strand
ggugacaggaggaggaaga

SEQ ID NO: 975639 - RNA, 19 nt, Homo sapiens
  misc_RNA (1)...(19): siRNA sense strand
gcugauugaguucuuugaa

SEQ ID NO: 975640 - RNA, 19 nt, Homo sapiens
  misc_RNA (1)...(19): siRNA sense strand
uugaagauauguacaagcu

SEQ ID NO: 975641 - RNA, 19 nt, Homo sapiens
  misc_RNA (1)...(19): siRNA sense strand
gggaugaaacugaacaacu

SEQ ID NO: 975642 - RNA, 19 nt, Homo sapiens
  misc_RNA (1)...(19): siRNA sense strand
gagcugauugaguucuuug

SEQ ID NO: 975643 - RNA, 19 nt, Homo sapiens
  misc_RNA (1)...(19): siRNA sense strand
gagagguggagacgcugua

SEQ ID NO: 975644 - RNA, 19 nt, Homo sapiens
  misc_RNA (1)...(19): siRNA sense strand
cauguggcucugcagaaua

SEQ ID NO: 975645 - RNA, 19 nt, Homo sapiens
  misc_RNA (1)...(19): siRNA sense strand
guaugaguuuccugacaag

SEQ ID NO: 975646 - RNA, 19 nt, Homo sapiens
  misc_RNA (1)...(19): siRNA sense strand
gguaucuucucaaaaguug

SEQ ID NO: 975647 - RNA, 19 nt, Homo sapiens
  misc_RNA (1)...(19): siRNA sense strand
ggaacagcagcacaaugga

SEQ ID NO: 975648 - RNA, 19 nt, Homo sapiens
  misc_RNA (1)...(19): siRNA sense strand
gagccuacagaauggcaaa

SEQ ID NO: 975649 - RNA, 19 nt, Homo sapiens
  misc_RNA (1)...(19): siRNA sense strand
gccaggaaaguuugaagau

SEQ ID NO: 975650 - RNA, 19 nt, Homo sapiens
  misc_RNA (1)...(19): siRNA sense strand
gagggagccuaugccaaag

SEQ ID NO: 975651 - RNA, 19 nt, Homo sapiens
  misc_RNA (1)...(19): siRNA sense strand
aaucugugacuuugacuug

SEQ ID NO: 975652 - RNA, 19 nt, Homo sapiens
  misc_RNA (1)...(19): siRNA sense strand
aggcauugcucaucgugau

SEQ ID NO: 975653 - RNA, 19 nt, Homo sapiens
  misc_RNA (1)...(19): siRNA sense strand
acaggaggaggaagaagaa

SEQ ID NO: 975654 - RNA, 19 nt, Homo sapiens
  misc_RNA (1)...(19): siRNA sense strand
aagcugaccucugaauugc

SEQ ID NO: 975655 - RNA, 19 nt, Homo sapiens
  misc_RNA (1)...(19): siRNA sense strand
cugauugaguucuuugaag

SEQ ID NO: 975656 - RNA, 19 nt, Homo sapiens
  misc_RNA (1)...(19): siRNA sense strand
ucaaaaucaucgagaaaca

SEQ ID NO: 975657 - RNA, 19 nt, Homo sapiens
  misc_RNA (1)...(19): siRNA sense strand
aaguaugaguuuccugaca

SEQ ID NO: 975658 - RNA, 19 nt, Homo sapiens
  misc_RNA (1)...(19): siRNA sense strand
guggagacgcuguaucagu

SEQ ID NO: 975659 - RNA, 19 nt, Homo sapiens
  misc_RNA (1)...(19): siRNA sense strand
cauccaggaaggcaaguau

SEQ ID NO: 975660 - RNA, 19 nt, Homo sapiens
  misc_RNA (1)...(19): siRNA sense strand
ggcgugguccucuacauca

SEQ ID NO: 975661 - RNA, 19 nt, Homo sapiens
  misc_RNA (1)...(19): siRNA sense strand
acaagcugaccucugaauu

SEQ ID NO: 975662 - RNA, 19 nt, Homo sapiens
  misc_RNA (1)...(19): siRNA sense strand
acagaauggcaaagaguau

SEQ ID NO: 975663 - RNA, 19 nt, Homo sapiens
  misc_RNA (1)...(19): siRNA sense strand
cuacagaauggcaaagagu

SEQ ID NO: 975664 - RNA, 19 nt, Homo sapiens
  misc_RNA (1)...(19): siRNA sense strand
ucagggaaacaagaacauu

SEQ ID NO: 975665 - RNA, 19 nt, Homo sapiens
  misc_RNA (1)...(19): siRNA sense strand
gaaauuacaucgagccuuu

SEQ ID NO: 975666 - RNA, 19 nt, Homo sapiens
  misc_RNA (1)...(19): siRNA sense strand
ggaaguauguggcaugauu

SEQ ID NO: 975667 - RNA, 19 nt, Homo sapiens
  misc_RNA (1)...(19): siRNA sense strand
gaugggaacuguauucuug

SEQ ID NO: 975668 - RNA, 19 nt, Homo sapiens
  misc_RNA (1)...(19): siRNA sense strand
uaacugacuugaauucuga

SEQ ID NO: 975669 - RNA, 19 nt, Homo sapiens
  misc_RNA (1)...(19): siRNA sense strand
aaagauauauggcagugua

SEQ ID NO: 975670 - RNA, 19 nt, Homo sapiens
  misc_RNA (1)...(19): siRNA sense strand
cgaaggcucuguagucuga

SEQ ID NO: 975671 - RNA, 19 nt, Homo sapiens
  misc_RNA (1)...(19): siRNA sense strand
ggaagacuauacugaguug

SEQ ID NO: 975672 - RNA, 19 nt, Homo sapiens
  misc_RNA (1)...(19): siRNA sense strand
gcugaaggaugaaggcuuu

SEQ ID NO: 975673 - RNA, 19 nt, Homo sapiens
  misc_RNA (1)...(19): siRNA sense strand
gaagauuggacccagaaua

SEQ ID NO: 975674 - RNA, 19 nt, Homo sapiens
  misc_RNA (1)...(19): siRNA sense strand
ccagauauauucuuagaca

SEQ ID NO: 975675 - RNA, 19 nt, Homo sapiens
  misc_RNA (1)...(19): siRNA sense strand
ggaaucacauugcuaacau

SEQ ID NO: 975676 - RNA, 19 nt, Homo sapiens
  misc_RNA (1)...(19): siRNA sense strand
gcaauaagcaccgacuuga

SEQ ID NO: 975677 - RNA, 19 nt, Homo sapiens
  misc_RNA (1)...(19): siRNA sense strand
gauggaaucacauugcuaa

SEQ ID NO: 975678 - RNA, 19 nt, Homo sapiens
  misc_RNA (1)...(19): siRNA sense strand
gaaucacauugcuaacauu

SEQ ID NO: 975679 - RNA, 19 nt, Homo sapiens
  misc_RNA (1)...(19): siRNA sense strand
caucgagccuuugccauuu

SEQ ID NO: 975680 - RNA, 19 nt, Homo sapiens
  misc_RNA (1)...(19): siRNA sense strand
uagaagagaugggcuacaa

SEQ ID NO: 975681 - RNA, 19 nt, Homo sapiens
  misc_RNA (1)...(19): siRNA sense strand
gaagagaugggcuacaaca

SEQ ID NO: 975682 - RNA, 19 nt, Homo sapiens
  misc_RNA (1)...(19): siRNA sense strand
gcaugauucugugcuauau

SEQ ID NO: 975683 - RNA, 19 nt, Homo sapiens
  misc_RNA (1)...(19): siRNA sense strand
aagcacaggucaauacuuc

SEQ ID NO: 975684 - RNA, 19 nt, Homo sapiens
  misc_RNA (1)...(19): siRNA sense strand
gcaccgacuugauggaauc

SEQ ID NO: 975685 - RNA, 19 nt, Homo sapiens
  misc_RNA (1)...(19): siRNA sense strand
uggaguggcuuugguauga

SEQ ID NO: 975686 - RNA, 19 nt, Homo sapiens
  misc_RNA (1)...(19): siRNA sense strand
ggagauuacauguuuagug

SEQ ID NO: 975687 - RNA, 19 nt, Homo sapiens
  misc_RNA (1)...(19): siRNA sense strand
acucccagauauauucuua

SEQ ID NO: 975688 - RNA, 19 nt, Homo sapiens
  misc_RNA (1)...(19): siRNA sense strand
acccauaacugacuugaau

SEQ ID NO: 975689 - RNA, 19 nt, Homo sapiens
  misc_RNA (1)...(19): siRNA sense strand
ugacuggcguucacacaug

SEQ ID NO: 975690 - RNA, 19 nt, Homo sapiens
  misc_RNA (1)...(19): siRNA sense strand
acacagucguccuaacuau

SEQ ID NO: 975691 - RNA, 19 nt, Homo sapiens
  misc_RNA (1)...(19): siRNA sense strand
agacagcguuccuagaauc

SEQ ID NO: 975692 - RNA, 19 nt, Homo sapiens
  misc_RNA (1)...(19): siRNA sense strand
uuagacagcguuccuagaa

SEQ ID NO: 975693 - RNA, 19 nt, Homo sapiens
  misc_RNA (1)...(19): siRNA sense strand
uccuaacuaugcugaauuu

SEQ ID NO: 975694 - RNA, 19 nt, Homo sapiens
  misc_RNA (1)...(19): siRNA sense strand
ucccagauauauucuuaga

SEQ ID NO: 975695 - RNA, 19 nt, Homo sapiens
  misc_RNA (1)...(19): siRNA sense strand
gcacaggucaauacuucug

SEQ ID NO: 975696 - RNA, 19 nt, Homo sapiens
  misc_RNA (1)...(19): siRNA sense strand
ggcaugauucugugcuaua

SEQ ID NO: 975697 - RNA, 19 nt, Homo sapiens
  misc_RNA (1)...(19): siRNA sense strand
ucacauugcuaacauugac

SEQ ID NO: 975698 - RNA, 19 nt, Homo sapiens
  misc_RNA (1)...(19): siRNA sense strand
cagaauacuggaagacuau

SEQ ID NO: 975699 - RNA, 19 nt, Homo sapiens
  misc_RNA (1)...(19): siRNA sense strand
aauaagcaccgacuugaug

SEQ ID NO: 975700 - RNA, 19 nt, Homo sapiens
  misc_RNA (1)...(19): siRNA sense strand
uugcuaacauugacugaau

SEQ ID NO: 975701 - RNA, 19 nt, Homo sapiens
  misc_RNA (1)...(19): siRNA sense strand
guacuggaaagauauaugg

SEQ ID NO: 975702 - RNA, 19 nt, Homo sapiens
  misc_RNA (1)...(19): siRNA sense strand
gcuccugguucuucuucuu

SEQ ID NO: 975703 - RNA, 19 nt, Homo sapiens
  misc_RNA (1)...(19): siRNA sense strand
gaaguauguggcaugauuc

SEQ ID NO: 975704 - RNA, 19 nt, Homo sapiens
  misc_RNA (1)...(19): siRNA sense strand
ugacugugacggacccaua

SEQ ID NO: 975705 - RNA, 19 nt, Homo sapiens
  misc_RNA (1)...(19): siRNA sense strand
guauguggcaugauucugu

SEQ ID NO: 975706 - RNA, 19 nt, Homo sapiens
  misc_RNA (1)...(19): siRNA sense strand
ucacaagcacaggucaaua

SEQ ID NO: 975707 - RNA, 19 nt, Homo sapiens
  misc_RNA (1)...(19): siRNA sense strand
cuguguggcugaaggauga

SEQ ID NO: 975708 - RNA, 19 nt, Homo sapiens
  misc_RNA (1)...(19): siRNA sense strand
gcuaacauugacugaauau

SEQ ID NO: 975709 - RNA, 19 nt, Homo sapiens
  misc_RNA (1)...(19): siRNA sense strand
caguguaugggagaaauua

SEQ ID NO: 975710 - RNA, 19 nt, Homo sapiens
  misc_RNA (1)...(19): siRNA sense strand
ccaccacucccagauauau

SEQ ID NO: 975711 - RNA, 19 nt, Homo sapiens
  misc_RNA (1)...(19): siRNA sense strand
aagacuauacugaguugua

SEQ ID NO: 975712 - RNA, 19 nt, Homo sapiens
  misc_RNA (1)...(19): siRNA sense strand
ugccugacaugcagaccua

SEQ ID NO: 975713 - RNA, 19 nt, Homo sapiens
  misc_RNA (1)...(19): siRNA sense strand
ugacuugaauucugaucag

SEQ ID NO: 975714 - RNA, 19 nt, Homo sapiens
  misc_RNA (1)...(19): siRNA sense strand
ccauaacugacuugaauuc

SEQ ID NO: 975715 - RNA, 19 nt, Homo sapiens
  misc_RNA (1)...(19): siRNA sense strand
uguggagauuacauguuua

SEQ ID NO: 975716 - RNA, 19 nt, Homo sapiens
  misc_RNA (1)...(19): siRNA sense strand
gcaguguaugggagaaauu

SEQ ID NO: 975717 - RNA, 19 nt, Homo sapiens
  misc_RNA (1)...(19): siRNA sense strand
ccuaaucaacucugcauuc

SEQ ID NO: 975718 - RNA, 19 nt, Homo sapiens
  misc_RNA (1)...(19): siRNA sense strand
gugacggacccauaacuga

SEQ ID NO: 975719 - RNA, 19 nt, Homo sapiens
  misc_RNA (1)...(19): siRNA sense strand
guggacauuuuaugcaaua

SEQ ID NO: 975720 - RNA, 19 nt, Homo sapiens
  misc_RNA (1)...(19): siRNA sense strand
ccacacagucguccuaacu

SEQ ID NO: 975721 - RNA, 19 nt, Homo sapiens
  misc_RNA (1)...(19): siRNA sense strand
gauauauggcaguguaugg

SEQ ID NO: 975722 - RNA, 19 nt, Homo sapiens
  misc_RNA (1)...(19): siRNA sense strand
ucuggaaaucaaagucuua

SEQ ID NO: 975723 - RNA, 19 nt, Homo sapiens
  misc_RNA (1)...(19): siRNA sense strand
ggucuccuccucuggaaau

SEQ ID NO: 975724 - RNA, 19 nt, Homo sapiens
  misc_RNA (1)...(19): siRNA sense strand
ucgcugcuuuaccauguuu

SEQ ID NO: 975725 - RNA, 19 nt, Homo sapiens
  misc_RNA (1)...(19): siRNA sense strand
uagacagcguuccuagaau

SEQ ID NO: 975726 - RNA, 19 nt, Homo sapiens
  misc_RNA (1)...(19): siRNA sense strand
ugcuaacauugacugaaua

SEQ ID NO: 975727 - RNA, 19 nt, Homo sapiens
  misc_RNA (1)...(19): siRNA sense strand
gauuggacccagaauacug

SEQ ID NO: 975728 - RNA, 19 nt, Homo sapiens
  misc_RNA (1)...(19): siRNA sense strand
auaacugacuugaauucug

SEQ ID NO: 975729 - RNA, 19 nt, Homo sapiens
  misc_RNA (1)...(19): siRNA sense strand
gacugugacggacccauaa

SEQ ID NO: 975730 - RNA, 19 nt, Homo sapiens
  misc_RNA (1)...(19): siRNA sense strand
aaagguuaaugcucucagu

SEQ ID NO: 975731 - RNA, 19 nt, Homo sapiens
  misc_RNA (1)...(19): siRNA sense strand
gugcuucuaugcguauuag

SEQ ID NO: 975732 - RNA, 19 nt, Homo sapiens
  misc_RNA (1)...(19): siRNA sense strand
gacuggcguucacacaugu

SEQ ID NO: 975733 - RNA, 19 nt, Homo sapiens
  misc_RNA (1)...(19): siRNA sense strand
caauaagcaccgacuugau

SEQ ID NO: 975734 - RNA, 19 nt, Homo sapiens
  misc_RNA (1)...(19): siRNA sense strand
ggagcuuucccaugacugu

SEQ ID NO: 975735 - RNA, 19 nt, Homo sapiens
  misc_RNA (1)...(19): siRNA sense strand
cuaaucaacucugcauucg

SEQ ID NO: 975736 - RNA, 19 nt, Homo sapiens
  misc_RNA (1)...(19): siRNA sense strand
acaucgagccuuugccauu

SEQ ID NO: 975737 - RNA, 19 nt, Homo sapiens
  misc_RNA (1)...(19): siRNA sense strand
guccgaaaauugcagaaaa

SEQ ID NO: 975738 - RNA, 19 nt, Homo sapiens
  misc_RNA (1)...(19): siRNA sense strand
cuucuaugcguauuaggua

SEQ ID NO: 975739 - RNA, 19 nt, Homo sapiens
  misc_RNA (1)...(19): siRNA sense strand
ggcaguguaugggagaaau

SEQ ID NO: 975740 - RNA, 19 nt, Homo sapiens
  misc_RNA (1)...(19): siRNA sense strand
uugcuucgcugcuuuacca

SEQ ID NO: 975741 - RNA, 19 nt, Homo sapiens
  misc_RNA (1)...(19): siRNA sense strand
guggcaugauucugugcua

SEQ ID NO: 975742 - RNA, 19 nt, Homo sapiens
  misc_RNA (1)...(19): siRNA sense strand
auucugaucaguaccagua

SEQ ID NO: 975743 - RNA, 19 nt, Homo sapiens
  misc_RNA (1)...(19): siRNA sense strand
cguccuaacuaugcugaau

SEQ ID NO: 975744 - RNA, 19 nt, Homo sapiens
  misc_RNA (1)...(19): siRNA sense strand
agagaugggcuacaacagu

SEQ ID NO: 975745 - RNA, 19 nt, Homo sapiens
  misc_RNA (1)...(19): siRNA sense strand
augcugaauuucuuuguca

SEQ ID NO: 975746 - RNA, 19 nt, Homo sapiens
  misc_RNA (1)...(19): siRNA sense strand
cacaagcacaggucaauac

SEQ ID NO: 975747 - RNA, 19 nt, Homo sapiens
  misc_RNA (1)...(19): siRNA sense strand
uagaaucccaugggccuuu

SEQ ID NO: 975748 - RNA, 19 nt, Homo sapiens
  misc_RNA (1)...(19): siRNA sense strand
cuugaauucugaucaguac

SEQ ID NO: 975749 - RNA, 19 nt, Homo sapiens
  misc_RNA (1)...(19): siRNA sense strand
cuaacuaugcugaauuucu

SEQ ID NO: 975750 - RNA, 19 nt, Homo sapiens
  misc_RNA (1)...(19): siRNA sense strand
cuucgcugcuuuaccaugu

SEQ ID NO: 975751 - RNA, 19 nt, Homo sapiens
  misc_RNA (1)...(19): siRNA sense strand
guagucugaugggaacugu

SEQ ID NO: 975752 - RNA, 19 nt, Homo sapiens
  misc_RNA (1)...(19): siRNA sense strand
aagauuggacccagaauac

SEQ ID NO: 975753 - RNA, 19 nt, Homo sapiens
  misc_RNA (1)...(19): siRNA sense strand
cuggaagacuauacugagu

SEQ ID NO: 975754 - RNA, 19 nt, Homo sapiens
  misc_RNA (1)...(19): siRNA sense strand
caagcacaggucaauacuu

SEQ ID NO: 975755 - RNA, 19 nt, Homo sapiens
  misc_RNA (1)...(19): siRNA sense strand
aaucacauugcuaacauug

SEQ ID NO: 975756 - RNA, 19 nt, Homo sapiens
  misc_RNA (1)...(19): siRNA sense strand
ggacccauaacugacuuga

SEQ ID NO: 975757 - RNA, 19 nt, Homo sapiens
  misc_RNA (1)...(19): siRNA sense strand
caccgaauguaaguaucuu

SEQ ID NO: 975758 - RNA, 19 nt, Homo sapiens
  misc_RNA (1)...(19): siRNA sense strand
gcuggacuaccaagcaugu

SEQ ID NO: 975759 - RNA, 19 nt, Homo sapiens
  misc_RNA (1)...(19): siRNA sense strand
cacacagucguccuaacua

SEQ ID NO: 975760 - RNA, 19 nt, Homo sapiens
  misc_RNA (1)...(19): siRNA sense strand
ugcauucgccgcuggacua

SEQ ID NO: 975761 - RNA, 19 nt, Homo sapiens
  misc_RNA (1)...(19): siRNA sense strand
gaauacuggaagacuauac

SEQ ID NO: 975762 - RNA, 19 nt, Homo sapiens
  misc_RNA (1)...(19): siRNA sense strand
ggacaagguucucgacaug

SEQ ID NO: 975763 - RNA, 19 nt, Homo sapiens
  misc_RNA (1)...(19): siRNA sense strand
ugaagaggcuggagaagga

SEQ ID NO: 975764 - RNA, 19 nt, Homo sapiens
  misc_RNA (1)...(19): siRNA sense strand
gaggaggccuucugugugu

SEQ ID NO: 975765 - RNA, 19 nt, Homo sapiens
  misc_RNA (1)...(19): siRNA sense strand
gaggagaacuacgucauca

SEQ ID NO: 975766 - RNA, 19 nt, Homo sapiens
  misc_RNA (1)...(19): siRNA sense strand
aggagaagcugcucaagga

SEQ ID NO: 975767 - RNA, 19 nt, Homo sapiens
  misc_RNA (1)...(19): siRNA sense strand
gcaucuaucaguucgagua

SEQ ID NO: 975768 - RNA, 19 nt, Homo sapiens
  misc_RNA (1)...(19): siRNA sense strand
ggacaugcccgucaagaac

SEQ ID NO: 975769 - RNA, 19 nt, Homo sapiens
  misc_RNA (1)...(19): siRNA sense strand
ggauugaaacccuagagaa

SEQ ID NO: 975770 - RNA, 19 nt, Homo sapiens
  misc_RNA (1)...(19): siRNA sense strand
guaccuggcugcacagaac

SEQ ID NO: 975771 - RNA, 19 nt, Homo sapiens
  misc_RNA (1)...(19): siRNA sense strand
ggaaggagaagcugcucaa

SEQ ID NO: 975772 - RNA, 19 nt, Homo sapiens
  misc_RNA (1)...(19): siRNA sense strand
gaaggcauacucgcuggua

SEQ ID NO: 975773 - RNA, 19 nt, Homo sapiens
  misc_RNA (1)...(19): siRNA sense strand
ucccaaagcuuccacacau

SEQ ID NO: 975774 - RNA, 19 nt, Homo sapiens
  misc_RNA (1)...(19): siRNA sense strand
ggagaacuacgucaucaag

SEQ ID NO: 975775 - RNA, 19 nt, Homo sapiens
  misc_RNA (1)...(19): siRNA sense strand
ugaugcagcuggacaugga

SEQ ID NO: 975776 - RNA, 19 nt, Homo sapiens
  misc_RNA (1)...(19): siRNA sense strand
ucaacgucaugaaggcaua

SEQ ID NO: 975777 - RNA, 19 nt, Homo sapiens
  misc_RNA (1)...(19): siRNA sense strand
ggagaugcaggacaagguu

SEQ ID NO: 975778 - RNA, 19 nt, Homo sapiens
  misc_RNA (1)...(19): siRNA sense strand
gaaccaggcggagcugaug

SEQ ID NO: 975779 - RNA, 19 nt, Homo sapiens
  misc_RNA (1)...(19): siRNA sense strand
ggaguacgcagccaugaag

SEQ ID NO: 975780 - RNA, 19 nt, Homo sapiens
  misc_RNA (1)...(19): siRNA sense strand
agaaccggcuccugaaaca

SEQ ID NO: 975781 - RNA, 19 nt, Homo sapiens
  misc_RNA (1)...(19): siRNA sense strand
gauugaaacccuagagaag

SEQ ID NO: 975782 - RNA, 19 nt, Homo sapiens
  misc_RNA (1)...(19): siRNA sense strand
ccuaccaggucaaguacaa

SEQ ID NO: 975783 - RNA, 19 nt, Homo sapiens
  misc_RNA (1)...(19): siRNA sense strand
ugaaacagcggauugaaac

SEQ ID NO: 975784 - RNA, 19 nt, Homo sapiens
  misc_RNA (1)...(19): siRNA sense strand
acaagguucucgacaugga

SEQ ID NO: 975785 - RNA, 19 nt, Homo sapiens
  misc_RNA (1)...(19): siRNA sense strand
ggaggagaacuacgucauc

SEQ ID NO: 975786 - RNA, 19 nt, Homo sapiens
  misc_RNA (1)...(19): siRNA sense strand
ccacuuccguucccaaagc

SEQ ID NO: 975787 - RNA, 19 nt, Homo sapiens
  misc_RNA (1)...(19): siRNA sense strand
agacgcagcucagcgaaag

SEQ ID NO: 975788 - RNA, 19 nt, Homo sapiens
  misc_RNA (1)...(19): siRNA sense strand
aagccuaccaggucaagua

SEQ ID NO: 975789 - RNA, 19 nt, Homo sapiens
  misc_RNA (1)...(19): siRNA sense strand
ccacauccaccgcaaccuu

SEQ ID NO: 975790 - RNA, 19 nt, Homo sapiens
  misc_RNA (1)...(19): siRNA sense strand
gagcaaggaggaggugaug

SEQ ID NO: 975791 - RNA, 19 nt, Homo sapiens
  misc_RNA (1)...(19): siRNA sense strand
ucgaggacccgcuggcuuu

SEQ ID NO: 975792 - RNA, 19 nt, Homo sapiens
  misc_RNA (1)...(19): siRNA sense strand
ggacucaucgcaguacauc

SEQ ID NO: 975793 - RNA, 19 nt, Homo sapiens
  misc_RNA (1)...(19): siRNA sense strand
uacaggagcagcaggagaa

SEQ ID NO: 975794 - RNA, 19 nt, Homo sapiens
  misc_RNA (1)...(19): siRNA sense strand
ucuaucaguucgaguacau

SEQ ID NO: 975795 - RNA, 19 nt, Homo sapiens
  misc_RNA (1)...(19): siRNA sense strand
aggagaagcugcaguaccu

SEQ ID NO: 975796 - RNA, 19 nt, Homo sapiens
  misc_RNA (1)...(19): siRNA sense strand
cugaaacagcggauugaaa

SEQ ID NO: 975797 - RNA, 19 nt, Homo sapiens
  misc_RNA (1)...(19): siRNA sense strand
gagaaccggcuccugaaac

SEQ ID NO: 975798 - RNA, 19 nt, Homo sapiens
  misc_RNA (1)...(19): siRNA sense strand
ggagauggaggagcagauc

SEQ ID NO: 975799 - RNA, 19 nt, Homo sapiens
  misc_RNA (1)...(19): siRNA sense strand
gcucugcaucuaucaguuc

SEQ ID NO: 975800 - RNA, 19 nt, Homo sapiens
  misc_RNA (1)...(19): siRNA sense strand
caaccucugacuccgagaa

SEQ ID NO: 975801 - RNA, 19 nt, Homo sapiens
  misc_RNA (1)...(19): siRNA sense strand
acgcagccaugaagagcaa

SEQ ID NO: 975802 - RNA, 19 nt, Homo sapiens
  misc_RNA (1)...(19): siRNA sense strand
ggucuuugacaucuucaug

SEQ ID NO: 975803 - RNA, 19 nt, Homo sapiens
  misc_RNA (1)...(19): siRNA sense strand
gcucgggcucugcaucuau

SEQ ID NO: 975804 - RNA, 19 nt, Homo sapiens
  misc_RNA (1)...(19): siRNA sense strand
cacauccaccgcaaccuuu

SEQ ID NO: 975805 - RNA, 19 nt, Homo sapiens
  misc_RNA (1)...(19): siRNA sense strand
ccacccgggucuuugacau

SEQ ID NO: 975806 - RNA, 19 nt, Homo sapiens
  misc_RNA (1)...(19): siRNA sense strand
ccaugaagagcaaggagau

SEQ ID NO: 975807 - RNA, 19 nt, Homo sapiens
  misc_RNA (1)...(19): siRNA sense strand
uggaggagcagaucgagau

SEQ ID NO: 975808 - RNA, 19 nt, Homo sapiens
  misc_RNA (1)...(19): siRNA sense strand
caagaaagcugaaacagau

SEQ ID NO: 975809 - RNA, 19 nt, Homo sapiens
  misc_RNA (1)...(19): siRNA sense strand
ggagaaagaaggauguuua

SEQ ID NO: 975810 - RNA, 19 nt, Homo sapiens
  misc_RNA (1)...(19): siRNA sense strand
aaauguagcuucccgguua

SEQ ID NO: 975811 - RNA, 19 nt, Homo sapiens
  misc_RNA (1)...(19): siRNA sense strand
cagaagaugucacccuuua

SEQ ID NO: 975812 - RNA, 19 nt, Homo sapiens
  misc_RNA (1)...(19): siRNA sense strand
gaaagaaggauguuuaugu

SEQ ID NO: 975813 - RNA, 19 nt, Homo sapiens
  misc_RNA (1)...(19): siRNA sense strand
gaaagcuacuggaaagaaa

SEQ ID NO: 975814 - RNA, 19 nt, Homo sapiens
  misc_RNA (1)...(19): siRNA sense strand
gagaggagaucaugaaaca

SEQ ID NO: 975815 - RNA, 19 nt, Homo sapiens
  misc_RNA (1)...(19): siRNA sense strand
gaacuuugauagagccuuu

SEQ ID NO: 975816 - RNA, 19 nt, Homo sapiens
  misc_RNA (1)...(19): siRNA sense strand
gaaagcaguuaaagcaguu

SEQ ID NO: 975817 - RNA, 19 nt, Homo sapiens
  misc_RNA (1)...(19): siRNA sense strand
gaagaugucacccuuuaaa

SEQ ID NO: 975818 - RNA, 19 nt, Homo sapiens
  misc_RNA (1)...(19): siRNA sense strand
ccagugggcugcauuagaa

SEQ ID NO: 975819 - RNA, 19 nt, Homo sapiens
  misc_RNA (1)...(19): siRNA sense strand
cuaaggaccucauaguuga

SEQ ID NO: 975820 - RNA, 19 nt, Homo sapiens
  misc_RNA (1)...(19): siRNA sense strand
cagaagacguuugaaauug

SEQ ID NO: 975821 - RNA, 19 nt, Homo sapiens
  misc_RNA (1)...(19): siRNA sense strand
gaagacguuugaaauugaa

SEQ ID NO: 975822 - RNA, 19 nt, Homo sapiens
  misc_RNA (1)...(19): siRNA sense strand
gaggagaucaugaaacaaa

SEQ ID NO: 975823 - RNA, 19 nt, Homo sapiens
  misc_RNA (1)...(19): siRNA sense strand
gagaaggaauguggaguga

SEQ ID NO: 975824 - RNA, 19 nt, Homo sapiens
  misc_RNA (1)...(19): siRNA sense strand
gaugguggccaacguauuu

SEQ ID NO: 975825 - RNA, 19 nt, Homo sapiens
  misc_RNA (1)...(19): siRNA sense strand
gauagucguugguucauca

SEQ ID NO: 975826 - RNA, 19 nt, Homo sapiens
  misc_RNA (1)...(19): siRNA sense strand
gaaggaauguggagugacu

SEQ ID NO: 975827 - RNA, 19 nt, Homo sapiens
  misc_RNA (1)...(19): siRNA sense strand
agaagacguuugaaauuga

SEQ ID NO: 975828 - RNA, 19 nt, Homo sapiens
  misc_RNA (1)...(19): siRNA sense strand
gaaggaucauuccguguca

SEQ ID NO: 975829 - RNA, 19 nt, Homo sapiens
  misc_RNA (1)...(19): siRNA sense strand
gcucacagaucaccaaugc

SEQ ID NO: 975830 - RNA, 19 nt, Homo sapiens
  misc_RNA (1)...(19): siRNA sense strand
ggaaauugcagccacaugu

SEQ ID NO: 975831 - RNA, 19 nt, Homo sapiens
  misc_RNA (1)...(19): siRNA sense strand
aaagaaagcaguuaaagca

SEQ ID NO: 975832 - RNA, 19 nt, Homo sapiens
  misc_RNA (1)...(19): siRNA sense strand
gaaauugcagccacauguu

SEQ ID NO: 975833 - RNA, 19 nt, Homo sapiens
  misc_RNA (1)...(19): siRNA sense strand
uaaguaccuuggccaugua

SEQ ID NO: 975834 - RNA, 19 nt, Homo sapiens
  misc_RNA (1)...(19): siRNA sense strand
caacgguucugcagcuuuc

SEQ ID NO: 975835 - RNA, 19 nt, Homo sapiens
  misc_RNA (1)...(19): siRNA sense strand
gaaagagaggagaucauga

SEQ ID NO: 975836 - RNA, 19 nt, Homo sapiens
  misc_RNA (1)...(19): siRNA sense strand
gagaaagaaggauguuuau

SEQ ID NO: 975837 - RNA, 19 nt, Homo sapiens
  misc_RNA (1)...(19): siRNA sense strand
gacaggaacuuugauagag

SEQ ID NO: 975838 - RNA, 19 nt, Homo sapiens
  misc_RNA (1)...(19): siRNA sense strand
ccaccagucccuucuuuaa

SEQ ID NO: 975839 - RNA, 19 nt, Homo sapiens
  misc_RNA (1)...(19): siRNA sense strand
ccaagaaagcugaaacaga

SEQ ID NO: 975840 - RNA, 19 nt, Homo sapiens
  misc_RNA (1)...(19): siRNA sense strand
caagaggaaugcacaucug

SEQ ID NO: 975841 - RNA, 19 nt, Homo sapiens
  misc_RNA (1)...(19): siRNA sense strand
ggaaagaaagcaguuaaag

SEQ ID NO: 975842 - RNA, 19 nt, Homo sapiens
  misc_RNA (1)...(19): siRNA sense strand
gaaagaaagcaguuaaagc

SEQ ID NO: 975843 - RNA, 19 nt, Homo sapiens
  misc_RNA (1)...(19): siRNA sense strand
aaagagaggagaucaugaa

SEQ ID NO: 975844 - RNA, 19 nt, Homo sapiens
  misc_RNA (1)...(19): siRNA sense strand
acagaagacguuugaaauu

SEQ ID NO: 975845 - RNA, 19 nt, Homo sapiens
  misc_RNA (1)...(19): siRNA sense strand
gaacaaauuacggcaaagu

SEQ ID NO: 975846 - RNA, 19 nt, Homo sapiens
  misc_RNA (1)...(19): siRNA sense strand
ccagacaggaacuuugaua

SEQ ID NO: 975847 - RNA, 19 nt, Homo sapiens
  misc_RNA (1)...(19): siRNA sense strand
aaugcaagaugccaagaaa

SEQ ID NO: 975848 - RNA, 19 nt, Homo sapiens
  misc_RNA (1)...(19): siRNA sense strand
gaauguggagugacugcua

SEQ ID NO: 975849 - RNA, 19 nt, Homo sapiens
  misc_RNA (1)...(19): siRNA sense strand
uaagauagucguugguuca

SEQ ID NO: 975850 - RNA, 19 nt, Homo sapiens
  misc_RNA (1)...(19): siRNA sense strand
ucuccuaccuuccaagcua

SEQ ID NO: 975851 - RNA, 19 nt, Homo sapiens
  misc_RNA (1)...(19): siRNA sense strand
uuaaguaccuuggccaugu

SEQ ID NO: 975852 - RNA, 19 nt, Homo sapiens
  misc_RNA (1)...(19): siRNA sense strand
ugaguugccuuccacuaug

SEQ ID NO: 975853 - RNA, 19 nt, Homo sapiens
  misc_RNA (1)...(19): siRNA sense strand
acaaauuacggcaaaguuu

SEQ ID NO: 975854 - RNA, 19 nt, Homo sapiens
  misc_RNA (1)...(19): siRNA sense strand
gaucaugaaacaaaugcaa

SEQ ID NO: 975855 - RNA, 19 nt, Homo sapiens
  misc_RNA (1)...(19): siRNA sense strand
uuacagaagacguuugaaa

SEQ ID NO: 975856 - RNA, 19 nt, Homo sapiens
  misc_RNA (1)...(19): siRNA sense strand
gauaagauagucguugguu

SEQ ID NO: 975857 - RNA, 19 nt, Homo sapiens
  misc_RNA (1)...(19): siRNA sense strand
ugaaacagauaagauaguc

SEQ ID NO: 975858 - RNA, 19 nt, Homo sapiens
  misc_RNA (1)...(19): siRNA sense strand
caacuaucccuacgcauca

SEQ ID NO: 975859 - RNA, 19 nt, Homo sapiens
  misc_RNA (1)...(19): siRNA sense strand
gaaggauguuuauguucca

SEQ ID NO: 975860 - RNA, 19 nt, Homo sapiens
  misc_RNA (1)...(19): siRNA sense strand
gcaguaggcugugcuuuug

SEQ ID NO: 975861 - RNA, 19 nt, Homo sapiens
  misc_RNA (1)...(19): siRNA sense strand
cagcagacauucccucacu

SEQ ID NO: 975862 - RNA, 19 nt, Homo sapiens
  misc_RNA (1)...(19): siRNA sense strand
gauugaaagcuacuggaaa

SEQ ID NO: 975863 - RNA, 19 nt, Homo sapiens
  misc_RNA (1)...(19): siRNA sense strand
agacaggcauacagagguu

SEQ ID NO: 975864 - RNA, 19 nt, Homo sapiens
  misc_RNA (1)...(19): siRNA sense strand
ugacucagccuuccaugug

SEQ ID NO: 975865 - RNA, 19 nt, Homo sapiens
  misc_RNA (1)...(19): siRNA sense strand
uaccaccagucccuucuuu

SEQ ID NO: 975866 - RNA, 19 nt, Homo sapiens
  misc_RNA (1)...(19): siRNA sense strand
gauagagccuuuucuuaca

SEQ ID NO: 975867 - RNA, 19 nt, Homo sapiens
  misc_RNA (1)...(19): siRNA sense strand
gcaaugccugugcgugaaa

SEQ ID NO: 975868 - RNA, 19 nt, Homo sapiens
  misc_RNA (1)...(19): siRNA sense strand
gaagacugauuuccccauu

SEQ ID NO: 975869 - RNA, 19 nt, Homo sapiens
  misc_RNA (1)...(19): siRNA sense strand
guagcuucccgguuaagua

SEQ ID NO: 975870 - RNA, 19 nt, Homo sapiens
  misc_RNA (1)...(19): siRNA sense strand
agacaggaacuuugauaga

SEQ ID NO: 975871 - RNA, 19 nt, Homo sapiens
  misc_RNA (1)...(19): siRNA sense strand
gcagaaagagaggagauca

SEQ ID NO: 975872 - RNA, 19 nt, Homo sapiens
  misc_RNA (1)...(19): siRNA sense strand
ugaaagcuacuggaaagaa

SEQ ID NO: 975873 - RNA, 19 nt, Homo sapiens
  misc_RNA (1)...(19): siRNA sense strand
ggagaucaugaaacaaaug

SEQ ID NO: 975874 - RNA, 19 nt, Homo sapiens
  misc_RNA (1)...(19): siRNA sense strand
guuuagagcgcaagcagaa

SEQ ID NO: 975875 - RNA, 19 nt, Homo sapiens
  misc_RNA (1)...(19): siRNA sense strand
uccagugacuuacagaaga

SEQ ID NO: 975876 - RNA, 19 nt, Homo sapiens
  misc_RNA (1)...(19): siRNA sense strand
agaaagcugaaacagauaa

SEQ ID NO: 975877 - RNA, 19 nt, Homo sapiens
  misc_RNA (1)...(19): siRNA sense strand
cacaacagccacugaacaa

SEQ ID NO: 975878 - RNA, 19 nt, Homo sapiens
  misc_RNA (1)...(19): siRNA sense strand
ccauguagaaguugaugaa

SEQ ID NO: 975879 - RNA, 19 nt, Homo sapiens
  misc_RNA (1)...(19): siRNA sense strand
cagcagacaggcauacaga

SEQ ID NO: 975880 - RNA, 19 nt, Homo sapiens
  misc_RNA (1)...(19): siRNA sense strand
guaccuuggccauguagaa

SEQ ID NO: 975881 - RNA, 19 nt, Homo sapiens
  misc_RNA (1)...(19): siRNA sense strand
uacaagagaaggaucauuc

SEQ ID NO: 975882 - RNA, 19 nt, Homo sapiens
  misc_RNA (1)...(19): siRNA sense strand
uacagaagacguuugaaau

SEQ ID NO: 975883 - RNA, 19 nt, Homo sapiens
  misc_RNA (1)...(19): siRNA sense strand
ccagaugguggccaacgua

SEQ ID NO: 975884 - RNA, 19 nt, Homo sapiens
  misc_RNA (1)...(19): siRNA sense strand
ccaauggaaugcccuaucc

SEQ ID NO: 975885 - RNA, 19 nt, Homo sapiens
  misc_RNA (1)...(19): siRNA sense strand
gcaagcagaagcgggagaa

SEQ ID NO: 975886 - RNA, 19 nt, Homo sapiens
  misc_RNA (1)...(19): siRNA sense strand
ugaggccgaccgaugguua

SEQ ID NO: 975887 - RNA, 19 nt, Homo sapiens
  misc_RNA (1)...(19): siRNA sense strand
agacugauuuccccauuaa

SEQ ID NO: 975888 - RNA, 19 nt, Homo sapiens
  misc_RNA (1)...(19): siRNA sense strand
gcagaggaagacugauuuc

SEQ ID NO: 975889 - RNA, 19 nt, Homo sapiens
  misc_RNA (1)...(19): siRNA sense strand
guggagugacugcuacuuu

SEQ ID NO: 975890 - RNA, 19 nt, Homo sapiens
  misc_RNA (1)...(19): siRNA sense strand
gcaguuaaagcaguucugu

SEQ ID NO: 975891 - RNA, 19 nt, Homo sapiens
  misc_RNA (1)...(19): siRNA sense strand
ccaacccuuucuccaguga

SEQ ID NO: 975892 - RNA, 19 nt, Homo sapiens
  misc_RNA (1)...(19): siRNA sense strand
gcaccacaaucuccuaccu

SEQ ID NO: 975893 - RNA, 19 nt, Homo sapiens
  misc_RNA (1)...(19): siRNA sense strand
agaaagagaggagaucaug

SEQ ID NO: 975894 - RNA, 19 nt, Homo sapiens
  misc_RNA (1)...(19): siRNA sense strand
caaauuacggcaaaguuuu

SEQ ID NO: 975895 - RNA, 19 nt, Homo sapiens
  misc_RNA (1)...(19): siRNA sense strand
gucguugguucaucaguug

SEQ ID NO: 975896 - RNA, 19 nt, Homo sapiens
  misc_RNA (1)...(19): siRNA sense strand
cggcaaaguuuuaggagaa

SEQ ID NO: 975897 - RNA, 19 nt, Homo sapiens
  misc_RNA (1)...(19): siRNA sense strand
gggcugcauuagaaaauaa

SEQ ID NO: 975898 - RNA, 19 nt, Homo sapiens
  misc_RNA (1)...(19): siRNA sense strand
gcagacauucccucacuac

SEQ ID NO: 975899 - RNA, 19 nt, Homo sapiens
  misc_RNA (1)...(19): siRNA sense strand
ucacaacagccacugaaca

SEQ ID NO: 975900 - RNA, 19 nt, Homo sapiens
  misc_RNA (1)...(19): siRNA sense strand
auugaaagcuacuggaaag

SEQ ID NO: 975901 - RNA, 19 nt, Homo sapiens
  misc_RNA (1)...(19): siRNA sense strand
gaucugucacugcuucaug

SEQ ID NO: 975902 - RNA, 19 nt, Homo sapiens
  misc_RNA (1)...(19): siRNA sense strand
ccacugaacaagcagaaag

SEQ ID NO: 975903 - RNA, 19 nt, Homo sapiens
  misc_RNA (1)...(19): siRNA sense strand
gcugaaacagauaagauag

SEQ ID NO: 975904 - RNA, 19 nt, Homo sapiens
  misc_RNA (1)...(19): siRNA sense strand
cagacgauagagaaaguuu

SEQ ID NO: 975905 - RNA, 19 nt, Homo sapiens
  misc_RNA (1)...(19): siRNA sense strand
gcauacagagguuccuaca

SEQ ID NO: 975906 - RNA, 19 nt, Homo sapiens
  misc_RNA (1)...(19): siRNA sense strand
ccagaagaugucacccuuu

SEQ ID NO: 975907 - RNA, 19 nt, Homo sapiens
  misc_RNA (1)...(19): siRNA sense strand
ccaagcagcguacuaaucc

SEQ ID NO: 975908 - RNA, 19 nt, Homo sapiens
  misc_RNA (1)...(19): siRNA sense strand
ggauagagauuccaaauau

SEQ ID NO: 975909 - RNA, 19 nt, Homo sapiens
  misc_RNA (1)...(19): siRNA sense strand
caaagaaacugaauuggaa

SEQ ID NO: 975910 - RNA, 19 nt, Homo sapiens
  misc_RNA (1)...(19): siRNA sense strand
gggauuaaauuccuuguuu

SEQ ID NO: 975911 - RNA, 19 nt, Homo sapiens
  misc_RNA (1)...(19): siRNA sense strand
gcacaaacaucagaggaaa

SEQ ID NO: 975912 - RNA, 19 nt, Homo sapiens
  misc_RNA (1)...(19): siRNA sense strand
gaagagaacuguggugaca

SEQ ID NO: 975913 - RNA, 19 nt, Homo sapiens
  misc_RNA (1)...(19): siRNA sense strand
ggacggcauuucuucauuu

SEQ ID NO: 975914 - RNA, 19 nt, Homo sapiens
  misc_RNA (1)...(19): siRNA sense strand
ggacuccucuucccugaaa

SEQ ID NO: 975915 - RNA, 19 nt, Homo sapiens
  misc_RNA (1)...(19): siRNA sense strand
ggaaauaccagacacaaug

SEQ ID NO: 975916 - RNA, 19 nt, Homo sapiens
  misc_RNA (1)...(19): siRNA sense strand
gcagaugugugcccaaaug

SEQ ID NO: 975917 - RNA, 19 nt, Homo sapiens
  misc_RNA (1)...(19): siRNA sense strand
ccucagaccuggaauauuc

SEQ ID NO: 975918 - RNA, 19 nt, Homo sapiens
  misc_RNA (1)...(19): siRNA sense strand
cgaagucucuguucugcua

SEQ ID NO: 975919 - RNA, 19 nt, Homo sapiens
  misc_RNA (1)...(19): siRNA sense strand
gcaaagaaacugaauugga

SEQ ID NO: 975920 - RNA, 19 nt, Homo sapiens
  misc_RNA (1)...(19): siRNA sense strand
uaacuuggcuaauucuaga

SEQ ID NO: 975921 - RNA, 19 nt, Homo sapiens
  misc_RNA (1)...(19): siRNA sense strand
cacaaugacuuccuggaua

SEQ ID NO: 975922 - RNA, 19 nt, Homo sapiens
  misc_RNA (1)...(19): siRNA sense strand
acacaggagugcuuucuaa

SEQ ID NO: 975923 - RNA, 19 nt, Homo sapiens
  misc_RNA (1)...(19): siRNA sense strand
ggaguauguuucccacuuu

SEQ ID NO: 975924 - RNA, 19 nt, Homo sapiens
  misc_RNA (1)...(19): siRNA sense strand
ccacagaaguaaggaauug

SEQ ID NO: 975925 - RNA, 19 nt, Homo sapiens
  misc_RNA (1)...(19): siRNA sense strand
gaguauguuucccacuuua

SEQ ID NO: 975926 - RNA, 19 nt, Homo sapiens
  misc_RNA (1)...(19): siRNA sense strand
ggaaggcaauagaauaaag

SEQ ID NO: 975927 - RNA, 19 nt, Homo sapiens
  misc_RNA (1)...(19): siRNA sense strand
gaauuggaauguguaaaug

SEQ ID NO: 975928 - RNA, 19 nt, Homo sapiens
  misc_RNA (1)...(19): siRNA sense strand
gaaauaccagacacaauga

SEQ ID NO: 975929 - RNA, 19 nt, Homo sapiens
  misc_RNA (1)...(19): siRNA sense strand
caacucaacuggguggauu

SEQ ID NO: 975930 - RNA, 19 nt, Homo sapiens
  misc_RNA (1)...(19): siRNA sense strand
caaaggguauucucuugga

SEQ ID NO: 975931 - RNA, 19 nt, Homo sapiens
  misc_RNA (1)...(19): siRNA sense strand
gaacuguggugacacuagu

SEQ ID NO: 975932 - RNA, 19 nt, Homo sapiens
  misc_RNA (1)...(19): siRNA sense strand
aaacugaauuggaaugugu

SEQ ID NO: 975933 - RNA, 19 nt, Homo sapiens
  misc_RNA (1)...(19): siRNA sense strand
ccaaaugccucaacucaac

SEQ ID NO: 975934 - RNA, 19 nt, Homo sapiens
  misc_RNA (1)...(19): siRNA sense strand
ccaauccucuuauguaucu

SEQ ID NO: 975935 - RNA, 19 nt, Homo sapiens
  misc_RNA (1)...(19): siRNA sense strand
ucagcuaacuuggcuaauu

SEQ ID NO: 975936 - RNA, 19 nt, Homo sapiens
  misc_RNA (1)...(19): siRNA sense strand
cagcuaacuuggcuaauuc

SEQ ID NO: 975937 - RNA, 19 nt, Homo sapiens
  misc_RNA (1)...(19): siRNA sense strand
gugggaaucuuaccaagug

SEQ ID NO: 975938 - RNA, 19 nt, Homo sapiens
  misc_RNA (1)...(19): siRNA sense strand
ucucacaaauucuacguuu

SEQ ID NO: 975939 - RNA, 19 nt, Homo sapiens
  misc_RNA (1)...(19): siRNA sense strand
gaaacugaauuggaaugug

SEQ ID NO: 975940 - RNA, 19 nt, Homo sapiens
  misc_RNA (1)...(19): siRNA sense strand
ccugauggguguuuacuug

SEQ ID NO: 975941 - RNA, 19 nt, Homo sapiens
  misc_RNA (1)...(19): siRNA sense strand
uuaaacaacuucagucucu

SEQ ID NO: 975942 - RNA, 19 nt, Homo sapiens
  misc_RNA (1)...(19): siRNA sense strand
cauccaauccucuuaugua

SEQ ID NO: 975943 - RNA, 19 nt, Homo sapiens
  misc_RNA (1)...(19): siRNA sense strand
gaccuggaauauucaaaga

SEQ ID NO: 975944 - RNA, 19 nt, Homo sapiens
  misc_RNA (1)...(19): siRNA sense strand
gaugauuucuaacaaugug

SEQ ID NO: 975945 - RNA, 19 nt, Homo sapiens
  misc_RNA (1)...(19): siRNA sense strand
cuacugaccuacuugacuu

SEQ ID NO: 975946 - RNA, 19 nt, Homo sapiens
  misc_RNA (1)...(19): siRNA sense strand
gaaaggauagagauuccaa

SEQ ID NO: 975947 - RNA, 19 nt, Homo sapiens
  misc_RNA (1)...(19): siRNA sense strand
gaaccaguuugaaagucuu

SEQ ID NO: 975948 - RNA, 19 nt, Homo sapiens
  misc_RNA (1)...(19): siRNA sense strand
ccacagucuuccagauaaa

SEQ ID NO: 975949 - RNA, 19 nt, Homo sapiens
  misc_RNA (1)...(19): siRNA sense strand
acaauguucuuucuacuuc

SEQ ID NO: 975950 - RNA, 19 nt, Homo sapiens
  misc_RNA (1)...(19): siRNA sense strand
agagguggcuguugcaaau

SEQ ID NO: 975951 - RNA, 19 nt, Homo sapiens
  misc_RNA (1)...(19): siRNA sense strand
aaauacaacucacgcuaug

SEQ ID NO: 975952 - RNA, 19 nt, Homo sapiens
  misc_RNA (1)...(19): siRNA sense strand
cuaacaauauccucagaau

SEQ ID NO: 975953 - RNA, 19 nt, Homo sapiens
  misc_RNA (1)...(19): siRNA sense strand
cagaagauauuggaagcaa

SEQ ID NO: 975954 - RNA, 19 nt, Homo sapiens
  misc_RNA (1)...(19): siRNA sense strand
gguguuuacuuguucuuug

SEQ ID NO: 975955 - RNA, 19 nt, Homo sapiens
  misc_RNA (1)...(19): siRNA sense strand
uaaagucugugccgaugau

SEQ ID NO: 975956 - RNA, 19 nt, Homo sapiens
  misc_RNA (1)...(19): siRNA sense strand
ccaauccucuauacucuca

SEQ ID NO: 975957 - RNA, 19 nt, Homo sapiens
  misc_RNA (1)...(19): siRNA sense strand
gaagauauuggaagcaaag

SEQ ID NO: 975958 - RNA, 19 nt, Homo sapiens
  misc_RNA (1)...(19): siRNA sense strand
cacaagaaccaguuugaaa

SEQ ID NO: 975959 - RNA, 19 nt, Homo sapiens
  misc_RNA (1)...(19): siRNA sense strand
gaauauguaugcccuugac

SEQ ID NO: 975960 - RNA, 19 nt, Homo sapiens
  misc_RNA (1)...(19): siRNA sense strand
gaauauuugucuggguuau

SEQ ID NO: 975961 - RNA, 19 nt, Homo sapiens
  misc_RNA (1)...(19): siRNA sense strand
acaaugcugugacugcaaa

SEQ ID NO: 975962 - RNA, 19 nt, Homo sapiens
  misc_RNA (1)...(19): siRNA sense strand
cuggaucugucuagcaaua

SEQ ID NO: 975963 - RNA, 19 nt, Homo sapiens
  misc_RNA (1)...(19): siRNA sense strand
cuagaugacaauccaauaa

SEQ ID NO: 975964 - RNA, 19 nt, Homo sapiens
  misc_RNA (1)...(19): siRNA sense strand
ccaaauauaaacacacgaa

SEQ ID NO: 975965 - RNA, 19 nt, Homo sapiens
  misc_RNA (1)...(19): siRNA sense strand
ugaccaaacagaagauauu

SEQ ID NO: 975966 - RNA, 19 nt, Homo sapiens
  misc_RNA (1)...(19): siRNA sense strand
gguuauagcuuucauuacc

SEQ ID NO: 975967 - RNA, 19 nt, Homo sapiens
  misc_RNA (1)...(19): siRNA sense strand
ccgaugauuucuaacaaug

SEQ ID NO: 975968 - RNA, 19 nt, Homo sapiens
  misc_RNA (1)...(19): siRNA sense strand
gcuaacagcguggccuuaa

SEQ ID NO: 975969 - RNA, 19 nt, Homo sapiens
  misc_RNA (1)...(19): siRNA sense strand
acaaugacuuccuggauag

SEQ ID NO: 975970 - RNA, 19 nt, Homo sapiens
  misc_RNA (1)...(19): siRNA sense strand
gauggguguuuacuuguuc

SEQ ID NO: 975971 - RNA, 19 nt, Homo sapiens
  misc_RNA (1)...(19): siRNA sense strand
gcgcuuguuuacgggauua

SEQ ID NO: 975972 - RNA, 19 nt, Homo sapiens
  misc_RNA (1)...(19): siRNA sense strand
agacacauauccaggaaag

SEQ ID NO: 975973 - RNA, 19 nt, Homo sapiens
  misc_RNA (1)...(19): siRNA sense strand
gaacuggaucugucuagca

SEQ ID NO: 975974 - RNA, 19 nt, Homo sapiens
  misc_RNA (1)...(19): siRNA sense strand
uaacagugcuuugaaucca

SEQ ID NO: 975975 - RNA, 19 nt, Homo sapiens
  misc_RNA (1)...(19): siRNA sense strand
ccucuuggcuaacaauauc

SEQ ID NO: 975976 - RNA, 19 nt, Homo sapiens
  misc_RNA (1)...(19): siRNA sense strand
gacggcauuucuucauuug

SEQ ID NO: 975977 - RNA, 19 nt, Homo sapiens
  misc_RNA (1)...(19): siRNA sense strand
ucaacuggguggauuugga

SEQ ID NO: 975978 - RNA, 19 nt, Homo sapiens
  misc_RNA (1)...(19): siRNA sense strand
ucuauacucucacaaccaa

SEQ ID NO: 975979 - RNA, 19 nt, Homo sapiens
  misc_RNA (1)...(19): siRNA sense strand
cuggauuccuguauuugua

SEQ ID NO: 975980 - RNA, 19 nt, Homo sapiens
  misc_RNA (1)...(19): siRNA sense strand
gagaaguuccuggucauug

SEQ ID NO: 975981 - RNA, 19 nt, Homo sapiens
  misc_RNA (1)...(19): siRNA sense strand
gagggcaguaucagaagua

SEQ ID NO: 975982 - RNA, 19 nt, Homo sapiens
  misc_RNA (1)...(19): siRNA sense strand
uguaaauggugacuuaaag

SEQ ID NO: 975983 - RNA, 19 nt, Homo sapiens
  misc_RNA (1)...(19): siRNA sense strand
acacuuggagacaguauaa

SEQ ID NO: 975984 - RNA, 19 nt, Homo sapiens
  misc_RNA (1)...(19): siRNA sense strand
ugaauccaauccucuauac

SEQ ID NO: 975985 - RNA, 19 nt, Homo sapiens
  misc_RNA (1)...(19): siRNA sense strand
guaaggaauuguuuuggaa

SEQ ID NO: 975986 - RNA, 19 nt, Homo sapiens
  misc_RNA (1)...(19): siRNA sense strand
agaaguuccuggucauugu

SEQ ID NO: 975987 - RNA, 19 nt, Homo sapiens
  misc_RNA (1)...(19): siRNA sense strand
acauuacugucucuuaaga

SEQ ID NO: 975988 - RNA, 19 nt, Homo sapiens
  misc_RNA (1)...(19): siRNA sense strand
uaaacaacuucagucucua

SEQ ID NO: 975989 - RNA, 19 nt, Homo sapiens
  misc_RNA (1)...(19): siRNA sense strand
cugcuggauuccuguauuu

SEQ ID NO: 975990 - RNA, 19 nt, Homo sapiens
  misc_RNA (1)...(19): siRNA sense strand
ccucagucauccucauuug

SEQ ID NO: 975991 - RNA, 19 nt, Homo sapiens
  misc_RNA (1)...(19): siRNA sense strand
auguguaaauggugacuua

SEQ ID NO: 975992 - RNA, 19 nt, Homo sapiens
  misc_RNA (1)...(19): siRNA sense strand
uggguuauagcuuucauua

SEQ ID NO: 975993 - RNA, 19 nt, Homo sapiens
  misc_RNA (1)...(19): siRNA sense strand
caagaaccaguuugaaagu

SEQ ID NO: 975994 - RNA, 19 nt, Homo sapiens
  misc_RNA (1)...(19): siRNA sense strand
gaaggcaauagaauaaagu

SEQ ID NO: 975995 - RNA, 19 nt, Homo sapiens
  misc_RNA (1)...(19): siRNA sense strand
aaccacaacugcaucacaa

SEQ ID NO: 975996 - RNA, 19 nt, Homo sapiens
  misc_RNA (1)...(19): siRNA sense strand
uccacagucuuccagauaa

SEQ ID NO: 975997 - RNA, 19 nt, Homo sapiens
  misc_RNA (1)...(19): siRNA sense strand
gacaauccaauaaccagaa

SEQ ID NO: 975998 - RNA, 19 nt, Homo sapiens
  misc_RNA (1)...(19): siRNA sense strand
guuucccacuuuauuauga

SEQ ID NO: 975999 - RNA, 19 nt, Homo sapiens
  misc_RNA (1)...(19): siRNA sense strand
uucauuaccugcuuuggaa

SEQ ID NO: 976000 - RNA, 19 nt, Homo sapiens
  misc_RNA (1)...(19): siRNA sense strand
caacuggguggauuuggaa

SEQ ID NO: 976001 - RNA, 19 nt, Homo sapiens
  misc_RNA (1)...(19): siRNA sense strand
gcccaaaugccucaacuca

SEQ ID NO: 976002 - RNA, 19 nt, Homo sapiens
  misc_RNA (1)...(19): siRNA sense strand
aagcagaugugugcccaaa

SEQ ID NO: 976003 - RNA, 19 nt, Homo sapiens
  misc_RNA (1)...(19): siRNA sense strand
cagaaguaaggaauuguuu

SEQ ID NO: 976004 - RNA, 19 nt, Homo sapiens
  misc_RNA (1)...(19): siRNA sense strand
uggagacaguauaaugaaa

SEQ ID NO: 976005 - RNA, 19 nt, Homo sapiens
  misc_RNA (1)...(19): siRNA sense strand
ccaguuaacagugcuuuga

SEQ ID NO: 976006 - RNA, 19 nt, Homo sapiens
  misc_RNA (1)...(19): siRNA sense strand
gagagguggcuguugcaaa

SEQ ID NO: 976007 - RNA, 19 nt, Homo sapiens
  misc_RNA (1)...(19): siRNA sense strand
gaaguaaggaauuguuuug

SEQ ID NO: 976008 - RNA, 19 nt, Homo sapiens
  misc_RNA (1)...(19): siRNA sense strand
uaacugggauugugaauuu

SEQ ID NO: 976009 - RNA, 19 nt, Homo sapiens
  misc_RNA (1)...(19): siRNA sense strand
gcaaguagcuggagagauc

SEQ ID NO: 976010 - RNA, 19 nt, Homo sapiens
  misc_RNA (1)...(19): siRNA sense strand
ggacaaauuuaccagaaga

SEQ ID NO: 976011 - RNA, 19 nt, Homo sapiens
  misc_RNA (1)...(19): siRNA sense strand
cauaguggcuuuccaguug

SEQ ID NO: 976012 - RNA, 19 nt, Homo sapiens
  misc_RNA (1)...(19): siRNA sense strand
gaagauucgucugcaagua

SEQ ID NO: 976013 - RNA, 19 nt, Homo sapiens
  misc_RNA (1)...(19): siRNA sense strand
ggucugauaccacaacuua

SEQ ID NO: 976014 - RNA, 19 nt, Homo sapiens
  misc_RNA (1)...(19): siRNA sense strand
gaucuccuaucaagaguuu

SEQ ID NO: 976015 - RNA, 19 nt, Homo sapiens
  misc_RNA (1)...(19): siRNA sense strand
gaauuuauccgacugcauu

SEQ ID NO: 976016 - RNA, 19 nt, Homo sapiens
  misc_RNA (1)...(19): siRNA sense strand
ucacaucgguggauacaga

SEQ ID NO: 976017 - RNA, 19 nt, Homo sapiens
  misc_RNA (1)...(19): siRNA sense strand
acauggagcuuguucguaa

SEQ ID NO: 976018 - RNA, 19 nt, Homo sapiens
  misc_RNA (1)...(19): siRNA sense strand
gaaagauguugaagucaca

SEQ ID NO: 976019 - RNA, 19 nt, Homo sapiens
  misc_RNA (1)...(19): siRNA sense strand
gccauuaaacugacuguua

SEQ ID NO: 976020 - RNA, 19 nt, Homo sapiens
  misc_RNA (1)...(19): siRNA sense strand
gacugcagcucgaguguuu

SEQ ID NO: 976021 - RNA, 19 nt, Homo sapiens
  misc_RNA (1)...(19): siRNA sense strand
caucuuaacuacacagaau

SEQ ID NO: 976022 - RNA, 19 nt, Homo sapiens
  misc_RNA (1)...(19): siRNA sense strand
ggagcuuguucguaagaua

SEQ ID NO: 976023 - RNA, 19 nt, Homo sapiens
  misc_RNA (1)...(19): siRNA sense strand
gccuuuaucucccgaaauu

SEQ ID NO: 976024 - RNA, 19 nt, Homo sapiens
  misc_RNA (1)...(19): siRNA sense strand
ucacaccacuagaaauuga

SEQ ID NO: 976025 - RNA, 19 nt, Homo sapiens
  misc_RNA (1)...(19): siRNA sense strand
gacagacuauuauucauca

SEQ ID NO: 976026 - RNA, 19 nt, Homo sapiens
  misc_RNA (1)...(19): siRNA sense strand
gaaaacaaauuuggccuuu

SEQ ID NO: 976027 - RNA, 19 nt, Homo sapiens
  misc_RNA (1)...(19): siRNA sense strand
uauaucagcuugcagacuu

SEQ ID NO: 976028 - RNA, 19 nt, Homo sapiens
  misc_RNA (1)...(19): siRNA sense strand
gcaauuggaacaugcaaga

SEQ ID NO: 976029 - RNA, 19 nt, Homo sapiens
  misc_RNA (1)...(19): siRNA sense strand
gacauucccuucucugcaa

SEQ ID NO: 976030 - RNA, 19 nt, Homo sapiens
  misc_RNA (1)...(19): siRNA sense strand
ggacaagucacaccacuag

SEQ ID NO: 976031 - RNA, 19 nt, Homo sapiens
  misc_RNA (1)...(19): siRNA sense strand
cauuagaucucacaugcuu

SEQ ID NO: 976032 - RNA, 19 nt, Homo sapiens
  misc_RNA (1)...(19): siRNA sense strand
ggauuucagugacaucaug

SEQ ID NO: 976033 - RNA, 19 nt, Homo sapiens
  misc_RNA (1)...(19): siRNA sense strand
acacagaauucacgcaguu

SEQ ID NO: 976034 - RNA, 19 nt, Homo sapiens
  misc_RNA (1)...(19): siRNA sense strand
ugaauaacauggagcuugu

SEQ ID NO: 976035 - RNA, 19 nt, Homo sapiens
  misc_RNA (1)...(19): siRNA sense strand
ugacaagaguggaaaugga

SEQ ID NO: 976036 - RNA, 19 nt, Homo sapiens
  misc_RNA (1)...(19): siRNA sense strand
ggaagauucuccgggaaga

SEQ ID NO: 976037 - RNA, 19 nt, Homo sapiens
  misc_RNA (1)...(19): siRNA sense strand
gaaaaggccauuaaacuga

SEQ ID NO: 976038 - RNA, 19 nt, Homo sapiens
  misc_RNA (1)...(19): siRNA sense strand
gcacaaggaaagauguuga

SEQ ID NO: 976039 - RNA, 19 nt, Homo sapiens
  misc_RNA (1)...(19): siRNA sense strand
ggagaggugacauuugaaa

SEQ ID NO: 976040 - RNA, 19 nt, Homo sapiens
  misc_RNA (1)...(19): siRNA sense strand
gugaagacccgaaugcaaa

SEQ ID NO: 976041 - RNA, 19 nt, Homo sapiens
  misc_RNA (1)...(19): siRNA sense strand
uggcagaacuucagagaca

SEQ ID NO: 976042 - RNA, 19 nt, Homo sapiens
  misc_RNA (1)...(19): siRNA sense strand
aaauuuaagucuccuagug

SEQ ID NO: 976043 - RNA, 19 nt, Homo sapiens
  misc_RNA (1)...(19): siRNA sense strand
gauggagagcguuauauga

SEQ ID NO: 976044 - RNA, 19 nt, Homo sapiens
  misc_RNA (1)...(19): siRNA sense strand
acagcagucuccuggguua

SEQ ID NO: 976045 - RNA, 19 nt, Homo sapiens
  misc_RNA (1)...(19): siRNA sense strand
uggcagauauugagagaau

SEQ ID NO: 976046 - RNA, 19 nt, Homo sapiens
  misc_RNA (1)...(19): siRNA sense strand
ggaggaauuugcccagagu

SEQ ID NO: 976047 - RNA, 19 nt, Homo sapiens
  misc_RNA (1)...(19): siRNA sense strand
aaggaaagauguugaaguc

SEQ ID NO: 976048 - RNA, 19 nt, Homo sapiens
  misc_RNA (1)...(19): siRNA sense strand
ggacagacuauuauucauc

SEQ ID NO: 976049 - RNA, 19 nt, Homo sapiens
  misc_RNA (1)...(19): siRNA sense strand
ccucaugaguuaagaaaca

SEQ ID NO: 976050 - RNA, 19 nt, Homo sapiens
  misc_RNA (1)...(19): siRNA sense strand
acaccuaagucacgcauug

SEQ ID NO: 976051 - RNA, 19 nt, Homo sapiens
  misc_RNA (1)...(19): siRNA sense strand
ccaaauaguaacccaaaga

SEQ ID NO: 976052 - RNA, 19 nt, Homo sapiens
  misc_RNA (1)...(19): siRNA sense strand
ucugauaccacaacuuaua

SEQ ID NO: 976053 - RNA, 19 nt, Homo sapiens
  misc_RNA (1)...(19): siRNA sense strand
ucaaugcauuuaacucguu

SEQ ID NO: 976054 - RNA, 19 nt, Homo sapiens
  misc_RNA (1)...(19): siRNA sense strand
gagcugcaauuggaacaug

SEQ ID NO: 976055 - RNA, 19 nt, Homo sapiens
  misc_RNA (1)...(19): siRNA sense strand
gaagggcccucagcauuuu

SEQ ID NO: 976056 - RNA, 19 nt, Homo sapiens
  misc_RNA (1)...(19): siRNA sense strand
caagucacaccacuagaaa

SEQ ID NO: 976057 - RNA, 19 nt, Homo sapiens
  misc_RNA (1)...(19): siRNA sense strand
agacaagccuuugcacuca

SEQ ID NO: 976058 - RNA, 19 nt, Homo sapiens
  misc_RNA (1)...(19): siRNA sense strand
ucaaggugcagacaacuaa

SEQ ID NO: 976059 - RNA, 19 nt, Homo sapiens
  misc_RNA (1)...(19): siRNA sense strand
gaagaagggcccucagcau

SEQ ID NO: 976060 - RNA, 19 nt, Homo sapiens
  misc_RNA (1)...(19): siRNA sense strand
ucagggcgcuugacuuugg

SEQ ID NO: 976061 - RNA, 19 nt, Homo sapiens
  misc_RNA (1)...(19): siRNA sense strand
uuaccuuggucacuuauga

SEQ ID NO: 976062 - RNA, 19 nt, Homo sapiens
  misc_RNA (1)...(19): siRNA sense strand
gguguuaccuuggucacuu

SEQ ID NO: 976063 - RNA, 19 nt, Homo sapiens
  misc_RNA (1)...(19): siRNA sense strand
agaagggcccucagcauuu

SEQ ID NO: 976064 - RNA, 19 nt, Homo sapiens
  misc_RNA (1)...(19): siRNA sense strand
uaucuuggacuguauaaug

SEQ ID NO: 976065 - RNA, 19 nt, Homo sapiens
  misc_RNA (1)...(19): siRNA sense strand
gcgcuggccagacgacaua

SEQ ID NO: 976066 - RNA, 19 nt, Homo sapiens
  misc_RNA (1)...(19): siRNA sense strand
cgugggagguuuaaaucuu

SEQ ID NO: 976067 - RNA, 19 nt, Homo sapiens
  misc_RNA (1)...(19): siRNA sense strand
auggagaggugacauuuga

SEQ ID NO: 976068 - RNA, 19 nt, Homo sapiens
  misc_RNA (1)...(19): siRNA sense strand
cagguuagcuucuccuacu

SEQ ID NO: 976069 - RNA, 19 nt, Homo sapiens
  misc_RNA (1)...(19): siRNA sense strand
guguuaccuuggucacuua

SEQ ID NO: 976070 - RNA, 19 nt, Homo sapiens
  misc_RNA (1)...(19): siRNA sense strand
cgggacaaauuuaccagaa

SEQ ID NO: 976071 - RNA, 19 nt, Homo sapiens
  misc_RNA (1)...(19): siRNA sense strand
cuauagaucuggugaagac

SEQ ID NO: 976072 - RNA, 19 nt, Homo sapiens
  misc_RNA (1)...(19): siRNA sense strand
gagcuuguucguaagauau

SEQ ID NO: 976073 - RNA, 19 nt, Homo sapiens
  misc_RNA (1)...(19): siRNA sense strand
caaauaguaacccaaagau

SEQ ID NO: 976074 - RNA, 19 nt, Homo sapiens
  misc_RNA (1)...(19): siRNA sense strand
cuuuaucucccgaaauuua

SEQ ID NO: 976075 - RNA, 19 nt, Homo sapiens
  misc_RNA (1)...(19): siRNA sense strand
gcagacuuauauaaugcuu

SEQ ID NO: 976076 - RNA, 19 nt, Homo sapiens
  misc_RNA (1)...(19): siRNA sense strand
cagauuccauguucauagu

SEQ ID NO: 976077 - RNA, 19 nt, Homo sapiens
  misc_RNA (1)...(19): siRNA sense strand
cauuggagauagugaagau

SEQ ID NO: 976078 - RNA, 19 nt, Homo sapiens
  misc_RNA (1)...(19): siRNA sense strand
aagaagggcccucagcauu

SEQ ID NO: 976079 - RNA, 19 nt, Homo sapiens
  misc_RNA (1)...(19): siRNA sense strand
caugauuucuggucuggau

SEQ ID NO: 976080 - RNA, 19 nt, Homo sapiens
  misc_RNA (1)...(19): siRNA sense strand
ggacacgugggagguuuaa

SEQ ID NO: 976081 - RNA, 19 nt, Homo sapiens
  misc_RNA (1)...(19): siRNA sense strand
ucccuucucugcaaucuau

SEQ ID NO: 976082 - RNA, 19 nt, Homo sapiens
  misc_RNA (1)...(19): siRNA sense strand
cuucagggcgcuugacuuu

SEQ ID NO: 976083 - RNA, 19 nt, Homo sapiens
  misc_RNA (1)...(19): siRNA sense strand
gacaagccuuugcacucaa

SEQ ID NO: 976084 - RNA, 19 nt, Homo sapiens
  misc_RNA (1)...(19): siRNA sense strand
gugggagguuuaaaucuuc

SEQ ID NO: 976085 - RNA, 19 nt, Homo sapiens
  misc_RNA (1)...(19): siRNA sense strand
gggacaaauuuaccagaag

SEQ ID NO: 976086 - RNA, 19 nt, Homo sapiens
  misc_RNA (1)...(19): siRNA sense strand
gcgcuugacuuuggcagau

SEQ ID NO: 976087 - RNA, 19 nt, Homo sapiens
  misc_RNA (1)...(19): siRNA sense strand
ucagugacaucaugguuac

SEQ ID NO: 976088 - RNA, 19 nt, Homo sapiens
  misc_RNA (1)...(19): siRNA sense strand
agaagcaucuuaacuacac

SEQ ID NO: 976089 - RNA, 19 nt, Homo sapiens
  misc_RNA (1)...(19): siRNA sense strand
agaaagucuugcguuauga

SEQ ID NO: 976090 - RNA, 19 nt, Homo sapiens
  misc_RNA (1)...(19): siRNA sense strand
ggugaagacccgaaugcaa

SEQ ID NO: 976091 - RNA, 19 nt, Homo sapiens
  misc_RNA (1)...(19): siRNA sense strand
acaagucacaccacuagaa

SEQ ID NO: 976092 - RNA, 19 nt, Homo sapiens
  misc_RNA (1)...(19): siRNA sense strand
cuacuucaaugcauuuaac

SEQ ID NO: 976093 - RNA, 19 nt, Homo sapiens
  misc_RNA (1)...(19): siRNA sense strand
ggucuggauuucagugaca

SEQ ID NO: 976094 - RNA, 19 nt, Homo sapiens
  misc_RNA (1)...(19): siRNA sense strand
cuugcagacuuauauaaug

SEQ ID NO: 976095 - RNA, 19 nt, Homo sapiens
  misc_RNA (1)...(19): siRNA sense strand
gcgcuaucuuggacuguau

SEQ ID NO: 976096 - RNA, 19 nt, Homo sapiens
  misc_RNA (1)...(19): siRNA sense strand
guggugucaucgacuguuu

SEQ ID NO: 976097 - RNA, 19 nt, Homo sapiens
  misc_RNA (1)...(19): siRNA sense strand
aaauuuaccagaagagaug

SEQ ID NO: 976098 - RNA, 19 nt, Homo sapiens
  misc_RNA (1)...(19): siRNA sense strand
caaggaaagauguugaagu

SEQ ID NO: 976099 - RNA, 19 nt, Homo sapiens
  misc_RNA (1)...(19): siRNA sense strand
gcucauugcaaacuacuuc

SEQ ID NO: 976100 - RNA, 19 nt, Homo sapiens
  misc_RNA (1)...(19): siRNA sense strand
agucacaccacuagaaauu

SEQ ID NO: 976101 - RNA, 19 nt, Homo sapiens
  misc_RNA (1)...(19): siRNA sense strand
aagcaaaaguggcaugauu

SEQ ID NO: 976102 - RNA, 19 nt, Homo sapiens
  misc_RNA (1)...(19): siRNA sense strand
guugauggagagcguuaua

SEQ ID NO: 976103 - RNA, 19 nt, Homo sapiens
  misc_RNA (1)...(19): siRNA sense strand
ugaaugugcuccgggacuu

SEQ ID NO: 976104 - RNA, 19 nt, Homo sapiens
  misc_RNA (1)...(19): siRNA sense strand
caaauuuaccagaagagau

SEQ ID NO: 976105 - RNA, 19 nt, Homo sapiens
  misc_RNA (1)...(19): siRNA sense strand
uagcuucuccuacuucaau

SEQ ID NO: 976106 - RNA, 19 nt, Homo sapiens
  misc_RNA (1)...(19): siRNA sense strand
gcaaucuauuuuccuguuu

SEQ ID NO: 976107 - RNA, 19 nt, Homo sapiens
  misc_RNA (1)...(19): siRNA sense strand
gaaauuuaagucuccuagu

SEQ ID NO: 976108 - RNA, 19 nt, Homo sapiens
  misc_RNA (1)...(19): siRNA sense strand
gccaaugaguuuaaagaua

SEQ ID NO: 976109 - RNA, 19 nt, Homo sapiens
  misc_RNA (1)...(19): siRNA sense strand
ccaaugaguuuaaagauag

SEQ ID NO: 976110 - RNA, 19 nt, Homo sapiens
  misc_RNA (1)...(19): siRNA sense strand
caaauacgcuggccacaag

SEQ ID NO: 976111 - RNA, 19 nt, Homo sapiens
  misc_RNA (1)...(19): siRNA sense strand
gaacauggagcuccgagaa

SEQ ID NO: 976112 - RNA, 19 nt, Homo sapiens
  misc_RNA (1)...(19): siRNA sense strand
ggagucauauagaugcuuu

SEQ ID NO: 976113 - RNA, 19 nt, Homo sapiens
  misc_RNA (1)...(19): siRNA sense strand
gggcugauguucauggaaa

SEQ ID NO: 976114 - RNA, 19 nt, Homo sapiens
  misc_RNA (1)...(19): siRNA sense strand
gaagagacaauacccaaau

SEQ ID NO: 976115 - RNA, 19 nt, Homo sapiens
  misc_RNA (1)...(19): siRNA sense strand
caauucagcuccuccaaag

SEQ ID NO: 976116 - RNA, 19 nt, Homo sapiens
  misc_RNA (1)...(19): siRNA sense strand
agaauuagcucguggaaaa

SEQ ID NO: 976117 - RNA, 19 nt, Homo sapiens
  misc_RNA (1)...(19): siRNA sense strand
aagagacaauacccaaaua

SEQ ID NO: 976118 - RNA, 19 nt, Homo sapiens
  misc_RNA (1)...(19): siRNA sense strand
caaagccaaugaguuuaaa

SEQ ID NO: 976119 - RNA, 19 nt, Homo sapiens
  misc_RNA (1)...(19): siRNA sense strand
ccaaagccaaugaguuuaa

SEQ ID NO: 976120 - RNA, 19 nt, Homo sapiens
  misc_RNA (1)...(19): siRNA sense strand
caggagacgucaagacaga

SEQ ID NO: 976121 - RNA, 19 nt, Homo sapiens
  misc_RNA (1)...(19): siRNA sense strand
ggaaagccaggaagaaauc

SEQ ID NO: 976122 - RNA, 19 nt, Homo sapiens
  misc_RNA (1)...(19): siRNA sense strand
gacagaagagcaacaccua

SEQ ID NO: 976123 - RNA, 19 nt, Homo sapiens
  misc_RNA (1)...(19): siRNA sense strand
gaucgucaucuaacaauuc

SEQ ID NO: 976124 - RNA, 19 nt, Homo sapiens
  misc_RNA (1)...(19): siRNA sense strand
cuccaaagccaaugaguuu

SEQ ID NO: 976125 - RNA, 19 nt, Homo sapiens
  misc_RNA (1)...(19): siRNA sense strand
gaaaacaccaccacaggaa

SEQ ID NO: 976126 - RNA, 19 nt, Homo sapiens
  misc_RNA (1)...(19): siRNA sense strand
ccaacucccugugcagaga

SEQ ID NO: 976127 - RNA, 19 nt, Homo sapiens
  misc_RNA (1)...(19): siRNA sense strand
guggaaagccaggaagaaa

SEQ ID NO: 976128 - RNA, 19 nt, Homo sapiens
  misc_RNA (1)...(19): siRNA sense strand
gaucaucagacuccaccaa

SEQ ID NO: 976129 - RNA, 19 nt, Homo sapiens
  misc_RNA (1)...(19): siRNA sense strand
ggagaugccaccauuacag

SEQ ID NO: 976130 - RNA, 19 nt, Homo sapiens
  misc_RNA (1)...(19): siRNA sense strand
ugagggagcagaacaugga

SEQ ID NO: 976131 - RNA, 19 nt, Homo sapiens
  misc_RNA (1)...(19): siRNA sense strand
ucaucagacuccaccaaga

SEQ ID NO: 976132 - RNA, 19 nt, Homo sapiens
  misc_RNA (1)...(19): siRNA sense strand
ucugucagcugaugaagag

SEQ ID NO: 976133 - RNA, 19 nt, Homo sapiens
  misc_RNA (1)...(19): siRNA sense strand
ccaaauacgcuggccacaa

SEQ ID NO: 976134 - RNA, 19 nt, Homo sapiens
  misc_RNA (1)...(19): siRNA sense strand
gagcuugggagacagaagu

SEQ ID NO: 976135 - RNA, 19 nt, Homo sapiens
  misc_RNA (1)...(19): siRNA sense strand
ugaagagacaauacccaaa

SEQ ID NO: 976136 - RNA, 19 nt, Homo sapiens
  misc_RNA (1)...(19): siRNA sense strand
acaauucagcuccuccaaa

SEQ ID NO: 976137 - RNA, 19 nt, Homo sapiens
  misc_RNA (1)...(19): siRNA sense strand
gguggaaagccaggaagaa

SEQ ID NO: 976138 - RNA, 19 nt, Homo sapiens
  misc_RNA (1)...(19): siRNA sense strand
ucugugggcugauguucau

SEQ ID NO: 976139 - RNA, 19 nt, Homo sapiens
  misc_RNA (1)...(19): siRNA sense strand
caucagacuccaccaagag

SEQ ID NO: 976140 - RNA, 19 nt, Homo sapiens
  misc_RNA (1)...(19): siRNA sense strand
cgucaagacagaagagcaa

SEQ ID NO: 976141 - RNA, 19 nt, Homo sapiens
  misc_RNA (1)...(19): siRNA sense strand
ucaccucugucagcugaug

SEQ ID NO: 976142 - RNA, 19 nt, Homo sapiens
  misc_RNA (1)...(19): siRNA sense strand
uggaaagccaggaagaaau

SEQ ID NO: 976143 - RNA, 19 nt, Homo sapiens
  misc_RNA (1)...(19): siRNA sense strand
ggagacgucaagacagaag

SEQ ID NO: 976144 - RNA, 19 nt, Homo sapiens
  misc_RNA (1)...(19): siRNA sense strand
aagccaaugaguuuaaaga

SEQ ID NO: 976145 - RNA, 19 nt, Homo sapiens
  misc_RNA (1)...(19): siRNA sense strand
gggagaugccaccauuaca

SEQ ID NO: 976146 - RNA, 19 nt, Homo sapiens
  misc_RNA (1)...(19): siRNA sense strand
cagaagagcaacaccuacu

SEQ ID NO: 976147 - RNA, 19 nt, Homo sapiens
  misc_RNA (1)...(19): siRNA sense strand
ggaaguaucuaucugauuc

SEQ ID NO: 976148 - RNA, 19 nt, Homo sapiens
  misc_RNA (1)...(19): siRNA sense strand
gagaaacccucacagauga

SEQ ID NO: 976149 - RNA, 19 nt, Homo sapiens
  misc_RNA (1)...(19): siRNA sense strand
ggacauagcugugauuucu

SEQ ID NO: 976150 - RNA, 19 nt, Homo sapiens
  misc_RNA (1)...(19): siRNA sense strand
ccaaguaugugucugauuu

SEQ ID NO: 976151 - RNA, 19 nt, Homo sapiens
  misc_RNA (1)...(19): siRNA sense strand
ccaagcagcuggccacuga

SEQ ID NO: 976152 - RNA, 19 nt, Homo sapiens
  misc_RNA (1)...(19): siRNA sense strand
gaacagaugauucuuguca

SEQ ID NO: 976153 - RNA, 19 nt, Homo sapiens
  misc_RNA (1)...(19): siRNA sense strand
gaagguguuuacugaaauu

SEQ ID NO: 976154 - RNA, 19 nt, Homo sapiens
  misc_RNA (1)...(19): siRNA sense strand
gaagaacucugccaagaac

SEQ ID NO: 976155 - RNA, 19 nt, Homo sapiens
  misc_RNA (1)...(19): siRNA sense strand
ggagaaacccucacagaug

SEQ ID NO: 976156 - RNA, 19 nt, Homo sapiens
  misc_RNA (1)...(19): siRNA sense strand
gaacaggacacaucucaau

SEQ ID NO: 976157 - RNA, 19 nt, Homo sapiens
  misc_RNA (1)...(19): siRNA sense strand
auaauuaccuccagaaaga

SEQ ID NO: 976158 - RNA, 19 nt, Homo sapiens
  misc_RNA (1)...(19): siRNA sense strand
caagagcugugucaaagug

SEQ ID NO: 976159 - RNA, 19 nt, Homo sapiens
  misc_RNA (1)...(19): siRNA sense strand
gagagcaucuugacagaca

SEQ ID NO: 976160 - RNA, 19 nt, Homo sapiens
  misc_RNA (1)...(19): siRNA sense strand
gugaagguguuuacugaaa

SEQ ID NO: 976161 - RNA, 19 nt, Homo sapiens
  misc_RNA (1)...(19): siRNA sense strand
ggaaacaagucaccaagcu

SEQ ID NO: 976162 - RNA, 19 nt, Homo sapiens
  misc_RNA (1)...(19): siRNA sense strand
ccacugacaucgacuaucu

SEQ ID NO: 976163 - RNA, 19 nt, Homo sapiens
  misc_RNA (1)...(19): siRNA sense strand
guagaucaguccaaagugu

SEQ ID NO: 976164 - RNA, 19 nt, Homo sapiens
  misc_RNA (1)...(19): siRNA sense strand
agauaacccugcugaauau

SEQ ID NO: 976165 - RNA, 19 nt, Homo sapiens
  misc_RNA (1)...(19): siRNA sense strand
aagauaacccugcugaaua

SEQ ID NO: 976166 - RNA, 19 nt, Homo sapiens
  misc_RNA (1)...(19): siRNA sense strand
gguagaaauugaccaagug

SEQ ID NO: 976167 - RNA, 19 nt, Homo sapiens
  misc_RNA (1)...(19): siRNA sense strand
caagugaaguccagaaugc

SEQ ID NO: 976168 - RNA, 19 nt, Homo sapiens
  misc_RNA (1)...(19): siRNA sense strand
uuucagaacuccauuagga

SEQ ID NO: 976169 - RNA, 19 nt, Homo sapiens
  misc_RNA (1)...(19): siRNA sense strand
gauauugaggagacauuua

SEQ ID NO: 976170 - RNA, 19 nt, Homo sapiens
  misc_RNA (1)...(19): siRNA sense strand
gcagaacagcuuaaugaug

SEQ ID NO: 976171 - RNA, 19 nt, Homo sapiens
  misc_RNA (1)...(19): siRNA sense strand
gaauaugccaguuuaaugg

SEQ ID NO: 976172 - RNA, 19 nt, Homo sapiens
  misc_RNA (1)...(19): siRNA sense strand
gggaagugauugacugugu

SEQ ID NO: 976173 - RNA, 19 nt, Homo sapiens
  misc_RNA (1)...(19): siRNA sense strand
ccaccuacaugaacacaau

SEQ ID NO: 976174 - RNA, 19 nt, Homo sapiens
  misc_RNA (1)...(19): siRNA sense strand
ggcaagagcugugucaaag

SEQ ID NO: 976175 - RNA, 19 nt, Homo sapiens
  misc_RNA (1)...(19): siRNA sense strand
gaacccauggcaagaauau

SEQ ID NO: 976176 - RNA, 19 nt, Homo sapiens
  misc_RNA (1)...(19): siRNA sense strand
gcugguggaugcuguguau

SEQ ID NO: 976177 - RNA, 19 nt, Homo sapiens
  misc_RNA (1)...(19): siRNA sense strand
ccaaagugcuccgugaugu

SEQ ID NO: 976178 - RNA, 19 nt, Homo sapiens
  misc_RNA (1)...(19): siRNA sense strand
gagccacaaugcagaccua

SEQ ID NO: 976179 - RNA, 19 nt, Homo sapiens
  misc_RNA (1)...(19): siRNA sense strand
aagaagaacucugccaaga

SEQ ID NO: 976180 - RNA, 19 nt, Homo sapiens
  misc_RNA (1)...(19): siRNA sense strand
ccagugggcuacacagguu

SEQ ID NO: 976181 - RNA, 19 nt, Homo sapiens
  misc_RNA (1)...(19): siRNA sense strand
uaacagguaugcagaacag

SEQ ID NO: 976182 - RNA, 19 nt, Homo sapiens
  misc_RNA (1)...(19): siRNA sense strand
gcagcuagccaacaggauu

SEQ ID NO: 976183 - RNA, 19 nt, Homo sapiens
  misc_RNA (1)...(19): siRNA sense strand
gcugaaguauggcgacaug

SEQ ID NO: 976184 - RNA, 19 nt, Homo sapiens
  misc_RNA (1)...(19): siRNA sense strand
gugaaggaguggaucaaug

SEQ ID NO: 976185 - RNA, 19 nt, Homo sapiens
  misc_RNA (1)...(19): siRNA sense strand
gcccugaaaucccucuuug

SEQ ID NO: 976186 - RNA, 19 nt, Homo sapiens
  misc_RNA (1)...(19): siRNA sense strand
gaaguauggcgacauggaa

SEQ ID NO: 976187 - RNA, 19 nt, Homo sapiens
  misc_RNA (1)...(19): siRNA sense strand
ucaccaagcucuccagaac

SEQ ID NO: 976188 - RNA, 19 nt, Homo sapiens
  misc_RNA (1)...(19): siRNA sense strand
gaagauggacagcuggaau

SEQ ID NO: 976189 - RNA, 19 nt, Homo sapiens
  misc_RNA (1)...(19): siRNA sense strand
uaauggugcugcugauuca

SEQ ID NO: 976190 - RNA, 19 nt, Homo sapiens
  misc_RNA (1)...(19): siRNA sense strand
ucagaacuccauuaggaua

SEQ ID NO: 976191 - RNA, 19 nt, Homo sapiens
  misc_RNA (1)...(19): siRNA sense strand
gcuuaaugaugcuuguuga

SEQ ID NO: 976192 - RNA, 19 nt, Homo sapiens
  misc_RNA (1)...(19): siRNA sense strand
uaaugaugcuuguugauac

SEQ ID NO: 976193 - RNA, 19 nt, Homo sapiens
  misc_RNA (1)...(19): siRNA sense strand
ucaggaggacucugccuua

SEQ ID NO: 976194 - RNA, 19 nt, Homo sapiens
  misc_RNA (1)...(19): siRNA sense strand
guccacagcugggaaguau

SEQ ID NO: 976195 - RNA, 19 nt, Homo sapiens
  misc_RNA (1)...(19): siRNA sense strand
gaaagauaacccugcugaa

SEQ ID NO: 976196 - RNA, 19 nt, Homo sapiens
  misc_RNA (1)...(19): siRNA sense strand
acaccagacuacucagaaa

SEQ ID NO: 976197 - RNA, 19 nt, Homo sapiens
  misc_RNA (1)...(19): siRNA sense strand
gacaucgacuaucugauca

SEQ ID NO: 976198 - RNA, 19 nt, Homo sapiens
  misc_RNA (1)...(19): siRNA sense strand
caaugcagaccuacuguga

SEQ ID NO: 976199 - RNA, 19 nt, Homo sapiens
  misc_RNA (1)...(19): siRNA sense strand
gaaauugaccaagugaagu

SEQ ID NO: 976200 - RNA, 19 nt, Homo sapiens
  misc_RNA (1)...(19): siRNA sense strand
ugacaucgacuaucugauc

SEQ ID NO: 976201 - RNA, 19 nt, Homo sapiens
  misc_RNA (1)...(19): siRNA sense strand
ugaauaugccaguuuaaug

SEQ ID NO: 976202 - RNA, 19 nt, Homo sapiens
  misc_RNA (1)...(19): siRNA sense strand
ugccgaaucucuucaggaa

SEQ ID NO: 976203 - RNA, 19 nt, Homo sapiens
  misc_RNA (1)...(19): siRNA sense strand
gcagguguugguagaaauu

SEQ ID NO: 976204 - RNA, 19 nt, Homo sapiens
  misc_RNA (1)...(19): siRNA sense strand
ccuaccagcugaaguaugg

SEQ ID NO: 976205 - RNA, 19 nt, Homo sapiens
  misc_RNA (1)...(19): siRNA sense strand
ugaagguguuuacugaaau

SEQ ID NO: 976206 - RNA, 19 nt, Homo sapiens
  misc_RNA (1)...(19): siRNA sense strand
guaauggugcugcugauuc

SEQ ID NO: 976207 - RNA, 19 nt, Homo sapiens
  misc_RNA (1)...(19): siRNA sense strand
gugaugcgauccuacagau

SEQ ID NO: 976208 - RNA, 19 nt, Homo sapiens
  misc_RNA (1)...(19): siRNA sense strand
aaagauaacccugcugaau

SEQ ID NO: 976209 - RNA, 19 nt, Homo sapiens
  misc_RNA (1)...(19): siRNA sense strand
ggaggaaacaagucaccaa

SEQ ID NO: 976210 - RNA, 19 nt, Homo sapiens
  misc_RNA (1)...(19): siRNA sense strand
ccaugcggagugugaauua

SEQ ID NO: 976211 - RNA, 19 nt, Homo sapiens
  misc_RNA (1)...(19): siRNA sense strand
caagaacccauggcaagaa

SEQ ID NO: 976212 - RNA, 19 nt, Homo sapiens
  misc_RNA (1)...(19): siRNA sense strand
gauaaguggagcacguuga

SEQ ID NO: 976213 - RNA, 19 nt, Homo sapiens
  misc_RNA (1)...(19): siRNA sense strand
ccaugcagguguugguaga

SEQ ID NO: 976214 - RNA, 19 nt, Homo sapiens
  misc_RNA (1)...(19): siRNA sense strand
gcacguugagcgccgauau

SEQ ID NO: 976215 - RNA, 19 nt, Homo sapiens
  misc_RNA (1)...(19): siRNA sense strand
guagaaauugaccaaguga

SEQ ID NO: 976216 - RNA, 19 nt, Homo sapiens
  misc_RNA (1)...(19): siRNA sense strand
ugugauuucugccaagcua

SEQ ID NO: 976217 - RNA, 19 nt, Homo sapiens
  misc_RNA (1)...(19): siRNA sense strand
ggacuucgagcagcagcua

SEQ ID NO: 976218 - RNA, 19 nt, Homo sapiens
  misc_RNA (1)...(19): siRNA sense strand
gcaaccuccucauccagau

SEQ ID NO: 976219 - RNA, 19 nt, Homo sapiens
  misc_RNA (1)...(19): siRNA sense strand
gcacuuggaggcacugaag

SEQ ID NO: 976220 - RNA, 19 nt, Homo sapiens
  misc_RNA (1)...(19): siRNA sense strand
cuacacagguuuuccagaa

SEQ ID NO: 976221 - RNA, 19 nt, Homo sapiens
  misc_RNA (1)...(19): siRNA sense strand
aagauggacagcuggaaua

SEQ ID NO: 976222 - RNA, 19 nt, Homo sapiens
  misc_RNA (1)...(19): siRNA sense strand
ugcugaauaugccaguuua

SEQ ID NO: 976223 - RNA, 19 nt, Homo sapiens
  misc_RNA (1)...(19): siRNA sense strand
augcagaacagcuuaauga

SEQ ID NO: 976224 - RNA, 19 nt, Homo sapiens
  misc_RNA (1)...(19): siRNA sense strand
uaaaacaggaggcaucuuu

SEQ ID NO: 976225 - RNA, 19 nt, Homo sapiens
  misc_RNA (1)...(19): siRNA sense strand
ucagcaacaucgggcagua

SEQ ID NO: 976226 - RNA, 19 nt, Homo sapiens
  misc_RNA (1)...(19): siRNA sense strand
agaagaacucugccaagaa

SEQ ID NO: 976227 - RNA, 19 nt, Homo sapiens
  misc_RNA (1)...(19): siRNA sense strand
caaagugcuccgugauguu

SEQ ID NO: 976228 - RNA, 19 nt, Homo sapiens
  misc_RNA (1)...(19): siRNA sense strand
cagaacuccauuaggauaa

SEQ ID NO: 976229 - RNA, 19 nt, Homo sapiens
  misc_RNA (1)...(19): siRNA sense strand
uugugaagguguuuacuga

SEQ ID NO: 976230 - RNA, 19 nt, Homo sapiens
  misc_RNA (1)...(19): siRNA sense strand
cugccaagcuaacagguau

SEQ ID NO: 976231 - RNA, 19 nt, Homo sapiens
  misc_RNA (1)...(19): siRNA sense strand
ccacaaugcagaccuacug

SEQ ID NO: 976232 - RNA, 19 nt, Homo sapiens
  misc_RNA (1)...(19): siRNA sense strand
gcagcgcugacucggcuua

SEQ ID NO: 976233 - RNA, 19 nt, Homo sapiens
  misc_RNA (1)...(19): siRNA sense strand
gcagcuuaccggacucuau

SEQ ID NO: 976234 - RNA, 19 nt, Homo sapiens
  misc_RNA (1)...(19): siRNA sense strand
augcagaccuacugugaug

SEQ ID NO: 976235 - RNA, 19 nt, Homo sapiens
  misc_RNA (1)...(19): siRNA sense strand
gggaaguaucuaucugauu

SEQ ID NO: 976236 - RNA, 19 nt, Homo sapiens
  misc_RNA (1)...(19): siRNA sense strand
caugaacacaaucugguaa

SEQ ID NO: 976237 - RNA, 19 nt, Homo sapiens
  misc_RNA (1)...(19): siRNA sense strand
cagcuagccaacaggauuu

SEQ ID NO: 976238 - RNA, 19 nt, Homo sapiens
  misc_RNA (1)...(19): siRNA sense strand
cuacugugaugcgauccua

SEQ ID NO: 976239 - RNA, 19 nt, Homo sapiens
  misc_RNA (1)...(19): siRNA sense strand
ccaagaacccauggcaaga

SEQ ID NO: 976240 - RNA, 19 nt, Homo sapiens
  misc_RNA (1)...(19): siRNA sense strand
ggcuguagaucaguccaaa

SEQ ID NO: 976241 - RNA, 19 nt, Homo sapiens
  misc_RNA (1)...(19): siRNA sense strand
cccugaaucuugagccauu

SEQ ID NO: 976242 - RNA, 19 nt, Homo sapiens
  misc_RNA (1)...(19): siRNA sense strand
ggcuuucgauuccguguuc

SEQ ID NO: 976243 - RNA, 19 nt, Homo sapiens
  misc_RNA (1)...(19): siRNA sense strand
uaugccaguuuaauggaaa

SEQ ID NO: 976244 - RNA, 19 nt, Homo sapiens
  misc_RNA (1)...(19): siRNA sense strand
acccauggcaagaauauaa

SEQ ID NO: 976245 - RNA, 19 nt, Homo sapiens
  misc_RNA (1)...(19): siRNA sense strand
gcugggaaguaucuaucug

SEQ ID NO: 976246 - RNA, 19 nt, Homo sapiens
  misc_RNA (1)...(19): siRNA sense strand
gcaagagcugugucaaagu

SEQ ID NO: 976247 - RNA, 19 nt, Homo sapiens
  misc_RNA (1)...(19): siRNA sense strand
gaaggucucugaauuaaga

SEQ ID NO: 976248 - RNA, 19 nt, Homo sapiens
  misc_RNA (1)...(19): siRNA sense strand
ccaacacgcugcccaauua

SEQ ID NO: 976249 - RNA, 19 nt, Homo sapiens
  misc_RNA (1)...(19): siRNA sense strand
gcagagagguccauuccaa

SEQ ID NO: 976250 - RNA, 19 nt, Homo sapiens
  misc_RNA (1)...(19): siRNA sense strand
gcaaugggcugcaguuaag

SEQ ID NO: 976251 - RNA, 19 nt, Homo sapiens
  misc_RNA (1)...(19): siRNA sense strand
gcgaagagccucacuuuga

SEQ ID NO: 976252 - RNA, 19 nt, Homo sapiens
  misc_RNA (1)...(19): siRNA sense strand
ucaaugaacucaccuggaa

SEQ ID NO: 976253 - RNA, 19 nt, Homo sapiens
  misc_RNA (1)...(19): siRNA sense strand
caacaucgauuuccuggau

SEQ ID NO: 976254 - RNA, 19 nt, Homo sapiens
  misc_RNA (1)...(19): siRNA sense strand
gaacagauggucagaaauc

SEQ ID NO: 976255 - RNA, 19 nt, Homo sapiens
  misc_RNA (1)...(19): siRNA sense strand
gauaauggauggauucucu

SEQ ID NO: 976256 - RNA, 19 nt, Homo sapiens
  misc_RNA (1)...(19): siRNA sense strand
gaggaucacucaugucuuc

SEQ ID NO: 976257 - RNA, 19 nt, Homo sapiens
  misc_RNA (1)...(19): siRNA sense strand
aaacuggugucucuucuuu

SEQ ID NO: 976258 - RNA, 19 nt, Homo sapiens
  misc_RNA (1)...(19): siRNA sense strand
uaacacagccuccauccua

SEQ ID NO: 976259 - RNA, 19 nt, Homo sapiens
  misc_RNA (1)...(19): siRNA sense strand
caacaacccucacuuucug

SEQ ID NO: 976260 - RNA, 19 nt, Homo sapiens
  misc_RNA (1)...(19): siRNA sense strand
gguuuacacucuucugaua

SEQ ID NO: 976261 - RNA, 19 nt, Homo sapiens
  misc_RNA (1)...(19): siRNA sense strand
guuaagacuucaacaaaga

SEQ ID NO: 976262 - RNA, 19 nt, Homo sapiens
  misc_RNA (1)...(19): siRNA sense strand
gaaaacauuuggauaguga

SEQ ID NO: 976263 - RNA, 19 nt, Homo sapiens
  misc_RNA (1)...(19): siRNA sense strand
gaauaacuguucagagaag

SEQ ID NO: 976264 - RNA, 19 nt, Homo sapiens
  misc_RNA (1)...(19): siRNA sense strand
ggaaccaaaugaacagaug

SEQ ID NO: 976265 - RNA, 19 nt, Homo sapiens
  misc_RNA (1)...(19): siRNA sense strand
uaagucaaguucagcaauu

SEQ ID NO: 976266 - RNA, 19 nt, Homo sapiens
  misc_RNA (1)...(19): siRNA sense strand
gagcgaagagccucacuuu

SEQ ID NO: 976267 - RNA, 19 nt, Homo sapiens
  misc_RNA (1)...(19): siRNA sense strand
ggaugucacugaucucaau

SEQ ID NO: 976268 - RNA, 19 nt, Homo sapiens
  misc_RNA (1)...(19): siRNA sense strand
ggucagaaauccaaacucu

SEQ ID NO: 976269 - RNA, 19 nt, Homo sapiens
  misc_RNA (1)...(19): siRNA sense strand
aggaauaacuguucagaga

SEQ ID NO: 976270 - RNA, 19 nt, Homo sapiens
  misc_RNA (1)...(19): siRNA sense strand
cauaauaccaccacugaaa

SEQ ID NO: 976271 - RNA, 19 nt, Homo sapiens
  misc_RNA (1)...(19): siRNA sense strand
gaucacucaugucuucaaa

SEQ ID NO: 976272 - RNA, 19 nt, Homo sapiens
  misc_RNA (1)...(19): siRNA sense strand
ggagucagcagauggauga

SEQ ID NO: 976273 - RNA, 19 nt, Homo sapiens
  misc_RNA (1)...(19): siRNA sense strand
gaucaaaccaauguacuuu

SEQ ID NO: 976274 - RNA, 19 nt, Homo sapiens
  misc_RNA (1)...(19): siRNA sense strand
caacagugccgacuugguu

SEQ ID NO: 976275 - RNA, 19 nt, Homo sapiens
  misc_RNA (1)...(19): siRNA sense strand
agaagaagccgcugccuuu

SEQ ID NO: 976276 - RNA, 19 nt, Homo sapiens
  misc_RNA (1)...(19): siRNA sense strand
cgaagagccucacuuugau

SEQ ID NO: 976277 - RNA, 19 nt, Homo sapiens
  misc_RNA (1)...(19): siRNA sense strand
caacugcuguccucaccaa

SEQ ID NO: 976278 - RNA, 19 nt, Homo sapiens
  misc_RNA (1)...(19): siRNA sense strand
gcccacagcacaucaguuu

SEQ ID NO: 976279 - RNA, 19 nt, Homo sapiens
  misc_RNA (1)...(19): siRNA sense strand
acaagaugcugguggagaa

SEQ ID NO: 976280 - RNA, 19 nt, Homo sapiens
  misc_RNA (1)...(19): siRNA sense strand
ggaauaacuguucagagaa

SEQ ID NO: 976281 - RNA, 19 nt, Homo sapiens
  misc_RNA (1)...(19): siRNA sense strand
gugcaacagugccgacuug

SEQ ID NO: 976282 - RNA, 19 nt, Homo sapiens
  misc_RNA (1)...(19): siRNA sense strand
gcaucuugaagucuuauua

SEQ ID NO: 976283 - RNA, 19 nt, Homo sapiens
  misc_RNA (1)...(19): siRNA sense strand
agcagaaggugaucaauga

SEQ ID NO: 976284 - RNA, 19 nt, Homo sapiens
  misc_RNA (1)...(19): siRNA sense strand
cugaaggucucugaauuaa

SEQ ID NO: 976285 - RNA, 19 nt, Homo sapiens
  misc_RNA (1)...(19): siRNA sense strand
aaaccaauguacuuucuuc

SEQ ID NO: 976286 - RNA, 19 nt, Homo sapiens
  misc_RNA (1)...(19): siRNA sense strand
ccaggugaguuucuccaaa

SEQ ID NO: 976287 - RNA, 19 nt, Homo sapiens
  misc_RNA (1)...(19): siRNA sense strand
ggaaagaugagugauguca

SEQ ID NO: 976288 - RNA, 19 nt, Homo sapiens
  misc_RNA (1)...(19): siRNA sense strand
cagaucaguuuuacaguua

SEQ ID NO: 976289 - RNA, 19 nt, Homo sapiens
  misc_RNA (1)...(19): siRNA sense strand
caacggcuucuaccacuuu

SEQ ID NO: 976290 - RNA, 19 nt, Homo sapiens
  misc_RNA (1)...(19): siRNA sense strand
uaaccuggaugaucugaag

SEQ ID NO: 976291 - RNA, 19 nt, Homo sapiens
  misc_RNA (1)...(19): siRNA sense strand
gcuuaaauaucaccaguac

SEQ ID NO: 976292 - RNA, 19 nt, Homo sapiens
  misc_RNA (1)...(19): siRNA sense strand
ugaauuccaugagcaaaga

SEQ ID NO: 976293 - RNA, 19 nt, Homo sapiens
  misc_RNA (1)...(19): siRNA sense strand
ggaccucacuccgccaaau

SEQ ID NO: 976294 - RNA, 19 nt, Homo sapiens
  misc_RNA (1)...(19): siRNA sense strand
uagagaggaucacucaugu

SEQ ID NO: 976295 - RNA, 19 nt, Homo sapiens
  misc_RNA (1)...(19): siRNA sense strand
cugcacagauggcugguuu

SEQ ID NO: 976296 - RNA, 19 nt, Homo sapiens
  misc_RNA (1)...(19): siRNA sense strand
gaaaaggaauaacuguuca

SEQ ID NO: 976297 - RNA, 19 nt, Homo sapiens
  misc_RNA (1)...(19): siRNA sense strand
ucugaaggucucugaauua

SEQ ID NO: 976298 - RNA, 19 nt, Homo sapiens
  misc_RNA (1)...(19): siRNA sense strand
ggaucagacucgaagugaa

SEQ ID NO: 976299 - RNA, 19 nt, Homo sapiens
  misc_RNA (1)...(19): siRNA sense strand
caggugaguuucuccaaau

SEQ ID NO: 976300 - RNA, 19 nt, Homo sapiens
  misc_RNA (1)...(19): siRNA sense strand
uaggaaagaugagugaugu

SEQ ID NO: 976301 - RNA, 19 nt, Homo sapiens
  misc_RNA (1)...(19): siRNA sense strand
gcccucggcuuccuuugaa

SEQ ID NO: 976302 - RNA, 19 nt, Homo sapiens
  misc_RNA (1)...(19): siRNA sense strand
gaaauccaaacucuucuuc

SEQ ID NO: 976303 - RNA, 19 nt, Homo sapiens
  misc_RNA (1)...(19): siRNA sense strand
ucagaaauccaaacucuuc

SEQ ID NO: 976304 - RNA, 19 nt, Homo sapiens
  misc_RNA (1)...(19): siRNA sense strand
ccaaaggugaagaagcuua

SEQ ID NO: 976305 - RNA, 19 nt, Homo sapiens
  misc_RNA (1)...(19): siRNA sense strand
gaaacguccagcugaauuc

SEQ ID NO: 976306 - RNA, 19 nt, Homo sapiens
  misc_RNA (1)...(19): siRNA sense strand
ccggacaccuucaaugaug

SEQ ID NO: 976307 - RNA, 19 nt, Homo sapiens
  misc_RNA (1)...(19): siRNA sense strand
gacaacagcuucgaauucg

SEQ ID NO: 976308 - RNA, 19 nt, Homo sapiens
  misc_RNA (1)...(19): siRNA sense strand
aauccaaacucuucuucaa

SEQ ID NO: 976309 - RNA, 19 nt, Homo sapiens
  misc_RNA (1)...(19): siRNA sense strand
caaaggugaagaagcuuaa

SEQ ID NO: 976310 - RNA, 19 nt, Homo sapiens
  misc_RNA (1)...(19): siRNA sense strand
gugccgacuugguuaauau

SEQ ID NO: 976311 - RNA, 19 nt, Homo sapiens
  misc_RNA (1)...(19): siRNA sense strand
cuaugaagaugccguaaag

SEQ ID NO: 976312 - RNA, 19 nt, Homo sapiens
  misc_RNA (1)...(19): siRNA sense strand
caccuaaccuggaugaucu

SEQ ID NO: 976313 - RNA, 19 nt, Homo sapiens
  misc_RNA (1)...(19): siRNA sense strand
ggugaagaagcuuaaauau

SEQ ID NO: 976314 - RNA, 19 nt, Homo sapiens
  misc_RNA (1)...(19): siRNA sense strand
ucacuuugaugggauaaug

SEQ ID NO: 976315 - RNA, 19 nt, Homo sapiens
  misc_RNA (1)...(19): siRNA sense strand
guacuuucuuccacauuuc

SEQ ID NO: 976316 - RNA, 19 nt, Homo sapiens
  misc_RNA (1)...(19): siRNA sense strand
gcucaacuccagccucuug

SEQ ID NO: 976317 - RNA, 19 nt, Homo sapiens
  misc_RNA (1)...(19): siRNA sense strand
caguuaagacuucaacaaa

SEQ ID NO: 976318 - RNA, 19 nt, Homo sapiens
  misc_RNA (1)...(19): siRNA sense strand
gcaacccagugccgaacuu

SEQ ID NO: 976319 - RNA, 19 nt, Homo sapiens
  misc_RNA (1)...(19): siRNA sense strand
caacgccacugagcaauac

SEQ ID NO: 976320 - RNA, 19 nt, Homo sapiens
  misc_RNA (1)...(19): siRNA sense strand
augaacagauggucagaaa

SEQ ID NO: 976321 - RNA, 19 nt, Homo sapiens
  misc_RNA (1)...(19): siRNA sense strand
gaaaugacucagccucaca

SEQ ID NO: 976322 - RNA, 19 nt, Homo sapiens
  misc_RNA (1)...(19): siRNA sense strand
ucaaaccaauguacuuucu

SEQ ID NO: 976323 - RNA, 19 nt, Homo sapiens
  misc_RNA (1)...(19): siRNA sense strand
caaagcagcagcucagagu

SEQ ID NO: 976324 - RNA, 19 nt, Homo sapiens
  misc_RNA (1)...(19): siRNA sense strand
ccaaguaccugugaaaaga

SEQ ID NO: 976325 - RNA, 19 nt, Homo sapiens
  misc_RNA (1)...(19): siRNA sense strand
gaucugaaggucucugaau

SEQ ID NO: 976326 - RNA, 19 nt, Homo sapiens
  misc_RNA (1)...(19): siRNA sense strand
ccgaugaucucaaugaaaa

SEQ ID NO: 976327 - RNA, 19 nt, Homo sapiens
  misc_RNA (1)...(19): siRNA sense strand
gggcugcaguuaagcuuca

SEQ ID NO: 976328 - RNA, 19 nt, Homo sapiens
  misc_RNA (1)...(19): siRNA sense strand
caaugcacaugagaucuug

SEQ ID NO: 976329 - RNA, 19 nt, Homo sapiens
  misc_RNA (1)...(19): siRNA sense strand
ggcauaauaccaccacuga

SEQ ID NO: 976330 - RNA, 19 nt, Homo sapiens
  misc_RNA (1)...(19): siRNA sense strand
gagaggaucacucaugucu

SEQ ID NO: 976331 - RNA, 19 nt, Homo sapiens
  misc_RNA (1)...(19): siRNA sense strand
uguacuuucuuccacauuu

SEQ ID NO: 976332 - RNA, 19 nt, Homo sapiens
  misc_RNA (1)...(19): siRNA sense strand
gugaagaagcuuaaauauc

SEQ ID NO: 976333 - RNA, 19 nt, Homo sapiens
  misc_RNA (1)...(19): siRNA sense strand
gaucagacucgaagugaag

SEQ ID NO: 976334 - RNA, 19 nt, Homo sapiens
  misc_RNA (1)...(19): siRNA sense strand
ccauggaccuucacuugca

SEQ ID NO: 976335 - RNA, 19 nt, Homo sapiens
  misc_RNA (1)...(19): siRNA sense strand
gaagagccucacuuugaug

SEQ ID NO: 976336 - RNA, 19 nt, Homo sapiens
  misc_RNA (1)...(19): siRNA sense strand
agacaacagcuucgaauuc

SEQ ID NO: 976337 - RNA, 19 nt, Homo sapiens
  misc_RNA (1)...(19): siRNA sense strand
ugagcaucuugaagucuua

SEQ ID NO: 976338 - RNA, 19 nt, Homo sapiens
  misc_RNA (1)...(19): siRNA sense strand
ggagcaaguucagaucagu

SEQ ID NO: 976339 - RNA, 19 nt, Homo sapiens
  misc_RNA (1)...(19): siRNA sense strand
acagauggcugguuuacac

SEQ ID NO: 976340 - RNA, 19 nt, Homo sapiens
  misc_RNA (1)...(19): siRNA sense strand
gaagaagcuuaaauaucac

SEQ ID NO: 976341 - RNA, 19 nt, Homo sapiens
  misc_RNA (1)...(19): siRNA sense strand
ugucacugaucucaauuug

SEQ ID NO: 976342 - RNA, 19 nt, Homo sapiens
  misc_RNA (1)...(19): siRNA sense strand
ugaaacguccagcugaauu

SEQ ID NO: 976343 - RNA, 19 nt, Homo sapiens
  misc_RNA (1)...(19): siRNA sense strand
ucaacgccacugagcaaua

SEQ ID NO: 976344 - RNA, 19 nt, Homo sapiens
  misc_RNA (1)...(19): siRNA sense strand
gcagaaggugaucaaugaa

SEQ ID NO: 976345 - RNA, 19 nt, Homo sapiens
  misc_RNA (1)...(19): siRNA sense strand
uggugucucuucuuucaaa

SEQ ID NO: 976346 - RNA, 19 nt, Homo sapiens
  misc_RNA (1)...(19): siRNA sense strand
cuagagaggaucacucaug

SEQ ID NO: 976347 - RNA, 19 nt, Homo sapiens
  misc_RNA (1)...(19): siRNA sense strand
gagccaaccuuacuacaaa

SEQ ID NO: 976348 - RNA, 19 nt, Homo sapiens
  misc_RNA (1)...(19): siRNA sense strand
cagaguggcuccagcauga

SEQ ID NO: 976349 - RNA, 19 nt, Homo sapiens
  misc_RNA (1)...(19): siRNA sense strand
gcacaaccguguccguaug

SEQ ID NO: 976350 - RNA, 19 nt, Homo sapiens
  misc_RNA (1)...(19): siRNA sense strand
ggaguacgauauauucaag

SEQ ID NO: 976351 - RNA, 19 nt, Homo sapiens
  misc_RNA (1)...(19): siRNA sense strand
gcacagggacucgcauaaa

SEQ ID NO: 976352 - RNA, 19 nt, Homo sapiens
  misc_RNA (1)...(19): siRNA sense strand
guacggaucucuguucaag

SEQ ID NO: 976353 - RNA, 19 nt, Homo sapiens
  misc_RNA (1)...(19): siRNA sense strand
ccacagagccaauagagau

SEQ ID NO: 976354 - RNA, 19 nt, Homo sapiens
  misc_RNA (1)...(19): siRNA sense strand
gcaauugugucccgcucuu

SEQ ID NO: 976355 - RNA, 19 nt, Homo sapiens
  misc_RNA (1)...(19): siRNA sense strand
caggacagcugcagaagca

SEQ ID NO: 976356 - RNA, 19 nt, Homo sapiens
  misc_RNA (1)...(19): siRNA sense strand
caaggcagcaaagaacuua

SEQ ID NO: 976357 - RNA, 19 nt, Homo sapiens
  misc_RNA (1)...(19): siRNA sense strand
caaaacaucuacagaacuu

SEQ ID NO: 976358 - RNA, 19 nt, Homo sapiens
  misc_RNA (1)...(19): siRNA sense strand
gaugaccucuuugccuauu

SEQ ID NO: 976359 - RNA, 19 nt, Homo sapiens
  misc_RNA (1)...(19): siRNA sense strand
gagacaagauugcccaaaa

SEQ ID NO: 976360 - RNA, 19 nt, Homo sapiens
  misc_RNA (1)...(19): siRNA sense strand
ggccacccauggagaguaa

SEQ ID NO: 976361 - RNA, 19 nt, Homo sapiens
  misc_RNA (1)...(19): siRNA sense strand
caaguaugcaccgauauuu

SEQ ID NO: 976362 - RNA, 19 nt, Homo sapiens
  misc_RNA (1)...(19): siRNA sense strand
cacacgggaugaccucuuu

SEQ ID NO: 976363 - RNA, 19 nt, Homo sapiens
  misc_RNA (1)...(19): siRNA sense strand
ggccauugcaggaguagua

SEQ ID NO: 976364 - RNA, 19 nt, Homo sapiens
  misc_RNA (1)...(19): siRNA sense strand
ggccaccucugcugcuuau

SEQ ID NO: 976365 - RNA, 19 nt, Homo sapiens
  misc_RNA (1)...(19): siRNA sense strand
ucaaguaugcaccgauauu

SEQ ID NO: 976366 - RNA, 19 nt, Homo sapiens
  misc_RNA (1)...(19): siRNA sense strand
gaacgucagagccaaccuu

SEQ ID NO: 976367 - RNA, 19 nt, Homo sapiens
  misc_RNA (1)...(19): siRNA sense strand
caggaccucucacaaaucu

SEQ ID NO: 976368 - RNA, 19 nt, Homo sapiens
  misc_RNA (1)...(19): siRNA sense strand
ucaagaccaugagaaacaa

SEQ ID NO: 976369 - RNA, 19 nt, Homo sapiens
  misc_RNA (1)...(19): siRNA sense strand
gcaaggcagcaaagaacuu

SEQ ID NO: 976370 - RNA, 19 nt, Homo sapiens
  misc_RNA (1)...(19): siRNA sense strand
gauauuugagagcgacuuu

SEQ ID NO: 976371 - RNA, 19 nt, Homo sapiens
  misc_RNA (1)...(19): siRNA sense strand
cacagggacucgcauaaag

SEQ ID NO: 976372 - RNA, 19 nt, Homo sapiens
  misc_RNA (1)...(19): siRNA sense strand
auucaaguaugcaccgaua

SEQ ID NO: 976373 - RNA, 19 nt, Homo sapiens
  misc_RNA (1)...(19): siRNA sense strand
cgaagaguaugcuggacau

SEQ ID NO: 976374 - RNA, 19 nt, Homo sapiens
  misc_RNA (1)...(19): siRNA sense strand
cauuccagcugaagacaug

SEQ ID NO: 976375 - RNA, 19 nt, Homo sapiens
  misc_RNA (1)...(19): siRNA sense strand
uggagacagugaccuuuga

SEQ ID NO: 976376 - RNA, 19 nt, Homo sapiens
  misc_RNA (1)...(19): siRNA sense strand
uccaggaccucucacaaau

SEQ ID NO: 976377 - RNA, 19 nt, Homo sapiens
  misc_RNA (1)...(19): siRNA sense strand
ggugaaagccgccacaaaa

SEQ ID NO: 976378 - RNA, 19 nt, Homo sapiens
  misc_RNA (1)...(19): siRNA sense strand
caacagcugcgccugaagu

SEQ ID NO: 976379 - RNA, 19 nt, Homo sapiens
  misc_RNA (1)...(19): siRNA sense strand
gaccuuugaagcccauuaa

SEQ ID NO: 976380 - RNA, 19 nt, Homo sapiens
  misc_RNA (1)...(19): siRNA sense strand
gagcgacuuuauccagauc

SEQ ID NO: 976381 - RNA, 19 nt, Homo sapiens
  misc_RNA (1)...(19): siRNA sense strand
gccacacgcccaucucaaa

SEQ ID NO: 976382 - RNA, 19 nt, Homo sapiens
  misc_RNA (1)...(19): siRNA sense strand
gggaguacgauauauucaa

SEQ ID NO: 976383 - RNA, 19 nt, Homo sapiens
  misc_RNA (1)...(19): siRNA sense strand
ggagacagugaccuuugaa

SEQ ID NO: 976384 - RNA, 19 nt, Homo sapiens
  misc_RNA (1)...(19): siRNA sense strand
gcgcauccaugagccuuuc

SEQ ID NO: 976385 - RNA, 19 nt, Homo sapiens
  misc_RNA (1)...(19): siRNA sense strand
ugauguggaugccuguguu

SEQ ID NO: 976386 - RNA, 19 nt, Homo sapiens
  misc_RNA (1)...(19): siRNA sense strand
gcacaccacauggcagaga

SEQ ID NO: 976387 - RNA, 19 nt, Homo sapiens
  misc_RNA (1)...(19): siRNA sense strand
caaaaggggagaagugauu

SEQ ID NO: 976388 - RNA, 19 nt, Homo sapiens
  misc_RNA (1)...(19): siRNA sense strand
gaaacugcagcgacaacug

SEQ ID NO: 976389 - RNA, 19 nt, Homo sapiens
  misc_RNA (1)...(19): siRNA sense strand
cagcaguaccuguggcauu

SEQ ID NO: 976390 - RNA, 19 nt, Homo sapiens
  misc_RNA (1)...(19): siRNA sense strand
acacgcccaucucaaagga

SEQ ID NO: 976391 - RNA, 19 nt, Homo sapiens
  misc_RNA (1)...(19): siRNA sense strand
cguagcaggugccuugagu

SEQ ID NO: 976392 - RNA, 19 nt, Homo sapiens
  misc_RNA (1)...(19): siRNA sense strand
ggggagaagugauugaugu

SEQ ID NO: 976393 - RNA, 19 nt, Homo sapiens
  misc_RNA (1)...(19): siRNA sense strand
gcuuauggaccaccaguuc

SEQ ID NO: 976394 - RNA, 19 nt, Homo sapiens
  misc_RNA (1)...(19): siRNA sense strand
aguaugcaccgauauuuga

SEQ ID NO: 976395 - RNA, 19 nt, Homo sapiens
  misc_RNA (1)...(19): siRNA sense strand
ggagacaagauugcccaaa

SEQ ID NO: 976396 - RNA, 19 nt, Homo sapiens
  misc_RNA (1)...(19): siRNA sense strand
gaaagccgccacaaaacaa

SEQ ID NO: 976397 - RNA, 19 nt, Homo sapiens
  misc_RNA (1)...(19): siRNA sense strand
gauguggaugccuguguuu

SEQ ID NO: 976398 - RNA, 19 nt, Homo sapiens
  misc_RNA (1)...(19): siRNA sense strand
cauggucucugaggugugu

SEQ ID NO: 976399 - RNA, 19 nt, Homo sapiens
  misc_RNA (1)...(19): siRNA sense strand
aaacugcagcgacaacugu

SEQ ID NO: 976400 - RNA, 19 nt, Homo sapiens
  misc_RNA (1)...(19): siRNA sense strand
acucccagaugucaugcua

SEQ ID NO: 976401 - RNA, 19 nt, Homo sapiens
  misc_RNA (1)...(19): siRNA sense strand
gagaguaacagcaguaccu

SEQ ID NO: 976402 - RNA, 19 nt, Homo sapiens
  misc_RNA (1)...(19): siRNA sense strand
aacaacagcugcgccugaa

SEQ ID NO: 976403 - RNA, 19 nt, Homo sapiens
  misc_RNA (1)...(19): siRNA sense strand
gcaaguccucagagcaugu

SEQ ID NO: 976404 - RNA, 19 nt, Homo sapiens
  misc_RNA (1)...(19): siRNA sense strand
gacuuuaacaaacccacua

SEQ ID NO: 976405 - RNA, 19 nt, Homo sapiens
  misc_RNA (1)...(19): siRNA sense strand
cgaugcaggaggaaacaaa

SEQ ID NO: 976406 - RNA, 19 nt, Homo sapiens
  misc_RNA (1)...(19): siRNA sense strand
gccaggccaccaagagaaa

SEQ ID NO: 976407 - RNA, 19 nt, Homo sapiens
  misc_RNA (1)...(19): siRNA sense strand
uccagcagguccucauuca

SEQ ID NO: 976408 - RNA, 19 nt, Homo sapiens
  misc_RNA (1)...(19): siRNA sense strand
gaucucuguucaagaccau

SEQ ID NO: 976409 - RNA, 19 nt, Homo sapiens
  misc_RNA (1)...(19): siRNA sense strand
uauuugagagcgacuuuau

SEQ ID NO: 976410 - RNA, 19 nt, Homo sapiens
  misc_RNA (1)...(19): siRNA sense strand
cgucagagccaaccuuacu

SEQ ID NO: 976411 - RNA, 19 nt, Homo sapiens
  misc_RNA (1)...(19): siRNA sense strand
gagcaagagcagccugagu

SEQ ID NO: 976412 - RNA, 19 nt, Homo sapiens
  misc_RNA (1)...(19): siRNA sense strand
ggaggaaacaaaggcaaca

SEQ ID NO: 976413 - RNA, 19 nt, Homo sapiens
  misc_RNA (1)...(19): siRNA sense strand
gggccaccucugcugcuua

SEQ ID NO: 976414 - RNA, 19 nt, Homo sapiens
  misc_RNA (1)...(19): siRNA sense strand
cauccaaagccuccacaug

SEQ ID NO: 976415 - RNA, 19 nt, Homo sapiens
  misc_RNA (1)...(19): siRNA sense strand
uuucugcugccguauuaua

SEQ ID NO: 976416 - RNA, 19 nt, Homo sapiens
  misc_RNA (1)...(19): siRNA sense strand
gggagggaaagaagggaaa

SEQ ID NO: 976417 - RNA, 19 nt, Homo sapiens
  misc_RNA (1)...(19): siRNA sense strand
ggaugaccucuuugccuau

SEQ ID NO: 976418 - RNA, 19 nt, Homo sapiens
  misc_RNA (1)...(19): siRNA sense strand
gacaucauggagacaguga

SEQ ID NO: 976419 - RNA, 19 nt, Homo sapiens
  misc_RNA (1)...(19): siRNA sense strand
ggcacagggacucgcauaa

SEQ ID NO: 976420 - RNA, 19 nt, Homo sapiens
  misc_RNA (1)...(19): siRNA sense strand
uagcaggugccuugagugu

SEQ ID NO: 976421 - RNA, 19 nt, Homo sapiens
  misc_RNA (1)...(19): siRNA sense strand
acaggugagcgcagccaua

SEQ ID NO: 976422 - RNA, 19 nt, Homo sapiens
  misc_RNA (1)...(19): siRNA sense strand
gagccaauagagaugacaa

SEQ ID NO: 976423 - RNA, 19 nt, Homo sapiens
  misc_RNA (1)...(19): siRNA sense strand
ccacuggcagaucuugcua

SEQ ID NO: 976424 - RNA, 19 nt, Homo sapiens
  misc_RNA (1)...(19): siRNA sense strand
agagccaaccuuacuacaa

SEQ ID NO: 976425 - RNA, 19 nt, Homo sapiens
  misc_RNA (1)...(19): siRNA sense strand
ccacacgcccaucucaaag

SEQ ID NO: 976426 - RNA, 19 nt, Homo sapiens
  misc_RNA (1)...(19): siRNA sense strand
uccaaagccuccacauggu

SEQ ID NO: 976427 - RNA, 19 nt, Homo sapiens
  misc_RNA (1)...(19): siRNA sense strand
ugaccucuuugccuauugg

SEQ ID NO: 976428 - RNA, 19 nt, Homo sapiens
  misc_RNA (1)...(19): siRNA sense strand
gcacagaucucuuagcaaa

SEQ ID NO: 976429 - RNA, 19 nt, Homo sapiens
  misc_RNA (1)...(19): siRNA sense strand
gugaagaccuaacgaaaua

SEQ ID NO: 976430 - RNA, 19 nt, Homo sapiens
  misc_RNA (1)...(19): siRNA sense strand
ugaauaaggugauuaguga

SEQ ID NO: 976431 - RNA, 19 nt, Homo sapiens
  misc_RNA (1)...(19): siRNA sense strand
ucacagauguccuggauaa

SEQ ID NO: 976432 - RNA, 19 nt, Homo sapiens
  misc_RNA (1)...(19): siRNA sense strand
ggagagagcagcagucuuu

SEQ ID NO: 976433 - RNA, 19 nt, Homo sapiens
  misc_RNA (1)...(19): siRNA sense strand
ggaagaggauuaugaagau

SEQ ID NO: 976434 - RNA, 19 nt, Homo sapiens
  misc_RNA (1)...(19): siRNA sense strand
guaaagaagucacggagaa

SEQ ID NO: 976435 - RNA, 19 nt, Homo sapiens
  misc_RNA (1)...(19): siRNA sense strand
ugacaaggaugaugauauu

SEQ ID NO: 976436 - RNA, 19 nt, Homo sapiens
  misc_RNA (1)...(19): siRNA sense strand
gaagaaagcccaguaugaa

SEQ ID NO: 976437 - RNA, 19 nt, Homo sapiens
  misc_RNA (1)...(19): siRNA sense strand
gagaugaacuaccaacaga

SEQ ID NO: 976438 - RNA, 19 nt, Homo sapiens
  misc_RNA (1)...(19): siRNA sense strand
gcacacaaaucauggugaa

SEQ ID NO: 976439 - RNA, 19 nt, Homo sapiens
  misc_RNA (1)...(19): siRNA sense strand
gagacaacuuucuuucuuu

SEQ ID NO: 976440 - RNA, 19 nt, Homo sapiens
  misc_RNA (1)...(19): siRNA sense strand
gaacuucggaaacugaaua

SEQ ID NO: 976441 - RNA, 19 nt, Homo sapiens
  misc_RNA (1)...(19): siRNA sense strand
gagcacaauuauucucuuu

SEQ ID NO: 976442 - RNA, 19 nt, Homo sapiens
  misc_RNA (1)...(19): siRNA sense strand
uagaagaccugacuccaaa

SEQ ID NO: 976443 - RNA, 19 nt, Homo sapiens
  misc_RNA (1)...(19): siRNA sense strand
gaugagcacagaucucuua

SEQ ID NO: 976444 - RNA, 19 nt, Homo sapiens
  misc_RNA (1)...(19): siRNA sense strand
guaugaagcuaauaaagug

SEQ ID NO: 976445 - RNA, 19 nt, Homo sapiens
  misc_RNA (1)...(19): siRNA sense strand
ggaggugacuucaauaucu

SEQ ID NO: 976446 - RNA, 19 nt, Homo sapiens
  misc_RNA (1)...(19): siRNA sense strand
guacaucagucucagauuc

SEQ ID NO: 976447 - RNA, 19 nt, Homo sapiens
  misc_RNA (1)...(19): siRNA sense strand
gagcacagaucucuuagca

SEQ ID NO: 976448 - RNA, 19 nt, Homo sapiens
  misc_RNA (1)...(19): siRNA sense strand
uaaaugcaguccugaagaa

SEQ ID NO: 976449 - RNA, 19 nt, Homo sapiens
  misc_RNA (1)...(19): siRNA sense strand
gcaaugaacuucggaaacu

SEQ ID NO: 976450 - RNA, 19 nt, Homo sapiens
  misc_RNA (1)...(19): siRNA sense strand
uagcucaacuuaauaguga

SEQ ID NO: 976451 - RNA, 19 nt, Homo sapiens
  misc_RNA (1)...(19): siRNA sense strand
gaagaccuaacgaaauaua

SEQ ID NO: 976452 - RNA, 19 nt, Homo sapiens
  misc_RNA (1)...(19): siRNA sense strand
uuccagagcuugucgguua

SEQ ID NO: 976453 - RNA, 19 nt, Homo sapiens
  misc_RNA (1)...(19): siRNA sense strand
agaccaacauguaucauaa

SEQ ID NO: 976454 - RNA, 19 nt, Homo sapiens
  misc_RNA (1)...(19): siRNA sense strand
gaagagagguaaaagaaga

SEQ ID NO: 976455 - RNA, 19 nt, Homo sapiens
  misc_RNA (1)...(19): siRNA sense strand
gcaaagacauugaaaaucu

SEQ ID NO: 976456 - RNA, 19 nt, Homo sapiens
  misc_RNA (1)...(19): siRNA sense strand
gaacaaaagaaguggauua

SEQ ID NO: 976457 - RNA, 19 nt, Homo sapiens
  misc_RNA (1)...(19): siRNA sense strand
cagauguccuggauaauga

SEQ ID NO: 976458 - RNA, 19 nt, Homo sapiens
  misc_RNA (1)...(19): siRNA sense strand
ggauccagauuucauguau

SEQ ID NO: 976459 - RNA, 19 nt, Homo sapiens
  misc_RNA (1)...(19): siRNA sense strand
uaaagaaacccaggaacua

SEQ ID NO: 976460 - RNA, 19 nt, Homo sapiens
  misc_RNA (1)...(19): siRNA sense strand
gaugaagagguuauaagua

SEQ ID NO: 976461 - RNA, 19 nt, Homo sapiens
  misc_RNA (1)...(19): siRNA sense strand
gaaacugaauaaggugauu

SEQ ID NO: 976462 - RNA, 19 nt, Homo sapiens
  misc_RNA (1)...(19): siRNA sense strand
gagcaugaacugucugaaa

SEQ ID NO: 976463 - RNA, 19 nt, Homo sapiens
  misc_RNA (1)...(19): siRNA sense strand
uguaugaacuggauagaga

SEQ ID NO: 976464 - RNA, 19 nt, Homo sapiens
  misc_RNA (1)...(19): siRNA sense strand
caaaggagaacaccugcua

SEQ ID NO: 976465 - RNA, 19 nt, Homo sapiens
  misc_RNA (1)...(19): siRNA sense strand
aagaagagcacaauuauuc

SEQ ID NO: 976466 - RNA, 19 nt, Homo sapiens
  misc_RNA (1)...(19): siRNA sense strand
ggaccaugaugaaggauuc

SEQ ID NO: 976467 - RNA, 19 nt, Homo sapiens
  misc_RNA (1)...(19): siRNA sense strand
ggagaacaccugcuacugu

SEQ ID NO: 976468 - RNA, 19 nt, Homo sapiens
  misc_RNA (1)...(19): siRNA sense strand
gaguauagugaacaacuua

SEQ ID NO: 976469 - RNA, 19 nt, Homo sapiens
  misc_RNA (1)...(19): siRNA sense strand
ucacacagaugcagcaaag

SEQ ID NO: 976470 - RNA, 19 nt, Homo sapiens
  misc_RNA (1)...(19): siRNA sense strand
acggagaacugauguagaa

SEQ ID NO: 976471 - RNA, 19 nt, Homo sapiens
  misc_RNA (1)...(19): siRNA sense strand
ggaguauagugaacaacuu

SEQ ID NO: 976472 - RNA, 19 nt, Homo sapiens
  misc_RNA (1)...(19): siRNA sense strand
agagacaacuuucuuucuu

SEQ ID NO: 976473 - RNA, 19 nt, Homo sapiens
  misc_RNA (1)...(19): siRNA sense strand
uaaagaagaaagcccagua

SEQ ID NO: 976474 - RNA, 19 nt, Homo sapiens
  misc_RNA (1)...(19): siRNA sense strand
gagcuugucgguuaaagaa

SEQ ID NO: 976475 - RNA, 19 nt, Homo sapiens
  misc_RNA (1)...(19): siRNA sense strand
uuaccaagaugaagagguu

SEQ ID NO: 976476 - RNA, 19 nt, Homo sapiens
  misc_RNA (1)...(19): siRNA sense strand
guacagaauccaagagaug

SEQ ID NO: 976477 - RNA, 19 nt, Homo sapiens
  misc_RNA (1)...(19): siRNA sense strand
ucagugagcuucccuuaac

SEQ ID NO: 976478 - RNA, 19 nt, Homo sapiens
  misc_RNA (1)...(19): siRNA sense strand
ggaagaagaggaagaggau

SEQ ID NO: 976479 - RNA, 19 nt, Homo sapiens
  misc_RNA (1)...(19): siRNA sense strand
aagaagaggaagaggauua

SEQ ID NO: 976480 - RNA, 19 nt, Homo sapiens
  misc_RNA (1)...(19): siRNA sense strand
gaggugacuucaauaucuu

SEQ ID NO: 976481 - RNA, 19 nt, Homo sapiens
  misc_RNA (1)...(19): siRNA sense strand
gaagaggauuaugaagaug

SEQ ID NO: 976482 - RNA, 19 nt, Homo sapiens
  misc_RNA (1)...(19): siRNA sense strand
agacaacuuucuuucuuug

SEQ ID NO: 976483 - RNA, 19 nt, Homo sapiens
  misc_RNA (1)...(19): siRNA sense strand
caacacagaauaugguaau

SEQ ID NO: 976484 - RNA, 19 nt, Homo sapiens
  misc_RNA (1)...(19): siRNA sense strand
agaagaaagcccaguauga

SEQ ID NO: 976485 - RNA, 19 nt, Homo sapiens
  misc_RNA (1)...(19): siRNA sense strand
caaggaugaugauauuagu

SEQ ID NO: 976486 - RNA, 19 nt, Homo sapiens
  misc_RNA (1)...(19): siRNA sense strand
gauggagccucuucaaggu

SEQ ID NO: 976487 - RNA, 19 nt, Homo sapiens
  misc_RNA (1)...(19): siRNA sense strand
gggaacagugggauacaua

SEQ ID NO: 976488 - RNA, 19 nt, Homo sapiens
  misc_RNA (1)...(19): siRNA sense strand
ggauaaugagggugcuuua

SEQ ID NO: 976489 - RNA, 19 nt, Homo sapiens
  misc_RNA (1)...(19): siRNA sense strand
agaaacccaggaacuauua

SEQ ID NO: 976490 - RNA, 19 nt, Homo sapiens
  misc_RNA (1)...(19): siRNA sense strand
gugaacagccaacuaaaug

SEQ ID NO: 976491 - RNA, 19 nt, Homo sapiens
  misc_RNA (1)...(19): siRNA sense strand
caacagaauccuagagaca

SEQ ID NO: 976492 - RNA, 19 nt, Homo sapiens
  misc_RNA (1)...(19): siRNA sense strand
gauuaaggauaccaacauc

SEQ ID NO: 976493 - RNA, 19 nt, Homo sapiens
  misc_RNA (1)...(19): siRNA sense strand
caacuuuagcucaacuuaa

SEQ ID NO: 976494 - RNA, 19 nt, Homo sapiens
  misc_RNA (1)...(19): siRNA sense strand
ccagauaggcaaugaacuu

SEQ ID NO: 976495 - RNA, 19 nt, Homo sapiens
  misc_RNA (1)...(19): siRNA sense strand
gcuugucgguuaaagaaga

SEQ ID NO: 976496 - RNA, 19 nt, Homo sapiens
  misc_RNA (1)...(19): siRNA sense strand
gauaaugagggugcuuuaa

SEQ ID NO: 976497 - RNA, 19 nt, Homo sapiens
  misc_RNA (1)...(19): siRNA sense strand
ggagaacugauguagaaga

SEQ ID NO: 976498 - RNA, 19 nt, Homo sapiens
  misc_RNA (1)...(19): siRNA sense strand
gaacagccaacuaaaugca

SEQ ID NO: 976499 - RNA, 19 nt, Homo sapiens
  misc_RNA (1)...(19): siRNA sense strand
ggacugcaaagacauugaa

SEQ ID NO: 976500 - RNA, 19 nt, Homo sapiens
  misc_RNA (1)...(19): siRNA sense strand
uggaggccuuguaggauua

SEQ ID NO: 976501 - RNA, 19 nt, Homo sapiens
  misc_RNA (1)...(19): siRNA sense strand
guagaagaccugacuccaa

SEQ ID NO: 976502 - RNA, 19 nt, Homo sapiens
  misc_RNA (1)...(19): siRNA sense strand
aggaggauguugaugauga

SEQ ID NO: 976503 - RNA, 19 nt, Homo sapiens
  misc_RNA (1)...(19): siRNA sense strand
cgaggaggauguugaugau

SEQ ID NO: 976504 - RNA, 19 nt, Homo sapiens
  misc_RNA (1)...(19): siRNA sense strand
gcuccuguguguucuucua

SEQ ID NO: 976505 - RNA, 19 nt, Homo sapiens
  misc_RNA (1)...(19): siRNA sense strand
caggaacuauuacuaaguc

SEQ ID NO: 976506 - RNA, 19 nt, Homo sapiens
  misc_RNA (1)...(19): siRNA sense strand
gaaccaggcuaugaaaaug

SEQ ID NO: 976507 - RNA, 19 nt, Homo sapiens
  misc_RNA (1)...(19): siRNA sense strand
gaugaacuaccaacagaau

SEQ ID NO: 976508 - RNA, 19 nt, Homo sapiens
  misc_RNA (1)...(19): siRNA sense strand
acagaucucuuagcaaaca

SEQ ID NO: 976509 - RNA, 19 nt, Homo sapiens
  misc_RNA (1)...(19): siRNA sense strand
ggaagguccugggucacuu

SEQ ID NO: 976510 - RNA, 19 nt, Homo sapiens
  misc_RNA (1)...(19): siRNA sense strand
ucaacuccaucaagcaaga

SEQ ID NO: 976511 - RNA, 19 nt, Homo sapiens
  misc_RNA (1)...(19): siRNA sense strand
caagaugaagagguuauaa

SEQ ID NO: 976512 - RNA, 19 nt, Homo sapiens
  misc_RNA (1)...(19): siRNA sense strand
gaugagagaggacccaaca

SEQ ID NO: 976513 - RNA, 19 nt, Homo sapiens
  misc_RNA (1)...(19): siRNA sense strand
auagagagaugaacuacca

SEQ ID NO: 976514 - RNA, 19 nt, Homo sapiens
  misc_RNA (1)...(19): siRNA sense strand
gagaacugauguagaagac

SEQ ID NO: 976515 - RNA, 19 nt, Homo sapiens
  misc_RNA (1)...(19): siRNA sense strand
ggaggaggaagaagaggaa

SEQ ID NO: 976516 - RNA, 19 nt, Homo sapiens
  misc_RNA (1)...(19): siRNA sense strand
ugaggaccaugaugaagga

SEQ ID NO: 976517 - RNA, 19 nt, Homo sapiens
  misc_RNA (1)...(19): siRNA sense strand
caaaaucccuuacccucuu

SEQ ID NO: 976518 - RNA, 19 nt, Homo sapiens
  misc_RNA (1)...(19): siRNA sense strand
uugaaaaucuggagucuuu

SEQ ID NO: 976519 - RNA, 19 nt, Homo sapiens
  misc_RNA (1)...(19): siRNA sense strand
cagaauuuguuaaccaagu

SEQ ID NO: 976520 - RNA, 19 nt, Homo sapiens
  misc_RNA (1)...(19): siRNA sense strand
gaagaugacaaggaugaug

SEQ ID NO: 976521 - RNA, 19 nt, Homo sapiens
  misc_RNA (1)...(19): siRNA sense strand
gauccagauuucauguaug

SEQ ID NO: 976522 - RNA, 19 nt, Homo sapiens
  misc_RNA (1)...(19): siRNA sense strand
ugagccagauucacacaga

SEQ ID NO: 976523 - RNA, 19 nt, Homo sapiens
  misc_RNA (1)...(19): siRNA sense strand
aggcaaagguaaagaucaa

SEQ ID NO: 976524 - RNA, 19 nt, Homo sapiens
  misc_RNA (1)...(19): siRNA sense strand
ggugaagaccaacauguau

SEQ ID NO: 976525 - RNA, 19 nt, Homo sapiens
  misc_RNA (1)...(19): siRNA sense strand
ugaacuggauagagagaug

SEQ ID NO: 976526 - RNA, 19 nt, Homo sapiens
  misc_RNA (1)...(19): siRNA sense strand
gaagaccugacuccaaauc

SEQ ID NO: 976527 - RNA, 19 nt, Homo sapiens
  misc_RNA (1)...(19): siRNA sense strand
ggcagaagcuugaaauccu

SEQ ID NO: 976528 - RNA, 19 nt, Homo sapiens
  misc_RNA (1)...(19): siRNA sense strand
gagaacaccuccagaaaua

SEQ ID NO: 976529 - RNA, 19 nt, Homo sapiens
  misc_RNA (1)...(19): siRNA sense strand
gagaaacccuauaaaugua

SEQ ID NO: 976530 - RNA, 19 nt, Homo sapiens
  misc_RNA (1)...(19): siRNA sense strand
aaacagagcugaaaucaag

SEQ ID NO: 976531 - RNA, 19 nt, Homo sapiens
  misc_RNA (1)...(19): siRNA sense strand
gaaagcauguugugcagaa

SEQ ID NO: 976532 - RNA, 19 nt, Homo sapiens
  misc_RNA (1)...(19): siRNA sense strand
acacgugacucaaguauuu

SEQ ID NO: 976533 - RNA, 19 nt, Homo sapiens
  misc_RNA (1)...(19): siRNA sense strand
caaguauaauccugucuua

SEQ ID NO: 976534 - RNA, 19 nt, Homo sapiens
  misc_RNA (1)...(19): siRNA sense strand
gagagaaacccuauaaaug

SEQ ID NO: 976535 - RNA, 19 nt, Homo sapiens
  misc_RNA (1)...(19): siRNA sense strand
gaagaagcccuacgaaugu

SEQ ID NO: 976536 - RNA, 19 nt, Homo sapiens
  misc_RNA (1)...(19): siRNA sense strand
gaacuuggcauucauagau

SEQ ID NO: 976537 - RNA, 19 nt, Homo sapiens
  misc_RNA (1)...(19): siRNA sense strand
ggagagaaacccuauaaau

SEQ ID NO: 976538 - RNA, 19 nt, Homo sapiens
  misc_RNA (1)...(19): siRNA sense strand
caagaaggauugucaaacu

SEQ ID NO: 976539 - RNA, 19 nt, Homo sapiens
  misc_RNA (1)...(19): siRNA sense strand
gagccacacuggagagaaa

SEQ ID NO: 976540 - RNA, 19 nt, Homo sapiens
  misc_RNA (1)...(19): siRNA sense strand
gagagaaaccguaugaaug

SEQ ID NO: 976541 - RNA, 19 nt, Homo sapiens
  misc_RNA (1)...(19): siRNA sense strand
acagggagauuccauaaga

SEQ ID NO: 976542 - RNA, 19 nt, Homo sapiens
  misc_RNA (1)...(19): siRNA sense strand
cuacgaaugugaagaaugu

SEQ ID NO: 976543 - RNA, 19 nt, Homo sapiens
  misc_RNA (1)...(19): siRNA sense strand
ggagagaaaccguaugaau

SEQ ID NO: 976544 - RNA, 19 nt, Homo sapiens
  misc_RNA (1)...(19): siRNA sense strand
gaaaugaggaaccacucua

SEQ ID NO: 976545 - RNA, 19 nt, Homo sapiens
  misc_RNA (1)...(19): siRNA sense strand
gaacacugugcaucauaua

SEQ ID NO: 976546 - RNA, 19 nt, Homo sapiens
  misc_RNA (1)...(19): siRNA sense strand
agauauuccuuacaccuua

SEQ ID NO: 976547 - RNA, 19 nt, Homo sapiens
  misc_RNA (1)...(19): siRNA sense strand
gauauuccuuacaccuuaa

SEQ ID NO: 976548 - RNA, 19 nt, Homo sapiens
  misc_RNA (1)...(19): siRNA sense strand
gagcugaaaucaagcacau

SEQ ID NO: 976549 - RNA, 19 nt, Homo sapiens
  misc_RNA (1)...(19): siRNA sense strand
agagaaacccuauaaaugu

SEQ ID NO: 976550 - RNA, 19 nt, Homo sapiens
  misc_RNA (1)...(19): siRNA sense strand
ugagaagcccugugaauga

SEQ ID NO: 976551 - RNA, 19 nt, Homo sapiens
  misc_RNA (1)...(19): siRNA sense strand
aauccugucuuaaacgaua

SEQ ID NO: 976552 - RNA, 19 nt, Homo sapiens
  misc_RNA (1)...(19): siRNA sense strand
agaagaagcccuacgaaug

SEQ ID NO: 976553 - RNA, 19 nt, Homo sapiens
  misc_RNA (1)...(19): siRNA sense strand
ucccagcacuccacauuaa

SEQ ID NO: 976554 - RNA, 19 nt, Homo sapiens
  misc_RNA (1)...(19): siRNA sense strand
ucauugcacuggagagaaa

SEQ ID NO: 976555 - RNA, 19 nt, Homo sapiens
  misc_RNA (1)...(19): siRNA sense strand
ggacccagcucagaggaau

SEQ ID NO: 976556 - RNA, 19 nt, Homo sapiens
  misc_RNA (1)...(19): siRNA sense strand
cauaagacaauguauccua

SEQ ID NO: 976557 - RNA, 19 nt, Homo sapiens
  misc_RNA (1)...(19): siRNA sense strand
gcacuccacauuaagagaa

SEQ ID NO: 976558 - RNA, 19 nt, Homo sapiens
  misc_RNA (1)...(19): siRNA sense strand
gaugagaagcccugugaau

SEQ ID NO: 976559 - RNA, 19 nt, Homo sapiens
  misc_RNA (1)...(19): siRNA sense strand
gcgagaacaccuccagaaa

SEQ ID NO: 976560 - RNA, 19 nt, Homo sapiens
  misc_RNA (1)...(19): siRNA sense strand
guauaauccugucuuaaac

SEQ ID NO: 976561 - RNA, 19 nt, Homo sapiens
  misc_RNA (1)...(19): siRNA sense strand
guaugaaugugggaaaugu

SEQ ID NO: 976562 - RNA, 19 nt, Homo sapiens
  misc_RNA (1)...(19): siRNA sense strand
ucacagggagauuccauaa

SEQ ID NO: 976563 - RNA, 19 nt, Homo sapiens
  misc_RNA (1)...(19): siRNA sense strand
agacguggcugugaacuuc

SEQ ID NO: 976564 - RNA, 19 nt, Homo sapiens
  misc_RNA (1)...(19): siRNA sense strand
ccuuacaccuuaauaaaca

SEQ ID NO: 976565 - RNA, 19 nt, Homo sapiens
  misc_RNA (1)...(19): siRNA sense strand
agagaaaccguaugaaugu

SEQ ID NO: 976566 - RNA, 19 nt, Homo sapiens
  misc_RNA (1)...(19): siRNA sense strand
agacaaacaagaaggauug

SEQ ID NO: 976567 - RNA, 19 nt, Homo sapiens
  misc_RNA (1)...(19): siRNA sense strand
ccagaaauaacucaauuca

SEQ ID NO: 976568 - RNA, 19 nt, Homo sapiens
  misc_RNA (1)...(19): siRNA sense strand
ugaaucuccuguuagcauu

SEQ ID NO: 976569 - RNA, 19 nt, Homo sapiens
  misc_RNA (1)...(19): siRNA sense strand
gaacaccuccagaaauaac

SEQ ID NO: 976570 - RNA, 19 nt, Homo sapiens
  misc_RNA (1)...(19): siRNA sense strand
cgagaacaccuccagaaau

SEQ ID NO: 976571 - RNA, 19 nt, Homo sapiens
  misc_RNA (1)...(19): siRNA sense strand
ggagauuccauaagacaau

SEQ ID NO: 976572 - RNA, 19 nt, Homo sapiens
  misc_RNA (1)...(19): siRNA sense strand
gagauuccauaagacaaug

SEQ ID NO: 976573 - RNA, 19 nt, Homo sapiens
  misc_RNA (1)...(19): siRNA sense strand
ccgcagagacaaacaagaa

SEQ ID NO: 976574 - RNA, 19 nt, Homo sapiens
  misc_RNA (1)...(19): siRNA sense strand
agaacacugugcaucauau

SEQ ID NO: 976575 - RNA, 19 nt, Homo sapiens
  misc_RNA (1)...(19): siRNA sense strand
gaagaaugugggaaaguca

SEQ ID NO: 976576 - RNA, 19 nt, Homo sapiens
  misc_RNA (1)...(19): siRNA sense strand
gcagaagaagcccuacgaa

SEQ ID NO: 976577 - RNA, 19 nt, Homo sapiens
  misc_RNA (1)...(19): siRNA sense strand
aggaaccacucuaaaccua

SEQ ID NO: 976578 - RNA, 19 nt, Homo sapiens
  misc_RNA (1)...(19): siRNA sense strand
gaaacccuauaaauguaag

SEQ ID NO: 976579 - RNA, 19 nt, Homo sapiens
  misc_RNA (1)...(19): siRNA sense strand
ugaagaaugugggaaaguc

SEQ ID NO: 976580 - RNA, 19 nt, Homo sapiens
  misc_RNA (1)...(19): siRNA sense strand
gagaaaccguaugaaugug

SEQ ID NO: 976581 - RNA, 19 nt, Homo sapiens
  misc_RNA (1)...(19): siRNA sense strand
cuccagaaauaacucaauu

SEQ ID NO: 976582 - RNA, 19 nt, Homo sapiens
  misc_RNA (1)...(19): siRNA sense strand
gagacaaacaagaaggauu

SEQ ID NO: 976583 - RNA, 19 nt, Homo sapiens
  misc_RNA (1)...(19): siRNA sense strand
ucuaggaacuuggcauuca

SEQ ID NO: 976584 - RNA, 19 nt, Homo sapiens
  misc_RNA (1)...(19): siRNA sense strand
cagaacacugugcaucaua

SEQ ID NO: 976585 - RNA, 19 nt, Homo sapiens
  misc_RNA (1)...(19): siRNA sense strand
uuaagacucacaaagauga

SEQ ID NO: 976586 - RNA, 19 nt, Homo sapiens
  misc_RNA (1)...(19): siRNA sense strand
aaacaacgaagacgaugga

SEQ ID NO: 976587 - RNA, 19 nt, Homo sapiens
  misc_RNA (1)...(19): siRNA sense strand
ggaaaauucuaggaacuug

SEQ ID NO: 976588 - RNA, 19 nt, Homo sapiens
  misc_RNA (1)...(19): siRNA sense strand
cgugaagacggaucccuua

SEQ ID NO: 976589 - RNA, 19 nt, Homo sapiens
  misc_RNA (1)...(19): siRNA sense strand
ucgcagacguggcugugaa

SEQ ID NO: 976590 - RNA, 19 nt, Homo sapiens
  misc_RNA (1)...(19): siRNA sense strand
uugugaagaucaugaaaug

SEQ ID NO: 976591 - RNA, 19 nt, Homo sapiens
  misc_RNA (1)...(19): siRNA sense strand
uaacacgugacucaaguau

SEQ ID NO: 976592 - RNA, 19 nt, Homo sapiens
  misc_RNA (1)...(19): siRNA sense strand
ccuaacacgugacucaagu

SEQ ID NO: 976593 - RNA, 19 nt, Homo sapiens
  misc_RNA (1)...(19): siRNA sense strand
agccggauauucuuccuaa

SEQ ID NO: 976594 - RNA, 19 nt, Homo sapiens
  misc_RNA (1)...(19): siRNA sense strand
cagaagaagcccuacgaau

SEQ ID NO: 976595 - RNA, 19 nt, Homo sapiens
  misc_RNA (1)...(19): siRNA sense strand
gagugugucucacgagcau

SEQ ID NO: 976596 - RNA, 19 nt, Homo sapiens
  misc_RNA (1)...(19): siRNA sense strand
gagagaaaacccauaaaug

SEQ ID NO: 976597 - RNA, 19 nt, Homo sapiens
  misc_RNA (1)...(19): siRNA sense strand
caaauuccgguucacacaa

SEQ ID NO: 976598 - RNA, 19 nt, Homo sapiens
  misc_RNA (1)...(19): siRNA sense strand
gcaccagcggaauccauuu

SEQ ID NO: 976599 - RNA, 19 nt, Homo sapiens
  misc_RNA (1)...(19): siRNA sense strand
aaaugaggaaccacucuaa

SEQ ID NO: 976600 - RNA, 19 nt, Homo sapiens
  misc_RNA (1)...(19): siRNA sense strand
gaaucuccuguuagcauuu

SEQ ID NO: 976601 - RNA, 19 nt, Homo sapiens
  misc_RNA (1)...(19): siRNA sense strand
ggaacuuggcauucauaga

SEQ ID NO: 976602 - RNA, 19 nt, Homo sapiens
  misc_RNA (1)...(19): siRNA sense strand
aagaugagaagcccuguga

SEQ ID NO: 976603 - RNA, 19 nt, Homo sapiens
  misc_RNA (1)...(19): siRNA sense strand
ggagaugccccaaaacaga

SEQ ID NO: 976604 - RNA, 19 nt, Homo sapiens
  misc_RNA (1)...(19): siRNA sense strand
cuggagagaaacccuauaa

SEQ ID NO: 976605 - RNA, 19 nt, Homo sapiens
  misc_RNA (1)...(19): siRNA sense strand
gcccuacgaaugugaagaa

SEQ ID NO: 976606 - RNA, 19 nt, Homo sapiens
  misc_RNA (1)...(19): siRNA sense strand
ggagagaaaacccauaaau

SEQ ID NO: 976607 - RNA, 19 nt, Homo sapiens
  misc_RNA (1)...(19): siRNA sense strand
aagaaggauugucaaacug

SEQ ID NO: 976608 - RNA, 19 nt, Homo sapiens
  misc_RNA (1)...(19): siRNA sense strand
ucagaacacugugcaucau

SEQ ID NO: 976609 - RNA, 19 nt, Homo sapiens
  misc_RNA (1)...(19): siRNA sense strand
aaaagaacauuuccugaag

SEQ ID NO: 976610 - RNA, 19 nt, Homo sapiens
  misc_RNA (1)...(19): siRNA sense strand
aagacaauguauccuaaca

SEQ ID NO: 976611 - RNA, 19 nt, Homo sapiens
  misc_RNA (1)...(19): siRNA sense strand
gcauuugugaagaucauga

SEQ ID NO: 976612 - RNA, 19 nt, Homo sapiens
  misc_RNA (1)...(19): siRNA sense strand
aauucacacuggagagaaa

SEQ ID NO: 976613 - RNA, 19 nt, Homo sapiens
  misc_RNA (1)...(19): siRNA sense strand
gccaacagagugugucuca

SEQ ID NO: 976614 - RNA, 19 nt, Homo sapiens
  misc_RNA (1)...(19): siRNA sense strand
uaagagaagacuggagaug

SEQ ID NO: 976615 - RNA, 19 nt, Homo sapiens
  misc_RNA (1)...(19): siRNA sense strand
ccaaauuccgguucacaca

SEQ ID NO: 976616 - RNA, 19 nt, Homo sapiens
  misc_RNA (1)...(19): siRNA sense strand
ccagcacuccacauuaaga

SEQ ID NO: 976617 - RNA, 19 nt, Homo sapiens
  misc_RNA (1)...(19): siRNA sense strand
guucccagcacuccacauu

SEQ ID NO: 976618 - RNA, 19 nt, Homo sapiens
  misc_RNA (1)...(19): siRNA sense strand
gacuggagaugccccaaaa

SEQ ID NO: 976619 - RNA, 19 nt, Homo sapiens
  misc_RNA (1)...(19): siRNA sense strand
cgggaguccucaaaauaua

SEQ ID NO: 976620 - RNA, 19 nt, Homo sapiens
  misc_RNA (1)...(19): siRNA sense strand
gaagcccuacgaaugugaa

SEQ ID NO: 976621 - RNA, 19 nt, Homo sapiens
  misc_RNA (1)...(19): siRNA sense strand
uugggcaacuccauguaaa

SEQ ID NO: 976622 - RNA, 19 nt, Homo sapiens
  misc_RNA (1)...(19): siRNA sense strand
ucaaguauaauccugucuu

SEQ ID NO: 976623 - RNA, 19 nt, Homo sapiens
  misc_RNA (1)...(19): siRNA sense strand
uaggaacuuggcauucaua

SEQ ID NO: 976624 - RNA, 19 nt, Homo sapiens
  misc_RNA (1)...(19): siRNA sense strand
uagcauuugugaagaucau

SEQ ID NO: 976625 - RNA, 19 nt, Homo sapiens
  misc_RNA (1)...(19): siRNA sense strand
aaauuccgguucacacaag

SEQ ID NO: 976626 - RNA, 19 nt, Homo sapiens
  misc_RNA (1)...(19): siRNA sense strand
cauuuaagaaagcauguug

SEQ ID NO: 976627 - RNA, 19 nt, Homo sapiens
  misc_RNA (1)...(19): siRNA sense strand
gagacgugaugcuggaaaa

SEQ ID NO: 976628 - RNA, 19 nt, Homo sapiens
  misc_RNA (1)...(19): siRNA sense strand
agacauagcugcauugaau

SEQ ID NO: 976629 - RNA, 19 nt, Homo sapiens
  misc_RNA (1)...(19): siRNA sense strand
gcacccgccugggaacuua

SEQ ID NO: 976630 - RNA, 19 nt, Homo sapiens
  misc_RNA (1)...(19): siRNA sense strand
ugaaagacauagcugcauu

SEQ ID NO: 976631 - RNA, 19 nt, Homo sapiens
  misc_RNA (1)...(19): siRNA sense strand
ccaaggaccucaugcucaa

SEQ ID NO: 976632 - RNA, 19 nt, Homo sapiens
  misc_RNA (1)...(19): siRNA sense strand
ggaggcagaaguaugauuu

SEQ ID NO: 976633 - RNA, 19 nt, Homo sapiens
  misc_RNA (1)...(19): siRNA sense strand
gaaagacauagcugcauug

SEQ ID NO: 976634 - RNA, 19 nt, Homo sapiens
  misc_RNA (1)...(19): siRNA sense strand
agaagggccugcacagcua

SEQ ID NO: 976635 - RNA, 19 nt, Homo sapiens
  misc_RNA (1)...(19): siRNA sense strand
ugaggaggcagaaguauga

SEQ ID NO: 976636 - RNA, 19 nt, Homo sapiens
  misc_RNA (1)...(19): siRNA sense strand
gcacugaggaggcagaagu

SEQ ID NO: 976637 - RNA, 19 nt, Homo sapiens
  misc_RNA (1)...(19): siRNA sense strand
cccagaagaugcucaagga

SEQ ID NO: 976638 - RNA, 19 nt, Homo sapiens
  misc_RNA (1)...(19): siRNA sense strand
gggaccgacuggccaugua

SEQ ID NO: 976639 - RNA, 19 nt, Homo sapiens
  misc_RNA (1)...(19): siRNA sense strand
ugugaggacuccaagagaa

SEQ ID NO: 976640 - RNA, 19 nt, Homo sapiens
  misc_RNA (1)...(19): siRNA sense strand
guacaaggcggaggugaug

SEQ ID NO: 976641 - RNA, 19 nt, Homo sapiens
  misc_RNA (1)...(19): siRNA sense strand
cggcuuggcccucugguuu

SEQ ID NO: 976642 - RNA, 19 nt, Homo sapiens
  misc_RNA (1)...(19): siRNA sense strand
caacuccagcuccgucuau

SEQ ID NO: 976643 - RNA, 19 nt, Homo sapiens
  misc_RNA (1)...(19): siRNA sense strand
ucauggcggucgucuggaa

SEQ ID NO: 976644 - RNA, 19 nt, Homo sapiens
  misc_RNA (1)...(19): siRNA sense strand
cuacagggccgaguacgaa

SEQ ID NO: 976645 - RNA, 19 nt, Homo sapiens
  misc_RNA (1)...(19): siRNA sense strand
ccugggaacuuacuacaac

SEQ ID NO: 976646 - RNA, 19 nt, Homo sapiens
  misc_RNA (1)...(19): siRNA sense strand
auuccacgcuggguuguua

SEQ ID NO: 976647 - RNA, 19 nt, Homo sapiens
  misc_RNA (1)...(19): siRNA sense strand
gcuuggcccucugguuuga

SEQ ID NO: 976648 - RNA, 19 nt, Homo sapiens
  misc_RNA (1)...(19): siRNA sense strand
guuguuaccgcuacagcua

SEQ ID NO: 976649 - RNA, 19 nt, Homo sapiens
  misc_RNA (1)...(19): siRNA sense strand
ggaccgacuggccauguau

SEQ ID NO: 976650 - RNA, 19 nt, Homo sapiens
  misc_RNA (1)...(19): siRNA sense strand
gguauuuccuaggguacaa

SEQ ID NO: 976651 - RNA, 19 nt, Homo sapiens
  misc_RNA (1)...(19): siRNA sense strand
gugaggacuccaagagaaa

SEQ ID NO: 976652 - RNA, 19 nt, Homo sapiens
  misc_RNA (1)...(19): siRNA sense strand
gcagugaaaccgccaaagc

SEQ ID NO: 976653 - RNA, 19 nt, Homo sapiens
  misc_RNA (1)...(19): siRNA sense strand
ucaccugcuucuucugguu

SEQ ID NO: 976654 - RNA, 19 nt, Homo sapiens
  misc_RNA (1)...(19): siRNA sense strand
gggugcuacucugguauuu

SEQ ID NO: 976655 - RNA, 19 nt, Homo sapiens
  misc_RNA (1)...(19): siRNA sense strand
ccagcuccgucuauuccuu

SEQ ID NO: 976656 - RNA, 19 nt, Homo sapiens
  misc_RNA (1)...(19): siRNA sense strand
gugcuacucugguauuucc

SEQ ID NO: 976657 - RNA, 19 nt, Homo sapiens
  misc_RNA (1)...(19): siRNA sense strand
cggaggugauggcgaggaa

SEQ ID NO: 976658 - RNA, 19 nt, Homo sapiens
  misc_RNA (1)...(19): siRNA sense strand
gacauagcugcauugaauu

SEQ ID NO: 976659 - RNA, 19 nt, Homo sapiens
  misc_RNA (1)...(19): siRNA sense strand
ggaagccagugugaaagac

SEQ ID NO: 976660 - RNA, 19 nt, Homo sapiens
  misc_RNA (1)...(19): siRNA sense strand
cgccaaagcccagaagaug

SEQ ID NO: 976661 - RNA, 19 nt, Homo sapiens
  misc_RNA (1)...(19): siRNA sense strand
gaagccagugugaaagaca

SEQ ID NO: 976662 - RNA, 19 nt, Homo sapiens
  misc_RNA (1)...(19): siRNA sense strand
ccucugguuugaugccuau

SEQ ID NO: 976663 - RNA, 19 nt, Homo sapiens
  misc_RNA (1)...(19): siRNA sense strand
gaggcagaaguaugauuug

SEQ ID NO: 976664 - RNA, 19 nt, Homo sapiens
  misc_RNA (1)...(19): siRNA sense strand
cagcuccgucuauuccuuu

SEQ ID NO: 976665 - RNA, 19 nt, Homo sapiens
  misc_RNA (1)...(19): siRNA sense strand
ccacuucucccaggaucuu

SEQ ID NO: 976666 - RNA, 19 nt, Homo sapiens
  misc_RNA (1)...(19): siRNA sense strand
aaagacauagcugcauuga

SEQ ID NO: 976667 - RNA, 19 nt, Homo sapiens
  misc_RNA (1)...(19): siRNA sense strand
gcuacucugguauuuccua

SEQ ID NO: 976668 - RNA, 19 nt, Homo sapiens
  misc_RNA (1)...(19): siRNA sense strand
uguacucaaucgccacuuc

SEQ ID NO: 976669 - RNA, 19 nt, Homo sapiens
  misc_RNA (1)...(19): siRNA sense strand
gguacaaggcggaggugau

SEQ ID NO: 976670 - RNA, 19 nt, Homo sapiens
  misc_RNA (1)...(19): siRNA sense strand
uuccaggccugugaaguga

SEQ ID NO: 976671 - RNA, 19 nt, Homo sapiens
  misc_RNA (1)...(19): siRNA sense strand
agacauagcugcauugaau

SEQ ID NO: 976672 - RNA, 19 nt, Homo sapiens
  misc_RNA (1)...(19): siRNA sense strand
gcacccgccugggaacuua

SEQ ID NO: 976673 - RNA, 19 nt, Homo sapiens
  misc_RNA (1)...(19): siRNA sense strand
ugaaagacauagcugcauu

SEQ ID NO: 976674 - RNA, 19 nt, Homo sapiens
  misc_RNA (1)...(19): siRNA sense strand
ccaaggaccucaugcucaa

SEQ ID NO: 976675 - RNA, 19 nt, Homo sapiens
  misc_RNA (1)...(19): siRNA sense strand
ggaggcagaaguaugauuu

SEQ ID NO: 976676 - RNA, 19 nt, Homo sapiens
  misc_RNA (1)...(19): siRNA sense strand
gaaagacauagcugcauug

SEQ ID NO: 976677 - RNA, 19 nt, Homo sapiens
  misc_RNA (1)...(19): siRNA sense strand
agaagggccugcacagcua

SEQ ID NO: 976678 - RNA, 19 nt, Homo sapiens
  misc_RNA (1)...(19): siRNA sense strand
ugaggaggcagaaguauga

SEQ ID NO: 976679 - RNA, 19 nt, Homo sapiens
  misc_RNA (1)...(19): siRNA sense strand
gcacugaggaggcagaagu

SEQ ID NO: 976680 - RNA, 19 nt, Homo sapiens
  misc_RNA (1)...(19): siRNA sense strand
cccagaagaugcucaagga

SEQ ID NO: 976681 - RNA, 19 nt, Homo sapiens
  misc_RNA (1)...(19): siRNA sense strand
gggaccgacuggccaugua

SEQ ID NO: 976682 - RNA, 19 nt, Homo sapiens
  misc_RNA (1)...(19): siRNA sense strand
ugugaggacuccaagagaa

SEQ ID NO: 976683 - RNA, 19 nt, Homo sapiens
  misc_RNA (1)...(19): siRNA sense strand
guacaaggcggaggugaug

SEQ ID NO: 976684 - RNA, 19 nt, Homo sapiens
  misc_RNA (1)...(19): siRNA sense strand
cggcuuggcccucugguuu

SEQ ID NO: 976685 - RNA, 19 nt, Homo sapiens
  misc_RNA (1)...(19): siRNA sense strand
caacuccagcuccgucuau

SEQ ID NO: 976686 - RNA, 19 nt, Homo sapiens
  misc_RNA (1)...(19): siRNA sense strand
ucauggcggucgucuggaa

SEQ ID NO: 976687 - RNA, 19 nt, Homo sapiens
  misc_RNA (1)...(19): siRNA sense strand
cuacagggccgaguacgaa

SEQ ID NO: 976688 - RNA, 19 nt, Homo sapiens
  misc_RNA (1)...(19): siRNA sense strand
ccugggaacuuacuacaac

SEQ ID NO: 976689 - RNA, 19 nt, Homo sapiens
  misc_RNA (1)...(19): siRNA sense strand
auuccacgcuggguuguua

SEQ ID NO: 976690 - RNA, 19 nt, Homo sapiens
  misc_RNA (1)...(19): siRNA sense strand
gcuuggcccucugguuuga

SEQ ID NO: 976691 - RNA, 19 nt, Homo sapiens
  misc_RNA (1)...(19): siRNA sense strand
guuguuaccgcuacagcua

SEQ ID NO: 976692 - RNA, 19 nt, Homo sapiens
  misc_RNA (1)...(19): siRNA sense strand
ggaccgacuggccauguau

SEQ ID NO: 976693 - RNA, 19 nt, Homo sapiens
  misc_RNA (1)...(19): siRNA sense strand
gguauuuccuaggguacaa

SEQ ID NO: 976694 - RNA, 19 nt, Homo sapiens
  misc_RNA (1)...(19): siRNA sense strand
gugaggacuccaagagaaa

SEQ ID NO: 976695 - RNA, 19 nt, Homo sapiens
  misc_RNA (1)...(19): siRNA sense strand
gcagugaaaccgccaaagc

SEQ ID NO: 976696 - RNA, 19 nt, Homo sapiens
  misc_RNA (1)...(19): siRNA sense strand
ucaccugcuucuucugguu

SEQ ID NO: 976697 - RNA, 19 nt, Homo sapiens
  misc_RNA (1)...(19): siRNA sense strand
gggugcuacucugguauuu

SEQ ID NO: 976698 - RNA, 19 nt, Homo sapiens
  misc_RNA (1)...(19): siRNA sense strand
ccagcuccgucuauuccuu

SEQ ID NO: 976699 - RNA, 19 nt, Homo sapiens
  misc_RNA (1)...(19): siRNA sense strand
gugcuacucugguauuucc

SEQ ID NO: 976700 - RNA, 19 nt, Homo sapiens
  misc_RNA (1)...(19): siRNA sense strand
cggaggugauggcgaggaa

SEQ ID NO: 976701 - RNA, 19 nt, Homo sapiens
  misc_RNA (1)...(19): siRNA sense strand
gacauagcugcauugaauu

SEQ ID NO: 976702 - RNA, 19 nt, Homo sapiens
  misc_RNA (1)...(19): siRNA sense strand
ggaagccagugugaaagac

SEQ ID NO: 976703 - RNA, 19 nt, Homo sapiens
  misc_RNA (1)...(19): siRNA sense strand
cgccaaagcccagaagaug

SEQ ID NO: 976704 - RNA, 19 nt, Homo sapiens
  misc_RNA (1)...(19): siRNA sense strand
gaagccagugugaaagaca

SEQ ID NO: 976705 - RNA, 19 nt, Homo sapiens
  misc_RNA (1)...(19): siRNA sense strand
ccucugguuugaugccuau

SEQ ID NO: 976706 - RNA, 19 nt, Homo sapiens
  misc_RNA (1)...(19): siRNA sense strand
gaggcagaaguaugauuug

SEQ ID NO: 976707 - RNA, 19 nt, Homo sapiens
  misc_RNA (1)...(19): siRNA sense strand
cagcuccgucuauuccuuu

SEQ ID NO: 976708 - RNA, 19 nt, Homo sapiens
  misc_RNA (1)...(19): siRNA sense strand
ccacuucucccaggaucuu

SEQ ID NO: 976709 - RNA, 19 nt, Homo sapiens
  misc_RNA (1)...(19): siRNA sense strand
aaagacauagcugcauuga

SEQ ID NO: 976710 - RNA, 19 nt, Homo sapiens
  misc_RNA (1)...(19): siRNA sense strand
gcuacucugguauuuccua

SEQ ID NO: 976711 - RNA, 19 nt, Homo sapiens
  misc_RNA (1)...(19): siRNA sense strand
uguacucaaucgccacuuc

SEQ ID NO: 976712 - RNA, 19 nt, Homo sapiens
  misc_RNA (1)...(19): siRNA sense strand
gguacaaggcggaggugau

SEQ ID NO: 976713 - RNA, 19 nt, Homo sapiens
  misc_RNA (1)...(19): siRNA sense strand
uuccaggccugugaaguga

SEQ ID NO: 976714 - RNA, 19 nt, Homo sapiens
  misc_RNA (1)...(19): siRNA sense strand
aaagggacauuaugcuuau

SEQ ID NO: 976715 - RNA, 19 nt, Homo sapiens
  misc_RNA (1)...(19): siRNA sense strand
gacauuaugcuuaugauug

SEQ ID NO: 976716 - RNA, 19 nt, Homo sapiens
  misc_RNA (1)...(19): siRNA sense strand
gaggagaaaccaaggugua

SEQ ID NO: 976717 - RNA, 19 nt, Homo sapiens
  misc_RNA (1)...(19): siRNA sense strand
gaaaccaagguguauguug

SEQ ID NO: 976718 - RNA, 19 nt, Homo sapiens
  misc_RNA (1)...(19): siRNA sense strand
caaaggagaguuagaaagg

SEQ ID NO: 976719 - RNA, 19 nt, Homo sapiens
  misc_RNA (1)...(19): siRNA sense strand
ggaauucgaagauccuaga

SEQ ID NO: 976720 - RNA, 19 nt, Homo sapiens
  misc_RNA (1)...(19): siRNA sense strand
gagaaaccaagguguaugu

SEQ ID NO: 976721 - RNA, 19 nt, Homo sapiens
  misc_RNA (1)...(19): siRNA sense strand
gauuugccuuuguggaauu

SEQ ID NO: 976722 - RNA, 19 nt, Homo sapiens
  misc_RNA (1)...(19): siRNA sense strand
ggacauuaugcuuaugauu

SEQ ID NO: 976723 - RNA, 19 nt, Homo sapiens
  misc_RNA (1)...(19): siRNA sense strand
gcaaaggagaguuagaaag

SEQ ID NO: 976724 - RNA, 19 nt, Homo sapiens
  misc_RNA (1)...(19): siRNA sense strand
cgacgucccuuugauccaa

SEQ ID NO: 976725 - RNA, 19 nt, Homo sapiens
  misc_RNA (1)...(19): siRNA sense strand
caguuauuaugguccuuua

SEQ ID NO: 976726 - RNA, 19 nt, Homo sapiens
  misc_RNA (1)...(19): siRNA sense strand
uacgaggacuggauggaaa

SEQ ID NO: 976727 - RNA, 19 nt, Homo sapiens
  misc_RNA (1)...(19): siRNA sense strand
gcgaagaagaagcagguuu

SEQ ID NO: 976728 - RNA, 19 nt, Homo sapiens
  misc_RNA (1)...(19): siRNA sense strand
cgaagaagaagcagguuuc

SEQ ID NO: 976729 - RNA, 19 nt, Homo sapiens
  misc_RNA (1)...(19): siRNA sense strand
gagugaggguugaacuauc

SEQ ID NO: 976730 - RNA, 19 nt, Homo sapiens
  misc_RNA (1)...(19): siRNA sense strand
cuguauggauugcgagaaa

SEQ ID NO: 976731 - RNA, 19 nt, Homo sapiens
  misc_RNA (1)...(19): siRNA sense strand
gaaaagggacauuaugcuu

SEQ ID NO: 976732 - RNA, 19 nt, Homo sapiens
  misc_RNA (1)...(19): siRNA sense strand
caagguguauguugguaac

SEQ ID NO: 976733 - RNA, 19 nt, Homo sapiens
  misc_RNA (1)...(19): siRNA sense strand
aagcagguuucuucguuug

SEQ ID NO: 976734 - RNA, 19 nt, Homo sapiens
  misc_RNA (1)...(19): siRNA sense strand
guacgaggacuggauggaa

SEQ ID NO: 976735 - RNA, 19 nt, Homo sapiens
  misc_RNA (1)...(19): siRNA sense strand
ggcaaaggagaguuagaaa

SEQ ID NO: 976736 - RNA, 19 nt, Homo sapiens
  misc_RNA (1)...(19): siRNA sense strand
ggagaaaccaagguguaug

SEQ ID NO: 976737 - RNA, 19 nt, Homo sapiens
  misc_RNA (1)...(19): siRNA sense strand
ccuccaagauuugccuuug

SEQ ID NO: 976738 - RNA, 19 nt, Homo sapiens
  misc_RNA (1)...(19): siRNA sense strand
ugcgagaaauccuccaaga

SEQ ID NO: 976739 - RNA, 19 nt, Homo sapiens
  misc_RNA (1)...(19): siRNA sense strand
gauggaaaggugauuugug

SEQ ID NO: 976740 - RNA, 19 nt, Homo sapiens
  misc_RNA (1)...(19): siRNA sense strand
gcgagaaauccuccaagau

SEQ ID NO: 976741 - RNA, 19 nt, Homo sapiens
  misc_RNA (1)...(19): siRNA sense strand
gcagguuucuucguuugag

SEQ ID NO: 976742 - RNA, 19 nt, Homo sapiens
  misc_RNA (1)...(19): siRNA sense strand
aaaagggacauuaugcuua

SEQ ID NO: 976743 - RNA, 19 nt, Homo sapiens
  misc_RNA (1)...(19): siRNA sense strand
cgaagauccuagagaugca

SEQ ID NO: 976744 - RNA, 19 nt, Homo sapiens
  misc_RNA (1)...(19): siRNA sense strand
ccucggagaucacguuuug

SEQ ID NO: 976745 - RNA, 19 nt, Homo sapiens
  misc_RNA (1)...(19): siRNA sense strand
aagauuugccuuuguggaa

SEQ ID NO: 976746 - RNA, 19 nt, Homo sapiens
  misc_RNA (1)...(19): siRNA sense strand
cgagugaggguugaacuau

SEQ ID NO: 976747 - RNA, 19 nt, Homo sapiens
  misc_RNA (1)...(19): siRNA sense strand
uccuagagaugcagaagau

SEQ ID NO: 976748 - RNA, 19 nt, Homo sapiens
  misc_RNA (1)...(19): siRNA sense strand
auucgaagauccuagagau

SEQ ID NO: 976749 - RNA, 19 nt, Homo sapiens
  misc_RNA (1)...(19): siRNA sense strand
uuaagaacuguauggauug

SEQ ID NO: 976750 - RNA, 19 nt, Homo sapiens
  misc_RNA (1)...(19): siRNA sense strand
gaacuggcgcuggcaaagg

SEQ ID NO: 976751 - RNA, 19 nt, Homo sapiens
  misc_RNA (1)...(19): siRNA sense strand
uggcaaaggagaguuagaa

SEQ ID NO: 976752 - RNA, 19 nt, Homo sapiens
  misc_RNA (1)...(19): siRNA sense strand
gggacauuaugcuuaugau

SEQ ID NO: 976753 - RNA, 19 nt, Homo sapiens
  misc_RNA (1)...(19): siRNA sense strand
uccaagauuugccuuugug

SEQ ID NO: 976754 - RNA, 19 nt, Homo sapiens
  misc_RNA (1)...(19): siRNA sense strand
guuauuaugguccuuuaag

SEQ ID NO: 976755 - RNA, 19 nt, Homo sapiens
  misc_RNA (1)...(19): siRNA sense strand
uaagaacuguauggauugc

SEQ ID NO: 976756 - RNA, 19 nt, Homo sapiens
  misc_RNA (1)...(19): siRNA sense strand
ggaacuggcgcuggcaaag

SEQ ID NO: 976757 - RNA, 19 nt, Homo sapiens
  misc_RNA (1)...(19): siRNA sense strand
gggaacuggcgcuggcaaa

SEQ ID NO: 976758 - RNA, 19 nt, Homo sapiens
  misc_RNA (1)...(19): siRNA sense strand
auuuguggcucccgaguga

SEQ ID NO: 976759 - RNA, 19 nt, Homo sapiens
  misc_RNA (1)...(19): siRNA sense strand
ggauggaaaggugauuugu

SEQ ID NO: 976760 - RNA, 19 nt, Homo sapiens
  misc_RNA (1)...(19): siRNA sense strand
uaugguccuuuaagaacug

SEQ ID NO: 976761 - RNA, 19 nt, Homo sapiens
  misc_RNA (1)...(19): siRNA sense strand
aacuggcgcuggcaaagga

SEQ ID NO: 976762 - RNA, 19 nt, Homo sapiens
  misc_RNA (1)...(19): siRNA sense strand
ucaccaagcucuccaagua

SEQ ID NO: 976763 - RNA, 19 nt, Homo sapiens
  misc_RNA (1)...(19): siRNA sense strand
ggagagagaagauuaagaa

SEQ ID NO: 976764 - RNA, 19 nt, Homo sapiens
  misc_RNA (1)...(19): siRNA sense strand
agaaaucucucacgucaaa

SEQ ID NO: 976765 - RNA, 19 nt, Homo sapiens
  misc_RNA (1)...(19): siRNA sense strand
gagaggagagagaagauua

SEQ ID NO: 976766 - RNA, 19 nt, Homo sapiens
  misc_RNA (1)...(19): siRNA sense strand
gaaaguggauagccucaag

SEQ ID NO: 976767 - RNA, 19 nt, Homo sapiens
  misc_RNA (1)...(19): siRNA sense strand
ggaagacagugccgaggaa

SEQ ID NO: 976768 - RNA, 19 nt, Homo sapiens
  misc_RNA (1)...(19): siRNA sense strand
ggagaaagccaugcagaaa

SEQ ID NO: 976769 - RNA, 19 nt, Homo sapiens
  misc_RNA (1)...(19): siRNA sense strand
gugagcagaugccaaauga

SEQ ID NO: 976770 - RNA, 19 nt, Homo sapiens
  misc_RNA (1)...(19): siRNA sense strand
ugaagggcauccagaauga

SEQ ID NO: 976771 - RNA, 19 nt, Homo sapiens
  misc_RNA (1)...(19): siRNA sense strand
gcagugagcagaugccaaa

SEQ ID NO: 976772 - RNA, 19 nt, Homo sapiens
  misc_RNA (1)...(19): siRNA sense strand
cgacuugacuauuguggaa

SEQ ID NO: 976773 - RNA, 19 nt, Homo sapiens
  misc_RNA (1)...(19): siRNA sense strand
gauccagccugaagaaagu

SEQ ID NO: 976774 - RNA, 19 nt, Homo sapiens
  misc_RNA (1)...(19): siRNA sense strand
ucaaagagcgcauggauag

SEQ ID NO: 976775 - RNA, 19 nt, Homo sapiens
  misc_RNA (1)...(19): siRNA sense strand
aggaggagcuuccggauga

SEQ ID NO: 976776 - RNA, 19 nt, Homo sapiens
  misc_RNA (1)...(19): siRNA sense strand
gcaagcugcuggagaaguc

SEQ ID NO: 976777 - RNA, 19 nt, Homo sapiens
  misc_RNA (1)...(19): siRNA sense strand
ugaagcggcuggagaacaa

SEQ ID NO: 976778 - RNA, 19 nt, Homo sapiens
  misc_RNA (1)...(19): siRNA sense strand
ggacagcaacaucgacuug

SEQ ID NO: 976779 - RNA, 19 nt, Homo sapiens
  misc_RNA (1)...(19): siRNA sense strand
caacaucgacuugacuauu

SEQ ID NO: 976780 - RNA, 19 nt, Homo sapiens
  misc_RNA (1)...(19): siRNA sense strand
gcacagaagguacgcuaug

SEQ ID NO: 976781 - RNA, 19 nt, Homo sapiens
  misc_RNA (1)...(19): siRNA sense strand
aaacaaaucccuggaggaa

SEQ ID NO: 976782 - RNA, 19 nt, Homo sapiens
  misc_RNA (1)...(19): siRNA sense strand
ugacuauuguggaagauga

SEQ ID NO: 976783 - RNA, 19 nt, Homo sapiens
  misc_RNA (1)...(19): siRNA sense strand
gaagaaaguagggcagaga

SEQ ID NO: 976784 - RNA, 19 nt, Homo sapiens
  misc_RNA (1)...(19): siRNA sense strand
ggaacaggcacagaaggua

SEQ ID NO: 976785 - RNA, 19 nt, Homo sapiens
  misc_RNA (1)...(19): siRNA sense strand
gagcagcgacagaucaguu

SEQ ID NO: 976786 - RNA, 19 nt, Homo sapiens
  misc_RNA (1)...(19): siRNA sense strand
ucaaagugcucaucuucca

SEQ ID NO: 976787 - RNA, 19 nt, Homo sapiens
  misc_RNA (1)...(19): siRNA sense strand
agaaugaccucaccaagcu

SEQ ID NO: 976788 - RNA, 19 nt, Homo sapiens
  misc_RNA (1)...(19): siRNA sense strand
cacagaagguacgcuauga

SEQ ID NO: 976789 - RNA, 19 nt, Homo sapiens
  misc_RNA (1)...(19): siRNA sense strand
acaaaucccuggaggaaac

SEQ ID NO: 976790 - RNA, 19 nt, Homo sapiens
  misc_RNA (1)...(19): siRNA sense strand
gaugccaaaugaccaggaa

SEQ ID NO: 976791 - RNA, 19 nt, Homo sapiens
  misc_RNA (1)...(19): siRNA sense strand
guggauagccucaagaaag

SEQ ID NO: 976792 - RNA, 19 nt, Homo sapiens
  misc_RNA (1)...(19): siRNA sense strand
aacaucgacuugacuauug

SEQ ID NO: 976793 - RNA, 19 nt, Homo sapiens
  misc_RNA (1)...(19): siRNA sense strand
gggagaaagccaugcagaa

SEQ ID NO: 976794 - RNA, 19 nt, Homo sapiens
  misc_RNA (1)...(19): siRNA sense strand
ggagaaccagcacaagaug

SEQ ID NO: 976795 - RNA, 19 nt, Homo sapiens
  misc_RNA (1)...(19): siRNA sense strand
cagaggaggcugcugagaa

SEQ ID NO: 976796 - RNA, 19 nt, Homo sapiens
  misc_RNA (1)...(19): siRNA sense strand
ggucaaagagcgcauggau

SEQ ID NO: 976797 - RNA, 19 nt, Homo sapiens
  misc_RNA (1)...(19): siRNA sense strand
uggacaagcuggugaacau

SEQ ID NO: 976798 - RNA, 19 nt, Homo sapiens
  misc_RNA (1)...(19): siRNA sense strand
gagagagaagauuaagaaa

SEQ ID NO: 976799 - RNA, 19 nt, Homo sapiens
  misc_RNA (1)...(19): siRNA sense strand
gugaagggcauccagaaug

SEQ ID NO: 976800 - RNA, 19 nt, Homo sapiens
  misc_RNA (1)...(19): siRNA sense strand
agaggaggcugcugagaag

SEQ ID NO: 976801 - RNA, 19 nt, Homo sapiens
  misc_RNA (1)...(19): siRNA sense strand
ggaccucuccucagaugau

SEQ ID NO: 976802 - RNA, 19 nt, Homo sapiens
  misc_RNA (1)...(19): siRNA sense strand
guagagaggagagagaaga

SEQ ID NO: 976803 - RNA, 19 nt, Homo sapiens
  misc_RNA (1)...(19): siRNA sense strand
cacgucaaaucaccagaaa

SEQ ID NO: 976804 - RNA, 19 nt, Homo sapiens
  misc_RNA (1)...(19): siRNA sense strand
guggaccucuccucagaug

SEQ ID NO: 976805 - RNA, 19 nt, Homo sapiens
  misc_RNA (1)...(19): siRNA sense strand
gaaaguagggcagagaaaa

SEQ ID NO: 976806 - RNA, 19 nt, Homo sapiens
  misc_RNA (1)...(19): siRNA sense strand
acgcaaccauuucaaagug

SEQ ID NO: 976807 - RNA, 19 nt, Homo sapiens
  misc_RNA (1)...(19): siRNA sense strand
gaagacagugccgaggaaa

SEQ ID NO: 976808 - RNA, 19 nt, Homo sapiens
  misc_RNA (1)...(19): siRNA sense strand
caggagaaccagcacaaga

SEQ ID NO: 976809 - RNA, 19 nt, Homo sapiens
  misc_RNA (1)...(19): siRNA sense strand
cuccucagaugaugauuug

SEQ ID NO: 976810 - RNA, 19 nt, Homo sapiens
  misc_RNA (1)...(19): siRNA sense strand
gaaaguccgagagggagaa

SEQ ID NO: 976811 - RNA, 19 nt, Homo sapiens
  misc_RNA (1)...(19): siRNA sense strand
ggaggagcuuccggaugaa

SEQ ID NO: 976812 - RNA, 19 nt, Homo sapiens
  misc_RNA (1)...(19): siRNA sense strand
aaagauccagccugaagaa

SEQ ID NO: 976813 - RNA, 19 nt, Homo sapiens
  misc_RNA (1)...(19): siRNA sense strand
ccguggaccucuccucaga

SEQ ID NO: 976814 - RNA, 19 nt, Homo sapiens
  misc_RNA (1)...(19): siRNA sense strand
gucaaagagcgcauggaua

SEQ ID NO: 976815 - RNA, 19 nt, Homo sapiens
  misc_RNA (1)...(19): siRNA sense strand
gagaaagccaugcagaaaa

SEQ ID NO: 976816 - RNA, 19 nt, Homo sapiens
  misc_RNA (1)...(19): siRNA sense strand
ugaacaagcuggggacaaa

SEQ ID NO: 976817 - RNA, 19 nt, Homo sapiens
  misc_RNA (1)...(19): siRNA sense strand
gcaacacggugagcaagcu

SEQ ID NO: 976818 - RNA, 19 nt, Homo sapiens
  misc_RNA (1)...(19): siRNA sense strand
ucagaagaccugccuagca

SEQ ID NO: 976819 - RNA, 19 nt, Homo sapiens
  misc_RNA (1)...(19): siRNA sense strand
gaaaagguggaagaaagua

SEQ ID NO: 976820 - RNA, 19 nt, Homo sapiens
  misc_RNA (1)...(19): siRNA sense strand
agaaagccaugcagaaaau

SEQ ID NO: 976821 - RNA, 19 nt, Homo sapiens
  misc_RNA (1)...(19): siRNA sense strand
cgacgcaaccauuucaaag

SEQ ID NO: 976822 - RNA, 19 nt, Homo sapiens
  misc_RNA (1)...(19): siRNA sense strand
ggagucaguggcccuggaa

SEQ ID NO: 976823 - RNA, 19 nt, Homo sapiens
  misc_RNA (1)...(19): siRNA sense strand
aaaaugagaccaagucaga

SEQ ID NO: 976824 - RNA, 19 nt, Homo sapiens
  misc_RNA (1)...(19): siRNA sense strand
gaucccugccagcguguuu

SEQ ID NO: 976825 - RNA, 19 nt, Homo sapiens
  misc_RNA (1)...(19): siRNA sense strand
gcaacaucgacuugacuau

SEQ ID NO: 976826 - RNA, 19 nt, Homo sapiens
  misc_RNA (1)...(19): siRNA sense strand
uagacgcugugcaggagaa

SEQ ID NO: 976827 - RNA, 19 nt, Homo sapiens
  misc_RNA (1)...(19): siRNA sense strand
ggacaagcuggugaacaug

SEQ ID NO: 976828 - RNA, 19 nt, Homo sapiens
  misc_RNA (1)...(19): siRNA sense strand
agaggagagagaagauuaa

SEQ ID NO: 976829 - RNA, 19 nt, Homo sapiens
  misc_RNA (1)...(19): siRNA sense strand
gacgcaaccauuucaaagu

SEQ ID NO: 976830 - RNA, 19 nt, Homo sapiens
  misc_RNA (1)...(19): siRNA sense strand
ucacgucaaaucaccagaa

SEQ ID NO: 976831 - RNA, 19 nt, Homo sapiens
  misc_RNA (1)...(19): siRNA sense strand
uggauagccucaagaaagc

SEQ ID NO: 976832 - RNA, 19 nt, Homo sapiens
  misc_RNA (1)...(19): siRNA sense strand
gcagcgacagaucaguuug

SEQ ID NO: 976833 - RNA, 19 nt, Homo sapiens
  misc_RNA (1)...(19): siRNA sense strand
gaccucuccucagaugaug

SEQ ID NO: 976834 - RNA, 19 nt, Homo sapiens
  misc_RNA (1)...(19): siRNA sense strand
gaggagcuuccggaugaaa

SEQ ID NO: 976835 - RNA, 19 nt, Homo sapiens
  misc_RNA (1)...(19): siRNA sense strand
gcagugcgcacaggugaag

SEQ ID NO: 976836 - RNA, 19 nt, Homo sapiens
  misc_RNA (1)...(19): siRNA sense strand
agaaaguagggcagagaaa

SEQ ID NO: 976837 - RNA, 19 nt, Homo sapiens
  misc_RNA (1)...(19): siRNA sense strand
gaggaggcccuggaagaca

SEQ ID NO: 976838 - RNA, 19 nt, Homo sapiens
  misc_RNA (1)...(19): siRNA sense strand
ggaaaagguggaagaaagu

SEQ ID NO: 976839 - RNA, 19 nt, Homo sapiens
  misc_RNA (1)...(19): siRNA sense strand
gacagcaacaucgacuuga

SEQ ID NO: 976840 - RNA, 19 nt, Homo sapiens
  misc_RNA (1)...(19): siRNA sense strand
gaggagagagaagauuaag

SEQ ID NO: 976841 - RNA, 19 nt, Homo sapiens
  misc_RNA (1)...(19): siRNA sense strand
gaagaagggugugggcaaa

SEQ ID NO: 976842 - RNA, 19 nt, Homo sapiens
  misc_RNA (1)...(19): siRNA sense strand
gggaaucacuacuuugcua

SEQ ID NO: 976843 - RNA, 19 nt, Homo sapiens
  misc_RNA (1)...(19): siRNA sense strand
ucucacaacugcuauguuu

SEQ ID NO: 976844 - RNA, 19 nt, Homo sapiens
  misc_RNA (1)...(19): siRNA sense strand
caaguuaccucagacagaa

SEQ ID NO: 976845 - RNA, 19 nt, Homo sapiens
  misc_RNA (1)...(19): siRNA sense strand
gaaggccucuccuguguuc

SEQ ID NO: 976846 - RNA, 19 nt, Homo sapiens
  misc_RNA (1)...(19): siRNA sense strand
gcauggagucguacaauuu

SEQ ID NO: 976847 - RNA, 19 nt, Homo sapiens
  misc_RNA (1)...(19): siRNA sense strand
gggaauggcucuacuucau

SEQ ID NO: 976848 - RNA, 19 nt, Homo sapiens
  misc_RNA (1)...(19): siRNA sense strand
uaaauuuccucucccgauu

SEQ ID NO: 976849 - RNA, 19 nt, Homo sapiens
  misc_RNA (1)...(19): siRNA sense strand
gaaguucagcgcccucuuu

SEQ ID NO: 976850 - RNA, 19 nt, Homo sapiens
  misc_RNA (1)...(19): siRNA sense strand
uaacaggaaucgaucaagu

SEQ ID NO: 976851 - RNA, 19 nt, Homo sapiens
  misc_RNA (1)...(19): siRNA sense strand
ggaaagaggaauccggaaa

SEQ ID NO: 976852 - RNA, 19 nt, Homo sapiens
  misc_RNA (1)...(19): siRNA sense strand
uaauuggccucucugguuu

SEQ ID NO: 976853 - RNA, 19 nt, Homo sapiens
  misc_RNA (1)...(19): siRNA sense strand
ggaaaggccucaggaagag

SEQ ID NO: 976854 - RNA, 19 nt, Homo sapiens
  misc_RNA (1)...(19): siRNA sense strand
ccauuuggcaugaacauua

SEQ ID NO: 976855 - RNA, 19 nt, Homo sapiens
  misc_RNA (1)...(19): siRNA sense strand
gcacccagcuuucuucacu

SEQ ID NO: 976856 - RNA, 19 nt, Homo sapiens
  misc_RNA (1)...(19): siRNA sense strand
gaaagaggaauccggaaau

SEQ ID NO: 976857 - RNA, 19 nt, Homo sapiens
  misc_RNA (1)...(19): siRNA sense strand
caauacgccagaaauguua

SEQ ID NO: 976858 - RNA, 19 nt, Homo sapiens
  misc_RNA (1)...(19): siRNA sense strand
ggaaugaucacagcuguug

SEQ ID NO: 976859 - RNA, 19 nt, Homo sapiens
  misc_RNA (1)...(19): siRNA sense strand
caccacagauguuucaguu

SEQ ID NO: 976860 - RNA, 19 nt, Homo sapiens
  misc_RNA (1)...(19): siRNA sense strand
gcggugagcaggacaauga

SEQ ID NO: 976861 - RNA, 19 nt, Homo sapiens
  misc_RNA (1)...(19): siRNA sense strand
ggaaauguaacaccacaga

SEQ ID NO: 976862 - RNA, 19 nt, Homo sapiens
  misc_RNA (1)...(19): siRNA sense strand
gccauccugucuuuagaua

SEQ ID NO: 976863 - RNA, 19 nt, Homo sapiens
  misc_RNA (1)...(19): siRNA sense strand
gaauaccacauccaaauca

SEQ ID NO: 976864 - RNA, 19 nt, Homo sapiens
  misc_RNA (1)...(19): siRNA sense strand
cacaaaguauggcuucuau

SEQ ID NO: 976865 - RNA, 19 nt, Homo sapiens
  misc_RNA (1)...(19): siRNA sense strand
gcacaaaguauggcuucua

SEQ ID NO: 976866 - RNA, 19 nt, Homo sapiens
  misc_RNA (1)...(19): siRNA sense strand
caacagaaggcaaauacga

SEQ ID NO: 976867 - RNA, 19 nt, Homo sapiens
  misc_RNA (1)...(19): siRNA sense strand
aggaaucgaucaaguguug

SEQ ID NO: 976868 - RNA, 19 nt, Homo sapiens
  misc_RNA (1)...(19): siRNA sense strand
gaacguccuucucacaacu

SEQ ID NO: 976869 - RNA, 19 nt, Homo sapiens
  misc_RNA (1)...(19): siRNA sense strand
guaagaauaccacauccaa

SEQ ID NO: 976870 - RNA, 19 nt, Homo sapiens
  misc_RNA (1)...(19): siRNA sense strand
gagccauccugucuuuaga

SEQ ID NO: 976871 - RNA, 19 nt, Homo sapiens
  misc_RNA (1)...(19): siRNA sense strand
gcaaggcgugcuucuggua

SEQ ID NO: 976872 - RNA, 19 nt, Homo sapiens
  misc_RNA (1)...(19): siRNA sense strand
ggcauggagucguacaauu

SEQ ID NO: 976873 - RNA, 19 nt, Homo sapiens
  misc_RNA (1)...(19): siRNA sense strand
ucacagggauaacaggaau

SEQ ID NO: 976874 - RNA, 19 nt, Homo sapiens
  misc_RNA (1)...(19): siRNA sense strand
gacaugauuuauaccauag

SEQ ID NO: 976875 - RNA, 19 nt, Homo sapiens
  misc_RNA (1)...(19): siRNA sense strand
gggcaaagggaacaaauca

SEQ ID NO: 976876 - RNA, 19 nt, Homo sapiens
  misc_RNA (1)...(19): siRNA sense strand
cuaauuggccucucugguu

SEQ ID NO: 976877 - RNA, 19 nt, Homo sapiens
  misc_RNA (1)...(19): siRNA sense strand
aaagaggaauccggaaaug

SEQ ID NO: 976878 - RNA, 19 nt, Homo sapiens
  misc_RNA (1)...(19): siRNA sense strand
ccugguaccuguguauauu

SEQ ID NO: 976879 - RNA, 19 nt, Homo sapiens
  misc_RNA (1)...(19): siRNA sense strand
gcuggaaguucaacagaag

SEQ ID NO: 976880 - RNA, 19 nt, Homo sapiens
  misc_RNA (1)...(19): siRNA sense strand
gcaauaaacaggggaauuu

SEQ ID NO: 976881 - RNA, 19 nt, Homo sapiens
  misc_RNA (1)...(19): siRNA sense strand
aauuuccucucccgauuua

SEQ ID NO: 976882 - RNA, 19 nt, Homo sapiens
  misc_RNA (1)...(19): siRNA sense strand
ucaauacgccagaaauguu

SEQ ID NO: 976883 - RNA, 19 nt, Homo sapiens
  misc_RNA (1)...(19): siRNA sense strand
gcaaagggaacaaaucacu

SEQ ID NO: 976884 - RNA, 19 nt, Homo sapiens
  misc_RNA (1)...(19): siRNA sense strand
ggccagugcuuuugcauuu

SEQ ID NO: 976885 - RNA, 19 nt, Homo sapiens
  misc_RNA (1)...(19): siRNA sense strand
uggaaggccucuccugugu

SEQ ID NO: 976886 - RNA, 19 nt, Homo sapiens
  misc_RNA (1)...(19): siRNA sense strand
gugugggaaucacuacuuu

SEQ ID NO: 976887 - RNA, 19 nt, Homo sapiens
  misc_RNA (1)...(19): siRNA sense strand
gaaccucuuugugcuugga

SEQ ID NO: 976888 - RNA, 19 nt, Homo sapiens
  misc_RNA (1)...(19): siRNA sense strand
caaaguauggcuucuaugc

SEQ ID NO: 976889 - RNA, 19 nt, Homo sapiens
  misc_RNA (1)...(19): siRNA sense strand
gauggacugcguacaaguu

SEQ ID NO: 976890 - RNA, 19 nt, Homo sapiens
  misc_RNA (1)...(19): siRNA sense strand
gcugacaauauuccuagua

SEQ ID NO: 976891 - RNA, 19 nt, Homo sapiens
  misc_RNA (1)...(19): siRNA sense strand
cauuuggcaugaacauuau

SEQ ID NO: 976892 - RNA, 19 nt, Homo sapiens
  misc_RNA (1)...(19): siRNA sense strand
gauaacaggaaucgaucaa

SEQ ID NO: 976893 - RNA, 19 nt, Homo sapiens
  misc_RNA (1)...(19): siRNA sense strand
aagaauaccacauccaaau

SEQ ID NO: 976894 - RNA, 19 nt, Homo sapiens
  misc_RNA (1)...(19): siRNA sense strand
uaagguuccauacccauuu

SEQ ID NO: 976895 - RNA, 19 nt, Homo sapiens
  misc_RNA (1)...(19): siRNA sense strand
uauccuggcugcucugcuu

SEQ ID NO: 976896 - RNA, 19 nt, Homo sapiens
  misc_RNA (1)...(19): siRNA sense strand
cugacaauauuccuaguau

SEQ ID NO: 976897 - RNA, 19 nt, Homo sapiens
  misc_RNA (1)...(19): siRNA sense strand
caaguuacagcuguucaaa

SEQ ID NO: 976898 - RNA, 19 nt, Homo sapiens
  misc_RNA (1)...(19): siRNA sense strand
uggaaaggccucaggaaga

SEQ ID NO: 976899 - RNA, 19 nt, Homo sapiens
  misc_RNA (1)...(19): siRNA sense strand
cuacagcacuaccugacau

SEQ ID NO: 976900 - RNA, 19 nt, Homo sapiens
  misc_RNA (1)...(19): siRNA sense strand
aauggaggcuggaaguuca

SEQ ID NO: 976901 - RNA, 19 nt, Homo sapiens
  misc_RNA (1)...(19): siRNA sense strand
ccaaguuaccucagacaga

SEQ ID NO: 976902 - RNA, 19 nt, Homo sapiens
  misc_RNA (1)...(19): siRNA sense strand
ucucuaaccugcaguucau

SEQ ID NO: 976903 - RNA, 19 nt, Homo sapiens
  misc_RNA (1)...(19): siRNA sense strand
ccagcuuucuucacucuuc

SEQ ID NO: 976904 - RNA, 19 nt, Homo sapiens
  misc_RNA (1)...(19): siRNA sense strand
uaagaauaccacauccaaa

SEQ ID NO: 976905 - RNA, 19 nt, Homo sapiens
  misc_RNA (1)...(19): siRNA sense strand
cuugauggcauauuuggua

SEQ ID NO: 976906 - RNA, 19 nt, Homo sapiens
  misc_RNA (1)...(19): siRNA sense strand
ggcuggaaguucaacagaa

SEQ ID NO: 976907 - RNA, 19 nt, Homo sapiens
  misc_RNA (1)...(19): siRNA sense strand
ggaauggcucuacuucauc

SEQ ID NO: 976908 - RNA, 19 nt, Homo sapiens
  misc_RNA (1)...(19): siRNA sense strand
gaaaacggcauugcagaaa

SEQ ID NO: 976909 - RNA, 19 nt, Homo sapiens
  misc_RNA (1)...(19): siRNA sense strand
cagaugcuucagcuacuua

SEQ ID NO: 976910 - RNA, 19 nt, Homo sapiens
  misc_RNA (1)...(19): siRNA sense strand
ggcucguccuuccaaguua

SEQ ID NO: 976911 - RNA, 19 nt, Homo sapiens
  misc_RNA (1)...(19): siRNA sense strand
gggcucguccuuccaaguu

SEQ ID NO: 976912 - RNA, 19 nt, Homo sapiens
  misc_RNA (1)...(19): siRNA sense strand
aaccugcaguucauugauu

SEQ ID NO: 976913 - RNA, 19 nt, Homo sapiens
  misc_RNA (1)...(19): siRNA sense strand
gauggcauauuugguacug

SEQ ID NO: 976914 - RNA, 19 nt, Homo sapiens
  misc_RNA (1)...(19): siRNA sense strand
gaaauguaacaccacagau

SEQ ID NO: 976915 - RNA, 19 nt, Homo sapiens
  misc_RNA (1)...(19): siRNA sense strand
gauggguauugguaagaau

SEQ ID NO: 976916 - RNA, 19 nt, Homo sapiens
  misc_RNA (1)...(19): siRNA sense strand
gaggaauccggaaauggaa

SEQ ID NO: 976917 - RNA, 19 nt, Homo sapiens
  misc_RNA (1)...(19): siRNA sense strand
ggacugcguacaaguuaca

SEQ ID NO: 976918 - RNA, 19 nt, Homo sapiens
  misc_RNA (1)...(19): siRNA sense strand
ggaauccggaaauggaaga

SEQ ID NO: 976919 - RNA, 19 nt, Homo sapiens
  misc_RNA (1)...(19): siRNA sense strand
guaccuguguauauuucug

SEQ ID NO: 976920 - RNA, 19 nt, Homo sapiens
  misc_RNA (1)...(19): siRNA sense strand
cauccuggccauccuggua

SEQ ID NO: 976921 - RNA, 19 nt, Homo sapiens
  misc_RNA (1)...(19): siRNA sense strand
aaauguaacaccacagaug

SEQ ID NO: 976922 - RNA, 19 nt, Homo sapiens
  misc_RNA (1)...(19): siRNA sense strand
cccaggcacuccagaggaa

SEQ ID NO: 976923 - RNA, 19 nt, Homo sapiens
  misc_RNA (1)...(19): siRNA sense strand
cauggagucguacaauuug

SEQ ID NO: 976924 - RNA, 19 nt, Homo sapiens
  misc_RNA (1)...(19): siRNA sense strand
agaggaauccggaaaugga

SEQ ID NO: 976925 - RNA, 19 nt, Homo sapiens
  misc_RNA (1)...(19): siRNA sense strand
ucauggcgaucuacacuac

SEQ ID NO: 976926 - RNA, 19 nt, Homo sapiens
  misc_RNA (1)...(19): siRNA sense strand
gacaacagccggaguucag

SEQ ID NO: 976927 - RNA, 19 nt, Homo sapiens
  misc_RNA (1)...(19): siRNA sense strand
ggaaaacggcauugcagaa

SEQ ID NO: 976928 - RNA, 19 nt, Homo sapiens
  misc_RNA (1)...(19): siRNA sense strand
ggaaggccucuccuguguu

SEQ ID NO: 976929 - RNA, 19 nt, Homo sapiens
  misc_RNA (1)...(19): siRNA sense strand
cuacuuugcuacagacaac

SEQ ID NO: 976930 - RNA, 19 nt, Homo sapiens
  misc_RNA (1)...(19): siRNA sense strand
gucguacaauuugccauuu

SEQ ID NO: 976931 - RNA, 19 nt, Homo sapiens
  misc_RNA (1)...(19): siRNA sense strand
cauauuugguacugggaau

SEQ ID NO: 976932 - RNA, 19 nt, Homo sapiens
  misc_RNA (1)...(19): siRNA sense strand
ccagcaucaucgagucuau

SEQ ID NO: 976933 - RNA, 19 nt, Homo sapiens
  misc_RNA (1)...(19): siRNA sense strand
uugccaugcugacaauauu

SEQ ID NO: 976934 - RNA, 19 nt, Homo sapiens
  misc_RNA (1)...(19): siRNA sense strand
caauggaggcuggaaguuc

SEQ ID NO: 976935 - RNA, 19 nt, Homo sapiens
  misc_RNA (1)...(19): siRNA sense strand
cuacagacaacguuuggau

SEQ ID NO: 976936 - RNA, 19 nt, Homo sapiens
  misc_RNA (1)...(19): siRNA sense strand
uguucuugauggcauauuu

SEQ ID NO: 976937 - RNA, 19 nt, Homo sapiens
  misc_RNA (1)...(19): siRNA sense strand
uuacagcuguucaaaaugu

SEQ ID NO: 976938 - RNA, 19 nt, Homo sapiens
  misc_RNA (1)...(19): siRNA sense strand
gcugagacccuggauagca

SEQ ID NO: 976939 - RNA, 19 nt, Homo sapiens
  misc_RNA (1)...(19): siRNA sense strand
gcaggacaaugaggacacu

SEQ ID NO: 976940 - RNA, 19 nt, Homo sapiens
  misc_RNA (1)...(19): siRNA sense strand
uggcugcucugcuucaucu

SEQ ID NO: 976941 - RNA, 19 nt, Homo sapiens
  misc_RNA (1)...(19): siRNA sense strand
ugaaagagcucaacaagaa

SEQ ID NO: 976942 - RNA, 19 nt, Homo sapiens
  misc_RNA (1)...(19): siRNA sense strand
ggaaaggacugccagaaaa

SEQ ID NO: 976943 - RNA, 19 nt, Homo sapiens
  misc_RNA (1)...(19): siRNA sense strand
gcaccugcguggaugauga

SEQ ID NO: 976944 - RNA, 19 nt, Homo sapiens
  misc_RNA (1)...(19): siRNA sense strand
gggaaaggacugccagaaa

SEQ ID NO: 976945 - RNA, 19 nt, Homo sapiens
  misc_RNA (1)...(19): siRNA sense strand
gaaagagcucaacaagaaa

SEQ ID NO: 976946 - RNA, 19 nt, Homo sapiens
  misc_RNA (1)...(19): siRNA sense strand
ggucucaccugugucaaga

SEQ ID NO: 976947 - RNA, 19 nt, Homo sapiens
  misc_RNA (1)...(19): siRNA sense strand
gguaucgucuuccucaaca

SEQ ID NO: 976948 - RNA, 19 nt, Homo sapiens
  misc_RNA (1)...(19): siRNA sense strand
ggaccuggccgucaacauc

SEQ ID NO: 976949 - RNA, 19 nt, Homo sapiens
  misc_RNA (1)...(19): siRNA sense strand
agaaccugcugcuucagua

SEQ ID NO: 976950 - RNA, 19 nt, Homo sapiens
  misc_RNA (1)...(19): siRNA sense strand
gaagaagaaccugcugcuu

SEQ ID NO: 976951 - RNA, 19 nt, Homo sapiens
  misc_RNA (1)...(19): siRNA sense strand
cugcgaggaugacaauguu

SEQ ID NO: 976952 - RNA, 19 nt, Homo sapiens
  misc_RNA (1)...(19): siRNA sense strand
gcgaggaugacaauguuug

SEQ ID NO: 976953 - RNA, 19 nt, Homo sapiens
  misc_RNA (1)...(19): siRNA sense strand
caugaaagagcucaacaag

SEQ ID NO: 976954 - RNA, 19 nt, Homo sapiens
  misc_RNA (1)...(19): siRNA sense strand
ucacggacucuguggagaa

SEQ ID NO: 976955 - RNA, 19 nt, Homo sapiens
  misc_RNA (1)...(19): siRNA sense strand
gaagguguccaugaaagag

SEQ ID NO: 976956 - RNA, 19 nt, Homo sapiens
  misc_RNA (1)...(19): siRNA sense strand
ugaagguguccaugaaaga

SEQ ID NO: 976957 - RNA, 19 nt, Homo sapiens
  misc_RNA (1)...(19): siRNA sense strand
gaccuggccgucaacauca

SEQ ID NO: 976958 - RNA, 19 nt, Homo sapiens
  misc_RNA (1)...(19): siRNA sense strand
cugaagguguccaugaaag

SEQ ID NO: 976959 - RNA, 19 nt, Homo sapiens
  misc_RNA (1)...(19): siRNA sense strand
uguccaaccugcgcuacaa

SEQ ID NO: 976960 - RNA, 19 nt, Homo sapiens
  misc_RNA (1)...(19): siRNA sense strand
gcacuguggguaucgucuu

SEQ ID NO: 976961 - RNA, 19 nt, Homo sapiens
  misc_RNA (1)...(19): siRNA sense strand
ccaugaaagagcucaacaa

SEQ ID NO: 976962 - RNA, 19 nt, Homo sapiens
  misc_RNA (1)...(19): siRNA sense strand
uccugaagguguccaugaa

SEQ ID NO: 976963 - RNA, 19 nt, Homo sapiens
  misc_RNA (1)...(19): siRNA sense strand
gaaccugcugcuucaguac

SEQ ID NO: 976964 - RNA, 19 nt, Homo sapiens
  misc_RNA (1)...(19): siRNA sense strand
ggagaaggacuacgucuuu

SEQ ID NO: 976965 - RNA, 19 nt, Homo sapiens
  misc_RNA (1)...(19): siRNA sense strand
gugaggaguuuauugauga

SEQ ID NO: 976966 - RNA, 19 nt, Homo sapiens
  misc_RNA (1)...(19): siRNA sense strand
caccugagaucaugaaaga

SEQ ID NO: 976967 - RNA, 19 nt, Homo sapiens
  misc_RNA (1)...(19): siRNA sense strand
gugcggagcuuccugaaau

SEQ ID NO: 976968 - RNA, 19 nt, Homo sapiens
  misc_RNA (1)...(19): siRNA sense strand
gagaggcacuuuggaaaug

SEQ ID NO: 976969 - RNA, 19 nt, Homo sapiens
  misc_RNA (1)...(19): siRNA sense strand
gcagcggccuggauuauuc

SEQ ID NO: 976970 - RNA, 19 nt, Homo sapiens
  misc_RNA (1)...(19): siRNA sense strand
cauaaacggaagcgaauua

SEQ ID NO: 976971 - RNA, 19 nt, Homo sapiens
  misc_RNA (1)...(19): siRNA sense strand
ugaaaucagugcuggaaga

SEQ ID NO: 976972 - RNA, 19 nt, Homo sapiens
  misc_RNA (1)...(19): siRNA sense strand
ccaaugagaugcuguucug

SEQ ID NO: 976973 - RNA, 19 nt, Homo sapiens
  misc_RNA (1)...(19): siRNA sense strand
ggauuugaaugaucauguu

SEQ ID NO: 976974 - RNA, 19 nt, Homo sapiens
  misc_RNA (1)...(19): siRNA sense strand
ggaagaacaagaaaggaaa

SEQ ID NO: 976975 - RNA, 19 nt, Homo sapiens
  misc_RNA (1)...(19): siRNA sense strand
gaaggccuuuauccaguuu

SEQ ID NO: 976976 - RNA, 19 nt, Homo sapiens
  misc_RNA (1)...(19): siRNA sense strand
ggaguuuauugaugaauuc

SEQ ID NO: 976977 - RNA, 19 nt, Homo sapiens
  misc_RNA (1)...(19): siRNA sense strand
gcagugccgugguguuaga

SEQ ID NO: 976978 - RNA, 19 nt, Homo sapiens
  misc_RNA (1)...(19): siRNA sense strand
gagaaggacuacgucuuug

SEQ ID NO: 976979 - RNA, 19 nt, Homo sapiens
  misc_RNA (1)...(19): siRNA sense strand
ggauaacaaugcccugaca

SEQ ID NO: 976980 - RNA, 19 nt, Homo sapiens
  misc_RNA (1)...(19): siRNA sense strand
gaugagaggcacuuuggaa

SEQ ID NO: 976981 - RNA, 19 nt, Homo sapiens
  misc_RNA (1)...(19): siRNA sense strand
ggacaaaauuuaugaaguc

SEQ ID NO: 976982 - RNA, 19 nt, Homo sapiens
  misc_RNA (1)...(19): siRNA sense strand
cccagugguuugcaaauaa

SEQ ID NO: 976983 - RNA, 19 nt, Homo sapiens
  misc_RNA (1)...(19): siRNA sense strand
uggaagacgugaacgagaa

SEQ ID NO: 976984 - RNA, 19 nt, Homo sapiens
  misc_RNA (1)...(19): siRNA sense strand
ccacagaccuucagauccu

SEQ ID NO: 976985 - RNA, 19 nt, Homo sapiens
  misc_RNA (1)...(19): siRNA sense strand
ccagucagaccucggauaa

SEQ ID NO: 976986 - RNA, 19 nt, Homo sapiens
  misc_RNA (1)...(19): siRNA sense strand
ugaaagcaacugucgguuu

SEQ ID NO: 976987 - RNA, 19 nt, Homo sapiens
  misc_RNA (1)...(19): siRNA sense strand
ggagagcacucggauugca

SEQ ID NO: 976988 - RNA, 19 nt, Homo sapiens
  misc_RNA (1)...(19): siRNA sense strand
uuacgagguugaaaggauu

SEQ ID NO: 976989 - RNA, 19 nt, Homo sapiens
  misc_RNA (1)...(19): siRNA sense strand
gacaagaggaagaacaaga

SEQ ID NO: 976990 - RNA, 19 nt, Homo sapiens
  misc_RNA (1)...(19): siRNA sense strand
gaaaaugggaguaucuuau

SEQ ID NO: 976991 - RNA, 19 nt, Homo sapiens
  misc_RNA (1)...(19): siRNA sense strand
ucagcuaccugcaggacaa

SEQ ID NO: 976992 - RNA, 19 nt, Homo sapiens
  misc_RNA (1)...(19): siRNA sense strand
ugaaggccuuuauccaguu

SEQ ID NO: 976993 - RNA, 19 nt, Homo sapiens
  misc_RNA (1)...(19): siRNA sense strand
ggacaagaggaucaaguca

SEQ ID NO: 976994 - RNA, 19 nt, Homo sapiens
  misc_RNA (1)...(19): siRNA sense strand
gcuuggauuugaaugauca

SEQ ID NO: 976995 - RNA, 19 nt, Homo sapiens
  misc_RNA (1)...(19): siRNA sense strand
caagaggaagaacaagaaa

SEQ ID NO: 976996 - RNA, 19 nt, Homo sapiens
  misc_RNA (1)...(19): siRNA sense strand
ccagugguuugcaaauaau

SEQ ID NO: 976997 - RNA, 19 nt, Homo sapiens
  misc_RNA (1)...(19): siRNA sense strand
ggaaaaugggaguaucuua

SEQ ID NO: 976998 - RNA, 19 nt, Homo sapiens
  misc_RNA (1)...(19): siRNA sense strand
aaggagagcacucggauug

SEQ ID NO: 976999 - RNA, 19 nt, Homo sapiens
  misc_RNA (1)...(19): siRNA sense strand
caaauaaugccccugaaaa

SEQ ID NO: 977000 - RNA, 19 nt, Homo sapiens
  misc_RNA (1)...(19): siRNA sense strand
agucagaccucggauaaca

SEQ ID NO: 977001 - RNA, 19 nt, Homo sapiens
  misc_RNA (1)...(19): siRNA sense strand
uaucuuauccgauggaaag

SEQ ID NO: 977002 - RNA, 19 nt, Homo sapiens
  misc_RNA (1)...(19): siRNA sense strand
acaagaggaagaacaagaa

SEQ ID NO: 977003 - RNA, 19 nt, Homo sapiens
  misc_RNA (1)...(19): siRNA sense strand
ugugaggaguuuauugaug

SEQ ID NO: 977004 - RNA, 19 nt, Homo sapiens
  misc_RNA (1)...(19): siRNA sense strand
gcacugugaggaguuuauu

SEQ ID NO: 977005 - RNA, 19 nt, Homo sapiens
  misc_RNA (1)...(19): siRNA sense strand
gauacaguguccgccagaa

SEQ ID NO: 977006 - RNA, 19 nt, Homo sapiens
  misc_RNA (1)...(19): siRNA sense strand
ucaauggguugcacauguc

SEQ ID NO: 977007 - RNA, 19 nt, Homo sapiens
  misc_RNA (1)...(19): siRNA sense strand
ucucagaacgggauggaaa

SEQ ID NO: 977008 - RNA, 19 nt, Homo sapiens
  misc_RNA (1)...(19): siRNA sense strand
cgagaaggaaugccucaug

SEQ ID NO: 977009 - RNA, 19 nt, Homo sapiens
  misc_RNA (1)...(19): siRNA sense strand
caucagggacuuugugaag

SEQ ID NO: 977010 - RNA, 19 nt, Homo sapiens
  misc_RNA (1)...(19): siRNA sense strand
gguugcacauguccaagga

SEQ ID NO: 977011 - RNA, 19 nt, Homo sapiens
  misc_RNA (1)...(19): siRNA sense strand
gcaaauaaugccccugaaa

SEQ ID NO: 977012 - RNA, 19 nt, Homo sapiens
  misc_RNA (1)...(19): siRNA sense strand
gcccgucgguugagaaacu

SEQ ID NO: 977013 - RNA, 19 nt, Homo sapiens
  misc_RNA (1)...(19): siRNA sense strand
gggugaaugugacguggau

SEQ ID NO: 977014 - RNA, 19 nt, Homo sapiens
  misc_RNA (1)...(19): siRNA sense strand
gaacaagaaaggaaaaugg

SEQ ID NO: 977015 - RNA, 19 nt, Homo sapiens
  misc_RNA (1)...(19): siRNA sense strand
ccugacaccugagaucaug

SEQ ID NO: 977016 - RNA, 19 nt, Homo sapiens
  misc_RNA (1)...(19): siRNA sense strand
ugaggaguuuauugaugaa

SEQ ID NO: 977017 - RNA, 19 nt, Homo sapiens
  misc_RNA (1)...(19): siRNA sense strand
aggaaugccucaugcucaa

SEQ ID NO: 977018 - RNA, 19 nt, Homo sapiens
  misc_RNA (1)...(19): siRNA sense strand
acgcuacacuggcggagaa

SEQ ID NO: 977019 - RNA, 19 nt, Homo sapiens
  misc_RNA (1)...(19): siRNA sense strand
ucagggaagcaguccagua

SEQ ID NO: 977020 - RNA, 19 nt, Homo sapiens
  misc_RNA (1)...(19): siRNA sense strand
gccuuuauccaguuuaaga

SEQ ID NO: 977021 - RNA, 19 nt, Homo sapiens
  misc_RNA (1)...(19): siRNA sense strand
cagaagccaucagggacuu

SEQ ID NO: 977022 - RNA, 19 nt, Homo sapiens
  misc_RNA (1)...(19): siRNA sense strand
cauguuggagagcaagaua

SEQ ID NO: 977023 - RNA, 19 nt, Homo sapiens
  misc_RNA (1)...(19): siRNA sense strand
gaaggaugagaggcacuuu

SEQ ID NO: 977024 - RNA, 19 nt, Homo sapiens
  misc_RNA (1)...(19): siRNA sense strand
gggaagcaguccaguaccu

SEQ ID NO: 977025 - RNA, 19 nt, Homo sapiens
  misc_RNA (1)...(19): siRNA sense strand
caagauaugggugaaugug

SEQ ID NO: 977026 - RNA, 19 nt, Homo sapiens
  misc_RNA (1)...(19): siRNA sense strand
gcaagauaugggugaaugu

SEQ ID NO: 977027 - RNA, 19 nt, Homo sapiens
  misc_RNA (1)...(19): siRNA sense strand
ugagaggcacuuuggaaau

SEQ ID NO: 977028 - RNA, 19 nt, Homo sapiens
  misc_RNA (1)...(19): siRNA sense strand
gaaggacuacgucuuugac

SEQ ID NO: 977029 - RNA, 19 nt, Homo sapiens
  misc_RNA (1)...(19): siRNA sense strand
gaagaacaagaaaggaaaa

SEQ ID NO: 977030 - RNA, 19 nt, Homo sapiens
  misc_RNA (1)...(19): siRNA sense strand
cugcagugccgugguguua

SEQ ID NO: 977031 - RNA, 19 nt, Homo sapiens
  misc_RNA (1)...(19): siRNA sense strand
guagacaagaggaagaaca

SEQ ID NO: 977032 - RNA, 19 nt, Homo sapiens
  misc_RNA (1)...(19): siRNA sense strand
gaagccaucagggacuuug

SEQ ID NO: 977033 - RNA, 19 nt, Homo sapiens
  misc_RNA (1)...(19): siRNA sense strand
uagacaagaggaagaacaa

SEQ ID NO: 977034 - RNA, 19 nt, Homo sapiens
  misc_RNA (1)...(19): siRNA sense strand
uucaauggguugcacaugu

SEQ ID NO: 977035 - RNA, 19 nt, Homo sapiens
  misc_RNA (1)...(19): siRNA sense strand
acaguccagugaagaggaa

SEQ ID NO: 977036 - RNA, 19 nt, Homo sapiens
  misc_RNA (1)...(19): siRNA sense strand
gaaaggaaaaugggaguau

SEQ ID NO: 977037 - RNA, 19 nt, Homo sapiens
  misc_RNA (1)...(19): siRNA sense strand
agaaggacuacgucuuuga

SEQ ID NO: 977038 - RNA, 19 nt, Homo sapiens
  misc_RNA (1)...(19): siRNA sense strand
gagguugaaaggauuguag

SEQ ID NO: 977039 - RNA, 19 nt, Homo sapiens
  misc_RNA (1)...(19): siRNA sense strand
ccuggauuauuccuaccua

SEQ ID NO: 977040 - RNA, 19 nt, Homo sapiens
  misc_RNA (1)...(19): siRNA sense strand
uuuacgagguugaaaggau

SEQ ID NO: 977041 - RNA, 19 nt, Homo sapiens
  misc_RNA (1)...(19): siRNA sense strand
gaccuucagauccuggaaa

SEQ ID NO: 977042 - RNA, 19 nt, Homo sapiens
  misc_RNA (1)...(19): siRNA sense strand
gguguuagaggaguccaaa

SEQ ID NO: 977043 - RNA, 19 nt, Homo sapiens
  misc_RNA (1)...(19): siRNA sense strand
ccugagaucaugaaagaag

SEQ ID NO: 977044 - RNA, 19 nt, Homo sapiens
  misc_RNA (1)...(19): siRNA sense strand
aagaaggguucacgcacau

SEQ ID NO: 977045 - RNA, 19 nt, Homo sapiens
  misc_RNA (1)...(19): siRNA sense strand
cagggaagcaguccaguac

SEQ ID NO: 977046 - RNA, 19 nt, Homo sapiens
  misc_RNA (1)...(19): siRNA sense strand
gauuugaaugaucauguug

SEQ ID NO: 977047 - RNA, 19 nt, Homo sapiens
  misc_RNA (1)...(19): siRNA sense strand
aggaagaacaagaaaggaa

SEQ ID NO: 977048 - RNA, 19 nt, Homo sapiens
  misc_RNA (1)...(19): siRNA sense strand
gacaaaaggcucagauaca

SEQ ID NO: 977049 - RNA, 19 nt, Homo sapiens
  misc_RNA (1)...(19): siRNA sense strand
agcaagauaugggugaaug

SEQ ID NO: 977050 - RNA, 19 nt, Homo sapiens
  misc_RNA (1)...(19): siRNA sense strand
aggccuuuauccaguuuaa

SEQ ID NO: 977051 - RNA, 19 nt, Homo sapiens
  misc_RNA (1)...(19): siRNA sense strand
ugacaccugagaucaugaa

SEQ ID NO: 977052 - RNA, 19 nt, Homo sapiens
  misc_RNA (1)...(19): siRNA sense strand
ucagaccucggauaacaau

SEQ ID NO: 977053 - RNA, 19 nt, Homo sapiens
  misc_RNA (1)...(19): siRNA sense strand
aggacuacgucuuugacaa

SEQ ID NO: 977054 - RNA, 19 nt, Homo sapiens
  misc_RNA (1)...(19): siRNA sense strand
gaggaagaacaagaaagga

SEQ ID NO: 977055 - RNA, 19 nt, Homo sapiens
  misc_RNA (1)...(19): siRNA sense strand
uggcuuggauuugaaugau

SEQ ID NO: 977056 - RNA, 19 nt, Homo sapiens
  misc_RNA (1)...(19): siRNA sense strand
ggaagacgugaacgagaag

SEQ ID NO: 977057 - RNA, 19 nt, Homo sapiens
  misc_RNA (1)...(19): siRNA sense strand
gaaaucagugcuggaagac

SEQ ID NO: 977058 - RNA, 19 nt, Homo sapiens
  misc_RNA (1)...(19): siRNA sense strand
uguuagaggaguccaaaug

SEQ ID NO: 977059 - RNA, 19 nt, Homo sapiens
  misc_RNA (1)...(19): siRNA sense strand
uggaagcggagaaggacua

SEQ ID NO: 977060 - RNA, 19 nt, Homo sapiens
  misc_RNA (1)...(19): siRNA sense strand
gugaaugugacguggauca

SEQ ID NO: 977061 - RNA, 19 nt, Homo sapiens
  misc_RNA (1)...(19): siRNA sense strand
acugugaggaguuuauuga

SEQ ID NO: 977062 - RNA, 19 nt, Homo sapiens
  misc_RNA (1)...(19): siRNA sense strand
cuggauuauuccuaccuaa

SEQ ID NO: 977063 - RNA, 19 nt, Homo sapiens
  misc_RNA (1)...(19): siRNA sense strand
gccaucagggacuuuguga

SEQ ID NO: 977064 - RNA, 19 nt, Homo sapiens
  misc_RNA (1)...(19): siRNA sense strand
gaaguaaacaguccacuaa

SEQ ID NO: 977065 - RNA, 19 nt, Homo sapiens
  misc_RNA (1)...(19): siRNA sense strand
ggaacgagaucgggaagua

SEQ ID NO: 977066 - RNA, 19 nt, Homo sapiens
  misc_RNA (1)...(19): siRNA sense strand
ggagaagugccaagucuua

SEQ ID NO: 977067 - RNA, 19 nt, Homo sapiens
  misc_RNA (1)...(19): siRNA sense strand
gaaccuugcucuucauauc

SEQ ID NO: 977068 - RNA, 19 nt, Homo sapiens
  misc_RNA (1)...(19): siRNA sense strand
ccacuaacccugccgauaa

SEQ ID NO: 977069 - RNA, 19 nt, Homo sapiens
  misc_RNA (1)...(19): siRNA sense strand
gaacuggagaugcaacaaa

SEQ ID NO: 977070 - RNA, 19 nt, Homo sapiens
  misc_RNA (1)...(19): siRNA sense strand
gaacagacagacacagaga

SEQ ID NO: 977071 - RNA, 19 nt, Homo sapiens
  misc_RNA (1)...(19): siRNA sense strand
ggaaguaaacaguccacua

SEQ ID NO: 977072 - RNA, 19 nt, Homo sapiens
  misc_RNA (1)...(19): siRNA sense strand
cagcacauuuccauugauu

SEQ ID NO: 977073 - RNA, 19 nt, Homo sapiens
  misc_RNA (1)...(19): siRNA sense strand
cgagaaagcauccguggaa

SEQ ID NO: 977074 - RNA, 19 nt, Homo sapiens
  misc_RNA (1)...(19): siRNA sense strand
gagaaagcauccguggaaa

SEQ ID NO: 977075 - RNA, 19 nt, Homo sapiens
  misc_RNA (1)...(19): siRNA sense strand
cagagaugcugcagagcua

SEQ ID NO: 977076 - RNA, 19 nt, Homo sapiens
  misc_RNA (1)...(19): siRNA sense strand
ugagauggguuucaaugug

SEQ ID NO: 977077 - RNA, 19 nt, Homo sapiens
  misc_RNA (1)...(19): siRNA sense strand
ggucacacuuguugagaug

SEQ ID NO: 977078 - RNA, 19 nt, Homo sapiens
  misc_RNA (1)...(19): siRNA sense strand
gaacgagaucgggaaguaa

SEQ ID NO: 977079 - RNA, 19 nt, Homo sapiens
  misc_RNA (1)...(19): siRNA sense strand
ggagcaggaugaacagaca

SEQ ID NO: 977080 - RNA, 19 nt, Homo sapiens
  misc_RNA (1)...(19): siRNA sense strand
uggaaacgcugacagagau

SEQ ID NO: 977081 - RNA, 19 nt, Homo sapiens
  misc_RNA (1)...(19): siRNA sense strand
uggacacucucccugcuua

SEQ ID NO: 977082 - RNA, 19 nt, Homo sapiens
  misc_RNA (1)...(19): siRNA sense strand
ggagaugcaacaaauggaa

SEQ ID NO: 977083 - RNA, 19 nt, Homo sapiens
  misc_RNA (1)...(19): siRNA sense strand
gcagagcuacauuucagaa

SEQ ID NO: 977084 - RNA, 19 nt, Homo sapiens
  misc_RNA (1)...(19): siRNA sense strand
gagaaccuugcucuucaua

SEQ ID NO: 977085 - RNA, 19 nt, Homo sapiens
  misc_RNA (1)...(19): siRNA sense strand
gucagcacauuuccauuga

SEQ ID NO: 977086 - RNA, 19 nt, Homo sapiens
  misc_RNA (1)...(19): siRNA sense strand
cgucugaacuggagaugca

SEQ ID NO: 977087 - RNA, 19 nt, Homo sapiens
  misc_RNA (1)...(19): siRNA sense strand
gcacauccccagccauuuu

SEQ ID NO: 977088 - RNA, 19 nt, Homo sapiens
  misc_RNA (1)...(19): siRNA sense strand
cagcucuucuuccgucuga

SEQ ID NO: 977089 - RNA, 19 nt, Homo sapiens
  misc_RNA (1)...(19): siRNA sense strand
gauguggagcgggcacuua

SEQ ID NO: 977090 - RNA, 19 nt, Homo sapiens
  misc_RNA (1)...(19): siRNA sense strand
aagaugacgucagcacauu

SEQ ID NO: 977091 - RNA, 19 nt, Homo sapiens
  misc_RNA (1)...(19): siRNA sense strand
ugacagaggcaggguuuga

SEQ ID NO: 977092 - RNA, 19 nt, Homo sapiens
  misc_RNA (1)...(19): siRNA sense strand
gaagugccaagucuuacug

SEQ ID NO: 977093 - RNA, 19 nt, Homo sapiens
  misc_RNA (1)...(19): siRNA sense strand
cgucagcacauuuccauug

SEQ ID NO: 977094 - RNA, 19 nt, Homo sapiens
  misc_RNA (1)...(19): siRNA sense strand
gcugacagaggcaggguuu

SEQ ID NO: 977095 - RNA, 19 nt, Homo sapiens
  misc_RNA (1)...(19): siRNA sense strand
gaaagcauccguggaaacg

SEQ ID NO: 977096 - RNA, 19 nt, Homo sapiens
  misc_RNA (1)...(19): siRNA sense strand
gcacauuuccauugauugc

SEQ ID NO: 977097 - RNA, 19 nt, Homo sapiens
  misc_RNA (1)...(19): siRNA sense strand
gaugacgucagcacauuuc

SEQ ID NO: 977098 - RNA, 19 nt, Homo sapiens
  misc_RNA (1)...(19): siRNA sense strand
uaacccugccgauaacuau

SEQ ID NO: 977099 - RNA, 19 nt, Homo sapiens
  misc_RNA (1)...(19): siRNA sense strand
guuugagagugccgagaaa

SEQ ID NO: 977100 - RNA, 19 nt, Homo sapiens
  misc_RNA (1)...(19): siRNA sense strand
gauaucguggucacacuug

SEQ ID NO: 977101 - RNA, 19 nt, Homo sapiens
  misc_RNA (1)...(19): siRNA sense strand
gugccaagucuuacuguga

SEQ ID NO: 977102 - RNA, 19 nt, Homo sapiens
  misc_RNA (1)...(19): siRNA sense strand
cugcagagcuacauuucag

SEQ ID NO: 977103 - RNA, 19 nt, Homo sapiens
  misc_RNA (1)...(19): siRNA sense strand
guggaaacgcugacagaga

SEQ ID NO: 977104 - RNA, 19 nt, Homo sapiens
  misc_RNA (1)...(19): siRNA sense strand
gugagcccgugucagacua

SEQ ID NO: 977105 - RNA, 19 nt, Homo sapiens
  misc_RNA (1)...(19): siRNA sense strand
caaauggaagagcagauuc

SEQ ID NO: 977106 - RNA, 19 nt, Homo sapiens
  misc_RNA (1)...(19): siRNA sense strand
acaaauggaagagcagauu

SEQ ID NO: 977107 - RNA, 19 nt, Homo sapiens
  misc_RNA (1)...(19): siRNA sense strand
ucagaaauugggagaagug

SEQ ID NO: 977108 - RNA, 19 nt, Homo sapiens
  misc_RNA (1)...(19): siRNA sense strand
ccucggagcaggaugaaca

SEQ ID NO: 977109 - RNA, 19 nt, Homo sapiens
  misc_RNA (1)...(19): siRNA sense strand
aacuggagaugcaacaaau

SEQ ID NO: 977110 - RNA, 19 nt, Homo sapiens
  misc_RNA (1)...(19): siRNA sense strand
ugggagaagugccaagucu

SEQ ID NO: 977111 - RNA, 19 nt, Homo sapiens
  misc_RNA (1)...(19): siRNA sense strand
gguuugagagugccgagaa

SEQ ID NO: 977112 - RNA, 19 nt, Homo sapiens
  misc_RNA (1)...(19): siRNA sense strand
cagcccacacuguccgaua

SEQ ID NO: 977113 - RNA, 19 nt, Homo sapiens
  misc_RNA (1)...(19): siRNA sense strand
ccaagacaggcgagacuca

SEQ ID NO: 977114 - RNA, 19 nt, Homo sapiens
  misc_RNA (1)...(19): siRNA sense strand
ggacacucucccugcuuau

SEQ ID NO: 977115 - RNA, 19 nt, Homo sapiens
  misc_RNA (1)...(19): siRNA sense strand
aaagaugacgucagcacau

SEQ ID NO: 977116 - RNA, 19 nt, Homo sapiens
  misc_RNA (1)...(19): siRNA sense strand
ggaaacgcugacagagaug

SEQ ID NO: 977117 - RNA, 19 nt, Homo sapiens
  misc_RNA (1)...(19): siRNA sense strand
aacgagaucgggaaguaaa

SEQ ID NO: 977118 - RNA, 19 nt, Homo sapiens
  misc_RNA (1)...(19): siRNA sense strand
ugagcuccuugcugacaga

SEQ ID NO: 977119 - RNA, 19 nt, Homo sapiens
  misc_RNA (1)...(19): siRNA sense strand
ggacguggccucuuugguu

SEQ ID NO: 977120 - RNA, 19 nt, Homo sapiens
  misc_RNA (1)...(19): siRNA sense strand
cagcuuccuugaaccauua

SEQ ID NO: 977121 - RNA, 19 nt, Homo sapiens
  misc_RNA (1)...(19): siRNA sense strand
gacguggccucuuugguuu

SEQ ID NO: 977122 - RNA, 19 nt, Homo sapiens
  misc_RNA (1)...(19): siRNA sense strand
gaaccauuaugcuggcuau

SEQ ID NO: 977123 - RNA, 19 nt, Homo sapiens
  misc_RNA (1)...(19): siRNA sense strand
gcagcuuccuugaaccauu

SEQ ID NO: 977124 - RNA, 19 nt, Homo sapiens
  misc_RNA (1)...(19): siRNA sense strand
gagaagggcaggcauaugg

SEQ ID NO: 977125 - RNA, 19 nt, Homo sapiens
  misc_RNA (1)...(19): siRNA sense strand
cgacgaggacuuugugcua

SEQ ID NO: 977126 - RNA, 19 nt, Homo sapiens
  misc_RNA (1)...(19): siRNA sense strand
gcuaugagcaggucaccaa

SEQ ID NO: 977127 - RNA, 19 nt, Homo sapiens
  misc_RNA (1)...(19): siRNA sense strand
gccagaagagcccuuauga

SEQ ID NO: 977128 - RNA, 19 nt, Homo sapiens
  misc_RNA (1)...(19): siRNA sense strand
ccaugaaccugcugucucu

SEQ ID NO: 977129 - RNA, 19 nt, Homo sapiens
  misc_RNA (1)...(19): siRNA sense strand
gauggggaauugaugguua

SEQ ID NO: 977130 - RNA, 19 nt, Homo sapiens
  misc_RNA (1)...(19): siRNA sense strand
ucacgcugaugcucacuga

SEQ ID NO: 977131 - RNA, 19 nt, Homo sapiens
  misc_RNA (1)...(19): siRNA sense strand
gagcaggucaccaaugaag

SEQ ID NO: 977132 - RNA, 19 nt, Homo sapiens
  misc_RNA (1)...(19): siRNA sense strand
gaagaccuccugaccaacu

SEQ ID NO: 977133 - RNA, 19 nt, Homo sapiens
  misc_RNA (1)...(19): siRNA sense strand
ggaugggaaagguguguuu

SEQ ID NO: 977134 - RNA, 19 nt, Homo sapiens
  misc_RNA (1)...(19): siRNA sense strand
uugcggacguggccucuuu

SEQ ID NO: 977135 - RNA, 19 nt, Homo sapiens
  misc_RNA (1)...(19): siRNA sense strand
gggcaggcauauggaguau

SEQ ID NO: 977136 - RNA, 19 nt, Homo sapiens
  misc_RNA (1)...(19): siRNA sense strand
cggcugcugucacccauga

SEQ ID NO: 977137 - RNA, 19 nt, Homo sapiens
  misc_RNA (1)...(19): siRNA sense strand
augaagaccuccugaccaa

SEQ ID NO: 977138 - RNA, 19 nt, Homo sapiens
  misc_RNA (1)...(19): siRNA sense strand
augagcaggucaccaauga

SEQ ID NO: 977139 - RNA, 19 nt, Homo sapiens
  misc_RNA (1)...(19): siRNA sense strand
gggcuucauugcugaugug

SEQ ID NO: 977140 - RNA, 19 nt, Homo sapiens
  misc_RNA (1)...(19): siRNA sense strand
aagaguggguuccaagaca

SEQ ID NO: 977141 - RNA, 19 nt, Homo sapiens
  misc_RNA (1)...(19): siRNA sense strand
ggagaccgccauccagaag

SEQ ID NO: 977142 - RNA, 19 nt, Homo sapiens
  misc_RNA (1)...(19): siRNA sense strand
gcaccugggcagugagaug

SEQ ID NO: 977143 - RNA, 19 nt, Homo sapiens
  misc_RNA (1)...(19): siRNA sense strand
ggaccuagagagugagaag

SEQ ID NO: 977144 - RNA, 19 nt, Homo sapiens
  misc_RNA (1)...(19): siRNA sense strand
ggagaagggcaggcauaug

SEQ ID NO: 977145 - RNA, 19 nt, Homo sapiens
  misc_RNA (1)...(19): siRNA sense strand
ccuagagagugagaaguau

SEQ ID NO: 977146 - RNA, 19 nt, Homo sapiens
  misc_RNA (1)...(19): siRNA sense strand
ccauuaugcuggcuaugag

SEQ ID NO: 977147 - RNA, 19 nt, Homo sapiens
  misc_RNA (1)...(19): siRNA sense strand
gaagaguggguuccaagac

SEQ ID NO: 977148 - RNA, 19 nt, Homo sapiens
  misc_RNA (1)...(19): siRNA sense strand
cagcuggcgucaugcaucu

SEQ ID NO: 977149 - RNA, 19 nt, Homo sapiens
  misc_RNA (1)...(19): siRNA sense strand
ucaugcaucuguucuacgu

SEQ ID NO: 977150 - RNA, 19 nt, Homo sapiens
  misc_RNA (1)...(19): siRNA sense strand
gccaggugcacccaaacua

SEQ ID NO: 977151 - RNA, 19 nt, Homo sapiens
  misc_RNA (1)...(19): siRNA sense strand
caaacuacuucuggauggu

SEQ ID NO: 977152 - RNA, 19 nt, Homo sapiens
  misc_RNA (1)...(19): siRNA sense strand
gggagaccgccauccagaa

SEQ ID NO: 977153 - RNA, 19 nt, Homo sapiens
  misc_RNA (1)...(19): siRNA sense strand
ccugggcagugagauguuu

SEQ ID NO: 977154 - RNA, 19 nt, Homo sapiens
  misc_RNA (1)...(19): siRNA sense strand
cccgguagaugcacaccuu

SEQ ID NO: 977155 - RNA, 19 nt, Homo sapiens
  misc_RNA (1)...(19): siRNA sense strand
gaccaacugcacgcuauug

SEQ ID NO: 977156 - RNA, 19 nt, Homo sapiens
  misc_RNA (1)...(19): siRNA sense strand
gcaggucaccaaugaagac

SEQ ID NO: 977157 - RNA, 19 nt, Homo sapiens
  misc_RNA (1)...(19): siRNA sense strand
uugcugauguggaccuaga

SEQ ID NO: 977158 - RNA, 19 nt, Homo sapiens
  misc_RNA (1)...(19): siRNA sense strand
cugaccaacugcacgcuau

SEQ ID NO: 977159 - RNA, 19 nt, Homo sapiens
  misc_RNA (1)...(19): siRNA sense strand
gaugggaaagguguguuug

SEQ ID NO: 977160 - RNA, 19 nt, Homo sapiens
  misc_RNA (1)...(19): siRNA sense strand
ugaaugccccuacuuggua

SEQ ID NO: 977161 - RNA, 19 nt, Homo sapiens
  misc_RNA (1)...(19): siRNA sense strand
cgucaugcaucuguucuac

SEQ ID NO: 977162 - RNA, 19 nt, Homo sapiens
  misc_RNA (1)...(19): siRNA sense strand
gggacgcucugguggucau

SEQ ID NO: 977163 - RNA, 19 nt, Homo sapiens
  misc_RNA (1)...(19): siRNA sense strand
ugggaaagguguguuugca

SEQ ID NO: 977164 - RNA, 19 nt, Homo sapiens
  misc_RNA (1)...(19): siRNA sense strand
acucgcaccugggcaguga

SEQ ID NO: 977165 - RNA, 19 nt, Homo sapiens
  misc_RNA (1)...(19): siRNA sense strand
cugugcagcuggcgucaug

SEQ ID NO: 977166 - RNA, 19 nt, Homo sapiens
  misc_RNA (1)...(19): siRNA sense strand
gaagaaauaugccaaauuc

SEQ ID NO: 977167 - RNA, 19 nt, Homo sapiens
  misc_RNA (1)...(19): siRNA sense strand
ggaaauccgugaaguguuu

SEQ ID NO: 977168 - RNA, 19 nt, Homo sapiens
  misc_RNA (1)...(19): siRNA sense strand
ccacggaccucauuacaua

SEQ ID NO: 977169 - RNA, 19 nt, Homo sapiens
  misc_RNA (1)...(19): siRNA sense strand
ugacagaaaugaugaagua

SEQ ID NO: 977170 - RNA, 19 nt, Homo sapiens
  misc_RNA (1)...(19): siRNA sense strand
gaaggaagcucucaagaag

SEQ ID NO: 977171 - RNA, 19 nt, Homo sapiens
  misc_RNA (1)...(19): siRNA sense strand
gaaagugacaugauaagua

SEQ ID NO: 977172 - RNA, 19 nt, Homo sapiens
  misc_RNA (1)...(19): siRNA sense strand
ugaagaaagugacaugaua

SEQ ID NO: 977173 - RNA, 19 nt, Homo sapiens
  misc_RNA (1)...(19): siRNA sense strand
agauuuaccuccugaauua

SEQ ID NO: 977174 - RNA, 19 nt, Homo sapiens
  misc_RNA (1)...(19): siRNA sense strand
ggaaauuguuuguccauug

SEQ ID NO: 977175 - RNA, 19 nt, Homo sapiens
  misc_RNA (1)...(19): siRNA sense strand
ggacaucugccaauaauga

SEQ ID NO: 977176 - RNA, 19 nt, Homo sapiens
  misc_RNA (1)...(19): siRNA sense strand
guuagaagcuugauauuag

SEQ ID NO: 977177 - RNA, 19 nt, Homo sapiens
  misc_RNA (1)...(19): siRNA sense strand
gaaaugacaguaccucaaa

SEQ ID NO: 977178 - RNA, 19 nt, Homo sapiens
  misc_RNA (1)...(19): siRNA sense strand
gaagaaagugacaugauaa

SEQ ID NO: 977179 - RNA, 19 nt, Homo sapiens
  misc_RNA (1)...(19): siRNA sense strand
gaaacucaguauucaauca

SEQ ID NO: 977180 - RNA, 19 nt, Homo sapiens
  misc_RNA (1)...(19): siRNA sense strand
gaaagcugaugauaaggaa

SEQ ID NO: 977181 - RNA, 19 nt, Homo sapiens
  misc_RNA (1)...(19): siRNA sense strand
gagcacagauaccaagcua

SEQ ID NO: 977182 - RNA, 19 nt, Homo sapiens
  misc_RNA (1)...(19): siRNA sense strand
gcacagauaccaagcuauu

SEQ ID NO: 977183 - RNA, 19 nt, Homo sapiens
  misc_RNA (1)...(19): siRNA sense strand
gcuaaaugcuggaaacuca

SEQ ID NO: 977184 - RNA, 19 nt, Homo sapiens
  misc_RNA (1)...(19): siRNA sense strand
gaacaaacaaacauacaga

SEQ ID NO: 977185 - RNA, 19 nt, Homo sapiens
  misc_RNA (1)...(19): siRNA sense strand
gaaaugugguuaauauugc

SEQ ID NO: 977186 - RNA, 19 nt, Homo sapiens
  misc_RNA (1)...(19): siRNA sense strand
gaagaagucaaauucauug

SEQ ID NO: 977187 - RNA, 19 nt, Homo sapiens
  misc_RNA (1)...(19): siRNA sense strand
gaagaaggaaauaucguuu

SEQ ID NO: 977188 - RNA, 19 nt, Homo sapiens
  misc_RNA (1)...(19): siRNA sense strand
guacaagcuucugaaauga

SEQ ID NO: 977189 - RNA, 19 nt, Homo sapiens
  misc_RNA (1)...(19): siRNA sense strand
aaacagaaacuaccauuug

SEQ ID NO: 977190 - RNA, 19 nt, Homo sapiens
  misc_RNA (1)...(19): siRNA sense strand
ggaagaaauaugccaaauu

SEQ ID NO: 977191 - RNA, 19 nt, Homo sapiens
  misc_RNA (1)...(19): siRNA sense strand
gcaaugaaagcugaugaua

SEQ ID NO: 977192 - RNA, 19 nt, Homo sapiens
  misc_RNA (1)...(19): siRNA sense strand
acacacaggcccagcauua

SEQ ID NO: 977193 - RNA, 19 nt, Homo sapiens
  misc_RNA (1)...(19): siRNA sense strand
gauaaugacagaaaugaug

SEQ ID NO: 977194 - RNA, 19 nt, Homo sapiens
  misc_RNA (1)...(19): siRNA sense strand
aaugaaagcugaugauaag

SEQ ID NO: 977195 - RNA, 19 nt, Homo sapiens
  misc_RNA (1)...(19): siRNA sense strand
aaacaaacauacagacaca

SEQ ID NO: 977196 - RNA, 19 nt, Homo sapiens
  misc_RNA (1)...(19): siRNA sense strand
caaugaaagcugaugauaa

SEQ ID NO: 977197 - RNA, 19 nt, Homo sapiens
  misc_RNA (1)...(19): siRNA sense strand
gaggaggcccugcugauuu

SEQ ID NO: 977198 - RNA, 19 nt, Homo sapiens
  misc_RNA (1)...(19): siRNA sense strand
uagccacccuuaagaagua

SEQ ID NO: 977199 - RNA, 19 nt, Homo sapiens
  misc_RNA (1)...(19): siRNA sense strand
acacauuccuguccaaaga

SEQ ID NO: 977200 - RNA, 19 nt, Homo sapiens
  misc_RNA (1)...(19): siRNA sense strand
gaaauuguuuguccauugc

SEQ ID NO: 977201 - RNA, 19 nt, Homo sapiens
  misc_RNA (1)...(19): siRNA sense strand
gaaauaugccaaauucaca

SEQ ID NO: 977202 - RNA, 19 nt, Homo sapiens
  misc_RNA (1)...(19): siRNA sense strand
cauacagacacacaaauua

SEQ ID NO: 977203 - RNA, 19 nt, Homo sapiens
  misc_RNA (1)...(19): siRNA sense strand
aguacaagcuucugaaaug

SEQ ID NO: 977204 - RNA, 19 nt, Homo sapiens
  misc_RNA (1)...(19): siRNA sense strand
gaagagcuggcaucgauga

SEQ ID NO: 977205 - RNA, 19 nt, Homo sapiens
  misc_RNA (1)...(19): siRNA sense strand
uggaaacucuucaguacaa

SEQ ID NO: 977206 - RNA, 19 nt, Homo sapiens
  misc_RNA (1)...(19): siRNA sense strand
gagaggauaaugacagaaa

SEQ ID NO: 977207 - RNA, 19 nt, Homo sapiens
  misc_RNA (1)...(19): siRNA sense strand
gacaauguacuguaucaaa

SEQ ID NO: 977208 - RNA, 19 nt, Homo sapiens
  misc_RNA (1)...(19): siRNA sense strand
ccagccaguucaucaagua

SEQ ID NO: 977209 - RNA, 19 nt, Homo sapiens
  misc_RNA (1)...(19): siRNA sense strand
aaaaugagcucgagauuca

SEQ ID NO: 977210 - RNA, 19 nt, Homo sapiens
  misc_RNA (1)...(19): siRNA sense strand
uuacauacagcaucuagua

SEQ ID NO: 977211 - RNA, 19 nt, Homo sapiens
  misc_RNA (1)...(19): siRNA sense strand
gggcaaaagccaacuauua

SEQ ID NO: 977212 - RNA, 19 nt, Homo sapiens
  misc_RNA (1)...(19): siRNA sense strand
ggauucaaaggucauauaa

SEQ ID NO: 977213 - RNA, 19 nt, Homo sapiens
  misc_RNA (1)...(19): siRNA sense strand
cauuguaacugguauauac

SEQ ID NO: 977214 - RNA, 19 nt, Homo sapiens
  misc_RNA (1)...(19): siRNA sense strand
caguguaucuucuuuguca

SEQ ID NO: 977215 - RNA, 19 nt, Homo sapiens
  misc_RNA (1)...(19): siRNA sense strand
caaggaacaaacaaacaua

SEQ ID NO: 977216 - RNA, 19 nt, Homo sapiens
  misc_RNA (1)...(19): siRNA sense strand
gcuggaaacucaguauuca

SEQ ID NO: 977217 - RNA, 19 nt, Homo sapiens
  misc_RNA (1)...(19): siRNA sense strand
gccugagucugguucuuua

SEQ ID NO: 977218 - RNA, 19 nt, Homo sapiens
  misc_RNA (1)...(19): siRNA sense strand
gagaugcugaggaugaaua

SEQ ID NO: 977219 - RNA, 19 nt, Homo sapiens
  misc_RNA (1)...(19): siRNA sense strand
ccaccgaccuuguaaaauu

SEQ ID NO: 977220 - RNA, 19 nt, Homo sapiens
  misc_RNA (1)...(19): siRNA sense strand
caaugaaguuguuccgaau

SEQ ID NO: 977221 - RNA, 19 nt, Homo sapiens
  misc_RNA (1)...(19): siRNA sense strand
guucagugaccgagacuua

SEQ ID NO: 977222 - RNA, 19 nt, Homo sapiens
  misc_RNA (1)...(19): siRNA sense strand
acaaguagcacacuguaaa

SEQ ID NO: 977223 - RNA, 19 nt, Homo sapiens
  misc_RNA (1)...(19): siRNA sense strand
gcaguaaccacagauaaug

SEQ ID NO: 977224 - RNA, 19 nt, Homo sapiens
  misc_RNA (1)...(19): siRNA sense strand
caacaacaggaaccucuuu

SEQ ID NO: 977225 - RNA, 19 nt, Homo sapiens
  misc_RNA (1)...(19): siRNA sense strand
aggaagagcuggcaucgau

SEQ ID NO: 977226 - RNA, 19 nt, Homo sapiens
  misc_RNA (1)...(19): siRNA sense strand
ugcaagggcucauaaggaa

SEQ ID NO: 977227 - RNA, 19 nt, Homo sapiens
  misc_RNA (1)...(19): siRNA sense strand
ugaaggaagcucucaagaa

SEQ ID NO: 977228 - RNA, 19 nt, Homo sapiens
  misc_RNA (1)...(19): siRNA sense strand
aacagaaacuaccauuuga

SEQ ID NO: 977229 - RNA, 19 nt, Homo sapiens
  misc_RNA (1)...(19): siRNA sense strand
gcaaggaacaaacaaacau

SEQ ID NO: 977230 - RNA, 19 nt, Homo sapiens
  misc_RNA (1)...(19): siRNA sense strand
ccaaaacaauuaccagauu

SEQ ID NO: 977231 - RNA, 19 nt, Homo sapiens
  misc_RNA (1)...(19): siRNA sense strand
gaguuucaguuacacauuc

SEQ ID NO: 977232 - RNA, 19 nt, Homo sapiens
  misc_RNA (1)...(19): siRNA sense strand
caaauuacagaagcacaua

SEQ ID NO: 977233 - RNA, 19 nt, Homo sapiens
  misc_RNA (1)...(19): siRNA sense strand
aaacauacagacacacaaa

SEQ ID NO: 977234 - RNA, 19 nt, Homo sapiens
  misc_RNA (1)...(19): siRNA sense strand
gaaauaguucggacuugga

SEQ ID NO: 977235 - RNA, 19 nt, Homo sapiens
  misc_RNA (1)...(19): siRNA sense strand
gcugagaaccaaaguacaa

SEQ ID NO: 977236 - RNA, 19 nt, Homo sapiens
  misc_RNA (1)...(19): siRNA sense strand
uauggaaacucuucaguac

SEQ ID NO: 977237 - RNA, 19 nt, Homo sapiens
  misc_RNA (1)...(19): siRNA sense strand
gggauucaaaggucauaua

SEQ ID NO: 977238 - RNA, 19 nt, Homo sapiens
  misc_RNA (1)...(19): siRNA sense strand
gaagcuugauauuagcaau

SEQ ID NO: 977239 - RNA, 19 nt, Homo sapiens
  misc_RNA (1)...(19): siRNA sense strand
ugaaguauccaucuguuug

SEQ ID NO: 977240 - RNA, 19 nt, Homo sapiens
  misc_RNA (1)...(19): siRNA sense strand
cagacaauguacuguauca

SEQ ID NO: 977241 - RNA, 19 nt, Homo sapiens
  misc_RNA (1)...(19): siRNA sense strand
uagagacccuuacuguaga

SEQ ID NO: 977242 - RNA, 19 nt, Homo sapiens
  misc_RNA (1)...(19): siRNA sense strand
cagcagaaggaaauuguuu

SEQ ID NO: 977243 - RNA, 19 nt, Homo sapiens
  misc_RNA (1)...(19): siRNA sense strand
gcacugcugucagauuuac

SEQ ID NO: 977244 - RNA, 19 nt, Homo sapiens
  misc_RNA (1)...(19): siRNA sense strand
guaaacucuuucuuggauu

SEQ ID NO: 977245 - RNA, 19 nt, Homo sapiens
  misc_RNA (1)...(19): siRNA sense strand
gaaguuguuccgaaugaug

SEQ ID NO: 977246 - RNA, 19 nt, Homo sapiens
  misc_RNA (1)...(19): siRNA sense strand
cacaaauggugaauauuag

SEQ ID NO: 977247 - RNA, 19 nt, Homo sapiens
  misc_RNA (1)...(19): siRNA sense strand
uguggcaacugaauuaaau

SEQ ID NO: 977248 - RNA, 19 nt, Homo sapiens
  misc_RNA (1)...(19): siRNA sense strand
gaacaaguaaacucuuucu

SEQ ID NO: 977249 - RNA, 19 nt, Homo sapiens
  misc_RNA (1)...(19): siRNA sense strand
gaagagcccaaugaaguug

SEQ ID NO: 977250 - RNA, 19 nt, Homo sapiens
  misc_RNA (1)...(19): siRNA sense strand
aagaagagcccaaugaagu

SEQ ID NO: 977251 - RNA, 19 nt, Homo sapiens
  misc_RNA (1)...(19): siRNA sense strand
agacaagugugcuaaaugc

SEQ ID NO: 977252 - RNA, 19 nt, Homo sapiens
  misc_RNA (1)...(19): siRNA sense strand
aggcacugcugucagauuu

SEQ ID NO: 977253 - RNA, 19 nt, Homo sapiens
  misc_RNA (1)...(19): siRNA sense strand
ucaagaagagcccaaugaa

SEQ ID NO: 977254 - RNA, 19 nt, Homo sapiens
  misc_RNA (1)...(19): siRNA sense strand
gaaguauccaucuguuugu

SEQ ID NO: 977255 - RNA, 19 nt, Homo sapiens
  misc_RNA (1)...(19): siRNA sense strand
gcagaaggaaauuguuugu

SEQ ID NO: 977256 - RNA, 19 nt, Homo sapiens
  misc_RNA (1)...(19): siRNA sense strand
gcacauaaaaucccuauuc

SEQ ID NO: 977257 - RNA, 19 nt, Homo sapiens
  misc_RNA (1)...(19): siRNA sense strand
aguaaacucuuucuuggau

SEQ ID NO: 977258 - RNA, 19 nt, Homo sapiens
  misc_RNA (1)...(19): siRNA sense strand
gaaaugaugaaguauccau

SEQ ID NO: 977259 - RNA, 19 nt, Homo sapiens
  misc_RNA (1)...(19): siRNA sense strand
cgaagaaggaaauaucguu

SEQ ID NO: 977260 - RNA, 19 nt, Homo sapiens
  misc_RNA (1)...(19): siRNA sense strand
gaaccaguugggauucaaa

SEQ ID NO: 977261 - RNA, 19 nt, Homo sapiens
  misc_RNA (1)...(19): siRNA sense strand
guaguaagaacucugaauc

SEQ ID NO: 977262 - RNA, 19 nt, Homo sapiens
  misc_RNA (1)...(19): siRNA sense strand
ggaagcugggccugaagua

SEQ ID NO: 977263 - RNA, 19 nt, Homo sapiens
  misc_RNA (1)...(19): siRNA sense strand
ggaccgcacucaguucagu

SEQ ID NO: 977264 - RNA, 19 nt, Homo sapiens
  misc_RNA (1)...(19): siRNA sense strand
cauacagcaucuaguacaa

SEQ ID NO: 977265 - RNA, 19 nt, Homo sapiens
  misc_RNA (1)...(19): siRNA sense strand
gagcugagaaccaaaguac

SEQ ID NO: 977266 - RNA, 19 nt, Homo sapiens
  misc_RNA (1)...(19): siRNA sense strand
gaaauaccauucaguucaa

SEQ ID NO: 977267 - RNA, 19 nt, Homo sapiens
  misc_RNA (1)...(19): siRNA sense strand
caaagaacacucaguauga

SEQ ID NO: 977268 - RNA, 19 nt, Homo sapiens
  misc_RNA (1)...(19): siRNA sense strand
gaagaguguuuccaguaaa

SEQ ID NO: 977269 - RNA, 19 nt, Homo sapiens
  misc_RNA (1)...(19): siRNA sense strand
gaggauaugucugaauuau

SEQ ID NO: 977270 - RNA, 19 nt, Homo sapiens
  misc_RNA (1)...(19): siRNA sense strand
gagaagaguguuuccagua

SEQ ID NO: 977271 - RNA, 19 nt, Homo sapiens
  misc_RNA (1)...(19): siRNA sense strand
agaagaguguuuccaguaa

SEQ ID NO: 977272 - RNA, 19 nt, Homo sapiens
  misc_RNA (1)...(19): siRNA sense strand
gaccaaauccuucaaaaua

SEQ ID NO: 977273 - RNA, 19 nt, Homo sapiens
  misc_RNA (1)...(19): siRNA sense strand
acaauucucuccuggcauu

SEQ ID NO: 977274 - RNA, 19 nt, Homo sapiens
  misc_RNA (1)...(19): siRNA sense strand
aaagaacacucaguaugaa

SEQ ID NO: 977275 - RNA, 19 nt, Homo sapiens
  misc_RNA (1)...(19): siRNA sense strand
ggaggauaugucugaauua

SEQ ID NO: 977276 - RNA, 19 nt, Homo sapiens
  misc_RNA (1)...(19): siRNA sense strand
ucaaagaacacucaguaug

SEQ ID NO: 977277 - RNA, 19 nt, Homo sapiens
  misc_RNA (1)...(19): siRNA sense strand
aaguacagcaucaacauua

SEQ ID NO: 977278 - RNA, 19 nt, Homo sapiens
  misc_RNA (1)...(19): siRNA sense strand
ggacaaaauuuccaaugau

SEQ ID NO: 977279 - RNA, 19 nt, Homo sapiens
  misc_RNA (1)...(19): siRNA sense strand
aggaggauaugucugaauu

SEQ ID NO: 977280 - RNA, 19 nt, Homo sapiens
  misc_RNA (1)...(19): siRNA sense strand
gagccaaggcagucaguga

SEQ ID NO: 977281 - RNA, 19 nt, Homo sapiens
  misc_RNA (1)...(19): siRNA sense strand
caaguacagcaucaacauu

SEQ ID NO: 977282 - RNA, 19 nt, Homo sapiens
  misc_RNA (1)...(19): siRNA sense strand
gacaaaauuuccaaugaug

SEQ ID NO: 977283 - RNA, 19 nt, Homo sapiens
  misc_RNA (1)...(19): siRNA sense strand
aaacaacaccgagcgaaau

SEQ ID NO: 977284 - RNA, 19 nt, Homo sapiens
  misc_RNA (1)...(19): siRNA sense strand
agacgggacccucugcuuu

SEQ ID NO: 977285 - RNA, 19 nt, Homo sapiens
  misc_RNA (1)...(19): siRNA sense strand
gacgggacccucugcuuug

SEQ ID NO: 977286 - RNA, 19 nt, Homo sapiens
  misc_RNA (1)...(19): siRNA sense strand
gcuguuggcaagaaacuga

SEQ ID NO: 977287 - RNA, 19 nt, Homo sapiens
  misc_RNA (1)...(19): siRNA sense strand
gcugugcuguuggcaagaa

SEQ ID NO: 977288 - RNA, 19 nt, Homo sapiens
  misc_RNA (1)...(19): siRNA sense strand
guuacaugcugguauugau

SEQ ID NO: 977289 - RNA, 19 nt, Homo sapiens
  misc_RNA (1)...(19): siRNA sense strand
gcaucaacauuaucaacac

SEQ ID NO: 977290 - RNA, 19 nt, Homo sapiens
  misc_RNA (1)...(19): siRNA sense strand
cgagcgaaaugccaaguac

SEQ ID NO: 977291 - RNA, 19 nt, Homo sapiens
  misc_RNA (1)...(19): siRNA sense strand
aacauuaucaacaccguua

SEQ ID NO: 977292 - RNA, 19 nt, Homo sapiens
  misc_RNA (1)...(19): siRNA sense strand
auucaaagaacacucagua

SEQ ID NO: 977293 - RNA, 19 nt, Homo sapiens
  misc_RNA (1)...(19): siRNA sense strand
gcagugagaagaguguuuc

SEQ ID NO: 977294 - RNA, 19 nt, Homo sapiens
  misc_RNA (1)...(19): siRNA sense strand
ccaaguacagcaucaacau

SEQ ID NO: 977295 - RNA, 19 nt, Homo sapiens
  misc_RNA (1)...(19): siRNA sense strand
gaugaagccaaugcuaaug

SEQ ID NO: 977296 - RNA, 19 nt, Homo sapiens
  misc_RNA (1)...(19): siRNA sense strand
guacagcaucaacauuauc

SEQ ID NO: 977297 - RNA, 19 nt, Homo sapiens
  misc_RNA (1)...(19): siRNA sense strand
ccaaugcuaaugcaaaucu

SEQ ID NO: 977298 - RNA, 19 nt, Homo sapiens
  misc_RNA (1)...(19): siRNA sense strand
ucugagaauuaccaugaau

SEQ ID NO: 977299 - RNA, 19 nt, Homo sapiens
  misc_RNA (1)...(19): siRNA sense strand
ugaagccaaugcuaaugca

SEQ ID NO: 977300 - RNA, 19 nt, Homo sapiens
  misc_RNA (1)...(19): siRNA sense strand
ugaugaagccaaugcuaau

SEQ ID NO: 977301 - RNA, 19 nt, Homo sapiens
  misc_RNA (1)...(19): siRNA sense strand
aguacagcaucaacauuau

SEQ ID NO: 977302 - RNA, 19 nt, Homo sapiens
  misc_RNA (1)...(19): siRNA sense strand
gaguguuuccaguaaagaa

SEQ ID NO: 977303 - RNA, 19 nt, Homo sapiens
  misc_RNA (1)...(19): siRNA sense strand
aagaguguuuccaguaaag

SEQ ID NO: 977304 - RNA, 19 nt, Homo sapiens
  misc_RNA (1)...(19): siRNA sense strand
aacaggaggauaugucuga

SEQ ID NO: 977305 - RNA, 19 nt, Homo sapiens
  misc_RNA (1)...(19): siRNA sense strand
gagacgggacccucugcuu

SEQ ID NO: 977306 - RNA, 19 nt, Homo sapiens
  misc_RNA (1)...(19): siRNA sense strand
uuaucaagcuggugguucu

SEQ ID NO: 977307 - RNA, 19 nt, Homo sapiens
  misc_RNA (1)...(19): siRNA sense strand
agccaaugcuaaugcaaau

SEQ ID NO: 977308 - RNA, 19 nt, Homo sapiens
  misc_RNA (1)...(19): siRNA sense strand
agaauucaaagaacacuca

SEQ ID NO: 977309 - RNA, 19 nt, Homo sapiens
  misc_RNA (1)...(19): siRNA sense strand
gaagccaaugcuaaugcaa

SEQ ID NO: 977310 - RNA, 19 nt, Homo sapiens
  misc_RNA (1)...(19): siRNA sense strand
guucaaaacaggaggauau

SEQ ID NO: 977311 - RNA, 19 nt, Homo sapiens
  misc_RNA (1)...(19): siRNA sense strand
augcugguauugaugagaa

SEQ ID NO: 977312 - RNA, 19 nt, Homo sapiens
  misc_RNA (1)...(19): siRNA sense strand
ggaccaaauccuucaaaau

SEQ ID NO: 977313 - RNA, 19 nt, Homo sapiens
  misc_RNA (1)...(19): siRNA sense strand
aagccaaugcuaaugcaaa

SEQ ID NO: 977314 - RNA, 19 nt, Homo sapiens
  misc_RNA (1)...(19): siRNA sense strand
gagcgaaaugccaaguaca

SEQ ID NO: 977315 - RNA, 19 nt, Homo sapiens
  misc_RNA (1)...(19): siRNA sense strand
ggacaugcuuucucaacua

SEQ ID NO: 977316 - RNA, 19 nt, Homo sapiens
  misc_RNA (1)...(19): siRNA sense strand
agagauggauucccuguua

SEQ ID NO: 977317 - RNA, 19 nt, Homo sapiens
  misc_RNA (1)...(19): siRNA sense strand
gaggacaggucacaauuug

SEQ ID NO: 977318 - RNA, 19 nt, Homo sapiens
  misc_RNA (1)...(19): siRNA sense strand
gaagagcggccauggagaa

SEQ ID NO: 977319 - RNA, 19 nt, Homo sapiens
  misc_RNA (1)...(19): siRNA sense strand
gauggcagcugcacuucuu

SEQ ID NO: 977320 - RNA, 19 nt, Homo sapiens
  misc_RNA (1)...(19): siRNA sense strand
gagauggauucccuguuaa

SEQ ID NO: 977321 - RNA, 19 nt, Homo sapiens
  misc_RNA (1)...(19): siRNA sense strand
gcgaagacaucaccucauc

SEQ ID NO: 977322 - RNA, 19 nt, Homo sapiens
  misc_RNA (1)...(19): siRNA sense strand
gaaggcaaauccugcaaag

SEQ ID NO: 977323 - RNA, 19 nt, Homo sapiens
  misc_RNA (1)...(19): siRNA sense strand
gaauaugucaugcaggaaa

SEQ ID NO: 977324 - RNA, 19 nt, Homo sapiens
  misc_RNA (1)...(19): siRNA sense strand
ucucaaaccugcuguguag

SEQ ID NO: 977325 - RNA, 19 nt, Homo sapiens
  misc_RNA (1)...(19): siRNA sense strand
ggaugggaaucaaugaaug

SEQ ID NO: 977326 - RNA, 19 nt, Homo sapiens
  misc_RNA (1)...(19): siRNA sense strand
ggaaaacugugggauagua

SEQ ID NO: 977327 - RNA, 19 nt, Homo sapiens
  misc_RNA (1)...(19): siRNA sense strand
aggaacaucugucuucuga

SEQ ID NO: 977328 - RNA, 19 nt, Homo sapiens
  misc_RNA (1)...(19): siRNA sense strand
ucaggaagauaguuucuca

SEQ ID NO: 977329 - RNA, 19 nt, Homo sapiens
  misc_RNA (1)...(19): siRNA sense strand
ggagagagcccuggcacaa

SEQ ID NO: 977330 - RNA, 19 nt, Homo sapiens
  misc_RNA (1)...(19): siRNA sense strand
gggaaucaaugaauguaca

SEQ ID NO: 977331 - RNA, 19 nt, Homo sapiens
  misc_RNA (1)...(19): siRNA sense strand
gaugagagcugggauucca

SEQ ID NO: 977332 - RNA, 19 nt, Homo sapiens
  misc_RNA (1)...(19): siRNA sense strand
gaaccucccagaauguuau

SEQ ID NO: 977333 - RNA, 19 nt, Homo sapiens
  misc_RNA (1)...(19): siRNA sense strand
ggagauggcagcugcacuu

SEQ ID NO: 977334 - RNA, 19 nt, Homo sapiens
  misc_RNA (1)...(19): siRNA sense strand
gguaagaauuuccgaugca

SEQ ID NO: 977335 - RNA, 19 nt, Homo sapiens
  misc_RNA (1)...(19): siRNA sense strand
gaggagagggacauucuga

SEQ ID NO: 977336 - RNA, 19 nt, Homo sapiens
  misc_RNA (1)...(19): siRNA sense strand
guaagaauuuccgaugcaa

SEQ ID NO: 977337 - RNA, 19 nt, Homo sapiens
  misc_RNA (1)...(19): siRNA sense strand
gaagagcuuuggccgaaaa

SEQ ID NO: 977338 - RNA, 19 nt, Homo sapiens
  misc_RNA (1)...(19): siRNA sense strand
cacagucccuucaggagaa

SEQ ID NO: 977339 - RNA, 19 nt, Homo sapiens
  misc_RNA (1)...(19): siRNA sense strand
gaagaccuuugggcgaaga

SEQ ID NO: 977340 - RNA, 19 nt, Homo sapiens
  misc_RNA (1)...(19): siRNA sense strand
gcagaaccucccagaaugu

SEQ ID NO: 977341 - RNA, 19 nt, Homo sapiens
  misc_RNA (1)...(19): siRNA sense strand
gacaugcuuucucaacuag

SEQ ID NO: 977342 - RNA, 19 nt, Homo sapiens
  misc_RNA (1)...(19): siRNA sense strand
uacaggagguggaagugaa

SEQ ID NO: 977343 - RNA, 19 nt, Homo sapiens
  misc_RNA (1)...(19): siRNA sense strand
acagcugccucaaguguga

SEQ ID NO: 977344 - RNA, 19 nt, Homo sapiens
  misc_RNA (1)...(19): siRNA sense strand
gaagcagaaccucccagaa

SEQ ID NO: 977345 - RNA, 19 nt, Homo sapiens
  misc_RNA (1)...(19): siRNA sense strand
cccagcagcuccagaggaa

SEQ ID NO: 977346 - RNA, 19 nt, Homo sapiens
  misc_RNA (1)...(19): siRNA sense strand
aagauacuguucucuggaa

SEQ ID NO: 977347 - RNA, 19 nt, Homo sapiens
  misc_RNA (1)...(19): siRNA sense strand
ggauaccccugaacuagaa

SEQ ID NO: 977348 - RNA, 19 nt, Homo sapiens
  misc_RNA (1)...(19): siRNA sense strand
aaacccaccuacaugacaa

SEQ ID NO: 977349 - RNA, 19 nt, Homo sapiens
  misc_RNA (1)...(19): siRNA sense strand
ggacaggaugggaaucaau

SEQ ID NO: 977350 - RNA, 19 nt, Homo sapiens
  misc_RNA (1)...(19): siRNA sense strand
aagcagaaccucccagaau

SEQ ID NO: 977351 - RNA, 19 nt, Homo sapiens
  misc_RNA (1)...(19): siRNA sense strand
gaagacaucaccucaucag

SEQ ID NO: 977352 - RNA, 19 nt, Homo sapiens
  misc_RNA (1)...(19): siRNA sense strand
agaaggaggagaagaacaa

SEQ ID NO: 977353 - RNA, 19 nt, Homo sapiens
  misc_RNA (1)...(19): siRNA sense strand
ccagagagugcaugcagaa

SEQ ID NO: 977354 - RNA, 19 nt, Homo sapiens
  misc_RNA (1)...(19): siRNA sense strand
cagcgugucugaagauacu

SEQ ID NO: 977355 - RNA, 19 nt, Homo sapiens
  misc_RNA (1)...(19): siRNA sense strand
ugaggacaggucacaauuu

SEQ ID NO: 977356 - RNA, 19 nt, Homo sapiens
  misc_RNA (1)...(19): siRNA sense strand
gcaggaaaacugugggaua

SEQ ID NO: 977357 - RNA, 19 nt, Homo sapiens
  misc_RNA (1)...(19): siRNA sense strand
gagcggccauggagaacag

SEQ ID NO: 977358 - RNA, 19 nt, Homo sapiens
  misc_RNA (1)...(19): siRNA sense strand
gacaggaugggaaucaaug

SEQ ID NO: 977359 - RNA, 19 nt, Homo sapiens
  misc_RNA (1)...(19): siRNA sense strand
gaugggaaucaaugaaugu

SEQ ID NO: 977360 - RNA, 19 nt, Homo sapiens
  misc_RNA (1)...(19): siRNA sense strand
ggaacccggagcaugauga

SEQ ID NO: 977361 - RNA, 19 nt, Homo sapiens
  misc_RNA (1)...(19): siRNA sense strand
gagguggaagugaacauga

SEQ ID NO: 977362 - RNA, 19 nt, Homo sapiens
  misc_RNA (1)...(19): siRNA sense strand
ucaacuagaaggaggagaa

SEQ ID NO: 977363 - RNA, 19 nt, Homo sapiens
  misc_RNA (1)...(19): siRNA sense strand
gggauaguagucucucuga

SEQ ID NO: 977364 - RNA, 19 nt, Homo sapiens
  misc_RNA (1)...(19): siRNA sense strand
agcagaaccucccagaaug

SEQ ID NO: 977365 - RNA, 19 nt, Homo sapiens
  misc_RNA (1)...(19): siRNA sense strand
aggaagauaguuucucaaa

SEQ ID NO: 977366 - RNA, 19 nt, Homo sapiens
  misc_RNA (1)...(19): siRNA sense strand
gaaugugggaagagcuuug

SEQ ID NO: 977367 - RNA, 19 nt, Homo sapiens
  misc_RNA (1)...(19): siRNA sense strand
cugcaaaggccaagagguu

SEQ ID NO: 977368 - RNA, 19 nt, Homo sapiens
  misc_RNA (1)...(19): siRNA sense strand
uauccagcgugucugaaga

SEQ ID NO: 977369 - RNA, 19 nt, Homo sapiens
  misc_RNA (1)...(19): siRNA sense strand
ggcaccaccuugugagaca

SEQ ID NO: 977370 - RNA, 19 nt, Homo sapiens
  misc_RNA (1)...(19): siRNA sense strand
cagcagcuccagaggaaug

SEQ ID NO: 977371 - RNA, 19 nt, Homo sapiens
  misc_RNA (1)...(19): siRNA sense strand
gcugaggacaggucacaau

SEQ ID NO: 977372 - RNA, 19 nt, Homo sapiens
  misc_RNA (1)...(19): siRNA sense strand
gcucugagugugguaagaa

SEQ ID NO: 977373 - RNA, 19 nt, Homo sapiens
  misc_RNA (1)...(19): siRNA sense strand
gauggauucccuguuaaga

SEQ ID NO: 977374 - RNA, 19 nt, Homo sapiens
  misc_RNA (1)...(19): siRNA sense strand
gagauuuccaauucccaaa

SEQ ID NO: 977375 - RNA, 19 nt, Homo sapiens
  misc_RNA (1)...(19): siRNA sense strand
gaaggaggagaagaacaau

SEQ ID NO: 977376 - RNA, 19 nt, Homo sapiens
  misc_RNA (1)...(19): siRNA sense strand
gggacaggaugggaaucaa

SEQ ID NO: 977377 - RNA, 19 nt, Homo sapiens
  misc_RNA (1)...(19): siRNA sense strand
cuacagcugccucaagugu

SEQ ID NO: 977378 - RNA, 19 nt, Homo sapiens
  misc_RNA (1)...(19): siRNA sense strand
auucugagggucacauaua

SEQ ID NO: 977379 - RNA, 19 nt, Homo sapiens
  misc_RNA (1)...(19): siRNA sense strand
ccugugcugugaccuugaa

SEQ ID NO: 977380 - RNA, 19 nt, Homo sapiens
  misc_RNA (1)...(19): siRNA sense strand
ucuggaacccggagcauga

SEQ ID NO: 977381 - RNA, 19 nt, Homo sapiens
  misc_RNA (1)...(19): siRNA sense strand
ggagguggaagugaacaug

SEQ ID NO: 977382 - RNA, 19 nt, Homo sapiens
  misc_RNA (1)...(19): siRNA sense strand
gauuuccaauucccaaacu

SEQ ID NO: 977383 - RNA, 19 nt, Homo sapiens
  misc_RNA (1)...(19): siRNA sense strand
acuagaaggaggagaagaa

SEQ ID NO: 977384 - RNA, 19 nt, Homo sapiens
  misc_RNA (1)...(19): siRNA sense strand
cugagugugguaagaauuu

SEQ ID NO: 977385 - RNA, 19 nt, Homo sapiens
  misc_RNA (1)...(19): siRNA sense strand
ugucacgugugcacugaau

SEQ ID NO: 977386 - RNA, 19 nt, Homo sapiens
  misc_RNA (1)...(19): siRNA sense strand
ucccuggguuccugcaauu

SEQ ID NO: 977387 - RNA, 19 nt, Homo sapiens
  misc_RNA (1)...(19): siRNA sense strand
gaauguacagcuggaugga

SEQ ID NO: 977388 - RNA, 19 nt, Homo sapiens
  misc_RNA (1)...(19): siRNA sense strand
ccucaucaggcaccagaaa

SEQ ID NO: 977389 - RNA, 19 nt, Homo sapiens
  misc_RNA (1)...(19): siRNA sense strand
ucacgugugcacugaaugu

SEQ ID NO: 977390 - RNA, 19 nt, Homo sapiens
  misc_RNA (1)...(19): siRNA sense strand
cccuacagcugccucaagu

SEQ ID NO: 977391 - RNA, 19 nt, Homo sapiens
  misc_RNA (1)...(19): siRNA sense strand
cagaaccucccagaauguu

SEQ ID NO: 977392 - RNA, 19 nt, Homo sapiens
  misc_RNA (1)...(19): siRNA sense strand
agaagagcuuuggccgaaa

SEQ ID NO: 977393 - RNA, 19 nt, Homo sapiens
  misc_RNA (1)...(19): siRNA sense strand
uuauggagaauaugucaug

SEQ ID NO: 977394 - RNA, 19 nt, Homo sapiens
  misc_RNA (1)...(19): siRNA sense strand
gagagagcccuggcacaag

SEQ ID NO: 977395 - RNA, 19 nt, Homo sapiens
  misc_RNA (1)...(19): siRNA sense strand
caggaugggaaucaaugaa

SEQ ID NO: 977396 - RNA, 19 nt, Homo sapiens
  misc_RNA (1)...(19): siRNA sense strand
agaaccucccagaauguua

SEQ ID NO: 977397 - RNA, 19 nt, Homo sapiens
  misc_RNA (1)...(19): siRNA sense strand
caggaaaacugugggauag

SEQ ID NO: 977398 - RNA, 19 nt, Homo sapiens
  misc_RNA (1)...(19): siRNA sense strand
gaaauugacuuguccuuca

SEQ ID NO: 977399 - RNA, 19 nt, Homo sapiens
  misc_RNA (1)...(19): siRNA sense strand
gcaaaucucuccucaccaa

SEQ ID NO: 977400 - RNA, 19 nt, Homo sapiens
  misc_RNA (1)...(19): siRNA sense strand
guaaauaggucuaaaucca

SEQ ID NO: 977401 - RNA, 19 nt, Homo sapiens
  misc_RNA (1)...(19): siRNA sense strand
gaacccaacccuuucagua

SEQ ID NO: 977402 - RNA, 19 nt, Homo sapiens
  misc_RNA (1)...(19): siRNA sense strand
gaacaugaagcucuugauu

SEQ ID NO: 977403 - RNA, 19 nt, Homo sapiens
  misc_RNA (1)...(19): siRNA sense strand
gaacagaaggcacuagaug

SEQ ID NO: 977404 - RNA, 19 nt, Homo sapiens
  misc_RNA (1)...(19): siRNA sense strand
ccucugaucuucacauuug

SEQ ID NO: 977405 - RNA, 19 nt, Homo sapiens
  misc_RNA (1)...(19): siRNA sense strand
gcaaagugaccucuucaaa

SEQ ID NO: 977406 - RNA, 19 nt, Homo sapiens
  misc_RNA (1)...(19): siRNA sense strand
gacuaagccuggaguaauu

SEQ ID NO: 977407 - RNA, 19 nt, Homo sapiens
  misc_RNA (1)...(19): siRNA sense strand
ggaauucgaagcaaacaaa

SEQ ID NO: 977408 - RNA, 19 nt, Homo sapiens
  misc_RNA (1)...(19): siRNA sense strand
uaaauccaaugacuacuug

SEQ ID NO: 977409 - RNA, 19 nt, Homo sapiens
  misc_RNA (1)...(19): siRNA sense strand
gaaagggaauucgaagcaa

SEQ ID NO: 977410 - RNA, 19 nt, Homo sapiens
  misc_RNA (1)...(19): siRNA sense strand
gcagcaaagugaccucuuc

SEQ ID NO: 977411 - RNA, 19 nt, Homo sapiens
  misc_RNA (1)...(19): siRNA sense strand
ccacagacccucucacaug

SEQ ID NO: 977412 - RNA, 19 nt, Homo sapiens
  misc_RNA (1)...(19): siRNA sense strand
gaagagcucugugcuacca

SEQ ID NO: 977413 - RNA, 19 nt, Homo sapiens
  misc_RNA (1)...(19): siRNA sense strand
gcacagcucaggcagcaaa

SEQ ID NO: 977414 - RNA, 19 nt, Homo sapiens
  misc_RNA (1)...(19): siRNA sense strand
ccucuaaauuccuuguuaa

SEQ ID NO: 977415 - RNA, 19 nt, Homo sapiens
  misc_RNA (1)...(19): siRNA sense strand
gcagcaaucccuacaaaca

SEQ ID NO: 977416 - RNA, 19 nt, Homo sapiens
  misc_RNA (1)...(19): siRNA sense strand
gaaaccaaauaugcaaauc

SEQ ID NO: 977417 - RNA, 19 nt, Homo sapiens
  misc_RNA (1)...(19): siRNA sense strand
aaagggaauucgaagcaaa

SEQ ID NO: 977418 - RNA, 19 nt, Homo sapiens
  misc_RNA (1)...(19): siRNA sense strand
aagagcagcuggucgagaa

SEQ ID NO: 977419 - RNA, 19 nt, Homo sapiens
  misc_RNA (1)...(19): siRNA sense strand
aaagugaccucuucaaagc

SEQ ID NO: 977420 - RNA, 19 nt, Homo sapiens
  misc_RNA (1)...(19): siRNA sense strand
ggacaacacauuagaacca

SEQ ID NO: 977421 - RNA, 19 nt, Homo sapiens
  misc_RNA (1)...(19): siRNA sense strand
caaagugaccucuucaaag

SEQ ID NO: 977422 - RNA, 19 nt, Homo sapiens
  misc_RNA (1)...(19): siRNA sense strand
caacuucuacaguaucuga

SEQ ID NO: 977423 - RNA, 19 nt, Homo sapiens
  misc_RNA (1)...(19): siRNA sense strand
ucaccaacuucuacaguau

SEQ ID NO: 977424 - RNA, 19 nt, Homo sapiens
  misc_RNA (1)...(19): siRNA sense strand
gaaccagccaagacugaaa

SEQ ID NO: 977425 - RNA, 19 nt, Homo sapiens
  misc_RNA (1)...(19): siRNA sense strand
ggaacgauuuuacaagaaa

SEQ ID NO: 977426 - RNA, 19 nt, Homo sapiens
  misc_RNA (1)...(19): siRNA sense strand
ugacaccucuaaauuccuu

SEQ ID NO: 977427 - RNA, 19 nt, Homo sapiens
  misc_RNA (1)...(19): siRNA sense strand
ccaggacccuucagucauc

SEQ ID NO: 977428 - RNA, 19 nt, Homo sapiens
  misc_RNA (1)...(19): siRNA sense strand
caagcugagucauccaaug

SEQ ID NO: 977429 - RNA, 19 nt, Homo sapiens
  misc_RNA (1)...(19): siRNA sense strand
caucuguccuucuccuuga

SEQ ID NO: 977430 - RNA, 19 nt, Homo sapiens
  misc_RNA (1)...(19): siRNA sense strand
ggucuaaauccaaugacua

SEQ ID NO: 977431 - RNA, 19 nt, Homo sapiens
  misc_RNA (1)...(19): siRNA sense strand
gcccaagucucuagcuauc

SEQ ID NO: 977432 - RNA, 19 nt, Homo sapiens
  misc_RNA (1)...(19): siRNA sense strand
agagagagaccaagcgaaa

SEQ ID NO: 977433 - RNA, 19 nt, Homo sapiens
  misc_RNA (1)...(19): siRNA sense strand
acaagaauuuagaggagaa

SEQ ID NO: 977434 - RNA, 19 nt, Homo sapiens
  misc_RNA (1)...(19): siRNA sense strand
gugaugaacaggagaauuc

SEQ ID NO: 977435 - RNA, 19 nt, Homo sapiens
  misc_RNA (1)...(19): siRNA sense strand
uggaguaauucgcccagua

SEQ ID NO: 977436 - RNA, 19 nt, Homo sapiens
  misc_RNA (1)...(19): siRNA sense strand
ucuaugaacccaacccuuu

SEQ ID NO: 977437 - RNA, 19 nt, Homo sapiens
  misc_RNA (1)...(19): siRNA sense strand
gauaagaguccagaaacug

SEQ ID NO: 977438 - RNA, 19 nt, Homo sapiens
  misc_RNA (1)...(19): siRNA sense strand
ccaacccuuucaguaaaua

SEQ ID NO: 977439 - RNA, 19 nt, Homo sapiens
  misc_RNA (1)...(19): siRNA sense strand
gcugggagccaacaagaga

SEQ ID NO: 977440 - RNA, 19 nt, Homo sapiens
  misc_RNA (1)...(19): siRNA sense strand
gagaaaccaaauaugcaaa

SEQ ID NO: 977441 - RNA, 19 nt, Homo sapiens
  misc_RNA (1)...(19): siRNA sense strand
ccaaggacaacacauuaga

SEQ ID NO: 977442 - RNA, 19 nt, Homo sapiens
  misc_RNA (1)...(19): siRNA sense strand
agagagaccaagcgaaauu

SEQ ID NO: 977443 - RNA, 19 nt, Homo sapiens
  misc_RNA (1)...(19): siRNA sense strand
guccagaaacuguaaauag

SEQ ID NO: 977444 - RNA, 19 nt, Homo sapiens
  misc_RNA (1)...(19): siRNA sense strand
gcucugugcuaccauugau

SEQ ID NO: 977445 - RNA, 19 nt, Homo sapiens
  misc_RNA (1)...(19): siRNA sense strand
caaggacaacacauuagaa

SEQ ID NO: 977446 - RNA, 19 nt, Homo sapiens
  misc_RNA (1)...(19): siRNA sense strand
gaggucaguggaacgauuu

SEQ ID NO: 977447 - RNA, 19 nt, Homo sapiens
  misc_RNA (1)...(19): siRNA sense strand
ucacaacgcaugcaacaag

SEQ ID NO: 977448 - RNA, 19 nt, Homo sapiens
  misc_RNA (1)...(19): siRNA sense strand
cgagaaaccaaauaugcaa

SEQ ID NO: 977449 - RNA, 19 nt, Homo sapiens
  misc_RNA (1)...(19): siRNA sense strand
cucaagaccucaucacauc

SEQ ID NO: 977450 - RNA, 19 nt, Homo sapiens
  misc_RNA (1)...(19): siRNA sense strand
gcugacaccucuaaauucc

SEQ ID NO: 977451 - RNA, 19 nt, Homo sapiens
  misc_RNA (1)...(19): siRNA sense strand
gaauuuagaggagaaacug

SEQ ID NO: 977452 - RNA, 19 nt, Homo sapiens
  misc_RNA (1)...(19): siRNA sense strand
ugacuaagccuggaguaau

SEQ ID NO: 977453 - RNA, 19 nt, Homo sapiens
  misc_RNA (1)...(19): siRNA sense strand
acagaaggcacuagaugaa

SEQ ID NO: 977454 - RNA, 19 nt, Homo sapiens
  misc_RNA (1)...(19): siRNA sense strand
agaagacuaccaacccaua

SEQ ID NO: 977455 - RNA, 19 nt, Homo sapiens
  misc_RNA (1)...(19): siRNA sense strand
uaagaguccagaaacugua

SEQ ID NO: 977456 - RNA, 19 nt, Homo sapiens
  misc_RNA (1)...(19): siRNA sense strand
gaaacuguaaauaggucua

SEQ ID NO: 977457 - RNA, 19 nt, Homo sapiens
  misc_RNA (1)...(19): siRNA sense strand
acccaacccuuucaguaaa

SEQ ID NO: 977458 - RNA, 19 nt, Homo sapiens
  misc_RNA (1)...(19): siRNA sense strand
ucuaugcauucuucugauu

SEQ ID NO: 977459 - RNA, 19 nt, Homo sapiens
  misc_RNA (1)...(19): siRNA sense strand
uggcugacaccucuaaauu

SEQ ID NO: 977460 - RNA, 19 nt, Homo sapiens
  misc_RNA (1)...(19): siRNA sense strand
aaagcugaauauguccuua

SEQ ID NO: 977461 - RNA, 19 nt, Homo sapiens
  misc_RNA (1)...(19): siRNA sense strand
agacauuguuggguucuga

SEQ ID NO: 977462 - RNA, 19 nt, Homo sapiens
  misc_RNA (1)...(19): siRNA sense strand
cugaaagugucuccaagga

SEQ ID NO: 977463 - RNA, 19 nt, Homo sapiens
  misc_RNA (1)...(19): siRNA sense strand
gcaauacaagaccaaguca

SEQ ID NO: 977464 - RNA, 19 nt, Homo sapiens
  misc_RNA (1)...(19): siRNA sense strand
ccaagucucuagcuaucuc

SEQ ID NO: 977465 - RNA, 19 nt, Homo sapiens
  misc_RNA (1)...(19): siRNA sense strand
agaggucaguggaacgauu

SEQ ID NO: 977466 - RNA, 19 nt, Homo sapiens
  misc_RNA (1)...(19): siRNA sense strand
ggcuauuccugaacaugaa

SEQ ID NO: 977467 - RNA, 19 nt, Homo sapiens
  misc_RNA (1)...(19): siRNA sense strand
gugcuaccauugauaaggu

SEQ ID NO: 977468 - RNA, 19 nt, Homo sapiens
  misc_RNA (1)...(19): siRNA sense strand
caagggaugcagcaaagug

SEQ ID NO: 977469 - RNA, 19 nt, Homo sapiens
  misc_RNA (1)...(19): siRNA sense strand
ccaaaccucugaucuucac

SEQ ID NO: 977470 - RNA, 19 nt, Homo sapiens
  misc_RNA (1)...(19): siRNA sense strand
ccuacaaacacauugcuuu

SEQ ID NO: 977471 - RNA, 19 nt, Homo sapiens
  misc_RNA (1)...(19): siRNA sense strand
ucuggucucugauguagug

SEQ ID NO: 977472 - RNA, 19 nt, Homo sapiens
  misc_RNA (1)...(19): siRNA sense strand
cuaaauccaaugacuacuu

SEQ ID NO: 977473 - RNA, 19 nt, Homo sapiens
  misc_RNA (1)...(19): siRNA sense strand
augaagcucuugauuccaa

SEQ ID NO: 977474 - RNA, 19 nt, Homo sapiens
  misc_RNA (1)...(19): siRNA sense strand
cagccaagacugaaagugu

SEQ ID NO: 977475 - RNA, 19 nt, Homo sapiens
  misc_RNA (1)...(19): siRNA sense strand
acaagaaagggaauucgaa

SEQ ID NO: 977476 - RNA, 19 nt, Homo sapiens
  misc_RNA (1)...(19): siRNA sense strand
gagagaccaagcgaaauug

SEQ ID NO: 977477 - RNA, 19 nt, Homo sapiens
  misc_RNA (1)...(19): siRNA sense strand
acaugaagcucuugauucc

SEQ ID NO: 977478 - RNA, 19 nt, Homo sapiens
  misc_RNA (1)...(19): siRNA sense strand
aaugguggcuauuccugaa

SEQ ID NO: 977479 - RNA, 19 nt, Homo sapiens
  misc_RNA (1)...(19): siRNA sense strand
ccucucacaugcugacugu

SEQ ID NO: 977480 - RNA, 19 nt, Homo sapiens
  misc_RNA (1)...(19): siRNA sense strand
aacccaacccuuucaguaa

SEQ ID NO: 977481 - RNA, 19 nt, Homo sapiens
  misc_RNA (1)...(19): siRNA sense strand
ggaguaauucgcccaguac

SEQ ID NO: 977482 - RNA, 19 nt, Homo sapiens
  misc_RNA (1)...(19): siRNA sense strand
ugauaagaguccagaaacu

SEQ ID NO: 977483 - RNA, 19 nt, Homo sapiens
  misc_RNA (1)...(19): siRNA sense strand
cucaccaacuucuacagua

SEQ ID NO: 977484 - RNA, 19 nt, Homo sapiens
  misc_RNA (1)...(19): siRNA sense strand
caccaguggagcucuauuu

SEQ ID NO: 977485 - RNA, 19 nt, Homo sapiens
  misc_RNA (1)...(19): siRNA sense strand
cuccaaggacaacacauua

SEQ ID NO: 977486 - RNA, 19 nt, Homo sapiens
  misc_RNA (1)...(19): siRNA sense strand
aagaggaggaagucuauga

SEQ ID NO: 977487 - RNA, 19 nt, Homo sapiens
  misc_RNA (1)...(19): siRNA sense strand
uccagaaacuguaaauagg

SEQ ID NO: 977488 - RNA, 19 nt, Homo sapiens
  misc_RNA (1)...(19): siRNA sense strand
ucagucaucuguccuucuc

SEQ ID NO: 977489 - RNA, 19 nt, Homo sapiens
  misc_RNA (1)...(19): siRNA sense strand
gauaacagcgaccucuuuu

SEQ ID NO: 977490 - RNA, 19 nt, Homo sapiens
  misc_RNA (1)...(19): siRNA sense strand
gaagccaaaccucugaucu

SEQ ID NO: 977491 - RNA, 19 nt, Homo sapiens
  misc_RNA (1)...(19): siRNA sense strand
agauaacagcgaccucuuu

SEQ ID NO: 977492 - RNA, 19 nt, Homo sapiens
  misc_RNA (1)...(19): siRNA sense strand
accucuaaauuccuuguua

SEQ ID NO: 977493 - RNA, 19 nt, Homo sapiens
  misc_RNA (1)...(19): siRNA sense strand
ggaacagaaggcacuagau

SEQ ID NO: 977494 - RNA, 19 nt, Homo sapiens
  misc_RNA (1)...(19): siRNA sense strand
agccaaaccucugaucuuc

SEQ ID NO: 977495 - RNA, 19 nt, Homo sapiens
  misc_RNA (1)...(19): siRNA sense strand
gaagacuaccaacccauac

SEQ ID NO: 977496 - RNA, 19 nt, Homo sapiens
  misc_RNA (1)...(19): siRNA sense strand
aaccaaauaugcaaaucuc

SEQ ID NO: 977497 - RNA, 19 nt, Homo sapiens
  misc_RNA (1)...(19): siRNA sense strand
aaugacuacuugaccuuga

SEQ ID NO: 977498 - RNA, 19 nt, Homo sapiens
  misc_RNA (1)...(19): siRNA sense strand
gcaccugcaucgccuucua

SEQ ID NO: 977499 - RNA, 19 nt, Homo sapiens
  misc_RNA (1)...(19): siRNA sense strand
ccagaaaguuccagaagca

SEQ ID NO: 977500 - RNA, 19 nt, Homo sapiens
  misc_RNA (1)...(19): siRNA sense strand
accaugagcuccauauuug

SEQ ID NO: 977501 - RNA, 19 nt, Homo sapiens
  misc_RNA (1)...(19): siRNA sense strand
acaagguggugguagauga

SEQ ID NO: 977502 - RNA, 19 nt, Homo sapiens
  misc_RNA (1)...(19): siRNA sense strand
gaagagaacaaaccuccau

SEQ ID NO: 977503 - RNA, 19 nt, Homo sapiens
  misc_RNA (1)...(19): siRNA sense strand
ccauggcccuccucuucua

SEQ ID NO: 977504 - RNA, 19 nt, Homo sapiens
  misc_RNA (1)...(19): siRNA sense strand
cgugugggcuucaugaugu

SEQ ID NO: 977505 - RNA, 19 nt, Homo sapiens
  misc_RNA (1)...(19): siRNA sense strand
gcgcugaucuacaagaaaa

SEQ ID NO: 977506 - RNA, 19 nt, Homo sapiens
  misc_RNA (1)...(19): siRNA sense strand
gaaaguuccagaagcagau

SEQ ID NO: 977507 - RNA, 19 nt, Homo sapiens
  misc_RNA (1)...(19): siRNA sense strand
ggaugagccgucagugaaa

SEQ ID NO: 977508 - RNA, 19 nt, Homo sapiens
  misc_RNA (1)...(19): siRNA sense strand
acaagaaaauccacaagaa

SEQ ID NO: 977509 - RNA, 19 nt, Homo sapiens
  misc_RNA (1)...(19): siRNA sense strand
ggaggaggcgggugaucuu

SEQ ID NO: 977510 - RNA, 19 nt, Homo sapiens
  misc_RNA (1)...(19): siRNA sense strand
gagaggugccagaagagaa

SEQ ID NO: 977511 - RNA, 19 nt, Homo sapiens
  misc_RNA (1)...(19): siRNA sense strand
aaccaugagcuccauauuu

SEQ ID NO: 977512 - RNA, 19 nt, Homo sapiens
  misc_RNA (1)...(19): siRNA sense strand
cgacucagaaagagagaaa

SEQ ID NO: 977513 - RNA, 19 nt, Homo sapiens
  misc_RNA (1)...(19): siRNA sense strand
agccgaagcugccgaagga

SEQ ID NO: 977514 - RNA, 19 nt, Homo sapiens
  misc_RNA (1)...(19): siRNA sense strand
uggaugagccgucagugaa

SEQ ID NO: 977515 - RNA, 19 nt, Homo sapiens
  misc_RNA (1)...(19): siRNA sense strand
cagaaagagagaaacaaga

SEQ ID NO: 977516 - RNA, 19 nt, Homo sapiens
  misc_RNA (1)...(19): siRNA sense strand
gaagauccccagaaaguuc

SEQ ID NO: 977517 - RNA, 19 nt, Homo sapiens
  misc_RNA (1)...(19): siRNA sense strand
auauuugcuuccucccuua

SEQ ID NO: 977518 - RNA, 19 nt, Homo sapiens
  misc_RNA (1)...(19): siRNA sense strand
agaaagagagaaacaagag

SEQ ID NO: 977519 - RNA, 19 nt, Homo sapiens
  misc_RNA (1)...(19): siRNA sense strand
accgagaggugccagaaga

SEQ ID NO: 977520 - RNA, 19 nt, Homo sapiens
  misc_RNA (1)...(19): siRNA sense strand
caagguggugguagaugaa

SEQ ID NO: 977521 - RNA, 19 nt, Homo sapiens
  misc_RNA (1)...(19): siRNA sense strand
ggagaggccgaggguuuga

SEQ ID NO: 977522 - RNA, 19 nt, Homo sapiens
  misc_RNA (1)...(19): siRNA sense strand
cggcgcugaucuacaagaa

SEQ ID NO: 977523 - RNA, 19 nt, Homo sapiens
  misc_RNA (1)...(19): siRNA sense strand
uacccucucugugguguuu

SEQ ID NO: 977524 - RNA, 19 nt, Homo sapiens
  misc_RNA (1)...(19): siRNA sense strand
uaaagcacuuacccucucu

SEQ ID NO: 977525 - RNA, 19 nt, Homo sapiens
  misc_RNA (1)...(19): siRNA sense strand
caucgugaacagcaucgua

SEQ ID NO: 977526 - RNA, 19 nt, Homo sapiens
  misc_RNA (1)...(19): siRNA sense strand
gggcgcugcucuuggucuu

SEQ ID NO: 977527 - RNA, 19 nt, Homo sapiens
  misc_RNA (1)...(19): siRNA sense strand
gagaacaaaccuccaucca

SEQ ID NO: 977528 - RNA, 19 nt, Homo sapiens
  misc_RNA (1)...(19): siRNA sense strand
ucagaaagagagaaacaag

SEQ ID NO: 977529 - RNA, 19 nt, Homo sapiens
  misc_RNA (1)...(19): siRNA sense strand
cccaggcagugcugucuga

SEQ ID NO: 977530 - RNA, 19 nt, Homo sapiens
  misc_RNA (1)...(19): siRNA sense strand
caugguugguggcauccuu

SEQ ID NO: 977531 - RNA, 19 nt, Homo sapiens
  misc_RNA (1)...(19): siRNA sense strand
gcgcugcucuuggucuucu

SEQ ID NO: 977532 - RNA, 19 nt, Homo sapiens
  misc_RNA (1)...(19): siRNA sense strand
acgacaagguggugguaga

SEQ ID NO: 977533 - RNA, 19 nt, Homo sapiens
  misc_RNA (1)...(19): siRNA sense strand
gcauguucuuggugaaguc

SEQ ID NO: 977534 - RNA, 19 nt, Homo sapiens
  misc_RNA (1)...(19): siRNA sense strand
ccacgagccuccuguuccu

SEQ ID NO: 977535 - RNA, 19 nt, Homo sapiens
  misc_RNA (1)...(19): siRNA sense strand
gaugagccgucagugaaaa

SEQ ID NO: 977536 - RNA, 19 nt, Homo sapiens
  misc_RNA (1)...(19): siRNA sense strand
aaaccaugagcuccauauu

SEQ ID NO: 977537 - RNA, 19 nt, Homo sapiens
  misc_RNA (1)...(19): siRNA sense strand
ggaggaggcacagcucgau

SEQ ID NO: 977538 - RNA, 19 nt, Homo sapiens
  misc_RNA (1)...(19): siRNA sense strand
ggccgaggguuugaugaag

SEQ ID NO: 977539 - RNA, 19 nt, Homo sapiens
  misc_RNA (1)...(19): siRNA sense strand
uuggagaggccgaggguuu

SEQ ID NO: 977540 - RNA, 19 nt, Homo sapiens
  misc_RNA (1)...(19): siRNA sense strand
cgggaaggcaggcaagaug

SEQ ID NO: 977541 - RNA, 19 nt, Homo sapiens
  misc_RNA (1)...(19): siRNA sense strand
ggagcaggcccagaucaag

SEQ ID NO: 977542 - RNA, 19 nt, Homo sapiens
  misc_RNA (1)...(19): siRNA sense strand
caagcacggccucuucagu

SEQ ID NO: 977543 - RNA, 19 nt, Homo sapiens
  misc_RNA (1)...(19): siRNA sense strand
ggcgggugaucuuccugaa

SEQ ID NO: 977544 - RNA, 19 nt, Homo sapiens
  misc_RNA (1)...(19): siRNA sense strand
ggaggcgggugaucuuccu

SEQ ID NO: 977545 - RNA, 19 nt, Homo sapiens
  misc_RNA (1)...(19): siRNA sense strand
gcucaaggccuuuggcuau

SEQ ID NO: 977546 - RNA, 19 nt, Homo sapiens
  misc_RNA (1)...(19): siRNA sense strand
gaucacagcgcagcaggua

SEQ ID NO: 977547 - RNA, 19 nt, Homo sapiens
  misc_RNA (1)...(19): siRNA sense strand
ugagagagccaaacauuuc

SEQ ID NO: 977548 - RNA, 19 nt, Homo sapiens
  misc_RNA (1)...(19): siRNA sense strand
gcugguggcuccucuugau

SEQ ID NO: 977549 - RNA, 19 nt, Homo sapiens
  misc_RNA (1)...(19): siRNA sense strand
ggacaaagugaaagaaguc

SEQ ID NO: 977550 - RNA, 19 nt, Homo sapiens
  misc_RNA (1)...(19): siRNA sense strand
gagagaaaauuccauguuc

SEQ ID NO: 977551 - RNA, 19 nt, Homo sapiens
  misc_RNA (1)...(19): siRNA sense strand
uggcaucugugacaacuug

SEQ ID NO: 977552 - RNA, 19 nt, Homo sapiens
  misc_RNA (1)...(19): siRNA sense strand
caacugagagagccaaaca

SEQ ID NO: 977553 - RNA, 19 nt, Homo sapiens
  misc_RNA (1)...(19): siRNA sense strand
ggaaguaucaguggucaca

SEQ ID NO: 977554 - RNA, 19 nt, Homo sapiens
  misc_RNA (1)...(19): siRNA sense strand
ggaccaucguggacaaagu

SEQ ID NO: 977555 - RNA, 19 nt, Homo sapiens
  misc_RNA (1)...(19): siRNA sense strand
cuucuggugucaaagcuuu

SEQ ID NO: 977556 - RNA, 19 nt, Homo sapiens
  misc_RNA (1)...(19): siRNA sense strand
ucacagcgcagcagguaga

SEQ ID NO: 977557 - RNA, 19 nt, Homo sapiens
  misc_RNA (1)...(19): siRNA sense strand
gcugaugaaugggagaugu

SEQ ID NO: 977558 - RNA, 19 nt, Homo sapiens
  misc_RNA (1)...(19): siRNA sense strand
caucguggacaaagugaaa

SEQ ID NO: 977559 - RNA, 19 nt, Homo sapiens
  misc_RNA (1)...(19): siRNA sense strand
gaaugggagauguggaaga

SEQ ID NO: 977560 - RNA, 19 nt, Homo sapiens
  misc_RNA (1)...(19): siRNA sense strand
gcagguagaccagcucaag

SEQ ID NO: 977561 - RNA, 19 nt, Homo sapiens
  misc_RNA (1)...(19): siRNA sense strand
ugacccaguucugcacauu

SEQ ID NO: 977562 - RNA, 19 nt, Homo sapiens
  misc_RNA (1)...(19): siRNA sense strand
gagccaaacauuucuacag

SEQ ID NO: 977563 - RNA, 19 nt, Homo sapiens
  misc_RNA (1)...(19): siRNA sense strand
cacccuugauggagagaaa

SEQ ID NO: 977564 - RNA, 19 nt, Homo sapiens
  misc_RNA (1)...(19): siRNA sense strand
acccaguucugcacauuga

SEQ ID NO: 977565 - RNA, 19 nt, Homo sapiens
  misc_RNA (1)...(19): siRNA sense strand
gaccaucguggacaaagug

SEQ ID NO: 977566 - RNA, 19 nt, Homo sapiens
  misc_RNA (1)...(19): siRNA sense strand
ucaaggccuuuggcuaugu

SEQ ID NO: 977567 - RNA, 19 nt, Homo sapiens
  misc_RNA (1)...(19): siRNA sense strand
ggagagaaaauuccauguu

SEQ ID NO: 977568 - RNA, 19 nt, Homo sapiens
  misc_RNA (1)...(19): siRNA sense strand
gaaaauuccauguucuugu

SEQ ID NO: 977569 - RNA, 19 nt, Homo sapiens
  misc_RNA (1)...(19): siRNA sense strand
uggacaaagugaaagaagu

SEQ ID NO: 977570 - RNA, 19 nt, Homo sapiens
  misc_RNA (1)...(19): siRNA sense strand
acugagagagccaaacauu

SEQ ID NO: 977571 - RNA, 19 nt, Homo sapiens
  misc_RNA (1)...(19): siRNA sense strand
ccaguggcaucugugacaa

SEQ ID NO: 977572 - RNA, 19 nt, Homo sapiens
  misc_RNA (1)...(19): siRNA sense strand
cugagagagccaaacauuu

SEQ ID NO: 977573 - RNA, 19 nt, Homo sapiens
  misc_RNA (1)...(19): siRNA sense strand
gagagagccaaacauuucu

SEQ ID NO: 977574 - RNA, 19 nt, Homo sapiens
  misc_RNA (1)...(19): siRNA sense strand
aaaauuccauguucuugug

SEQ ID NO: 977575 - RNA, 19 nt, Homo sapiens
  misc_RNA (1)...(19): siRNA sense strand
aaugggagauguggaagag

SEQ ID NO: 977576 - RNA, 19 nt, Homo sapiens
  misc_RNA (1)...(19): siRNA sense strand
gcuggugugcggagaugaa

SEQ ID NO: 977577 - RNA, 19 nt, Homo sapiens
  misc_RNA (1)...(19): siRNA sense strand
caaggccuuuggcuauguc

SEQ ID NO: 977578 - RNA, 19 nt, Homo sapiens
  misc_RNA (1)...(19): siRNA sense strand
gcaaagaaguauuaaggaa

SEQ ID NO: 977579 - RNA, 19 nt, Homo sapiens
  misc_RNA (1)...(19): siRNA sense strand
caauuaugcucucauguua

SEQ ID NO: 977580 - RNA, 19 nt, Homo sapiens
  misc_RNA (1)...(19): siRNA sense strand
caagaaguuucacguguua

SEQ ID NO: 977581 - RNA, 19 nt, Homo sapiens
  misc_RNA (1)...(19): siRNA sense strand
ggacuuacucguuauguua

SEQ ID NO: 977582 - RNA, 19 nt, Homo sapiens
  misc_RNA (1)...(19): siRNA sense strand
gaacaauuaugcucucaug

SEQ ID NO: 977583 - RNA, 19 nt, Homo sapiens
  misc_RNA (1)...(19): siRNA sense strand
uaaagaagccucccaaaga

SEQ ID NO: 977584 - RNA, 19 nt, Homo sapiens
  misc_RNA (1)...(19): siRNA sense strand
cgucagaucuggaacaauu

SEQ ID NO: 977585 - RNA, 19 nt, Homo sapiens
  misc_RNA (1)...(19): siRNA sense strand
ccaggaaccuaccuugaaa

SEQ ID NO: 977586 - RNA, 19 nt, Homo sapiens
  misc_RNA (1)...(19): siRNA sense strand
gaagaaccaaucaaaguug

SEQ ID NO: 977587 - RNA, 19 nt, Homo sapiens
  misc_RNA (1)...(19): siRNA sense strand
ucaaugguguuccuucgua

SEQ ID NO: 977588 - RNA, 19 nt, Homo sapiens
  misc_RNA (1)...(19): siRNA sense strand
gaaauucaguaucaagaac

SEQ ID NO: 977589 - RNA, 19 nt, Homo sapiens
  misc_RNA (1)...(19): siRNA sense strand
guacaugaaaucccgcuua

SEQ ID NO: 977590 - RNA, 19 nt, Homo sapiens
  misc_RNA (1)...(19): siRNA sense strand
gaagaagauuacaaagaca

SEQ ID NO: 977591 - RNA, 19 nt, Homo sapiens
  misc_RNA (1)...(19): siRNA sense strand
ugaagaagauuacaaagac

SEQ ID NO: 977592 - RNA, 19 nt, Homo sapiens
  misc_RNA (1)...(19): siRNA sense strand
aaacguuccuucccauuug

SEQ ID NO: 977593 - RNA, 19 nt, Homo sapiens
  misc_RNA (1)...(19): siRNA sense strand
caacaaggcaguaauuagu

SEQ ID NO: 977594 - RNA, 19 nt, Homo sapiens
  misc_RNA (1)...(19): siRNA sense strand
gaaaucaacaaggcaguaa

SEQ ID NO: 977595 - RNA, 19 nt, Homo sapiens
  misc_RNA (1)...(19): siRNA sense strand
gaaccuaccuugaaaacug

SEQ ID NO: 977596 - RNA, 19 nt, Homo sapiens
  misc_RNA (1)...(19): siRNA sense strand
acaaggcaguaauuaguaa

SEQ ID NO: 977597 - RNA, 19 nt, Homo sapiens
  misc_RNA (1)...(19): siRNA sense strand
gagcaaagaaguauuaagg

SEQ ID NO: 977598 - RNA, 19 nt, Homo sapiens
  misc_RNA (1)...(19): siRNA sense strand
ggaaauucaguaucaagaa

SEQ ID NO: 977599 - RNA, 19 nt, Homo sapiens
  misc_RNA (1)...(19): siRNA sense strand
ucaaggaacucugugaauc

SEQ ID NO: 977600 - RNA, 19 nt, Homo sapiens
  misc_RNA (1)...(19): siRNA sense strand
acaagaaguuucacguguu

SEQ ID NO: 977601 - RNA, 19 nt, Homo sapiens
  misc_RNA (1)...(19): siRNA sense strand
uacaugaaaucccgcuuaa

SEQ ID NO: 977602 - RNA, 19 nt, Homo sapiens
  misc_RNA (1)...(19): siRNA sense strand
aaagaagccucccaaagag

SEQ ID NO: 977603 - RNA, 19 nt, Homo sapiens
  misc_RNA (1)...(19): siRNA sense strand
caagaacaaaccaacaauu

SEQ ID NO: 977604 - RNA, 19 nt, Homo sapiens
  misc_RNA (1)...(19): siRNA sense strand
ccaaagagcaaagaaguau

SEQ ID NO: 977605 - RNA, 19 nt, Homo sapiens
  misc_RNA (1)...(19): siRNA sense strand
caacaauucacucaaggaa

SEQ ID NO: 977606 - RNA, 19 nt, Homo sapiens
  misc_RNA (1)...(19): siRNA sense strand
gaugaagaaacgaaggaua

SEQ ID NO: 977607 - RNA, 19 nt, Homo sapiens
  misc_RNA (1)...(19): siRNA sense strand
gaaaucccgcuuaaccuau

SEQ ID NO: 977608 - RNA, 19 nt, Homo sapiens
  misc_RNA (1)...(19): siRNA sense strand
ccauuugccucaaguaaca

SEQ ID NO: 977609 - RNA, 19 nt, Homo sapiens
  misc_RNA (1)...(19): siRNA sense strand
ggaacucugugaaucucuu

SEQ ID NO: 977610 - RNA, 19 nt, Homo sapiens
  misc_RNA (1)...(19): siRNA sense strand
guaaagaagccucccaaag

SEQ ID NO: 977611 - RNA, 19 nt, Homo sapiens
  misc_RNA (1)...(19): siRNA sense strand
ggggaggacuuacucguua

SEQ ID NO: 977612 - RNA, 19 nt, Homo sapiens
  misc_RNA (1)...(19): siRNA sense strand
aaaucccgcuuaaccuaua

SEQ ID NO: 977613 - RNA, 19 nt, Homo sapiens
  misc_RNA (1)...(19): siRNA sense strand
acaaagacauagaacaucu

SEQ ID NO: 977614 - RNA, 19 nt, Homo sapiens
  misc_RNA (1)...(19): siRNA sense strand
ugaaaucccgcuuaaccua

SEQ ID NO: 977615 - RNA, 19 nt, Homo sapiens
  misc_RNA (1)...(19): siRNA sense strand
ugaagaaccaaucaaaguu

SEQ ID NO: 977616 - RNA, 19 nt, Homo sapiens
  misc_RNA (1)...(19): siRNA sense strand
uaccaaaggucguuauuuu

SEQ ID NO: 977617 - RNA, 19 nt, Homo sapiens
  misc_RNA (1)...(19): siRNA sense strand
aguggaagcugacauaaag

SEQ ID NO: 977618 - RNA, 19 nt, Homo sapiens
  misc_RNA (1)...(19): siRNA sense strand
uuugaaagcugacaagaag

SEQ ID NO: 977619 - RNA, 19 nt, Homo sapiens
  misc_RNA (1)...(19): siRNA sense strand
gaacaaaccaacaauucac

SEQ ID NO: 977620 - RNA, 19 nt, Homo sapiens
  misc_RNA (1)...(19): siRNA sense strand
gguguuccuucguacauga

SEQ ID NO: 977621 - RNA, 19 nt, Homo sapiens
  misc_RNA (1)...(19): siRNA sense strand
gaaccugaacccguaaaga

SEQ ID NO: 977622 - RNA, 19 nt, Homo sapiens
  misc_RNA (1)...(19): siRNA sense strand
uauaguggaagcugacaua

SEQ ID NO: 977623 - RNA, 19 nt, Homo sapiens
  misc_RNA (1)...(19): siRNA sense strand
gccaggaaccuaccuugaa

SEQ ID NO: 977624 - RNA, 19 nt, Homo sapiens
  misc_RNA (1)...(19): siRNA sense strand
gaaagcugacaagaaguuu

SEQ ID NO: 977625 - RNA, 19 nt, Homo sapiens
  misc_RNA (1)...(19): siRNA sense strand
aagaaacuguggccaggaa

SEQ ID NO: 977626 - RNA, 19 nt, Homo sapiens
  misc_RNA (1)...(19): siRNA sense strand
acaauuaugcucucauguu

SEQ ID NO: 977627 - RNA, 19 nt, Homo sapiens
  misc_RNA (1)...(19): siRNA sense strand
acaauucacucaaggaacu

SEQ ID NO: 977628 - RNA, 19 nt, Homo sapiens
  misc_RNA (1)...(19): siRNA sense strand
ugaaagcugacaagaaguu

SEQ ID NO: 977629 - RNA, 19 nt, Homo sapiens
  misc_RNA (1)...(19): siRNA sense strand
gaccagaaaucucuaucac

SEQ ID NO: 977630 - RNA, 19 nt, Homo sapiens
  misc_RNA (1)...(19): siRNA sense strand
gaagaaccugaacccguaa

SEQ ID NO: 977631 - RNA, 19 nt, Homo sapiens
  misc_RNA (1)...(19): siRNA sense strand
gggaggacuuacucguuau

SEQ ID NO: 977632 - RNA, 19 nt, Homo sapiens
  misc_RNA (1)...(19): siRNA sense strand
ccgcuuaaccuauaaucaa

SEQ ID NO: 977633 - RNA, 19 nt, Homo sapiens
  misc_RNA (1)...(19): siRNA sense strand
aagcugacauaaaggaguu

SEQ ID NO: 977634 - RNA, 19 nt, Homo sapiens
  misc_RNA (1)...(19): siRNA sense strand
cgcuuaaccuauaaucaaa

SEQ ID NO: 977635 - RNA, 19 nt, Homo sapiens
  misc_RNA (1)...(19): siRNA sense strand
aagaacaaaccaacaauuc

SEQ ID NO: 977636 - RNA, 19 nt, Homo sapiens
  misc_RNA (1)...(19): siRNA sense strand
caaggaacucugugaaucu

SEQ ID NO: 977637 - RNA, 19 nt, Homo sapiens
  misc_RNA (1)...(19): siRNA sense strand
gauaccaaaggucguuauu

SEQ ID NO: 977638 - RNA, 19 nt, Homo sapiens
  misc_RNA (1)...(19): siRNA sense strand
aaacgaaggauaccaaagg

SEQ ID NO: 977639 - RNA, 19 nt, Homo sapiens
  misc_RNA (1)...(19): siRNA sense strand
gaaacgaaggauaccaaag

SEQ ID NO: 977640 - RNA, 19 nt, Homo sapiens
  misc_RNA (1)...(19): siRNA sense strand
aaucaacaaggcaguaauu

SEQ ID NO: 977641 - RNA, 19 nt, Homo sapiens
  misc_RNA (1)...(19): siRNA sense strand
aaccugaacccguaaagaa

SEQ ID NO: 977642 - RNA, 19 nt, Homo sapiens
  misc_RNA (1)...(19): siRNA sense strand
caaagagcaaagaaguauu

SEQ ID NO: 977643 - RNA, 19 nt, Homo sapiens
  misc_RNA (1)...(19): siRNA sense strand
caaaguugaagaaccugaa

SEQ ID NO: 977644 - RNA, 19 nt, Homo sapiens
  misc_RNA (1)...(19): siRNA sense strand
gaagauuacaaagacauag

SEQ ID NO: 977645 - RNA, 19 nt, Homo sapiens
  misc_RNA (1)...(19): siRNA sense strand
caaaccaacaauucacuca

SEQ ID NO: 977646 - RNA, 19 nt, Homo sapiens
  misc_RNA (1)...(19): siRNA sense strand
agaacaaaccaacaauuca

SEQ ID NO: 977647 - RNA, 19 nt, Homo sapiens
  misc_RNA (1)...(19): siRNA sense strand
ucaacaaggcaguaauuag

SEQ ID NO: 977648 - RNA, 19 nt, Homo sapiens
  misc_RNA (1)...(19): siRNA sense strand
cgacacugccggaggcuau

SEQ ID NO: 977649 - RNA, 19 nt, Homo sapiens
  misc_RNA (1)...(19): siRNA sense strand
gaacucugugaaucucuug

SEQ ID NO: 977650 - RNA, 19 nt, Homo sapiens
  misc_RNA (1)...(19): siRNA sense strand
aacaaggcaguaauuagua

SEQ ID NO: 977651 - RNA, 19 nt, Homo sapiens
  misc_RNA (1)...(19): siRNA sense strand
cugaagaaccaaucaaagu

SEQ ID NO: 977652 - RNA, 19 nt, Homo sapiens
  misc_RNA (1)...(19): siRNA sense strand
ccaaaggucguuauuuuau

SEQ ID NO: 977653 - RNA, 19 nt, Homo sapiens
  misc_RNA (1)...(19): siRNA sense strand
ccauuuauaacuugugaug

SEQ ID NO: 977654 - RNA, 19 nt, Homo sapiens
  misc_RNA (1)...(19): siRNA sense strand
uaaaauaggagaugagauc

SEQ ID NO: 977655 - RNA, 19 nt, Homo sapiens
  misc_RNA (1)...(19): siRNA sense strand
gacauagaacaucuuaaag

SEQ ID NO: 977656 - RNA, 19 nt, Homo sapiens
  misc_RNA (1)...(19): siRNA sense strand
caaggcaguaauuaguaaa

SEQ ID NO: 977657 - RNA, 19 nt, Homo sapiens
  misc_RNA (1)...(19): siRNA sense strand
aaccaacaauucacucaag

SEQ ID NO: 977658 - RNA, 19 nt, Homo sapiens
  misc_RNA (1)...(19): siRNA sense strand
cccaaagagcaaagaagua

SEQ ID NO: 977659 - RNA, 19 nt, Homo sapiens
  misc_RNA (1)...(19): siRNA sense strand
ggccaggaaccuaccuuga

SEQ ID NO: 977660 - RNA, 19 nt, Homo sapiens
  misc_RNA (1)...(19): siRNA sense strand
acccagagcuguguuaagg

SEQ ID NO: 977661 - RNA, 19 nt, Homo sapiens
  misc_RNA (1)...(19): siRNA sense strand
ucaagaacaaaccaacaau

SEQ ID NO: 977662 - RNA, 19 nt, Homo sapiens
  misc_RNA (1)...(19): siRNA sense strand
agaaaucaacaaggcagua

SEQ ID NO: 977663 - RNA, 19 nt, Homo sapiens
  misc_RNA (1)...(19): siRNA sense strand
ggaggacuuacucguuaug

SEQ ID NO: 977664 - RNA, 19 nt, Homo sapiens
  misc_RNA (1)...(19): siRNA sense strand
cacguguuacugaauauuu

SEQ ID NO: 977665 - RNA, 19 nt, Homo sapiens
  misc_RNA (1)...(19): siRNA sense strand
gaagaaacgaaggauacca

SEQ ID NO: 977666 - RNA, 19 nt, Homo sapiens
  misc_RNA (1)...(19): siRNA sense strand
gagcuguguuaagggauca

SEQ ID NO: 977667 - RNA, 19 nt, Homo sapiens
  misc_RNA (1)...(19): siRNA sense strand
gacauaaaggaguucacaa

SEQ ID NO: 977668 - RNA, 19 nt, Homo sapiens
  misc_RNA (1)...(19): siRNA sense strand
ugacauaaaggaguucaca

SEQ ID NO: 977669 - RNA, 19 nt, Homo sapiens
  misc_RNA (1)...(19): siRNA sense strand
uaguggaagcugacauaaa

SEQ ID NO: 977670 - RNA, 19 nt, Homo sapiens
  misc_RNA (1)...(19): siRNA sense strand
ugccauuuauaacuuguga

SEQ ID NO: 977671 - RNA, 19 nt, Homo sapiens
  misc_RNA (1)...(19): siRNA sense strand
ucagaucuggaacaauuau

SEQ ID NO: 977672 - RNA, 19 nt, Homo sapiens
  misc_RNA (1)...(19): siRNA sense strand
ugaccagaaaucucuauca

SEQ ID NO: 977673 - RNA, 19 nt, Homo sapiens
  misc_RNA (1)...(19): siRNA sense strand
gacuuacucguuauguuau

SEQ ID NO: 977674 - RNA, 19 nt, Homo sapiens
  misc_RNA (1)...(19): siRNA sense strand
gaaguuucacguguuacug

SEQ ID NO: 977675 - RNA, 19 nt, Homo sapiens
  misc_RNA (1)...(19): siRNA sense strand
ccaacaauucacucaagga

SEQ ID NO: 977676 - RNA, 19 nt, Homo sapiens
  misc_RNA (1)...(19): siRNA sense strand
ggauaccaaaggucguuau

SEQ ID NO: 977677 - RNA, 19 nt, Homo sapiens
  misc_RNA (1)...(19): siRNA sense strand
aagaaacgaaggauaccaa

SEQ ID NO: 977678 - RNA, 19 nt, Homo sapiens
  misc_RNA (1)...(19): siRNA sense strand
ccacaucgacuacuacuua

SEQ ID NO: 977679 - RNA, 19 nt, Homo sapiens
  misc_RNA (1)...(19): siRNA sense strand
caacaaggcuaaugacaca

SEQ ID NO: 977680 - RNA, 19 nt, Homo sapiens
  misc_RNA (1)...(19): siRNA sense strand
gaacagcaucccagacauu

SEQ ID NO: 977681 - RNA, 19 nt, Homo sapiens
  misc_RNA (1)...(19): siRNA sense strand
ugcagaaaguguccuauaa

SEQ ID NO: 977682 - RNA, 19 nt, Homo sapiens
  misc_RNA (1)...(19): siRNA sense strand
gaggguuacuucaacaguu

SEQ ID NO: 977683 - RNA, 19 nt, Homo sapiens
  misc_RNA (1)...(19): siRNA sense strand
ggaggaggguuacuucaac

SEQ ID NO: 977684 - RNA, 19 nt, Homo sapiens
  misc_RNA (1)...(19): siRNA sense strand
gagugcagcucuucgagau

SEQ ID NO: 977685 - RNA, 19 nt, Homo sapiens
  misc_RNA (1)...(19): siRNA sense strand
cagaaaguguccuauaagg

SEQ ID NO: 977686 - RNA, 19 nt, Homo sapiens
  misc_RNA (1)...(19): siRNA sense strand
cacccucccuugugcauuu

SEQ ID NO: 977687 - RNA, 19 nt, Homo sapiens
  misc_RNA (1)...(19): siRNA sense strand
gcagaaaguguccuauaag

SEQ ID NO: 977688 - RNA, 19 nt, Homo sapiens
  misc_RNA (1)...(19): siRNA sense strand
gcagcugcaugccgacguu

SEQ ID NO: 977689 - RNA, 19 nt, Homo sapiens
  misc_RNA (1)...(19): siRNA sense strand
gaggaggguuacuucaaca

SEQ ID NO: 977690 - RNA, 19 nt, Homo sapiens
  misc_RNA (1)...(19): siRNA sense strand
gugcagcucuucgagauca

SEQ ID NO: 977691 - RNA, 19 nt, Homo sapiens
  misc_RNA (1)...(19): siRNA sense strand
gcagccucguguucuauau

SEQ ID NO: 977692 - RNA, 19 nt, Homo sapiens
  misc_RNA (1)...(19): siRNA sense strand
ccuacaagcuggugaagac

SEQ ID NO: 977693 - RNA, 19 nt, Homo sapiens
  misc_RNA (1)...(19): siRNA sense strand
caauauugcugugaaccau

SEQ ID NO: 977694 - RNA, 19 nt, Homo sapiens
  misc_RNA (1)...(19): siRNA sense strand
ucauccacaucgacuacua

SEQ ID NO: 977695 - RNA, 19 nt, Homo sapiens
  misc_RNA (1)...(19): siRNA sense strand
ccacugcacccacguccuu

SEQ ID NO: 977696 - RNA, 19 nt, Homo sapiens
  misc_RNA (1)...(19): siRNA sense strand
caagugcagccucguguuc

SEQ ID NO: 977697 - RNA, 19 nt, Homo sapiens
  misc_RNA (1)...(19): siRNA sense strand
cugcagaaaguguccuaua

SEQ ID NO: 977698 - RNA, 19 nt, Homo sapiens
  misc_RNA (1)...(19): siRNA sense strand
ugacacagcguggguagug

SEQ ID NO: 977699 - RNA, 19 nt, Homo sapiens
  misc_RNA (1)...(19): siRNA sense strand
gcgcuggauccacgacgua

SEQ ID NO: 977700 - RNA, 19 nt, Homo sapiens
  misc_RNA (1)...(19): siRNA sense strand
accagcaccuugauucuuc

SEQ ID NO: 977701 - RNA, 19 nt, Homo sapiens
  misc_RNA (1)...(19): siRNA sense strand
gaggguccuuucgggaaga

SEQ ID NO: 977702 - RNA, 19 nt, Homo sapiens
  misc_RNA (1)...(19): siRNA sense strand
ccuugaaccugaacagcau

SEQ ID NO: 977703 - RNA, 19 nt, Homo sapiens
  misc_RNA (1)...(19): siRNA sense strand
ggguaguggaggaggguua

SEQ ID NO: 977704 - RNA, 19 nt, Homo sapiens
  misc_RNA (1)...(19): siRNA sense strand
gcugcagccucauccacau

SEQ ID NO: 977705 - RNA, 19 nt, Homo sapiens
  misc_RNA (1)...(19): siRNA sense strand
ggaggguuacuucaacagu

SEQ ID NO: 977706 - RNA, 19 nt, Homo sapiens
  misc_RNA (1)...(19): siRNA sense strand
gauucuuccuccagaguac

SEQ ID NO: 977707 - RNA, 19 nt, Homo sapiens
  misc_RNA (1)...(19): siRNA sense strand
ccucugccaccaagaaguu

SEQ ID NO: 977708 - RNA, 19 nt, Homo sapiens
  misc_RNA (1)...(19): siRNA sense strand
ugaacagcaucccagacau

SEQ ID NO: 977709 - RNA, 19 nt, Homo sapiens
  misc_RNA (1)...(19): siRNA sense strand
aggguuacuucaacaguuc

SEQ ID NO: 977710 - RNA, 19 nt, Homo sapiens
  misc_RNA (1)...(19): siRNA sense strand
acuuacaggucucucugaa

SEQ ID NO: 977711 - RNA, 19 nt, Homo sapiens
  misc_RNA (1)...(19): siRNA sense strand
cauccacacgccacgguuu

SEQ ID NO: 977712 - RNA, 19 nt, Homo sapiens
  misc_RNA (1)...(19): siRNA sense strand
ccucguguucuauaucuug

SEQ ID NO: 977713 - RNA, 19 nt, Homo sapiens
  misc_RNA (1)...(19): siRNA sense strand
ucuccaacaaggcuaauga

SEQ ID NO: 977714 - RNA, 19 nt, Homo sapiens
  misc_RNA (1)...(19): siRNA sense strand
cggaagcugugcaguauua

SEQ ID NO: 977715 - RNA, 19 nt, Homo sapiens
  misc_RNA (1)...(19): siRNA sense strand
gaaccacugucucugauca

SEQ ID NO: 977716 - RNA, 19 nt, Homo sapiens
  misc_RNA (1)...(19): siRNA sense strand
gagaaggaccgcacucuga

SEQ ID NO: 977717 - RNA, 19 nt, Homo sapiens
  misc_RNA (1)...(19): siRNA sense strand
aagaagagcuggcguccaa

SEQ ID NO: 977718 - RNA, 19 nt, Homo sapiens
  misc_RNA (1)...(19): siRNA sense strand
ggaggacaguuacgaaauc

SEQ ID NO: 977719 - RNA, 19 nt, Homo sapiens
  misc_RNA (1)...(19): siRNA sense strand
cggcacaucuuccucauca

SEQ ID NO: 977720 - RNA, 19 nt, Homo sapiens
  misc_RNA (1)...(19): siRNA sense strand
ggcaggaggaggacaguua

SEQ ID NO: 977721 - RNA, 19 nt, Homo sapiens
  misc_RNA (1)...(19): siRNA sense strand
ggacaguuacgaaaucuuc

SEQ ID NO: 977722 - RNA, 19 nt, Homo sapiens
  misc_RNA (1)...(19): siRNA sense strand
ccauagagaccaccgauau

SEQ ID NO: 977723 - RNA, 19 nt, Homo sapiens
  misc_RNA (1)...(19): siRNA sense strand
ggagcaggcugaacucacu

SEQ ID NO: 977724 - RNA, 19 nt, Homo sapiens
  misc_RNA (1)...(19): siRNA sense strand
gccggaagcugugcaguau

SEQ ID NO: 977725 - RNA, 19 nt, Homo sapiens
  misc_RNA (1)...(19): siRNA sense strand
gaggaggacaguuacgaaa

SEQ ID NO: 977726 - RNA, 19 nt, Homo sapiens
  misc_RNA (1)...(19): siRNA sense strand
caagcuggaccacuacaaa

SEQ ID NO: 977727 - RNA, 19 nt, Homo sapiens
  misc_RNA (1)...(19): siRNA sense strand
ggaagaggaacguggaauc

SEQ ID NO: 977728 - RNA, 19 nt, Homo sapiens
  misc_RNA (1)...(19): siRNA sense strand
ccaggcgucugcaaaguca

SEQ ID NO: 977729 - RNA, 19 nt, Homo sapiens
  misc_RNA (1)...(19): siRNA sense strand
caucaggcauucccaguac

SEQ ID NO: 977730 - RNA, 19 nt, Homo sapiens
  misc_RNA (1)...(19): siRNA sense strand
ggaggaggacaguuacgaa

SEQ ID NO: 977731 - RNA, 19 nt, Homo sapiens
  misc_RNA (1)...(19): siRNA sense strand
gaagaggaacguggaaucu

SEQ ID NO: 977732 - RNA, 19 nt, Homo sapiens
  misc_RNA (1)...(19): siRNA sense strand
gaggacaguuacgaaaucu

SEQ ID NO: 977733 - RNA, 19 nt, Homo sapiens
  misc_RNA (1)...(19): siRNA sense strand
guuacgaaaucuucaucug

SEQ ID NO: 977734 - RNA, 19 nt, Homo sapiens
  misc_RNA (1)...(19): siRNA sense strand
gcaaagucagcacagaucu

SEQ ID NO: 977735 - RNA, 19 nt, Homo sapiens
  misc_RNA (1)...(19): siRNA sense strand
uuacgaaaucuucaucugu

SEQ ID NO: 977736 - RNA, 19 nt, Homo sapiens
  misc_RNA (1)...(19): siRNA sense strand
caacgucauccgcuacauc

SEQ ID NO: 977737 - RNA, 19 nt, Homo sapiens
  misc_RNA (1)...(19): siRNA sense strand
caacugggacaggcgagaa

SEQ ID NO: 977738 - RNA, 19 nt, Homo sapiens
  misc_RNA (1)...(19): siRNA sense strand
ucaucaggcauucccagua

SEQ ID NO: 977739 - RNA, 19 nt, Homo sapiens
  misc_RNA (1)...(19): siRNA sense strand
gagaccaccgauaucauca

SEQ ID NO: 977740 - RNA, 19 nt, Homo sapiens
  misc_RNA (1)...(19): siRNA sense strand
gccauagagaccaccgaua

SEQ ID NO: 977741 - RNA, 19 nt, Homo sapiens
  misc_RNA (1)...(19): siRNA sense strand
gcaggaggaggacaguuac

SEQ ID NO: 977742 - RNA, 19 nt, Homo sapiens
  misc_RNA (1)...(19): siRNA sense strand
gcuugggguugaaguuuaa

SEQ ID NO: 977743 - RNA, 19 nt, Homo sapiens
  misc_RNA (1)...(19): siRNA sense strand
caaagucagcacagaucug

SEQ ID NO: 977744 - RNA, 19 nt, Homo sapiens
  misc_RNA (1)...(19): siRNA sense strand
cauagagaccaccgauauc

SEQ ID NO: 977745 - RNA, 19 nt, Homo sapiens
  misc_RNA (1)...(19): siRNA sense strand
gaacgaagcagauuuguaa

SEQ ID NO: 977746 - RNA, 19 nt, Homo sapiens
  misc_RNA (1)...(19): siRNA sense strand
gcaaaucgguucauuggaa

SEQ ID NO: 977747 - RNA, 19 nt, Homo sapiens
  misc_RNA (1)...(19): siRNA sense strand
gaacagauccgacgaugga

SEQ ID NO: 977748 - RNA, 19 nt, Homo sapiens
  misc_RNA (1)...(19): siRNA sense strand
gaaagcaaaugaacuucuu

SEQ ID NO: 977749 - RNA, 19 nt, Homo sapiens
  misc_RNA (1)...(19): siRNA sense strand
gaugugcucuguaaugaaa

SEQ ID NO: 977750 - RNA, 19 nt, Homo sapiens
  misc_RNA (1)...(19): siRNA sense strand
gaggacggcuguaaacauu

SEQ ID NO: 977751 - RNA, 19 nt, Homo sapiens
  misc_RNA (1)...(19): siRNA sense strand
caaagcagcugaugagaag

SEQ ID NO: 977752 - RNA, 19 nt, Homo sapiens
  misc_RNA (1)...(19): siRNA sense strand
gcaaaugaacuucuucuga

SEQ ID NO: 977753 - RNA, 19 nt, Homo sapiens
  misc_RNA (1)...(19): siRNA sense strand
gaaagagaauggcaaaucg

SEQ ID NO: 977754 - RNA, 19 nt, Homo sapiens
  misc_RNA (1)...(19): siRNA sense strand
gaagaaagaaucuaugaag

SEQ ID NO: 977755 - RNA, 19 nt, Homo sapiens
  misc_RNA (1)...(19): siRNA sense strand
ccuaugaugugcucuguaa

SEQ ID NO: 977756 - RNA, 19 nt, Homo sapiens
  misc_RNA (1)...(19): siRNA sense strand
caagaaagcaaaugaacuu

SEQ ID NO: 977757 - RNA, 19 nt, Homo sapiens
  misc_RNA (1)...(19): siRNA sense strand
cuaaagacaucuggaagaa

SEQ ID NO: 977758 - RNA, 19 nt, Homo sapiens
  misc_RNA (1)...(19): siRNA sense strand
gaaagaagacucggaaugg

SEQ ID NO: 977759 - RNA, 19 nt, Homo sapiens
  misc_RNA (1)...(19): siRNA sense strand
uguaagagcuggaaagaag

SEQ ID NO: 977760 - RNA, 19 nt, Homo sapiens
  misc_RNA (1)...(19): siRNA sense strand
caaaucgguucauuggaaa

SEQ ID NO: 977761 - RNA, 19 nt, Homo sapiens
  misc_RNA (1)...(19): siRNA sense strand
ggaaagaagacucggaaug

SEQ ID NO: 977762 - RNA, 19 nt, Homo sapiens
  misc_RNA (1)...(19): siRNA sense strand
ggaagaaaguggcagaaaa

SEQ ID NO: 977763 - RNA, 19 nt, Homo sapiens
  misc_RNA (1)...(19): siRNA sense strand
gcgaacaccaucuagauaa

SEQ ID NO: 977764 - RNA, 19 nt, Homo sapiens
  misc_RNA (1)...(19): siRNA sense strand
gacaucauccggugguuua

SEQ ID NO: 977765 - RNA, 19 nt, Homo sapiens
  misc_RNA (1)...(19): siRNA sense strand
ggacggcuguaaacauuuc

SEQ ID NO: 977766 - RNA, 19 nt, Homo sapiens
  misc_RNA (1)...(19): siRNA sense strand
cgaacaccaucuagauaaa

SEQ ID NO: 977767 - RNA, 19 nt, Homo sapiens
  misc_RNA (1)...(19): siRNA sense strand
ggaauucucacacucaaga

SEQ ID NO: 977768 - RNA, 19 nt, Homo sapiens
  misc_RNA (1)...(19): siRNA sense strand
ucaaauagaagaagagaga

SEQ ID NO: 977769 - RNA, 19 nt, Homo sapiens
  misc_RNA (1)...(19): siRNA sense strand
aaagacaucuggaagaaag

SEQ ID NO: 977770 - RNA, 19 nt, Homo sapiens
  misc_RNA (1)...(19): siRNA sense strand
gcuaugcccuguccuaucu

SEQ ID NO: 977771 - RNA, 19 nt, Homo sapiens
  misc_RNA (1)...(19): siRNA sense strand
aagcagcuauggaaagaaa

SEQ ID NO: 977772 - RNA, 19 nt, Homo sapiens
  misc_RNA (1)...(19): siRNA sense strand
caccaacccuggaagaaga

SEQ ID NO: 977773 - RNA, 19 nt, Homo sapiens
  misc_RNA (1)...(19): siRNA sense strand
ugucggagauguacauaga

SEQ ID NO: 977774 - RNA, 19 nt, Homo sapiens
  misc_RNA (1)...(19): siRNA sense strand
guaaacauuuccucaucga

SEQ ID NO: 977775 - RNA, 19 nt, Homo sapiens
  misc_RNA (1)...(19): siRNA sense strand
cagaagaaagaaucuauga

SEQ ID NO: 977776 - RNA, 19 nt, Homo sapiens
  misc_RNA (1)...(19): siRNA sense strand
uggcagagcucagcgaaga

SEQ ID NO: 977777 - RNA, 19 nt, Homo sapiens
  misc_RNA (1)...(19): siRNA sense strand
agaagcagcuauggaaaga

SEQ ID NO: 977778 - RNA, 19 nt, Homo sapiens
  misc_RNA (1)...(19): siRNA sense strand
uggcggauuugguggaaua

SEQ ID NO: 977779 - RNA, 19 nt, Homo sapiens
  misc_RNA (1)...(19): siRNA sense strand
gcucagcgaagaacagaaa

SEQ ID NO: 977780 - RNA, 19 nt, Homo sapiens
  misc_RNA (1)...(19): siRNA sense strand
gagagaacgaagcagauuu

SEQ ID NO: 977781 - RNA, 19 nt, Homo sapiens
  misc_RNA (1)...(19): siRNA sense strand
gcgaagaacagaaacagau

SEQ ID NO: 977782 - RNA, 19 nt, Homo sapiens
  misc_RNA (1)...(19): siRNA sense strand
uagauaaacccuaugaugu

SEQ ID NO: 977783 - RNA, 19 nt, Homo sapiens
  misc_RNA (1)...(19): siRNA sense strand
ccaaagcagcugaugagaa

SEQ ID NO: 977784 - RNA, 19 nt, Homo sapiens
  misc_RNA (1)...(19): siRNA sense strand
gaugagagaggaacagauc

SEQ ID NO: 977785 - RNA, 19 nt, Homo sapiens
  misc_RNA (1)...(19): siRNA sense strand
cggauaaccagcagacuaa

SEQ ID NO: 977786 - RNA, 19 nt, Homo sapiens
  misc_RNA (1)...(19): siRNA sense strand
gagaagacuacaagagguu

SEQ ID NO: 977787 - RNA, 19 nt, Homo sapiens
  misc_RNA (1)...(19): siRNA sense strand
cauaugcauuucaccagaa

SEQ ID NO: 977788 - RNA, 19 nt, Homo sapiens
  misc_RNA (1)...(19): siRNA sense strand
gaaaggaucaaaggcuaug

SEQ ID NO: 977789 - RNA, 19 nt, Homo sapiens
  misc_RNA (1)...(19): siRNA sense strand
gaaaaccucagacaccaua

SEQ ID NO: 977790 - RNA, 19 nt, Homo sapiens
  misc_RNA (1)...(19): siRNA sense strand
cgaagcagauuuguaagag

SEQ ID NO: 977791 - RNA, 19 nt, Homo sapiens
  misc_RNA (1)...(19): siRNA sense strand
aaagaaagagaauggcaaa

SEQ ID NO: 977792 - RNA, 19 nt, Homo sapiens
  misc_RNA (1)...(19): siRNA sense strand
cggauuugguggaauauca

SEQ ID NO: 977793 - RNA, 19 nt, Homo sapiens
  misc_RNA (1)...(19): siRNA sense strand
gaaggcauaugcauuucac

SEQ ID NO: 977794 - RNA, 19 nt, Homo sapiens
  misc_RNA (1)...(19): siRNA sense strand
gauaaggaagucuggguau

SEQ ID NO: 977795 - RNA, 19 nt, Homo sapiens
  misc_RNA (1)...(19): siRNA sense strand
cuagauaaacccuaugaug

SEQ ID NO: 977796 - RNA, 19 nt, Homo sapiens
  misc_RNA (1)...(19): siRNA sense strand
ggcgaacaccaucuagaua

SEQ ID NO: 977797 - RNA, 19 nt, Homo sapiens
  misc_RNA (1)...(19): siRNA sense strand
gaaacccagaccaaagaaa

SEQ ID NO: 977798 - RNA, 19 nt, Homo sapiens
  misc_RNA (1)...(19): siRNA sense strand
ggacaucauccggugguuu

SEQ ID NO: 977799 - RNA, 19 nt, Homo sapiens
  misc_RNA (1)...(19): siRNA sense strand
gaauucaccaauagcuuga

SEQ ID NO: 977800 - RNA, 19 nt, Homo sapiens
  misc_RNA (1)...(19): siRNA sense strand
acuuggagcugauaaggaa

SEQ ID NO: 977801 - RNA, 19 nt, Homo sapiens
  misc_RNA (1)...(19): siRNA sense strand
gugaaacccagaccaaaga

SEQ ID NO: 977802 - RNA, 19 nt, Homo sapiens
  misc_RNA (1)...(19): siRNA sense strand
ccaucuagauaaacccuau

SEQ ID NO: 977803 - RNA, 19 nt, Homo sapiens
  misc_RNA (1)...(19): siRNA sense strand
gaccaaagaaagagaaugg

SEQ ID NO: 977804 - RNA, 19 nt, Homo sapiens
  misc_RNA (1)...(19): siRNA sense strand
gagaagcagcuauggaaag

SEQ ID NO: 977805 - RNA, 19 nt, Homo sapiens
  misc_RNA (1)...(19): siRNA sense strand
aagagaagcagcuauggaa

SEQ ID NO: 977806 - RNA, 19 nt, Homo sapiens
  misc_RNA (1)...(19): siRNA sense strand
ggaggacggcuguaaacau

SEQ ID NO: 977807 - RNA, 19 nt, Homo sapiens
  misc_RNA (1)...(19): siRNA sense strand
gaacuggagcaaggaucua

SEQ ID NO: 977808 - RNA, 19 nt, Homo sapiens
  misc_RNA (1)...(19): siRNA sense strand
gaucugcaggcuccggaua

SEQ ID NO: 977809 - RNA, 19 nt, Homo sapiens
  misc_RNA (1)...(19): siRNA sense strand
caaaaucacaguaccauga

SEQ ID NO: 977810 - RNA, 19 nt, Homo sapiens
  misc_RNA (1)...(19): siRNA sense strand
agaaagagaagcagcuaug

SEQ ID NO: 977811 - RNA, 19 nt, Homo sapiens
  misc_RNA (1)...(19): siRNA sense strand
aaacucacucugaagaauu

SEQ ID NO: 977812 - RNA, 19 nt, Homo sapiens
  misc_RNA (1)...(19): siRNA sense strand
ggaaacuuggagcugauaa

SEQ ID NO: 977813 - RNA, 19 nt, Homo sapiens
  misc_RNA (1)...(19): siRNA sense strand
gaagaauucaccaauagcu

SEQ ID NO: 977814 - RNA, 19 nt, Homo sapiens
  misc_RNA (1)...(19): siRNA sense strand
gggcgaacaccaucuagau

SEQ ID NO: 977815 - RNA, 19 nt, Homo sapiens
  misc_RNA (1)...(19): siRNA sense strand
gaggagcagcuaccacuuc

SEQ ID NO: 977816 - RNA, 19 nt, Homo sapiens
  misc_RNA (1)...(19): siRNA sense strand
gaaagagaagcagcuaugg

SEQ ID NO: 977817 - RNA, 19 nt, Homo sapiens
  misc_RNA (1)...(19): siRNA sense strand
gcacgagaagacuacaaga

SEQ ID NO: 977818 - RNA, 19 nt, Homo sapiens
  misc_RNA (1)...(19): siRNA sense strand
uaaacaagcacgagaagac

SEQ ID NO: 977819 - RNA, 19 nt, Homo sapiens
  misc_RNA (1)...(19): siRNA sense strand
agauaaacccuaugaugug

SEQ ID NO: 977820 - RNA, 19 nt, Homo sapiens
  misc_RNA (1)...(19): siRNA sense strand
agaaagagaauggcaaauc

SEQ ID NO: 977821 - RNA, 19 nt, Homo sapiens
  misc_RNA (1)...(19): siRNA sense strand
aggaccagcugccugacua

SEQ ID NO: 977822 - RNA, 19 nt, Homo sapiens
  misc_RNA (1)...(19): siRNA sense strand
agagaacgaagcagauuug

SEQ ID NO: 977823 - RNA, 19 nt, Homo sapiens
  misc_RNA (1)...(19): siRNA sense strand
gcaccaacccuggaagaag

SEQ ID NO: 977824 - RNA, 19 nt, Homo sapiens
  misc_RNA (1)...(19): siRNA sense strand
ccaauagcuugaaaacaaa

SEQ ID NO: 977825 - RNA, 19 nt, Homo sapiens
  misc_RNA (1)...(19): siRNA sense strand
cagaacaggaggcagaaga

SEQ ID NO: 977826 - RNA, 19 nt, Homo sapiens
  misc_RNA (1)...(19): siRNA sense strand
uaugaugugcucuguaaug

SEQ ID NO: 977827 - RNA, 19 nt, Homo sapiens
  misc_RNA (1)...(19): siRNA sense strand
gagaaaauccgaucacucu

SEQ ID NO: 977828 - RNA, 19 nt, Homo sapiens
  misc_RNA (1)...(19): siRNA sense strand
agacuaaagacaucuggaa

SEQ ID NO: 977829 - RNA, 19 nt, Homo sapiens
  misc_RNA (1)...(19): siRNA sense strand
ccagcagacuaaagacauc

SEQ ID NO: 977830 - RNA, 19 nt, Homo sapiens
  misc_RNA (1)...(19): siRNA sense strand
accaauagcuugaaaacaa

SEQ ID NO: 977831 - RNA, 19 nt, Homo sapiens
  misc_RNA (1)...(19): siRNA sense strand
ccggauaaccagcagacua

SEQ ID NO: 977832 - RNA, 19 nt, Homo sapiens
  misc_RNA (1)...(19): siRNA sense strand
cgaucacucuccaguucuu

SEQ ID NO: 977833 - RNA, 19 nt, Homo sapiens
  misc_RNA (1)...(19): siRNA sense strand
gaagaaaguggcagaaaag

SEQ ID NO: 977834 - RNA, 19 nt, Homo sapiens
  misc_RNA (1)...(19): siRNA sense strand
uaaagacaucuggaagaaa

SEQ ID NO: 977835 - RNA, 19 nt, Homo sapiens
  misc_RNA (1)...(19): siRNA sense strand
gaaacuuggagcugauaag

SEQ ID NO: 977836 - RNA, 19 nt, Homo sapiens
  misc_RNA (1)...(19): siRNA sense strand
agaacgaagcagauuugua

SEQ ID NO: 977837 - RNA, 19 nt, Homo sapiens
  misc_RNA (1)...(19): siRNA sense strand
ccagugaaacccagaccaa

SEQ ID NO: 977838 - RNA, 19 nt, Homo sapiens
  misc_RNA (1)...(19): siRNA sense strand
gaacaccaucuagauaaac

SEQ ID NO: 977839 - RNA, 19 nt, Homo sapiens
  misc_RNA (1)...(19): siRNA sense strand
aaagaaagagaagcagcua

SEQ ID NO: 977840 - RNA, 19 nt, Homo sapiens
  misc_RNA (1)...(19): siRNA sense strand
aaagagaagcagcuaugga

SEQ ID NO: 977841 - RNA, 19 nt, Homo sapiens
  misc_RNA (1)...(19): siRNA sense strand
ccaagccucaguuccuaaa

SEQ ID NO: 977842 - RNA, 19 nt, Homo sapiens
  misc_RNA (1)...(19): siRNA sense strand
caaagccccuugcguguuc

SEQ ID NO: 977843 - RNA, 19 nt, Homo sapiens
  misc_RNA (1)...(19): siRNA sense strand
cagauacugucggagaugu

SEQ ID NO: 977844 - RNA, 19 nt, Homo sapiens
  misc_RNA (1)...(19): siRNA sense strand
uccgaucacucuccaguuc

SEQ ID NO: 977845 - RNA, 19 nt, Homo sapiens
  misc_RNA (1)...(19): siRNA sense strand
gaacgaagauguggugguu

SEQ ID NO: 977846 - RNA, 19 nt, Homo sapiens
  misc_RNA (1)...(19): siRNA sense strand
aaacagaugucaugaauca

SEQ ID NO: 977847 - RNA, 19 nt, Homo sapiens
  misc_RNA (1)...(19): siRNA sense strand
gaagugaccuguaaagaac

SEQ ID NO: 977848 - RNA, 19 nt, Homo sapiens
  misc_RNA (1)...(19): siRNA sense strand
ggaagugaccuguaaagaa

SEQ ID NO: 977849 - RNA, 19 nt, Homo sapiens
  misc_RNA (1)...(19): siRNA sense strand
ugaaacagaugucaugaau

SEQ ID NO: 977850 - RNA, 19 nt, Homo sapiens
  misc_RNA (1)...(19): siRNA sense strand
gaugagcacuuugcagaaa

SEQ ID NO: 977851 - RNA, 19 nt, Homo sapiens
  misc_RNA (1)...(19): siRNA sense strand
gaaggcaguugaaacagau

SEQ ID NO: 977852 - RNA, 19 nt, Homo sapiens
  misc_RNA (1)...(19): siRNA sense strand
agacaagccuuccuccauu

SEQ ID NO: 977853 - RNA, 19 nt, Homo sapiens
  misc_RNA (1)...(19): siRNA sense strand
gcaaggagcaccaacucaa

SEQ ID NO: 977854 - RNA, 19 nt, Homo sapiens
  misc_RNA (1)...(19): siRNA sense strand
cuacaugcccuacgcuaua

SEQ ID NO: 977855 - RNA, 19 nt, Homo sapiens
  misc_RNA (1)...(19): siRNA sense strand
cugaggaagugaccuguaa

SEQ ID NO: 977856 - RNA, 19 nt, Homo sapiens
  misc_RNA (1)...(19): siRNA sense strand
aguggugucuuacaaagua

SEQ ID NO: 977857 - RNA, 19 nt, Homo sapiens
  misc_RNA (1)...(19): siRNA sense strand
ggacuuggaguggcgauaa

SEQ ID NO: 977858 - RNA, 19 nt, Homo sapiens
  misc_RNA (1)...(19): siRNA sense strand
agaaaccaguuauuacuuc

SEQ ID NO: 977859 - RNA, 19 nt, Homo sapiens
  misc_RNA (1)...(19): siRNA sense strand
gcagaaaccaguuauuacu

SEQ ID NO: 977860 - RNA, 19 nt, Homo sapiens
  misc_RNA (1)...(19): siRNA sense strand
gcaaggacgaccuggaaga

SEQ ID NO: 977861 - RNA, 19 nt, Homo sapiens
  misc_RNA (1)...(19): siRNA sense strand
gacaagccuuccuccauuc

SEQ ID NO: 977862 - RNA, 19 nt, Homo sapiens
  misc_RNA (1)...(19): siRNA sense strand
agaaggcaguugaaacaga

SEQ ID NO: 977863 - RNA, 19 nt, Homo sapiens
  misc_RNA (1)...(19): siRNA sense strand
caauagccuuggcaucaga

SEQ ID NO: 977864 - RNA, 19 nt, Homo sapiens
  misc_RNA (1)...(19): siRNA sense strand
caucagagaaggcaguuga

SEQ ID NO: 977865 - RNA, 19 nt, Homo sapiens
  misc_RNA (1)...(19): siRNA sense strand
cuucggagaugagcacuuu

SEQ ID NO: 977866 - RNA, 19 nt, Homo sapiens
  misc_RNA (1)...(19): siRNA sense strand
uugcagaaaccaguuauua

SEQ ID NO: 977867 - RNA, 19 nt, Homo sapiens
  misc_RNA (1)...(19): siRNA sense strand
gcucaaggacaaugauuuc

SEQ ID NO: 977868 - RNA, 19 nt, Homo sapiens
  misc_RNA (1)...(19): siRNA sense strand
gggcaaggacgaccuggaa

SEQ ID NO: 977869 - RNA, 19 nt, Homo sapiens
  misc_RNA (1)...(19): siRNA sense strand
ccaucuuaguggugucuua

SEQ ID NO: 977870 - RNA, 19 nt, Homo sapiens
  misc_RNA (1)...(19): siRNA sense strand
gugcuuauguuugccaaga

SEQ ID NO: 977871 - RNA, 19 nt, Homo sapiens
  misc_RNA (1)...(19): siRNA sense strand
gaagauggaggaaguagcu

SEQ ID NO: 977872 - RNA, 19 nt, Homo sapiens
  misc_RNA (1)...(19): siRNA sense strand
gcucaggguucuuggacau

SEQ ID NO: 977873 - RNA, 19 nt, Homo sapiens
  misc_RNA (1)...(19): siRNA sense strand
cagaugucaugaaucaaga

SEQ ID NO: 977874 - RNA, 19 nt, Homo sapiens
  misc_RNA (1)...(19): siRNA sense strand
ccaaacagagccuggaugu

SEQ ID NO: 977875 - RNA, 19 nt, Homo sapiens
  misc_RNA (1)...(19): siRNA sense strand
cacaauagccuuggcauca

SEQ ID NO: 977876 - RNA, 19 nt, Homo sapiens
  misc_RNA (1)...(19): siRNA sense strand
caacacagucaucuucauc

SEQ ID NO: 977877 - RNA, 19 nt, Homo sapiens
  misc_RNA (1)...(19): siRNA sense strand
uacaugcccuacgcuauaa

SEQ ID NO: 977878 - RNA, 19 nt, Homo sapiens
  misc_RNA (1)...(19): siRNA sense strand
gagccuggaugugcuagau

SEQ ID NO: 977879 - RNA, 19 nt, Homo sapiens
  misc_RNA (1)...(19): siRNA sense strand
cauuggcgcuacgaccuua

SEQ ID NO: 977880 - RNA, 19 nt, Homo sapiens
  misc_RNA (1)...(19): siRNA sense strand
caagacaaacgaggaguug

SEQ ID NO: 977881 - RNA, 19 nt, Homo sapiens
  misc_RNA (1)...(19): siRNA sense strand
ggccaggcuuugaguacuu

SEQ ID NO: 977882 - RNA, 19 nt, Homo sapiens
  misc_RNA (1)...(19): siRNA sense strand
acacaacacagucaucuuc

SEQ ID NO: 977883 - RNA, 19 nt, Homo sapiens
  misc_RNA (1)...(19): siRNA sense strand
ccucagaguugggcaagga

SEQ ID NO: 977884 - RNA, 19 nt, Homo sapiens
  misc_RNA (1)...(19): siRNA sense strand
gaguccaccuucaguucuu

SEQ ID NO: 977885 - RNA, 19 nt, Homo sapiens
  misc_RNA (1)...(19): siRNA sense strand
agagaaggcaguugaaaca

SEQ ID NO: 977886 - RNA, 19 nt, Homo sapiens
  misc_RNA (1)...(19): siRNA sense strand
ggacgaccuggaagaguug

SEQ ID NO: 977887 - RNA, 19 nt, Homo sapiens
  misc_RNA (1)...(19): siRNA sense strand
cagaaaccaguuauuacuu

SEQ ID NO: 977888 - RNA, 19 nt, Homo sapiens
  misc_RNA (1)...(19): siRNA sense strand
gaagauguggugguuguag

SEQ ID NO: 977889 - RNA, 19 nt, Homo sapiens
  misc_RNA (1)...(19): siRNA sense strand
gccugcaacucaacgagaa

SEQ ID NO: 977890 - RNA, 19 nt, Homo sapiens
  misc_RNA (1)...(19): siRNA sense strand
cccagaagauggaggaagu

SEQ ID NO: 977891 - RNA, 19 nt, Homo sapiens
  misc_RNA (1)...(19): siRNA sense strand
ccugcuagcugagaacgaa

SEQ ID NO: 977892 - RNA, 19 nt, Homo sapiens
  misc_RNA (1)...(19): siRNA sense strand
acgaagauguggugguugu

SEQ ID NO: 977893 - RNA, 19 nt, Homo sapiens
  misc_RNA (1)...(19): siRNA sense strand
gccaggcuuugaguacuuu

SEQ ID NO: 977894 - RNA, 19 nt, Homo sapiens
  misc_RNA (1)...(19): siRNA sense strand
ucaggguucuuggacauug

SEQ ID NO: 977895 - RNA, 19 nt, Homo sapiens
  misc_RNA (1)...(19): siRNA sense strand
aggacgaccuggaagaguu

SEQ ID NO: 977896 - RNA, 19 nt, Homo sapiens
  misc_RNA (1)...(19): siRNA sense strand
gcuacauucccaagacaaa

SEQ ID NO: 977897 - RNA, 19 nt, Homo sapiens
  misc_RNA (1)...(19): siRNA sense strand
ucaaggacaaugauuucuu

SEQ ID NO: 977898 - RNA, 19 nt, Homo sapiens
  misc_RNA (1)...(19): siRNA sense strand
gaaacagaugucaugaauc

SEQ ID NO: 977899 - RNA, 19 nt, Homo sapiens
  misc_RNA (1)...(19): siRNA sense strand
gcggauggcucaggguucu

SEQ ID NO: 977900 - RNA, 19 nt, Homo sapiens
  misc_RNA (1)...(19): siRNA sense strand
gcacaggaugacuggcaaa

SEQ ID NO: 977901 - RNA, 19 nt, Homo sapiens
  misc_RNA (1)...(19): siRNA sense strand
gacaaacgaggaguugcua

SEQ ID NO: 977902 - RNA, 19 nt, Homo sapiens
  misc_RNA (1)...(19): siRNA sense strand
aaugauuucuugcggaaca

SEQ ID NO: 977903 - RNA, 19 nt, Homo sapiens
  misc_RNA (1)...(19): siRNA sense strand
uagcugagaacgaagaugu

SEQ ID NO: 977904 - RNA, 19 nt, Homo sapiens
  misc_RNA (1)...(19): siRNA sense strand
gcuuauguuugccaagaca

SEQ ID NO: 977905 - RNA, 19 nt, Homo sapiens
  misc_RNA (1)...(19): siRNA sense strand
gaggaagugaccuguaaag

SEQ ID NO: 977906 - RNA, 19 nt, Homo sapiens
  misc_RNA (1)...(19): siRNA sense strand
ucaacaucgugcucaagga

SEQ ID NO: 977907 - RNA, 19 nt, Homo sapiens
  misc_RNA (1)...(19): siRNA sense strand
ucagagaaggcaguugaaa

SEQ ID NO: 977908 - RNA, 19 nt, Homo sapiens
  misc_RNA (1)...(19): siRNA sense strand
ccaagacaaacgaggaguu

SEQ ID NO: 977909 - RNA, 19 nt, Homo sapiens
  misc_RNA (1)...(19): siRNA sense strand
aagauguggugguuguaga

SEQ ID NO: 977910 - RNA, 19 nt, Homo sapiens
  misc_RNA (1)...(19): siRNA sense strand
gagcaccaggccaaacaga

SEQ ID NO: 977911 - RNA, 19 nt, Homo sapiens
  misc_RNA (1)...(19): siRNA sense strand
uuaguggugucuuacaaag

SEQ ID NO: 977912 - RNA, 19 nt, Homo sapiens
  misc_RNA (1)...(19): siRNA sense strand
cgucuucaguaccgaguuc

SEQ ID NO: 977913 - RNA, 19 nt, Homo sapiens
  misc_RNA (1)...(19): siRNA sense strand
ucaggaguuggacacaaua

SEQ ID NO: 977914 - RNA, 19 nt, Homo sapiens
  misc_RNA (1)...(19): siRNA sense strand
caaggagcaccaacucaag

SEQ ID NO: 977915 - RNA, 19 nt, Homo sapiens
  misc_RNA (1)...(19): siRNA sense strand
gccaucccauucucaacga

SEQ ID NO: 977916 - RNA, 19 nt, Homo sapiens
  misc_RNA (1)...(19): siRNA sense strand
aacagugucuacccagguu

SEQ ID NO: 977917 - RNA, 19 nt, Homo sapiens
  misc_RNA (1)...(19): siRNA sense strand
ucuuaguggugucuuacaa

SEQ ID NO: 977918 - RNA, 19 nt, Homo sapiens
  misc_RNA (1)...(19): siRNA sense strand
gagaauucacgagcagguu

SEQ ID NO: 977919 - RNA, 19 nt, Homo sapiens
  misc_RNA (1)...(19): siRNA sense strand
uagacaagccuuccuccau

SEQ ID NO: 977920 - RNA, 19 nt, Homo sapiens
  misc_RNA (1)...(19): siRNA sense strand
gcaguugaaacagauguca

SEQ ID NO: 977921 - RNA, 19 nt, Homo sapiens
  misc_RNA (1)...(19): siRNA sense strand
cucaggaguuggacacaau

SEQ ID NO: 977922 - RNA, 19 nt, Homo sapiens
  misc_RNA (1)...(19): siRNA sense strand
ccucaggaguuggacacaa

SEQ ID NO: 977923 - RNA, 19 nt, Homo sapiens
  misc_RNA (1)...(19): siRNA sense strand
ccagaagauggaggaagua

SEQ ID NO: 977924 - RNA, 19 nt, Homo sapiens
  misc_RNA (1)...(19): siRNA sense strand
ggauggcucaggguucuug

SEQ ID NO: 977925 - RNA, 19 nt, Homo sapiens
  misc_RNA (1)...(19): siRNA sense strand
acacagugcacaggcauga

SEQ ID NO: 977926 - RNA, 19 nt, Homo sapiens
  misc_RNA (1)...(19): siRNA sense strand
gaugucaugaaucaagaga

SEQ ID NO: 977927 - RNA, 19 nt, Homo sapiens
  misc_RNA (1)...(19): siRNA sense strand
acagaugucaugaaucaag

SEQ ID NO: 977928 - RNA, 19 nt, Homo sapiens
  misc_RNA (1)...(19): siRNA sense strand
ggggugagcuucggagaug

SEQ ID NO: 977929 - RNA, 19 nt, Homo sapiens
  misc_RNA (1)...(19): siRNA sense strand
gcggcuacauucccaagac

SEQ ID NO: 977930 - RNA, 19 nt, Homo sapiens
  misc_RNA (1)...(19): siRNA sense strand
gcaugagccaccagucaca

SEQ ID NO: 977931 - RNA, 19 nt, Homo sapiens
  misc_RNA (1)...(19): siRNA sense strand
cgacacaacacagucaucu

SEQ ID NO: 977932 - RNA, 19 nt, Homo sapiens
  misc_RNA (1)...(19): siRNA sense strand
ucaugaaucaagagacaga

SEQ ID NO: 977933 - RNA, 19 nt, Homo sapiens
  misc_RNA (1)...(19): siRNA sense strand
cagagcaccaggccaaaca

SEQ ID NO: 977934 - RNA, 19 nt, Homo sapiens
  misc_RNA (1)...(19): siRNA sense strand
ccucaggggugcuuauguu

SEQ ID NO: 977935 - RNA, 19 nt, Homo sapiens
  misc_RNA (1)...(19): siRNA sense strand
acaacacagucaucuucau

SEQ ID NO: 977936 - RNA, 19 nt, Homo sapiens
  misc_RNA (1)...(19): siRNA sense strand
gcaccaacucaaggagcua

SEQ ID NO: 977937 - RNA, 19 nt, Homo sapiens
  misc_RNA (1)...(19): siRNA sense strand
gccuggaugugcuagaucu

SEQ ID NO: 977938 - RNA, 19 nt, Homo sapiens
  misc_RNA (1)...(19): siRNA sense strand
acaauggccaguccagugu

SEQ ID NO: 977939 - RNA, 19 nt, Homo sapiens
  misc_RNA (1)...(19): siRNA sense strand
ccacaaagauguuaauguu

SEQ ID NO: 977940 - RNA, 19 nt, Homo sapiens
  misc_RNA (1)...(19): siRNA sense strand
gcacagaugucuuuuguua

SEQ ID NO: 977941 - RNA, 19 nt, Homo sapiens
  misc_RNA (1)...(19): siRNA sense strand
gcacuuggauuuccuguug

SEQ ID NO: 977942 - RNA, 19 nt, Homo sapiens
  misc_RNA (1)...(19): siRNA sense strand
ggaauccaguggugaaaua

SEQ ID NO: 977943 - RNA, 19 nt, Homo sapiens
  misc_RNA (1)...(19): siRNA sense strand
caacuccgcuuccucagua

SEQ ID NO: 977944 - RNA, 19 nt, Homo sapiens
  misc_RNA (1)...(19): siRNA sense strand
ggaaccagauaaagccuua

SEQ ID NO: 977945 - RNA, 19 nt, Homo sapiens
  misc_RNA (1)...(19): siRNA sense strand
gaaagacccuucuccaaag

SEQ ID NO: 977946 - RNA, 19 nt, Homo sapiens
  misc_RNA (1)...(19): siRNA sense strand
ggaagcagauccauccauu

SEQ ID NO: 977947 - RNA, 19 nt, Homo sapiens
  misc_RNA (1)...(19): siRNA sense strand
ggaccucccuuguaugaaa

SEQ ID NO: 977948 - RNA, 19 nt, Homo sapiens
  misc_RNA (1)...(19): siRNA sense strand
uuaagugccuugcaaauuu

SEQ ID NO: 977949 - RNA, 19 nt, Homo sapiens
  misc_RNA (1)...(19): siRNA sense strand
gaaagaaacccuugaacug

SEQ ID NO: 977950 - RNA, 19 nt, Homo sapiens
  misc_RNA (1)...(19): siRNA sense strand
gguauacagucacuucuaa

SEQ ID NO: 977951 - RNA, 19 nt, Homo sapiens
  misc_RNA (1)...(19): siRNA sense strand
uaagugccuugcaaauuua

SEQ ID NO: 977952 - RNA, 19 nt, Homo sapiens
  misc_RNA (1)...(19): siRNA sense strand
ggaauaugguccaguccua

SEQ ID NO: 977953 - RNA, 19 nt, Homo sapiens
  misc_RNA (1)...(19): siRNA sense strand
gcaacccucucauauagaa

SEQ ID NO: 977954 - RNA, 19 nt, Homo sapiens
  misc_RNA (1)...(19): siRNA sense strand
gaaggaggcaugcagagua

SEQ ID NO: 977955 - RNA, 19 nt, Homo sapiens
  misc_RNA (1)...(19): siRNA sense strand
gaagagauccuggccguuu

SEQ ID NO: 977956 - RNA, 19 nt, Homo sapiens
  misc_RNA (1)...(19): siRNA sense strand
ucagcaaucugccgaauga

SEQ ID NO: 977957 - RNA, 19 nt, Homo sapiens
  misc_RNA (1)...(19): siRNA sense strand
ugaaagacccuucuccaaa

SEQ ID NO: 977958 - RNA, 19 nt, Homo sapiens
  misc_RNA (1)...(19): siRNA sense strand
aacagaagcugccaugaaa

SEQ ID NO: 977959 - RNA, 19 nt, Homo sapiens
  misc_RNA (1)...(19): siRNA sense strand
caggagagcugcaguacau

SEQ ID NO: 977960 - RNA, 19 nt, Homo sapiens
  misc_RNA (1)...(19): siRNA sense strand
gaagagugaagacaccaua

SEQ ID NO: 977961 - RNA, 19 nt, Homo sapiens
  misc_RNA (1)...(19): siRNA sense strand
gcaagaaucgcuuagugaa

SEQ ID NO: 977962 - RNA, 19 nt, Homo sapiens
  misc_RNA (1)...(19): siRNA sense strand
guacugcaauggcuccaaa

SEQ ID NO: 977963 - RNA, 19 nt, Homo sapiens
  misc_RNA (1)...(19): siRNA sense strand
caauauugaugucacuuga

SEQ ID NO: 977964 - RNA, 19 nt, Homo sapiens
  misc_RNA (1)...(19): siRNA sense strand
gaacugggcacaggcuuaa

SEQ ID NO: 977965 - RNA, 19 nt, Homo sapiens
  misc_RNA (1)...(19): siRNA sense strand
gaagaaacgucaguuagcu

SEQ ID NO: 977966 - RNA, 19 nt, Homo sapiens
  misc_RNA (1)...(19): siRNA sense strand
gaacugagugggaauaugg

SEQ ID NO: 977967 - RNA, 19 nt, Homo sapiens
  misc_RNA (1)...(19): siRNA sense strand
uaacagaagcugccaugaa

SEQ ID NO: 977968 - RNA, 19 nt, Homo sapiens
  misc_RNA (1)...(19): siRNA sense strand
gaacagcacuuggauuucc

SEQ ID NO: 977969 - RNA, 19 nt, Homo sapiens
  misc_RNA (1)...(19): siRNA sense strand
gaauggcccuuaaacacau

SEQ ID NO: 977970 - RNA, 19 nt, Homo sapiens
  misc_RNA (1)...(19): siRNA sense strand
ggucaccgcuuuacagaag

SEQ ID NO: 977971 - RNA, 19 nt, Homo sapiens
  misc_RNA (1)...(19): siRNA sense strand
gugauguucuggacuauga

SEQ ID NO: 977972 - RNA, 19 nt, Homo sapiens
  misc_RNA (1)...(19): siRNA sense strand
ccacgcaccuuuaccugaa

SEQ ID NO: 977973 - RNA, 19 nt, Homo sapiens
  misc_RNA (1)...(19): siRNA sense strand
gcaaaugcaauauugaugu

SEQ ID NO: 977974 - RNA, 19 nt, Homo sapiens
  misc_RNA (1)...(19): siRNA sense strand
ugacucaucuggaucacaa

SEQ ID NO: 977975 - RNA, 19 nt, Homo sapiens
  misc_RNA (1)...(19): siRNA sense strand
ugacaucggucgugacauc

SEQ ID NO: 977976 - RNA, 19 nt, Homo sapiens
  misc_RNA (1)...(19): siRNA sense strand
ccucggaccucccuuguau

SEQ ID NO: 977977 - RNA, 19 nt, Homo sapiens
  misc_RNA (1)...(19): siRNA sense strand
gaauucaaguacuguguca

SEQ ID NO: 977978 - RNA, 19 nt, Homo sapiens
  misc_RNA (1)...(19): siRNA sense strand
gaacuuggcagcccacagu

SEQ ID NO: 977979 - RNA, 19 nt, Homo sapiens
  misc_RNA (1)...(19): siRNA sense strand
agaaucaucuugucagcaa

SEQ ID NO: 977980 - RNA, 19 nt, Homo sapiens
  misc_RNA (1)...(19): siRNA sense strand
gcucggaucuggaaugcau

SEQ ID NO: 977981 - RNA, 19 nt, Homo sapiens
  misc_RNA (1)...(19): siRNA sense strand
cagcaagaaucgcuuagug

SEQ ID NO: 977982 - RNA, 19 nt, Homo sapiens
  misc_RNA (1)...(19): siRNA sense strand
ccagaggccuucagcaauc

SEQ ID NO: 977983 - RNA, 19 nt, Homo sapiens
  misc_RNA (1)...(19): siRNA sense strand
gaccguuacucagauaauu

SEQ ID NO: 977984 - RNA, 19 nt, Homo sapiens
  misc_RNA (1)...(19): siRNA sense strand
ggugggagaaugaaacuaa

SEQ ID NO: 977985 - RNA, 19 nt, Homo sapiens
  misc_RNA (1)...(19): siRNA sense strand
aaagaaacccuugaacuga

SEQ ID NO: 977986 - RNA, 19 nt, Homo sapiens
  misc_RNA (1)...(19): siRNA sense strand
gguaauagcaauucagcaa

SEQ ID NO: 977987 - RNA, 19 nt, Homo sapiens
  misc_RNA (1)...(19): siRNA sense strand
cauauacuauuucggcuau

SEQ ID NO: 977988 - RNA, 19 nt, Homo sapiens
  misc_RNA (1)...(19): siRNA sense strand
uuacagguauugacucuuc

SEQ ID NO: 977989 - RNA, 19 nt, Homo sapiens
  misc_RNA (1)...(19): siRNA sense strand
ucacagaccguuacucaga

SEQ ID NO: 977990 - RNA, 19 nt, Homo sapiens
  misc_RNA (1)...(19): siRNA sense strand
gaguuugccuuuagaugga

SEQ ID NO: 977991 - RNA, 19 nt, Homo sapiens
  misc_RNA (1)...(19): siRNA sense strand
ggacguuagugcucuucuu

SEQ ID NO: 977992 - RNA, 19 nt, Homo sapiens
  misc_RNA (1)...(19): siRNA sense strand
uaucaaaugcaccuuauga

SEQ ID NO: 977993 - RNA, 19 nt, Homo sapiens
  misc_RNA (1)...(19): siRNA sense strand
uuagagaguugcacagaug

SEQ ID NO: 977994 - RNA, 19 nt, Homo sapiens
  misc_RNA (1)...(19): siRNA sense strand
ugaugacucuuacauugaa

SEQ ID NO: 977995 - RNA, 19 nt, Homo sapiens
  misc_RNA (1)...(19): siRNA sense strand
cuugaugacucuuacauug

SEQ ID NO: 977996 - RNA, 19 nt, Homo sapiens
  misc_RNA (1)...(19): siRNA sense strand
ugaagacaccauagacuuu

SEQ ID NO: 977997 - RNA, 19 nt, Homo sapiens
  misc_RNA (1)...(19): siRNA sense strand
caacaccggacucuuaaug

SEQ ID NO: 977998 - RNA, 19 nt, Homo sapiens
  misc_RNA (1)...(19): siRNA sense strand
cugcaacccucucauauag

SEQ ID NO: 977999 - RNA, 19 nt, Homo sapiens
  misc_RNA (1)...(19): siRNA sense strand
ggaaacaccagacccaagu

SEQ ID NO: 978000 - RNA, 19 nt, Homo sapiens
  misc_RNA (1)...(19): siRNA sense strand
caaaugcaauauugauguc

SEQ ID NO: 978001 - RNA, 19 nt, Homo sapiens
  misc_RNA (1)...(19): siRNA sense strand
ucagagagcaccagucuuc

SEQ ID NO: 978002 - RNA, 19 nt, Homo sapiens
  misc_RNA (1)...(19): siRNA sense strand
guggugauguucuggacua

SEQ ID NO: 978003 - RNA, 19 nt, Homo sapiens
  misc_RNA (1)...(19): siRNA sense strand
gagagcaccagucuucuug

SEQ ID NO: 978004 - RNA, 19 nt, Homo sapiens
  misc_RNA (1)...(19): siRNA sense strand
acaccggacucuuaaugaa

SEQ ID NO: 978005 - RNA, 19 nt, Homo sapiens
  misc_RNA (1)...(19): siRNA sense strand
ccuaauuucuacuguucua

SEQ ID NO: 978006 - RNA, 19 nt, Homo sapiens
  misc_RNA (1)...(19): siRNA sense strand
gcccuaauuucuacuguuc

SEQ ID NO: 978007 - RNA, 19 nt, Homo sapiens
  misc_RNA (1)...(19): siRNA sense strand
aaggaggcaugcagaguaa

SEQ ID NO: 978008 - RNA, 19 nt, Homo sapiens
  misc_RNA (1)...(19): siRNA sense strand
ggucagcaguagugaguca

SEQ ID NO: 978009 - RNA, 19 nt, Homo sapiens
  misc_RNA (1)...(19): siRNA sense strand
gcgaacaccuaucaaacca

SEQ ID NO: 978010 - RNA, 19 nt, Homo sapiens
  misc_RNA (1)...(19): siRNA sense strand
aggcaacaccggacucuua

SEQ ID NO: 978011 - RNA, 19 nt, Homo sapiens
  misc_RNA (1)...(19): siRNA sense strand
caagaaucgcuuagugaaa

SEQ ID NO: 978012 - RNA, 19 nt, Homo sapiens
  misc_RNA (1)...(19): siRNA sense strand
ccggagcccugcagaauuc

SEQ ID NO: 978013 - RNA, 19 nt, Homo sapiens
  misc_RNA (1)...(19): siRNA sense strand
gaucagagagcaccagucu

SEQ ID NO: 978014 - RNA, 19 nt, Homo sapiens
  misc_RNA (1)...(19): siRNA sense strand
guccagaguuugccuuuag

SEQ ID NO: 978015 - RNA, 19 nt, Homo sapiens
  misc_RNA (1)...(19): siRNA sense strand
ggagagcugcaguacauug

SEQ ID NO: 978016 - RNA, 19 nt, Homo sapiens
  misc_RNA (1)...(19): siRNA sense strand
acagguaauuguugaugaa

SEQ ID NO: 978017 - RNA, 19 nt, Homo sapiens
  misc_RNA (1)...(19): siRNA sense strand
gcaaagugagccagcuuau

SEQ ID NO: 978018 - RNA, 19 nt, Homo sapiens
  misc_RNA (1)...(19): siRNA sense strand
gaaugcuuguuaugcaaug

SEQ ID NO: 978019 - RNA, 19 nt, Homo sapiens
  misc_RNA (1)...(19): siRNA sense strand
agacgcagcaaaugcaaua

SEQ ID NO: 978020 - RNA, 19 nt, Homo sapiens
  misc_RNA (1)...(19): siRNA sense strand
auaauuaagugccuugcaa

SEQ ID NO: 978021 - RNA, 19 nt, Homo sapiens
  misc_RNA (1)...(19): siRNA sense strand
agaaugaaacuaacacaga

SEQ ID NO: 978022 - RNA, 19 nt, Homo sapiens
  misc_RNA (1)...(19): siRNA sense strand
gcacugauucaccucuuga

SEQ ID NO: 978023 - RNA, 19 nt, Homo sapiens
  misc_RNA (1)...(19): siRNA sense strand
gcaauauugaugucacuug

SEQ ID NO: 978024 - RNA, 19 nt, Homo sapiens
  misc_RNA (1)...(19): siRNA sense strand
cgcagcaaaugcaauauug

SEQ ID NO: 978025 - RNA, 19 nt, Homo sapiens
  misc_RNA (1)...(19): siRNA sense strand
gagaggugauuugcaagug

SEQ ID NO: 978026 - RNA, 19 nt, Homo sapiens
  misc_RNA (1)...(19): siRNA sense strand
gcaaggggcuacuuuucaa

SEQ ID NO: 978027 - RNA, 19 nt, Homo sapiens
  misc_RNA (1)...(19): siRNA sense strand
gcaaggagaggaggaggaa

SEQ ID NO: 978028 - RNA, 19 nt, Homo sapiens
  misc_RNA (1)...(19): siRNA sense strand
uggauuuccuguuggcaua

SEQ ID NO: 978029 - RNA, 19 nt, Homo sapiens
  misc_RNA (1)...(19): siRNA sense strand
uacagucacuucuaaaugg

SEQ ID NO: 978030 - RNA, 19 nt, Homo sapiens
  misc_RNA (1)...(19): siRNA sense strand
aagaaucgcuuagugaaag

SEQ ID NO: 978031 - RNA, 19 nt, Homo sapiens
  misc_RNA (1)...(19): siRNA sense strand
acagaccguuacucagaua

SEQ ID NO: 978032 - RNA, 19 nt, Homo sapiens
  misc_RNA (1)...(19): siRNA sense strand
ggaaggcucaaagcaguuu

SEQ ID NO: 978033 - RNA, 19 nt, Homo sapiens
  misc_RNA (1)...(19): siRNA sense strand
ggaaguggagcugcagaaa

SEQ ID NO: 978034 - RNA, 19 nt, Homo sapiens
  misc_RNA (1)...(19): siRNA sense strand
cuaaauggugggagaauga

SEQ ID NO: 978035 - RNA, 19 nt, Homo sapiens
  misc_RNA (1)...(19): siRNA sense strand
aaagacccuucuccaaaga

SEQ ID NO: 978036 - RNA, 19 nt, Homo sapiens
  misc_RNA (1)...(19): siRNA sense strand
gagcaguacgggucuguug

SEQ ID NO: 978037 - RNA, 19 nt, Homo sapiens
  misc_RNA (1)...(19): siRNA sense strand
caggaugucauauuuguug

SEQ ID NO: 978038 - RNA, 19 nt, Homo sapiens
  misc_RNA (1)...(19): siRNA sense strand
gaguugcacagaugucuuu

SEQ ID NO: 978039 - RNA, 19 nt, Homo sapiens
  misc_RNA (1)...(19): siRNA sense strand
gcaaggcgaugcagaugua

SEQ ID NO: 978040 - RNA, 19 nt, Homo sapiens
  misc_RNA (1)...(19): siRNA sense strand
ggagggagcuucgcgauca

SEQ ID NO: 978041 - RNA, 19 nt, Homo sapiens
  misc_RNA (1)...(19): siRNA sense strand
ugagaugacugugaagaua

SEQ ID NO: 978042 - RNA, 19 nt, Homo sapiens
  misc_RNA (1)...(19): siRNA sense strand
ccgagggccuugggaauua

SEQ ID NO: 978043 - RNA, 19 nt, Homo sapiens
  misc_RNA (1)...(19): siRNA sense strand
gcacugaggcagagauuca

SEQ ID NO: 978044 - RNA, 19 nt, Homo sapiens
  misc_RNA (1)...(19): siRNA sense strand
gccagugccugaccucgua

SEQ ID NO: 978045 - RNA, 19 nt, Homo sapiens
  misc_RNA (1)...(19): siRNA sense strand
gaugucagcccagcacuuu

SEQ ID NO: 978046 - RNA, 19 nt, Homo sapiens
  misc_RNA (1)...(19): siRNA sense strand
gagcugguaugcccgacuu

SEQ ID NO: 978047 - RNA, 19 nt, Homo sapiens
  misc_RNA (1)...(19): siRNA sense strand
gguggaggcuuucucuauc

SEQ ID NO: 978048 - RNA, 19 nt, Homo sapiens
  misc_RNA (1)...(19): siRNA sense strand
aaucauggcgucuaccuaa

SEQ ID NO: 978049 - RNA, 19 nt, Homo sapiens
  misc_RNA (1)...(19): siRNA sense strand
aggaugagaugacugugaa

SEQ ID NO: 978050 - RNA, 19 nt, Homo sapiens
  misc_RNA (1)...(19): siRNA sense strand
gcauccaccugguugaagu

SEQ ID NO: 978051 - RNA, 19 nt, Homo sapiens
  misc_RNA (1)...(19): siRNA sense strand
augcagauguagcggguua

SEQ ID NO: 978052 - RNA, 19 nt, Homo sapiens
  misc_RNA (1)...(19): siRNA sense strand
gaagguggagguagaagag

SEQ ID NO: 978053 - RNA, 19 nt, Homo sapiens
  misc_RNA (1)...(19): siRNA sense strand
gcccuggagugaauucuuc

SEQ ID NO: 978054 - RNA, 19 nt, Homo sapiens
  misc_RNA (1)...(19): siRNA sense strand
gagagggacaaguggcuaa

SEQ ID NO: 978055 - RNA, 19 nt, Homo sapiens
  misc_RNA (1)...(19): siRNA sense strand
gagauucagcgguguguca

SEQ ID NO: 978056 - RNA, 19 nt, Homo sapiens
  misc_RNA (1)...(19): siRNA sense strand
gaggcuuucucuaucuguu

SEQ ID NO: 978057 - RNA, 19 nt, Homo sapiens
  misc_RNA (1)...(19): siRNA sense strand
gagaugacugugaagauag

SEQ ID NO: 978058 - RNA, 19 nt, Homo sapiens
  misc_RNA (1)...(19): siRNA sense strand
gaaucauggcgucuaccua

SEQ ID NO: 978059 - RNA, 19 nt, Homo sapiens
  misc_RNA (1)...(19): siRNA sense strand
uggcugaccugcgggacua

SEQ ID NO: 978060 - RNA, 19 nt, Homo sapiens
  misc_RNA (1)...(19): siRNA sense strand
gaugagaugacugugaaga

SEQ ID NO: 978061 - RNA, 19 nt, Homo sapiens
  misc_RNA (1)...(19): siRNA sense strand
caagaggacagguguucga

SEQ ID NO: 978062 - RNA, 19 nt, Homo sapiens
  misc_RNA (1)...(19): siRNA sense strand
ccaaggagccacagcaaaa

SEQ ID NO: 978063 - RNA, 19 nt, Homo sapiens
  misc_RNA (1)...(19): siRNA sense strand
gcacggaagcccugaucca

SEQ ID NO: 978064 - RNA, 19 nt, Homo sapiens
  misc_RNA (1)...(19): siRNA sense strand
ggagcugcgugaccuuguc

SEQ ID NO: 978065 - RNA, 19 nt, Homo sapiens
  misc_RNA (1)...(19): siRNA sense strand
ggcuuucucuaucuguuga

SEQ ID NO: 978066 - RNA, 19 nt, Homo sapiens
  misc_RNA (1)...(19): siRNA sense strand
caacgugcccuggagugaa

SEQ ID NO: 978067 - RNA, 19 nt, Homo sapiens
  misc_RNA (1)...(19): siRNA sense strand
gaccaaggagccacagcaa

SEQ ID NO: 978068 - RNA, 19 nt, Homo sapiens
  misc_RNA (1)...(19): siRNA sense strand
ggccuacgcucagaaucau

SEQ ID NO: 978069 - RNA, 19 nt, Homo sapiens
  misc_RNA (1)...(19): siRNA sense strand
ucaaugaccaccugcucuu

SEQ ID NO: 978070 - RNA, 19 nt, Homo sapiens
  misc_RNA (1)...(19): siRNA sense strand
cacugaagguggagguaga

SEQ ID NO: 978071 - RNA, 19 nt, Homo sapiens
  misc_RNA (1)...(19): siRNA sense strand
ggucgagacuuccccuuug

SEQ ID NO: 978072 - RNA, 19 nt, Homo sapiens
  misc_RNA (1)...(19): siRNA sense strand
ucagaaucauggcgucuac

SEQ ID NO: 978073 - RNA, 19 nt, Homo sapiens
  misc_RNA (1)...(19): siRNA sense strand
guggaggcuuucucuaucu

SEQ ID NO: 978074 - RNA, 19 nt, Homo sapiens
  misc_RNA (1)...(19): siRNA sense strand
gaaugcccacagccuggua

SEQ ID NO: 978075 - RNA, 19 nt, Homo sapiens
  misc_RNA (1)...(19): siRNA sense strand
caggaugagaugacuguga

SEQ ID NO: 978076 - RNA, 19 nt, Homo sapiens
  misc_RNA (1)...(19): siRNA sense strand
cuguugcccuuucccauga

SEQ ID NO: 978077 - RNA, 19 nt, Homo sapiens
  misc_RNA (1)...(19): siRNA sense strand
ccgccaggcugugauguca

SEQ ID NO: 978078 - RNA, 19 nt, Homo sapiens
  misc_RNA (1)...(19): siRNA sense strand
cacggugccugagggcuuu

SEQ ID NO: 978079 - RNA, 19 nt, Homo sapiens
  misc_RNA (1)...(19): siRNA sense strand
gaccgagggccuugggaau

SEQ ID NO: 978080 - RNA, 19 nt, Homo sapiens
  misc_RNA (1)...(19): siRNA sense strand
gggcacugaggcagagauu

SEQ ID NO: 978081 - RNA, 19 nt, Homo sapiens
  misc_RNA (1)...(19): siRNA sense strand
uggaagccuuggucugcaa

SEQ ID NO: 978082 - RNA, 19 nt, Homo sapiens
  misc_RNA (1)...(19): siRNA sense strand
gggcaaggcgaugcagaug

SEQ ID NO: 978083 - RNA, 19 nt, Homo sapiens
  misc_RNA (1)...(19): siRNA sense strand
agaugacugugaagauagu

SEQ ID NO: 978084 - RNA, 19 nt, Homo sapiens
  misc_RNA (1)...(19): siRNA sense strand
cgguggaggcuuucucuau

SEQ ID NO: 978085 - RNA, 19 nt, Homo sapiens
  misc_RNA (1)...(19): siRNA sense strand
gugcugaggagcugguaug

SEQ ID NO: 978086 - RNA, 19 nt, Homo sapiens
  misc_RNA (1)...(19): siRNA sense strand
gaccagagcucauccaaca

SEQ ID NO: 978087 - RNA, 19 nt, Homo sapiens
  misc_RNA (1)...(19): siRNA sense strand
gaggagaucuuccaguaug

SEQ ID NO: 978088 - RNA, 19 nt, Homo sapiens
  misc_RNA (1)...(19): siRNA sense strand
gaggagaacuucaccauac

SEQ ID NO: 978089 - RNA, 19 nt, Homo sapiens
  misc_RNA (1)...(19): siRNA sense strand
ggaggaggaugaugagaug

SEQ ID NO: 978090 - RNA, 19 nt, Homo sapiens
  misc_RNA (1)...(19): siRNA sense strand
ggaacgggaucaugaagga

SEQ ID NO: 978091 - RNA, 19 nt, Homo sapiens
  misc_RNA (1)...(19): siRNA sense strand
gguccuggcugaaacauga

SEQ ID NO: 978092 - RNA, 19 nt, Homo sapiens
  misc_RNA (1)...(19): siRNA sense strand
gcaacuaugugcucuucaa

SEQ ID NO: 978093 - RNA, 19 nt, Homo sapiens
  misc_RNA (1)...(19): siRNA sense strand
gaagauggccacaggaaug

SEQ ID NO: 978094 - RNA, 19 nt, Homo sapiens
  misc_RNA (1)...(19): siRNA sense strand
gcaagaugaucgacgucua

SEQ ID NO: 978095 - RNA, 19 nt, Homo sapiens
  misc_RNA (1)...(19): siRNA sense strand
ggguggagaucauguacua

SEQ ID NO: 978096 - RNA, 19 nt, Homo sapiens
  misc_RNA (1)...(19): siRNA sense strand
ggaacagccucaagcacaa

SEQ ID NO: 978097 - RNA, 19 nt, Homo sapiens
  misc_RNA (1)...(19): siRNA sense strand
gagcugugcccgcaacaua

SEQ ID NO: 978098 - RNA, 19 nt, Homo sapiens
  misc_RNA (1)...(19): siRNA sense strand
gcucugaugucccucuuug

SEQ ID NO: 978099 - RNA, 19 nt, Homo sapiens
  misc_RNA (1)...(19): siRNA sense strand
gacagcgucucuuuaauca

SEQ ID NO: 978100 - RNA, 19 nt, Homo sapiens
  misc_RNA (1)...(19): siRNA sense strand
ggacagcgucucuuuaauc

SEQ ID NO: 978101 - RNA, 19 nt, Homo sapiens
  misc_RNA (1)...(19): siRNA sense strand
ccagagcucauccaacaua

SEQ ID NO: 978102 - RNA, 19 nt, Homo sapiens
  misc_RNA (1)...(19): siRNA sense strand
ggagacagcccucaaguac

SEQ ID NO: 978103 - RNA, 19 nt, Homo sapiens
  misc_RNA (1)...(19): siRNA sense strand
ggaggagaacuucaccaua

SEQ ID NO: 978104 - RNA, 19 nt, Homo sapiens
  misc_RNA (1)...(19): siRNA sense strand
cagagaacuuccuguguga

SEQ ID NO: 978105 - RNA, 19 nt, Homo sapiens
  misc_RNA (1)...(19): siRNA sense strand
acgaggagaucuuccagua

SEQ ID NO: 978106 - RNA, 19 nt, Homo sapiens
  misc_RNA (1)...(19): siRNA sense strand
gcaggucuuugaugacuuc

SEQ ID NO: 978107 - RNA, 19 nt, Homo sapiens
  misc_RNA (1)...(19): siRNA sense strand
uggcagggauggucgagua

SEQ ID NO: 978108 - RNA, 19 nt, Homo sapiens
  misc_RNA (1)...(19): siRNA sense strand
cagcgucucuuuaaucauc

SEQ ID NO: 978109 - RNA, 19 nt, Homo sapiens
  misc_RNA (1)...(19): siRNA sense strand
gagcucauccaacauagaa

SEQ ID NO: 978110 - RNA, 19 nt, Homo sapiens
  misc_RNA (1)...(19): siRNA sense strand
cauuugggcucuucgacua

SEQ ID NO: 978111 - RNA, 19 nt, Homo sapiens
  misc_RNA (1)...(19): siRNA sense strand
agacagcccucaaguacug

SEQ ID NO: 978112 - RNA, 19 nt, Homo sapiens
  misc_RNA (1)...(19): siRNA sense strand
ggaaccgccuggauuucuu

SEQ ID NO: 978113 - RNA, 19 nt, Homo sapiens
  misc_RNA (1)...(19): siRNA sense strand
cggaggagcugaccaacau

SEQ ID NO: 978114 - RNA, 19 nt, Homo sapiens
  misc_RNA (1)...(19): siRNA sense strand
ccacaagggugccaucaac

SEQ ID NO: 978115 - RNA, 19 nt, Homo sapiens
  misc_RNA (1)...(19): siRNA sense strand
ggaccuggccauugugcua

SEQ ID NO: 978116 - RNA, 19 nt, Homo sapiens
  misc_RNA (1)...(19): siRNA sense strand
cuucaucuuuggcaucaua

SEQ ID NO: 978117 - RNA, 19 nt, Homo sapiens
  misc_RNA (1)...(19): siRNA sense strand
caagggugccaucaacuuu

SEQ ID NO: 978118 - RNA, 19 nt, Homo sapiens
  misc_RNA (1)...(19): siRNA sense strand
gaccauuauugcccacaaa

SEQ ID NO: 978119 - RNA, 19 nt, Homo sapiens
  misc_RNA (1)...(19): siRNA sense strand
ggucuucaccagcauguuu

SEQ ID NO: 978120 - RNA, 19 nt, Homo sapiens
  misc_RNA (1)...(19): siRNA sense strand
gaucugcaauguggucuuc

SEQ ID NO: 978121 - RNA, 19 nt, Homo sapiens
  misc_RNA (1)...(19): siRNA sense strand
guacugcaacuauauguuc

SEQ ID NO: 978122 - RNA, 19 nt, Homo sapiens
  misc_RNA (1)...(19): siRNA sense strand
ccaugucccuggagcacua

SEQ ID NO: 978123 - RNA, 19 nt, Homo sapiens
  misc_RNA (1)...(19): siRNA sense strand
gaacgugcuggauggcuuu

SEQ ID NO: 978124 - RNA, 19 nt, Homo sapiens
  misc_RNA (1)...(19): siRNA sense strand
uagaagaguuugauaagcu

SEQ ID NO: 978125 - RNA, 19 nt, Homo sapiens
  misc_RNA (1)...(19): siRNA sense strand
caacauagaagaguuugau

SEQ ID NO: 978126 - RNA, 19 nt, Homo sapiens
  misc_RNA (1)...(19): siRNA sense strand
gcucaucgucagcuucuuu

SEQ ID NO: 978127 - RNA, 19 nt, Homo sapiens
  misc_RNA (1)...(19): siRNA sense strand
gggccucccucuacuuugu

SEQ ID NO: 978128 - RNA, 19 nt, Homo sapiens
  misc_RNA (1)...(19): siRNA sense strand
acacgguggugcaagcuuu

SEQ ID NO: 978129 - RNA, 19 nt, Homo sapiens
  misc_RNA (1)...(19): siRNA sense strand
guucaccacugucuuugug

SEQ ID NO: 978130 - RNA, 19 nt, Homo sapiens
  misc_RNA (1)...(19): siRNA sense strand
ggauggcuuucuugucuuc

SEQ ID NO: 978131 - RNA, 19 nt, Homo sapiens
  misc_RNA (1)...(19): siRNA sense strand
gaugaucgacgucuauaag

SEQ ID NO: 978132 - RNA, 19 nt, Homo sapiens
  misc_RNA (1)...(19): siRNA sense strand
uggaggagaucccauucaa

SEQ ID NO: 978133 - RNA, 19 nt, Homo sapiens
  misc_RNA (1)...(19): siRNA sense strand
gaacuuccugugugagaug

SEQ ID NO: 978134 - RNA, 19 nt, Homo sapiens
  misc_RNA (1)...(19): siRNA sense strand
gccacuaccuggacaucuu

SEQ ID NO: 978135 - RNA, 19 nt, Homo sapiens
  misc_RNA (1)...(19): siRNA sense strand
caucugcugugccuucuuc

SEQ ID NO: 978136 - RNA, 19 nt, Homo sapiens
  misc_RNA (1)...(19): siRNA sense strand
cccacaaacucuucgacua

SEQ ID NO: 978137 - RNA, 19 nt, Homo sapiens
  misc_RNA (1)...(19): siRNA sense strand
cauggaaccgccuggauuu

SEQ ID NO: 978138 - RNA, 19 nt, Homo sapiens
  misc_RNA (1)...(19): siRNA sense strand
ggugguggcugugcucaug

SEQ ID NO: 978139 - RNA, 19 nt, Homo sapiens
  misc_RNA (1)...(19): siRNA sense strand
caagaugaucgacgucuau

SEQ ID NO: 978140 - RNA, 19 nt, Homo sapiens
  misc_RNA (1)...(19): siRNA sense strand
cauccaacauagaagaguu

SEQ ID NO: 978141 - RNA, 19 nt, Homo sapiens
  misc_RNA (1)...(19): siRNA sense strand
gggcgacaaugggauaaug

SEQ ID NO: 978142 - RNA, 19 nt, Homo sapiens
  misc_RNA (1)...(19): siRNA sense strand
cagcaucauugucaucauc

SEQ ID NO: 978143 - RNA, 19 nt, Homo sapiens
  misc_RNA (1)...(19): siRNA sense strand
ucaaguacugcaacuauau

SEQ ID NO: 978144 - RNA, 19 nt, Homo sapiens
  misc_RNA (1)...(19): siRNA sense strand
ggagauggugcucaagaug

SEQ ID NO: 978145 - RNA, 19 nt, Homo sapiens
  misc_RNA (1)...(19): siRNA sense strand
uagggaggaugagcuauga

SEQ ID NO: 978146 - RNA, 19 nt, Homo sapiens
  misc_RNA (1)...(19): siRNA sense strand
caccaagggucaacuguac

SEQ ID NO: 978147 - RNA, 19 nt, Homo sapiens
  misc_RNA (1)...(19): siRNA sense strand
gagaacuuccugugugaga

SEQ ID NO: 978148 - RNA, 19 nt, Homo sapiens
  misc_RNA (1)...(19): siRNA sense strand
cucaaguacugcaacuaua

SEQ ID NO: 978149 - RNA, 19 nt, Homo sapiens
  misc_RNA (1)...(19): siRNA sense strand
gcgugacacuuggcaugua

SEQ ID NO: 978150 - RNA, 19 nt, Homo sapiens
  misc_RNA (1)...(19): siRNA sense strand
ggucugaggcgcuucuuca

SEQ ID NO: 978151 - RNA, 19 nt, Homo sapiens
  misc_RNA (1)...(19): siRNA sense strand
gcuggguccaucacaaaua

SEQ ID NO: 978152 - RNA, 19 nt, Homo sapiens
  misc_RNA (1)...(19): siRNA sense strand
cgagaugacauugaaggua

SEQ ID NO: 978153 - RNA, 19 nt, Homo sapiens
  misc_RNA (1)...(19): siRNA sense strand
gcaccgaacgcaucuuucu

SEQ ID NO: 978154 - RNA, 19 nt, Homo sapiens
  misc_RNA (1)...(19): siRNA sense strand
cguccuggccuucaucuuu

SEQ ID NO: 978155 - RNA, 19 nt, Homo sapiens
  misc_RNA (1)...(19): siRNA sense strand
gaaacuggugcgcuucaug

SEQ ID NO: 978156 - RNA, 19 nt, Homo sapiens
  misc_RNA (1)...(19): siRNA sense strand
ugaccaacauccuggagau

SEQ ID NO: 978157 - RNA, 19 nt, Homo sapiens
  misc_RNA (1)...(19): siRNA sense strand
gaugcucacuccuucuaca

SEQ ID NO: 978158 - RNA, 19 nt, Homo sapiens
  misc_RNA (1)...(19): siRNA sense strand
gacaacaucgguuaugcuu

SEQ ID NO: 978159 - RNA, 19 nt, Homo sapiens
  misc_RNA (1)...(19): siRNA sense strand
gcaucacccuggaggagau

SEQ ID NO: 978160 - RNA, 19 nt, Homo sapiens
  misc_RNA (1)...(19): siRNA sense strand
caucgguuaugcuuggauu

SEQ ID NO: 978161 - RNA, 19 nt, Homo sapiens
  misc_RNA (1)...(19): siRNA sense strand
gcccuacuaugccaccuau

SEQ ID NO: 978162 - RNA, 19 nt, Homo sapiens
  misc_RNA (1)...(19): siRNA sense strand
gcucauccaacauagaaga

SEQ ID NO: 978163 - RNA, 19 nt, Homo sapiens
  misc_RNA (1)...(19): siRNA sense strand
ggagaacuucaccauacaa

SEQ ID NO: 978164 - RNA, 19 nt, Homo sapiens
  misc_RNA (1)...(19): siRNA sense strand
acaaauacaacuucgacaa

SEQ ID NO: 978165 - RNA, 19 nt, Homo sapiens
  misc_RNA (1)...(19): siRNA sense strand
ccacaaacucuucgacuac

SEQ ID NO: 978166 - RNA, 19 nt, Homo sapiens
  misc_RNA (1)...(19): siRNA sense strand
cauagaagaguuugauaag

SEQ ID NO: 978167 - RNA, 19 nt, Homo sapiens
  misc_RNA (1)...(19): siRNA sense strand
auagugggcuccuucuuca

SEQ ID NO: 978168 - RNA, 19 nt, Homo sapiens
  misc_RNA (1)...(19): siRNA sense strand
gguuaugcuuggauuguca

SEQ ID NO: 978169 - RNA, 19 nt, Homo sapiens
  misc_RNA (1)...(19): siRNA sense strand
cugcugcucugcuucuuug

SEQ ID NO: 978170 - RNA, 19 nt, Homo sapiens
  misc_RNA (1)...(19): siRNA sense strand
ucaccaagggucaacugua

SEQ ID NO: 978171 - RNA, 19 nt, Homo sapiens
  misc_RNA (1)...(19): siRNA sense strand
caaccugggccuccucuuc

SEQ ID NO: 978172 - RNA, 19 nt, Homo sapiens
  misc_RNA (1)...(19): siRNA sense strand
cuggauggcuuucuugucu

SEQ ID NO: 978173 - RNA, 19 nt, Homo sapiens
  misc_RNA (1)...(19): siRNA sense strand
cagcaccgaacgcaucuuu

SEQ ID NO: 978174 - RNA, 19 nt, Homo sapiens
  misc_RNA (1)...(19): siRNA sense strand
caucuucgacagcaucauu

SEQ ID NO: 978175 - RNA, 19 nt, Homo sapiens
  misc_RNA (1)...(19): siRNA sense strand
ggacagcaaguacuucaac

SEQ ID NO: 978176 - RNA, 19 nt, Homo sapiens
  misc_RNA (1)...(19): siRNA sense strand
gcacuaccaugggaagacu

SEQ ID NO: 978177 - RNA, 19 nt, Homo sapiens
  misc_RNA (1)...(19): siRNA sense strand
caacuucaucuacuucauc

SEQ ID NO: 978178 - RNA, 19 nt, Homo sapiens
  misc_RNA (1)...(19): siRNA sense strand
caacuggaaccguuacuac

SEQ ID NO: 978179 - RNA, 19 nt, Homo sapiens
  misc_RNA (1)...(19): siRNA sense strand
gaaccguuacuacaaugug

SEQ ID NO: 978180 - RNA, 19 nt, Homo sapiens
  misc_RNA (1)...(19): siRNA sense strand
gugcugaagcuguugaaga

SEQ ID NO: 978181 - RNA, 19 nt, Homo sapiens
  misc_RNA (1)...(19): siRNA sense strand
ccuggaugcugcuguacuu

SEQ ID NO: 978182 - RNA, 19 nt, Homo sapiens
  misc_RNA (1)...(19): siRNA sense strand
caaauacaacuucgacaac

SEQ ID NO: 978183 - RNA, 19 nt, Homo sapiens
  misc_RNA (1)...(19): siRNA sense strand
gacuucaucuuuaucuucu

SEQ ID NO: 978184 - RNA, 19 nt, Homo sapiens
  misc_RNA (1)...(19): siRNA sense strand
uugggaagcuggucugcaa

SEQ ID NO: 978185 - RNA, 19 nt, Homo sapiens
  misc_RNA (1)...(19): siRNA sense strand
cuggacagcgucucuuuaa

SEQ ID NO: 978186 - RNA, 19 nt, Homo sapiens
  misc_RNA (1)...(19): siRNA sense strand
uuaagagacucaucagauu

SEQ ID NO: 978187 - RNA, 19 nt, Homo sapiens
  misc_RNA (1)...(19): siRNA sense strand
gaagcaaaguuaagagacu

SEQ ID NO: 978188 - RNA, 19 nt, Homo sapiens
  misc_RNA (1)...(19): siRNA sense strand
ccagcgggcuccucaauuc

SEQ ID NO: 978189 - RNA, 19 nt, Homo sapiens
  misc_RNA (1)...(19): siRNA sense strand
guuaagagacucaucagau

SEQ ID NO: 978190 - RNA, 19 nt, Homo sapiens
  misc_RNA (1)...(19): siRNA sense strand
gagcugcugcgggauauuu

SEQ ID NO: 978191 - RNA, 19 nt, Homo sapiens
  misc_RNA (1)...(19): siRNA sense strand
uaagagacucaucagauuc

SEQ ID NO: 978192 - RNA, 19 nt, Homo sapiens
  misc_RNA (1)...(19): siRNA sense strand
aaaguuaagagacucauca

SEQ ID NO: 978193 - RNA, 19 nt, Homo sapiens
  misc_RNA (1)...(19): siRNA sense strand
uagaagcaaaguuaagaga

SEQ ID NO: 978194 - RNA, 19 nt, Homo sapiens
  misc_RNA (1)...(19): siRNA sense strand
gagaugugccagcuguuca

SEQ ID NO: 978195 - RNA, 19 nt, Homo sapiens
  misc_RNA (1)...(19): siRNA sense strand
gcuguucaccaccgagcua

SEQ ID NO: 978196 - RNA, 19 nt, Homo sapiens
  misc_RNA (1)...(19): siRNA sense strand
uuaagagacucaucagauu

SEQ ID NO: 978197 - RNA, 19 nt, Homo sapiens
  misc_RNA (1)...(19): siRNA sense strand
gaagcaaaguuaagagacu

SEQ ID NO: 978198 - RNA, 19 nt, Homo sapiens
  misc_RNA (1)...(19): siRNA sense strand
ccagcgggcuccucaauuc

SEQ ID NO: 978199 - RNA, 19 nt, Homo sapiens
  misc_RNA (1)...(19): siRNA sense strand
guuaagagacucaucagau

SEQ ID NO: 978200 - RNA, 19 nt, Homo sapiens
  misc_RNA (1)...(19): siRNA sense strand
gagcugcugcgggauauuu

SEQ ID NO: 978201 - RNA, 19 nt, Homo sapiens
  misc_RNA (1)...(19): siRNA sense strand
uaagagacucaucagauuc

SEQ ID NO: 978202 - RNA, 19 nt, Homo sapiens
  misc_RNA (1)...(19): siRNA sense strand
aaaguuaagagacucauca

SEQ ID NO: 978203 - RNA, 19 nt, Homo sapiens
  misc_RNA (1)...(19): siRNA sense strand
uagaagcaaaguuaagaga

SEQ ID NO: 978204 - RNA, 19 nt, Homo sapiens
  misc_RNA (1)...(19): siRNA sense strand
gagaugugccagcuguuca

SEQ ID NO: 978205 - RNA, 19 nt, Homo sapiens
  misc_RNA (1)...(19): siRNA sense strand
gcuguucaccaccgagcua

SEQ ID NO: 978206 - RNA, 19 nt, Homo sapiens
  misc_RNA (1)...(19): siRNA sense strand
gcacauuucucaccuauau

SEQ ID NO: 978207 - RNA, 19 nt, Homo sapiens
  misc_RNA (1)...(19): siRNA sense strand
gcaauaaacuauacaaguc

SEQ ID NO: 978208 - RNA, 19 nt, Homo sapiens
  misc_RNA (1)...(19): siRNA sense strand
gaaguuaugugucccauuc

SEQ ID NO: 978209 - RNA, 19 nt, Homo sapiens
  misc_RNA (1)...(19): siRNA sense strand
gcaguuauaugauagacaa

SEQ ID NO: 978210 - RNA, 19 nt, Homo sapiens
  misc_RNA (1)...(19): siRNA sense strand
gccauuagcuccauucuuc

SEQ ID NO: 978211 - RNA, 19 nt, Homo sapiens
  misc_RNA (1)...(19): siRNA sense strand
guggagaauuugaguauuu

SEQ ID NO: 978212 - RNA, 19 nt, Homo sapiens
  misc_RNA (1)...(19): siRNA sense strand
gaacguagcggaucauuac

SEQ ID NO: 978213 - RNA, 19 nt, Homo sapiens
  misc_RNA (1)...(19): siRNA sense strand
gcacugaauugagcaaaga

SEQ ID NO: 978214 - RNA, 19 nt, Homo sapiens
  misc_RNA (1)...(19): siRNA sense strand
gacgugcaguuauaugaua

SEQ ID NO: 978215 - RNA, 19 nt, Homo sapiens
  misc_RNA (1)...(19): siRNA sense strand
caaauccucuuacuguuuc

SEQ ID NO: 978216 - RNA, 19 nt, Homo sapiens
  misc_RNA (1)...(19): siRNA sense strand
gcuguuggcucaagcagaa

SEQ ID NO: 978217 - RNA, 19 nt, Homo sapiens
  misc_RNA (1)...(19): siRNA sense strand
gugcggagcuguacuucaa

SEQ ID NO: 978218 - RNA, 19 nt, Homo sapiens
  misc_RNA (1)...(19): siRNA sense strand
aagacuauguggagaauuu

SEQ ID NO: 978219 - RNA, 19 nt, Homo sapiens
  misc_RNA (1)...(19): siRNA sense strand
gaaggaacaggaaauuaga

SEQ ID NO: 978220 - RNA, 19 nt, Homo sapiens
  misc_RNA (1)...(19): siRNA sense strand
ucacagaggcaucgaacua

SEQ ID NO: 978221 - RNA, 19 nt, Homo sapiens
  misc_RNA (1)...(19): siRNA sense strand
acacaaauccucuuacugu

SEQ ID NO: 978222 - RNA, 19 nt, Homo sapiens
  misc_RNA (1)...(19): siRNA sense strand
gcagagacaccuucagauc

SEQ ID NO: 978223 - RNA, 19 nt, Homo sapiens
  misc_RNA (1)...(19): siRNA sense strand
cuucagaucucuuuaaugc

SEQ ID NO: 978224 - RNA, 19 nt, Homo sapiens
  misc_RNA (1)...(19): siRNA sense strand
agucuuaccuugaggcauu

SEQ ID NO: 978225 - RNA, 19 nt, Homo sapiens
  misc_RNA (1)...(19): siRNA sense strand
gauagcagaauguauuuca

SEQ ID NO: 978226 - RNA, 19 nt, Homo sapiens
  misc_RNA (1)...(19): siRNA sense strand
guggauagcagaauguauu

SEQ ID NO: 978227 - RNA, 19 nt, Homo sapiens
  misc_RNA (1)...(19): siRNA sense strand
cuagaugaacugaauauug

SEQ ID NO: 978228 - RNA, 19 nt, Homo sapiens
  misc_RNA (1)...(19): siRNA sense strand
gagcgugagguacaaauga

SEQ ID NO: 978229 - RNA, 19 nt, Homo sapiens
  misc_RNA (1)...(19): siRNA sense strand
ugaagaacguagcggauca

SEQ ID NO: 978230 - RNA, 19 nt, Homo sapiens
  misc_RNA (1)...(19): siRNA sense strand
cagaagacuuugaccagau

SEQ ID NO: 978231 - RNA, 19 nt, Homo sapiens
  misc_RNA (1)...(19): siRNA sense strand
gacauuggaggacguguuu

SEQ ID NO: 978232 - RNA, 19 nt, Homo sapiens
  misc_RNA (1)...(19): siRNA sense strand
caacaguuacauuccaauu

SEQ ID NO: 978233 - RNA, 19 nt, Homo sapiens
  misc_RNA (1)...(19): siRNA sense strand
acagaggcaucgaacuaaa

SEQ ID NO: 978234 - RNA, 19 nt, Homo sapiens
  misc_RNA (1)...(19): siRNA sense strand
acaaauccucuuacuguuu

SEQ ID NO: 978235 - RNA, 19 nt, Homo sapiens
  misc_RNA (1)...(19): siRNA sense strand
caacagacaguuccacuac

SEQ ID NO: 978236 - RNA, 19 nt, Homo sapiens
  misc_RNA (1)...(19): siRNA sense strand
cagcacauuucucaccuau

SEQ ID NO: 978237 - RNA, 19 nt, Homo sapiens
  misc_RNA (1)...(19): siRNA sense strand
ugaaaaugcucuagaugaa

SEQ ID NO: 978238 - RNA, 19 nt, Homo sapiens
  misc_RNA (1)...(19): siRNA sense strand
ugaaggaacaggaaauuag

SEQ ID NO: 978239 - RNA, 19 nt, Homo sapiens
  misc_RNA (1)...(19): siRNA sense strand
ucacacaaauccucuuacu

SEQ ID NO: 978240 - RNA, 19 nt, Homo sapiens
  misc_RNA (1)...(19): siRNA sense strand
gaguauuuccggaaucauu

SEQ ID NO: 978241 - RNA, 19 nt, Homo sapiens
  misc_RNA (1)...(19): siRNA sense strand
cacaaauccucuuacuguu

SEQ ID NO: 978242 - RNA, 19 nt, Homo sapiens
  misc_RNA (1)...(19): siRNA sense strand
cggaguauacaaaccuuua

SEQ ID NO: 978243 - RNA, 19 nt, Homo sapiens
  misc_RNA (1)...(19): siRNA sense strand
aaauucaucuccagacuac

SEQ ID NO: 978244 - RNA, 19 nt, Homo sapiens
  misc_RNA (1)...(19): siRNA sense strand
gacccuagaagaccugaaa

SEQ ID NO: 978245 - RNA, 19 nt, Homo sapiens
  misc_RNA (1)...(19): siRNA sense strand
gaugucacagcagaaguua

SEQ ID NO: 978246 - RNA, 19 nt, Homo sapiens
  misc_RNA (1)...(19): siRNA sense strand
ggcauucuauaaauucugu

SEQ ID NO: 978247 - RNA, 19 nt, Homo sapiens
  misc_RNA (1)...(19): siRNA sense strand
gauagacaaugugauucug

SEQ ID NO: 978248 - RNA, 19 nt, Homo sapiens
  misc_RNA (1)...(19): siRNA sense strand
gaaacgccauuagcuccau

SEQ ID NO: 978249 - RNA, 19 nt, Homo sapiens
  misc_RNA (1)...(19): siRNA sense strand
gcagaauguauuucacaga

SEQ ID NO: 978250 - RNA, 19 nt, Homo sapiens
  misc_RNA (1)...(19): siRNA sense strand
cuugaggcauucuauaaau

SEQ ID NO: 978251 - RNA, 19 nt, Homo sapiens
  misc_RNA (1)...(19): siRNA sense strand
gaaaagacuauguggagaa

SEQ ID NO: 978252 - RNA, 19 nt, Homo sapiens
  misc_RNA (1)...(19): siRNA sense strand
ggaacaggaaauuagaaau

SEQ ID NO: 978253 - RNA, 19 nt, Homo sapiens
  misc_RNA (1)...(19): siRNA sense strand
agaagacuuugaccagaug

SEQ ID NO: 978254 - RNA, 19 nt, Homo sapiens
  misc_RNA (1)...(19): siRNA sense strand
aaucacacaaauccucuua

SEQ ID NO: 978255 - RNA, 19 nt, Homo sapiens
  misc_RNA (1)...(19): siRNA sense strand
cgacagacgugcuuuuauc

SEQ ID NO: 978256 - RNA, 19 nt, Homo sapiens
  misc_RNA (1)...(19): siRNA sense strand
gaucgaaacgccauuagcu

SEQ ID NO: 978257 - RNA, 19 nt, Homo sapiens
  misc_RNA (1)...(19): siRNA sense strand
gcuacgcaauaaacuauac

SEQ ID NO: 978258 - RNA, 19 nt, Homo sapiens
  misc_RNA (1)...(19): siRNA sense strand
gaaauauuguguggauagc

SEQ ID NO: 978259 - RNA, 19 nt, Homo sapiens
  misc_RNA (1)...(19): siRNA sense strand
gcugaaggaacaggaaauu

SEQ ID NO: 978260 - RNA, 19 nt, Homo sapiens
  misc_RNA (1)...(19): siRNA sense strand
ggaguauacaaaccuuuau

SEQ ID NO: 978261 - RNA, 19 nt, Homo sapiens
  misc_RNA (1)...(19): siRNA sense strand
uaacuccuuuggcacugaa

SEQ ID NO: 978262 - RNA, 19 nt, Homo sapiens
  misc_RNA (1)...(19): siRNA sense strand
gaaauggaagcugucaaca

SEQ ID NO: 978263 - RNA, 19 nt, Homo sapiens
  misc_RNA (1)...(19): siRNA sense strand
ugacccagcaagacuauau

SEQ ID NO: 978264 - RNA, 19 nt, Homo sapiens
  misc_RNA (1)...(19): siRNA sense strand
ugucacagcagaaguuaug

SEQ ID NO: 978265 - RNA, 19 nt, Homo sapiens
  misc_RNA (1)...(19): siRNA sense strand
gaaaauucaucuccagacu

SEQ ID NO: 978266 - RNA, 19 nt, Homo sapiens
  misc_RNA (1)...(19): siRNA sense strand
auguaaagcugaaggaaca

SEQ ID NO: 978267 - RNA, 19 nt, Homo sapiens
  misc_RNA (1)...(19): siRNA sense strand
agacuacugauuaugguaa

SEQ ID NO: 978268 - RNA, 19 nt, Homo sapiens
  misc_RNA (1)...(19): siRNA sense strand
acauuucucaccuauauga

SEQ ID NO: 978269 - RNA, 19 nt, Homo sapiens
  misc_RNA (1)...(19): siRNA sense strand
ccagacuacugauuauggu

SEQ ID NO: 978270 - RNA, 19 nt, Homo sapiens
  misc_RNA (1)...(19): siRNA sense strand
agaaauauuguguggauag

SEQ ID NO: 978271 - RNA, 19 nt, Homo sapiens
  misc_RNA (1)...(19): siRNA sense strand
ucaucacucuuaacuccuu

SEQ ID NO: 978272 - RNA, 19 nt, Homo sapiens
  misc_RNA (1)...(19): siRNA sense strand
gcuuuuaucaucacucuua

SEQ ID NO: 978273 - RNA, 19 nt, Homo sapiens
  misc_RNA (1)...(19): siRNA sense strand
gucccauucuugaguuuga

SEQ ID NO: 978274 - RNA, 19 nt, Homo sapiens
  misc_RNA (1)...(19): siRNA sense strand
gcucuagaugaacugaaua

SEQ ID NO: 978275 - RNA, 19 nt, Homo sapiens
  misc_RNA (1)...(19): siRNA sense strand
ggcucaagcagaagacuuu

SEQ ID NO: 978276 - RNA, 19 nt, Homo sapiens
  misc_RNA (1)...(19): siRNA sense strand
ucuccagacuacugauuau

SEQ ID NO: 978277 - RNA, 19 nt, Homo sapiens
  misc_RNA (1)...(19): siRNA sense strand
gaacugaauauugaauugc

SEQ ID NO: 978278 - RNA, 19 nt, Homo sapiens
  misc_RNA (1)...(19): siRNA sense strand
ucagcacauuucucaccua

SEQ ID NO: 978279 - RNA, 19 nt, Homo sapiens
  misc_RNA (1)...(19): siRNA sense strand
ucaacagacaguuccacua

SEQ ID NO: 978280 - RNA, 19 nt, Homo sapiens
  misc_RNA (1)...(19): siRNA sense strand
agaacguagcggaucauua

SEQ ID NO: 978281 - RNA, 19 nt, Homo sapiens
  misc_RNA (1)...(19): siRNA sense strand
acaaugugauucugcugau

SEQ ID NO: 978282 - RNA, 19 nt, Homo sapiens
  misc_RNA (1)...(19): siRNA sense strand
ccuauaugacgugcaguua

SEQ ID NO: 978283 - RNA, 19 nt, Homo sapiens
  misc_RNA (1)...(19): siRNA sense strand
ugaggcauucuauaaauuc

SEQ ID NO: 978284 - RNA, 19 nt, Homo sapiens
  misc_RNA (1)...(19): siRNA sense strand
aaucaacaguuacauucca

SEQ ID NO: 978285 - RNA, 19 nt, Homo sapiens
  misc_RNA (1)...(19): siRNA sense strand
cacagaggcaucgaacuaa

SEQ ID NO: 978286 - RNA, 19 nt, Homo sapiens
  misc_RNA (1)...(19): siRNA sense strand
cugaaggaacaggaaauua

SEQ ID NO: 978287 - RNA, 19 nt, Homo sapiens
  misc_RNA (1)...(19): siRNA sense strand
ucauuacggaguauacaaa

SEQ ID NO: 978288 - RNA, 19 nt, Homo sapiens
  misc_RNA (1)...(19): siRNA sense strand
gaggcauucuauaaauucu

SEQ ID NO: 978289 - RNA, 19 nt, Homo sapiens
  misc_RNA (1)...(19): siRNA sense strand
caccuucagaucucuuuaa

SEQ ID NO: 978290 - RNA, 19 nt, Homo sapiens
  misc_RNA (1)...(19): siRNA sense strand
uggagaauuugaguauuuc

SEQ ID NO: 978291 - RNA, 19 nt, Homo sapiens
  misc_RNA (1)...(19): siRNA sense strand
ccacuacgguguguuuuau

SEQ ID NO: 978292 - RNA, 19 nt, Homo sapiens
  misc_RNA (1)...(19): siRNA sense strand
guuccacuacgguguguuu

SEQ ID NO: 978293 - RNA, 19 nt, Homo sapiens
  misc_RNA (1)...(19): siRNA sense strand
caucacucuuaacuccuuu

SEQ ID NO: 978294 - RNA, 19 nt, Homo sapiens
  misc_RNA (1)...(19): siRNA sense strand
cgcaauaaacuauacaagu

SEQ ID NO: 978295 - RNA, 19 nt, Homo sapiens
  misc_RNA (1)...(19): siRNA sense strand
cagagacaccuucagaucu

SEQ ID NO: 978296 - RNA, 19 nt, Homo sapiens
  misc_RNA (1)...(19): siRNA sense strand
caaugugauucugcugaug

SEQ ID NO: 978297 - RNA, 19 nt, Homo sapiens
  misc_RNA (1)...(19): siRNA sense strand
aaacgccauuagcuccauu

SEQ ID NO: 978298 - RNA, 19 nt, Homo sapiens
  misc_RNA (1)...(19): siRNA sense strand
augcauauguaaagcugaa

SEQ ID NO: 978299 - RNA, 19 nt, Homo sapiens
  misc_RNA (1)...(19): siRNA sense strand
ccuugaggcauucuauaaa

SEQ ID NO: 978300 - RNA, 19 nt, Homo sapiens
  misc_RNA (1)...(19): siRNA sense strand
ccagcaagacuauaucaac

SEQ ID NO: 978301 - RNA, 19 nt, Homo sapiens
  misc_RNA (1)...(19): siRNA sense strand
uuacgagcgugagguacaa

SEQ ID NO: 978302 - RNA, 19 nt, Homo sapiens
  misc_RNA (1)...(19): siRNA sense strand
gaucauuacggaguauaca

SEQ ID NO: 978303 - RNA, 19 nt, Homo sapiens
  misc_RNA (1)...(19): siRNA sense strand
ugaugucacagcagaaguu

SEQ ID NO: 978304 - RNA, 19 nt, Homo sapiens
  misc_RNA (1)...(19): siRNA sense strand
gcggaucauuacggaguau

SEQ ID NO: 978305 - RNA, 19 nt, Homo sapiens
  misc_RNA (1)...(19): siRNA sense strand
ggcacugaauugagcaaag

SEQ ID NO: 978306 - RNA, 19 nt, Homo sapiens
  misc_RNA (1)...(19): siRNA sense strand
ccaagaggcugccauaucu

SEQ ID NO: 978307 - RNA, 19 nt, Homo sapiens
  misc_RNA (1)...(19): siRNA sense strand
gaaacagauuugccucuuc

SEQ ID NO: 978308 - RNA, 19 nt, Homo sapiens
  misc_RNA (1)...(19): siRNA sense strand
auggaagggucuaaacuua

SEQ ID NO: 978309 - RNA, 19 nt, Homo sapiens
  misc_RNA (1)...(19): siRNA sense strand
ggaagaugcgcuugcugua

SEQ ID NO: 978310 - RNA, 19 nt, Homo sapiens
  misc_RNA (1)...(19): siRNA sense strand
gagcuccacuaccuugcua

SEQ ID NO: 978311 - RNA, 19 nt, Homo sapiens
  misc_RNA (1)...(19): siRNA sense strand
gaacggaaagucuguaacu

SEQ ID NO: 978312 - RNA, 19 nt, Homo sapiens
  misc_RNA (1)...(19): siRNA sense strand
cauccuguccugcuuguua

SEQ ID NO: 978313 - RNA, 19 nt, Homo sapiens
  misc_RNA (1)...(19): siRNA sense strand
ucagggaacaaccaaauaa

SEQ ID NO: 978314 - RNA, 19 nt, Homo sapiens
  misc_RNA (1)...(19): siRNA sense strand
caaaugaguggucccaaga

SEQ ID NO: 978315 - RNA, 19 nt, Homo sapiens
  misc_RNA (1)...(19): siRNA sense strand
cgaaacagauuugccucuu

SEQ ID NO: 978316 - RNA, 19 nt, Homo sapiens
  misc_RNA (1)...(19): siRNA sense strand
gauggaagggucuaaacuu

SEQ ID NO: 978317 - RNA, 19 nt, Homo sapiens
  misc_RNA (1)...(19): siRNA sense strand
ggaggaugauacaaguuca

SEQ ID NO: 978318 - RNA, 19 nt, Homo sapiens
  misc_RNA (1)...(19): siRNA sense strand
caucagcgccaucuuguuc

SEQ ID NO: 978319 - RNA, 19 nt, Homo sapiens
  misc_RNA (1)...(19): siRNA sense strand
gcucuaucgucgaaacaga

SEQ ID NO: 978320 - RNA, 19 nt, Homo sapiens
  misc_RNA (1)...(19): siRNA sense strand
uccacuaccuugcuaagaa

SEQ ID NO: 978321 - RNA, 19 nt, Homo sapiens
  misc_RNA (1)...(19): siRNA sense strand
ggagcucgccaucagcaaa

SEQ ID NO: 978322 - RNA, 19 nt, Homo sapiens
  misc_RNA (1)...(19): siRNA sense strand
gaugauacaaguucagaag

SEQ ID NO: 978323 - RNA, 19 nt, Homo sapiens
  misc_RNA (1)...(19): siRNA sense strand
aauaacagcggaacggaaa

SEQ ID NO: 978324 - RNA, 19 nt, Homo sapiens
  misc_RNA (1)...(19): siRNA sense strand
aagaugcgcuugcuguaca

SEQ ID NO: 978325 - RNA, 19 nt, Homo sapiens
  misc_RNA (1)...(19): siRNA sense strand
ucuuucaacuucaggauga

SEQ ID NO: 978326 - RNA, 19 nt, Homo sapiens
  misc_RNA (1)...(19): siRNA sense strand
ccacuaccuugcuaagaag

SEQ ID NO: 978327 - RNA, 19 nt, Homo sapiens
  misc_RNA (1)...(19): siRNA sense strand
agaggaggaugauacaagu

SEQ ID NO: 978328 - RNA, 19 nt, Homo sapiens
  misc_RNA (1)...(19): siRNA sense strand
gccaggaauuagaaacuuc

SEQ ID NO: 978329 - RNA, 19 nt, Homo sapiens
  misc_RNA (1)...(19): siRNA sense strand
caagagcaaccgagaugga

SEQ ID NO: 978330 - RNA, 19 nt, Homo sapiens
  misc_RNA (1)...(19): siRNA sense strand
gcaaaacucuaugguucuu

SEQ ID NO: 978331 - RNA, 19 nt, Homo sapiens
  misc_RNA (1)...(19): siRNA sense strand
gagcuuggcugggaaaauc

SEQ ID NO: 978332 - RNA, 19 nt, Homo sapiens
  misc_RNA (1)...(19): siRNA sense strand
gaagaugcgcuugcuguac

SEQ ID NO: 978333 - RNA, 19 nt, Homo sapiens
  misc_RNA (1)...(19): siRNA sense strand
ggagcucuaucgucgaaac

SEQ ID NO: 978334 - RNA, 19 nt, Homo sapiens
  misc_RNA (1)...(19): siRNA sense strand
gaggcugccauaucuuuga

SEQ ID NO: 978335 - RNA, 19 nt, Homo sapiens
  misc_RNA (1)...(19): siRNA sense strand
uaucugaagaggaggauga

SEQ ID NO: 978336 - RNA, 19 nt, Homo sapiens
  misc_RNA (1)...(19): siRNA sense strand
cuaugguucuuucaacuuc

SEQ ID NO: 978337 - RNA, 19 nt, Homo sapiens
  misc_RNA (1)...(19): siRNA sense strand
gaagaggaggaugauacaa

SEQ ID NO: 978338 - RNA, 19 nt, Homo sapiens
  misc_RNA (1)...(19): siRNA sense strand
gcagauacagcagccacaa

SEQ ID NO: 978339 - RNA, 19 nt, Homo sapiens
  misc_RNA (1)...(19): siRNA sense strand
gggaacaaccaaauaacag

SEQ ID NO: 978340 - RNA, 19 nt, Homo sapiens
  misc_RNA (1)...(19): siRNA sense strand
caccuggaccgcuguguga

SEQ ID NO: 978341 - RNA, 19 nt, Homo sapiens
  misc_RNA (1)...(19): siRNA sense strand
gaaccggagcucgccauca

SEQ ID NO: 978342 - RNA, 19 nt, Homo sapiens
  misc_RNA (1)...(19): siRNA sense strand
ggaacuguccuugguagag

SEQ ID NO: 978343 - RNA, 19 nt, Homo sapiens
  misc_RNA (1)...(19): siRNA sense strand
agauacagcagccacaaga

SEQ ID NO: 978344 - RNA, 19 nt, Homo sapiens
  misc_RNA (1)...(19): siRNA sense strand
ugaagaggaggaugauaca

SEQ ID NO: 978345 - RNA, 19 nt, Homo sapiens
  misc_RNA (1)...(19): siRNA sense strand
gaggaggaugauacaaguu

SEQ ID NO: 978346 - RNA, 19 nt, Homo sapiens
  misc_RNA (1)...(19): siRNA sense strand
cgcuugcuguacagaguua

SEQ ID NO: 978347 - RNA, 19 nt, Homo sapiens
  misc_RNA (1)...(19): siRNA sense strand
cuggaccgcugugugauug

SEQ ID NO: 978348 - RNA, 19 nt, Homo sapiens
  misc_RNA (1)...(19): siRNA sense strand
uggagcgccuggagaagga

SEQ ID NO: 978349 - RNA, 19 nt, Homo sapiens
  misc_RNA (1)...(19): siRNA sense strand
gagauggaagggucuaaac

SEQ ID NO: 978350 - RNA, 19 nt, Homo sapiens
  misc_RNA (1)...(19): siRNA sense strand
agauggagcgccuggagaa

SEQ ID NO: 978351 - RNA, 19 nt, Homo sapiens
  misc_RNA (1)...(19): siRNA sense strand
ucagcgccaucuuguucuu

SEQ ID NO: 978352 - RNA, 19 nt, Homo sapiens
  misc_RNA (1)...(19): siRNA sense strand
cgagauggaagggucuaaa

SEQ ID NO: 978353 - RNA, 19 nt, Homo sapiens
  misc_RNA (1)...(19): siRNA sense strand
cccaagagcaaccgagaug

SEQ ID NO: 978354 - RNA, 19 nt, Homo sapiens
  misc_RNA (1)...(19): siRNA sense strand
uaucgucgaaacagauuug

SEQ ID NO: 978355 - RNA, 19 nt, Homo sapiens
  misc_RNA (1)...(19): siRNA sense strand
cccaagaggcugccauauc

SEQ ID NO: 978356 - RNA, 19 nt, Homo sapiens
  misc_RNA (1)...(19): siRNA sense strand
cggaacggaaagucuguaa

SEQ ID NO: 978357 - RNA, 19 nt, Homo sapiens
  misc_RNA (1)...(19): siRNA sense strand
ggaugauacaaguucagaa

SEQ ID NO: 978358 - RNA, 19 nt, Homo sapiens
  misc_RNA (1)...(19): siRNA sense strand
gaaacuucuuuuaccuaug

SEQ ID NO: 978359 - RNA, 19 nt, Homo sapiens
  misc_RNA (1)...(19): siRNA sense strand
ugaaaacacucuggaacug

SEQ ID NO: 978360 - RNA, 19 nt, Homo sapiens
  misc_RNA (1)...(19): siRNA sense strand
aaccggagcucgccaucag

SEQ ID NO: 978361 - RNA, 19 nt, Homo sapiens
  misc_RNA (1)...(19): siRNA sense strand
gaacuuuacugaugaggua

SEQ ID NO: 978362 - RNA, 19 nt, Homo sapiens
  misc_RNA (1)...(19): siRNA sense strand
ugaaugcccugcagucuua

SEQ ID NO: 978363 - RNA, 19 nt, Homo sapiens
  misc_RNA (1)...(19): siRNA sense strand
gguaucagaugaagaauug

SEQ ID NO: 978364 - RNA, 19 nt, Homo sapiens
  misc_RNA (1)...(19): siRNA sense strand
ggaaauagugcuugucauu

SEQ ID NO: 978365 - RNA, 19 nt, Homo sapiens
  misc_RNA (1)...(19): siRNA sense strand
caacacauaucuuaucagu

SEQ ID NO: 978366 - RNA, 19 nt, Homo sapiens
  misc_RNA (1)...(19): siRNA sense strand
agagaugccuuuaguugua

SEQ ID NO: 978367 - RNA, 19 nt, Homo sapiens
  misc_RNA (1)...(19): siRNA sense strand
ugaagaacuuuacugauga

SEQ ID NO: 978368 - RNA, 19 nt, Homo sapiens
  misc_RNA (1)...(19): siRNA sense strand
ggaaaagacugacugagaa

SEQ ID NO: 978369 - RNA, 19 nt, Homo sapiens
  misc_RNA (1)...(19): siRNA sense strand
uugcaaaccuuucugauga

SEQ ID NO: 978370 - RNA, 19 nt, Homo sapiens
  misc_RNA (1)...(19): siRNA sense strand
agaagcacaucaagacuuu

SEQ ID NO: 978371 - RNA, 19 nt, Homo sapiens
  misc_RNA (1)...(19): siRNA sense strand
gcagcgagauggaaauagu

SEQ ID NO: 978372 - RNA, 19 nt, Homo sapiens
  misc_RNA (1)...(19): siRNA sense strand
gaucagagacagagcagaa

SEQ ID NO: 978373 - RNA, 19 nt, Homo sapiens
  misc_RNA (1)...(19): siRNA sense strand
uugaagaacuuuacugaug

SEQ ID NO: 978374 - RNA, 19 nt, Homo sapiens
  misc_RNA (1)...(19): siRNA sense strand
gcaccaugaagauaaauuu

SEQ ID NO: 978375 - RNA, 19 nt, Homo sapiens
  misc_RNA (1)...(19): siRNA sense strand
acaccaaacuuccaacaga

SEQ ID NO: 978376 - RNA, 19 nt, Homo sapiens
  misc_RNA (1)...(19): siRNA sense strand
gaacaaggagacacacaau

SEQ ID NO: 978377 - RNA, 19 nt, Homo sapiens
  misc_RNA (1)...(19): siRNA sense strand
agacugagacuuugaagaa

SEQ ID NO: 978378 - RNA, 19 nt, Homo sapiens
  misc_RNA (1)...(19): siRNA sense strand
agaaaucacucggguauca

SEQ ID NO: 978379 - RNA, 19 nt, Homo sapiens
  misc_RNA (1)...(19): siRNA sense strand
gcgacuuacucuaaucaaa

SEQ ID NO: 978380 - RNA, 19 nt, Homo sapiens
  misc_RNA (1)...(19): siRNA sense strand
agagagagaugccuuuagu

SEQ ID NO: 978381 - RNA, 19 nt, Homo sapiens
  misc_RNA (1)...(19): siRNA sense strand
gcaccaaccagacaccaaa

SEQ ID NO: 978382 - RNA, 19 nt, Homo sapiens
  misc_RNA (1)...(19): siRNA sense strand
uguagaggcuucagagaga

SEQ ID NO: 978383 - RNA, 19 nt, Homo sapiens
  misc_RNA (1)...(19): siRNA sense strand
ucaacuaccucaagcucaa

SEQ ID NO: 978384 - RNA, 19 nt, Homo sapiens
  misc_RNA (1)...(19): siRNA sense strand
gcaaaccuuucugaugaga

SEQ ID NO: 978385 - RNA, 19 nt, Homo sapiens
  misc_RNA (1)...(19): siRNA sense strand
gaagaacuuuacugaugag

SEQ ID NO: 978386 - RNA, 19 nt, Homo sapiens
  misc_RNA (1)...(19): siRNA sense strand
caccaaacuuccaacagaa

SEQ ID NO: 978387 - RNA, 19 nt, Homo sapiens
  misc_RNA (1)...(19): siRNA sense strand
gagaagcacaucaagacuu

SEQ ID NO: 978388 - RNA, 19 nt, Homo sapiens
  misc_RNA (1)...(19): siRNA sense strand
gaacggcaccaaccagaca

SEQ ID NO: 978389 - RNA, 19 nt, Homo sapiens
  misc_RNA (1)...(19): siRNA sense strand
ggaacaaggagacacacaa

SEQ ID NO: 978390 - RNA, 19 nt, Homo sapiens
  misc_RNA (1)...(19): siRNA sense strand
ucacucggguaucagauga

SEQ ID NO: 978391 - RNA, 19 nt, Homo sapiens
  misc_RNA (1)...(19): siRNA sense strand
guacagacuuccagcucau

SEQ ID NO: 978392 - RNA, 19 nt, Homo sapiens
  misc_RNA (1)...(19): siRNA sense strand
ucaagcgacuuacucuaau

SEQ ID NO: 978393 - RNA, 19 nt, Homo sapiens
  misc_RNA (1)...(19): siRNA sense strand
gaacaucuucauaccaaag

SEQ ID NO: 978394 - RNA, 19 nt, Homo sapiens
  misc_RNA (1)...(19): siRNA sense strand
agagagaugccuuuaguug

SEQ ID NO: 978395 - RNA, 19 nt, Homo sapiens
  misc_RNA (1)...(19): siRNA sense strand
ggacaaaagugcucuugca

SEQ ID NO: 978396 - RNA, 19 nt, Homo sapiens
  misc_RNA (1)...(19): siRNA sense strand
aaucugagcuuuuggacua

SEQ ID NO: 978397 - RNA, 19 nt, Homo sapiens
  misc_RNA (1)...(19): siRNA sense strand
cagagcuggugauuguuaa

SEQ ID NO: 978398 - RNA, 19 nt, Homo sapiens
  misc_RNA (1)...(19): siRNA sense strand
gaagaugcagcgagaugga

SEQ ID NO: 978399 - RNA, 19 nt, Homo sapiens
  misc_RNA (1)...(19): siRNA sense strand
ggaggcagcagcuaagcaa

SEQ ID NO: 978400 - RNA, 19 nt, Homo sapiens
  misc_RNA (1)...(19): siRNA sense strand
gagagaugccuuuaguugu

SEQ ID NO: 978401 - RNA, 19 nt, Homo sapiens
  misc_RNA (1)...(19): siRNA sense strand
aaagcugcaucuuggauug

SEQ ID NO: 978402 - RNA, 19 nt, Homo sapiens
  misc_RNA (1)...(19): siRNA sense strand
cugaugagacugagacuuu

SEQ ID NO: 978403 - RNA, 19 nt, Homo sapiens
  misc_RNA (1)...(19): siRNA sense strand
aagacgagcagcagacaua

SEQ ID NO: 978404 - RNA, 19 nt, Homo sapiens
  misc_RNA (1)...(19): siRNA sense strand
gcagcuaagcaacacauau

SEQ ID NO: 978405 - RNA, 19 nt, Homo sapiens
  misc_RNA (1)...(19): siRNA sense strand
ugagaaaagucauaucaga

SEQ ID NO: 978406 - RNA, 19 nt, Homo sapiens
  misc_RNA (1)...(19): siRNA sense strand
caagcgacuuacucuaauc

SEQ ID NO: 978407 - RNA, 19 nt, Homo sapiens
  misc_RNA (1)...(19): siRNA sense strand
agacagagcagaagaugca

SEQ ID NO: 978408 - RNA, 19 nt, Homo sapiens
  misc_RNA (1)...(19): siRNA sense strand
ccauuucucaagcgacuua

SEQ ID NO: 978409 - RNA, 19 nt, Homo sapiens
  misc_RNA (1)...(19): siRNA sense strand
gacacacaaucugagcuuu

SEQ ID NO: 978410 - RNA, 19 nt, Homo sapiens
  misc_RNA (1)...(19): siRNA sense strand
ucagagagagaugccuuua

SEQ ID NO: 978411 - RNA, 19 nt, Homo sapiens
  misc_RNA (1)...(19): siRNA sense strand
caaccagacaccaaacuuc

SEQ ID NO: 978412 - RNA, 19 nt, Homo sapiens
  misc_RNA (1)...(19): siRNA sense strand
cugaugagguacagacuuc

SEQ ID NO: 978413 - RNA, 19 nt, Homo sapiens
  misc_RNA (1)...(19): siRNA sense strand
caaaagugcucuugcaaac

SEQ ID NO: 978414 - RNA, 19 nt, Homo sapiens
  misc_RNA (1)...(19): siRNA sense strand
acagaaaucacucggguau

SEQ ID NO: 978415 - RNA, 19 nt, Homo sapiens
  misc_RNA (1)...(19): siRNA sense strand
gaugagacugagacuuuga

SEQ ID NO: 978416 - RNA, 19 nt, Homo sapiens
  misc_RNA (1)...(19): siRNA sense strand
gagagagaugccuuuaguu

SEQ ID NO: 978417 - RNA, 19 nt, Homo sapiens
  misc_RNA (1)...(19): siRNA sense strand
gaaaagacugacugagaaa

SEQ ID NO: 978418 - RNA, 19 nt, Homo sapiens
  misc_RNA (1)...(19): siRNA sense strand
ucagaugaccccagaauaa

SEQ ID NO: 978419 - RNA, 19 nt, Homo sapiens
  misc_RNA (1)...(19): siRNA sense strand
uuacuggagucauuucuac

SEQ ID NO: 978420 - RNA, 19 nt, Homo sapiens
  misc_RNA (1)...(19): siRNA sense strand
cagcuaagcaacacauauc

SEQ ID NO: 978421 - RNA, 19 nt, Homo sapiens
  misc_RNA (1)...(19): siRNA sense strand
gaugaacuuuugaacagaa

SEQ ID NO: 978422 - RNA, 19 nt, Homo sapiens
  misc_RNA (1)...(19): siRNA sense strand
cucaagcgacuuacucuaa

SEQ ID NO: 978423 - RNA, 19 nt, Homo sapiens
  misc_RNA (1)...(19): siRNA sense strand
cagaagaugcagcgagaug

SEQ ID NO: 978424 - RNA, 19 nt, Homo sapiens
  misc_RNA (1)...(19): siRNA sense strand
uaucagugucccuauugua

SEQ ID NO: 978425 - RNA, 19 nt, Homo sapiens
  misc_RNA (1)...(19): siRNA sense strand
ugaugagacugagacuuug

SEQ ID NO: 978426 - RNA, 19 nt, Homo sapiens
  misc_RNA (1)...(19): siRNA sense strand
gcuggugauuguuaaugau

SEQ ID NO: 978427 - RNA, 19 nt, Homo sapiens
  misc_RNA (1)...(19): siRNA sense strand
gugcuugucauuuaccauu

SEQ ID NO: 978428 - RNA, 19 nt, Homo sapiens
  misc_RNA (1)...(19): siRNA sense strand
aaagugcucuugcaaaccu

SEQ ID NO: 978429 - RNA, 19 nt, Homo sapiens
  misc_RNA (1)...(19): siRNA sense strand
gagaugccuuuaguuguac

SEQ ID NO: 978430 - RNA, 19 nt, Homo sapiens
  misc_RNA (1)...(19): siRNA sense strand
acaaggagacacacaaucu

SEQ ID NO: 978431 - RNA, 19 nt, Homo sapiens
  misc_RNA (1)...(19): siRNA sense strand
caagagagaauagaugaac

SEQ ID NO: 978432 - RNA, 19 nt, Homo sapiens
  misc_RNA (1)...(19): siRNA sense strand
cagugucccuauuguaaca

SEQ ID NO: 978433 - RNA, 19 nt, Homo sapiens
  misc_RNA (1)...(19): siRNA sense strand
gcuaagcaacacauaucuu

SEQ ID NO: 978434 - RNA, 19 nt, Homo sapiens
  misc_RNA (1)...(19): siRNA sense strand
agucauuucuacuccaaga

SEQ ID NO: 978435 - RNA, 19 nt, Homo sapiens
  misc_RNA (1)...(19): siRNA sense strand
gacuuucucacccguauug

SEQ ID NO: 978436 - RNA, 19 nt, Homo sapiens
  misc_RNA (1)...(19): siRNA sense strand
gacgagcagcagacauaaa

SEQ ID NO: 978437 - RNA, 19 nt, Homo sapiens
  misc_RNA (1)...(19): siRNA sense strand
gagcuggugauuguuaaug

SEQ ID NO: 978438 - RNA, 19 nt, Homo sapiens
  misc_RNA (1)...(19): siRNA sense strand
uucccaggcuuucagauga

SEQ ID NO: 978439 - RNA, 19 nt, Homo sapiens
  misc_RNA (1)...(19): siRNA sense strand
aaaccuuucugaugagacu

SEQ ID NO: 978440 - RNA, 19 nt, Homo sapiens
  misc_RNA (1)...(19): siRNA sense strand
cgacuuacucuaaucaaac

SEQ ID NO: 978441 - RNA, 19 nt, Homo sapiens
  misc_RNA (1)...(19): siRNA sense strand
gagacugagacuuugaaga

SEQ ID NO: 978442 - RNA, 19 nt, Homo sapiens
  misc_RNA (1)...(19): siRNA sense strand
agcaacacauaucuuauca

SEQ ID NO: 978443 - RNA, 19 nt, Homo sapiens
  misc_RNA (1)...(19): siRNA sense strand
gagacuuugaagaacuuua

SEQ ID NO: 978444 - RNA, 19 nt, Homo sapiens
  misc_RNA (1)...(19): siRNA sense strand
gauguagaggcuucagaga

SEQ ID NO: 978445 - RNA, 19 nt, Homo sapiens
  misc_RNA (1)...(19): siRNA sense strand
uauugcaccaugaagauaa

SEQ ID NO: 978446 - RNA, 19 nt, Homo sapiens
  misc_RNA (1)...(19): siRNA sense strand
ggguaucagaugaagaauu

SEQ ID NO: 978447 - RNA, 19 nt, Homo sapiens
  misc_RNA (1)...(19): siRNA sense strand
ccaaacuuccaacagaaau

SEQ ID NO: 978448 - RNA, 19 nt, Homo sapiens
  misc_RNA (1)...(19): siRNA sense strand
agaauaaucuggaaaagac

SEQ ID NO: 978449 - RNA, 19 nt, Homo sapiens
  misc_RNA (1)...(19): siRNA sense strand
ucuuaucagugucccuauu

SEQ ID NO: 978450 - RNA, 19 nt, Homo sapiens
  misc_RNA (1)...(19): siRNA sense strand
ucggguaucagaugaagaa

SEQ ID NO: 978451 - RNA, 19 nt, Homo sapiens
  misc_RNA (1)...(19): siRNA sense strand
ccaaccagacaccaaacuu

SEQ ID NO: 978452 - RNA, 19 nt, Homo sapiens
  misc_RNA (1)...(19): siRNA sense strand
aaggagacacacaaucuga

SEQ ID NO: 978453 - RNA, 19 nt, Homo sapiens
  misc_RNA (1)...(19): siRNA sense strand
uccaagagagaauagauga

SEQ ID NO: 978454 - RNA, 19 nt, Homo sapiens
  misc_RNA (1)...(19): siRNA sense strand
aagcaacacauaucuuauc

SEQ ID NO: 978455 - RNA, 19 nt, Homo sapiens
  misc_RNA (1)...(19): siRNA sense strand
caaggagacacacaaucug

SEQ ID NO: 978456 - RNA, 19 nt, Homo sapiens
  misc_RNA (1)...(19): siRNA sense strand
ccaagagagaauagaugaa

SEQ ID NO: 978457 - RNA, 19 nt, Homo sapiens
  misc_RNA (1)...(19): siRNA sense strand
aagagagaauagaugaaca

SEQ ID NO: 978458 - RNA, 19 nt, Homo sapiens
  misc_RNA (1)...(19): siRNA sense strand
ucagagacagagcagaaga

SEQ ID NO: 978459 - RNA, 19 nt, Homo sapiens
  misc_RNA (1)...(19): siRNA sense strand
cgagauggaaauagugcuu

SEQ ID NO: 978460 - RNA, 19 nt, Homo sapiens
  misc_RNA (1)...(19): siRNA sense strand
cugagacuuugaagaacuu

SEQ ID NO: 978461 - RNA, 19 nt, Homo sapiens
  misc_RNA (1)...(19): siRNA sense strand
gcaccugggucuaggcuuu

SEQ ID NO: 978462 - RNA, 19 nt, Homo sapiens
  misc_RNA (1)...(19): siRNA sense strand
gaacgaggacgacgaguac

SEQ ID NO: 978463 - RNA, 19 nt, Homo sapiens
  misc_RNA (1)...(19): siRNA sense strand
ggacgacgaguacaacaag

SEQ ID NO: 978464 - RNA, 19 nt, Homo sapiens
  misc_RNA (1)...(19): siRNA sense strand
ccaaguggcggaagaagag

SEQ ID NO: 978465 - RNA, 19 nt, Homo sapiens
  misc_RNA (1)...(19): siRNA sense strand
agaacgaggacgacgagua

SEQ ID NO: 978466 - RNA, 19 nt, Homo sapiens
  misc_RNA (1)...(19): siRNA sense strand
ggaccaaguggcggaagaa

SEQ ID NO: 978467 - RNA, 19 nt, Homo sapiens
  misc_RNA (1)...(19): siRNA sense strand
cagaaccgcaggaccaagu

SEQ ID NO: 978468 - RNA, 19 nt, Homo sapiens
  misc_RNA (1)...(19): siRNA sense strand
cgucuuaccuguugaucuu

SEQ ID NO: 978469 - RNA, 19 nt, Homo sapiens
  misc_RNA (1)...(19): siRNA sense strand
gcgguucgguggcuucuag

SEQ ID NO: 978470 - RNA, 19 nt, Homo sapiens
  misc_RNA (1)...(19): siRNA sense strand
ccgcauuuccaccuucuaa

SEQ ID NO: 978471 - RNA, 19 nt, Homo sapiens
  misc_RNA (1)...(19): siRNA sense strand
gcauugaccuugaguaugu

SEQ ID NO: 978472 - RNA, 19 nt, Homo sapiens
  misc_RNA (1)...(19): siRNA sense strand
ggacaaugauuugguuuau

SEQ ID NO: 978473 - RNA, 19 nt, Homo sapiens
  misc_RNA (1)...(19): siRNA sense strand
ugaaacaccuagagauuga

SEQ ID NO: 978474 - RNA, 19 nt, Homo sapiens
  misc_RNA (1)...(19): siRNA sense strand
gcaccaaugccaauacuuu

SEQ ID NO: 978475 - RNA, 19 nt, Homo sapiens
  misc_RNA (1)...(19): siRNA sense strand
gagauagacuugagugaca

SEQ ID NO: 978476 - RNA, 19 nt, Homo sapiens
  misc_RNA (1)...(19): siRNA sense strand
cgucaacccugaagaauuc

SEQ ID NO: 978477 - RNA, 19 nt, Homo sapiens
  misc_RNA (1)...(19): siRNA sense strand
ugaagcaucucaauaucaa

SEQ ID NO: 978478 - RNA, 19 nt, Homo sapiens
  misc_RNA (1)...(19): siRNA sense strand
cuggaggucuugagcauua

SEQ ID NO: 978479 - RNA, 19 nt, Homo sapiens
  misc_RNA (1)...(19): siRNA sense strand
uaacagcaguaccaacaga

SEQ ID NO: 978480 - RNA, 19 nt, Homo sapiens
  misc_RNA (1)...(19): siRNA sense strand
ucaacaauaugccugugua

SEQ ID NO: 978481 - RNA, 19 nt, Homo sapiens
  misc_RNA (1)...(19): siRNA sense strand
gauaugaugccugccaaua

SEQ ID NO: 978482 - RNA, 19 nt, Homo sapiens
  misc_RNA (1)...(19): siRNA sense strand
ggagaaaugcaacuuaaca

SEQ ID NO: 978483 - RNA, 19 nt, Homo sapiens
  misc_RNA (1)...(19): siRNA sense strand
caauggugcuguuguggaa

SEQ ID NO: 978484 - RNA, 19 nt, Homo sapiens
  misc_RNA (1)...(19): siRNA sense strand
ucagugggcuucuuagcuu

SEQ ID NO: 978485 - RNA, 19 nt, Homo sapiens
  misc_RNA (1)...(19): siRNA sense strand
aaacaauacuggugucuac

SEQ ID NO: 978486 - RNA, 19 nt, Homo sapiens
  misc_RNA (1)...(19): siRNA sense strand
gaaaggauucgcuucagau

SEQ ID NO: 978487 - RNA, 19 nt, Homo sapiens
  misc_RNA (1)...(19): siRNA sense strand
acaccaaucugucuacugu

SEQ ID NO: 978488 - RNA, 19 nt, Homo sapiens
  misc_RNA (1)...(19): siRNA sense strand
ugagaggucuuucaaggau

SEQ ID NO: 978489 - RNA, 19 nt, Homo sapiens
  misc_RNA (1)...(19): siRNA sense strand
gcuaugggcugcuucacau

SEQ ID NO: 978490 - RNA, 19 nt, Homo sapiens
  misc_RNA (1)...(19): siRNA sense strand
gcauucaacaaucucuuua

SEQ ID NO: 978491 - RNA, 19 nt, Homo sapiens
  misc_RNA (1)...(19): siRNA sense strand
cccaggagguucaacauga

SEQ ID NO: 978492 - RNA, 19 nt, Homo sapiens
  misc_RNA (1)...(19): siRNA sense strand
gauugacuauuggccuuua

SEQ ID NO: 978493 - RNA, 19 nt, Homo sapiens
  misc_RNA (1)...(19): siRNA sense strand
gcauucagugggcuucuua

SEQ ID NO: 978494 - RNA, 19 nt, Homo sapiens
  misc_RNA (1)...(19): siRNA sense strand
guacaugaccgacuccaau

SEQ ID NO: 978495 - RNA, 19 nt, Homo sapiens
  misc_RNA (1)...(19): siRNA sense strand
caucagcacuauugaagca

SEQ ID NO: 978496 - RNA, 19 nt, Homo sapiens
  misc_RNA (1)...(19): siRNA sense strand
caucugaagcaucucaaua

SEQ ID NO: 978497 - RNA, 19 nt, Homo sapiens
  misc_RNA (1)...(19): siRNA sense strand
cuggagaaaugcaacuuaa

SEQ ID NO: 978498 - RNA, 19 nt, Homo sapiens
  misc_RNA (1)...(19): siRNA sense strand
gggucuggcugugguguua

SEQ ID NO: 978499 - RNA, 19 nt, Homo sapiens
  misc_RNA (1)...(19): siRNA sense strand
gcaaugcugcugggaauga

SEQ ID NO: 978500 - RNA, 19 nt, Homo sapiens
  misc_RNA (1)...(19): siRNA sense strand
aagcaggcauguucucuga

SEQ ID NO: 978501 - RNA, 19 nt, Homo sapiens
  misc_RNA (1)...(19): siRNA sense strand
ccugaagucucuagaagug

SEQ ID NO: 978502 - RNA, 19 nt, Homo sapiens
  misc_RNA (1)...(19): siRNA sense strand
cauauccucugcuggaaga

SEQ ID NO: 978503 - RNA, 19 nt, Homo sapiens
  misc_RNA (1)...(19): siRNA sense strand
gcaguuugguggccagcaa

SEQ ID NO: 978504 - RNA, 19 nt, Homo sapiens
  misc_RNA (1)...(19): siRNA sense strand
gggacaaugauuugguuua

SEQ ID NO: 978505 - RNA, 19 nt, Homo sapiens
  misc_RNA (1)...(19): siRNA sense strand
agaaccugcuggaaacuuu

SEQ ID NO: 978506 - RNA, 19 nt, Homo sapiens
  misc_RNA (1)...(19): siRNA sense strand
caagacagcgggauguaug

SEQ ID NO: 978507 - RNA, 19 nt, Homo sapiens
  misc_RNA (1)...(19): siRNA sense strand
uagacuacauguuccaaga

SEQ ID NO: 978508 - RNA, 19 nt, Homo sapiens
  misc_RNA (1)...(19): siRNA sense strand
caacuuaacagcaguacca

SEQ ID NO: 978509 - RNA, 19 nt, Homo sapiens
  misc_RNA (1)...(19): siRNA sense strand
agaggucuuucaaggauuu

SEQ ID NO: 978510 - RNA, 19 nt, Homo sapiens
  misc_RNA (1)...(19): siRNA sense strand
uacauaaccugaagucucu

SEQ ID NO: 978511 - RNA, 19 nt, Homo sapiens
  misc_RNA (1)...(19): siRNA sense strand
gaaccaggagcauucaaca

SEQ ID NO: 978512 - RNA, 19 nt, Homo sapiens
  misc_RNA (1)...(19): siRNA sense strand
gagaggucuuucaaggauu

SEQ ID NO: 978513 - RNA, 19 nt, Homo sapiens
  misc_RNA (1)...(19): siRNA sense strand
accuagagauugacuauug

SEQ ID NO: 978514 - RNA, 19 nt, Homo sapiens
  misc_RNA (1)...(19): siRNA sense strand
ucaacaaucucuuuaaccu

SEQ ID NO: 978515 - RNA, 19 nt, Homo sapiens
  misc_RNA (1)...(19): siRNA sense strand
acaaaucuguuagcuguca

SEQ ID NO: 978516 - RNA, 19 nt, Homo sapiens
  misc_RNA (1)...(19): siRNA sense strand
gcagacaguccagcuagaa

SEQ ID NO: 978517 - RNA, 19 nt, Homo sapiens
  misc_RNA (1)...(19): siRNA sense strand
gcuggaaacuuuggaagag

SEQ ID NO: 978518 - RNA, 19 nt, Homo sapiens
  misc_RNA (1)...(19): siRNA sense strand
ucucagaaccugcuggaaa

SEQ ID NO: 978519 - RNA, 19 nt, Homo sapiens
  misc_RNA (1)...(19): siRNA sense strand
cauguucucugaccugauc

SEQ ID NO: 978520 - RNA, 19 nt, Homo sapiens
  misc_RNA (1)...(19): siRNA sense strand
ccaggagcauucaacaauc

SEQ ID NO: 978521 - RNA, 19 nt, Homo sapiens
  misc_RNA (1)...(19): siRNA sense strand
uggaagagccaccguguug

SEQ ID NO: 978522 - RNA, 19 nt, Homo sapiens
  misc_RNA (1)...(19): siRNA sense strand
ccauagcacugcccuuucu

SEQ ID NO: 978523 - RNA, 19 nt, Homo sapiens
  misc_RNA (1)...(19): siRNA sense strand
gacauuagugagaauaaga

SEQ ID NO: 978524 - RNA, 19 nt, Homo sapiens
  misc_RNA (1)...(19): siRNA sense strand
gcugugguguuaaucuuca

SEQ ID NO: 978525 - RNA, 19 nt, Homo sapiens
  misc_RNA (1)...(19): siRNA sense strand
uugaguaugugcccagaaa

SEQ ID NO: 978526 - RNA, 19 nt, Homo sapiens
  misc_RNA (1)...(19): siRNA sense strand
agacuugagugacaacauc

SEQ ID NO: 978527 - RNA, 19 nt, Homo sapiens
  misc_RNA (1)...(19): siRNA sense strand
auacuggugucuacagcua

SEQ ID NO: 978528 - RNA, 19 nt, Homo sapiens
  misc_RNA (1)...(19): siRNA sense strand
aaagauuguuccaccugaa

SEQ ID NO: 978529 - RNA, 19 nt, Homo sapiens
  misc_RNA (1)...(19): siRNA sense strand
guuccaagaucuacauaac

SEQ ID NO: 978530 - RNA, 19 nt, Homo sapiens
  misc_RNA (1)...(19): siRNA sense strand
gcaucucaauaucaacaau

SEQ ID NO: 978531 - RNA, 19 nt, Homo sapiens
  misc_RNA (1)...(19): siRNA sense strand
cagcauugaccuugaguau

SEQ ID NO: 978532 - RNA, 19 nt, Homo sapiens
  misc_RNA (1)...(19): siRNA sense strand
caaaauccgugaaaagaag

SEQ ID NO: 978533 - RNA, 19 nt, Homo sapiens
  misc_RNA (1)...(19): siRNA sense strand
ccugaaacaccuagagauu

SEQ ID NO: 978534 - RNA, 19 nt, Homo sapiens
  misc_RNA (1)...(19): siRNA sense strand
gacuacauguuccaagauc

SEQ ID NO: 978535 - RNA, 19 nt, Homo sapiens
  misc_RNA (1)...(19): siRNA sense strand
uggaaacuuuggaagagaa

SEQ ID NO: 978536 - RNA, 19 nt, Homo sapiens
  misc_RNA (1)...(19): siRNA sense strand
uuaaacaccugguauaccu

SEQ ID NO: 978537 - RNA, 19 nt, Homo sapiens
  misc_RNA (1)...(19): siRNA sense strand
gcauucccaucgaaaccaa

SEQ ID NO: 978538 - RNA, 19 nt, Homo sapiens
  misc_RNA (1)...(19): siRNA sense strand
acaacccucuggccuguga

SEQ ID NO: 978539 - RNA, 19 nt, Homo sapiens
  misc_RNA (1)...(19): siRNA sense strand
aaacagcauugaccuugag

SEQ ID NO: 978540 - RNA, 19 nt, Homo sapiens
  misc_RNA (1)...(19): siRNA sense strand
gaacaggaccccuauguac

SEQ ID NO: 978541 - RNA, 19 nt, Homo sapiens
  misc_RNA (1)...(19): siRNA sense strand
caaccucacaucccuuuca

SEQ ID NO: 978542 - RNA, 19 nt, Homo sapiens
  misc_RNA (1)...(19): siRNA sense strand
gacagcgggauguauguuu

SEQ ID NO: 978543 - RNA, 19 nt, Homo sapiens
  misc_RNA (1)...(19): siRNA sense strand
ucaggagcuucauauagug

SEQ ID NO: 978544 - RNA, 19 nt, Homo sapiens
  misc_RNA (1)...(19): siRNA sense strand
uucaggagcuucauauagu

SEQ ID NO: 978545 - RNA, 19 nt, Homo sapiens
  misc_RNA (1)...(19): siRNA sense strand
gcuggaagagauagacuug

SEQ ID NO: 978546 - RNA, 19 nt, Homo sapiens
  misc_RNA (1)...(19): siRNA sense strand
acagcgggauguauguuug

SEQ ID NO: 978547 - RNA, 19 nt, Homo sapiens
  misc_RNA (1)...(19): siRNA sense strand
ccagacaccauccgugaga

SEQ ID NO: 978548 - RNA, 19 nt, Homo sapiens
  misc_RNA (1)...(19): siRNA sense strand
uacccuuccuugccuuuaa

SEQ ID NO: 978549 - RNA, 19 nt, Homo sapiens
  misc_RNA (1)...(19): siRNA sense strand
ggccuuuacuggauaugau

SEQ ID NO: 978550 - RNA, 19 nt, Homo sapiens
  misc_RNA (1)...(19): siRNA sense strand
uggaagagauagacuugag

SEQ ID NO: 978551 - RNA, 19 nt, Homo sapiens
  misc_RNA (1)...(19): siRNA sense strand
gccuguguaugccuuuaaa

SEQ ID NO: 978552 - RNA, 19 nt, Homo sapiens
  misc_RNA (1)...(19): siRNA sense strand
cuacauguuccaagaucua

SEQ ID NO: 978553 - RNA, 19 nt, Homo sapiens
  misc_RNA (1)...(19): siRNA sense strand
caggagcauucaacaaucu

SEQ ID NO: 978554 - RNA, 19 nt, Homo sapiens
  misc_RNA (1)...(19): siRNA sense strand
uaaccugaagucucuagaa

SEQ ID NO: 978555 - RNA, 19 nt, Homo sapiens
  misc_RNA (1)...(19): siRNA sense strand
gaaccugcuggaaacuuug

SEQ ID NO: 978556 - RNA, 19 nt, Homo sapiens
  misc_RNA (1)...(19): siRNA sense strand
gcgucaacccugaagaauu

SEQ ID NO: 978557 - RNA, 19 nt, Homo sapiens
  misc_RNA (1)...(19): siRNA sense strand
guauaccugacucaccuua

SEQ ID NO: 978558 - RNA, 19 nt, Homo sapiens
  misc_RNA (1)...(19): siRNA sense strand
ucacagaaggcgauugauc

SEQ ID NO: 978559 - RNA, 19 nt, Homo sapiens
  misc_RNA (1)...(19): siRNA sense strand
caacaauaugccuguguau

SEQ ID NO: 978560 - RNA, 19 nt, Homo sapiens
  misc_RNA (1)...(19): siRNA sense strand
gcagcucacccuggagaaa

SEQ ID NO: 978561 - RNA, 19 nt, Homo sapiens
  misc_RNA (1)...(19): siRNA sense strand
ggagugguuuuauuuuguu

SEQ ID NO: 978562 - RNA, 19 nt, Homo sapiens
  misc_RNA (1)...(19): siRNA sense strand
gaucaagacagcgggaugu

SEQ ID NO: 978563 - RNA, 19 nt, Homo sapiens
  misc_RNA (1)...(19): siRNA sense strand
cuuaaccucuccuacaauc

SEQ ID NO: 978564 - RNA, 19 nt, Homo sapiens
  misc_RNA (1)...(19): siRNA sense strand
cuauuggccuuuacuggau

SEQ ID NO: 978565 - RNA, 19 nt, Homo sapiens
  misc_RNA (1)...(19): siRNA sense strand
ggcagacaguccagcuaga

SEQ ID NO: 978566 - RNA, 19 nt, Homo sapiens
  misc_RNA (1)...(19): siRNA sense strand
uaccuucacagccuccuua

SEQ ID NO: 978567 - RNA, 19 nt, Homo sapiens
  misc_RNA (1)...(19): siRNA sense strand
ucugaagcaucucaauauc

SEQ ID NO: 978568 - RNA, 19 nt, Homo sapiens
  misc_RNA (1)...(19): siRNA sense strand
ccuuuaaacaccugguaua

SEQ ID NO: 978569 - RNA, 19 nt, Homo sapiens
  misc_RNA (1)...(19): siRNA sense strand
uauuggccuuuacuggaua

SEQ ID NO: 978570 - RNA, 19 nt, Homo sapiens
  misc_RNA (1)...(19): siRNA sense strand
aaucuuggaccucaguaaa

SEQ ID NO: 978571 - RNA, 19 nt, Homo sapiens
  misc_RNA (1)...(19): siRNA sense strand
ggaaagauccaaauaauga

SEQ ID NO: 978572 - RNA, 19 nt, Homo sapiens
  misc_RNA (1)...(19): siRNA sense strand
guuguucucugaagauuaa

SEQ ID NO: 978573 - RNA, 19 nt, Homo sapiens
  misc_RNA (1)...(19): siRNA sense strand
gaaauguuguucucugaag

SEQ ID NO: 978574 - RNA, 19 nt, Homo sapiens
  misc_RNA (1)...(19): siRNA sense strand
gagaaaagccuuauuggaa

SEQ ID NO: 978575 - RNA, 19 nt, Homo sapiens
  misc_RNA (1)...(19): siRNA sense strand
gguagaaucugagugucuu

SEQ ID NO: 978576 - RNA, 19 nt, Homo sapiens
  misc_RNA (1)...(19): siRNA sense strand
gaacagcacaauggcaaga

SEQ ID NO: 978577 - RNA, 19 nt, Homo sapiens
  misc_RNA (1)...(19): siRNA sense strand
gaagcacauuagugaagga

SEQ ID NO: 978578 - RNA, 19 nt, Homo sapiens
  misc_RNA (1)...(19): siRNA sense strand
ggaaauguuguucucugaa

SEQ ID NO: 978579 - RNA, 19 nt, Homo sapiens
  misc_RNA (1)...(19): siRNA sense strand
agaaaagccuuauuggaaa

SEQ ID NO: 978580 - RNA, 19 nt, Homo sapiens
  misc_RNA (1)...(19): siRNA sense strand
uggaaauguuguucucuga

SEQ ID NO: 978581 - RNA, 19 nt, Homo sapiens
  misc_RNA (1)...(19): siRNA sense strand
ccaaauaaugacuucagaa

SEQ ID NO: 978582 - RNA, 19 nt, Homo sapiens
  misc_RNA (1)...(19): siRNA sense strand
ggcugaagcacauuaguga

SEQ ID NO: 978583 - RNA, 19 nt, Homo sapiens
  misc_RNA (1)...(19): siRNA sense strand
gaaaagccuuauuggaaag

SEQ ID NO: 978584 - RNA, 19 nt, Homo sapiens
  misc_RNA (1)...(19): siRNA sense strand
ccaaccugguggaaauguu

SEQ ID NO: 978585 - RNA, 19 nt, Homo sapiens
  misc_RNA (1)...(19): siRNA sense strand
gggcugaagcacauuagug

SEQ ID NO: 978586 - RNA, 19 nt, Homo sapiens
  misc_RNA (1)...(19): siRNA sense strand
aaauguuguucucugaaga

SEQ ID NO: 978587 - RNA, 19 nt, Homo sapiens
  misc_RNA (1)...(19): siRNA sense strand
ggagaaaagccuuauugga

SEQ ID NO: 978588 - RNA, 19 nt, Homo sapiens
  misc_RNA (1)...(19): siRNA sense strand
aggccaaccugguggaaau

SEQ ID NO: 978589 - RNA, 19 nt, Homo sapiens
  misc_RNA (1)...(19): siRNA sense strand
gagaggggcugaagcacau

SEQ ID NO: 978590 - RNA, 19 nt, Homo sapiens
  misc_RNA (1)...(19): siRNA sense strand
gcaggcugaaccagucgua

SEQ ID NO: 978591 - RNA, 19 nt, Homo sapiens
  misc_RNA (1)...(19): siRNA sense strand
uccaaauaaugacuucaga

SEQ ID NO: 978592 - RNA, 19 nt, Homo sapiens
  misc_RNA (1)...(19): siRNA sense strand
gaaagauccaaauaaugac

SEQ ID NO: 978593 - RNA, 19 nt, Homo sapiens
  misc_RNA (1)...(19): siRNA sense strand
gugccuacacuacuuaagu

SEQ ID NO: 978594 - RNA, 19 nt, Homo sapiens
  misc_RNA (1)...(19): siRNA sense strand
gcugaagcacauuagugaa

SEQ ID NO: 978595 - RNA, 19 nt, Homo sapiens
  misc_RNA (1)...(19): siRNA sense strand
cagcagcaguacuaucuca

SEQ ID NO: 978596 - RNA, 19 nt, Homo sapiens
  misc_RNA (1)...(19): siRNA sense strand
cgacaaguuuggcgugaag

SEQ ID NO: 978597 - RNA, 19 nt, Homo sapiens
  misc_RNA (1)...(19): siRNA sense strand
ggacgaacucggagagcuu

SEQ ID NO: 978598 - RNA, 19 nt, Homo sapiens
  misc_RNA (1)...(19): siRNA sense strand
gagaucugcuggacgaacu

SEQ ID NO: 978599 - RNA, 19 nt, Homo sapiens
  misc_RNA (1)...(19): siRNA sense strand
gggccaggaaugcaucuuu

SEQ ID NO: 978600 - RNA, 19 nt, Homo sapiens
  misc_RNA (1)...(19): siRNA sense strand
gcaucacccaccucaacua

SEQ ID NO: 978601 - RNA, 19 nt, Homo sapiens
  misc_RNA (1)...(19): siRNA sense strand
gguccacaccgccagguuu

SEQ ID NO: 978602 - RNA, 19 nt, Homo sapiens
  misc_RNA (1)...(19): siRNA sense strand
ccucaacgagacucaguuu

SEQ ID NO: 978603 - RNA, 19 nt, Homo sapiens
  misc_RNA (1)...(19): siRNA sense strand
ucacccaccucaacuacag

SEQ ID NO: 978604 - RNA, 19 nt, Homo sapiens
  misc_RNA (1)...(19): siRNA sense strand
gcgccgaccuaagcgucua

SEQ ID NO: 978605 - RNA, 19 nt, Homo sapiens
  misc_RNA (1)...(19): siRNA sense strand
cuucucggaugaugaggaa

SEQ ID NO: 978606 - RNA, 19 nt, Homo sapiens
  misc_RNA (1)...(19): siRNA sense strand
gaucauccaccugcaccaa

SEQ ID NO: 978607 - RNA, 19 nt, Homo sapiens
  misc_RNA (1)...(19): siRNA sense strand
ggccaggaaugcaucuuuu

SEQ ID NO: 978608 - RNA, 19 nt, Homo sapiens
  misc_RNA (1)...(19): siRNA sense strand
ugaggaagaccuggacgaa

SEQ ID NO: 978609 - RNA, 19 nt, Homo sapiens
  misc_RNA (1)...(19): siRNA sense strand
gcagcaguacuaucucaag

SEQ ID NO: 978610 - RNA, 19 nt, Homo sapiens
  misc_RNA (1)...(19): siRNA sense strand
gcgagaagcgccguaucga

SEQ ID NO: 978611 - RNA, 19 nt, Homo sapiens
  misc_RNA (1)...(19): siRNA sense strand
ggacugggaacauuuaaua

SEQ ID NO: 978612 - RNA, 19 nt, Homo sapiens
  misc_RNA (1)...(19): siRNA sense strand
caaccaaguuuaucagaaa

SEQ ID NO: 978613 - RNA, 19 nt, Homo sapiens
  misc_RNA (1)...(19): siRNA sense strand
gaaggccacuuaauucuac

SEQ ID NO: 978614 - RNA, 19 nt, Homo sapiens
  misc_RNA (1)...(19): siRNA sense strand
gcugauguguguacagauu

SEQ ID NO: 978615 - RNA, 19 nt, Homo sapiens
  misc_RNA (1)...(19): siRNA sense strand
ugagaugcuuucuauacua

SEQ ID NO: 978616 - RNA, 19 nt, Homo sapiens
  misc_RNA (1)...(19): siRNA sense strand
cuucaaccaucuugucaua

SEQ ID NO: 978617 - RNA, 19 nt, Homo sapiens
  misc_RNA (1)...(19): siRNA sense strand
gagaugcuuucuauacuag

SEQ ID NO: 978618 - RNA, 19 nt, Homo sapiens
  misc_RNA (1)...(19): siRNA sense strand
gcucacgaguggaugguuu

SEQ ID NO: 978619 - RNA, 19 nt, Homo sapiens
  misc_RNA (1)...(19): siRNA sense strand
gaaggggucccaccuaaua

SEQ ID NO: 978620 - RNA, 19 nt, Homo sapiens
  misc_RNA (1)...(19): siRNA sense strand
guguacagauugcaaauuc

SEQ ID NO: 978621 - RNA, 19 nt, Homo sapiens
  misc_RNA (1)...(19): siRNA sense strand
ugugugagaugcuuucuau

SEQ ID NO: 978622 - RNA, 19 nt, Homo sapiens
  misc_RNA (1)...(19): siRNA sense strand
gcauagagaggcaccagaa

SEQ ID NO: 978623 - RNA, 19 nt, Homo sapiens
  misc_RNA (1)...(19): siRNA sense strand
gauauucuguguagcugau

SEQ ID NO: 978624 - RNA, 19 nt, Homo sapiens
  misc_RNA (1)...(19): siRNA sense strand
gaaaccagauuugcuugag

SEQ ID NO: 978625 - RNA, 19 nt, Homo sapiens
  misc_RNA (1)...(19): siRNA sense strand
ucaaccaucuugucauaag

SEQ ID NO: 978626 - RNA, 19 nt, Homo sapiens
  misc_RNA (1)...(19): siRNA sense strand
cugggaacauuuaauaaga

SEQ ID NO: 978627 - RNA, 19 nt, Homo sapiens
  misc_RNA (1)...(19): siRNA sense strand
guacagauugcaaauucaa

SEQ ID NO: 978628 - RNA, 19 nt, Homo sapiens
  misc_RNA (1)...(19): siRNA sense strand
acaaccaaguuuaucagaa

SEQ ID NO: 978629 - RNA, 19 nt, Homo sapiens
  misc_RNA (1)...(19): siRNA sense strand
ugaaggccacuuaauucua

SEQ ID NO: 978630 - RNA, 19 nt, Homo sapiens
  misc_RNA (1)...(19): siRNA sense strand
agaggcaucuuaugagagu

SEQ ID NO: 978631 - RNA, 19 nt, Homo sapiens
  misc_RNA (1)...(19): siRNA sense strand
uagcugauguguguacaga

SEQ ID NO: 978632 - RNA, 19 nt, Homo sapiens
  misc_RNA (1)...(19): siRNA sense strand
gacacauccucgacccaaa

SEQ ID NO: 978633 - RNA, 19 nt, Homo sapiens
  misc_RNA (1)...(19): siRNA sense strand
gugagaugcuuucuauacu

SEQ ID NO: 978634 - RNA, 19 nt, Homo sapiens
  misc_RNA (1)...(19): siRNA sense strand
cuguguagcugaugugugu

SEQ ID NO: 978635 - RNA, 19 nt, Homo sapiens
  misc_RNA (1)...(19): siRNA sense strand
uguggaugcuucaaaggaa

SEQ ID NO: 978636 - RNA, 19 nt, Homo sapiens
  misc_RNA (1)...(19): siRNA sense strand
acagaaaccagauuugcuu

SEQ ID NO: 978637 - RNA, 19 nt, Homo sapiens
  misc_RNA (1)...(19): siRNA sense strand
gauacagaaaccagauuug

SEQ ID NO: 978638 - RNA, 19 nt, Homo sapiens
  misc_RNA (1)...(19): siRNA sense strand
caaguguggaugcuucaaa

SEQ ID NO: 978639 - RNA, 19 nt, Homo sapiens
  misc_RNA (1)...(19): siRNA sense strand
ccugaaggccacuuaauuc

SEQ ID NO: 978640 - RNA, 19 nt, Homo sapiens
  misc_RNA (1)...(19): siRNA sense strand
cauuuaagaugccaaagcu

SEQ ID NO: 978641 - RNA, 19 nt, Homo sapiens
  misc_RNA (1)...(19): siRNA sense strand
acgaguggaugguuugaug

SEQ ID NO: 978642 - RNA, 19 nt, Homo sapiens
  misc_RNA (1)...(19): siRNA sense strand
ccaaagcucacgaguggau

SEQ ID NO: 978643 - RNA, 19 nt, Homo sapiens
  misc_RNA (1)...(19): siRNA sense strand
gacugggaacauuuaauaa

SEQ ID NO: 978644 - RNA, 19 nt, Homo sapiens
  misc_RNA (1)...(19): siRNA sense strand
uuacagaucaaacaaccaa

SEQ ID NO: 978645 - RNA, 19 nt, Homo sapiens
  misc_RNA (1)...(19): siRNA sense strand
cagaucaaacaaccaaguu

SEQ ID NO: 978646 - RNA, 19 nt, Homo sapiens
  misc_RNA (1)...(19): siRNA sense strand
uaagauacagaaaccagau

SEQ ID NO: 978647 - RNA, 19 nt, Homo sapiens
  misc_RNA (1)...(19): siRNA sense strand
cuaauaggaagaacaccaa

SEQ ID NO: 978648 - RNA, 19 nt, Homo sapiens
  misc_RNA (1)...(19): siRNA sense strand
agauacagaaaccagauuu

SEQ ID NO: 978649 - RNA, 19 nt, Homo sapiens
  misc_RNA (1)...(19): siRNA sense strand
gcacccauuuuacagauca

SEQ ID NO: 978650 - RNA, 19 nt, Homo sapiens
  misc_RNA (1)...(19): siRNA sense strand
ugugagaugcuuucuauac

SEQ ID NO: 978651 - RNA, 19 nt, Homo sapiens
  misc_RNA (1)...(19): siRNA sense strand
gaugcugaagccaacauug

SEQ ID NO: 978652 - RNA, 19 nt, Homo sapiens
  misc_RNA (1)...(19): siRNA sense strand
caccaagacuuccccaaga

SEQ ID NO: 978653 - RNA, 19 nt, Homo sapiens
  misc_RNA (1)...(19): siRNA sense strand
auagagaggcaccagaaga

SEQ ID NO: 978654 - RNA, 19 nt, Homo sapiens
  misc_RNA (1)...(19): siRNA sense strand
aggaagaacaccaagacuu

SEQ ID NO: 978655 - RNA, 19 nt, Homo sapiens
  misc_RNA (1)...(19): siRNA sense strand
cccugaaggccacuuaauu

SEQ ID NO: 978656 - RNA, 19 nt, Homo sapiens
  misc_RNA (1)...(19): siRNA sense strand
caaaagaacaaguguggau

SEQ ID NO: 978657 - RNA, 19 nt, Homo sapiens
  misc_RNA (1)...(19): siRNA sense strand
aacaccaucucagcucaaa

SEQ ID NO: 978658 - RNA, 19 nt, Homo sapiens
  misc_RNA (1)...(19): siRNA sense strand
agaaaccagauuugcuuga

SEQ ID NO: 978659 - RNA, 19 nt, Homo sapiens
  misc_RNA (1)...(19): siRNA sense strand
uuaauucuaccaaccuuca

SEQ ID NO: 978660 - RNA, 19 nt, Homo sapiens
  misc_RNA (1)...(19): siRNA sense strand
gaacauggcuaucaaacuu

SEQ ID NO: 978661 - RNA, 19 nt, Homo sapiens
  misc_RNA (1)...(19): siRNA sense strand
gcaagcacaugaagaaguu

SEQ ID NO: 978662 - RNA, 19 nt, Homo sapiens
  misc_RNA (1)...(19): siRNA sense strand
caaccuggaugccuuugua

SEQ ID NO: 978663 - RNA, 19 nt, Homo sapiens
  misc_RNA (1)...(19): siRNA sense strand
ggaaggcucuggcaaucaa

SEQ ID NO: 978664 - RNA, 19 nt, Homo sapiens
  misc_RNA (1)...(19): siRNA sense strand
ggacauggagcggcauuua

SEQ ID NO: 978665 - RNA, 19 nt, Homo sapiens
  misc_RNA (1)...(19): siRNA sense strand
gcaagcagcaguuuaacaa

SEQ ID NO: 978666 - RNA, 19 nt, Homo sapiens
  misc_RNA (1)...(19): siRNA sense strand
gggagaagccuuucaagug

SEQ ID NO: 978667 - RNA, 19 nt, Homo sapiens
  misc_RNA (1)...(19): siRNA sense strand
ggcaaucaaacuuucauua

SEQ ID NO: 978668 - RNA, 19 nt, Homo sapiens
  misc_RNA (1)...(19): siRNA sense strand
agaaaaggcuuaacuguug

SEQ ID NO: 978669 - RNA, 19 nt, Homo sapiens
  misc_RNA (1)...(19): siRNA sense strand
aguuucagcuccagaauuu

SEQ ID NO: 978670 - RNA, 19 nt, Homo sapiens
  misc_RNA (1)...(19): siRNA sense strand
ccgacuccauuccagauua

SEQ ID NO: 978671 - RNA, 19 nt, Homo sapiens
  misc_RNA (1)...(19): siRNA sense strand
caacaccaccugcucagaa

SEQ ID NO: 978672 - RNA, 19 nt, Homo sapiens
  misc_RNA (1)...(19): siRNA sense strand
aagcagaccuacuccauca

SEQ ID NO: 978673 - RNA, 19 nt, Homo sapiens
  misc_RNA (1)...(19): siRNA sense strand
gcagcagccucaacaagca

SEQ ID NO: 978674 - RNA, 19 nt, Homo sapiens
  misc_RNA (1)...(19): siRNA sense strand
gcaaucaaacuuucauuac

SEQ ID NO: 978675 - RNA, 19 nt, Homo sapiens
  misc_RNA (1)...(19): siRNA sense strand
gcacagcgggaauaacuuc

SEQ ID NO: 978676 - RNA, 19 nt, Homo sapiens
  misc_RNA (1)...(19): siRNA sense strand
gcagaccuacuccaucauu

SEQ ID NO: 978677 - RNA, 19 nt, Homo sapiens
  misc_RNA (1)...(19): siRNA sense strand
gggacaugguuaagacuga

SEQ ID NO: 978678 - RNA, 19 nt, Homo sapiens
  misc_RNA (1)...(19): siRNA sense strand
ccauaagugugaagucugu

SEQ ID NO: 978679 - RNA, 19 nt, Homo sapiens
  misc_RNA (1)...(19): siRNA sense strand
gacauggagcggcauuuaa

SEQ ID NO: 978680 - RNA, 19 nt, Homo sapiens
  misc_RNA (1)...(19): siRNA sense strand
gagaagugcucggaaugca

SEQ ID NO: 978681 - RNA, 19 nt, Homo sapiens
  misc_RNA (1)...(19): siRNA sense strand
ugagcaagcacaugaagaa

SEQ ID NO: 978682 - RNA, 19 nt, Homo sapiens
  misc_RNA (1)...(19): siRNA sense strand
gaguuuccacugcgauaua

SEQ ID NO: 978683 - RNA, 19 nt, Homo sapiens
  misc_RNA (1)...(19): siRNA sense strand
caagcuggaugccaagaag

SEQ ID NO: 978684 - RNA, 19 nt, Homo sapiens
  misc_RNA (1)...(19): siRNA sense strand
gcucuggcaaucaaacuuu

SEQ ID NO: 978685 - RNA, 19 nt, Homo sapiens
  misc_RNA (1)...(19): siRNA sense strand
gcgugaagcccuacaagug

SEQ ID NO: 978686 - RNA, 19 nt, Homo sapiens
  misc_RNA (1)...(19): siRNA sense strand
aauguccgcugcaccauga

SEQ ID NO: 978687 - RNA, 19 nt, Homo sapiens
  misc_RNA (1)...(19): siRNA sense strand
gcaccgaccgcccuuucaa

SEQ ID NO: 978688 - RNA, 19 nt, Homo sapiens
  misc_RNA (1)...(19): siRNA sense strand
caggaaggcucuggcaauc

SEQ ID NO: 978689 - RNA, 19 nt, Homo sapiens
  misc_RNA (1)...(19): siRNA sense strand
uaacaaccuggaugccuuu

SEQ ID NO: 978690 - RNA, 19 nt, Homo sapiens
  misc_RNA (1)...(19): siRNA sense strand
caagugcuuuagccggaaa

SEQ ID NO: 978691 - RNA, 19 nt, Homo sapiens
  misc_RNA (1)...(19): siRNA sense strand
gguauuacuugcacugacu

SEQ ID NO: 978692 - RNA, 19 nt, Homo sapiens
  misc_RNA (1)...(19): siRNA sense strand
cgugaccguucuccaguuu

SEQ ID NO: 978693 - RNA, 19 nt, Homo sapiens
  misc_RNA (1)...(19): siRNA sense strand
ucaagucgcacauccguau

SEQ ID NO: 978694 - RNA, 19 nt, Homo sapiens
  misc_RNA (1)...(19): siRNA sense strand
acauggagcggcauuuaaa

SEQ ID NO: 978695 - RNA, 19 nt, Homo sapiens
  misc_RNA (1)...(19): siRNA sense strand
ccaguucggguauuacuug

SEQ ID NO: 978696 - RNA, 19 nt, Homo sapiens
  misc_RNA (1)...(19): siRNA sense strand
gguuaagacugaggcucua

SEQ ID NO: 978697 - RNA, 19 nt, Homo sapiens
  misc_RNA (1)...(19): siRNA sense strand
ccagcacgguccaguuugu

SEQ ID NO: 978698 - RNA, 19 nt, Homo sapiens
  misc_RNA (1)...(19): siRNA sense strand
ugaccguucuccaguuuca

SEQ ID NO: 978699 - RNA, 19 nt, Homo sapiens
  misc_RNA (1)...(19): siRNA sense strand
aggcuuaacuguugcuauc

SEQ ID NO: 978700 - RNA, 19 nt, Homo sapiens
  misc_RNA (1)...(19): siRNA sense strand
ccugagaagugcucggaau

SEQ ID NO: 978701 - RNA, 19 nt, Homo sapiens
  misc_RNA (1)...(19): siRNA sense strand
aaucagcucggacuugaaa

SEQ ID NO: 978702 - RNA, 19 nt, Homo sapiens
  misc_RNA (1)...(19): siRNA sense strand
acaagagacagcacaguga

SEQ ID NO: 978703 - RNA, 19 nt, Homo sapiens
  misc_RNA (1)...(19): siRNA sense strand
ggccuaaacgccuugauuc

SEQ ID NO: 978704 - RNA, 19 nt, Homo sapiens
  misc_RNA (1)...(19): siRNA sense strand
caaucaaacuuucauuacc

SEQ ID NO: 978705 - RNA, 19 nt, Homo sapiens
  misc_RNA (1)...(19): siRNA sense strand
cgacuccauuccagauuag

SEQ ID NO: 978706 - RNA, 19 nt, Homo sapiens
  misc_RNA (1)...(19): siRNA sense strand
cuauccagguugccaauuc

SEQ ID NO: 978707 - RNA, 19 nt, Homo sapiens
  misc_RNA (1)...(19): siRNA sense strand
uuacuugcacugacuuuga

SEQ ID NO: 978708 - RNA, 19 nt, Homo sapiens
  misc_RNA (1)...(19): siRNA sense strand
agagacagcacagugagua

SEQ ID NO: 978709 - RNA, 19 nt, Homo sapiens
  misc_RNA (1)...(19): siRNA sense strand
gccaauucaagacugcuua

SEQ ID NO: 978710 - RNA, 19 nt, Homo sapiens
  misc_RNA (1)...(19): siRNA sense strand
aacaccaccugcucagaaa

SEQ ID NO: 978711 - RNA, 19 nt, Homo sapiens
  misc_RNA (1)...(19): siRNA sense strand
ccagcaaccugagcaagca

SEQ ID NO: 978712 - RNA, 19 nt, Homo sapiens
  misc_RNA (1)...(19): siRNA sense strand
aaaaucagcucggacuuga

SEQ ID NO: 978713 - RNA, 19 nt, Homo sapiens
  misc_RNA (1)...(19): siRNA sense strand
ucaacaagcaccugaggau

SEQ ID NO: 978714 - RNA, 19 nt, Homo sapiens
  misc_RNA (1)...(19): siRNA sense strand
uauccagguugccaauuca

SEQ ID NO: 978715 - RNA, 19 nt, Homo sapiens
  misc_RNA (1)...(19): siRNA sense strand
gacagcagcagccucaaca

SEQ ID NO: 978716 - RNA, 19 nt, Homo sapiens
  misc_RNA (1)...(19): siRNA sense strand
gaccuacuccaucauucaa

SEQ ID NO: 978717 - RNA, 19 nt, Homo sapiens
  misc_RNA (1)...(19): siRNA sense strand
ccucggagacccagacaau

SEQ ID NO: 978718 - RNA, 19 nt, Homo sapiens
  misc_RNA (1)...(19): siRNA sense strand
ccauccagcuuugcucugu

SEQ ID NO: 978719 - RNA, 19 nt, Homo sapiens
  misc_RNA (1)...(19): siRNA sense strand
ggacagcagaagugacagu

SEQ ID NO: 978720 - RNA, 19 nt, Homo sapiens
  misc_RNA (1)...(19): siRNA sense strand
uacuugcacugacuuugaa

SEQ ID NO: 978721 - RNA, 19 nt, Homo sapiens
  misc_RNA (1)...(19): siRNA sense strand
ucaagcacagcgggaauaa

SEQ ID NO: 978722 - RNA, 19 nt, Homo sapiens
  misc_RNA (1)...(19): siRNA sense strand
caagugcgaguucugcaau

SEQ ID NO: 978723 - RNA, 19 nt, Homo sapiens
  misc_RNA (1)...(19): siRNA sense strand
aagacaagcugaaaacuca

SEQ ID NO: 978724 - RNA, 19 nt, Homo sapiens
  misc_RNA (1)...(19): siRNA sense strand
ccagguugccaauucaaga

SEQ ID NO: 978725 - RNA, 19 nt, Homo sapiens
  misc_RNA (1)...(19): siRNA sense strand
acaaguguaagacguguga

SEQ ID NO: 978726 - RNA, 19 nt, Homo sapiens
  misc_RNA (1)...(19): siRNA sense strand
ccaagcagaccuacuccau

SEQ ID NO: 978727 - RNA, 19 nt, Homo sapiens
  misc_RNA (1)...(19): siRNA sense strand
agcaagaacuacccaagca

SEQ ID NO: 978728 - RNA, 19 nt, Homo sapiens
  misc_RNA (1)...(19): siRNA sense strand
cagcgggaauaacuucaag

SEQ ID NO: 978729 - RNA, 19 nt, Homo sapiens
  misc_RNA (1)...(19): siRNA sense strand
gcacgguccaguuuguauc

SEQ ID NO: 978730 - RNA, 19 nt, Homo sapiens
  misc_RNA (1)...(19): siRNA sense strand
ucggagacccagacaauca

SEQ ID NO: 978731 - RNA, 19 nt, Homo sapiens
  misc_RNA (1)...(19): siRNA sense strand
cagaccuacuccaucauuc

SEQ ID NO: 978732 - RNA, 19 nt, Homo sapiens
  misc_RNA (1)...(19): siRNA sense strand
agucggagcauccugagaa

SEQ ID NO: 978733 - RNA, 19 nt, Homo sapiens
  misc_RNA (1)...(19): siRNA sense strand
gcuuaacuguugcuaucca

SEQ ID NO: 978734 - RNA, 19 nt, Homo sapiens
  misc_RNA (1)...(19): siRNA sense strand
ggcagcccauccagcuuug

SEQ ID NO: 978735 - RNA, 19 nt, Homo sapiens
  misc_RNA (1)...(19): siRNA sense strand
acucagaccaccaccagaa

SEQ ID NO: 978736 - RNA, 19 nt, Homo sapiens
  misc_RNA (1)...(19): siRNA sense strand
cggagcauccugagaagug

SEQ ID NO: 978737 - RNA, 19 nt, Homo sapiens
  misc_RNA (1)...(19): siRNA sense strand
cuuccugggugacagcaaa

SEQ ID NO: 978738 - RNA, 19 nt, Homo sapiens
  misc_RNA (1)...(19): siRNA sense strand
cgugaagcccuacaagugu

SEQ ID NO: 978739 - RNA, 19 nt, Homo sapiens
  misc_RNA (1)...(19): siRNA sense strand
cagaaaaggcuuaacuguu

SEQ ID NO: 978740 - RNA, 19 nt, Homo sapiens
  misc_RNA (1)...(19): siRNA sense strand
gagggaagagucaaaauca

SEQ ID NO: 978741 - RNA, 19 nt, Homo sapiens
  misc_RNA (1)...(19): siRNA sense strand
aaccugagcaagcacauga

SEQ ID NO: 978742 - RNA, 19 nt, Homo sapiens
  misc_RNA (1)...(19): siRNA sense strand
ggaaagacaagcugaaaac

SEQ ID NO: 978743 - RNA, 19 nt, Homo sapiens
  misc_RNA (1)...(19): siRNA sense strand
agacaaaccccauaagugu

SEQ ID NO: 978744 - RNA, 19 nt, Homo sapiens
  misc_RNA (1)...(19): siRNA sense strand
gagacaaaccccauaagug

SEQ ID NO: 978745 - RNA, 19 nt, Homo sapiens
  misc_RNA (1)...(19): siRNA sense strand
ccacggaaaguaaugaaaa

SEQ ID NO: 978746 - RNA, 19 nt, Homo sapiens
  misc_RNA (1)...(19): siRNA sense strand
gccuaaacgccuugauuca

SEQ ID NO: 978747 - RNA, 19 nt, Homo sapiens
  misc_RNA (1)...(19): siRNA sense strand
cagccacugucaucucucu

SEQ ID NO: 978748 - RNA, 19 nt, Homo sapiens
  misc_RNA (1)...(19): siRNA sense strand
cagcgagggaagagucaaa

SEQ ID NO: 978749 - RNA, 19 nt, Homo sapiens
  misc_RNA (1)...(19): siRNA sense strand
gcagguggccaagcuggau

SEQ ID NO: 978750 - RNA, 19 nt, Homo sapiens
  misc_RNA (1)...(19): siRNA sense strand
aagcacagcgggaauaacu

SEQ ID NO: 978751 - RNA, 19 nt, Homo sapiens
  misc_RNA (1)...(19): siRNA sense strand
acccagacaaucacaguuu

SEQ ID NO: 978752 - RNA, 19 nt, Homo sapiens
  misc_RNA (1)...(19): siRNA sense strand
cccagacaaucacaguuuc

SEQ ID NO: 978753 - RNA, 19 nt, Homo sapiens
  misc_RNA (1)...(19): siRNA sense strand
ccggaaagacaagcugaaa

SEQ ID NO: 978754 - RNA, 19 nt, Homo sapiens
  misc_RNA (1)...(19): siRNA sense strand
ccaauucaagacugcuuau

SEQ ID NO: 978755 - RNA, 19 nt, Homo sapiens
  misc_RNA (1)...(19): siRNA sense strand
gaaggcucuggcaaucaaa

SEQ ID NO: 978756 - RNA, 19 nt, Homo sapiens
  misc_RNA (1)...(19): siRNA sense strand
gaacauggcuaucaaacuu

SEQ ID NO: 978757 - RNA, 19 nt, Homo sapiens
  misc_RNA (1)...(19): siRNA sense strand
gcaagcacaugaagaaguu

SEQ ID NO: 978758 - RNA, 19 nt, Homo sapiens
  misc_RNA (1)...(19): siRNA sense strand
caaccuggaugccuuugua

SEQ ID NO: 978759 - RNA, 19 nt, Homo sapiens
  misc_RNA (1)...(19): siRNA sense strand
ggaaggcucuggcaaucaa

SEQ ID NO: 978760 - RNA, 19 nt, Homo sapiens
  misc_RNA (1)...(19): siRNA sense strand
ggacauggagcggcauuua

SEQ ID NO: 978761 - RNA, 19 nt, Homo sapiens
  misc_RNA (1)...(19): siRNA sense strand
gcaagcagcaguuuaacaa

SEQ ID NO: 978762 - RNA, 19 nt, Homo sapiens
  misc_RNA (1)...(19): siRNA sense strand
gggagaagccuuucaagug

SEQ ID NO: 978763 - RNA, 19 nt, Homo sapiens
  misc_RNA (1)...(19): siRNA sense strand
ggcaaucaaacuuucauua

SEQ ID NO: 978764 - RNA, 19 nt, Homo sapiens
  misc_RNA (1)...(19): siRNA sense strand
agaaaaggcuuaacuguug

SEQ ID NO: 978765 - RNA, 19 nt, Homo sapiens
  misc_RNA (1)...(19): siRNA sense strand
aguuucagcuccagaauuu

SEQ ID NO: 978766 - RNA, 19 nt, Homo sapiens
  misc_RNA (1)...(19): siRNA sense strand
ccgacuccauuccagauua

SEQ ID NO: 978767 - RNA, 19 nt, Homo sapiens
  misc_RNA (1)...(19): siRNA sense strand
caacaccaccugcucagaa

SEQ ID NO: 978768 - RNA, 19 nt, Homo sapiens
  misc_RNA (1)...(19): siRNA sense strand
aagcagaccuacuccauca

SEQ ID NO: 978769 - RNA, 19 nt, Homo sapiens
  misc_RNA (1)...(19): siRNA sense strand
gcagcagccucaacaagca

SEQ ID NO: 978770 - RNA, 19 nt, Homo sapiens
  misc_RNA (1)...(19): siRNA sense strand
gcaaucaaacuuucauuac

SEQ ID NO: 978771 - RNA, 19 nt, Homo sapiens
  misc_RNA (1)...(19): siRNA sense strand
gcacagcgggaauaacuuc

SEQ ID NO: 978772 - RNA, 19 nt, Homo sapiens
  misc_RNA (1)...(19): siRNA sense strand
gcagaccuacuccaucauu

SEQ ID NO: 978773 - RNA, 19 nt, Homo sapiens
  misc_RNA (1)...(19): siRNA sense strand
gggacaugguuaagacuga

SEQ ID NO: 978774 - RNA, 19 nt, Homo sapiens
  misc_RNA (1)...(19): siRNA sense strand
ccauaagugugaagucugu

SEQ ID NO: 978775 - RNA, 19 nt, Homo sapiens
  misc_RNA (1)...(19): siRNA sense strand
gacauggagcggcauuuaa

SEQ ID NO: 978776 - RNA, 19 nt, Homo sapiens
  misc_RNA (1)...(19): siRNA sense strand
gagaagugcucggaaugca

SEQ ID NO: 978777 - RNA, 19 nt, Homo sapiens
  misc_RNA (1)...(19): siRNA sense strand
ugagcaagcacaugaagaa

SEQ ID NO: 978778 - RNA, 19 nt, Homo sapiens
  misc_RNA (1)...(19): siRNA sense strand
gaguuuccacugcgauaua

SEQ ID NO: 978779 - RNA, 19 nt, Homo sapiens
  misc_RNA (1)...(19): siRNA sense strand
caagcuggaugccaagaag

SEQ ID NO: 978780 - RNA, 19 nt, Homo sapiens
  misc_RNA (1)...(19): siRNA sense strand
gcucuggcaaucaaacuuu

SEQ ID NO: 978781 - RNA, 19 nt, Homo sapiens
  misc_RNA (1)...(19): siRNA sense strand
gcgugaagcccuacaagug

SEQ ID NO: 978782 - RNA, 19 nt, Homo sapiens
  misc_RNA (1)...(19): siRNA sense strand
aauguccgcugcaccauga

SEQ ID NO: 978783 - RNA, 19 nt, Homo sapiens
  misc_RNA (1)...(19): siRNA sense strand
gcaccgaccgcccuuucaa

SEQ ID NO: 978784 - RNA, 19 nt, Homo sapiens
  misc_RNA (1)...(19): siRNA sense strand
caggaaggcucuggcaauc

SEQ ID NO: 978785 - RNA, 19 nt, Homo sapiens
  misc_RNA (1)...(19): siRNA sense strand
uaacaaccuggaugccuuu

SEQ ID NO: 978786 - RNA, 19 nt, Homo sapiens
  misc_RNA (1)...(19): siRNA sense strand
caagugcuuuagccggaaa

SEQ ID NO: 978787 - RNA, 19 nt, Homo sapiens
  misc_RNA (1)...(19): siRNA sense strand
gguauuacuugcacugacu

SEQ ID NO: 978788 - RNA, 19 nt, Homo sapiens
  misc_RNA (1)...(19): siRNA sense strand
cgugaccguucuccaguuu

SEQ ID NO: 978789 - RNA, 19 nt, Homo sapiens
  misc_RNA (1)...(19): siRNA sense strand
ucaagucgcacauccguau

SEQ ID NO: 978790 - RNA, 19 nt, Homo sapiens
  misc_RNA (1)...(19): siRNA sense strand
acauggagcggcauuuaaa

SEQ ID NO: 978791 - RNA, 19 nt, Homo sapiens
  misc_RNA (1)...(19): siRNA sense strand
ccaguucggguauuacuug

SEQ ID NO: 978792 - RNA, 19 nt, Homo sapiens
  misc_RNA (1)...(19): siRNA sense strand
gguuaagacugaggcucua

SEQ ID NO: 978793 - RNA, 19 nt, Homo sapiens
  misc_RNA (1)...(19): siRNA sense strand
ccagcacgguccaguuugu

SEQ ID NO: 978794 - RNA, 19 nt, Homo sapiens
  misc_RNA (1)...(19): siRNA sense strand
ugaccguucuccaguuuca

SEQ ID NO: 978795 - RNA, 19 nt, Homo sapiens
  misc_RNA (1)...(19): siRNA sense strand
aggcuuaacuguugcuauc

SEQ ID NO: 978796 - RNA, 19 nt, Homo sapiens
  misc_RNA (1)...(19): siRNA sense strand
ccugagaagugcucggaau

SEQ ID NO: 978797 - RNA, 19 nt, Homo sapiens
  misc_RNA (1)...(19): siRNA sense strand
aaucagcucggacuugaaa

SEQ ID NO: 978798 - RNA, 19 nt, Homo sapiens
  misc_RNA (1)...(19): siRNA sense strand
acaagagacagcacaguga

SEQ ID NO: 978799 - RNA, 19 nt, Homo sapiens
  misc_RNA (1)...(19): siRNA sense strand
ggccuaaacgccuugauuc

SEQ ID NO: 978800 - RNA, 19 nt, Homo sapiens
  misc_RNA (1)...(19): siRNA sense strand
caaucaaacuuucauuacc

SEQ ID NO: 978801 - RNA, 19 nt, Homo sapiens
  misc_RNA (1)...(19): siRNA sense strand
cgacuccauuccagauuag

SEQ ID NO: 978802 - RNA, 19 nt, Homo sapiens
  misc_RNA (1)...(19): siRNA sense strand
cuauccagguugccaauuc

SEQ ID NO: 978803 - RNA, 19 nt, Homo sapiens
  misc_RNA (1)...(19): siRNA sense strand
uuacuugcacugacuuuga

SEQ ID NO: 978804 - RNA, 19 nt, Homo sapiens
  misc_RNA (1)...(19): siRNA sense strand
agagacagcacagugagua

SEQ ID NO: 978805 - RNA, 19 nt, Homo sapiens
  misc_RNA (1)...(19): siRNA sense strand
gccaauucaagacugcuua

SEQ ID NO: 978806 - RNA, 19 nt, Homo sapiens
  misc_RNA (1)...(19): siRNA sense strand
aacaccaccugcucagaaa

SEQ ID NO: 978807 - RNA, 19 nt, Homo sapiens
  misc_RNA (1)...(19): siRNA sense strand
ccagcaaccugagcaagca

SEQ ID NO: 978808 - RNA, 19 nt, Homo sapiens
  misc_RNA (1)...(19): siRNA sense strand
aaaaucagcucggacuuga

SEQ ID NO: 978809 - RNA, 19 nt, Homo sapiens
  misc_RNA (1)...(19): siRNA sense strand
ucaacaagcaccugaggau

SEQ ID NO: 978810 - RNA, 19 nt, Homo sapiens
  misc_RNA (1)...(19): siRNA sense strand
uauccagguugccaauuca

SEQ ID NO: 978811 - RNA, 19 nt, Homo sapiens
  misc_RNA (1)...(19): siRNA sense strand
gacagcagcagccucaaca

SEQ ID NO: 978812 - RNA, 19 nt, Homo sapiens
  misc_RNA (1)...(19): siRNA sense strand
gaccuacuccaucauucaa

SEQ ID NO: 978813 - RNA, 19 nt, Homo sapiens
  misc_RNA (1)...(19): siRNA sense strand
ccucggagacccagacaau

SEQ ID NO: 978814 - RNA, 19 nt, Homo sapiens
  misc_RNA (1)...(19): siRNA sense strand
ccauccagcuuugcucugu

SEQ ID NO: 978815 - RNA, 19 nt, Homo sapiens
  misc_RNA (1)...(19): siRNA sense strand
ggacagcagaagugacagu

SEQ ID NO: 978816 - RNA, 19 nt, Homo sapiens
  misc_RNA (1)...(19): siRNA sense strand
uacuugcacugacuuugaa

SEQ ID NO: 978817 - RNA, 19 nt, Homo sapiens
  misc_RNA (1)...(19): siRNA sense strand
ucaagcacagcgggaauaa

SEQ ID NO: 978818 - RNA, 19 nt, Homo sapiens
  misc_RNA (1)...(19): siRNA sense strand
caagugcgaguucugcaau

SEQ ID NO: 978819 - RNA, 19 nt, Homo sapiens
  misc_RNA (1)...(19): siRNA sense strand
aagacaagcugaaaacuca

SEQ ID NO: 978820 - RNA, 19 nt, Homo sapiens
  misc_RNA (1)...(19): siRNA sense strand
ccagguugccaauucaaga

SEQ ID NO: 978821 - RNA, 19 nt, Homo sapiens
  misc_RNA (1)...(19): siRNA sense strand
acaaguguaagacguguga

SEQ ID NO: 978822 - RNA, 19 nt, Homo sapiens
  misc_RNA (1)...(19): siRNA sense strand
ccaagcagaccuacuccau

SEQ ID NO: 978823 - RNA, 19 nt, Homo sapiens
  misc_RNA (1)...(19): siRNA sense strand
agcaagaacuacccaagca

SEQ ID NO: 978824 - RNA, 19 nt, Homo sapiens
  misc_RNA (1)...(19): siRNA sense strand
cagcgggaauaacuucaag

SEQ ID NO: 978825 - RNA, 19 nt, Homo sapiens
  misc_RNA (1)...(19): siRNA sense strand
gcacgguccaguuuguauc

SEQ ID NO: 978826 - RNA, 19 nt, Homo sapiens
  misc_RNA (1)...(19): siRNA sense strand
ucggagacccagacaauca

SEQ ID NO: 978827 - RNA, 19 nt, Homo sapiens
  misc_RNA (1)...(19): siRNA sense strand
cagaccuacuccaucauuc

SEQ ID NO: 978828 - RNA, 19 nt, Homo sapiens
  misc_RNA (1)...(19): siRNA sense strand
agucggagcauccugagaa

SEQ ID NO: 978829 - RNA, 19 nt, Homo sapiens
  misc_RNA (1)...(19): siRNA sense strand
gcuuaacuguugcuaucca

SEQ ID NO: 978830 - RNA, 19 nt, Homo sapiens
  misc_RNA (1)...(19): siRNA sense strand
ggcagcccauccagcuuug

SEQ ID NO: 978831 - RNA, 19 nt, Homo sapiens
  misc_RNA (1)...(19): siRNA sense strand
acucagaccaccaccagaa

SEQ ID NO: 978832 - RNA, 19 nt, Homo sapiens
  misc_RNA (1)...(19): siRNA sense strand
cggagcauccugagaagug

SEQ ID NO: 978833 - RNA, 19 nt, Homo sapiens
  misc_RNA (1)...(19): siRNA sense strand
cuuccugggugacagcaaa

SEQ ID NO: 978834 - RNA, 19 nt, Homo sapiens
  misc_RNA (1)...(19): siRNA sense strand
cgugaagcccuacaagugu

SEQ ID NO: 978835 - RNA, 19 nt, Homo sapiens
  misc_RNA (1)...(19): siRNA sense strand
cagaaaaggcuuaacuguu

SEQ ID NO: 978836 - RNA, 19 nt, Homo sapiens
  misc_RNA (1)...(19): siRNA sense strand
gagggaagagucaaaauca

SEQ ID NO: 978837 - RNA, 19 nt, Homo sapiens
  misc_RNA (1)...(19): siRNA sense strand
aaccugagcaagcacauga

SEQ ID NO: 978838 - RNA, 19 nt, Homo sapiens
  misc_RNA (1)...(19): siRNA sense strand
ggaaagacaagcugaaaac

SEQ ID NO: 978839 - RNA, 19 nt, Homo sapiens
  misc_RNA (1)...(19): siRNA sense strand
agacaaaccccauaagugu

SEQ ID NO: 978840 - RNA, 19 nt, Homo sapiens
  misc_RNA (1)...(19): siRNA sense strand
gagacaaaccccauaagug

SEQ ID NO: 978841 - RNA, 19 nt, Homo sapiens
  misc_RNA (1)...(19): siRNA sense strand
ccacggaaaguaaugaaaa

SEQ ID NO: 978842 - RNA, 19 nt, Homo sapiens
  misc_RNA (1)...(19): siRNA sense strand
gccuaaacgccuugauuca

SEQ ID NO: 978843 - RNA, 19 nt, Homo sapiens
  misc_RNA (1)...(19): siRNA sense strand
cagccacugucaucucucu

SEQ ID NO: 978844 - RNA, 19 nt, Homo sapiens
  misc_RNA (1)...(19): siRNA sense strand
cagcgagggaagagucaaa

SEQ ID NO: 978845 - RNA, 19 nt, Homo sapiens
  misc_RNA (1)...(19): siRNA sense strand
gcagguggccaagcuggau

SEQ ID NO: 978846 - RNA, 19 nt, Homo sapiens
  misc_RNA (1)...(19): siRNA sense strand
aagcacagcgggaauaacu

SEQ ID NO: 978847 - RNA, 19 nt, Homo sapiens
  misc_RNA (1)...(19): siRNA sense strand
acccagacaaucacaguuu

SEQ ID NO: 978848 - RNA, 19 nt, Homo sapiens
  misc_RNA (1)...(19): siRNA sense strand
cccagacaaucacaguuuc

SEQ ID NO: 978849 - RNA, 19 nt, Homo sapiens
  misc_RNA (1)...(19): siRNA sense strand
ccggaaagacaagcugaaa

SEQ ID NO: 978850 - RNA, 19 nt, Homo sapiens
  misc_RNA (1)...(19): siRNA sense strand
ccaauucaagacugcuuau

SEQ ID NO: 978851 - RNA, 19 nt, Homo sapiens
  misc_RNA (1)...(19): siRNA sense strand
gaaggcucuggcaaucaaa

SEQ ID NO: 978852 - RNA, 19 nt, Homo sapiens
  misc_RNA (1)...(19): siRNA sense strand
aggaagagcugcagugcua

SEQ ID NO: 978853 - RNA, 19 nt, Homo sapiens
  misc_RNA (1)...(19): siRNA sense strand
gaaccugggcccaaacaaa

SEQ ID NO: 978854 - RNA, 19 nt, Homo sapiens
  misc_RNA (1)...(19): siRNA sense strand
gaggagaagacaaucauaa

SEQ ID NO: 978855 - RNA, 19 nt, Homo sapiens
  misc_RNA (1)...(19): siRNA sense strand
ugacgcagcugcaguucaa

SEQ ID NO: 978856 - RNA, 19 nt, Homo sapiens
  misc_RNA (1)...(19): siRNA sense strand
cuacaagaguggccugauu

SEQ ID NO: 978857 - RNA, 19 nt, Homo sapiens
  misc_RNA (1)...(19): siRNA sense strand
gagcugcagugcuacaaga

SEQ ID NO: 978858 - RNA, 19 nt, Homo sapiens
  misc_RNA (1)...(19): siRNA sense strand
uggaggcgcuggugaauga

SEQ ID NO: 978859 - RNA, 19 nt, Homo sapiens
  misc_RNA (1)...(19): siRNA sense strand
ugacaucuccuaccuguug

SEQ ID NO: 978860 - RNA, 19 nt, Homo sapiens
  misc_RNA (1)...(19): siRNA sense strand
uggaggagcugaagaugga

SEQ ID NO: 978861 - RNA, 19 nt, Homo sapiens
  misc_RNA (1)...(19): siRNA sense strand
gaacaaggaggagaagaca

SEQ ID NO: 978862 - RNA, 19 nt, Homo sapiens
  misc_RNA (1)...(19): siRNA sense strand
ggaggagaagacaaucaua

SEQ ID NO: 978863 - RNA, 19 nt, Homo sapiens
  misc_RNA (1)...(19): siRNA sense strand
gaacgcaacaaacucaagu

SEQ ID NO: 978864 - RNA, 19 nt, Homo sapiens
  misc_RNA (1)...(19): siRNA sense strand
gcaggaacaaggaggagaa

SEQ ID NO: 978865 - RNA, 19 nt, Homo sapiens
  misc_RNA (1)...(19): siRNA sense strand
caaacaaaauggugguuga

SEQ ID NO: 978866 - RNA, 19 nt, Homo sapiens
  misc_RNA (1)...(19): siRNA sense strand
ccaggaggaagaagagaaa

SEQ ID NO: 978867 - RNA, 19 nt, Homo sapiens
  misc_RNA (1)...(19): siRNA sense strand
ggagaagacaaucauaaaa

SEQ ID NO: 978868 - RNA, 19 nt, Homo sapiens
  misc_RNA (1)...(19): siRNA sense strand
aagaugcugugguuacuag

SEQ ID NO: 978869 - RNA, 19 nt, Homo sapiens
  misc_RNA (1)...(19): siRNA sense strand
acaaggaggagaagacaau

SEQ ID NO: 978870 - RNA, 19 nt, Homo sapiens
  misc_RNA (1)...(19): siRNA sense strand
gggaccaccucaggaagga

SEQ ID NO: 978871 - RNA, 19 nt, Homo sapiens
  misc_RNA (1)...(19): siRNA sense strand
ggaacaaggaggagaagac

SEQ ID NO: 978872 - RNA, 19 nt, Homo sapiens
  misc_RNA (1)...(19): siRNA sense strand
gaagagcugcagugcuaca

SEQ ID NO: 978873 - RNA, 19 nt, Homo sapiens
  misc_RNA (1)...(19): siRNA sense strand
aggagaagacaaucauaaa

SEQ ID NO: 978874 - RNA, 19 nt, Homo sapiens
  misc_RNA (1)...(19): siRNA sense strand
ccgaggacguguaugacau

SEQ ID NO: 978875 - RNA, 19 nt, Homo sapiens
  misc_RNA (1)...(19): siRNA sense strand
gcaggaacgcaacaaacuc

SEQ ID NO: 978876 - RNA, 19 nt, Homo sapiens
  misc_RNA (1)...(19): siRNA sense strand
caggaacgcaacaaacuca

SEQ ID NO: 978877 - RNA, 19 nt, Homo sapiens
  misc_RNA (1)...(19): siRNA sense strand
agagaaggcccaggaggaa

SEQ ID NO: 978878 - RNA, 19 nt, Homo sapiens
  misc_RNA (1)...(19): siRNA sense strand
ccgccgaggacguguauga

SEQ ID NO: 978879 - RNA, 19 nt, Homo sapiens
  misc_RNA (1)...(19): siRNA sense strand
ggaacgcaacaaacucaag

SEQ ID NO: 978880 - RNA, 19 nt, Homo sapiens
  misc_RNA (1)...(19): siRNA sense strand
ugcaggagcuaagggaugu

SEQ ID NO: 978881 - RNA, 19 nt, Homo sapiens
  misc_RNA (1)...(19): siRNA sense strand
gaaggcccaggaggaagaa

SEQ ID NO: 978882 - RNA, 19 nt, Homo sapiens
  misc_RNA (1)...(19): siRNA sense strand
agaaggcccaggaggaaga

SEQ ID NO: 978883 - RNA, 19 nt, Homo sapiens
  misc_RNA (1)...(19): siRNA sense strand
gcugcaggaacgcaacaaa

SEQ ID NO: 978884 - RNA, 19 nt, Homo sapiens
  misc_RNA (1)...(19): siRNA sense strand
uacaagaguggccugauuc

SEQ ID NO: 978885 - RNA, 19 nt, Homo sapiens
  misc_RNA (1)...(19): siRNA sense strand
gaacaggaggaauuaaaua

SEQ ID NO: 978886 - RNA, 19 nt, Homo sapiens
  misc_RNA (1)...(19): siRNA sense strand
gaaagaagagguucgagaa

SEQ ID NO: 978887 - RNA, 19 nt, Homo sapiens
  misc_RNA (1)...(19): siRNA sense strand
uggcagaacuugaagaauu

SEQ ID NO: 978888 - RNA, 19 nt, Homo sapiens
  misc_RNA (1)...(19): siRNA sense strand
aaacauggaucugaacaaa

SEQ ID NO: 978889 - RNA, 19 nt, Homo sapiens
  misc_RNA (1)...(19): siRNA sense strand
gaauaagcgagcugcauua

SEQ ID NO: 978890 - RNA, 19 nt, Homo sapiens
  misc_RNA (1)...(19): siRNA sense strand
gaaacaagaguaccuggaa

SEQ ID NO: 978891 - RNA, 19 nt, Homo sapiens
  misc_RNA (1)...(19): siRNA sense strand
agaaacagcucacucagau

SEQ ID NO: 978892 - RNA, 19 nt, Homo sapiens
  misc_RNA (1)...(19): siRNA sense strand
caggaggaauuaaauaaga

SEQ ID NO: 978893 - RNA, 19 nt, Homo sapiens
  misc_RNA (1)...(19): siRNA sense strand
ggauaucgcccaagaaauc

SEQ ID NO: 978894 - RNA, 19 nt, Homo sapiens
  misc_RNA (1)...(19): siRNA sense strand
gcacuaaagagaaagaaga

SEQ ID NO: 978895 - RNA, 19 nt, Homo sapiens
  misc_RNA (1)...(19): siRNA sense strand
ggcagaacuugaagaauug

SEQ ID NO: 978896 - RNA, 19 nt, Homo sapiens
  misc_RNA (1)...(19): siRNA sense strand
caagaaaucucagaagcau

SEQ ID NO: 978897 - RNA, 19 nt, Homo sapiens
  misc_RNA (1)...(19): siRNA sense strand
gagaagcccuggagaacuc

SEQ ID NO: 978898 - RNA, 19 nt, Homo sapiens
  misc_RNA (1)...(19): siRNA sense strand
aaacaagaguaccuggaaa

SEQ ID NO: 978899 - RNA, 19 nt, Homo sapiens
  misc_RNA (1)...(19): siRNA sense strand
ucacagagcaacaggauau

SEQ ID NO: 978900 - RNA, 19 nt, Homo sapiens
  misc_RNA (1)...(19): siRNA sense strand
cagcacagccaaauagaaa

SEQ ID NO: 978901 - RNA, 19 nt, Homo sapiens
  misc_RNA (1)...(19): siRNA sense strand
caaaagcgaugaaaucugu

SEQ ID NO: 978902 - RNA, 19 nt, Homo sapiens
  misc_RNA (1)...(19): siRNA sense strand
caaaugugccuuccucuuc

SEQ ID NO: 978903 - RNA, 19 nt, Homo sapiens
  misc_RNA (1)...(19): siRNA sense strand
uaagcgagcugcauuacag

SEQ ID NO: 978904 - RNA, 19 nt, Homo sapiens
  misc_RNA (1)...(19): siRNA sense strand
aaacagcucacucagauug

SEQ ID NO: 978905 - RNA, 19 nt, Homo sapiens
  misc_RNA (1)...(19): siRNA sense strand
gagaaacagcucacucaga

SEQ ID NO: 978906 - RNA, 19 nt, Homo sapiens
  misc_RNA (1)...(19): siRNA sense strand
gaagaagaggaugaugaua

SEQ ID NO: 978907 - RNA, 19 nt, Homo sapiens
  misc_RNA (1)...(19): siRNA sense strand
ggaacaggaggaauuaaau

SEQ ID NO: 978908 - RNA, 19 nt, Homo sapiens
  misc_RNA (1)...(19): siRNA sense strand
uagaugauuugaugcaaga

SEQ ID NO: 978909 - RNA, 19 nt, Homo sapiens
  misc_RNA (1)...(19): siRNA sense strand
agaagaggaugaugauauc

SEQ ID NO: 978910 - RNA, 19 nt, Homo sapiens
  misc_RNA (1)...(19): siRNA sense strand
acaaauauccgccuuccaa

SEQ ID NO: 978911 - RNA, 19 nt, Homo sapiens
  misc_RNA (1)...(19): siRNA sense strand
ccauugaguuccagagaga

SEQ ID NO: 978912 - RNA, 19 nt, Homo sapiens
  misc_RNA (1)...(19): siRNA sense strand
caggauaucgcccaagaaa

SEQ ID NO: 978913 - RNA, 19 nt, Homo sapiens
  misc_RNA (1)...(19): siRNA sense strand
cagaagaagaggaugauga

SEQ ID NO: 978914 - RNA, 19 nt, Homo sapiens
  misc_RNA (1)...(19): siRNA sense strand
agaagagguucgagaaaca

SEQ ID NO: 978915 - RNA, 19 nt, Homo sapiens
  misc_RNA (1)...(19): siRNA sense strand
aagaagaggaugaugauau

SEQ ID NO: 978916 - RNA, 19 nt, Homo sapiens
  misc_RNA (1)...(19): siRNA sense strand
gauggcagaacuugaagaa

SEQ ID NO: 978917 - RNA, 19 nt, Homo sapiens
  misc_RNA (1)...(19): siRNA sense strand
uggcuuuggugaugacuuu

SEQ ID NO: 978918 - RNA, 19 nt, Homo sapiens
  misc_RNA (1)...(19): siRNA sense strand
uacaggcacuaaagagaaa

SEQ ID NO: 978919 - RNA, 19 nt, Homo sapiens
  misc_RNA (1)...(19): siRNA sense strand
gaugauaucaaacaauugg

SEQ ID NO: 978920 - RNA, 19 nt, Homo sapiens
  misc_RNA (1)...(19): siRNA sense strand
gaaaucgcccuggccaaga

SEQ ID NO: 978921 - RNA, 19 nt, Homo sapiens
  misc_RNA (1)...(19): siRNA sense strand
ucagauugauggcacacuu

SEQ ID NO: 978922 - RNA, 19 nt, Homo sapiens
  misc_RNA (1)...(19): siRNA sense strand
gaucacagagcaacaggau

SEQ ID NO: 978923 - RNA, 19 nt, Homo sapiens
  misc_RNA (1)...(19): siRNA sense strand
gaaacagcucacucagauu

SEQ ID NO: 978924 - RNA, 19 nt, Homo sapiens
  misc_RNA (1)...(19): siRNA sense strand
caaauauccgccuuccaaa

SEQ ID NO: 978925 - RNA, 19 nt, Homo sapiens
  misc_RNA (1)...(19): siRNA sense strand
agaauaagcgagcugcauu

SEQ ID NO: 978926 - RNA, 19 nt, Homo sapiens
  misc_RNA (1)...(19): siRNA sense strand
ggagaugcugggcaagaaa

SEQ ID NO: 978927 - RNA, 19 nt, Homo sapiens
  misc_RNA (1)...(19): siRNA sense strand
gcacacuuucuaccauuga

SEQ ID NO: 978928 - RNA, 19 nt, Homo sapiens
  misc_RNA (1)...(19): siRNA sense strand
uaaagagaaagaagagguu

SEQ ID NO: 978929 - RNA, 19 nt, Homo sapiens
  misc_RNA (1)...(19): siRNA sense strand
gggcagaagaagaggauga

SEQ ID NO: 978930 - RNA, 19 nt, Homo sapiens
  misc_RNA (1)...(19): siRNA sense strand
caaguugggcaaguucuuu

SEQ ID NO: 978931 - RNA, 19 nt, Homo sapiens
  misc_RNA (1)...(19): siRNA sense strand
aaaucgcccuggccaagaa

SEQ ID NO: 978932 - RNA, 19 nt, Homo sapiens
  misc_RNA (1)...(19): siRNA sense strand
aaucgaauccagagagaaa

SEQ ID NO: 978933 - RNA, 19 nt, Homo sapiens
  misc_RNA (1)...(19): siRNA sense strand
aagcacggcacgcagaaua

SEQ ID NO: 978934 - RNA, 19 nt, Homo sapiens
  misc_RNA (1)...(19): siRNA sense strand
guugauggcagaacuugaa

SEQ ID NO: 978935 - RNA, 19 nt, Homo sapiens
  misc_RNA (1)...(19): siRNA sense strand
aaagaagagguucgagaaa

SEQ ID NO: 978936 - RNA, 19 nt, Homo sapiens
  misc_RNA (1)...(19): siRNA sense strand
gcauuacaggcacuaaaga

SEQ ID NO: 978937 - RNA, 19 nt, Homo sapiens
  misc_RNA (1)...(19): siRNA sense strand
gagagaagcccuggagaac

SEQ ID NO: 978938 - RNA, 19 nt, Homo sapiens
  misc_RNA (1)...(19): siRNA sense strand
uuacaggcacuaaagagaa

SEQ ID NO: 978939 - RNA, 19 nt, Homo sapiens
  misc_RNA (1)...(19): siRNA sense strand
aacaggauaucgcccaaga

SEQ ID NO: 978940 - RNA, 19 nt, Homo sapiens
  misc_RNA (1)...(19): siRNA sense strand
gaggagaugcugggcaaga

SEQ ID NO: 978941 - RNA, 19 nt, Homo sapiens
  misc_RNA (1)...(19): siRNA sense strand
aauauccgccuuccaaaug

SEQ ID NO: 978942 - RNA, 19 nt, Homo sapiens
  misc_RNA (1)...(19): siRNA sense strand
gcaaguugggcaaguucuu

SEQ ID NO: 978943 - RNA, 19 nt, Homo sapiens
  misc_RNA (1)...(19): siRNA sense strand
ccaagaaaucucagaagca

SEQ ID NO: 978944 - RNA, 19 nt, Homo sapiens
  misc_RNA (1)...(19): siRNA sense strand
uggcacacuuucuaccauu

SEQ ID NO: 978945 - RNA, 19 nt, Homo sapiens
  misc_RNA (1)...(19): siRNA sense strand
aagaagagguucgagaaac

SEQ ID NO: 978946 - RNA, 19 nt, Homo sapiens
  misc_RNA (1)...(19): siRNA sense strand
ccagagggcagaagaagag

SEQ ID NO: 978947 - RNA, 19 nt, Homo sapiens
  misc_RNA (1)...(19): siRNA sense strand
uggaacaggaggaauuaaa

SEQ ID NO: 978948 - RNA, 19 nt, Homo sapiens
  misc_RNA (1)...(19): siRNA sense strand
agagagaagcccuggagaa

SEQ ID NO: 978949 - RNA, 19 nt, Homo sapiens
  misc_RNA (1)...(19): siRNA sense strand
ggcacacuuucuaccauug

SEQ ID NO: 978950 - RNA, 19 nt, Homo sapiens
  misc_RNA (1)...(19): siRNA sense strand
ccaaaugugccuuccucuu

SEQ ID NO: 978951 - RNA, 19 nt, Homo sapiens
  misc_RNA (1)...(19): siRNA sense strand
gcaagaaacaagaguaccu

SEQ ID NO: 978952 - RNA, 19 nt, Homo sapiens
  misc_RNA (1)...(19): siRNA sense strand
gaacucacacaccaacacu

SEQ ID NO: 978953 - RNA, 19 nt, Homo sapiens
  misc_RNA (1)...(19): siRNA sense strand
cggguuggcuuuggugaug

SEQ ID NO: 978954 - RNA, 19 nt, Homo sapiens
  misc_RNA (1)...(19): siRNA sense strand
agaagaagaggaugaugau

SEQ ID NO: 978955 - RNA, 19 nt, Homo sapiens
  misc_RNA (1)...(19): siRNA sense strand
gagcaaguugggcaaguuc

SEQ ID NO: 978956 - RNA, 19 nt, Homo sapiens
  misc_RNA (1)...(19): siRNA sense strand
ugaugaggaugaguugaug

SEQ ID NO: 978957 - RNA, 19 nt, Homo sapiens
  misc_RNA (1)...(19): siRNA sense strand
gaugauuugaugcaagaga

SEQ ID NO: 978958 - RNA, 19 nt, Homo sapiens
  misc_RNA (1)...(19): siRNA sense strand
aaaugugccuuccucuucu

SEQ ID NO: 978959 - RNA, 19 nt, Homo sapiens
  misc_RNA (1)...(19): siRNA sense strand
acauggaucugaacaaaau

SEQ ID NO: 978960 - RNA, 19 nt, Homo sapiens
  misc_RNA (1)...(19): siRNA sense strand
gcaagagaucacagagcaa

SEQ ID NO: 978961 - RNA, 19 nt, Homo sapiens
  misc_RNA (1)...(19): siRNA sense strand
cagauugauggcacacuuu

SEQ ID NO: 978962 - RNA, 19 nt, Homo sapiens
  misc_RNA (1)...(19): siRNA sense strand
ccagcacagccaaauagaa

SEQ ID NO: 978963 - RNA, 19 nt, Homo sapiens
  misc_RNA (1)...(19): siRNA sense strand
gaaaucuguucaugaaaac

SEQ ID NO: 978964 - RNA, 19 nt, Homo sapiens
  misc_RNA (1)...(19): siRNA sense strand
ggaggaauuaaauaagaag

SEQ ID NO: 978965 - RNA, 19 nt, Homo sapiens
  misc_RNA (1)...(19): siRNA sense strand
gcacggcacgcagaauaag

SEQ ID NO: 978966 - RNA, 19 nt, Homo sapiens
  misc_RNA (1)...(19): siRNA sense strand
aaauauccgccuuccaaau

SEQ ID NO: 978967 - RNA, 19 nt, Homo sapiens
  misc_RNA (1)...(19): siRNA sense strand
aggagaugcugggcaagaa

SEQ ID NO: 978968 - RNA, 19 nt, Homo sapiens
  misc_RNA (1)...(19): siRNA sense strand
gggcaagaaacaagaguac

SEQ ID NO: 978969 - RNA, 19 nt, Homo sapiens
  misc_RNA (1)...(19): siRNA sense strand
ucgagaaacagcucacuca

SEQ ID NO: 978970 - RNA, 19 nt, Homo sapiens
  misc_RNA (1)...(19): siRNA sense strand
acucacacaccaacacuga

SEQ ID NO: 978971 - RNA, 19 nt, Homo sapiens
  misc_RNA (1)...(19): siRNA sense strand
gagggcagaagaagaggau

SEQ ID NO: 978972 - RNA, 19 nt, Homo sapiens
  misc_RNA (1)...(19): siRNA sense strand
gaagagguucgagaaacag

SEQ ID NO: 978973 - RNA, 19 nt, Homo sapiens
  misc_RNA (1)...(19): siRNA sense strand
gcagaagaagaggaugaug

SEQ ID NO: 978974 - RNA, 19 nt, Homo sapiens
  misc_RNA (1)...(19): siRNA sense strand
aaguugggcaaguucuuua

SEQ ID NO: 978975 - RNA, 19 nt, Homo sapiens
  misc_RNA (1)...(19): siRNA sense strand
aagcugaggccucuaaaga

SEQ ID NO: 978976 - RNA, 19 nt, Homo sapiens
  misc_RNA (1)...(19): siRNA sense strand
gagcccgacuucgaggaaa

SEQ ID NO: 978977 - RNA, 19 nt, Homo sapiens
  misc_RNA (1)...(19): siRNA sense strand
acccgaggcugaagcagaa

SEQ ID NO: 978978 - RNA, 19 nt, Homo sapiens
  misc_RNA (1)...(19): siRNA sense strand
ggaagcugaggccucuaaa

SEQ ID NO: 978979 - RNA, 19 nt, Homo sapiens
  misc_RNA (1)...(19): siRNA sense strand
ggccagaguacgaggcauu

SEQ ID NO: 978980 - RNA, 19 nt, Homo sapiens
  misc_RNA (1)...(19): siRNA sense strand
gaagcugaggccucuaaag

SEQ ID NO: 978981 - RNA, 19 nt, Homo sapiens
  misc_RNA (1)...(19): siRNA sense strand
ggacucgggacugcuguug

SEQ ID NO: 978982 - RNA, 19 nt, Homo sapiens
  misc_RNA (1)...(19): siRNA sense strand
acucgggacugcuguugga

SEQ ID NO: 978983 - RNA, 19 nt, Homo sapiens
  misc_RNA (1)...(19): siRNA sense strand
uggaagcugaggccucuaa

SEQ ID NO: 978984 - RNA, 19 nt, Homo sapiens
  misc_RNA (1)...(19): siRNA sense strand
ggaacaauacucucaaugu

SEQ ID NO: 978985 - RNA, 19 nt, Homo sapiens
  misc_RNA (1)...(19): siRNA sense strand
ggaccaguaaccaggcuua

SEQ ID NO: 978986 - RNA, 19 nt, Homo sapiens
  misc_RNA (1)...(19): siRNA sense strand
agaaggcugucuccgugua

SEQ ID NO: 978987 - RNA, 19 nt, Homo sapiens
  misc_RNA (1)...(19): siRNA sense strand
ggagaggaccagcgacuac

SEQ ID NO: 978988 - RNA, 19 nt, Homo sapiens
  misc_RNA (1)...(19): siRNA sense strand
ccggaacaauacucucaau

SEQ ID NO: 978989 - RNA, 19 nt, Homo sapiens
  misc_RNA (1)...(19): siRNA sense strand
ucugugacaucuaaaguua

SEQ ID NO: 978990 - RNA, 19 nt, Homo sapiens
  misc_RNA (1)...(19): siRNA sense strand
cagccaagaugaugucuac

SEQ ID NO: 978991 - RNA, 19 nt, Homo sapiens
  misc_RNA (1)...(19): siRNA sense strand
gcagcuggacucucuguga

SEQ ID NO: 978992 - RNA, 19 nt, Homo sapiens
  misc_RNA (1)...(19): siRNA sense strand
gggcuucaccucaguagga

SEQ ID NO: 978993 - RNA, 19 nt, Homo sapiens
  misc_RNA (1)...(19): siRNA sense strand
gacucucugugacaucuaa

SEQ ID NO: 978994 - RNA, 19 nt, Homo sapiens
  misc_RNA (1)...(19): siRNA sense strand
gcagucugguggcuauucu

SEQ ID NO: 978995 - RNA, 19 nt, Homo sapiens
  misc_RNA (1)...(19): siRNA sense strand
ugugacaucuaaaguuauc

SEQ ID NO: 978996 - RNA, 19 nt, Homo sapiens
  misc_RNA (1)...(19): siRNA sense strand
cuccauagcagccaagaug

SEQ ID NO: 978997 - RNA, 19 nt, Homo sapiens
  misc_RNA (1)...(19): siRNA sense strand
aaucgccgcauccuccaua

SEQ ID NO: 978998 - RNA, 19 nt, Homo sapiens
  misc_RNA (1)...(19): siRNA sense strand
cauagcagccaagaugaug

SEQ ID NO: 978999 - RNA, 19 nt, Homo sapiens
  misc_RNA (1)...(19): siRNA sense strand
gcagccaagaugaugucua

SEQ ID NO: 979000 - RNA, 19 nt, Homo sapiens
  misc_RNA (1)...(19): siRNA sense strand
gcuggacucucugugacau

SEQ ID NO: 979001 - RNA, 19 nt, Homo sapiens
  misc_RNA (1)...(19): siRNA sense strand
ggcuucaccucaguaggaa

SEQ ID NO: 979002 - RNA, 19 nt, Homo sapiens
  misc_RNA (1)...(19): siRNA sense strand
uggcuauucugcagucagu

SEQ ID NO: 979003 - RNA, 19 nt, Homo sapiens
  misc_RNA (1)...(19): siRNA sense strand
ggacagguaucaggaauua

SEQ ID NO: 979004 - RNA, 19 nt, Homo sapiens
  misc_RNA (1)...(19): siRNA sense strand
caagaaagcuuccuguuga

SEQ ID NO: 979005 - RNA, 19 nt, Homo sapiens
  misc_RNA (1)...(19): siRNA sense strand
ggagaaaccuggccaagaa

SEQ ID NO: 979006 - RNA, 19 nt, Homo sapiens
  misc_RNA (1)...(19): siRNA sense strand
gcaaaggacaucagcauua

SEQ ID NO: 979007 - RNA, 19 nt, Homo sapiens
  misc_RNA (1)...(19): siRNA sense strand
gagguaauccuuauagaua

SEQ ID NO: 979008 - RNA, 19 nt, Homo sapiens
  misc_RNA (1)...(19): siRNA sense strand
cacggaagcuuucacuuua

SEQ ID NO: 979009 - RNA, 19 nt, Homo sapiens
  misc_RNA (1)...(19): siRNA sense strand
ugaaggagcugacauacug

SEQ ID NO: 979010 - RNA, 19 nt, Homo sapiens
  misc_RNA (1)...(19): siRNA sense strand
caaagaagccaacauacaa

SEQ ID NO: 979011 - RNA, 19 nt, Homo sapiens
  misc_RNA (1)...(19): siRNA sense strand
gacaagagguaauccuuau

SEQ ID NO: 979012 - RNA, 19 nt, Homo sapiens
  misc_RNA (1)...(19): siRNA sense strand
ggaaaugauucuuugauac

SEQ ID NO: 979013 - RNA, 19 nt, Homo sapiens
  misc_RNA (1)...(19): siRNA sense strand
caaaggacaucagcauuau

SEQ ID NO: 979014 - RNA, 19 nt, Homo sapiens
  misc_RNA (1)...(19): siRNA sense strand
auaaagaccucagggauaa

SEQ ID NO: 979015 - RNA, 19 nt, Homo sapiens
  misc_RNA (1)...(19): siRNA sense strand
ccuaugaacucccaucuug

SEQ ID NO: 979016 - RNA, 19 nt, Homo sapiens
  misc_RNA (1)...(19): siRNA sense strand
gggagucacuucaacaaug

SEQ ID NO: 979017 - RNA, 19 nt, Homo sapiens
  misc_RNA (1)...(19): siRNA sense strand
aaagugaugucuauggaaa

SEQ ID NO: 979018 - RNA, 19 nt, Homo sapiens
  misc_RNA (1)...(19): siRNA sense strand
ggagacagcagucacuaaa

SEQ ID NO: 979019 - RNA, 19 nt, Homo sapiens
  misc_RNA (1)...(19): siRNA sense strand
aagagaagaucauagaaga

SEQ ID NO: 979020 - RNA, 19 nt, Homo sapiens
  misc_RNA (1)...(19): siRNA sense strand
ggaugaagcaccaauucua

SEQ ID NO: 979021 - RNA, 19 nt, Homo sapiens
  misc_RNA (1)...(19): siRNA sense strand
ggagucacuucaacaaugu

SEQ ID NO: 979022 - RNA, 19 nt, Homo sapiens
  misc_RNA (1)...(19): siRNA sense strand
cauaaagaccucagggaua

SEQ ID NO: 979023 - RNA, 19 nt, Homo sapiens
  misc_RNA (1)...(19): siRNA sense strand
cccuugaacuggaugauua

SEQ ID NO: 979024 - RNA, 19 nt, Homo sapiens
  misc_RNA (1)...(19): siRNA sense strand
ccacguuccuguccagauu

SEQ ID NO: 979025 - RNA, 19 nt, Homo sapiens
  misc_RNA (1)...(19): siRNA sense strand
ggacgaauugcccgauuaa

SEQ ID NO: 979026 - RNA, 19 nt, Homo sapiens
  misc_RNA (1)...(19): siRNA sense strand
caaccaaggcuuaugauuc

SEQ ID NO: 979027 - RNA, 19 nt, Homo sapiens
  misc_RNA (1)...(19): siRNA sense strand
uaaguaagccagaagaaga

SEQ ID NO: 979028 - RNA, 19 nt, Homo sapiens
  misc_RNA (1)...(19): siRNA sense strand
gaagagaagaucauagaag

SEQ ID NO: 979029 - RNA, 19 nt, Homo sapiens
  misc_RNA (1)...(19): siRNA sense strand
gaagccaacauacaaagaa

SEQ ID NO: 979030 - RNA, 19 nt, Homo sapiens
  misc_RNA (1)...(19): siRNA sense strand
gcuuaugauucaacaguuu

SEQ ID NO: 979031 - RNA, 19 nt, Homo sapiens
  misc_RNA (1)...(19): siRNA sense strand
ggaaaacaaugaagaaaca

SEQ ID NO: 979032 - RNA, 19 nt, Homo sapiens
  misc_RNA (1)...(19): siRNA sense strand
aaccaaggcuuaugauuca

SEQ ID NO: 979033 - RNA, 19 nt, Homo sapiens
  misc_RNA (1)...(19): siRNA sense strand
agaccuaacuagcauuuau

SEQ ID NO: 979034 - RNA, 19 nt, Homo sapiens
  misc_RNA (1)...(19): siRNA sense strand
gcuccuaacacuucuuuaa

SEQ ID NO: 979035 - RNA, 19 nt, Homo sapiens
  misc_RNA (1)...(19): siRNA sense strand
ucccagagguguugagaaa

SEQ ID NO: 979036 - RNA, 19 nt, Homo sapiens
  misc_RNA (1)...(19): siRNA sense strand
ccaagaaagcuuccuguug

SEQ ID NO: 979037 - RNA, 19 nt, Homo sapiens
  misc_RNA (1)...(19): siRNA sense strand
gcacaaaagcguuuccaua

SEQ ID NO: 979038 - RNA, 19 nt, Homo sapiens
  misc_RNA (1)...(19): siRNA sense strand
agaguuaacacgaaagaua

SEQ ID NO: 979039 - RNA, 19 nt, Homo sapiens
  misc_RNA (1)...(19): siRNA sense strand
uagcagaguuaacacgaaa

SEQ ID NO: 979040 - RNA, 19 nt, Homo sapiens
  misc_RNA (1)...(19): siRNA sense strand
gucaagguguauauuauga

SEQ ID NO: 979041 - RNA, 19 nt, Homo sapiens
  misc_RNA (1)...(19): siRNA sense strand
caaaagcguuuccauaaau

SEQ ID NO: 979042 - RNA, 19 nt, Homo sapiens
  misc_RNA (1)...(19): siRNA sense strand
aaagaugguagcagaguua

SEQ ID NO: 979043 - RNA, 19 nt, Homo sapiens
  misc_RNA (1)...(19): siRNA sense strand
gagaucugcuugccauauc

SEQ ID NO: 979044 - RNA, 19 nt, Homo sapiens
  misc_RNA (1)...(19): siRNA sense strand
gaugaagcaccaauucuau

SEQ ID NO: 979045 - RNA, 19 nt, Homo sapiens
  misc_RNA (1)...(19): siRNA sense strand
aaacccaacccacaccuua

SEQ ID NO: 979046 - RNA, 19 nt, Homo sapiens
  misc_RNA (1)...(19): siRNA sense strand
gguaauccuuauagauaug

SEQ ID NO: 979047 - RNA, 19 nt, Homo sapiens
  misc_RNA (1)...(19): siRNA sense strand
acacggaagcuuucacuuu

SEQ ID NO: 979048 - RNA, 19 nt, Homo sapiens
  misc_RNA (1)...(19): siRNA sense strand
aaagaaaugguggcacuua

SEQ ID NO: 979049 - RNA, 19 nt, Homo sapiens
  misc_RNA (1)...(19): siRNA sense strand
gaggacagguaucaggaau

SEQ ID NO: 979050 - RNA, 19 nt, Homo sapiens
  misc_RNA (1)...(19): siRNA sense strand
gacaucagcauuauggauu

SEQ ID NO: 979051 - RNA, 19 nt, Homo sapiens
  misc_RNA (1)...(19): siRNA sense strand
guucuugguuggauuccua

SEQ ID NO: 979052 - RNA, 19 nt, Homo sapiens
  misc_RNA (1)...(19): siRNA sense strand
ccaaagaagccaacauaca

SEQ ID NO: 979053 - RNA, 19 nt, Homo sapiens
  misc_RNA (1)...(19): siRNA sense strand
agacaagagguaauccuua

SEQ ID NO: 979054 - RNA, 19 nt, Homo sapiens
  misc_RNA (1)...(19): siRNA sense strand
ccaaccugcuggagcuuaa

SEQ ID NO: 979055 - RNA, 19 nt, Homo sapiens
  misc_RNA (1)...(19): siRNA sense strand
gacguucucuggaggcuau

SEQ ID NO: 979056 - RNA, 19 nt, Homo sapiens
  misc_RNA (1)...(19): siRNA sense strand
aagagaguauggugggaua

SEQ ID NO: 979057 - RNA, 19 nt, Homo sapiens
  misc_RNA (1)...(19): siRNA sense strand
caggucaagguguauauua

SEQ ID NO: 979058 - RNA, 19 nt, Homo sapiens
  misc_RNA (1)...(19): siRNA sense strand
agaguauggugggauaaua

SEQ ID NO: 979059 - RNA, 19 nt, Homo sapiens
  misc_RNA (1)...(19): siRNA sense strand
cuauggaaaugauucuuug

SEQ ID NO: 979060 - RNA, 19 nt, Homo sapiens
  misc_RNA (1)...(19): siRNA sense strand
gaauuaagggagucacuuc

SEQ ID NO: 979061 - RNA, 19 nt, Homo sapiens
  misc_RNA (1)...(19): siRNA sense strand
guagcagaguuaacacgaa

SEQ ID NO: 979062 - RNA, 19 nt, Homo sapiens
  misc_RNA (1)...(19): siRNA sense strand
caagagguaauccuuauag

SEQ ID NO: 979063 - RNA, 19 nt, Homo sapiens
  misc_RNA (1)...(19): siRNA sense strand
gaguuguucuugaauaugg

SEQ ID NO: 979064 - RNA, 19 nt, Homo sapiens
  misc_RNA (1)...(19): siRNA sense strand
cacgaaagauaggauuuga

SEQ ID NO: 979065 - RNA, 19 nt, Homo sapiens
  misc_RNA (1)...(19): siRNA sense strand
ggagugaccaaaccucaga

SEQ ID NO: 979066 - RNA, 19 nt, Homo sapiens
  misc_RNA (1)...(19): siRNA sense strand
acauaaagccauuuccaaa

SEQ ID NO: 979067 - RNA, 19 nt, Homo sapiens
  misc_RNA (1)...(19): siRNA sense strand
cagccggugugacccauaa

SEQ ID NO: 979068 - RNA, 19 nt, Homo sapiens
  misc_RNA (1)...(19): siRNA sense strand
ggugggauaauaccgauuu

SEQ ID NO: 979069 - RNA, 19 nt, Homo sapiens
  misc_RNA (1)...(19): siRNA sense strand
gcuugaaggagcugacaua

SEQ ID NO: 979070 - RNA, 19 nt, Homo sapiens
  misc_RNA (1)...(19): siRNA sense strand
cccacuggcucacuucgua

SEQ ID NO: 979071 - RNA, 19 nt, Homo sapiens
  misc_RNA (1)...(19): siRNA sense strand
ggacaucagcauuauggau

SEQ ID NO: 979072 - RNA, 19 nt, Homo sapiens
  misc_RNA (1)...(19): siRNA sense strand
gaugguagcagaguuaaca

SEQ ID NO: 979073 - RNA, 19 nt, Homo sapiens
  misc_RNA (1)...(19): siRNA sense strand
gacauaaagccauuuccaa

SEQ ID NO: 979074 - RNA, 19 nt, Homo sapiens
  misc_RNA (1)...(19): siRNA sense strand
caaaagaccuaacuagcau

SEQ ID NO: 979075 - RNA, 19 nt, Homo sapiens
  misc_RNA (1)...(19): siRNA sense strand
ugauugauauucccaugga

SEQ ID NO: 979076 - RNA, 19 nt, Homo sapiens
  misc_RNA (1)...(19): siRNA sense strand
gcagaguuaacacgaaaga

SEQ ID NO: 979077 - RNA, 19 nt, Homo sapiens
  misc_RNA (1)...(19): siRNA sense strand
gagaaaccuggccaagaaa

SEQ ID NO: 979078 - RNA, 19 nt, Homo sapiens
  misc_RNA (1)...(19): siRNA sense strand
gcguuuccauaaaucaauu

SEQ ID NO: 979079 - RNA, 19 nt, Homo sapiens
  misc_RNA (1)...(19): siRNA sense strand
cggaagcuuucacuuuaga

SEQ ID NO: 979080 - RNA, 19 nt, Homo sapiens
  misc_RNA (1)...(19): siRNA sense strand
cgugaucaguauaauaugu

SEQ ID NO: 979081 - RNA, 19 nt, Homo sapiens
  misc_RNA (1)...(19): siRNA sense strand
aggacgaauugcccgauua

SEQ ID NO: 979082 - RNA, 19 nt, Homo sapiens
  misc_RNA (1)...(19): siRNA sense strand
aaagaagccaacauacaaa

SEQ ID NO: 979083 - RNA, 19 nt, Homo sapiens
  misc_RNA (1)...(19): siRNA sense strand
ugccaaagaagccaacaua

SEQ ID NO: 979084 - RNA, 19 nt, Homo sapiens
  misc_RNA (1)...(19): siRNA sense strand
ccuuauagauaugaacuga

SEQ ID NO: 979085 - RNA, 19 nt, Homo sapiens
  misc_RNA (1)...(19): siRNA sense strand
ggucaagguguauauuaug

SEQ ID NO: 979086 - RNA, 19 nt, Homo sapiens
  misc_RNA (1)...(19): siRNA sense strand
cuacgugaucaguauaaua

SEQ ID NO: 979087 - RNA, 19 nt, Homo sapiens
  misc_RNA (1)...(19): siRNA sense strand
caacccacaccuuacugua

SEQ ID NO: 979088 - RNA, 19 nt, Homo sapiens
  misc_RNA (1)...(19): siRNA sense strand
aagccaacauacaaagaaa

SEQ ID NO: 979089 - RNA, 19 nt, Homo sapiens
  misc_RNA (1)...(19): siRNA sense strand
gaccacaggccaaaguaug

SEQ ID NO: 979090 - RNA, 19 nt, Homo sapiens
  misc_RNA (1)...(19): siRNA sense strand
aagaaagcuuccuguugaa

SEQ ID NO: 979091 - RNA, 19 nt, Homo sapiens
  misc_RNA (1)...(19): siRNA sense strand
cuaacuagcauuuaugaca

SEQ ID NO: 979092 - RNA, 19 nt, Homo sapiens
  misc_RNA (1)...(19): siRNA sense strand
acaucagcauuauggauuu

SEQ ID NO: 979093 - RNA, 19 nt, Homo sapiens
  misc_RNA (1)...(19): siRNA sense strand
cacaaaagcguuuccauaa

SEQ ID NO: 979094 - RNA, 19 nt, Homo sapiens
  misc_RNA (1)...(19): siRNA sense strand
agagcuugcugucuaccua

SEQ ID NO: 979095 - RNA, 19 nt, Homo sapiens
  misc_RNA (1)...(19): siRNA sense strand
gagaagaucauagaagaac

SEQ ID NO: 979096 - RNA, 19 nt, Homo sapiens
  misc_RNA (1)...(19): siRNA sense strand
gaguuaacacgaaagauag

SEQ ID NO: 979097 - RNA, 19 nt, Homo sapiens
  misc_RNA (1)...(19): siRNA sense strand
ugaacuggaugauuaccau

SEQ ID NO: 979098 - RNA, 19 nt, Homo sapiens
  misc_RNA (1)...(19): siRNA sense strand
cuucguacacucaugauuu

SEQ ID NO: 979099 - RNA, 19 nt, Homo sapiens
  misc_RNA (1)...(19): siRNA sense strand
gaaaugauucuuugauacc

SEQ ID NO: 979100 - RNA, 19 nt, Homo sapiens
  misc_RNA (1)...(19): siRNA sense strand
uaugaacucccaucuuguu

SEQ ID NO: 979101 - RNA, 19 nt, Homo sapiens
  misc_RNA (1)...(19): siRNA sense strand
acaaaagcguuuccauaaa

SEQ ID NO: 979102 - RNA, 19 nt, Homo sapiens
  misc_RNA (1)...(19): siRNA sense strand
gaacucccaucuuguuacc

SEQ ID NO: 979103 - RNA, 19 nt, Homo sapiens
  misc_RNA (1)...(19): siRNA sense strand
gaaauuaguccuaguguua

SEQ ID NO: 979104 - RNA, 19 nt, Homo sapiens
  misc_RNA (1)...(19): siRNA sense strand
aaacagugcugaagccuuu

SEQ ID NO: 979105 - RNA, 19 nt, Homo sapiens
  misc_RNA (1)...(19): siRNA sense strand
gcacagcaguuggcaguaa

SEQ ID NO: 979106 - RNA, 19 nt, Homo sapiens
  misc_RNA (1)...(19): siRNA sense strand
gaaagauccuccuagugaa

SEQ ID NO: 979107 - RNA, 19 nt, Homo sapiens
  misc_RNA (1)...(19): siRNA sense strand
ugaaagauccuccuaguga

SEQ ID NO: 979108 - RNA, 19 nt, Homo sapiens
  misc_RNA (1)...(19): siRNA sense strand
gagaaagacaaggaaauua

SEQ ID NO: 979109 - RNA, 19 nt, Homo sapiens
  misc_RNA (1)...(19): siRNA sense strand
ggaaauuaguccuaguguu

SEQ ID NO: 979110 - RNA, 19 nt, Homo sapiens
  misc_RNA (1)...(19): siRNA sense strand
gaagaaggagaaaguugaa

SEQ ID NO: 979111 - RNA, 19 nt, Homo sapiens
  misc_RNA (1)...(19): siRNA sense strand
gcaaaugcuacaacaaaga

SEQ ID NO: 979112 - RNA, 19 nt, Homo sapiens
  misc_RNA (1)...(19): siRNA sense strand
gcugaagccuuuaaaugca

SEQ ID NO: 979113 - RNA, 19 nt, Homo sapiens
  misc_RNA (1)...(19): siRNA sense strand
gagaagaaggagaaaguug

SEQ ID NO: 979114 - RNA, 19 nt, Homo sapiens
  misc_RNA (1)...(19): siRNA sense strand
aaaggcaccuccaccagaa

SEQ ID NO: 979115 - RNA, 19 nt, Homo sapiens
  misc_RNA (1)...(19): siRNA sense strand
gaaagacaaggaaauuagu

SEQ ID NO: 979116 - RNA, 19 nt, Homo sapiens
  misc_RNA (1)...(19): siRNA sense strand
ugucagcagucaaugauga

SEQ ID NO: 979117 - RNA, 19 nt, Homo sapiens
  misc_RNA (1)...(19): siRNA sense strand
caaagagaaaccugagaaa

SEQ ID NO: 979118 - RNA, 19 nt, Homo sapiens
  misc_RNA (1)...(19): siRNA sense strand
aagagaaaccugagaaaga

SEQ ID NO: 979119 - RNA, 19 nt, Homo sapiens
  misc_RNA (1)...(19): siRNA sense strand
caacgucaccgucauuauc

SEQ ID NO: 979120 - RNA, 19 nt, Homo sapiens
  misc_RNA (1)...(19): siRNA sense strand
aaacaaaucacaccucaag

SEQ ID NO: 979121 - RNA, 19 nt, Homo sapiens
  misc_RNA (1)...(19): siRNA sense strand
agucugacauucugaaaga

SEQ ID NO: 979122 - RNA, 19 nt, Homo sapiens
  misc_RNA (1)...(19): siRNA sense strand
aaaccaaaccaaagucuga

SEQ ID NO: 979123 - RNA, 19 nt, Homo sapiens
  misc_RNA (1)...(19): siRNA sense strand
uaucacagacuuuaaggaa

SEQ ID NO: 979124 - RNA, 19 nt, Homo sapiens
  misc_RNA (1)...(19): siRNA sense strand
caaagaccagcgaaacaaa

SEQ ID NO: 979125 - RNA, 19 nt, Homo sapiens
  misc_RNA (1)...(19): siRNA sense strand
gaagcaaacagcauacagu

SEQ ID NO: 979126 - RNA, 19 nt, Homo sapiens
  misc_RNA (1)...(19): siRNA sense strand
ugagaaagacaaggaaauu

SEQ ID NO: 979127 - RNA, 19 nt, Homo sapiens
  misc_RNA (1)...(19): siRNA sense strand
ucacagacuuuaaggaaaa

SEQ ID NO: 979128 - RNA, 19 nt, Homo sapiens
  misc_RNA (1)...(19): siRNA sense strand
ggucagagagcacagacaa

SEQ ID NO: 979129 - RNA, 19 nt, Homo sapiens
  misc_RNA (1)...(19): siRNA sense strand
aaaccaaagucugacauuc

SEQ ID NO: 979130 - RNA, 19 nt, Homo sapiens
  misc_RNA (1)...(19): siRNA sense strand
cgacaugucagcagucaau

SEQ ID NO: 979131 - RNA, 19 nt, Homo sapiens
  misc_RNA (1)...(19): siRNA sense strand
guccuaguguuaccaagaa

SEQ ID NO: 979132 - RNA, 19 nt, Homo sapiens
  misc_RNA (1)...(19): siRNA sense strand
gugcugaagccuuuaaaug

SEQ ID NO: 979133 - RNA, 19 nt, Homo sapiens
  misc_RNA (1)...(19): siRNA sense strand
acaaguggcacaacaguau

SEQ ID NO: 979134 - RNA, 19 nt, Homo sapiens
  misc_RNA (1)...(19): siRNA sense strand
caacaaagaccagcgaaac

SEQ ID NO: 979135 - RNA, 19 nt, Homo sapiens
  misc_RNA (1)...(19): siRNA sense strand
agaagaaggagaaaguuga

SEQ ID NO: 979136 - RNA, 19 nt, Homo sapiens
  misc_RNA (1)...(19): siRNA sense strand
gaaaaccucggaucaauuc

SEQ ID NO: 979137 - RNA, 19 nt, Homo sapiens
  misc_RNA (1)...(19): siRNA sense strand
ggagaagaaggagaaaguu

SEQ ID NO: 979138 - RNA, 19 nt, Homo sapiens
  misc_RNA (1)...(19): siRNA sense strand
cugcaaaugcuacaacaaa

SEQ ID NO: 979139 - RNA, 19 nt, Homo sapiens
  misc_RNA (1)...(19): siRNA sense strand
caaaccaaagucugacauu

SEQ ID NO: 979140 - RNA, 19 nt, Homo sapiens
  misc_RNA (1)...(19): siRNA sense strand
acaaagagaaaccugagaa

SEQ ID NO: 979141 - RNA, 19 nt, Homo sapiens
  misc_RNA (1)...(19): siRNA sense strand
agaaagacaaggaaauuag

SEQ ID NO: 979142 - RNA, 19 nt, Homo sapiens
  misc_RNA (1)...(19): siRNA sense strand
gucauuaucacagacuuua

SEQ ID NO: 979143 - RNA, 19 nt, Homo sapiens
  misc_RNA (1)...(19): siRNA sense strand
cacaacaaguggcacaaca

SEQ ID NO: 979144 - RNA, 19 nt, Homo sapiens
  misc_RNA (1)...(19): siRNA sense strand
ggucagaacagcagaacca

SEQ ID NO: 979145 - RNA, 19 nt, Homo sapiens
  misc_RNA (1)...(19): siRNA sense strand
cagcauacagucugcaaau

SEQ ID NO: 979146 - RNA, 19 nt, Homo sapiens
  misc_RNA (1)...(19): siRNA sense strand
ucugaaagauccuccuagu

SEQ ID NO: 979147 - RNA, 19 nt, Homo sapiens
  misc_RNA (1)...(19): siRNA sense strand
caaagucugacauucugaa

SEQ ID NO: 979148 - RNA, 19 nt, Homo sapiens
  misc_RNA (1)...(19): siRNA sense strand
gaaaccugccacagacgaa

SEQ ID NO: 979149 - RNA, 19 nt, Homo sapiens
  misc_RNA (1)...(19): siRNA sense strand
agagaaaccugagaaagac

SEQ ID NO: 979150 - RNA, 19 nt, Homo sapiens
  misc_RNA (1)...(19): siRNA sense strand
caacaaguggcacaacagu

SEQ ID NO: 979151 - RNA, 19 nt, Homo sapiens
  misc_RNA (1)...(19): siRNA sense strand
gaaacaaaucacaccucaa

SEQ ID NO: 979152 - RNA, 19 nt, Homo sapiens
  misc_RNA (1)...(19): siRNA sense strand
gccaaagggcgacauguca

SEQ ID NO: 979153 - RNA, 19 nt, Homo sapiens
  misc_RNA (1)...(19): siRNA sense strand
aagcgaaaccugccacaga

SEQ ID NO: 979154 - RNA, 19 nt, Homo sapiens
  misc_RNA (1)...(19): siRNA sense strand
acaaagaccagcgaaacaa

SEQ ID NO: 979155 - RNA, 19 nt, Homo sapiens
  misc_RNA (1)...(19): siRNA sense strand
gaccaugggcgacaagaag

SEQ ID NO: 979156 - RNA, 19 nt, Homo sapiens
  misc_RNA (1)...(19): siRNA sense strand
gggcaacgucaccgucauu

SEQ ID NO: 979157 - RNA, 19 nt, Homo sapiens
  misc_RNA (1)...(19): siRNA sense strand
caaugaugaaucuuucuga

SEQ ID NO: 979158 - RNA, 19 nt, Homo sapiens
  misc_RNA (1)...(19): siRNA sense strand
agucaaugaugaaucuuuc

SEQ ID NO: 979159 - RNA, 19 nt, Homo sapiens
  misc_RNA (1)...(19): siRNA sense strand
gcaacgucaccgucauuau

SEQ ID NO: 979160 - RNA, 19 nt, Homo sapiens
  misc_RNA (1)...(19): siRNA sense strand
gcugguggcacaacaagug

SEQ ID NO: 979161 - RNA, 19 nt, Homo sapiens
  misc_RNA (1)...(19): siRNA sense strand
ucaccgucauuaucacaga

SEQ ID NO: 979162 - RNA, 19 nt, Homo sapiens
  misc_RNA (1)...(19): siRNA sense strand
ggcaacgucaccgucauua

SEQ ID NO: 979163 - RNA, 19 nt, Homo sapiens
  misc_RNA (1)...(19): siRNA sense strand
cagaaaaccucggaucaau

SEQ ID NO: 979164 - RNA, 19 nt, Homo sapiens
  misc_RNA (1)...(19): siRNA sense strand
uagugaagcaaacagcaua

SEQ ID NO: 979165 - RNA, 19 nt, Homo sapiens
  misc_RNA (1)...(19): siRNA sense strand
gacgaaggguuuugggauu

SEQ ID NO: 979166 - RNA, 19 nt, Homo sapiens
  misc_RNA (1)...(19): siRNA sense strand
aagacucgcuccucaucga

SEQ ID NO: 979167 - RNA, 19 nt, Homo sapiens
  misc_RNA (1)...(19): siRNA sense strand
aaagcaggacaaagagaaa

SEQ ID NO: 979168 - RNA, 19 nt, Homo sapiens
  misc_RNA (1)...(19): siRNA sense strand
gacaaagagaaaccugaga

SEQ ID NO: 979169 - RNA, 19 nt, Homo sapiens
  misc_RNA (1)...(19): siRNA sense strand
gaaaagcaggacaaagaga

SEQ ID NO: 979170 - RNA, 19 nt, Homo sapiens
  misc_RNA (1)...(19): siRNA sense strand
aaagaccagcgaaacaaau

SEQ ID NO: 979171 - RNA, 19 nt, Homo sapiens
  misc_RNA (1)...(19): siRNA sense strand
caaaugcuacaacaaagac

SEQ ID NO: 979172 - RNA, 19 nt, Homo sapiens
  misc_RNA (1)...(19): siRNA sense strand
cauacagucugcaaaugcu

SEQ ID NO: 979173 - RNA, 19 nt, Homo sapiens
  misc_RNA (1)...(19): siRNA sense strand
aaccucggaucaauucuca

SEQ ID NO: 979174 - RNA, 19 nt, Homo sapiens
  misc_RNA (1)...(19): siRNA sense strand
aaagagaaaccugagaaag

SEQ ID NO: 979175 - RNA, 19 nt, Homo sapiens
  misc_RNA (1)...(19): siRNA sense strand
accaaagucugacauucug

SEQ ID NO: 979176 - RNA, 19 nt, Homo sapiens
  misc_RNA (1)...(19): siRNA sense strand
ugccacagacgaaggguuu

SEQ ID NO: 979177 - RNA, 19 nt, Homo sapiens
  misc_RNA (1)...(19): siRNA sense strand
ugcaaaugcuacaacaaag

SEQ ID NO: 979178 - RNA, 19 nt, Homo sapiens
  misc_RNA (1)...(19): siRNA sense strand
caagaaaaccaaaccaaag

SEQ ID NO: 979179 - RNA, 19 nt, Homo sapiens
  misc_RNA (1)...(19): siRNA sense strand
cagucaaugaugaaucuuu

SEQ ID NO: 979180 - RNA, 19 nt, Homo sapiens
  misc_RNA (1)...(19): siRNA sense strand
caugucagcagucaaugau

SEQ ID NO: 979181 - RNA, 19 nt, Homo sapiens
  misc_RNA (1)...(19): siRNA sense strand
ggcgacaugucagcaguca

SEQ ID NO: 979182 - RNA, 19 nt, Homo sapiens
  misc_RNA (1)...(19): siRNA sense strand
uguagcgucugcaccuuca

SEQ ID NO: 979183 - RNA, 19 nt, Homo sapiens
  misc_RNA (1)...(19): siRNA sense strand
caaguggcacaacaguaug

SEQ ID NO: 979184 - RNA, 19 nt, Homo sapiens
  misc_RNA (1)...(19): siRNA sense strand
gcaguuggcuauuauaucu

SEQ ID NO: 979185 - RNA, 19 nt, Homo sapiens
  misc_RNA (1)...(19): siRNA sense strand
gcacugggauggaacuuca

SEQ ID NO: 979186 - RNA, 19 nt, Homo sapiens
  misc_RNA (1)...(19): siRNA sense strand
ggaacggagucuugaauuc

SEQ ID NO: 979187 - RNA, 19 nt, Homo sapiens
  misc_RNA (1)...(19): siRNA sense strand
gcgaaacgcuacaaauauc

SEQ ID NO: 979188 - RNA, 19 nt, Homo sapiens
  misc_RNA (1)...(19): siRNA sense strand
gacaugggauucuuugaga

SEQ ID NO: 979189 - RNA, 19 nt, Homo sapiens
  misc_RNA (1)...(19): siRNA sense strand
guucaucucuaacaaguau

SEQ ID NO: 979190 - RNA, 19 nt, Homo sapiens
  misc_RNA (1)...(19): siRNA sense strand
uaaugugguucaucucuaa

SEQ ID NO: 979191 - RNA, 19 nt, Homo sapiens
  misc_RNA (1)...(19): siRNA sense strand
gagcagagacuaugaugug

SEQ ID NO: 979192 - RNA, 19 nt, Homo sapiens
  misc_RNA (1)...(19): siRNA sense strand
ccacagagaguuuacagaa

SEQ ID NO: 979193 - RNA, 19 nt, Homo sapiens
  misc_RNA (1)...(19): siRNA sense strand
acagagaguuuacagaaau

SEQ ID NO: 979194 - RNA, 19 nt, Homo sapiens
  misc_RNA (1)...(19): siRNA sense strand
gagaugacccugcuuucuu

SEQ ID NO: 979195 - RNA, 19 nt, Homo sapiens
  misc_RNA (1)...(19): siRNA sense strand
gggauucuuugagacaaua

SEQ ID NO: 979196 - RNA, 19 nt, Homo sapiens
  misc_RNA (1)...(19): siRNA sense strand
cagagacuaugauguggaa

SEQ ID NO: 979197 - RNA, 19 nt, Homo sapiens
  misc_RNA (1)...(19): siRNA sense strand
cacagagaguuuacagaaa

SEQ ID NO: 979198 - RNA, 19 nt, Homo sapiens
  misc_RNA (1)...(19): siRNA sense strand
cagagaguuuacagaaauu

SEQ ID NO: 979199 - RNA, 19 nt, Homo sapiens
  misc_RNA (1)...(19): siRNA sense strand
acacacagccggagcgaaa

SEQ ID NO: 979200 - RNA, 19 nt, Homo sapiens
  misc_RNA (1)...(19): siRNA sense strand
cagacacauuuauuggaua

SEQ ID NO: 979201 - RNA, 19 nt, Homo sapiens
  misc_RNA (1)...(19): siRNA sense strand
ggguuguacucauagauug

SEQ ID NO: 979202 - RNA, 19 nt, Homo sapiens
  misc_RNA (1)...(19): siRNA sense strand
agaugacccugcuuucuug

SEQ ID NO: 979203 - RNA, 19 nt, Homo sapiens
  misc_RNA (1)...(19): siRNA sense strand
ggacaugggauucuuugag

SEQ ID NO: 979204 - RNA, 19 nt, Homo sapiens
  misc_RNA (1)...(19): siRNA sense strand
ccagagaugacccugcuuu

SEQ ID NO: 979205 - RNA, 19 nt, Homo sapiens
  misc_RNA (1)...(19): siRNA sense strand
acagacacauuuauuggau

SEQ ID NO: 979206 - RNA, 19 nt, Homo sapiens
  misc_RNA (1)...(19): siRNA sense strand
cgacagagcagagacuaug

SEQ ID NO: 979207 - RNA, 19 nt, Homo sapiens
  misc_RNA (1)...(19): siRNA sense strand
ggcagaugcucuaccuguu

SEQ ID NO: 979208 - RNA, 19 nt, Homo sapiens
  misc_RNA (1)...(19): siRNA sense strand
cccauacucucuguucuuu

SEQ ID NO: 979209 - RNA, 19 nt, Homo sapiens
  misc_RNA (1)...(19): siRNA sense strand
uuaaugugguucaucucua

SEQ ID NO: 979210 - RNA, 19 nt, Homo sapiens
  misc_RNA (1)...(19): siRNA sense strand
gacaauaaagcuucuccuu

SEQ ID NO: 979211 - RNA, 19 nt, Homo sapiens
  misc_RNA (1)...(19): siRNA sense strand
gcagaugcucuaccuguuc

SEQ ID NO: 979212 - RNA, 19 nt, Homo sapiens
  misc_RNA (1)...(19): siRNA sense strand
cauacucucuguucuuucu

SEQ ID NO: 979213 - RNA, 19 nt, Homo sapiens
  misc_RNA (1)...(19): siRNA sense strand
gguugcaguuggcuauuau

SEQ ID NO: 979214 - RNA, 19 nt, Homo sapiens
  misc_RNA (1)...(19): siRNA sense strand
ccuuuggguuguacucaua

SEQ ID NO: 979215 - RNA, 19 nt, Homo sapiens
  misc_RNA (1)...(19): siRNA sense strand
cagaugcucuaccuguuca

SEQ ID NO: 979216 - RNA, 19 nt, Homo sapiens
  misc_RNA (1)...(19): siRNA sense strand
gggaacggagucuugaauu

SEQ ID NO: 979217 - RNA, 19 nt, Homo sapiens
  misc_RNA (1)...(19): siRNA sense strand
aggcguuggucuucugaua

SEQ ID NO: 979218 - RNA, 19 nt, Homo sapiens
  misc_RNA (1)...(19): siRNA sense strand
uauaggauuuggcuuugug

SEQ ID NO: 979219 - RNA, 19 nt, Homo sapiens
  misc_RNA (1)...(19): siRNA sense strand
ucugauagcaacuuuaaug

SEQ ID NO: 979220 - RNA, 19 nt, Homo sapiens
  misc_RNA (1)...(19): siRNA sense strand
gagaaggcuuuuccgcuuu

SEQ ID NO: 979221 - RNA, 19 nt, Homo sapiens
  misc_RNA (1)...(19): siRNA sense strand
ggaauggggcuaugcuuuu

SEQ ID NO: 979222 - RNA, 19 nt, Homo sapiens
  misc_RNA (1)...(19): siRNA sense strand
uagcaacuuuaaugugguu

SEQ ID NO: 979223 - RNA, 19 nt, Homo sapiens
  misc_RNA (1)...(19): siRNA sense strand
gagacuaugauguggaaug

SEQ ID NO: 979224 - RNA, 19 nt, Homo sapiens
  misc_RNA (1)...(19): siRNA sense strand
cauguuauccugacagaca

SEQ ID NO: 979225 - RNA, 19 nt, Homo sapiens
  misc_RNA (1)...(19): siRNA sense strand
gaaauaccuuaugguuggu

SEQ ID NO: 979226 - RNA, 19 nt, Homo sapiens
  misc_RNA (1)...(19): siRNA sense strand
ugacagacacauuuauugg

SEQ ID NO: 979227 - RNA, 19 nt, Homo sapiens
  misc_RNA (1)...(19): siRNA sense strand
gacagacacauuuauugga

SEQ ID NO: 979228 - RNA, 19 nt, Homo sapiens
  misc_RNA (1)...(19): siRNA sense strand
uguguccacuauaggauuu

SEQ ID NO: 979229 - RNA, 19 nt, Homo sapiens
  misc_RNA (1)...(19): siRNA sense strand
gaauggggcuaugcuuuug

SEQ ID NO: 979230 - RNA, 19 nt, Homo sapiens
  misc_RNA (1)...(19): siRNA sense strand
cuucugauagcaacuuuaa

SEQ ID NO: 979231 - RNA, 19 nt, Homo sapiens
  misc_RNA (1)...(19): siRNA sense strand
ugguugcaguuggcuauua

SEQ ID NO: 979232 - RNA, 19 nt, Homo sapiens
  misc_RNA (1)...(19): siRNA sense strand
gaaacgcuacaaauaucug

SEQ ID NO: 979233 - RNA, 19 nt, Homo sapiens
  misc_RNA (1)...(19): siRNA sense strand
uauccugacagacacauuu

SEQ ID NO: 979234 - RNA, 19 nt, Homo sapiens
  misc_RNA (1)...(19): siRNA sense strand
gaacggagucuugaauucc

SEQ ID NO: 979235 - RNA, 19 nt, Homo sapiens
  misc_RNA (1)...(19): siRNA sense strand
cacuauaggauuuggcuuu

SEQ ID NO: 979236 - RNA, 19 nt, Homo sapiens
  misc_RNA (1)...(19): siRNA sense strand
caacuuuaaugugguucau

SEQ ID NO: 979237 - RNA, 19 nt, Homo sapiens
  misc_RNA (1)...(19): siRNA sense strand
aaauaucugagaaggcuuu

SEQ ID NO: 979238 - RNA, 19 nt, Homo sapiens
  misc_RNA (1)...(19): siRNA sense strand
ccugacagacacauuuauu

SEQ ID NO: 979239 - RNA, 19 nt, Homo sapiens
  misc_RNA (1)...(19): siRNA sense strand
gacagagcagagacuauga

SEQ ID NO: 979240 - RNA, 19 nt, Homo sapiens
  misc_RNA (1)...(19): siRNA sense strand
ucucuguucuuucuauaag

SEQ ID NO: 979241 - RNA, 19 nt, Homo sapiens
  misc_RNA (1)...(19): siRNA sense strand
uaacuuuccugggauacag

SEQ ID NO: 979242 - RNA, 19 nt, Homo sapiens
  misc_RNA (1)...(19): siRNA sense strand
caaccauguuauccugaca

SEQ ID NO: 979243 - RNA, 19 nt, Homo sapiens
  misc_RNA (1)...(19): siRNA sense strand
acuauaggauuuggcuuug

SEQ ID NO: 979244 - RNA, 19 nt, Homo sapiens
  misc_RNA (1)...(19): siRNA sense strand
agacuaugauguggaaugg

SEQ ID NO: 979245 - RNA, 19 nt, Homo sapiens
  misc_RNA (1)...(19): siRNA sense strand
guacucauagauuguguag

SEQ ID NO: 979246 - RNA, 19 nt, Homo sapiens
  misc_RNA (1)...(19): siRNA sense strand
gauacagugcauugccauu

SEQ ID NO: 979247 - RNA, 19 nt, Homo sapiens
  misc_RNA (1)...(19): siRNA sense strand
auacagugcauugccauuu

SEQ ID NO: 979248 - RNA, 19 nt, Homo sapiens
  misc_RNA (1)...(19): siRNA sense strand
gcucuguguguccacuaua

SEQ ID NO: 979249 - RNA, 19 nt, Homo sapiens
  misc_RNA (1)...(19): siRNA sense strand
guaauucuucuguauccau

SEQ ID NO: 979250 - RNA, 19 nt, Homo sapiens
  misc_RNA (1)...(19): siRNA sense strand
gggcuaugcuuuugaugug

SEQ ID NO: 979251 - RNA, 19 nt, Homo sapiens
  misc_RNA (1)...(19): siRNA sense strand
acaaguauuuagugaaacg

SEQ ID NO: 979252 - RNA, 19 nt, Homo sapiens
  misc_RNA (1)...(19): siRNA sense strand
uauccacuccuggucauuu

SEQ ID NO: 979253 - RNA, 19 nt, Homo sapiens
  misc_RNA (1)...(19): siRNA sense strand
gcuggacaugggauucuuu

SEQ ID NO: 979254 - RNA, 19 nt, Homo sapiens
  misc_RNA (1)...(19): siRNA sense strand
cuauaaguacagagugaaa

SEQ ID NO: 979255 - RNA, 19 nt, Homo sapiens
  misc_RNA (1)...(19): siRNA sense strand
acucucuguucuuucuaua

SEQ ID NO: 979256 - RNA, 19 nt, Homo sapiens
  misc_RNA (1)...(19): siRNA sense strand
caguaauucuucuguaucc

SEQ ID NO: 979257 - RNA, 19 nt, Homo sapiens
  misc_RNA (1)...(19): siRNA sense strand
ccagggaugcggcaagaca

SEQ ID NO: 979258 - RNA, 19 nt, Homo sapiens
  misc_RNA (1)...(19): siRNA sense strand
ugauagcaacuuuaaugug

SEQ ID NO: 979259 - RNA, 19 nt, Homo sapiens
  misc_RNA (1)...(19): siRNA sense strand
ucuugguccuguuaaguau

SEQ ID NO: 979260 - RNA, 19 nt, Homo sapiens
  misc_RNA (1)...(19): siRNA sense strand
uuaccgaguacuucaguga

SEQ ID NO: 979261 - RNA, 19 nt, Homo sapiens
  misc_RNA (1)...(19): siRNA sense strand
ugguucaucucuaacaagu

SEQ ID NO: 979262 - RNA, 19 nt, Homo sapiens
  misc_RNA (1)...(19): siRNA sense strand
ucacccauacucucuguuc

SEQ ID NO: 979263 - RNA, 19 nt, Homo sapiens
  misc_RNA (1)...(19): siRNA sense strand
caccucugauucugcucua

SEQ ID NO: 979264 - RNA, 19 nt, Homo sapiens
  misc_RNA (1)...(19): siRNA sense strand
uuggaaauaccuuaugguu

SEQ ID NO: 979265 - RNA, 19 nt, Homo sapiens
  misc_RNA (1)...(19): siRNA sense strand
gaccagugggccagagaug

SEQ ID NO: 979266 - RNA, 19 nt, Homo sapiens
  misc_RNA (1)...(19): siRNA sense strand
ugacaaacaucucuucauu

SEQ ID NO: 979267 - RNA, 19 nt, Homo sapiens
  misc_RNA (1)...(19): siRNA sense strand
acaaacaucucuucauuga

SEQ ID NO: 979268 - RNA, 19 nt, Homo sapiens
  misc_RNA (1)...(19): siRNA sense strand
gcaagcugcuguggacaua

SEQ ID NO: 979269 - RNA, 19 nt, Homo sapiens
  misc_RNA (1)...(19): siRNA sense strand
gaaugucccuggcuucuuc

SEQ ID NO: 979270 - RNA, 19 nt, Homo sapiens
  misc_RNA (1)...(19): siRNA sense strand
gaagacaccaucaugaaug

SEQ ID NO: 979271 - RNA, 19 nt, Homo sapiens
  misc_RNA (1)...(19): siRNA sense strand
gcacggccauugacuuugu

SEQ ID NO: 979272 - RNA, 19 nt, Homo sapiens
  misc_RNA (1)...(19): siRNA sense strand
gaauuaggauacacucugu

SEQ ID NO: 979273 - RNA, 19 nt, Homo sapiens
  misc_RNA (1)...(19): siRNA sense strand
ggugacagcugaccacauc

SEQ ID NO: 979274 - RNA, 19 nt, Homo sapiens
  misc_RNA (1)...(19): siRNA sense strand
aaacaucucuucauugacu

SEQ ID NO: 979275 - RNA, 19 nt, Homo sapiens
  misc_RNA (1)...(19): siRNA sense strand
gcaagaaggaugacaaugg

SEQ ID NO: 979276 - RNA, 19 nt, Homo sapiens
  misc_RNA (1)...(19): siRNA sense strand
gcaugucccugcaggagaa

SEQ ID NO: 979277 - RNA, 19 nt, Homo sapiens
  misc_RNA (1)...(19): siRNA sense strand
gcaaaggcaagaaggauga

SEQ ID NO: 979278 - RNA, 19 nt, Homo sapiens
  misc_RNA (1)...(19): siRNA sense strand
ggacuuaucagcuacuuag

SEQ ID NO: 979279 - RNA, 19 nt, Homo sapiens
  misc_RNA (1)...(19): siRNA sense strand
gcucaccccugaagaaaua

SEQ ID NO: 979280 - RNA, 19 nt, Homo sapiens
  misc_RNA (1)...(19): siRNA sense strand
cagaaccuguggucaugua

SEQ ID NO: 979281 - RNA, 19 nt, Homo sapiens
  misc_RNA (1)...(19): siRNA sense strand
gggaagaacccaacuggau

SEQ ID NO: 979282 - RNA, 19 nt, Homo sapiens
  misc_RNA (1)...(19): siRNA sense strand
gaccacauccaacucauug

SEQ ID NO: 979283 - RNA, 19 nt, Homo sapiens
  misc_RNA (1)...(19): siRNA sense strand
ccagccagcuaaccaaugu

SEQ ID NO: 979284 - RNA, 19 nt, Homo sapiens
  misc_RNA (1)...(19): siRNA sense strand
guggcuggcuccaucaauu

SEQ ID NO: 979285 - RNA, 19 nt, Homo sapiens
  misc_RNA (1)...(19): siRNA sense strand
gaagggccagguagacuug

SEQ ID NO: 979286 - RNA, 19 nt, Homo sapiens
  misc_RNA (1)...(19): siRNA sense strand
gcugacuggucuccggaua

SEQ ID NO: 979287 - RNA, 19 nt, Homo sapiens
  misc_RNA (1)...(19): siRNA sense strand
gagcagaaccuguggucau

SEQ ID NO: 979288 - RNA, 19 nt, Homo sapiens
  misc_RNA (1)...(19): siRNA sense strand
gacaaacaucucuucauug

SEQ ID NO: 979289 - RNA, 19 nt, Homo sapiens
  misc_RNA (1)...(19): siRNA sense strand
gugaagacaccaucaugaa

SEQ ID NO: 979290 - RNA, 19 nt, Homo sapiens
  misc_RNA (1)...(19): siRNA sense strand
gaaccuguggucauguauu

SEQ ID NO: 979291 - RNA, 19 nt, Homo sapiens
  misc_RNA (1)...(19): siRNA sense strand
ugacuggucuccggauaug

SEQ ID NO: 979292 - RNA, 19 nt, Homo sapiens
  misc_RNA (1)...(19): siRNA sense strand
ggaagggccagguagacuu

SEQ ID NO: 979293 - RNA, 19 nt, Homo sapiens
  misc_RNA (1)...(19): siRNA sense strand
gcaguaugagcgugacaaa

SEQ ID NO: 979294 - RNA, 19 nt, Homo sapiens
  misc_RNA (1)...(19): siRNA sense strand
ggcuaccucucuccaaaga

SEQ ID NO: 979295 - RNA, 19 nt, Homo sapiens
  misc_RNA (1)...(19): siRNA sense strand
cuaccucucuccaaagaca

SEQ ID NO: 979296 - RNA, 19 nt, Homo sapiens
  misc_RNA (1)...(19): siRNA sense strand
gaaacuucuuacuuacuac

SEQ ID NO: 979297 - RNA, 19 nt, Homo sapiens
  misc_RNA (1)...(19): siRNA sense strand
ccaaugucauccuccacuu

SEQ ID NO: 979298 - RNA, 19 nt, Homo sapiens
  misc_RNA (1)...(19): siRNA sense strand
guggcagccucuacgauga

SEQ ID NO: 979299 - RNA, 19 nt, Homo sapiens
  misc_RNA (1)...(19): siRNA sense strand
gugagaauccagaguacuu

SEQ ID NO: 979300 - RNA, 19 nt, Homo sapiens
  misc_RNA (1)...(19): siRNA sense strand
guaugagcgugacaaacau

SEQ ID NO: 979301 - RNA, 19 nt, Homo sapiens
  misc_RNA (1)...(19): siRNA sense strand
ccacagacuccuccaccuu

SEQ ID NO: 979302 - RNA, 19 nt, Homo sapiens
  misc_RNA (1)...(19): siRNA sense strand
cagauacauuugagaaggu

SEQ ID NO: 979303 - RNA, 19 nt, Homo sapiens
  misc_RNA (1)...(19): siRNA sense strand
ugaagacaccaucaugaau

SEQ ID NO: 979304 - RNA, 19 nt, Homo sapiens
  misc_RNA (1)...(19): siRNA sense strand
aagcugcuguggacauaug

SEQ ID NO: 979305 - RNA, 19 nt, Homo sapiens
  misc_RNA (1)...(19): siRNA sense strand
aagacaccaucaugaaugu

SEQ ID NO: 979306 - RNA, 19 nt, Homo sapiens
  misc_RNA (1)...(19): siRNA sense strand
gaaaaggagcugggaagaa

SEQ ID NO: 979307 - RNA, 19 nt, Homo sapiens
  misc_RNA (1)...(19): siRNA sense strand
gggccaaguugccugacau

SEQ ID NO: 979308 - RNA, 19 nt, Homo sapiens
  misc_RNA (1)...(19): siRNA sense strand
agauacauuugagaaggua

SEQ ID NO: 979309 - RNA, 19 nt, Homo sapiens
  misc_RNA (1)...(19): siRNA sense strand
aaccuguggucauguauuc

SEQ ID NO: 979310 - RNA, 19 nt, Homo sapiens
  misc_RNA (1)...(19): siRNA sense strand
aguaugagcgugacaaaca

SEQ ID NO: 979311 - RNA, 19 nt, Homo sapiens
  misc_RNA (1)...(19): siRNA sense strand
uuacugggaccgcugugua

SEQ ID NO: 979312 - RNA, 19 nt, Homo sapiens
  misc_RNA (1)...(19): siRNA sense strand
gagaauccagaguacuuuc

SEQ ID NO: 979313 - RNA, 19 nt, Homo sapiens
  misc_RNA (1)...(19): siRNA sense strand
cacaccggcuagcccagua

SEQ ID NO: 979314 - RNA, 19 nt, Homo sapiens
  misc_RNA (1)...(19): siRNA sense strand
ugcagacccuucccacaga

SEQ ID NO: 979315 - RNA, 19 nt, Homo sapiens
  misc_RNA (1)...(19): siRNA sense strand
gucgugagaauccagagua

SEQ ID NO: 979316 - RNA, 19 nt, Homo sapiens
  misc_RNA (1)...(19): siRNA sense strand
ugaggggacuuaucagcua

SEQ ID NO: 979317 - RNA, 19 nt, Homo sapiens
  misc_RNA (1)...(19): siRNA sense strand
cgaucucugugccucaaga

SEQ ID NO: 979318 - RNA, 19 nt, Homo sapiens
  misc_RNA (1)...(19): siRNA sense strand
ccaggaagggccagguaga

SEQ ID NO: 979319 - RNA, 19 nt, Homo sapiens
  misc_RNA (1)...(19): siRNA sense strand
caaugucauccuccacuug

SEQ ID NO: 979320 - RNA, 19 nt, Homo sapiens
  misc_RNA (1)...(19): siRNA sense strand
ugagaauccagaguacuuu

SEQ ID NO: 979321 - RNA, 19 nt, Homo sapiens
  misc_RNA (1)...(19): siRNA sense strand
caguuaagcggauguacga

SEQ ID NO: 979322 - RNA, 19 nt, Homo sapiens
  misc_RNA (1)...(19): siRNA sense strand
ccagguagacuugaagaag

SEQ ID NO: 979323 - RNA, 19 nt, Homo sapiens
  misc_RNA (1)...(19): siRNA sense strand
gcgcaaaggcaagaaggau

SEQ ID NO: 979324 - RNA, 19 nt, Homo sapiens
  misc_RNA (1)...(19): siRNA sense strand
caagauccucaaggccaua

SEQ ID NO: 979325 - RNA, 19 nt, Homo sapiens
  misc_RNA (1)...(19): siRNA sense strand
ccagcuaaccaaugucauc

SEQ ID NO: 979326 - RNA, 19 nt, Homo sapiens
  misc_RNA (1)...(19): siRNA sense strand
gcugaccacauccaacuca

SEQ ID NO: 979327 - RNA, 19 nt, Homo sapiens
  misc_RNA (1)...(19): siRNA sense strand
gagcgugacaaacaucucu

SEQ ID NO: 979328 - RNA, 19 nt, Homo sapiens
  misc_RNA (1)...(19): siRNA sense strand
ggggcuaccucucuccaaa

SEQ ID NO: 979329 - RNA, 19 nt, Homo sapiens
  misc_RNA (1)...(19): siRNA sense strand
gccgaucucugugccucaa

SEQ ID NO: 979330 - RNA, 19 nt, Homo sapiens
  misc_RNA (1)...(19): siRNA sense strand
ccucuuggacuaugugauc

SEQ ID NO: 979331 - RNA, 19 nt, Homo sapiens
  misc_RNA (1)...(19): siRNA sense strand
aaaaggagcugggaagaac

SEQ ID NO: 979332 - RNA, 19 nt, Homo sapiens
  misc_RNA (1)...(19): siRNA sense strand
gggacuuaucagcuacuua

SEQ ID NO: 979333 - RNA, 19 nt, Homo sapiens
  misc_RNA (1)...(19): siRNA sense strand
ccuggugcgucgugagaau

SEQ ID NO: 979334 - RNA, 19 nt, Homo sapiens
  misc_RNA (1)...(19): siRNA sense strand
ugaccacauccaacucauu

SEQ ID NO: 979335 - RNA, 19 nt, Homo sapiens
  misc_RNA (1)...(19): siRNA sense strand
ggaauacaccaaacaauua

SEQ ID NO: 979336 - RNA, 19 nt, Homo sapiens
  misc_RNA (1)...(19): siRNA sense strand
gagaagaacuggaagaauc

SEQ ID NO: 979337 - RNA, 19 nt, Homo sapiens
  misc_RNA (1)...(19): siRNA sense strand
ccaaagcagugucauuuaa

SEQ ID NO: 979338 - RNA, 19 nt, Homo sapiens
  misc_RNA (1)...(19): siRNA sense strand
gaagaaaugcuacagguuu

SEQ ID NO: 979339 - RNA, 19 nt, Homo sapiens
  misc_RNA (1)...(19): siRNA sense strand
gcaagcaacugcggcauuu

SEQ ID NO: 979340 - RNA, 19 nt, Homo sapiens
  misc_RNA (1)...(19): siRNA sense strand
gaaaggaggagaagaaugu

SEQ ID NO: 979341 - RNA, 19 nt, Homo sapiens
  misc_RNA (1)...(19): siRNA sense strand
caaaacagaugaagcauuu

SEQ ID NO: 979342 - RNA, 19 nt, Homo sapiens
  misc_RNA (1)...(19): siRNA sense strand
gauggaagaugaaugugaa

SEQ ID NO: 979343 - RNA, 19 nt, Homo sapiens
  misc_RNA (1)...(19): siRNA sense strand
caagaaacguugaagagau

SEQ ID NO: 979344 - RNA, 19 nt, Homo sapiens
  misc_RNA (1)...(19): siRNA sense strand
ggaugacucucuuuggaaa

SEQ ID NO: 979345 - RNA, 19 nt, Homo sapiens
  misc_RNA (1)...(19): siRNA sense strand
gcagugucauuuaauaaga

SEQ ID NO: 979346 - RNA, 19 nt, Homo sapiens
  misc_RNA (1)...(19): siRNA sense strand
gaacaucagugccaaaaga

SEQ ID NO: 979347 - RNA, 19 nt, Homo sapiens
  misc_RNA (1)...(19): siRNA sense strand
ccacugaacuaccagauuc

SEQ ID NO: 979348 - RNA, 19 nt, Homo sapiens
  misc_RNA (1)...(19): siRNA sense strand
ggaaaggaacgcagacaaa

SEQ ID NO: 979349 - RNA, 19 nt, Homo sapiens
  misc_RNA (1)...(19): siRNA sense strand
gaagaaaccauucccaaag

SEQ ID NO: 979350 - RNA, 19 nt, Homo sapiens
  misc_RNA (1)...(19): siRNA sense strand
ggagaauuauauugucuug

SEQ ID NO: 979351 - RNA, 19 nt, Homo sapiens
  misc_RNA (1)...(19): siRNA sense strand
ggaaaccacugaacuacca

SEQ ID NO: 979352 - RNA, 19 nt, Homo sapiens
  misc_RNA (1)...(19): siRNA sense strand
acaagcagauugagaagaa

SEQ ID NO: 979353 - RNA, 19 nt, Homo sapiens
  misc_RNA (1)...(19): siRNA sense strand
caaaauauauccuggaaga

SEQ ID NO: 979354 - RNA, 19 nt, Homo sapiens
  misc_RNA (1)...(19): siRNA sense strand
uagcagaguugauggaaga

SEQ ID NO: 979355 - RNA, 19 nt, Homo sapiens
  misc_RNA (1)...(19): siRNA sense strand
agaugaaugugaagaagua

SEQ ID NO: 979356 - RNA, 19 nt, Homo sapiens
  misc_RNA (1)...(19): siRNA sense strand
gaagaugaaugugaagaag

SEQ ID NO: 979357 - RNA, 19 nt, Homo sapiens
  misc_RNA (1)...(19): siRNA sense strand
gagagccacuccagagcua

SEQ ID NO: 979358 - RNA, 19 nt, Homo sapiens
  misc_RNA (1)...(19): siRNA sense strand
caacuuggcagauugcauu

SEQ ID NO: 979359 - RNA, 19 nt, Homo sapiens
  misc_RNA (1)...(19): siRNA sense strand
ugaugaauauccuccagua

SEQ ID NO: 979360 - RNA, 19 nt, Homo sapiens
  misc_RNA (1)...(19): siRNA sense strand
ggaagaagaacaagcaauc

SEQ ID NO: 979361 - RNA, 19 nt, Homo sapiens
  misc_RNA (1)...(19): siRNA sense strand
cuuacgaccuguuagauaa

SEQ ID NO: 979362 - RNA, 19 nt, Homo sapiens
  misc_RNA (1)...(19): siRNA sense strand
gaauauccuccaguacuua

SEQ ID NO: 979363 - RNA, 19 nt, Homo sapiens
  misc_RNA (1)...(19): siRNA sense strand
aagaaacguugaagagauu

SEQ ID NO: 979364 - RNA, 19 nt, Homo sapiens
  misc_RNA (1)...(19): siRNA sense strand
gagcucaccucccaucagu

SEQ ID NO: 979365 - RNA, 19 nt, Homo sapiens
  misc_RNA (1)...(19): siRNA sense strand
uugaagagauugugguaaa

SEQ ID NO: 979366 - RNA, 19 nt, Homo sapiens
  misc_RNA (1)...(19): siRNA sense strand
gacaauaguuacccguuuc

SEQ ID NO: 979367 - RNA, 19 nt, Homo sapiens
  misc_RNA (1)...(19): siRNA sense strand
gugaagaaguagaacauca

SEQ ID NO: 979368 - RNA, 19 nt, Homo sapiens
  misc_RNA (1)...(19): siRNA sense strand
gcggaugacucucuuugga

SEQ ID NO: 979369 - RNA, 19 nt, Homo sapiens
  misc_RNA (1)...(19): siRNA sense strand
gaagcgcgcugcugugcau

SEQ ID NO: 979370 - RNA, 19 nt, Homo sapiens
  misc_RNA (1)...(19): siRNA sense strand
gaauauuuccggauaaagu

SEQ ID NO: 979371 - RNA, 19 nt, Homo sapiens
  misc_RNA (1)...(19): siRNA sense strand
cagaguugauggaagauga

SEQ ID NO: 979372 - RNA, 19 nt, Homo sapiens
  misc_RNA (1)...(19): siRNA sense strand
gcacugcugugaaacugau

SEQ ID NO: 979373 - RNA, 19 nt, Homo sapiens
  misc_RNA (1)...(19): siRNA sense strand
uggaagaagacaauaguua

SEQ ID NO: 979374 - RNA, 19 nt, Homo sapiens
  misc_RNA (1)...(19): siRNA sense strand
gggcacuguugcuggaaua

SEQ ID NO: 979375 - RNA, 19 nt, Homo sapiens
  misc_RNA (1)...(19): siRNA sense strand
ggaagaugaaugugaagaa

SEQ ID NO: 979376 - RNA, 19 nt, Homo sapiens
  misc_RNA (1)...(19): siRNA sense strand
ugaauauccuccaguacuu

SEQ ID NO: 979377 - RNA, 19 nt, Homo sapiens
  misc_RNA (1)...(19): siRNA sense strand
gagaaauuccucuggauuc

SEQ ID NO: 979378 - RNA, 19 nt, Homo sapiens
  misc_RNA (1)...(19): siRNA sense strand
agacaauaguuacccguuu

SEQ ID NO: 979379 - RNA, 19 nt, Homo sapiens
  misc_RNA (1)...(19): siRNA sense strand
cacuguugcuggaauauuu

SEQ ID NO: 979380 - RNA, 19 nt, Homo sapiens
  misc_RNA (1)...(19): siRNA sense strand
ucgauuugcugcuuugauu

SEQ ID NO: 979381 - RNA, 19 nt, Homo sapiens
  misc_RNA (1)...(19): siRNA sense strand
uaucauugacugucuagua

SEQ ID NO: 979382 - RNA, 19 nt, Homo sapiens
  misc_RNA (1)...(19): siRNA sense strand
ucacauggguccguuuaug

SEQ ID NO: 979383 - RNA, 19 nt, Homo sapiens
  misc_RNA (1)...(19): siRNA sense strand
ggaagaagacaauaguuac

SEQ ID NO: 979384 - RNA, 19 nt, Homo sapiens
  misc_RNA (1)...(19): siRNA sense strand
gaagaacaagcaaucaaca

SEQ ID NO: 979385 - RNA, 19 nt, Homo sapiens
  misc_RNA (1)...(19): siRNA sense strand
gcuaauauccgucucacau

SEQ ID NO: 979386 - RNA, 19 nt, Homo sapiens
  misc_RNA (1)...(19): siRNA sense strand
aaacuuacaagcagauuga

SEQ ID NO: 979387 - RNA, 19 nt, Homo sapiens
  misc_RNA (1)...(19): siRNA sense strand
agaagcagacacugaauuu

SEQ ID NO: 979388 - RNA, 19 nt, Homo sapiens
  misc_RNA (1)...(19): siRNA sense strand
ccaaaggacagguuguuga

SEQ ID NO: 979389 - RNA, 19 nt, Homo sapiens
  misc_RNA (1)...(19): siRNA sense strand
ugucucagcuccugucuuc

SEQ ID NO: 979390 - RNA, 19 nt, Homo sapiens
  misc_RNA (1)...(19): siRNA sense strand
gaagaagaacaagcaauca

SEQ ID NO: 979391 - RNA, 19 nt, Homo sapiens
  misc_RNA (1)...(19): siRNA sense strand
gcagauugcauugcugaaa

SEQ ID NO: 979392 - RNA, 19 nt, Homo sapiens
  misc_RNA (1)...(19): siRNA sense strand
agacagcguuguauaccuu

SEQ ID NO: 979393 - RNA, 19 nt, Homo sapiens
  misc_RNA (1)...(19): siRNA sense strand
agacagacagcguuguaua

SEQ ID NO: 979394 - RNA, 19 nt, Homo sapiens
  misc_RNA (1)...(19): siRNA sense strand
uaaagcuuacgaccuguua

SEQ ID NO: 979395 - RNA, 19 nt, Homo sapiens
  misc_RNA (1)...(19): siRNA sense strand
gcgccuagaugauacuuac

SEQ ID NO: 979396 - RNA, 19 nt, Homo sapiens
  misc_RNA (1)...(19): siRNA sense strand
gaugaugccucugguggau

SEQ ID NO: 979397 - RNA, 19 nt, Homo sapiens
  misc_RNA (1)...(19): siRNA sense strand
ggacagguuguugacauuu

SEQ ID NO: 979398 - RNA, 19 nt, Homo sapiens
  misc_RNA (1)...(19): siRNA sense strand
ugagaacgaucuggaggaa

SEQ ID NO: 979399 - RNA, 19 nt, Homo sapiens
  misc_RNA (1)...(19): siRNA sense strand
gaacuggaagaaucacaug

SEQ ID NO: 979400 - RNA, 19 nt, Homo sapiens
  misc_RNA (1)...(19): siRNA sense strand
gcuuacgaccuguuagaua

SEQ ID NO: 979401 - RNA, 19 nt, Homo sapiens
  misc_RNA (1)...(19): siRNA sense strand
agagaaaggaggagaagaa

SEQ ID NO: 979402 - RNA, 19 nt, Homo sapiens
  misc_RNA (1)...(19): siRNA sense strand
agaacgaucuggaggaagu

SEQ ID NO: 979403 - RNA, 19 nt, Homo sapiens
  misc_RNA (1)...(19): siRNA sense strand
gcuccugucuuccaaugau

SEQ ID NO: 979404 - RNA, 19 nt, Homo sapiens
  misc_RNA (1)...(19): siRNA sense strand
gaguggugguccugagauu

SEQ ID NO: 979405 - RNA, 19 nt, Homo sapiens
  misc_RNA (1)...(19): siRNA sense strand
caucagauacaaagcuuga

SEQ ID NO: 979406 - RNA, 19 nt, Homo sapiens
  misc_RNA (1)...(19): siRNA sense strand
aauauauccuggaagaaga

SEQ ID NO: 979407 - RNA, 19 nt, Homo sapiens
  misc_RNA (1)...(19): siRNA sense strand
gaaaggaacgcagacaaac

SEQ ID NO: 979408 - RNA, 19 nt, Homo sapiens
  misc_RNA (1)...(19): siRNA sense strand
agaagaaaccauucccaaa

SEQ ID NO: 979409 - RNA, 19 nt, Homo sapiens
  misc_RNA (1)...(19): siRNA sense strand
gcccauccuuguucaacuu

SEQ ID NO: 979410 - RNA, 19 nt, Homo sapiens
  misc_RNA (1)...(19): siRNA sense strand
gcaaaauacccaaagauau

SEQ ID NO: 979411 - RNA, 19 nt, Homo sapiens
  misc_RNA (1)...(19): siRNA sense strand
gacacuggcuaccacacuu

SEQ ID NO: 979412 - RNA, 19 nt, Homo sapiens
  misc_RNA (1)...(19): siRNA sense strand
uaauauccgucucacaucu

SEQ ID NO: 979413 - RNA, 19 nt, Homo sapiens
  misc_RNA (1)...(19): siRNA sense strand
caaagcagugucauuuaau

SEQ ID NO: 979414 - RNA, 19 nt, Homo sapiens
  misc_RNA (1)...(19): siRNA sense strand
auaguuacccguuuccuaa

SEQ ID NO: 979415 - RNA, 19 nt, Homo sapiens
  misc_RNA (1)...(19): siRNA sense strand
ugacaacaaugaagaacac

SEQ ID NO: 979416 - RNA, 19 nt, Homo sapiens
  misc_RNA (1)...(19): siRNA sense strand
gacauucauuccugugauc

SEQ ID NO: 979417 - RNA, 19 nt, Homo sapiens
  misc_RNA (1)...(19): siRNA sense strand
gaagaaguagaacaucagu

SEQ ID NO: 979418 - RNA, 19 nt, Homo sapiens
  misc_RNA (1)...(19): siRNA sense strand
gagcccagcacucugagaa

SEQ ID NO: 979419 - RNA, 19 nt, Homo sapiens
  misc_RNA (1)...(19): siRNA sense strand
cacaguccauggaaaggaa

SEQ ID NO: 979420 - RNA, 19 nt, Homo sapiens
  misc_RNA (1)...(19): siRNA sense strand
uaccaugcaucgcacaguu

SEQ ID NO: 979421 - RNA, 19 nt, Homo sapiens
  misc_RNA (1)...(19): siRNA sense strand
gaaaaugacccugaaaagu

SEQ ID NO: 979422 - RNA, 19 nt, Homo sapiens
  misc_RNA (1)...(19): siRNA sense strand
ucccaucagucucagcuaa

SEQ ID NO: 979423 - RNA, 19 nt, Homo sapiens
  misc_RNA (1)...(19): siRNA sense strand
ggugauucaucuggagaaa

SEQ ID NO: 979424 - RNA, 19 nt, Homo sapiens
  misc_RNA (1)...(19): siRNA sense strand
ugaaucacaagaagaaaug

SEQ ID NO: 979425 - RNA, 19 nt, Homo sapiens
  misc_RNA (1)...(19): siRNA sense strand
gagcaggagccuugaugau

SEQ ID NO: 979426 - RNA, 19 nt, Homo sapiens
  misc_RNA (1)...(19): siRNA sense strand
gagagcaggagccuugaug

SEQ ID NO: 979427 - RNA, 19 nt, Homo sapiens
  misc_RNA (1)...(19): siRNA sense strand
gagaaaggaggagaagaau

SEQ ID NO: 979428 - RNA, 19 nt, Homo sapiens
  misc_RNA (1)...(19): siRNA sense strand
uacacugggugcagagaaa

SEQ ID NO: 979429 - RNA, 19 nt, Homo sapiens
  misc_RNA (1)...(19): siRNA sense strand
ccaaaagacuauucagcaa

SEQ ID NO: 979430 - RNA, 19 nt, Homo sapiens
  misc_RNA (1)...(19): siRNA sense strand
guuauucccgcacuuauuc

SEQ ID NO: 979431 - RNA, 19 nt, Homo sapiens
  misc_RNA (1)...(19): siRNA sense strand
gcagaagguuguggagacu

SEQ ID NO: 979432 - RNA, 19 nt, Homo sapiens
  misc_RNA (1)...(19): siRNA sense strand
auaacaagcugcagcaaaa

SEQ ID NO: 979433 - RNA, 19 nt, Homo sapiens
  misc_RNA (1)...(19): siRNA sense strand
ggcaaaauacccaaagaua

SEQ ID NO: 979434 - RNA, 19 nt, Homo sapiens
  misc_RNA (1)...(19): siRNA sense strand
cccaaagcagugucauuua

SEQ ID NO: 979435 - RNA, 19 nt, Homo sapiens
  misc_RNA (1)...(19): siRNA sense strand
ggacauacuuccaacaaua

SEQ ID NO: 979436 - RNA, 19 nt, Homo sapiens
  misc_RNA (1)...(19): siRNA sense strand
caagacagcugccaaauau

SEQ ID NO: 979437 - RNA, 19 nt, Homo sapiens
  misc_RNA (1)...(19): siRNA sense strand
ggaaagacaucgaucuaaa

SEQ ID NO: 979438 - RNA, 19 nt, Homo sapiens
  misc_RNA (1)...(19): siRNA sense strand
ggaggaagcagaaagaaua

SEQ ID NO: 979439 - RNA, 19 nt, Homo sapiens
  misc_RNA (1)...(19): siRNA sense strand
gcacaaggcuggagauugg

SEQ ID NO: 979440 - RNA, 19 nt, Homo sapiens
  misc_RNA (1)...(19): siRNA sense strand
aagaauagcuagagaagaa

SEQ ID NO: 979441 - RNA, 19 nt, Homo sapiens
  misc_RNA (1)...(19): siRNA sense strand
gggaaacauucuugucaua

SEQ ID NO: 979442 - RNA, 19 nt, Homo sapiens
  misc_RNA (1)...(19): siRNA sense strand
gagauuauguugcaaaugg

SEQ ID NO: 979443 - RNA, 19 nt, Homo sapiens
  misc_RNA (1)...(19): siRNA sense strand
gaaaaucgcugugauauca

SEQ ID NO: 979444 - RNA, 19 nt, Homo sapiens
  misc_RNA (1)...(19): siRNA sense strand
ccaagaaauucaucacaaa

SEQ ID NO: 979445 - RNA, 19 nt, Homo sapiens
  misc_RNA (1)...(19): siRNA sense strand
ggaauacagugucgagaug

SEQ ID NO: 979446 - RNA, 19 nt, Homo sapiens
  misc_RNA (1)...(19): siRNA sense strand
aaagaucggcuacagauua

SEQ ID NO: 979447 - RNA, 19 nt, Homo sapiens
  misc_RNA (1)...(19): siRNA sense strand
aaagagacauugaacaguu

SEQ ID NO: 979448 - RNA, 19 nt, Homo sapiens
  misc_RNA (1)...(19): siRNA sense strand
uaagugacauguugaccua

SEQ ID NO: 979449 - RNA, 19 nt, Homo sapiens
  misc_RNA (1)...(19): siRNA sense strand
gagagaagccucacaaagu

SEQ ID NO: 979450 - RNA, 19 nt, Homo sapiens
  misc_RNA (1)...(19): siRNA sense strand
cuagugaccugguugaauu

SEQ ID NO: 979451 - RNA, 19 nt, Homo sapiens
  misc_RNA (1)...(19): siRNA sense strand
uacgagagcugcaugugua

SEQ ID NO: 979452 - RNA, 19 nt, Homo sapiens
  misc_RNA (1)...(19): siRNA sense strand
gaaagacaucgaucuaaau

SEQ ID NO: 979453 - RNA, 19 nt, Homo sapiens
  misc_RNA (1)...(19): siRNA sense strand
gcagaguguuuaugaagau

SEQ ID NO: 979454 - RNA, 19 nt, Homo sapiens
  misc_RNA (1)...(19): siRNA sense strand
uggugaagaugcugaaaua

SEQ ID NO: 979455 - RNA, 19 nt, Homo sapiens
  misc_RNA (1)...(19): siRNA sense strand
ccaagacagcugccaaaua

SEQ ID NO: 979456 - RNA, 19 nt, Homo sapiens
  misc_RNA (1)...(19): siRNA sense strand
aaaguggaguuuauuguga

SEQ ID NO: 979457 - RNA, 19 nt, Homo sapiens
  misc_RNA (1)...(19): siRNA sense strand
gacaagacaccgaauagaa

SEQ ID NO: 979458 - RNA, 19 nt, Homo sapiens
  misc_RNA (1)...(19): siRNA sense strand
ucaggaagauauaagaguu

SEQ ID NO: 979459 - RNA, 19 nt, Homo sapiens
  misc_RNA (1)...(19): siRNA sense strand
gaacaugggucugggaaaa

SEQ ID NO: 979460 - RNA, 19 nt, Homo sapiens
  misc_RNA (1)...(19): siRNA sense strand
agacaucgaucuaaauaag

SEQ ID NO: 979461 - RNA, 19 nt, Homo sapiens
  misc_RNA (1)...(19): siRNA sense strand
gaaagaauagcuagagaag

SEQ ID NO: 979462 - RNA, 19 nt, Homo sapiens
  misc_RNA (1)...(19): siRNA sense strand
ugaaagaccucggaauaca

SEQ ID NO: 979463 - RNA, 19 nt, Homo sapiens
  misc_RNA (1)...(19): siRNA sense strand
ccagaagaauacagagauu

SEQ ID NO: 979464 - RNA, 19 nt, Homo sapiens
  misc_RNA (1)...(19): siRNA sense strand
gcagucaaguauucugaga

SEQ ID NO: 979465 - RNA, 19 nt, Homo sapiens
  misc_RNA (1)...(19): siRNA sense strand
ggaaaucaggaagauauaa

SEQ ID NO: 979466 - RNA, 19 nt, Homo sapiens
  misc_RNA (1)...(19): siRNA sense strand
aaugaaagaccucggaaua

SEQ ID NO: 979467 - RNA, 19 nt, Homo sapiens
  misc_RNA (1)...(19): siRNA sense strand
guaaggagagauuauguug

SEQ ID NO: 979468 - RNA, 19 nt, Homo sapiens
  misc_RNA (1)...(19): siRNA sense strand
agagaagccucacaaagug

SEQ ID NO: 979469 - RNA, 19 nt, Homo sapiens
  misc_RNA (1)...(19): siRNA sense strand
cuacuaaauuucagcauca

SEQ ID NO: 979470 - RNA, 19 nt, Homo sapiens
  misc_RNA (1)...(19): siRNA sense strand
gagagauuauguugcaaau

SEQ ID NO: 979471 - RNA, 19 nt, Homo sapiens
  misc_RNA (1)...(19): siRNA sense strand
caccaggaauuauuauaga

SEQ ID NO: 979472 - RNA, 19 nt, Homo sapiens
  misc_RNA (1)...(19): siRNA sense strand
ccgaugggcugaaacucua

SEQ ID NO: 979473 - RNA, 19 nt, Homo sapiens
  misc_RNA (1)...(19): siRNA sense strand
gauaugacccuuuccuaca

SEQ ID NO: 979474 - RNA, 19 nt, Homo sapiens
  misc_RNA (1)...(19): siRNA sense strand
gcaccaggaauuauuauag

SEQ ID NO: 979475 - RNA, 19 nt, Homo sapiens
  misc_RNA (1)...(19): siRNA sense strand
cagaaagaauagcuagaga

SEQ ID NO: 979476 - RNA, 19 nt, Homo sapiens
  misc_RNA (1)...(19): siRNA sense strand
agacccagaucaagacauu

SEQ ID NO: 979477 - RNA, 19 nt, Homo sapiens
  misc_RNA (1)...(19): siRNA sense strand
ggagagauuauguugcaaa

SEQ ID NO: 979478 - RNA, 19 nt, Homo sapiens
  misc_RNA (1)...(19): siRNA sense strand
ggccauaccagguugaauu

SEQ ID NO: 979479 - RNA, 19 nt, Homo sapiens
  misc_RNA (1)...(19): siRNA sense strand
gcaaaugguggcugggaaa

SEQ ID NO: 979480 - RNA, 19 nt, Homo sapiens
  misc_RNA (1)...(19): siRNA sense strand
cacaaaguguauuggaauu

SEQ ID NO: 979481 - RNA, 19 nt, Homo sapiens
  misc_RNA (1)...(19): siRNA sense strand
gaaagaucggcuacagauu

SEQ ID NO: 979482 - RNA, 19 nt, Homo sapiens
  misc_RNA (1)...(19): siRNA sense strand
gccgggauccuacuaaauu

SEQ ID NO: 979483 - RNA, 19 nt, Homo sapiens
  misc_RNA (1)...(19): siRNA sense strand
uuaaagugguggcccauau

SEQ ID NO: 979484 - RNA, 19 nt, Homo sapiens
  misc_RNA (1)...(19): siRNA sense strand
caaaguguauuggaauuac

SEQ ID NO: 979485 - RNA, 19 nt, Homo sapiens
  misc_RNA (1)...(19): siRNA sense strand
gaaacauucuugucauacg

SEQ ID NO: 979486 - RNA, 19 nt, Homo sapiens
  misc_RNA (1)...(19): siRNA sense strand
gaaaucaggaagauauaag

SEQ ID NO: 979487 - RNA, 19 nt, Homo sapiens
  misc_RNA (1)...(19): siRNA sense strand
gggcugaaacucuauccua

SEQ ID NO: 979488 - RNA, 19 nt, Homo sapiens
  misc_RNA (1)...(19): siRNA sense strand
ugugauggguggaacguuu

SEQ ID NO: 979489 - RNA, 19 nt, Homo sapiens
  misc_RNA (1)...(19): siRNA sense strand
gggaaagacaucgaucuaa

SEQ ID NO: 979490 - RNA, 19 nt, Homo sapiens
  misc_RNA (1)...(19): siRNA sense strand
gagcugaugaugcugacua

SEQ ID NO: 979491 - RNA, 19 nt, Homo sapiens
  misc_RNA (1)...(19): siRNA sense strand
guacagagggauauuccaa

SEQ ID NO: 979492 - RNA, 19 nt, Homo sapiens
  misc_RNA (1)...(19): siRNA sense strand
cagaagaauacagagauua

SEQ ID NO: 979493 - RNA, 19 nt, Homo sapiens
  misc_RNA (1)...(19): siRNA sense strand
gcccguacauggugaagau

SEQ ID NO: 979494 - RNA, 19 nt, Homo sapiens
  misc_RNA (1)...(19): siRNA sense strand
gacuauaggagauguuauu

SEQ ID NO: 979495 - RNA, 19 nt, Homo sapiens
  misc_RNA (1)...(19): siRNA sense strand
uuaguuagcucaggaguag

SEQ ID NO: 979496 - RNA, 19 nt, Homo sapiens
  misc_RNA (1)...(19): siRNA sense strand
ggccaaagauuccgguuuu

SEQ ID NO: 979497 - RNA, 19 nt, Homo sapiens
  misc_RNA (1)...(19): siRNA sense strand
cauuucaccuggccaaaga

SEQ ID NO: 979498 - RNA, 19 nt, Homo sapiens
  misc_RNA (1)...(19): siRNA sense strand
acagagggauauuccaaug

SEQ ID NO: 979499 - RNA, 19 nt, Homo sapiens
  misc_RNA (1)...(19): siRNA sense strand
gaauugguaaggagagauu

SEQ ID NO: 979500 - RNA, 19 nt, Homo sapiens
  misc_RNA (1)...(19): siRNA sense strand
gaagauguggcuagagaca

SEQ ID NO: 979501 - RNA, 19 nt, Homo sapiens
  misc_RNA (1)...(19): siRNA sense strand
uuuaugagcuuuggaaauc

SEQ ID NO: 979502 - RNA, 19 nt, Homo sapiens
  misc_RNA (1)...(19): siRNA sense strand
gaaagagacauugaacagu

SEQ ID NO: 979503 - RNA, 19 nt, Homo sapiens
  misc_RNA (1)...(19): siRNA sense strand
aaggagagauuauguugca

SEQ ID NO: 979504 - RNA, 19 nt, Homo sapiens
  misc_RNA (1)...(19): siRNA sense strand
gaagcagaaagaauagcua

SEQ ID NO: 979505 - RNA, 19 nt, Homo sapiens
  misc_RNA (1)...(19): siRNA sense strand
acgcaaguguucagaagaa

SEQ ID NO: 979506 - RNA, 19 nt, Homo sapiens
  misc_RNA (1)...(19): siRNA sense strand
cagaacugcuagugggauu

SEQ ID NO: 979507 - RNA, 19 nt, Homo sapiens
  misc_RNA (1)...(19): siRNA sense strand
cagccgggauccuacuaaa

SEQ ID NO: 979508 - RNA, 19 nt, Homo sapiens
  misc_RNA (1)...(19): siRNA sense strand
ugauuggccuccuacgauu

SEQ ID NO: 979509 - RNA, 19 nt, Homo sapiens
  misc_RNA (1)...(19): siRNA sense strand
uccaagaaauucaucacaa

SEQ ID NO: 979510 - RNA, 19 nt, Homo sapiens
  misc_RNA (1)...(19): siRNA sense strand
caggaagauauaagaguua

SEQ ID NO: 979511 - RNA, 19 nt, Homo sapiens
  misc_RNA (1)...(19): siRNA sense strand
aaacgugggacuagaaaga

SEQ ID NO: 979512 - RNA, 19 nt, Homo sapiens
  misc_RNA (1)...(19): siRNA sense strand
ggcagugugugagucauuu

SEQ ID NO: 979513 - RNA, 19 nt, Homo sapiens
  misc_RNA (1)...(19): siRNA sense strand
gacauacuuccaacaauau

SEQ ID NO: 979514 - RNA, 19 nt, Homo sapiens
  misc_RNA (1)...(19): siRNA sense strand
gcagaaagaauagcuagag

SEQ ID NO: 979515 - RNA, 19 nt, Homo sapiens
  misc_RNA (1)...(19): siRNA sense strand
gauggaggaagcagaaaga

SEQ ID NO: 979516 - RNA, 19 nt, Homo sapiens
  misc_RNA (1)...(19): siRNA sense strand
ccgggauccuacuaaauuu

SEQ ID NO: 979517 - RNA, 19 nt, Homo sapiens
  misc_RNA (1)...(19): siRNA sense strand
aaacauucuugucauacga

SEQ ID NO: 979518 - RNA, 19 nt, Homo sapiens
  misc_RNA (1)...(19): siRNA sense strand
agucaaguauucugagaga

SEQ ID NO: 979519 - RNA, 19 nt, Homo sapiens
  misc_RNA (1)...(19): siRNA sense strand
gaaauucaucacaaaguac

SEQ ID NO: 979520 - RNA, 19 nt, Homo sapiens
  misc_RNA (1)...(19): siRNA sense strand
gaaggcagugugugaguca

SEQ ID NO: 979521 - RNA, 19 nt, Homo sapiens
  misc_RNA (1)...(19): siRNA sense strand
ucacaaaguguauuggaau

SEQ ID NO: 979522 - RNA, 19 nt, Homo sapiens
  misc_RNA (1)...(19): siRNA sense strand
gauuggccuccuacgauua

SEQ ID NO: 979523 - RNA, 19 nt, Homo sapiens
  misc_RNA (1)...(19): siRNA sense strand
ggacuagaaagagacauug

SEQ ID NO: 979524 - RNA, 19 nt, Homo sapiens
  misc_RNA (1)...(19): siRNA sense strand
uaaaacaacuuggucauag

SEQ ID NO: 979525 - RNA, 19 nt, Homo sapiens
  misc_RNA (1)...(19): siRNA sense strand
agaaagaucggcuacagau

SEQ ID NO: 979526 - RNA, 19 nt, Homo sapiens
  misc_RNA (1)...(19): siRNA sense strand
gguaaggagagauuauguu

SEQ ID NO: 979527 - RNA, 19 nt, Homo sapiens
  misc_RNA (1)...(19): siRNA sense strand
ggugcagaguguuuaugaa

SEQ ID NO: 979528 - RNA, 19 nt, Homo sapiens
  misc_RNA (1)...(19): siRNA sense strand
gcaugaagcgacauuuaag

SEQ ID NO: 979529 - RNA, 19 nt, Homo sapiens
  misc_RNA (1)...(19): siRNA sense strand
caaccuccaugagagcuau

SEQ ID NO: 979530 - RNA, 19 nt, Homo sapiens
  misc_RNA (1)...(19): siRNA sense strand
gaugcugacuauaggagau

SEQ ID NO: 979531 - RNA, 19 nt, Homo sapiens
  misc_RNA (1)...(19): siRNA sense strand
ugaagcgacauuuaaguga

SEQ ID NO: 979532 - RNA, 19 nt, Homo sapiens
  misc_RNA (1)...(19): siRNA sense strand
gaaugaaagaccucggaau

SEQ ID NO: 979533 - RNA, 19 nt, Homo sapiens
  misc_RNA (1)...(19): siRNA sense strand
gcacuugcaagaaugaaag

SEQ ID NO: 979534 - RNA, 19 nt, Homo sapiens
  misc_RNA (1)...(19): siRNA sense strand
augaagauguggcuagaga

SEQ ID NO: 979535 - RNA, 19 nt, Homo sapiens
  misc_RNA (1)...(19): siRNA sense strand
ugaaagaacugaagcauuu

SEQ ID NO: 979536 - RNA, 19 nt, Homo sapiens
  misc_RNA (1)...(19): siRNA sense strand
ggagagaaacugauauuua

SEQ ID NO: 979537 - RNA, 19 nt, Homo sapiens
  misc_RNA (1)...(19): siRNA sense strand
aagcagaccuuacggaaua

SEQ ID NO: 979538 - RNA, 19 nt, Homo sapiens
  misc_RNA (1)...(19): siRNA sense strand
gcuuggaggucauuaauaa

SEQ ID NO: 979539 - RNA, 19 nt, Homo sapiens
  misc_RNA (1)...(19): siRNA sense strand
ugacaucacuagaucaauu

SEQ ID NO: 979540 - RNA, 19 nt, Homo sapiens
  misc_RNA (1)...(19): siRNA sense strand
gcucugcaguuugguauua

SEQ ID NO: 979541 - RNA, 19 nt, Homo sapiens
  misc_RNA (1)...(19): siRNA sense strand
gcaugugcauccagucuaa

SEQ ID NO: 979542 - RNA, 19 nt, Homo sapiens
  misc_RNA (1)...(19): siRNA sense strand
ugacaaagcugaaguuagc

SEQ ID NO: 979543 - RNA, 19 nt, Homo sapiens
  misc_RNA (1)...(19): siRNA sense strand
gcaagcaccuagugaucuu

SEQ ID NO: 979544 - RNA, 19 nt, Homo sapiens
  misc_RNA (1)...(19): siRNA sense strand
gagauaagggcacacagua

SEQ ID NO: 979545 - RNA, 19 nt, Homo sapiens
  misc_RNA (1)...(19): siRNA sense strand
ggaacaagaagaacauuau

SEQ ID NO: 979546 - RNA, 19 nt, Homo sapiens
  misc_RNA (1)...(19): siRNA sense strand
ugaagaugaugaacaagaa

SEQ ID NO: 979547 - RNA, 19 nt, Homo sapiens
  misc_RNA (1)...(19): siRNA sense strand
guaaagaaggacugucuaa

SEQ ID NO: 979548 - RNA, 19 nt, Homo sapiens
  misc_RNA (1)...(19): siRNA sense strand
ggagaggucuugauguuuu

SEQ ID NO: 979549 - RNA, 19 nt, Homo sapiens
  misc_RNA (1)...(19): siRNA sense strand
gaaaagcgcugugcugaug

SEQ ID NO: 979550 - RNA, 19 nt, Homo sapiens
  misc_RNA (1)...(19): siRNA sense strand
ugaugaagaugaugaacaa

SEQ ID NO: 979551 - RNA, 19 nt, Homo sapiens
  misc_RNA (1)...(19): siRNA sense strand
cagugaagcuguugguuga

SEQ ID NO: 979552 - RNA, 19 nt, Homo sapiens
  misc_RNA (1)...(19): siRNA sense strand
caagaaagaaggaauguag

SEQ ID NO: 979553 - RNA, 19 nt, Homo sapiens
  misc_RNA (1)...(19): siRNA sense strand
agacgcaucuucauaaaca

SEQ ID NO: 979554 - RNA, 19 nt, Homo sapiens
  misc_RNA (1)...(19): siRNA sense strand
gggccaaacuacccaguga

SEQ ID NO: 979555 - RNA, 19 nt, Homo sapiens
  misc_RNA (1)...(19): siRNA sense strand
gagaugaauugguggaagu

SEQ ID NO: 979556 - RNA, 19 nt, Homo sapiens
  misc_RNA (1)...(19): siRNA sense strand
ucaugaaagugaagaguga

SEQ ID NO: 979557 - RNA, 19 nt, Homo sapiens
  misc_RNA (1)...(19): siRNA sense strand
gauaagggcacacaguaug

SEQ ID NO: 979558 - RNA, 19 nt, Homo sapiens
  misc_RNA (1)...(19): siRNA sense strand
gaaauagagacgcaucuuc

SEQ ID NO: 979559 - RNA, 19 nt, Homo sapiens
  misc_RNA (1)...(19): siRNA sense strand
aagaaggacugucuaaagu

SEQ ID NO: 979560 - RNA, 19 nt, Homo sapiens
  misc_RNA (1)...(19): siRNA sense strand
gacaucacuagaucaauua

SEQ ID NO: 979561 - RNA, 19 nt, Homo sapiens
  misc_RNA (1)...(19): siRNA sense strand
gauuugacauggaagugaa

SEQ ID NO: 979562 - RNA, 19 nt, Homo sapiens
  misc_RNA (1)...(19): siRNA sense strand
ugucuaaagucaagucuau

SEQ ID NO: 979563 - RNA, 19 nt, Homo sapiens
  misc_RNA (1)...(19): siRNA sense strand
caaacuacccagugaguau

SEQ ID NO: 979564 - RNA, 19 nt, Homo sapiens
  misc_RNA (1)...(19): siRNA sense strand
ggaccucucaugaaaguga

SEQ ID NO: 979565 - RNA, 19 nt, Homo sapiens
  misc_RNA (1)...(19): siRNA sense strand
agacaaacgagaugaauug

SEQ ID NO: 979566 - RNA, 19 nt, Homo sapiens
  misc_RNA (1)...(19): siRNA sense strand
gaacaagaagaacauuauc

SEQ ID NO: 979567 - RNA, 19 nt, Homo sapiens
  misc_RNA (1)...(19): siRNA sense strand
uagagacgcaucuucauaa

SEQ ID NO: 979568 - RNA, 19 nt, Homo sapiens
  misc_RNA (1)...(19): siRNA sense strand
gaacuucagggauguuugu

SEQ ID NO: 979569 - RNA, 19 nt, Homo sapiens
  misc_RNA (1)...(19): siRNA sense strand
gaacugaagcauuuguaca

SEQ ID NO: 979570 - RNA, 19 nt, Homo sapiens
  misc_RNA (1)...(19): siRNA sense strand
gguaaagaguauuaucaag

SEQ ID NO: 979571 - RNA, 19 nt, Homo sapiens
  misc_RNA (1)...(19): siRNA sense strand
cuucagggauguuuguauu

SEQ ID NO: 979572 - RNA, 19 nt, Homo sapiens
  misc_RNA (1)...(19): siRNA sense strand
gguguucagucuuuacaau

SEQ ID NO: 979573 - RNA, 19 nt, Homo sapiens
  misc_RNA (1)...(19): siRNA sense strand
aaacaggcauacaggacaa

SEQ ID NO: 979574 - RNA, 19 nt, Homo sapiens
  misc_RNA (1)...(19): siRNA sense strand
caagaagaacauuaucaga

SEQ ID NO: 979575 - RNA, 19 nt, Homo sapiens
  misc_RNA (1)...(19): siRNA sense strand
agagacgcaucuucauaaa

SEQ ID NO: 979576 - RNA, 19 nt, Homo sapiens
  misc_RNA (1)...(19): siRNA sense strand
gucaguaucguucagauuu

SEQ ID NO: 979577 - RNA, 19 nt, Homo sapiens
  misc_RNA (1)...(19): siRNA sense strand
ucugugauguugauaucua

SEQ ID NO: 979578 - RNA, 19 nt, Homo sapiens
  misc_RNA (1)...(19): siRNA sense strand
gaaagugaagagugagaug

SEQ ID NO: 979579 - RNA, 19 nt, Homo sapiens
  misc_RNA (1)...(19): siRNA sense strand
cacacaguaugaacucuuu

SEQ ID NO: 979580 - RNA, 19 nt, Homo sapiens
  misc_RNA (1)...(19): siRNA sense strand
gcuaucagagcaacaaaga

SEQ ID NO: 979581 - RNA, 19 nt, Homo sapiens
  misc_RNA (1)...(19): siRNA sense strand
gcaagaaagaaggaaugua

SEQ ID NO: 979582 - RNA, 19 nt, Homo sapiens
  misc_RNA (1)...(19): siRNA sense strand
uuauguaccuccuggaaug

SEQ ID NO: 979583 - RNA, 19 nt, Homo sapiens
  misc_RNA (1)...(19): siRNA sense strand
uacaagaaaugagugagaa

SEQ ID NO: 979584 - RNA, 19 nt, Homo sapiens
  misc_RNA (1)...(19): siRNA sense strand
ccugugguguucagucuuu

SEQ ID NO: 979585 - RNA, 19 nt, Homo sapiens
  misc_RNA (1)...(19): siRNA sense strand
agggagaggucuugauguu

SEQ ID NO: 979586 - RNA, 19 nt, Homo sapiens
  misc_RNA (1)...(19): siRNA sense strand
uaaagucaagucuauccua

SEQ ID NO: 979587 - RNA, 19 nt, Homo sapiens
  misc_RNA (1)...(19): siRNA sense strand
aaagaaggacugucuaaag

SEQ ID NO: 979588 - RNA, 19 nt, Homo sapiens
  misc_RNA (1)...(19): siRNA sense strand
uaaagaaggacugucuaaa

SEQ ID NO: 979589 - RNA, 19 nt, Homo sapiens
  misc_RNA (1)...(19): siRNA sense strand
agagugagaugauugacau

SEQ ID NO: 979590 - RNA, 19 nt, Homo sapiens
  misc_RNA (1)...(19): siRNA sense strand
gaagaugcggucacugcaa

SEQ ID NO: 979591 - RNA, 19 nt, Homo sapiens
  misc_RNA (1)...(19): siRNA sense strand
agaaaugagugagaagaug

SEQ ID NO: 979592 - RNA, 19 nt, Homo sapiens
  misc_RNA (1)...(19): siRNA sense strand
ccaaauugcccaacuaaaa

SEQ ID NO: 979593 - RNA, 19 nt, Homo sapiens
  misc_RNA (1)...(19): siRNA sense strand
ggaaauagagacgcaucuu

SEQ ID NO: 979594 - RNA, 19 nt, Homo sapiens
  misc_RNA (1)...(19): siRNA sense strand
gaaagaacugaagcauuug

SEQ ID NO: 979595 - RNA, 19 nt, Homo sapiens
  misc_RNA (1)...(19): siRNA sense strand
ucagggauguuuguauuca

SEQ ID NO: 979596 - RNA, 19 nt, Homo sapiens
  misc_RNA (1)...(19): siRNA sense strand
cugaagcauuuguacaauu

SEQ ID NO: 979597 - RNA, 19 nt, Homo sapiens
  misc_RNA (1)...(19): siRNA sense strand
gagcaagcaccuagugauc

SEQ ID NO: 979598 - RNA, 19 nt, Homo sapiens
  misc_RNA (1)...(19): siRNA sense strand
uaaaugcugagccagguaa

SEQ ID NO: 979599 - RNA, 19 nt, Homo sapiens
  misc_RNA (1)...(19): siRNA sense strand
gcacacaguaugaacucuu

SEQ ID NO: 979600 - RNA, 19 nt, Homo sapiens
  misc_RNA (1)...(19): siRNA sense strand
caaagcugaaguuagcaua

SEQ ID NO: 979601 - RNA, 19 nt, Homo sapiens
  misc_RNA (1)...(19): siRNA sense strand
caagaaaugagugagaaga

SEQ ID NO: 979602 - RNA, 19 nt, Homo sapiens
  misc_RNA (1)...(19): siRNA sense strand
aaauagagacgcaucuuca

SEQ ID NO: 979603 - RNA, 19 nt, Homo sapiens
  misc_RNA (1)...(19): siRNA sense strand
gauuuuggcuuuggaauga

SEQ ID NO: 979604 - RNA, 19 nt, Homo sapiens
  misc_RNA (1)...(19): siRNA sense strand
gaagaaaagccaguuagaa

SEQ ID NO: 979605 - RNA, 19 nt, Homo sapiens
  misc_RNA (1)...(19): siRNA sense strand
gaugaauugguggaaguua

SEQ ID NO: 979606 - RNA, 19 nt, Homo sapiens
  misc_RNA (1)...(19): siRNA sense strand
cauggugaccucauuguga

SEQ ID NO: 979607 - RNA, 19 nt, Homo sapiens
  misc_RNA (1)...(19): siRNA sense strand
cuagugaucuuuuagaguu

SEQ ID NO: 979608 - RNA, 19 nt, Homo sapiens
  misc_RNA (1)...(19): siRNA sense strand
ugaauugguggaaguuauu

SEQ ID NO: 979609 - RNA, 19 nt, Homo sapiens
  misc_RNA (1)...(19): siRNA sense strand
auagagacgcaucuucaua

SEQ ID NO: 979610 - RNA, 19 nt, Homo sapiens
  misc_RNA (1)...(19): siRNA sense strand
agucuaaagccaugaauga

SEQ ID NO: 979611 - RNA, 19 nt, Homo sapiens
  misc_RNA (1)...(19): siRNA sense strand
ggaaaauuaugguaaagag

SEQ ID NO: 979612 - RNA, 19 nt, Homo sapiens
  misc_RNA (1)...(19): siRNA sense strand
gaaggaauguaggggcuaa

SEQ ID NO: 979613 - RNA, 19 nt, Homo sapiens
  misc_RNA (1)...(19): siRNA sense strand
ggucuucagggaggaaaua

SEQ ID NO: 979614 - RNA, 19 nt, Homo sapiens
  misc_RNA (1)...(19): siRNA sense strand
cagauuuccugaccauugg

SEQ ID NO: 979615 - RNA, 19 nt, Homo sapiens
  misc_RNA (1)...(19): siRNA sense strand
ugaagagugagaugauuga

SEQ ID NO: 979616 - RNA, 19 nt, Homo sapiens
  misc_RNA (1)...(19): siRNA sense strand
ucaguaucguucagauuuc

SEQ ID NO: 979617 - RNA, 19 nt, Homo sapiens
  misc_RNA (1)...(19): siRNA sense strand
gguaaagaaggacugucua

SEQ ID NO: 979618 - RNA, 19 nt, Homo sapiens
  misc_RNA (1)...(19): siRNA sense strand
uuucuucauucccaaauug

SEQ ID NO: 979619 - RNA, 19 nt, Homo sapiens
  misc_RNA (1)...(19): siRNA sense strand
gcuuugcucugcaguuugg

SEQ ID NO: 979620 - RNA, 19 nt, Homo sapiens
  misc_RNA (1)...(19): siRNA sense strand
ggauuugacauggaaguga

SEQ ID NO: 979621 - RNA, 19 nt, Homo sapiens
  misc_RNA (1)...(19): siRNA sense strand
gggagaggucuugauguuu

SEQ ID NO: 979622 - RNA, 19 nt, Homo sapiens
  misc_RNA (1)...(19): siRNA sense strand
acaccuuggucucauugaa

SEQ ID NO: 979623 - RNA, 19 nt, Homo sapiens
  misc_RNA (1)...(19): siRNA sense strand
caucaagacaagaagauuc

SEQ ID NO: 979624 - RNA, 19 nt, Homo sapiens
  misc_RNA (1)...(19): siRNA sense strand
gugaagagugagaugauug

SEQ ID NO: 979625 - RNA, 19 nt, Homo sapiens
  misc_RNA (1)...(19): siRNA sense strand
ccaaauugacaaagcugaa

SEQ ID NO: 979626 - RNA, 19 nt, Homo sapiens
  misc_RNA (1)...(19): siRNA sense strand
agucugaaacgccaaauug

SEQ ID NO: 979627 - RNA, 19 nt, Homo sapiens
  misc_RNA (1)...(19): siRNA sense strand
gaaaagccaguuagaaaag

SEQ ID NO: 979628 - RNA, 19 nt, Homo sapiens
  misc_RNA (1)...(19): siRNA sense strand
ccaaacuacccagugagua

SEQ ID NO: 979629 - RNA, 19 nt, Homo sapiens
  misc_RNA (1)...(19): siRNA sense strand
guauucaucaagacaagaa

SEQ ID NO: 979630 - RNA, 19 nt, Homo sapiens
  misc_RNA (1)...(19): siRNA sense strand
gggcuuggaggucauuaau

SEQ ID NO: 979631 - RNA, 19 nt, Homo sapiens
  misc_RNA (1)...(19): siRNA sense strand
uugcuuugcucugcaguuu

SEQ ID NO: 979632 - RNA, 19 nt, Homo sapiens
  misc_RNA (1)...(19): siRNA sense strand
ccuagaagaggacugauuc

SEQ ID NO: 979633 - RNA, 19 nt, Homo sapiens
  misc_RNA (1)...(19): siRNA sense strand
gaagaugaugaacaagaag

SEQ ID NO: 979634 - RNA, 19 nt, Homo sapiens
  misc_RNA (1)...(19): siRNA sense strand
gcagaccuuacggaauaua

SEQ ID NO: 979635 - RNA, 19 nt, Homo sapiens
  misc_RNA (1)...(19): siRNA sense strand
gaacugggcaccaccauua

SEQ ID NO: 979636 - RNA, 19 nt, Homo sapiens
  misc_RNA (1)...(19): siRNA sense strand
ugaccaauguggccuauua

SEQ ID NO: 979637 - RNA, 19 nt, Homo sapiens
  misc_RNA (1)...(19): siRNA sense strand
aaggagaucucacugcuua

SEQ ID NO: 979638 - RNA, 19 nt, Homo sapiens
  misc_RNA (1)...(19): siRNA sense strand
ccaagggugugcucauaua

SEQ ID NO: 979639 - RNA, 19 nt, Homo sapiens
  misc_RNA (1)...(19): siRNA sense strand
gaggagagaugcccaagca

SEQ ID NO: 979640 - RNA, 19 nt, Homo sapiens
  misc_RNA (1)...(19): siRNA sense strand
gcaccaccauuaagaaauc

SEQ ID NO: 979641 - RNA, 19 nt, Homo sapiens
  misc_RNA (1)...(19): siRNA sense strand
uaacugugccuaugucaaa

SEQ ID NO: 979642 - RNA, 19 nt, Homo sapiens
  misc_RNA (1)...(19): siRNA sense strand
gcuaaaguauuggcacuga

SEQ ID NO: 979643 - RNA, 19 nt, Homo sapiens
  misc_RNA (1)...(19): siRNA sense strand
ggucaucguugcaggcauu

SEQ ID NO: 979644 - RNA, 19 nt, Homo sapiens
  misc_RNA (1)...(19): siRNA sense strand
ugacagcacugaguaugaa

SEQ ID NO: 979645 - RNA, 19 nt, Homo sapiens
  misc_RNA (1)...(19): siRNA sense strand
cauauacagugccuccuuu

SEQ ID NO: 979646 - RNA, 19 nt, Homo sapiens
  misc_RNA (1)...(19): siRNA sense strand
gcucuucaaugguaucaug

SEQ ID NO: 979647 - RNA, 19 nt, Homo sapiens
  misc_RNA (1)...(19): siRNA sense strand
ucucugcucuucaauggua

SEQ ID NO: 979648 - RNA, 19 nt, Homo sapiens
  misc_RNA (1)...(19): siRNA sense strand
ucaacuaugucacugaaga

SEQ ID NO: 979649 - RNA, 19 nt, Homo sapiens
  misc_RNA (1)...(19): siRNA sense strand
gggacacccucaacuaugu

SEQ ID NO: 979650 - RNA, 19 nt, Homo sapiens
  misc_RNA (1)...(19): siRNA sense strand
caccuaugcuaaaguauug

SEQ ID NO: 979651 - RNA, 19 nt, Homo sapiens
  misc_RNA (1)...(19): siRNA sense strand
gaacccugguacaagauau

SEQ ID NO: 979652 - RNA, 19 nt, Homo sapiens
  misc_RNA (1)...(19): siRNA sense strand
cagggagccucuacucauu

SEQ ID NO: 979653 - RNA, 19 nt, Homo sapiens
  misc_RNA (1)...(19): siRNA sense strand
gcacuguacucagcucugu

SEQ ID NO: 979654 - RNA, 19 nt, Homo sapiens
  misc_RNA (1)...(19): siRNA sense strand
gcagaucagauauuuggaa

SEQ ID NO: 979655 - RNA, 19 nt, Homo sapiens
  misc_RNA (1)...(19): siRNA sense strand
ggaccucccugcucaucau

SEQ ID NO: 979656 - RNA, 19 nt, Homo sapiens
  misc_RNA (1)...(19): siRNA sense strand
acucagcucuguucuccua

SEQ ID NO: 979657 - RNA, 19 nt, Homo sapiens
  misc_RNA (1)...(19): siRNA sense strand
gucaguugcugcagaaaug

SEQ ID NO: 979658 - RNA, 19 nt, Homo sapiens
  misc_RNA (1)...(19): siRNA sense strand
ucagagugccagaacauaa

SEQ ID NO: 979659 - RNA, 19 nt, Homo sapiens
  misc_RNA (1)...(19): siRNA sense strand
uuucaccuaugcuaaagua

SEQ ID NO: 979660 - RNA, 19 nt, Homo sapiens
  misc_RNA (1)...(19): siRNA sense strand
cagaucagauauuuggaau

SEQ ID NO: 979661 - RNA, 19 nt, Homo sapiens
  misc_RNA (1)...(19): siRNA sense strand
ucacugaagagaucaagaa

SEQ ID NO: 979662 - RNA, 19 nt, Homo sapiens
  misc_RNA (1)...(19): siRNA sense strand
caucauugccaucaccuuu

SEQ ID NO: 979663 - RNA, 19 nt, Homo sapiens
  misc_RNA (1)...(19): siRNA sense strand
ccucaacuaugucacugaa

SEQ ID NO: 979664 - RNA, 19 nt, Homo sapiens
  misc_RNA (1)...(19): siRNA sense strand
ggaacccugguacaagaua

SEQ ID NO: 979665 - RNA, 19 nt, Homo sapiens
  misc_RNA (1)...(19): siRNA sense strand
gggcaccaccauuaagaaa

SEQ ID NO: 979666 - RNA, 19 nt, Homo sapiens
  misc_RNA (1)...(19): siRNA sense strand
ucucaggccugcccuuuua

SEQ ID NO: 979667 - RNA, 19 nt, Homo sapiens
  misc_RNA (1)...(19): siRNA sense strand
ucaguugcauuauccuguu

SEQ ID NO: 979668 - RNA, 19 nt, Homo sapiens
  misc_RNA (1)...(19): siRNA sense strand
gcugggacacccucaacua

SEQ ID NO: 979669 - RNA, 19 nt, Homo sapiens
  misc_RNA (1)...(19): siRNA sense strand
ggccagcuaugccuauauc

SEQ ID NO: 979670 - RNA, 19 nt, Homo sapiens
  misc_RNA (1)...(19): siRNA sense strand
ucuuccagcucauuaacua

SEQ ID NO: 979671 - RNA, 19 nt, Homo sapiens
  misc_RNA (1)...(19): siRNA sense strand
ggaggccuuuggaggauuc

SEQ ID NO: 979672 - RNA, 19 nt, Homo sapiens
  misc_RNA (1)...(19): siRNA sense strand
gacaucuuccagcucauua

SEQ ID NO: 979673 - RNA, 19 nt, Homo sapiens
  misc_RNA (1)...(19): siRNA sense strand
cugaagagaucaagaaucc

SEQ ID NO: 979674 - RNA, 19 nt, Homo sapiens
  misc_RNA (1)...(19): siRNA sense strand
aggugaagcugaagaagga

SEQ ID NO: 979675 - RNA, 19 nt, Homo sapiens
  misc_RNA (1)...(19): siRNA sense strand
ucaccuaugcuaaaguauu

SEQ ID NO: 979676 - RNA, 19 nt, Homo sapiens
  misc_RNA (1)...(19): siRNA sense strand
caagauauuuucaccuaug

SEQ ID NO: 979677 - RNA, 19 nt, Homo sapiens
  misc_RNA (1)...(19): siRNA sense strand
ggaagauggaggagagaug

SEQ ID NO: 979678 - RNA, 19 nt, Homo sapiens
  misc_RNA (1)...(19): siRNA sense strand
cuuugaggguucaucauuu

SEQ ID NO: 979679 - RNA, 19 nt, Homo sapiens
  misc_RNA (1)...(19): siRNA sense strand
gaaggagaucucacugcuu

SEQ ID NO: 979680 - RNA, 19 nt, Homo sapiens
  misc_RNA (1)...(19): siRNA sense strand
ggaacugggcaccaccauu

SEQ ID NO: 979681 - RNA, 19 nt, Homo sapiens
  misc_RNA (1)...(19): siRNA sense strand
uaugucaguugcugcagaa

SEQ ID NO: 979682 - RNA, 19 nt, Homo sapiens
  misc_RNA (1)...(19): siRNA sense strand
gagacaucuuggccaguga

SEQ ID NO: 979683 - RNA, 19 nt, Homo sapiens
  misc_RNA (1)...(19): siRNA sense strand
cggagcaggugaagcugaa

SEQ ID NO: 979684 - RNA, 19 nt, Homo sapiens
  misc_RNA (1)...(19): siRNA sense strand
gcaggcauuguuagacuug

SEQ ID NO: 979685 - RNA, 19 nt, Homo sapiens
  misc_RNA (1)...(19): siRNA sense strand
ucaucuauaucuugaccaa

SEQ ID NO: 979686 - RNA, 19 nt, Homo sapiens
  misc_RNA (1)...(19): siRNA sense strand
cuaugucacugaagagauc

SEQ ID NO: 979687 - RNA, 19 nt, Homo sapiens
  misc_RNA (1)...(19): siRNA sense strand
uaacggcgugugccugauu

SEQ ID NO: 979688 - RNA, 19 nt, Homo sapiens
  misc_RNA (1)...(19): siRNA sense strand
agacaugagagacaucuug

SEQ ID NO: 979689 - RNA, 19 nt, Homo sapiens
  misc_RNA (1)...(19): siRNA sense strand
caauguggccuauuauacu

SEQ ID NO: 979690 - RNA, 19 nt, Homo sapiens
  misc_RNA (1)...(19): siRNA sense strand
ccaauguggccuauuauac

SEQ ID NO: 979691 - RNA, 19 nt, Homo sapiens
  misc_RNA (1)...(19): siRNA sense strand
uuugaggguucaucauuug

SEQ ID NO: 979692 - RNA, 19 nt, Homo sapiens
  misc_RNA (1)...(19): siRNA sense strand
ucacaccagugccuucucu

SEQ ID NO: 979693 - RNA, 19 nt, Homo sapiens
  misc_RNA (1)...(19): siRNA sense strand
ccucccugcucaucauuga

SEQ ID NO: 979694 - RNA, 19 nt, Homo sapiens
  misc_RNA (1)...(19): siRNA sense strand
uaaaguauuggcacugauc

SEQ ID NO: 979695 - RNA, 19 nt, Homo sapiens
  misc_RNA (1)...(19): siRNA sense strand
ccaucaccuuugccaacua

SEQ ID NO: 979696 - RNA, 19 nt, Homo sapiens
  misc_RNA (1)...(19): siRNA sense strand
ccuauuauacugugcuaga

SEQ ID NO: 979697 - RNA, 19 nt, Homo sapiens
  misc_RNA (1)...(19): siRNA sense strand
caccaucaucuauaucuug

SEQ ID NO: 979698 - RNA, 19 nt, Homo sapiens
  misc_RNA (1)...(19): siRNA sense strand
gagcaggugaagcugaaga

SEQ ID NO: 979699 - RNA, 19 nt, Homo sapiens
  misc_RNA (1)...(19): siRNA sense strand
ccagggagccucuacucau

SEQ ID NO: 979700 - RNA, 19 nt, Homo sapiens
  misc_RNA (1)...(19): siRNA sense strand
ggggaacccugguacaaga

SEQ ID NO: 979701 - RNA, 19 nt, Homo sapiens
  misc_RNA (1)...(19): siRNA sense strand
ucaccaucaucuauaucuu

SEQ ID NO: 979702 - RNA, 19 nt, Homo sapiens
  misc_RNA (1)...(19): siRNA sense strand
caguugcauuauccuguuu

SEQ ID NO: 979703 - RNA, 19 nt, Homo sapiens
  misc_RNA (1)...(19): siRNA sense strand
ggccuauuauacugugcua

SEQ ID NO: 979704 - RNA, 19 nt, Homo sapiens
  misc_RNA (1)...(19): siRNA sense strand
gagaucaagaauccugaga

SEQ ID NO: 979705 - RNA, 19 nt, Homo sapiens
  misc_RNA (1)...(19): siRNA sense strand
ucauggcauugaucuacuu

SEQ ID NO: 979706 - RNA, 19 nt, Homo sapiens
  misc_RNA (1)...(19): siRNA sense strand
gggagccucuacucauuuu

SEQ ID NO: 979707 - RNA, 19 nt, Homo sapiens
  misc_RNA (1)...(19): siRNA sense strand
caucagagugccagaacau

SEQ ID NO: 979708 - RNA, 19 nt, Homo sapiens
  misc_RNA (1)...(19): siRNA sense strand
accaucaucuauaucuuga

SEQ ID NO: 979709 - RNA, 19 nt, Homo sapiens
  misc_RNA (1)...(19): siRNA sense strand
caucaccuuugccaacuac

SEQ ID NO: 979710 - RNA, 19 nt, Homo sapiens
  misc_RNA (1)...(19): siRNA sense strand
ugccuucucugcucuucaa

SEQ ID NO: 979711 - RNA, 19 nt, Homo sapiens
  misc_RNA (1)...(19): siRNA sense strand
aauguggccuauuauacug

SEQ ID NO: 979712 - RNA, 19 nt, Homo sapiens
  misc_RNA (1)...(19): siRNA sense strand
gaccaauguggccuauuau

SEQ ID NO: 979713 - RNA, 19 nt, Homo sapiens
  misc_RNA (1)...(19): siRNA sense strand
gaaccugccccucuccauu

SEQ ID NO: 979714 - RNA, 19 nt, Homo sapiens
  misc_RNA (1)...(19): siRNA sense strand
caucguugcaggcauuguu

SEQ ID NO: 979715 - RNA, 19 nt, Homo sapiens
  misc_RNA (1)...(19): siRNA sense strand
cauuaacugugccuauguc

SEQ ID NO: 979716 - RNA, 19 nt, Homo sapiens
  misc_RNA (1)...(19): siRNA sense strand
ugaagaaggagaucucacu

SEQ ID NO: 979717 - RNA, 19 nt, Homo sapiens
  misc_RNA (1)...(19): siRNA sense strand
uauugugggucagcuuuau

SEQ ID NO: 979718 - RNA, 19 nt, Homo sapiens
  misc_RNA (1)...(19): siRNA sense strand
aucuauaucuugaccaaug

SEQ ID NO: 979719 - RNA, 19 nt, Homo sapiens
  misc_RNA (1)...(19): siRNA sense strand
gaauuccuuugaggguuca

SEQ ID NO: 979720 - RNA, 19 nt, Homo sapiens
  misc_RNA (1)...(19): siRNA sense strand
agaaggccaucucccugau

SEQ ID NO: 979721 - RNA, 19 nt, Homo sapiens
  misc_RNA (1)...(19): siRNA sense strand
ggcccuuuguuauguggaa

SEQ ID NO: 979722 - RNA, 19 nt, Homo sapiens
  misc_RNA (1)...(19): siRNA sense strand
cuucucugcucuucaaugg

SEQ ID NO: 979723 - RNA, 19 nt, Homo sapiens
  misc_RNA (1)...(19): siRNA sense strand
uuugugggcucaagagaag

SEQ ID NO: 979724 - RNA, 19 nt, Homo sapiens
  misc_RNA (1)...(19): siRNA sense strand
ucuauaucuugaccaaugu

SEQ ID NO: 979725 - RNA, 19 nt, Homo sapiens
  misc_RNA (1)...(19): siRNA sense strand
gggccucuucuccgucuuu

SEQ ID NO: 979726 - RNA, 19 nt, Homo sapiens
  misc_RNA (1)...(19): siRNA sense strand
ggagaucucacugcuuaac

SEQ ID NO: 979727 - RNA, 19 nt, Homo sapiens
  misc_RNA (1)...(19): siRNA sense strand
cuaaaguauuggcacugau

SEQ ID NO: 979728 - RNA, 19 nt, Homo sapiens
  misc_RNA (1)...(19): siRNA sense strand
ccuuugaggguucaucauu

SEQ ID NO: 979729 - RNA, 19 nt, Homo sapiens
  misc_RNA (1)...(19): siRNA sense strand
guaaagaccuacaagauaa

SEQ ID NO: 979730 - RNA, 19 nt, Homo sapiens
  misc_RNA (1)...(19): siRNA sense strand
gaaagcggcuauagagauu

SEQ ID NO: 979731 - RNA, 19 nt, Homo sapiens
  misc_RNA (1)...(19): siRNA sense strand
gguaaagaccuacaagaua

SEQ ID NO: 979732 - RNA, 19 nt, Homo sapiens
  misc_RNA (1)...(19): siRNA sense strand
gcuaacaagugcugguaaa

SEQ ID NO: 979733 - RNA, 19 nt, Homo sapiens
  misc_RNA (1)...(19): siRNA sense strand
ucacuacuguggacuugua

SEQ ID NO: 979734 - RNA, 19 nt, Homo sapiens
  misc_RNA (1)...(19): siRNA sense strand
ggaaagcggcuauagagau

SEQ ID NO: 979735 - RNA, 19 nt, Homo sapiens
  misc_RNA (1)...(19): siRNA sense strand
caacugggacgcugauauu

SEQ ID NO: 979736 - RNA, 19 nt, Homo sapiens
  misc_RNA (1)...(19): siRNA sense strand
caacgccuaugaagauuuc

SEQ ID NO: 979737 - RNA, 19 nt, Homo sapiens
  misc_RNA (1)...(19): siRNA sense strand
gaaucacuauccugacaga

SEQ ID NO: 979738 - RNA, 19 nt, Homo sapiens
  misc_RNA (1)...(19): siRNA sense strand
ugaaggccuuggacaauau

SEQ ID NO: 979739 - RNA, 19 nt, Homo sapiens
  misc_RNA (1)...(19): siRNA sense strand
gaaauucucaugggcaaga

SEQ ID NO: 979740 - RNA, 19 nt, Homo sapiens
  misc_RNA (1)...(19): siRNA sense strand
gaagacaaucgcaguggaa

SEQ ID NO: 979741 - RNA, 19 nt, Homo sapiens
  misc_RNA (1)...(19): siRNA sense strand
gaucacuacuguggacuug

SEQ ID NO: 979742 - RNA, 19 nt, Homo sapiens
  misc_RNA (1)...(19): siRNA sense strand
gaccacauuuccagaagga

SEQ ID NO: 979743 - RNA, 19 nt, Homo sapiens
  misc_RNA (1)...(19): siRNA sense strand
uaauucaagucccaacuau

SEQ ID NO: 979744 - RNA, 19 nt, Homo sapiens
  misc_RNA (1)...(19): siRNA sense strand
uguacuaccuggaggauga

SEQ ID NO: 979745 - RNA, 19 nt, Homo sapiens
  misc_RNA (1)...(19): siRNA sense strand
cugaaggccuuggacaaua

SEQ ID NO: 979746 - RNA, 19 nt, Homo sapiens
  misc_RNA (1)...(19): siRNA sense strand
guaauucaagucccaacua

SEQ ID NO: 979747 - RNA, 19 nt, Homo sapiens
  misc_RNA (1)...(19): siRNA sense strand
uccaaggccuacagauaua

SEQ ID NO: 979748 - RNA, 19 nt, Homo sapiens
  misc_RNA (1)...(19): siRNA sense strand
ggcuaaagacggaagauuu

SEQ ID NO: 979749 - RNA, 19 nt, Homo sapiens
  misc_RNA (1)...(19): siRNA sense strand
ugaguuccgugaucuuuau

SEQ ID NO: 979750 - RNA, 19 nt, Homo sapiens
  misc_RNA (1)...(19): siRNA sense strand
caaggaaagcggcuauaga

SEQ ID NO: 979751 - RNA, 19 nt, Homo sapiens
  misc_RNA (1)...(19): siRNA sense strand
ccagaaggcuuacuuuuca

SEQ ID NO: 979752 - RNA, 19 nt, Homo sapiens
  misc_RNA (1)...(19): siRNA sense strand
gaucuuuauucgugacaga

SEQ ID NO: 979753 - RNA, 19 nt, Homo sapiens
  misc_RNA (1)...(19): siRNA sense strand
caggauacaucgacuaugc

SEQ ID NO: 979754 - RNA, 19 nt, Homo sapiens
  misc_RNA (1)...(19): siRNA sense strand
uagaaucacuauccugaca

SEQ ID NO: 979755 - RNA, 19 nt, Homo sapiens
  misc_RNA (1)...(19): siRNA sense strand
uaacaagugcugguaaaga

SEQ ID NO: 979756 - RNA, 19 nt, Homo sapiens
  misc_RNA (1)...(19): siRNA sense strand
gccuacagauauaagcuuu

SEQ ID NO: 979757 - RNA, 19 nt, Homo sapiens
  misc_RNA (1)...(19): siRNA sense strand
gcagccaggugacaacucu

SEQ ID NO: 979758 - RNA, 19 nt, Homo sapiens
  misc_RNA (1)...(19): siRNA sense strand
ugaaagagcucagcaaaag

SEQ ID NO: 979759 - RNA, 19 nt, Homo sapiens
  misc_RNA (1)...(19): siRNA sense strand
ccgagggacuggagagaga

SEQ ID NO: 979760 - RNA, 19 nt, Homo sapiens
  misc_RNA (1)...(19): siRNA sense strand
ucaagugauugccgauaau

SEQ ID NO: 979761 - RNA, 19 nt, Homo sapiens
  misc_RNA (1)...(19): siRNA sense strand
ggacgcugauauugcuguu

SEQ ID NO: 979762 - RNA, 19 nt, Homo sapiens
  misc_RNA (1)...(19): siRNA sense strand
cuauagagauugcaagacu

SEQ ID NO: 979763 - RNA, 19 nt, Homo sapiens
  misc_RNA (1)...(19): siRNA sense strand
gcaaggaaagcggcuauag

SEQ ID NO: 979764 - RNA, 19 nt, Homo sapiens
  misc_RNA (1)...(19): siRNA sense strand
cgauaauccagaaggcuua

SEQ ID NO: 979765 - RNA, 19 nt, Homo sapiens
  misc_RNA (1)...(19): siRNA sense strand
caaaagacgcuaacaagug

SEQ ID NO: 979766 - RNA, 19 nt, Homo sapiens
  misc_RNA (1)...(19): siRNA sense strand
gcugauauugcuguuagua

SEQ ID NO: 979767 - RNA, 19 nt, Homo sapiens
  misc_RNA (1)...(19): siRNA sense strand
ugacggcccuggcaaugag

SEQ ID NO: 979768 - RNA, 19 nt, Homo sapiens
  misc_RNA (1)...(19): siRNA sense strand
cuuccaaggccuacagaua

SEQ ID NO: 979769 - RNA, 19 nt, Homo sapiens
  misc_RNA (1)...(19): siRNA sense strand
gcaaugagagaagaagaca

SEQ ID NO: 979770 - RNA, 19 nt, Homo sapiens
  misc_RNA (1)...(19): siRNA sense strand
gcugaaggccuuggacaau

SEQ ID NO: 979771 - RNA, 19 nt, Homo sapiens
  misc_RNA (1)...(19): siRNA sense strand
gaaggccuuggacaauauu

SEQ ID NO: 979772 - RNA, 19 nt, Homo sapiens
  misc_RNA (1)...(19): siRNA sense strand
gcuaaagacggaagauuuu

SEQ ID NO: 979773 - RNA, 19 nt, Homo sapiens
  misc_RNA (1)...(19): siRNA sense strand
ucacuauccugacagaacu

SEQ ID NO: 979774 - RNA, 19 nt, Homo sapiens
  misc_RNA (1)...(19): siRNA sense strand
acucgcagaucacuacugu

SEQ ID NO: 979775 - RNA, 19 nt, Homo sapiens
  misc_RNA (1)...(19): siRNA sense strand
ccaggugacaacucuacua

SEQ ID NO: 979776 - RNA, 19 nt, Homo sapiens
  misc_RNA (1)...(19): siRNA sense strand
uugcaagacuggcugaaag

SEQ ID NO: 979777 - RNA, 19 nt, Homo sapiens
  misc_RNA (1)...(19): siRNA sense strand
aaugagagaagaagacaau

SEQ ID NO: 979778 - RNA, 19 nt, Homo sapiens
  misc_RNA (1)...(19): siRNA sense strand
gacuaugcccacaggcuaa

SEQ ID NO: 979779 - RNA, 19 nt, Homo sapiens
  misc_RNA (1)...(19): siRNA sense strand
acgcugauauugcuguuag

SEQ ID NO: 979780 - RNA, 19 nt, Homo sapiens
  misc_RNA (1)...(19): siRNA sense strand
ccaaggccuacagauauaa

SEQ ID NO: 979781 - RNA, 19 nt, Homo sapiens
  misc_RNA (1)...(19): siRNA sense strand
gacggaagauuuugaaguc

SEQ ID NO: 979782 - RNA, 19 nt, Homo sapiens
  misc_RNA (1)...(19): siRNA sense strand
agucccaacuaucaaguga

SEQ ID NO: 979783 - RNA, 19 nt, Homo sapiens
  misc_RNA (1)...(19): siRNA sense strand
cuacuguggacuuguacua

SEQ ID NO: 979784 - RNA, 19 nt, Homo sapiens
  misc_RNA (1)...(19): siRNA sense strand
aaggaaagcggcuauagag

SEQ ID NO: 979785 - RNA, 19 nt, Homo sapiens
  misc_RNA (1)...(19): siRNA sense strand
gcaaaagacgcuaacaagu

SEQ ID NO: 979786 - RNA, 19 nt, Homo sapiens
  misc_RNA (1)...(19): siRNA sense strand
aacaagugcugguaaagac

SEQ ID NO: 979787 - RNA, 19 nt, Homo sapiens
  misc_RNA (1)...(19): siRNA sense strand
auucaagucccaacuauca

SEQ ID NO: 979788 - RNA, 19 nt, Homo sapiens
  misc_RNA (1)...(19): siRNA sense strand
uuccaaggccuacagauau

SEQ ID NO: 979789 - RNA, 19 nt, Homo sapiens
  misc_RNA (1)...(19): siRNA sense strand
ugguaaagaccuacaagau

SEQ ID NO: 979790 - RNA, 19 nt, Homo sapiens
  misc_RNA (1)...(19): siRNA sense strand
gggcaagagauaucaggau

SEQ ID NO: 979791 - RNA, 19 nt, Homo sapiens
  misc_RNA (1)...(19): siRNA sense strand
gacuggagagagagugaaa

SEQ ID NO: 979792 - RNA, 19 nt, Homo sapiens
  misc_RNA (1)...(19): siRNA sense strand
gaaagagcucagcaaaaga

SEQ ID NO: 979793 - RNA, 19 nt, Homo sapiens
  misc_RNA (1)...(19): siRNA sense strand
ucaacgccuaugaagauuu

SEQ ID NO: 979794 - RNA, 19 nt, Homo sapiens
  misc_RNA (1)...(19): siRNA sense strand
cggaagauuuugaagucua

SEQ ID NO: 979795 - RNA, 19 nt, Homo sapiens
  misc_RNA (1)...(19): siRNA sense strand
ggacuggagagagagugaa

SEQ ID NO: 979796 - RNA, 19 nt, Homo sapiens
  misc_RNA (1)...(19): siRNA sense strand
ggacacaucugcaucaaau

SEQ ID NO: 979797 - RNA, 19 nt, Homo sapiens
  misc_RNA (1)...(19): siRNA sense strand
ggaggaagcugaggaguga

SEQ ID NO: 979798 - RNA, 19 nt, Homo sapiens
  misc_RNA (1)...(19): siRNA sense strand
cacgagggcugcagaguga

SEQ ID NO: 979799 - RNA, 19 nt, Homo sapiens
  misc_RNA (1)...(19): siRNA sense strand
ucaaauccaucacaaagac

SEQ ID NO: 979800 - RNA, 19 nt, Homo sapiens
  misc_RNA (1)...(19): siRNA sense strand
gcaagaguccagauuaugc

SEQ ID NO: 979801 - RNA, 19 nt, Homo sapiens
  misc_RNA (1)...(19): siRNA sense strand
caucaaauccaucacaaag

SEQ ID NO: 979802 - RNA, 19 nt, Homo sapiens
  misc_RNA (1)...(19): siRNA sense strand
gcuccugccucugugauga

SEQ ID NO: 979803 - RNA, 19 nt, Homo sapiens
  misc_RNA (1)...(19): siRNA sense strand
gagcugcccaggucuucua

SEQ ID NO: 979804 - RNA, 19 nt, Homo sapiens
  misc_RNA (1)...(19): siRNA sense strand
gcccaggucuucuauaucc

SEQ ID NO: 979805 - RNA, 19 nt, Homo sapiens
  misc_RNA (1)...(19): siRNA sense strand
aaagcaaaguggacacauc

SEQ ID NO: 979806 - RNA, 19 nt, Homo sapiens
  misc_RNA (1)...(19): siRNA sense strand
aggcaagaguccagauuau

SEQ ID NO: 979807 - RNA, 19 nt, Homo sapiens
  misc_RNA (1)...(19): siRNA sense strand
gcaucaaauccaucacaaa

SEQ ID NO: 979808 - RNA, 19 nt, Homo sapiens
  misc_RNA (1)...(19): siRNA sense strand
cugcccaggucuucuauau

SEQ ID NO: 979809 - RNA, 19 nt, Homo sapiens
  misc_RNA (1)...(19): siRNA sense strand
aaggcaagaguccagauua

SEQ ID NO: 979810 - RNA, 19 nt, Homo sapiens
  misc_RNA (1)...(19): siRNA sense strand
ccucagacgccaucaacaa

SEQ ID NO: 979811 - RNA, 19 nt, Homo sapiens
  misc_RNA (1)...(19): siRNA sense strand
ucacaaagacggccuucca

SEQ ID NO: 979812 - RNA, 19 nt, Homo sapiens
  misc_RNA (1)...(19): siRNA sense strand
gagaaacaccccacaaauc

SEQ ID NO: 979813 - RNA, 19 nt, Homo sapiens
  misc_RNA (1)...(19): siRNA sense strand
gaguccagauuaugcaaac

SEQ ID NO: 979814 - RNA, 19 nt, Homo sapiens
  misc_RNA (1)...(19): siRNA sense strand
ggcaagaguccagauuaug

SEQ ID NO: 979815 - RNA, 19 nt, Homo sapiens
  misc_RNA (1)...(19): siRNA sense strand
cgguuucccuccacucgaa

SEQ ID NO: 979816 - RNA, 19 nt, Homo sapiens
  misc_RNA (1)...(19): siRNA sense strand
acaggucgccaucagcaaa

SEQ ID NO: 979817 - RNA, 19 nt, Homo sapiens
  misc_RNA (1)...(19): siRNA sense strand
aaaggcaagaguccagauu

SEQ ID NO: 979818 - RNA, 19 nt, Homo sapiens
  misc_RNA (1)...(19): siRNA sense strand
caagaguccagauuaugca

SEQ ID NO: 979819 - RNA, 19 nt, Homo sapiens
  misc_RNA (1)...(19): siRNA sense strand
cgucacaggucgccaucag

SEQ ID NO: 979820 - RNA, 19 nt, Homo sapiens
  misc_RNA (1)...(19): siRNA sense strand
guggacacaucugcaucaa

SEQ ID NO: 979821 - RNA, 19 nt, Homo sapiens
  misc_RNA (1)...(19): siRNA sense strand
agaaacaccccacaaauca

SEQ ID NO: 979822 - RNA, 19 nt, Homo sapiens
  misc_RNA (1)...(19): siRNA sense strand
ugcaucaaauccaucacaa

SEQ ID NO: 979823 - RNA, 19 nt, Homo sapiens
  misc_RNA (1)...(19): siRNA sense strand
aaagacggccuuccagacu

SEQ ID NO: 979824 - RNA, 19 nt, Homo sapiens
  misc_RNA (1)...(19): siRNA sense strand
gaaagcugcucuucaauga

SEQ ID NO: 979825 - RNA, 19 nt, Homo sapiens
  misc_RNA (1)...(19): siRNA sense strand
gcaaggaacuuaucaaacu

SEQ ID NO: 979826 - RNA, 19 nt, Homo sapiens
  misc_RNA (1)...(19): siRNA sense strand
gaauuaagcuuuacaugag

SEQ ID NO: 979827 - RNA, 19 nt, Homo sapiens
  misc_RNA (1)...(19): siRNA sense strand
gcaagcagguuaacaagga

SEQ ID NO: 979828 - RNA, 19 nt, Homo sapiens
  misc_RNA (1)...(19): siRNA sense strand
gaaagagguuuacccacuu

SEQ ID NO: 979829 - RNA, 19 nt, Homo sapiens
  misc_RNA (1)...(19): siRNA sense strand
cuacuuuggugcuaaauaa

SEQ ID NO: 979830 - RNA, 19 nt, Homo sapiens
  misc_RNA (1)...(19): siRNA sense strand
gaacaugccaucaaacugu

SEQ ID NO: 979831 - RNA, 19 nt, Homo sapiens
  misc_RNA (1)...(19): siRNA sense strand
cagaaaagcugaaucaauu

SEQ ID NO: 979832 - RNA, 19 nt, Homo sapiens
  misc_RNA (1)...(19): siRNA sense strand
gauuucagcuguucuacuu

SEQ ID NO: 979833 - RNA, 19 nt, Homo sapiens
  misc_RNA (1)...(19): siRNA sense strand
cgaauuaagcuuuacauga

SEQ ID NO: 979834 - RNA, 19 nt, Homo sapiens
  misc_RNA (1)...(19): siRNA sense strand
cagagacacuuaugacaga

SEQ ID NO: 979835 - RNA, 19 nt, Homo sapiens
  misc_RNA (1)...(19): siRNA sense strand
cgucuuggauucagaacua

SEQ ID NO: 979836 - RNA, 19 nt, Homo sapiens
  misc_RNA (1)...(19): siRNA sense strand
aaccaaaucugugaaguuu

SEQ ID NO: 979837 - RNA, 19 nt, Homo sapiens
  misc_RNA (1)...(19): siRNA sense strand
gcccuaggcucucaauaug

SEQ ID NO: 979838 - RNA, 19 nt, Homo sapiens
  misc_RNA (1)...(19): siRNA sense strand
gcaaauauacuucgaaagc

SEQ ID NO: 979839 - RNA, 19 nt, Homo sapiens
  misc_RNA (1)...(19): siRNA sense strand
acagugggauuaucagaaa

SEQ ID NO: 979840 - RNA, 19 nt, Homo sapiens
  misc_RNA (1)...(19): siRNA sense strand
agacuuguguugagguuaa

SEQ ID NO: 979841 - RNA, 19 nt, Homo sapiens
  misc_RNA (1)...(19): siRNA sense strand
caaggaacuuaucaaacuu

SEQ ID NO: 979842 - RNA, 19 nt, Homo sapiens
  misc_RNA (1)...(19): siRNA sense strand
guagaugcuucaccuccua

SEQ ID NO: 979843 - RNA, 19 nt, Homo sapiens
  misc_RNA (1)...(19): siRNA sense strand
gccaguugguggaauauga

SEQ ID NO: 979844 - RNA, 19 nt, Homo sapiens
  misc_RNA (1)...(19): siRNA sense strand
gaauuaccagagacacuua

SEQ ID NO: 979845 - RNA, 19 nt, Homo sapiens
  misc_RNA (1)...(19): siRNA sense strand
guccugaauucuauuggua

SEQ ID NO: 979846 - RNA, 19 nt, Homo sapiens
  misc_RNA (1)...(19): siRNA sense strand
ugagaaggcuacuuugucu

SEQ ID NO: 979847 - RNA, 19 nt, Homo sapiens
  misc_RNA (1)...(19): siRNA sense strand
ggacacagaccucauuagg

SEQ ID NO: 979848 - RNA, 19 nt, Homo sapiens
  misc_RNA (1)...(19): siRNA sense strand
ccaacuaugucaucaguac

SEQ ID NO: 979849 - RNA, 19 nt, Homo sapiens
  misc_RNA (1)...(19): siRNA sense strand
uccaaggguuguaacauuu

SEQ ID NO: 979850 - RNA, 19 nt, Homo sapiens
  misc_RNA (1)...(19): siRNA sense strand
gcaaacauugugaaucuca

SEQ ID NO: 979851 - RNA, 19 nt, Homo sapiens
  misc_RNA (1)...(19): siRNA sense strand
aauccuaucugguccuuga

SEQ ID NO: 979852 - RNA, 19 nt, Homo sapiens
  misc_RNA (1)...(19): siRNA sense strand
gagcacgucuucaggaacu

SEQ ID NO: 979853 - RNA, 19 nt, Homo sapiens
  misc_RNA (1)...(19): siRNA sense strand
caaccaaaucugugaaguu

SEQ ID NO: 979854 - RNA, 19 nt, Homo sapiens
  misc_RNA (1)...(19): siRNA sense strand
cagcaaggaacuuaucaaa

SEQ ID NO: 979855 - RNA, 19 nt, Homo sapiens
  misc_RNA (1)...(19): siRNA sense strand
gaagugauggcuacagcaa

SEQ ID NO: 979856 - RNA, 19 nt, Homo sapiens
  misc_RNA (1)...(19): siRNA sense strand
caaggguuguaacauuuga

SEQ ID NO: 979857 - RNA, 19 nt, Homo sapiens
  misc_RNA (1)...(19): siRNA sense strand
augcugagauucaagcuaa

SEQ ID NO: 979858 - RNA, 19 nt, Homo sapiens
  misc_RNA (1)...(19): siRNA sense strand
uaacaagacccugauggaa

SEQ ID NO: 979859 - RNA, 19 nt, Homo sapiens
  misc_RNA (1)...(19): siRNA sense strand
gccaagcgauucugauucu

SEQ ID NO: 979860 - RNA, 19 nt, Homo sapiens
  misc_RNA (1)...(19): siRNA sense strand
aggcagagcuuugcaagug

SEQ ID NO: 979861 - RNA, 19 nt, Homo sapiens
  misc_RNA (1)...(19): siRNA sense strand
ugagauugcuguaaaugag

SEQ ID NO: 979862 - RNA, 19 nt, Homo sapiens
  misc_RNA (1)...(19): siRNA sense strand
ugagacaaauauuccaugu

SEQ ID NO: 979863 - RNA, 19 nt, Homo sapiens
  misc_RNA (1)...(19): siRNA sense strand
cgaaagcugcucuucaaug

SEQ ID NO: 979864 - RNA, 19 nt, Homo sapiens
  misc_RNA (1)...(19): siRNA sense strand
aaacuugacucuugcucau

SEQ ID NO: 979865 - RNA, 19 nt, Homo sapiens
  misc_RNA (1)...(19): siRNA sense strand
acaagacccugauggaaag

SEQ ID NO: 979866 - RNA, 19 nt, Homo sapiens
  misc_RNA (1)...(19): siRNA sense strand
caacauggugggugcuauu

SEQ ID NO: 979867 - RNA, 19 nt, Homo sapiens
  misc_RNA (1)...(19): siRNA sense strand
cuccaaggguuguaacauu

SEQ ID NO: 979868 - RNA, 19 nt, Homo sapiens
  misc_RNA (1)...(19): siRNA sense strand
cacuuuaaaugcugagauu

SEQ ID NO: 979869 - RNA, 19 nt, Homo sapiens
  misc_RNA (1)...(19): siRNA sense strand
cucaugagauugcuguaaa

SEQ ID NO: 979870 - RNA, 19 nt, Homo sapiens
  misc_RNA (1)...(19): siRNA sense strand
gaaguccugaauucuauug

SEQ ID NO: 979871 - RNA, 19 nt, Homo sapiens
  misc_RNA (1)...(19): siRNA sense strand
gccugccugucccuaauua

SEQ ID NO: 979872 - RNA, 19 nt, Homo sapiens
  misc_RNA (1)...(19): siRNA sense strand
caaauggacauggccaauu

SEQ ID NO: 979873 - RNA, 19 nt, Homo sapiens
  misc_RNA (1)...(19): siRNA sense strand
ggccaacuaugucaucagu

SEQ ID NO: 979874 - RNA, 19 nt, Homo sapiens
  misc_RNA (1)...(19): siRNA sense strand
uugaaggcaugaacaaaga

SEQ ID NO: 979875 - RNA, 19 nt, Homo sapiens
  misc_RNA (1)...(19): siRNA sense strand
gacucuugcucaugagauu

SEQ ID NO: 979876 - RNA, 19 nt, Homo sapiens
  misc_RNA (1)...(19): siRNA sense strand
caacaaacaaguguaugga

SEQ ID NO: 979877 - RNA, 19 nt, Homo sapiens
  misc_RNA (1)...(19): siRNA sense strand
cuauugguauucagacuug

SEQ ID NO: 979878 - RNA, 19 nt, Homo sapiens
  misc_RNA (1)...(19): siRNA sense strand
ggaggugcugagacaaaua

SEQ ID NO: 979879 - RNA, 19 nt, Homo sapiens
  misc_RNA (1)...(19): siRNA sense strand
gcaaccaaaucugugaagu

SEQ ID NO: 979880 - RNA, 19 nt, Homo sapiens
  misc_RNA (1)...(19): siRNA sense strand
ggcagagcuuugcaaguga

SEQ ID NO: 979881 - RNA, 19 nt, Homo sapiens
  misc_RNA (1)...(19): siRNA sense strand
caaauauacuucgaaagcu

SEQ ID NO: 979882 - RNA, 19 nt, Homo sapiens
  misc_RNA (1)...(19): siRNA sense strand
uacaugagaaggcuacuuu

SEQ ID NO: 979883 - RNA, 19 nt, Homo sapiens
  misc_RNA (1)...(19): siRNA sense strand
uguaacauuugaugaagug

SEQ ID NO: 979884 - RNA, 19 nt, Homo sapiens
  misc_RNA (1)...(19): siRNA sense strand
uggcuucgcucagugacua

SEQ ID NO: 979885 - RNA, 19 nt, Homo sapiens
  misc_RNA (1)...(19): siRNA sense strand
caaacauugugaaucucaa

SEQ ID NO: 979886 - RNA, 19 nt, Homo sapiens
  misc_RNA (1)...(19): siRNA sense strand
cauggugggugcuauuaca

SEQ ID NO: 979887 - RNA, 19 nt, Homo sapiens
  misc_RNA (1)...(19): siRNA sense strand
gguuguaacauuugaugaa

SEQ ID NO: 979888 - RNA, 19 nt, Homo sapiens
  misc_RNA (1)...(19): siRNA sense strand
aacaagacccugauggaaa

SEQ ID NO: 979889 - RNA, 19 nt, Homo sapiens
  misc_RNA (1)...(19): siRNA sense strand
gaaggcaugaacaaagaga

SEQ ID NO: 979890 - RNA, 19 nt, Homo sapiens
  misc_RNA (1)...(19): siRNA sense strand
gaauaugagagaaccaagu

SEQ ID NO: 979891 - RNA, 19 nt, Homo sapiens
  misc_RNA (1)...(19): siRNA sense strand
gaggugcugagacaaauau

SEQ ID NO: 979892 - RNA, 19 nt, Homo sapiens
  misc_RNA (1)...(19): siRNA sense strand
gcucaugagauugcuguaa

SEQ ID NO: 979893 - RNA, 19 nt, Homo sapiens
  misc_RNA (1)...(19): siRNA sense strand
uucgaaagcugcucuucaa

SEQ ID NO: 979894 - RNA, 19 nt, Homo sapiens
  misc_RNA (1)...(19): siRNA sense strand
aaauccagcucuccugcuu

SEQ ID NO: 979895 - RNA, 19 nt, Homo sapiens
  misc_RNA (1)...(19): siRNA sense strand
ggacgucuuggauucagaa

SEQ ID NO: 979896 - RNA, 19 nt, Homo sapiens
  misc_RNA (1)...(19): siRNA sense strand
gcaaauggacauggccaau

SEQ ID NO: 979897 - RNA, 19 nt, Homo sapiens
  misc_RNA (1)...(19): siRNA sense strand
augcaaacauugugaaucu

SEQ ID NO: 979898 - RNA, 19 nt, Homo sapiens
  misc_RNA (1)...(19): siRNA sense strand
gguauucagacuuguguug

SEQ ID NO: 979899 - RNA, 19 nt, Homo sapiens
  misc_RNA (1)...(19): siRNA sense strand
ccugaauucuauugguauu

SEQ ID NO: 979900 - RNA, 19 nt, Homo sapiens
  misc_RNA (1)...(19): siRNA sense strand
uuucagcuguucuacuuga

SEQ ID NO: 979901 - RNA, 19 nt, Homo sapiens
  misc_RNA (1)...(19): siRNA sense strand
cagccaagcgauucugauu

SEQ ID NO: 979902 - RNA, 19 nt, Homo sapiens
  misc_RNA (1)...(19): siRNA sense strand
gaaaagcugaaucaauuga

SEQ ID NO: 979903 - RNA, 19 nt, Homo sapiens
  misc_RNA (1)...(19): siRNA sense strand
ggacauggccaauuuuaca

SEQ ID NO: 979904 - RNA, 19 nt, Homo sapiens
  misc_RNA (1)...(19): siRNA sense strand
ccuaggcucucaauaugca

SEQ ID NO: 979905 - RNA, 19 nt, Homo sapiens
  misc_RNA (1)...(19): siRNA sense strand
ucugguccuugauugauaa

SEQ ID NO: 979906 - RNA, 19 nt, Homo sapiens
  misc_RNA (1)...(19): siRNA sense strand
gcccuacuuuggugcuaaa

SEQ ID NO: 979907 - RNA, 19 nt, Homo sapiens
  misc_RNA (1)...(19): siRNA sense strand
ucaugagauugcuguaaau

SEQ ID NO: 979908 - RNA, 19 nt, Homo sapiens
  misc_RNA (1)...(19): siRNA sense strand
aagagaccuuuaacuugaa

SEQ ID NO: 979909 - RNA, 19 nt, Homo sapiens
  misc_RNA (1)...(19): siRNA sense strand
acaaggauuucagcuguuc

SEQ ID NO: 979910 - RNA, 19 nt, Homo sapiens
  misc_RNA (1)...(19): siRNA sense strand
gcacgucuucaggaacuaa

SEQ ID NO: 979911 - RNA, 19 nt, Homo sapiens
  misc_RNA (1)...(19): siRNA sense strand
caaccggcuucgcaaccaa

SEQ ID NO: 979912 - RNA, 19 nt, Homo sapiens
  misc_RNA (1)...(19): siRNA sense strand
gcaaccggcuucgcaacca

SEQ ID NO: 979913 - RNA, 19 nt, Homo sapiens
  misc_RNA (1)...(19): siRNA sense strand
gagauugcuguaaaugaga

SEQ ID NO: 979914 - RNA, 19 nt, Homo sapiens
  misc_RNA (1)...(19): siRNA sense strand
ccuaucugguccuugauug

SEQ ID NO: 979915 - RNA, 19 nt, Homo sapiens
  misc_RNA (1)...(19): siRNA sense strand
caagcgauucugauucuuc

SEQ ID NO: 979916 - RNA, 19 nt, Homo sapiens
  misc_RNA (1)...(19): siRNA sense strand
uaacagaaaagcugaauca

SEQ ID NO: 979917 - RNA, 19 nt, Homo sapiens
  misc_RNA (1)...(19): siRNA sense strand
ucugggacgucuuggauuc

SEQ ID NO: 979918 - RNA, 19 nt, Homo sapiens
  misc_RNA (1)...(19): siRNA sense strand
cuucaccuccuacuaacua

SEQ ID NO: 979919 - RNA, 19 nt, Homo sapiens
  misc_RNA (1)...(19): siRNA sense strand
ucagacuuguguugagguu

SEQ ID NO: 979920 - RNA, 19 nt, Homo sapiens
  misc_RNA (1)...(19): siRNA sense strand
ggaaguccugaauucuauu

SEQ ID NO: 979921 - RNA, 19 nt, Homo sapiens
  misc_RNA (1)...(19): siRNA sense strand
aauaugagagaaccaaguu

SEQ ID NO: 979922 - RNA, 19 nt, Homo sapiens
  misc_RNA (1)...(19): siRNA sense strand
acuugacucuugcucauga

SEQ ID NO: 979923 - RNA, 19 nt, Homo sapiens
  misc_RNA (1)...(19): siRNA sense strand
guuguaacauuugaugaag

SEQ ID NO: 979924 - RNA, 19 nt, Homo sapiens
  misc_RNA (1)...(19): siRNA sense strand
gaagaaaugccucagcuua

SEQ ID NO: 979925 - RNA, 19 nt, Homo sapiens
  misc_RNA (1)...(19): siRNA sense strand
acaaagaggugaaggagua

SEQ ID NO: 979926 - RNA, 19 nt, Homo sapiens
  misc_RNA (1)...(19): siRNA sense strand
caacuauacucaugauguu

SEQ ID NO: 979927 - RNA, 19 nt, Homo sapiens
  misc_RNA (1)...(19): siRNA sense strand
ggcaaaugcugaauauucu

SEQ ID NO: 979928 - RNA, 19 nt, Homo sapiens
  misc_RNA (1)...(19): siRNA sense strand
gcauuuggcuguuucuacu

SEQ ID NO: 979929 - RNA, 19 nt, Homo sapiens
  misc_RNA (1)...(19): siRNA sense strand
gcaaguagugauuggagaa

SEQ ID NO: 979930 - RNA, 19 nt, Homo sapiens
  misc_RNA (1)...(19): siRNA sense strand
ugacaacuauacucaugau

SEQ ID NO: 979931 - RNA, 19 nt, Homo sapiens
  misc_RNA (1)...(19): siRNA sense strand
gaaaugccucagcuuacaa

SEQ ID NO: 979932 - RNA, 19 nt, Homo sapiens
  misc_RNA (1)...(19): siRNA sense strand
uggcaaaugcugaauauuc

SEQ ID NO: 979933 - RNA, 19 nt, Homo sapiens
  misc_RNA (1)...(19): siRNA sense strand
agaaaugccucagcuuaca

SEQ ID NO: 979934 - RNA, 19 nt, Homo sapiens
  misc_RNA (1)...(19): siRNA sense strand
ggcccucugugguuaaaga

SEQ ID NO: 979935 - RNA, 19 nt, Homo sapiens
  misc_RNA (1)...(19): siRNA sense strand
uauauucugcggccuguuu

SEQ ID NO: 979936 - RNA, 19 nt, Homo sapiens
  misc_RNA (1)...(19): siRNA sense strand
guucaggcccucugugguu

SEQ ID NO: 979937 - RNA, 19 nt, Homo sapiens
  misc_RNA (1)...(19): siRNA sense strand
gguuaaagacuguauccau

SEQ ID NO: 979938 - RNA, 19 nt, Homo sapiens
  misc_RNA (1)...(19): siRNA sense strand
acugacaacuauacucaug

SEQ ID NO: 979939 - RNA, 19 nt, Homo sapiens
  misc_RNA (1)...(19): siRNA sense strand
acuggcaaaugcugaauau

SEQ ID NO: 979940 - RNA, 19 nt, Homo sapiens
  misc_RNA (1)...(19): siRNA sense strand
acacugacaacuauacuca

SEQ ID NO: 979941 - RNA, 19 nt, Homo sapiens
  misc_RNA (1)...(19): siRNA sense strand
acaacuauacucaugaugu

SEQ ID NO: 979942 - RNA, 19 nt, Homo sapiens
  misc_RNA (1)...(19): siRNA sense strand
ucaaggagggacuggcaaa

SEQ ID NO: 979943 - RNA, 19 nt, Homo sapiens
  misc_RNA (1)...(19): siRNA sense strand
uaaagacuguauccaugcu

SEQ ID NO: 979944 - RNA, 19 nt, Homo sapiens
  misc_RNA (1)...(19): siRNA sense strand
cccgagaacaccuauauuc

SEQ ID NO: 979945 - RNA, 19 nt, Homo sapiens
  misc_RNA (1)...(19): siRNA sense strand
caguuuauucugcguugua

SEQ ID NO: 979946 - RNA, 19 nt, Homo sapiens
  misc_RNA (1)...(19): siRNA sense strand
gacuggcaaaugcugaaua

SEQ ID NO: 979947 - RNA, 19 nt, Homo sapiens
  misc_RNA (1)...(19): siRNA sense strand
guagugauuggagaacaaa

SEQ ID NO: 979948 - RNA, 19 nt, Homo sapiens
  misc_RNA (1)...(19): siRNA sense strand
gguggugcaaguagugauu

SEQ ID NO: 979949 - RNA, 19 nt, Homo sapiens
  misc_RNA (1)...(19): siRNA sense strand
uucaggcccucugugguua

SEQ ID NO: 979950 - RNA, 19 nt, Homo sapiens
  misc_RNA (1)...(19): siRNA sense strand
aguagugauuggagaacaa

SEQ ID NO: 979951 - RNA, 19 nt, Homo sapiens
  misc_RNA (1)...(19): siRNA sense strand
caaaaugguggugcaagua

SEQ ID NO: 979952 - RNA, 19 nt, Homo sapiens
  misc_RNA (1)...(19): siRNA sense strand
aggagggacuggcaaaugc

SEQ ID NO: 979953 - RNA, 19 nt, Homo sapiens
  misc_RNA (1)...(19): siRNA sense strand
gcugacacugacaacuaua

SEQ ID NO: 979954 - RNA, 19 nt, Homo sapiens
  misc_RNA (1)...(19): siRNA sense strand
ugcugacacugacaacuau

SEQ ID NO: 979955 - RNA, 19 nt, Homo sapiens
  misc_RNA (1)...(19): siRNA sense strand
gcaucacucucaugaaaug

SEQ ID NO: 979956 - RNA, 19 nt, Homo sapiens
  misc_RNA (1)...(19): siRNA sense strand
cugcaucacucucaugaaa

SEQ ID NO: 979957 - RNA, 19 nt, Homo sapiens
  misc_RNA (1)...(19): siRNA sense strand
ugaaauggcugagaaaauu

SEQ ID NO: 979958 - RNA, 19 nt, Homo sapiens
  misc_RNA (1)...(19): siRNA sense strand
agaggaggauguucucaga

SEQ ID NO: 979959 - RNA, 19 nt, Homo sapiens
  misc_RNA (1)...(19): siRNA sense strand
gaaaauugagggcuauuga

SEQ ID NO: 979960 - RNA, 19 nt, Homo sapiens
  misc_RNA (1)...(19): siRNA sense strand
ugcuguaucuguggacuua

SEQ ID NO: 979961 - RNA, 19 nt, Homo sapiens
  misc_RNA (1)...(19): siRNA sense strand
cuugucgacuagccaguua

SEQ ID NO: 979962 - RNA, 19 nt, Homo sapiens
  misc_RNA (1)...(19): siRNA sense strand
gcaccuugccuccaugucu

SEQ ID NO: 979963 - RNA, 19 nt, Homo sapiens
  misc_RNA (1)...(19): siRNA sense strand
cuguaucuguggacuuauu

SEQ ID NO: 979964 - RNA, 19 nt, Homo sapiens
  misc_RNA (1)...(19): siRNA sense strand
gagcauucccugcaucacu

SEQ ID NO: 979965 - RNA, 19 nt, Homo sapiens
  misc_RNA (1)...(19): siRNA sense strand
gaaaacuuccucccuauac

SEQ ID NO: 979966 - RNA, 19 nt, Homo sapiens
  misc_RNA (1)...(19): siRNA sense strand
ccaugucucucgcgugcau

SEQ ID NO: 979967 - RNA, 19 nt, Homo sapiens
  misc_RNA (1)...(19): siRNA sense strand
ucgacuagccaguuaugaa

SEQ ID NO: 979968 - RNA, 19 nt, Homo sapiens
  misc_RNA (1)...(19): siRNA sense strand
cgacuagccaguuaugaac

SEQ ID NO: 979969 - RNA, 19 nt, Homo sapiens
  misc_RNA (1)...(19): siRNA sense strand
gaaauggcugagaaaauug

SEQ ID NO: 979970 - RNA, 19 nt, Homo sapiens
  misc_RNA (1)...(19): siRNA sense strand
ucucagaaagggagcauuc

SEQ ID NO: 979971 - RNA, 19 nt, Homo sapiens
  misc_RNA (1)...(19): siRNA sense strand
cuggcucacuugucgacua

SEQ ID NO: 979972 - RNA, 19 nt, Homo sapiens
  misc_RNA (1)...(19): siRNA sense strand
ggaaaucagugaaauauug

SEQ ID NO: 979973 - RNA, 19 nt, Homo sapiens
  misc_RNA (1)...(19): siRNA sense strand
caaggaaugugaaauguua

SEQ ID NO: 979974 - RNA, 19 nt, Homo sapiens
  misc_RNA (1)...(19): siRNA sense strand
gaaaguggcugcagugaca

SEQ ID NO: 979975 - RNA, 19 nt, Homo sapiens
  misc_RNA (1)...(19): siRNA sense strand
aagaauagcuugucagaaa

SEQ ID NO: 979976 - RNA, 19 nt, Homo sapiens
  misc_RNA (1)...(19): siRNA sense strand
gaacuucaacagacaauuu

SEQ ID NO: 979977 - RNA, 19 nt, Homo sapiens
  misc_RNA (1)...(19): siRNA sense strand
ucacaggaaugguaaauau

SEQ ID NO: 979978 - RNA, 19 nt, Homo sapiens
  misc_RNA (1)...(19): siRNA sense strand
agacaaccauuucuaguaa

SEQ ID NO: 979979 - RNA, 19 nt, Homo sapiens
  misc_RNA (1)...(19): siRNA sense strand
gaggacacauuaacucuga

SEQ ID NO: 979980 - RNA, 19 nt, Homo sapiens
  misc_RNA (1)...(19): siRNA sense strand
aaacuuggacgguaacuua

SEQ ID NO: 979981 - RNA, 19 nt, Homo sapiens
  misc_RNA (1)...(19): siRNA sense strand
uaauggaacuggagaguga

SEQ ID NO: 979982 - RNA, 19 nt, Homo sapiens
  misc_RNA (1)...(19): siRNA sense strand
uuaagaaucugguugaaga

SEQ ID NO: 979983 - RNA, 19 nt, Homo sapiens
  misc_RNA (1)...(19): siRNA sense strand
caaagaaagacaaccauuu

SEQ ID NO: 979984 - RNA, 19 nt, Homo sapiens
  misc_RNA (1)...(19): siRNA sense strand
gaacuucagacuuuacaaa

SEQ ID NO: 979985 - RNA, 19 nt, Homo sapiens
  misc_RNA (1)...(19): siRNA sense strand
agagacacuucuucaaaua

SEQ ID NO: 979986 - RNA, 19 nt, Homo sapiens
  misc_RNA (1)...(19): siRNA sense strand
ggaaagagaaauugagaau

SEQ ID NO: 979987 - RNA, 19 nt, Homo sapiens
  misc_RNA (1)...(19): siRNA sense strand
caacuauacucacgaagau

SEQ ID NO: 979988 - RNA, 19 nt, Homo sapiens
  misc_RNA (1)...(19): siRNA sense strand
guagaaaacccacaauuua

SEQ ID NO: 979989 - RNA, 19 nt, Homo sapiens
  misc_RNA (1)...(19): siRNA sense strand
caacagacaauuuaucuuc

SEQ ID NO: 979990 - RNA, 19 nt, Homo sapiens
  misc_RNA (1)...(19): siRNA sense strand
cacaaucucucauacagaa

SEQ ID NO: 979991 - RNA, 19 nt, Homo sapiens
  misc_RNA (1)...(19): siRNA sense strand
gauauggccauuguaaaua

SEQ ID NO: 979992 - RNA, 19 nt, Homo sapiens
  misc_RNA (1)...(19): siRNA sense strand
gaugacauuugccauucua

SEQ ID NO: 979993 - RNA, 19 nt, Homo sapiens
  misc_RNA (1)...(19): siRNA sense strand
ccaagacacuucauucagu

SEQ ID NO: 979994 - RNA, 19 nt, Homo sapiens
  misc_RNA (1)...(19): siRNA sense strand
gacgguaacuuaaaugaag

SEQ ID NO: 979995 - RNA, 19 nt, Homo sapiens
  misc_RNA (1)...(19): siRNA sense strand
guauagaaauggaagcaau

SEQ ID NO: 979996 - RNA, 19 nt, Homo sapiens
  misc_RNA (1)...(19): siRNA sense strand
gaacucucaagcaucauua

SEQ ID NO: 979997 - RNA, 19 nt, Homo sapiens
  misc_RNA (1)...(19): siRNA sense strand
agaguacuauucagucuaa

SEQ ID NO: 979998 - RNA, 19 nt, Homo sapiens
  misc_RNA (1)...(19): siRNA sense strand
agacagaacucucaagcau

SEQ ID NO: 979999 - RNA, 19 nt, Homo sapiens
  misc_RNA (1)...(19): siRNA sense strand
gacaaauuauggaaagaga

SEQ ID NO: 980000 - RNA, 19 nt, Homo sapiens
  misc_RNA (1)...(19): siRNA sense strand
ugaaaccucuuaucuuuac

SEQ ID NO: 980001 - RNA, 19 nt, Homo sapiens
  misc_RNA (1)...(19): siRNA sense strand
acagaacucucaagcauca

SEQ ID NO: 980002 - RNA, 19 nt, Homo sapiens
  misc_RNA (1)...(19): siRNA sense strand
aaagaaagccagcuagaga

SEQ ID NO: 980003 - RNA, 19 nt, Homo sapiens
  misc_RNA (1)...(19): siRNA sense strand
cguccaagauccuaaauuc

SEQ ID NO: 980004 - RNA, 19 nt, Homo sapiens
  misc_RNA (1)...(19): siRNA sense strand
ggaagaggaugaaguugac

SEQ ID NO: 980005 - RNA, 19 nt, Homo sapiens
  misc_RNA (1)...(19): siRNA sense strand
aaagugauauggccauugu

SEQ ID NO: 980006 - RNA, 19 nt, Homo sapiens
  misc_RNA (1)...(19): siRNA sense strand
ccaauauucuguugauaca

SEQ ID NO: 980007 - RNA, 19 nt, Homo sapiens
  misc_RNA (1)...(19): siRNA sense strand
gaaagacaaagaaagacaa

SEQ ID NO: 980008 - RNA, 19 nt, Homo sapiens
  misc_RNA (1)...(19): siRNA sense strand
ugacaacuauacucacgaa

SEQ ID NO: 980009 - RNA, 19 nt, Homo sapiens
  misc_RNA (1)...(19): siRNA sense strand
gggauaccuuggaauuuga

SEQ ID NO: 980010 - RNA, 19 nt, Homo sapiens
  misc_RNA (1)...(19): siRNA sense strand
gaauagcuugucagaaauu

SEQ ID NO: 980011 - RNA, 19 nt, Homo sapiens
  misc_RNA (1)...(19): siRNA sense strand
gaaugaguauagaaaugga

SEQ ID NO: 980012 - RNA, 19 nt, Homo sapiens
  misc_RNA (1)...(19): siRNA sense strand
gauggaagcauuagaucaa

SEQ ID NO: 980013 - RNA, 19 nt, Homo sapiens
  misc_RNA (1)...(19): siRNA sense strand
ggauuugccuacagagaau

SEQ ID NO: 980014 - RNA, 19 nt, Homo sapiens
  misc_RNA (1)...(19): siRNA sense strand
gaaagccagcuagagauaa

SEQ ID NO: 980015 - RNA, 19 nt, Homo sapiens
  misc_RNA (1)...(19): siRNA sense strand
gaaaaccaauauucuguug

SEQ ID NO: 980016 - RNA, 19 nt, Homo sapiens
  misc_RNA (1)...(19): siRNA sense strand
gggaagaggaugaaguuga

SEQ ID NO: 980017 - RNA, 19 nt, Homo sapiens
  misc_RNA (1)...(19): siRNA sense strand
gagacacuucuucaaauaa

SEQ ID NO: 980018 - RNA, 19 nt, Homo sapiens
  misc_RNA (1)...(19): siRNA sense strand
cuucggauuugaaagguua

SEQ ID NO: 980019 - RNA, 19 nt, Homo sapiens
  misc_RNA (1)...(19): siRNA sense strand
ccagacaaauuauggaaag

SEQ ID NO: 980020 - RNA, 19 nt, Homo sapiens
  misc_RNA (1)...(19): siRNA sense strand
ggaaucauuucaggcuuug

SEQ ID NO: 980021 - RNA, 19 nt, Homo sapiens
  misc_RNA (1)...(19): siRNA sense strand
cuacagagaaucaagaaga

SEQ ID NO: 980022 - RNA, 19 nt, Homo sapiens
  misc_RNA (1)...(19): siRNA sense strand
gauguucacaggaauggua

SEQ ID NO: 980023 - RNA, 19 nt, Homo sapiens
  misc_RNA (1)...(19): siRNA sense strand
gcaaggaaugugaaauguu

SEQ ID NO: 980024 - RNA, 19 nt, Homo sapiens
  misc_RNA (1)...(19): siRNA sense strand
aaagcucacuuggaaauga

SEQ ID NO: 980025 - RNA, 19 nt, Homo sapiens
  misc_RNA (1)...(19): siRNA sense strand
ggaagcauuagaucaacua

SEQ ID NO: 980026 - RNA, 19 nt, Homo sapiens
  misc_RNA (1)...(19): siRNA sense strand
gggaaacugugucaaaauu

SEQ ID NO: 980027 - RNA, 19 nt, Homo sapiens
  misc_RNA (1)...(19): siRNA sense strand
gacaaccauuucuaguaaa

SEQ ID NO: 980028 - RNA, 19 nt, Homo sapiens
  misc_RNA (1)...(19): siRNA sense strand
gucucaagcugauacagua

SEQ ID NO: 980029 - RNA, 19 nt, Homo sapiens
  misc_RNA (1)...(19): siRNA sense strand
aaacacaccagcuucuaaa

SEQ ID NO: 980030 - RNA, 19 nt, Homo sapiens
  misc_RNA (1)...(19): siRNA sense strand
agaaauggaagcaaugaaa

SEQ ID NO: 980031 - RNA, 19 nt, Homo sapiens
  misc_RNA (1)...(19): siRNA sense strand
uaaagaaauucccaucacu

SEQ ID NO: 980032 - RNA, 19 nt, Homo sapiens
  misc_RNA (1)...(19): siRNA sense strand
gaauuagaggcauuaguga

SEQ ID NO: 980033 - RNA, 19 nt, Homo sapiens
  misc_RNA (1)...(19): siRNA sense strand
gccauucuaucaaacaaau

SEQ ID NO: 980034 - RNA, 19 nt, Homo sapiens
  misc_RNA (1)...(19): siRNA sense strand
ucaagcugauacaguaauu

SEQ ID NO: 980035 - RNA, 19 nt, Homo sapiens
  misc_RNA (1)...(19): siRNA sense strand
ggacgguaacuuaaaugaa

SEQ ID NO: 980036 - RNA, 19 nt, Homo sapiens
  misc_RNA (1)...(19): siRNA sense strand
caaccuugaaacaacauua

SEQ ID NO: 980037 - RNA, 19 nt, Homo sapiens
  misc_RNA (1)...(19): siRNA sense strand
gaagaauacagcaaagagu

SEQ ID NO: 980038 - RNA, 19 nt, Homo sapiens
  misc_RNA (1)...(19): siRNA sense strand
guacuauucagucuaaguu

SEQ ID NO: 980039 - RNA, 19 nt, Homo sapiens
  misc_RNA (1)...(19): siRNA sense strand
gaagaaaagaguacuauuc

SEQ ID NO: 980040 - RNA, 19 nt, Homo sapiens
  misc_RNA (1)...(19): siRNA sense strand
guacuuacagaauuaccua

SEQ ID NO: 980041 - RNA, 19 nt, Homo sapiens
  misc_RNA (1)...(19): siRNA sense strand
uacagagaaucaagaagaa

SEQ ID NO: 980042 - RNA, 19 nt, Homo sapiens
  misc_RNA (1)...(19): siRNA sense strand
auucaaaccuaccaaucua

SEQ ID NO: 980043 - RNA, 19 nt, Homo sapiens
  misc_RNA (1)...(19): siRNA sense strand
ucgaaugaguauagaaaug

SEQ ID NO: 980044 - RNA, 19 nt, Homo sapiens
  misc_RNA (1)...(19): siRNA sense strand
uagacuuacugaagacaaa

SEQ ID NO: 980045 - RNA, 19 nt, Homo sapiens
  misc_RNA (1)...(19): siRNA sense strand
aaagccagcuagagauaau

SEQ ID NO: 980046 - RNA, 19 nt, Homo sapiens
  misc_RNA (1)...(19): siRNA sense strand
agaaagccagcuagagaua

SEQ ID NO: 980047 - RNA, 19 nt, Homo sapiens
  misc_RNA (1)...(19): siRNA sense strand
gaacagucucccucaaagu

SEQ ID NO: 980048 - RNA, 19 nt, Homo sapiens
  misc_RNA (1)...(19): siRNA sense strand
ggcaaggaaugugaaaugu

SEQ ID NO: 980049 - RNA, 19 nt, Homo sapiens
  misc_RNA (1)...(19): siRNA sense strand
gaaauuggcaaggaaugug

SEQ ID NO: 980050 - RNA, 19 nt, Homo sapiens
  misc_RNA (1)...(19): siRNA sense strand
uggaaucauuucaggcuuu

SEQ ID NO: 980051 - RNA, 19 nt, Homo sapiens
  misc_RNA (1)...(19): siRNA sense strand
acaaacugauccagauguu

SEQ ID NO: 980052 - RNA, 19 nt, Homo sapiens
  misc_RNA (1)...(19): siRNA sense strand
caguaauucuggauaaauc

SEQ ID NO: 980053 - RNA, 19 nt, Homo sapiens
  misc_RNA (1)...(19): siRNA sense strand
gauacaguaauucuggaua

SEQ ID NO: 980054 - RNA, 19 nt, Homo sapiens
  misc_RNA (1)...(19): siRNA sense strand
aggcauuagugaagaaauu

SEQ ID NO: 980055 - RNA, 19 nt, Homo sapiens
  misc_RNA (1)...(19): siRNA sense strand
uuagagaagcaacaaauga

SEQ ID NO: 980056 - RNA, 19 nt, Homo sapiens
  misc_RNA (1)...(19): siRNA sense strand
aagacaaccauuucuagua

SEQ ID NO: 980057 - RNA, 19 nt, Homo sapiens
  misc_RNA (1)...(19): siRNA sense strand
ucagggaaacugugucaaa

SEQ ID NO: 980058 - RNA, 19 nt, Homo sapiens
  misc_RNA (1)...(19): siRNA sense strand
uagaugacauuugccauuc

SEQ ID NO: 980059 - RNA, 19 nt, Homo sapiens
  misc_RNA (1)...(19): siRNA sense strand
agggauaccuuggaauuug

SEQ ID NO: 980060 - RNA, 19 nt, Homo sapiens
  misc_RNA (1)...(19): siRNA sense strand
cuagagauaauccagcuaa

SEQ ID NO: 980061 - RNA, 19 nt, Homo sapiens
  misc_RNA (1)...(19): siRNA sense strand
ugauauggccauuguaaau

SEQ ID NO: 980062 - RNA, 19 nt, Homo sapiens
  misc_RNA (1)...(19): siRNA sense strand
gcagaaugucagcauggua

SEQ ID NO: 980063 - RNA, 19 nt, Homo sapiens
  misc_RNA (1)...(19): siRNA sense strand
caaaguuaauuccguuacu

SEQ ID NO: 980064 - RNA, 19 nt, Homo sapiens
  misc_RNA (1)...(19): siRNA sense strand
gcagugacacagaauaugg

SEQ ID NO: 980065 - RNA, 19 nt, Homo sapiens
  misc_RNA (1)...(19): siRNA sense strand
caagauacacacuguccuu

SEQ ID NO: 980066 - RNA, 19 nt, Homo sapiens
  misc_RNA (1)...(19): siRNA sense strand
guuccaagauacacacugu

SEQ ID NO: 980067 - RNA, 19 nt, Homo sapiens
  misc_RNA (1)...(19): siRNA sense strand
ggcauuagugaagaaauua

SEQ ID NO: 980068 - RNA, 19 nt, Homo sapiens
  misc_RNA (1)...(19): siRNA sense strand
agaauuagaggcauuagug

SEQ ID NO: 980069 - RNA, 19 nt, Homo sapiens
  misc_RNA (1)...(19): siRNA sense strand
acaggaaugguaaauauga

SEQ ID NO: 980070 - RNA, 19 nt, Homo sapiens
  misc_RNA (1)...(19): siRNA sense strand
aaacugauccagauguuca

SEQ ID NO: 980071 - RNA, 19 nt, Homo sapiens
  misc_RNA (1)...(19): siRNA sense strand
gacauuugccauucuauca

SEQ ID NO: 980072 - RNA, 19 nt, Homo sapiens
  misc_RNA (1)...(19): siRNA sense strand
guacaacgcugaccucuuc

SEQ ID NO: 980073 - RNA, 19 nt, Homo sapiens
  misc_RNA (1)...(19): siRNA sense strand
gagagaagcccuuugaaga

SEQ ID NO: 980074 - RNA, 19 nt, Homo sapiens
  misc_RNA (1)...(19): siRNA sense strand
gaaccuagacuauuaccaa

SEQ ID NO: 980075 - RNA, 19 nt, Homo sapiens
  misc_RNA (1)...(19): siRNA sense strand
agcagaaccuagacuauua

SEQ ID NO: 980076 - RNA, 19 nt, Homo sapiens
  misc_RNA (1)...(19): siRNA sense strand
caucacagaucauuacauc

SEQ ID NO: 980077 - RNA, 19 nt, Homo sapiens
  misc_RNA (1)...(19): siRNA sense strand
gcgaagggcccuaugacua

SEQ ID NO: 980078 - RNA, 19 nt, Homo sapiens
  misc_RNA (1)...(19): siRNA sense strand
ucccaucgcauuauaauua

SEQ ID NO: 980079 - RNA, 19 nt, Homo sapiens
  misc_RNA (1)...(19): siRNA sense strand
acaacuaccuugaguacaa

SEQ ID NO: 980080 - RNA, 19 nt, Homo sapiens
  misc_RNA (1)...(19): siRNA sense strand
gagcgaugcugaguucuug

SEQ ID NO: 980081 - RNA, 19 nt, Homo sapiens
  misc_RNA (1)...(19): siRNA sense strand
ggacuucgauggcggaaac

SEQ ID NO: 980082 - RNA, 19 nt, Homo sapiens
  misc_RNA (1)...(19): siRNA sense strand
gagaagugauucccaagag

SEQ ID NO: 980083 - RNA, 19 nt, Homo sapiens
  misc_RNA (1)...(19): siRNA sense strand
ccacauacucccaaugaaa

SEQ ID NO: 980084 - RNA, 19 nt, Homo sapiens
  misc_RNA (1)...(19): siRNA sense strand
cccaagagauugcaagaga

SEQ ID NO: 980085 - RNA, 19 nt, Homo sapiens
  misc_RNA (1)...(19): siRNA sense strand
gagaagaacacaccagauc

SEQ ID NO: 980086 - RNA, 19 nt, Homo sapiens
  misc_RNA (1)...(19): siRNA sense strand
gcagagaggaaggaugaua

SEQ ID NO: 980087 - RNA, 19 nt, Homo sapiens
  misc_RNA (1)...(19): siRNA sense strand
cagcgaagccuacuggaaa

SEQ ID NO: 980088 - RNA, 19 nt, Homo sapiens
  misc_RNA (1)...(19): siRNA sense strand
gcaucagucucaccaugaa

SEQ ID NO: 980089 - RNA, 19 nt, Homo sapiens
  misc_RNA (1)...(19): siRNA sense strand
gcagcaaccucaggagaug

SEQ ID NO: 980090 - RNA, 19 nt, Homo sapiens
  misc_RNA (1)...(19): siRNA sense strand
ccaacgcccugucauuaug

SEQ ID NO: 980091 - RNA, 19 nt, Homo sapiens
  misc_RNA (1)...(19): siRNA sense strand
agaccuaucuucucuucuu

SEQ ID NO: 980092 - RNA, 19 nt, Homo sapiens
  misc_RNA (1)...(19): siRNA sense strand
ccaagagauugcaagagaa

SEQ ID NO: 980093 - RNA, 19 nt, Homo sapiens
  misc_RNA (1)...(19): siRNA sense strand
caagagauugcaagagaaa

SEQ ID NO: 980094 - RNA, 19 nt, Homo sapiens
  misc_RNA (1)...(19): siRNA sense strand
gagauugggaaccuuauga

SEQ ID NO: 980095 - RNA, 19 nt, Homo sapiens
  misc_RNA (1)...(19): siRNA sense strand
gcaggucgccuacuucaag

SEQ ID NO: 980096 - RNA, 19 nt, Homo sapiens
  misc_RNA (1)...(19): siRNA sense strand
ccagagcgcccuugguuug

SEQ ID NO: 980097 - RNA, 19 nt, Homo sapiens
  misc_RNA (1)...(19): siRNA sense strand
uuucuucgcuuaugauguu

SEQ ID NO: 980098 - RNA, 19 nt, Homo sapiens
  misc_RNA (1)...(19): siRNA sense strand
caaaccaugucuggaguga

SEQ ID NO: 980099 - RNA, 19 nt, Homo sapiens
  misc_RNA (1)...(19): siRNA sense strand
gagaagcccuuugaagacu

SEQ ID NO: 980100 - RNA, 19 nt, Homo sapiens
  misc_RNA (1)...(19): siRNA sense strand
gaagugauucccaagagau

SEQ ID NO: 980101 - RNA, 19 nt, Homo sapiens
  misc_RNA (1)...(19): siRNA sense strand
ggacaacugcauccugaau

SEQ ID NO: 980102 - RNA, 19 nt, Homo sapiens
  misc_RNA (1)...(19): siRNA sense strand
auaauuaucugcaguuugc

SEQ ID NO: 980103 - RNA, 19 nt, Homo sapiens
  misc_RNA (1)...(19): siRNA sense strand
cagcagaaccuagacuauu

SEQ ID NO: 980104 - RNA, 19 nt, Homo sapiens
  misc_RNA (1)...(19): siRNA sense strand
ggagaagugauucccaaga

SEQ ID NO: 980105 - RNA, 19 nt, Homo sapiens
  misc_RNA (1)...(19): siRNA sense strand
ggaaaugcagcagaaccua

SEQ ID NO: 980106 - RNA, 19 nt, Homo sapiens
  misc_RNA (1)...(19): siRNA sense strand
gaagagguccaggcagaga

SEQ ID NO: 980107 - RNA, 19 nt, Homo sapiens
  misc_RNA (1)...(19): siRNA sense strand
ugacuacgauggcuacaac

SEQ ID NO: 980108 - RNA, 19 nt, Homo sapiens
  misc_RNA (1)...(19): siRNA sense strand
gcagagugcccaccuguac

SEQ ID NO: 980109 - RNA, 19 nt, Homo sapiens
  misc_RNA (1)...(19): siRNA sense strand
ggaaaucgagacccuugug

SEQ ID NO: 980110 - RNA, 19 nt, Homo sapiens
  misc_RNA (1)...(19): siRNA sense strand
cagcuaugcuuggagaaga

SEQ ID NO: 980111 - RNA, 19 nt, Homo sapiens
  misc_RNA (1)...(19): siRNA sense strand
gggcaauccugagcacaug

SEQ ID NO: 980112 - RNA, 19 nt, Homo sapiens
  misc_RNA (1)...(19): siRNA sense strand
gaacuccaaacuccugaau

SEQ ID NO: 980113 - RNA, 19 nt, Homo sapiens
  misc_RNA (1)...(19): siRNA sense strand
ucgagacccuuguggaaga

SEQ ID NO: 980114 - RNA, 19 nt, Homo sapiens
  misc_RNA (1)...(19): siRNA sense strand
gaagaacacaccagaucca

SEQ ID NO: 980115 - RNA, 19 nt, Homo sapiens
  misc_RNA (1)...(19): siRNA sense strand
acauggaaaugcagcagaa

SEQ ID NO: 980116 - RNA, 19 nt, Homo sapiens
  misc_RNA (1)...(19): siRNA sense strand
ccaaugacgaggugaugaa

SEQ ID NO: 980117 - RNA, 19 nt, Homo sapiens
  misc_RNA (1)...(19): siRNA sense strand
gaagagccgugggauucuc

SEQ ID NO: 980118 - RNA, 19 nt, Homo sapiens
  misc_RNA (1)...(19): siRNA sense strand
gacuacagcgccauccuuu

SEQ ID NO: 980119 - RNA, 19 nt, Homo sapiens
  misc_RNA (1)...(19): siRNA sense strand
caggagauugggaaccuua

SEQ ID NO: 980120 - RNA, 19 nt, Homo sapiens
  misc_RNA (1)...(19): siRNA sense strand
gaaacagccguacgcaucu

SEQ ID NO: 980121 - RNA, 19 nt, Homo sapiens
  misc_RNA (1)...(19): siRNA sense strand
agaagugauucccaagaga

SEQ ID NO: 980122 - RNA, 19 nt, Homo sapiens
  misc_RNA (1)...(19): siRNA sense strand
gcagcagaaccuagacuau

SEQ ID NO: 980123 - RNA, 19 nt, Homo sapiens
  misc_RNA (1)...(19): siRNA sense strand
gaaaaguucuaugguguca

SEQ ID NO: 980124 - RNA, 19 nt, Homo sapiens
  misc_RNA (1)...(19): siRNA sense strand
gucaggagcugcagagacu

SEQ ID NO: 980125 - RNA, 19 nt, Homo sapiens
  misc_RNA (1)...(19): siRNA sense strand
gcaguuugccuacuauaac

SEQ ID NO: 980126 - RNA, 19 nt, Homo sapiens
  misc_RNA (1)...(19): siRNA sense strand
gaagucagaacgggaaaca

SEQ ID NO: 980127 - RNA, 19 nt, Homo sapiens
  misc_RNA (1)...(19): siRNA sense strand
caucauggaguccuacuuc

SEQ ID NO: 980128 - RNA, 19 nt, Homo sapiens
  misc_RNA (1)...(19): siRNA sense strand
ggugauggacggcguaauc

SEQ ID NO: 980129 - RNA, 19 nt, Homo sapiens
  misc_RNA (1)...(19): siRNA sense strand
ugcagagacugaccaaugu

SEQ ID NO: 980130 - RNA, 19 nt, Homo sapiens
  misc_RNA (1)...(19): siRNA sense strand
aaccuagacuauuaccaaa

SEQ ID NO: 980131 - RNA, 19 nt, Homo sapiens
  misc_RNA (1)...(19): siRNA sense strand
gcuccaacgcccugucauu

SEQ ID NO: 980132 - RNA, 19 nt, Homo sapiens
  misc_RNA (1)...(19): siRNA sense strand
uggugucacugucuucaaa

SEQ ID NO: 980133 - RNA, 19 nt, Homo sapiens
  misc_RNA (1)...(19): siRNA sense strand
cgagagaagcccuuugaag

SEQ ID NO: 980134 - RNA, 19 nt, Homo sapiens
  misc_RNA (1)...(19): siRNA sense strand
uccagguccucaacuguaa

SEQ ID NO: 980135 - RNA, 19 nt, Homo sapiens
  misc_RNA (1)...(19): siRNA sense strand
ucacagaucauuacaucca

SEQ ID NO: 980136 - RNA, 19 nt, Homo sapiens
  misc_RNA (1)...(19): siRNA sense strand
caguuugccuacuauaaca

SEQ ID NO: 980137 - RNA, 19 nt, Homo sapiens
  misc_RNA (1)...(19): siRNA sense strand
ggagcgaugcugaguucuu

SEQ ID NO: 980138 - RNA, 19 nt, Homo sapiens
  misc_RNA (1)...(19): siRNA sense strand
cuccaacgcccugucauua

SEQ ID NO: 980139 - RNA, 19 nt, Homo sapiens
  misc_RNA (1)...(19): siRNA sense strand
acuccaaacuccugaaugg

SEQ ID NO: 980140 - RNA, 19 nt, Homo sapiens
  misc_RNA (1)...(19): siRNA sense strand
uaugaaggcaucagucuca

SEQ ID NO: 980141 - RNA, 19 nt, Homo sapiens
  misc_RNA (1)...(19): siRNA sense strand
aagagaaacagaagucaga

SEQ ID NO: 980142 - RNA, 19 nt, Homo sapiens
  misc_RNA (1)...(19): siRNA sense strand
gaccuaucuucucuucuuc

SEQ ID NO: 980143 - RNA, 19 nt, Homo sapiens
  misc_RNA (1)...(19): siRNA sense strand
aaccaugucuggagugaag

SEQ ID NO: 980144 - RNA, 19 nt, Homo sapiens
  misc_RNA (1)...(19): siRNA sense strand
cugcagagacugaccaaug

SEQ ID NO: 980145 - RNA, 19 nt, Homo sapiens
  misc_RNA (1)...(19): siRNA sense strand
ggagaagaacacaccagau

SEQ ID NO: 980146 - RNA, 19 nt, Homo sapiens
  misc_RNA (1)...(19): siRNA sense strand
gcuguugaaugugccaaga

SEQ ID NO: 980147 - RNA, 19 nt, Homo sapiens
  misc_RNA (1)...(19): siRNA sense strand
cgaagggcccuaugacuac

SEQ ID NO: 980148 - RNA, 19 nt, Homo sapiens
  misc_RNA (1)...(19): siRNA sense strand
aauacuuuguggccuauga

SEQ ID NO: 980149 - RNA, 19 nt, Homo sapiens
  misc_RNA (1)...(19): siRNA sense strand
aaacccacauggagugaag

SEQ ID NO: 980150 - RNA, 19 nt, Homo sapiens
  misc_RNA (1)...(19): siRNA sense strand
gggcaagaaggcaaaguuc

SEQ ID NO: 980151 - RNA, 19 nt, Homo sapiens
  misc_RNA (1)...(19): siRNA sense strand
ccaaggagucacuggaugu

SEQ ID NO: 980152 - RNA, 19 nt, Homo sapiens
  misc_RNA (1)...(19): siRNA sense strand
uggaagagaagaccaagga

SEQ ID NO: 980153 - RNA, 19 nt, Homo sapiens
  misc_RNA (1)...(19): siRNA sense strand
gcaagagaaacagaaguca

SEQ ID NO: 980154 - RNA, 19 nt, Homo sapiens
  misc_RNA (1)...(19): siRNA sense strand
gugagagugccaaggagua

SEQ ID NO: 980155 - RNA, 19 nt, Homo sapiens
  misc_RNA (1)...(19): siRNA sense strand
gcuacaacuaccuugagua

SEQ ID NO: 980156 - RNA, 19 nt, Homo sapiens
  misc_RNA (1)...(19): siRNA sense strand
uggaagagccgugggauuc

SEQ ID NO: 980157 - RNA, 19 nt, Homo sapiens
  misc_RNA (1)...(19): siRNA sense strand
cuacagcgccauccuuuac

SEQ ID NO: 980158 - RNA, 19 nt, Homo sapiens
  misc_RNA (1)...(19): siRNA sense strand
aggcagagaggaaggauga

SEQ ID NO: 980159 - RNA, 19 nt, Homo sapiens
  misc_RNA (1)...(19): siRNA sense strand
aaaguucuauggugucacu

SEQ ID NO: 980160 - RNA, 19 nt, Homo sapiens
  misc_RNA (1)...(19): siRNA sense strand
ggagauugggaaccuuaug

SEQ ID NO: 980161 - RNA, 19 nt, Homo sapiens
  misc_RNA (1)...(19): siRNA sense strand
ccacccaagucgagagaag

SEQ ID NO: 980162 - RNA, 19 nt, Homo sapiens
  misc_RNA (1)...(19): siRNA sense strand
cccaucgcauuauaauuau

SEQ ID NO: 980163 - RNA, 19 nt, Homo sapiens
  misc_RNA (1)...(19): siRNA sense strand
gacaacugcauccugaaug

SEQ ID NO: 980164 - RNA, 19 nt, Homo sapiens
  misc_RNA (1)...(19): siRNA sense strand
ggcaucagucucaccauga

SEQ ID NO: 980165 - RNA, 19 nt, Homo sapiens
  misc_RNA (1)...(19): siRNA sense strand
aaauuuggccuauuaugca

SEQ ID NO: 980166 - RNA, 19 nt, Homo sapiens
  misc_RNA (1)...(19): siRNA sense strand
agggagcgaugcugaguuc

SEQ ID NO: 980167 - RNA, 19 nt, Homo sapiens
  misc_RNA (1)...(19): siRNA sense strand
agaggaaggaugauaguca

SEQ ID NO: 980168 - RNA, 19 nt, Homo sapiens
  misc_RNA (1)...(19): siRNA sense strand
gcaagaaggcaaaguuccu

SEQ ID NO: 980169 - RNA, 19 nt, Homo sapiens
  misc_RNA (1)...(19): siRNA sense strand
gauggacggcguaaucucu

SEQ ID NO: 980170 - RNA, 19 nt, Homo sapiens
  misc_RNA (1)...(19): siRNA sense strand
gaccaaggagucacuggau

SEQ ID NO: 980171 - RNA, 19 nt, Homo sapiens
  misc_RNA (1)...(19): siRNA sense strand
gcccuugguuugccuuucu

SEQ ID NO: 980172 - RNA, 19 nt, Homo sapiens
  misc_RNA (1)...(19): siRNA sense strand
gacaaucacugcagagaua

SEQ ID NO: 980173 - RNA, 19 nt, Homo sapiens
  misc_RNA (1)...(19): siRNA sense strand
gcaaugcgccacucaauga

SEQ ID NO: 980174 - RNA, 19 nt, Homo sapiens
  misc_RNA (1)...(19): siRNA sense strand
gaggauagcaggcguaaau

SEQ ID NO: 980175 - RNA, 19 nt, Homo sapiens
  misc_RNA (1)...(19): siRNA sense strand
ucuaaucacugcaugcuuu

SEQ ID NO: 980176 - RNA, 19 nt, Homo sapiens
  misc_RNA (1)...(19): siRNA sense strand
auagugaccugacuuguga

SEQ ID NO: 980177 - RNA, 19 nt, Homo sapiens
  misc_RNA (1)...(19): siRNA sense strand
gcguaaauaccuacuguaa

SEQ ID NO: 980178 - RNA, 19 nt, Homo sapiens
  misc_RNA (1)...(19): siRNA sense strand
gacaguaguaccagugaua

SEQ ID NO: 980179 - RNA, 19 nt, Homo sapiens
  misc_RNA (1)...(19): siRNA sense strand
gaaauuaacauugcgucuu

SEQ ID NO: 980180 - RNA, 19 nt, Homo sapiens
  misc_RNA (1)...(19): siRNA sense strand
aaauuaacauugcgucuuc

SEQ ID NO: 980181 - RNA, 19 nt, Homo sapiens
  misc_RNA (1)...(19): siRNA sense strand
gccacucaaugaagaaauu

SEQ ID NO: 980182 - RNA, 19 nt, Homo sapiens
  misc_RNA (1)...(19): siRNA sense strand
aaucucaaguucagaaaga

SEQ ID NO: 980183 - RNA, 19 nt, Homo sapiens
  misc_RNA (1)...(19): siRNA sense strand
ugaccugacuugugacuca

SEQ ID NO: 980184 - RNA, 19 nt, Homo sapiens
  misc_RNA (1)...(19): siRNA sense strand
gcaauccagugauaaacag

SEQ ID NO: 980185 - RNA, 19 nt, Homo sapiens
  misc_RNA (1)...(19): siRNA sense strand
gauagugaccugacuugug

SEQ ID NO: 980186 - RNA, 19 nt, Homo sapiens
  misc_RNA (1)...(19): siRNA sense strand
aacauugcgucuucagaua

SEQ ID NO: 980187 - RNA, 19 nt, Homo sapiens
  misc_RNA (1)...(19): siRNA sense strand
caaaacaucugcuggcaau

SEQ ID NO: 980188 - RNA, 19 nt, Homo sapiens
  misc_RNA (1)...(19): siRNA sense strand
cugcaaggaagaaauauaa

SEQ ID NO: 980189 - RNA, 19 nt, Homo sapiens
  misc_RNA (1)...(19): siRNA sense strand
uagcaggcguaaauaccua

SEQ ID NO: 980190 - RNA, 19 nt, Homo sapiens
  misc_RNA (1)...(19): siRNA sense strand
gaacugagaagggacucuu

SEQ ID NO: 980191 - RNA, 19 nt, Homo sapiens
  misc_RNA (1)...(19): siRNA sense strand
gcagaaguuguugaccuua

SEQ ID NO: 980192 - RNA, 19 nt, Homo sapiens
  misc_RNA (1)...(19): siRNA sense strand
uaacauugcgucuucagau

SEQ ID NO: 980193 - RNA, 19 nt, Homo sapiens
  misc_RNA (1)...(19): siRNA sense strand
cuguagaacuggaaucuca

SEQ ID NO: 980194 - RNA, 19 nt, Homo sapiens
  misc_RNA (1)...(19): siRNA sense strand
ggacaguaguaccagugau

SEQ ID NO: 980195 - RNA, 19 nt, Homo sapiens
  misc_RNA (1)...(19): siRNA sense strand
aaccggcaauccagugaua

SEQ ID NO: 980196 - RNA, 19 nt, Homo sapiens
  misc_RNA (1)...(19): siRNA sense strand
guggucaccuggcugauuc

SEQ ID NO: 980197 - RNA, 19 nt, Homo sapiens
  misc_RNA (1)...(19): siRNA sense strand
guucaagagcacaguaauu

SEQ ID NO: 980198 - RNA, 19 nt, Homo sapiens
  misc_RNA (1)...(19): siRNA sense strand
acccagaagugguaaaugu

SEQ ID NO: 980199 - RNA, 19 nt, Homo sapiens
  misc_RNA (1)...(19): siRNA sense strand
gcugcaaggaagaaauaua

SEQ ID NO: 980200 - RNA, 19 nt, Homo sapiens
  misc_RNA (1)...(19): siRNA sense strand
gucccgaucugaaagugaa

SEQ ID NO: 980201 - RNA, 19 nt, Homo sapiens
  misc_RNA (1)...(19): siRNA sense strand
uauguuagcaccaggcaaa

SEQ ID NO: 980202 - RNA, 19 nt, Homo sapiens
  misc_RNA (1)...(19): siRNA sense strand
gggagcagcaagacaauca

SEQ ID NO: 980203 - RNA, 19 nt, Homo sapiens
  misc_RNA (1)...(19): siRNA sense strand
ggccgagucgccaagguua

SEQ ID NO: 980204 - RNA, 19 nt, Homo sapiens
  misc_RNA (1)...(19): siRNA sense strand
caagagcacaguaauucug

SEQ ID NO: 980205 - RNA, 19 nt, Homo sapiens
  misc_RNA (1)...(19): siRNA sense strand
guaguaccagugauaguga

SEQ ID NO: 980206 - RNA, 19 nt, Homo sapiens
  misc_RNA (1)...(19): siRNA sense strand
acaguuauuucuucaaugc

SEQ ID NO: 980207 - RNA, 19 nt, Homo sapiens
  misc_RNA (1)...(19): siRNA sense strand
ccacucaaugaagaaauua

SEQ ID NO: 980208 - RNA, 19 nt, Homo sapiens
  misc_RNA (1)...(19): siRNA sense strand
ggaaucucaaguucagaaa

SEQ ID NO: 980209 - RNA, 19 nt, Homo sapiens
  misc_RNA (1)...(19): siRNA sense strand
cagaguguuucuucaugga

SEQ ID NO: 980210 - RNA, 19 nt, Homo sapiens
  misc_RNA (1)...(19): siRNA sense strand
agaggcaggucauuuggau

SEQ ID NO: 980211 - RNA, 19 nt, Homo sapiens
  misc_RNA (1)...(19): siRNA sense strand
ucagggagcagcaagacaa

SEQ ID NO: 980212 - RNA, 19 nt, Homo sapiens
  misc_RNA (1)...(19): siRNA sense strand
gagagugacaagccuacaa

SEQ ID NO: 980213 - RNA, 19 nt, Homo sapiens
  misc_RNA (1)...(19): siRNA sense strand
uacguugucuuccgcagaa

SEQ ID NO: 980214 - RNA, 19 nt, Homo sapiens
  misc_RNA (1)...(19): siRNA sense strand
ggugugauucagaguguuu

SEQ ID NO: 980215 - RNA, 19 nt, Homo sapiens
  misc_RNA (1)...(19): siRNA sense strand
gauagugaaguagagauug

SEQ ID NO: 980216 - RNA, 19 nt, Homo sapiens
  misc_RNA (1)...(19): siRNA sense strand
agaaacggcgguagaagga

SEQ ID NO: 980217 - RNA, 19 nt, Homo sapiens
  misc_RNA (1)...(19): siRNA sense strand
gauucagaguguuucuuca

SEQ ID NO: 980218 - RNA, 19 nt, Homo sapiens
  misc_RNA (1)...(19): siRNA sense strand
cuccaguuguagcucauua

SEQ ID NO: 980219 - RNA, 19 nt, Homo sapiens
  misc_RNA (1)...(19): siRNA sense strand
ggauagcaggcguaaauac

SEQ ID NO: 980220 - RNA, 19 nt, Homo sapiens
  misc_RNA (1)...(19): siRNA sense strand
caguuagcauccacagaga

SEQ ID NO: 980221 - RNA, 19 nt, Homo sapiens
  misc_RNA (1)...(19): siRNA sense strand
auagugaaguagagauugu

SEQ ID NO: 980222 - RNA, 19 nt, Homo sapiens
  misc_RNA (1)...(19): siRNA sense strand
guaguucaagagcacagua

SEQ ID NO: 980223 - RNA, 19 nt, Homo sapiens
  misc_RNA (1)...(19): siRNA sense strand
ggagacccuucaggagugu

SEQ ID NO: 980224 - RNA, 19 nt, Homo sapiens
  misc_RNA (1)...(19): siRNA sense strand
agaugaugaugaagagguu

SEQ ID NO: 980225 - RNA, 19 nt, Homo sapiens
  misc_RNA (1)...(19): siRNA sense strand
cagaaguuguugaccuuac

SEQ ID NO: 980226 - RNA, 19 nt, Homo sapiens
  misc_RNA (1)...(19): siRNA sense strand
aaaagcaucugaacaagag

SEQ ID NO: 980227 - RNA, 19 nt, Homo sapiens
  misc_RNA (1)...(19): siRNA sense strand
gcucgggcacgcaguaugu

SEQ ID NO: 980228 - RNA, 19 nt, Homo sapiens
  misc_RNA (1)...(19): siRNA sense strand
guggugugauucagagugu

SEQ ID NO: 980229 - RNA, 19 nt, Homo sapiens
  misc_RNA (1)...(19): siRNA sense strand
gcagaggcaggucauuugg

SEQ ID NO: 980230 - RNA, 19 nt, Homo sapiens
  misc_RNA (1)...(19): siRNA sense strand
uagcauccacagagaguga

SEQ ID NO: 980231 - RNA, 19 nt, Homo sapiens
  misc_RNA (1)...(19): siRNA sense strand
caugcaagguguguucauc

SEQ ID NO: 980232 - RNA, 19 nt, Homo sapiens
  misc_RNA (1)...(19): siRNA sense strand
ggcaaugcgccacucaaug

SEQ ID NO: 980233 - RNA, 19 nt, Homo sapiens
  misc_RNA (1)...(19): siRNA sense strand
cggcugcaguaguucaaga

SEQ ID NO: 980234 - RNA, 19 nt, Homo sapiens
  misc_RNA (1)...(19): siRNA sense strand
caagcacgagcucaucaga

SEQ ID NO: 980235 - RNA, 19 nt, Homo sapiens
  misc_RNA (1)...(19): siRNA sense strand
cugcugcaaggaagaaaua

SEQ ID NO: 980236 - RNA, 19 nt, Homo sapiens
  misc_RNA (1)...(19): siRNA sense strand
gggaggcugcugcaaggaa

SEQ ID NO: 980237 - RNA, 19 nt, Homo sapiens
  misc_RNA (1)...(19): siRNA sense strand
ggcaauccagugauaaaca

SEQ ID NO: 980238 - RNA, 19 nt, Homo sapiens
  misc_RNA (1)...(19): siRNA sense strand
aggcguaaauaccuacugu

SEQ ID NO: 980239 - RNA, 19 nt, Homo sapiens
  misc_RNA (1)...(19): siRNA sense strand
gauugugggaguucaggaa

SEQ ID NO: 980240 - RNA, 19 nt, Homo sapiens
  misc_RNA (1)...(19): siRNA sense strand
gaccugacuugugacucaa

SEQ ID NO: 980241 - RNA, 19 nt, Homo sapiens
  misc_RNA (1)...(19): siRNA sense strand
ugaacccucucaggcagaa

SEQ ID NO: 980242 - RNA, 19 nt, Homo sapiens
  misc_RNA (1)...(19): siRNA sense strand
uuuauuggcggcugcagua

SEQ ID NO: 980243 - RNA, 19 nt, Homo sapiens
  misc_RNA (1)...(19): siRNA sense strand
gcagaaacggcgguagaag

SEQ ID NO: 980244 - RNA, 19 nt, Homo sapiens
  misc_RNA (1)...(19): siRNA sense strand
ggcagaaacggcgguagaa

SEQ ID NO: 980245 - RNA, 19 nt, Homo sapiens
  misc_RNA (1)...(19): siRNA sense strand
gcaaggaagaaauauaacc

SEQ ID NO: 980246 - RNA, 19 nt, Homo sapiens
  misc_RNA (1)...(19): siRNA sense strand
aagaugguguagcggauuc

SEQ ID NO: 980247 - RNA, 19 nt, Homo sapiens
  misc_RNA (1)...(19): siRNA sense strand
ccaguuguagcucauuaug

SEQ ID NO: 980248 - RNA, 19 nt, Homo sapiens
  misc_RNA (1)...(19): siRNA sense strand
uagcggauucuacaguuau

SEQ ID NO: 980249 - RNA, 19 nt, Homo sapiens
  misc_RNA (1)...(19): siRNA sense strand
aacaagagacagccaagga

SEQ ID NO: 980250 - RNA, 19 nt, Homo sapiens
  misc_RNA (1)...(19): siRNA sense strand
gaccagcgggcuucuagag

SEQ ID NO: 980251 - RNA, 19 nt, Homo sapiens
  misc_RNA (1)...(19): siRNA sense strand
uggccgaguuuaugagagu

SEQ ID NO: 980252 - RNA, 19 nt, Homo sapiens
  misc_RNA (1)...(19): siRNA sense strand
agcagaaguuguugaccuu

SEQ ID NO: 980253 - RNA, 19 nt, Homo sapiens
  misc_RNA (1)...(19): siRNA sense strand
ccagcagacuugggcuuca

SEQ ID NO: 980254 - RNA, 19 nt, Homo sapiens
  misc_RNA (1)...(19): siRNA sense strand
cauugcgucuucagauagu

SEQ ID NO: 980255 - RNA, 19 nt, Homo sapiens
  misc_RNA (1)...(19): siRNA sense strand
gugauagugaccugacuug

SEQ ID NO: 980256 - RNA, 19 nt, Homo sapiens
  misc_RNA (1)...(19): siRNA sense strand
caaaagcaucugaacaaga

SEQ ID NO: 980257 - RNA, 19 nt, Homo sapiens
  misc_RNA (1)...(19): siRNA sense strand
agacagccaaggaggaaga

SEQ ID NO: 980258 - RNA, 19 nt, Homo sapiens
  misc_RNA (1)...(19): siRNA sense strand
gaaucucaaguucagaaag

SEQ ID NO: 980259 - RNA, 19 nt, Homo sapiens
  misc_RNA (1)...(19): siRNA sense strand
uuguugaccuuaccuugga

SEQ ID NO: 980260 - RNA, 19 nt, Homo sapiens
  misc_RNA (1)...(19): siRNA sense strand
guagagauugugggaguuc

SEQ ID NO: 980261 - RNA, 19 nt, Homo sapiens
  misc_RNA (1)...(19): siRNA sense strand
caaggaagaaauauaaccu

SEQ ID NO: 980262 - RNA, 19 nt, Homo sapiens
  misc_RNA (1)...(19): siRNA sense strand
ccagugauaaacagaaugg

SEQ ID NO: 980263 - RNA, 19 nt, Homo sapiens
  misc_RNA (1)...(19): siRNA sense strand
gggcagugguuacuuguua

SEQ ID NO: 980264 - RNA, 19 nt, Homo sapiens
  misc_RNA (1)...(19): siRNA sense strand
caagucauuucccuuauuu

SEQ ID NO: 980265 - RNA, 19 nt, Homo sapiens
  misc_RNA (1)...(19): siRNA sense strand
gacaagcacucauuaagga

SEQ ID NO: 980266 - RNA, 19 nt, Homo sapiens
  misc_RNA (1)...(19): siRNA sense strand
gcaagucauuucccuuauu

SEQ ID NO: 980267 - RNA, 19 nt, Homo sapiens
  misc_RNA (1)...(19): siRNA sense strand
uaugguggcuguauuauga

SEQ ID NO: 980268 - RNA, 19 nt, Homo sapiens
  misc_RNA (1)...(19): siRNA sense strand
gggaagagauacaauccuu

SEQ ID NO: 980269 - RNA, 19 nt, Homo sapiens
  misc_RNA (1)...(19): siRNA sense strand
gcauagaauuggacacaga

SEQ ID NO: 980270 - RNA, 19 nt, Homo sapiens
  misc_RNA (1)...(19): siRNA sense strand
acaaauaccugcuccaucu

SEQ ID NO: 980271 - RNA, 19 nt, Homo sapiens
  misc_RNA (1)...(19): siRNA sense strand
caacauguguggcaagaag

SEQ ID NO: 980272 - RNA, 19 nt, Homo sapiens
  misc_RNA (1)...(19): siRNA sense strand
cgagaaucauugucaugua

SEQ ID NO: 980273 - RNA, 19 nt, Homo sapiens
  misc_RNA (1)...(19): siRNA sense strand
gcaggacaagcacucauua

SEQ ID NO: 980274 - RNA, 19 nt, Homo sapiens
  misc_RNA (1)...(19): siRNA sense strand
caucuggacuagugaauuc

SEQ ID NO: 980275 - RNA, 19 nt, Homo sapiens
  misc_RNA (1)...(19): siRNA sense strand
gagaaucauugucauguac

SEQ ID NO: 980276 - RNA, 19 nt, Homo sapiens
  misc_RNA (1)...(19): siRNA sense strand
gcggccaaguggaauauaa

SEQ ID NO: 980277 - RNA, 19 nt, Homo sapiens
  misc_RNA (1)...(19): siRNA sense strand
aaugauggaucgucagaaa

SEQ ID NO: 980278 - RNA, 19 nt, Homo sapiens
  misc_RNA (1)...(19): siRNA sense strand
gcauuagccuugucuuugg

SEQ ID NO: 980279 - RNA, 19 nt, Homo sapiens
  misc_RNA (1)...(19): siRNA sense strand
ucaaggaaccauugugaaa

SEQ ID NO: 980280 - RNA, 19 nt, Homo sapiens
  misc_RNA (1)...(19): siRNA sense strand
cagaaugcauauacuacaa

SEQ ID NO: 980281 - RNA, 19 nt, Homo sapiens
  misc_RNA (1)...(19): siRNA sense strand
uaacugcuuuggagacuuc

SEQ ID NO: 980282 - RNA, 19 nt, Homo sapiens
  misc_RNA (1)...(19): siRNA sense strand
gcaacaaauuaaacaaugc

SEQ ID NO: 980283 - RNA, 19 nt, Homo sapiens
  misc_RNA (1)...(19): siRNA sense strand
ggcaggacaugacccuaaa

SEQ ID NO: 980284 - RNA, 19 nt, Homo sapiens
  misc_RNA (1)...(19): siRNA sense strand
ggacaagcacucauuaagg

SEQ ID NO: 980285 - RNA, 19 nt, Homo sapiens
  misc_RNA (1)...(19): siRNA sense strand
gaauuucugaguuucguaa

SEQ ID NO: 980286 - RNA, 19 nt, Homo sapiens
  misc_RNA (1)...(19): siRNA sense strand
ggcagucccucuguuauug

SEQ ID NO: 980287 - RNA, 19 nt, Homo sapiens
  misc_RNA (1)...(19): siRNA sense strand
ccaacgaccucagcauaga

SEQ ID NO: 980288 - RNA, 19 nt, Homo sapiens
  misc_RNA (1)...(19): siRNA sense strand
aagcaagucauuucccuua

SEQ ID NO: 980289 - RNA, 19 nt, Homo sapiens
  misc_RNA (1)...(19): siRNA sense strand
ugacagcuuuggcaacaug

SEQ ID NO: 980290 - RNA, 19 nt, Homo sapiens
  misc_RNA (1)...(19): siRNA sense strand
ggccucaucuggacuagug

SEQ ID NO: 980291 - RNA, 19 nt, Homo sapiens
  misc_RNA (1)...(19): siRNA sense strand
gccaugauguuuaccuuca

SEQ ID NO: 980292 - RNA, 19 nt, Homo sapiens
  misc_RNA (1)...(19): siRNA sense strand
gaacuccaggccauuguga

SEQ ID NO: 980293 - RNA, 19 nt, Homo sapiens
  misc_RNA (1)...(19): siRNA sense strand
gggcaggacaugacccuaa

SEQ ID NO: 980294 - RNA, 19 nt, Homo sapiens
  misc_RNA (1)...(19): siRNA sense strand
ggaaugaggagggaacaga

SEQ ID NO: 980295 - RNA, 19 nt, Homo sapiens
  misc_RNA (1)...(19): siRNA sense strand
uaacuacaaucgggcauuc

SEQ ID NO: 980296 - RNA, 19 nt, Homo sapiens
  misc_RNA (1)...(19): siRNA sense strand
caucaaggaaccauuguga

SEQ ID NO: 980297 - RNA, 19 nt, Homo sapiens
  misc_RNA (1)...(19): siRNA sense strand
gguccuuccuguguguuua

SEQ ID NO: 980298 - RNA, 19 nt, Homo sapiens
  misc_RNA (1)...(19): siRNA sense strand
uaaccgaugugucccucaa

SEQ ID NO: 980299 - RNA, 19 nt, Homo sapiens
  misc_RNA (1)...(19): siRNA sense strand
gaaugaggagggaacagaa

SEQ ID NO: 980300 - RNA, 19 nt, Homo sapiens
  misc_RNA (1)...(19): siRNA sense strand
gcauauacuacaacugcua

SEQ ID NO: 980301 - RNA, 19 nt, Homo sapiens
  misc_RNA (1)...(19): siRNA sense strand
ggaaucaugucgggaagag

SEQ ID NO: 980302 - RNA, 19 nt, Homo sapiens
  misc_RNA (1)...(19): siRNA sense strand
gggcagucccucuguuauu

SEQ ID NO: 980303 - RNA, 19 nt, Homo sapiens
  misc_RNA (1)...(19): siRNA sense strand
ccgcauggcccucugugua

SEQ ID NO: 980304 - RNA, 19 nt, Homo sapiens
  misc_RNA (1)...(19): siRNA sense strand
cacguguucuuuaugaauu

SEQ ID NO: 980305 - RNA, 19 nt, Homo sapiens
  misc_RNA (1)...(19): siRNA sense strand
gugguuacuuguuauuuca

SEQ ID NO: 980306 - RNA, 19 nt, Homo sapiens
  misc_RNA (1)...(19): siRNA sense strand
gaaugcauauacuacaacu

SEQ ID NO: 980307 - RNA, 19 nt, Homo sapiens
  misc_RNA (1)...(19): siRNA sense strand
caaaugauggaucgucaga

SEQ ID NO: 980308 - RNA, 19 nt, Homo sapiens
  misc_RNA (1)...(19): siRNA sense strand
uaugacagcuuuggcaaca

SEQ ID NO: 980309 - RNA, 19 nt, Homo sapiens
  misc_RNA (1)...(19): siRNA sense strand
caaccagaaugcauauacu

SEQ ID NO: 980310 - RNA, 19 nt, Homo sapiens
  misc_RNA (1)...(19): siRNA sense strand
gauguuuaccuucagauuc

SEQ ID NO: 980311 - RNA, 19 nt, Homo sapiens
  misc_RNA (1)...(19): siRNA sense strand
gaucuggaaacaaaugaug

SEQ ID NO: 980312 - RNA, 19 nt, Homo sapiens
  misc_RNA (1)...(19): siRNA sense strand
gcuauuaaugggacagauu

SEQ ID NO: 980313 - RNA, 19 nt, Homo sapiens
  misc_RNA (1)...(19): siRNA sense strand
ggucguaccauuuaauugg

SEQ ID NO: 980314 - RNA, 19 nt, Homo sapiens
  misc_RNA (1)...(19): siRNA sense strand
gacauuugccauccucauu

SEQ ID NO: 980315 - RNA, 19 nt, Homo sapiens
  misc_RNA (1)...(19): siRNA sense strand
gugcugcucgucuugauuu

SEQ ID NO: 980316 - RNA, 19 nt, Homo sapiens
  misc_RNA (1)...(19): siRNA sense strand
uaccaacgaccucagcaua

SEQ ID NO: 980317 - RNA, 19 nt, Homo sapiens
  misc_RNA (1)...(19): siRNA sense strand
uccaggccauugugagaua

SEQ ID NO: 980318 - RNA, 19 nt, Homo sapiens
  misc_RNA (1)...(19): siRNA sense strand
uuggaggacucauggcuuu

SEQ ID NO: 980319 - RNA, 19 nt, Homo sapiens
  misc_RNA (1)...(19): siRNA sense strand
gugguguguuucacuguuu

SEQ ID NO: 980320 - RNA, 19 nt, Homo sapiens
  misc_RNA (1)...(19): siRNA sense strand
gagguccaguucuuugcaa

SEQ ID NO: 980321 - RNA, 19 nt, Homo sapiens
  misc_RNA (1)...(19): siRNA sense strand
cuacaacugcuauuaaugg

SEQ ID NO: 980322 - RNA, 19 nt, Homo sapiens
  misc_RNA (1)...(19): siRNA sense strand
gcaaaacgcacugaaagaa

SEQ ID NO: 980323 - RNA, 19 nt, Homo sapiens
  misc_RNA (1)...(19): siRNA sense strand
gaaucauugucauguacau

SEQ ID NO: 980324 - RNA, 19 nt, Homo sapiens
  misc_RNA (1)...(19): siRNA sense strand
gcagugguuacuuguuauu

SEQ ID NO: 980325 - RNA, 19 nt, Homo sapiens
  misc_RNA (1)...(19): siRNA sense strand
gggcacagcaggacaagca

SEQ ID NO: 980326 - RNA, 19 nt, Homo sapiens
  misc_RNA (1)...(19): siRNA sense strand
ggcaacauguguggcaaga

SEQ ID NO: 980327 - RNA, 19 nt, Homo sapiens
  misc_RNA (1)...(19): siRNA sense strand
ccauuuaauuggccucauc

SEQ ID NO: 980328 - RNA, 19 nt, Homo sapiens
  misc_RNA (1)...(19): siRNA sense strand
caugauguuuaccuucaga

SEQ ID NO: 980329 - RNA, 19 nt, Homo sapiens
  misc_RNA (1)...(19): siRNA sense strand
ggagcaacaaauuaaacaa

SEQ ID NO: 980330 - RNA, 19 nt, Homo sapiens
  misc_RNA (1)...(19): siRNA sense strand
uccaagaacucaagucacu

SEQ ID NO: 980331 - RNA, 19 nt, Homo sapiens
  misc_RNA (1)...(19): siRNA sense strand
guggcuguauuaugacuau

SEQ ID NO: 980332 - RNA, 19 nt, Homo sapiens
  misc_RNA (1)...(19): siRNA sense strand
caggacaagcacucauuaa

SEQ ID NO: 980333 - RNA, 19 nt, Homo sapiens
  misc_RNA (1)...(19): siRNA sense strand
gugggcagucccucuguua

SEQ ID NO: 980334 - RNA, 19 nt, Homo sapiens
  misc_RNA (1)...(19): siRNA sense strand
caacgaccucagcauagaa

SEQ ID NO: 980335 - RNA, 19 nt, Homo sapiens
  misc_RNA (1)...(19): siRNA sense strand
gagcugcccagguuaugga

SEQ ID NO: 980336 - RNA, 19 nt, Homo sapiens
  misc_RNA (1)...(19): siRNA sense strand
cuauuaaugggacagauuu

SEQ ID NO: 980337 - RNA, 19 nt, Homo sapiens
  misc_RNA (1)...(19): siRNA sense strand
ggcagugguuacuuguuau

SEQ ID NO: 980338 - RNA, 19 nt, Homo sapiens
  misc_RNA (1)...(19): siRNA sense strand
gaaagaacagcagcauggu

SEQ ID NO: 980339 - RNA, 19 nt, Homo sapiens
  misc_RNA (1)...(19): siRNA sense strand
cgaccucagcauagaauug

SEQ ID NO: 980340 - RNA, 19 nt, Homo sapiens
  misc_RNA (1)...(19): siRNA sense strand
gcauggcccucuguguauc

SEQ ID NO: 980341 - RNA, 19 nt, Homo sapiens
  misc_RNA (1)...(19): siRNA sense strand
gcacuuuuccuguguuuug

SEQ ID NO: 980342 - RNA, 19 nt, Homo sapiens
  misc_RNA (1)...(19): siRNA sense strand
guauccaacugcccugaag

SEQ ID NO: 980343 - RNA, 19 nt, Homo sapiens
  misc_RNA (1)...(19): siRNA sense strand
cuuuggagacuucauaauu

SEQ ID NO: 980344 - RNA, 19 nt, Homo sapiens
  misc_RNA (1)...(19): siRNA sense strand
caguugagcuuuuccaaau

SEQ ID NO: 980345 - RNA, 19 nt, Homo sapiens
  misc_RNA (1)...(19): siRNA sense strand
ucuccauucucuucuucua

SEQ ID NO: 980346 - RNA, 19 nt, Homo sapiens
  misc_RNA (1)...(19): siRNA sense strand
gcaaaagaugcauucaaaa

SEQ ID NO: 980347 - RNA, 19 nt, Homo sapiens
  misc_RNA (1)...(19): siRNA sense strand
acagcagcauggugcauug

SEQ ID NO: 980348 - RNA, 19 nt, Homo sapiens
  misc_RNA (1)...(19): siRNA sense strand
gaucaucccauccuuucgu

SEQ ID NO: 980349 - RNA, 19 nt, Homo sapiens
  misc_RNA (1)...(19): siRNA sense strand
agcaaaagaugcauucaaa

SEQ ID NO: 980350 - RNA, 19 nt, Homo sapiens
  misc_RNA (1)...(19): siRNA sense strand
caaggaaccauugugaaag

SEQ ID NO: 980351 - RNA, 19 nt, Homo sapiens
  misc_RNA (1)...(19): siRNA sense strand
cauagaauuggacacagaa

SEQ ID NO: 980352 - RNA, 19 nt, Homo sapiens
  misc_RNA (1)...(19): siRNA sense strand
caagggcacagcaggacaa

SEQ ID NO: 980353 - RNA, 19 nt, Homo sapiens
  misc_RNA (1)...(19): siRNA sense strand
ccagaaugcauauacuaca

SEQ ID NO: 980354 - RNA, 19 nt, Homo sapiens
  misc_RNA (1)...(19): siRNA sense strand
acauuugccauccucauuu

SEQ ID NO: 980355 - RNA, 19 nt, Homo sapiens
  misc_RNA (1)...(19): siRNA sense strand
guccaguucuuugcaaaca

SEQ ID NO: 980356 - RNA, 19 nt, Homo sapiens
  misc_RNA (1)...(19): siRNA sense strand
aaggaaccauugugaaagg

SEQ ID NO: 980357 - RNA, 19 nt, Homo sapiens
  misc_RNA (1)...(19): siRNA sense strand
gcagcuugacucccuggaa

SEQ ID NO: 980358 - RNA, 19 nt, Homo sapiens
  misc_RNA (1)...(19): siRNA sense strand
cagcauagaauuggacaca

SEQ ID NO: 980359 - RNA, 19 nt, Homo sapiens
  misc_RNA (1)...(19): siRNA sense strand
ucaaagguacgcagcucaa

SEQ ID NO: 980360 - RNA, 19 nt, Homo sapiens
  misc_RNA (1)...(19): siRNA sense strand
caagcacucauuaaggaau

SEQ ID NO: 980361 - RNA, 19 nt, Homo sapiens
  misc_RNA (1)...(19): siRNA sense strand
gaggacucauggcuuuuaa

SEQ ID NO: 980362 - RNA, 19 nt, Homo sapiens
  misc_RNA (1)...(19): siRNA sense strand
ggaggacucauggcuuuua

SEQ ID NO: 980363 - RNA, 19 nt, Homo sapiens
  misc_RNA (1)...(19): siRNA sense strand
acucauagcuguugucuuu

SEQ ID NO: 980364 - RNA, 19 nt, Homo sapiens
  misc_RNA (1)...(19): siRNA sense strand
gaacacauacaaaguagaa

SEQ ID NO: 980365 - RNA, 19 nt, Homo sapiens
  misc_RNA (1)...(19): siRNA sense strand
gacauuggcuuccauuaug

SEQ ID NO: 980366 - RNA, 19 nt, Homo sapiens
  misc_RNA (1)...(19): siRNA sense strand
gaugaacacauacaaagua

SEQ ID NO: 980367 - RNA, 19 nt, Homo sapiens
  misc_RNA (1)...(19): siRNA sense strand
gagaagugaugcuaacugu

SEQ ID NO: 980368 - RNA, 19 nt, Homo sapiens
  misc_RNA (1)...(19): siRNA sense strand
gaagugaugcuaacuguuc

SEQ ID NO: 980369 - RNA, 19 nt, Homo sapiens
  misc_RNA (1)...(19): siRNA sense strand
gaagguaguugcuggaaac

SEQ ID NO: 980370 - RNA, 19 nt, Homo sapiens
  misc_RNA (1)...(19): siRNA sense strand
ggagaacuaugacgugcuu

SEQ ID NO: 980371 - RNA, 19 nt, Homo sapiens
  misc_RNA (1)...(19): siRNA sense strand
aagcagagcucauugaagu

SEQ ID NO: 980372 - RNA, 19 nt, Homo sapiens
  misc_RNA (1)...(19): siRNA sense strand
uaauuggccugaagugaaa

SEQ ID NO: 980373 - RNA, 19 nt, Homo sapiens
  misc_RNA (1)...(19): siRNA sense strand
ggagagagcguuccagaca

SEQ ID NO: 980374 - RNA, 19 nt, Homo sapiens
  misc_RNA (1)...(19): siRNA sense strand
guaauuggccugaagugaa

SEQ ID NO: 980375 - RNA, 19 nt, Homo sapiens
  misc_RNA (1)...(19): siRNA sense strand
gcagagcucauugaaguuu

SEQ ID NO: 980376 - RNA, 19 nt, Homo sapiens
  misc_RNA (1)...(19): siRNA sense strand
uuagcgaucuuucagugua

SEQ ID NO: 980377 - RNA, 19 nt, Homo sapiens
  misc_RNA (1)...(19): siRNA sense strand
ccacuggcuggacaaauua

SEQ ID NO: 980378 - RNA, 19 nt, Homo sapiens
  misc_RNA (1)...(19): siRNA sense strand
gagaugaacacauacaaag

SEQ ID NO: 980379 - RNA, 19 nt, Homo sapiens
  misc_RNA (1)...(19): siRNA sense strand
gcagcauuauccucuguau

SEQ ID NO: 980380 - RNA, 19 nt, Homo sapiens
  misc_RNA (1)...(19): siRNA sense strand
gaagaguucauugcuguug

SEQ ID NO: 980381 - RNA, 19 nt, Homo sapiens
  misc_RNA (1)...(19): siRNA sense strand
cauugaaguuucucacaga

SEQ ID NO: 980382 - RNA, 19 nt, Homo sapiens
  misc_RNA (1)...(19): siRNA sense strand
gguaguugcuggaaaccau

SEQ ID NO: 980383 - RNA, 19 nt, Homo sapiens
  misc_RNA (1)...(19): siRNA sense strand
gaaagcguaagacaagaug

SEQ ID NO: 980384 - RNA, 19 nt, Homo sapiens
  misc_RNA (1)...(19): siRNA sense strand
gaacuaugacgugcuuuca

SEQ ID NO: 980385 - RNA, 19 nt, Homo sapiens
  misc_RNA (1)...(19): siRNA sense strand
caagucauguacagcugaa

SEQ ID NO: 980386 - RNA, 19 nt, Homo sapiens
  misc_RNA (1)...(19): siRNA sense strand
gcauuaacuuugugauggu

SEQ ID NO: 980387 - RNA, 19 nt, Homo sapiens
  misc_RNA (1)...(19): siRNA sense strand
ugacauuggcuuccauuau

SEQ ID NO: 980388 - RNA, 19 nt, Homo sapiens
  misc_RNA (1)...(19): siRNA sense strand
cauuuaaggagaacuauga

SEQ ID NO: 980389 - RNA, 19 nt, Homo sapiens
  misc_RNA (1)...(19): siRNA sense strand
gcaucacgcccacagacua

SEQ ID NO: 980390 - RNA, 19 nt, Homo sapiens
  misc_RNA (1)...(19): siRNA sense strand
ugaagguaguugcuggaaa

SEQ ID NO: 980391 - RNA, 19 nt, Homo sapiens
  misc_RNA (1)...(19): siRNA sense strand
uguggcaucugcucugaaa

SEQ ID NO: 980392 - RNA, 19 nt, Homo sapiens
  misc_RNA (1)...(19): siRNA sense strand
gagcucagcgucccaucuu

SEQ ID NO: 980393 - RNA, 19 nt, Homo sapiens
  misc_RNA (1)...(19): siRNA sense strand
ggaaagcguaagacaagau

SEQ ID NO: 980394 - RNA, 19 nt, Homo sapiens
  misc_RNA (1)...(19): siRNA sense strand
uaaagaggaagaguucauu

SEQ ID NO: 980395 - RNA, 19 nt, Homo sapiens
  misc_RNA (1)...(19): siRNA sense strand
uagcgaucuuucaguguaa

SEQ ID NO: 980396 - RNA, 19 nt, Homo sapiens
  misc_RNA (1)...(19): siRNA sense strand
ucauugcuguugaaacuca

SEQ ID NO: 980397 - RNA, 19 nt, Homo sapiens
  misc_RNA (1)...(19): siRNA sense strand
ggagaagugaugcuaacug

SEQ ID NO: 980398 - RNA, 19 nt, Homo sapiens
  misc_RNA (1)...(19): siRNA sense strand
ugagaugaacacauacaaa

SEQ ID NO: 980399 - RNA, 19 nt, Homo sapiens
  misc_RNA (1)...(19): siRNA sense strand
acauuggcuuccauuauga

SEQ ID NO: 980400 - RNA, 19 nt, Homo sapiens
  misc_RNA (1)...(19): siRNA sense strand
gaagggaauggcagaugga

SEQ ID NO: 980401 - RNA, 19 nt, Homo sapiens
  misc_RNA (1)...(19): siRNA sense strand
uggcuuccauuaugagaug

SEQ ID NO: 980402 - RNA, 19 nt, Homo sapiens
  misc_RNA (1)...(19): siRNA sense strand
cauuaaagaggaagaguuc

SEQ ID NO: 980403 - RNA, 19 nt, Homo sapiens
  misc_RNA (1)...(19): siRNA sense strand
gcuguggcaucugcucuga

SEQ ID NO: 980404 - RNA, 19 nt, Homo sapiens
  misc_RNA (1)...(19): siRNA sense strand
ucaguuggaggaacagaaa

SEQ ID NO: 980405 - RNA, 19 nt, Homo sapiens
  misc_RNA (1)...(19): siRNA sense strand
cagaagcagagcucauuga

SEQ ID NO: 980406 - RNA, 19 nt, Homo sapiens
  misc_RNA (1)...(19): siRNA sense strand
gauguggagcgguuucaga

SEQ ID NO: 980407 - RNA, 19 nt, Homo sapiens
  misc_RNA (1)...(19): siRNA sense strand
gaaguuucucacagacuga

SEQ ID NO: 980408 - RNA, 19 nt, Homo sapiens
  misc_RNA (1)...(19): siRNA sense strand
gaagcagagcucauugaag

SEQ ID NO: 980409 - RNA, 19 nt, Homo sapiens
  misc_RNA (1)...(19): siRNA sense strand
ugucuuugcugugcuucua

SEQ ID NO: 980410 - RNA, 19 nt, Homo sapiens
  misc_RNA (1)...(19): siRNA sense strand
gacagaauuuucauccauu

SEQ ID NO: 980411 - RNA, 19 nt, Homo sapiens
  misc_RNA (1)...(19): siRNA sense strand
gcuggaaaccaugacauug

SEQ ID NO: 980412 - RNA, 19 nt, Homo sapiens
  misc_RNA (1)...(19): siRNA sense strand
aguagaacgcuuugagaaa

SEQ ID NO: 980413 - RNA, 19 nt, Homo sapiens
  misc_RNA (1)...(19): siRNA sense strand
guuugaacuugcucggaaa

SEQ ID NO: 980414 - RNA, 19 nt, Homo sapiens
  misc_RNA (1)...(19): siRNA sense strand
gcucagcgucccaucuuuc

SEQ ID NO: 980415 - RNA, 19 nt, Homo sapiens
  misc_RNA (1)...(19): siRNA sense strand
ggaagaguucauugcuguu

SEQ ID NO: 980416 - RNA, 19 nt, Homo sapiens
  misc_RNA (1)...(19): siRNA sense strand
cacagccucugauggugaa

SEQ ID NO: 980417 - RNA, 19 nt, Homo sapiens
  misc_RNA (1)...(19): siRNA sense strand
agaagcagagcucauugaa

SEQ ID NO: 980418 - RNA, 19 nt, Homo sapiens
  misc_RNA (1)...(19): siRNA sense strand
aagaguucauugcuguuga

SEQ ID NO: 980419 - RNA, 19 nt, Homo sapiens
  misc_RNA (1)...(19): siRNA sense strand
aaagaggaagaguucauug

SEQ ID NO: 980420 - RNA, 19 nt, Homo sapiens
  misc_RNA (1)...(19): siRNA sense strand
ucacgggaggcaucacaaa

SEQ ID NO: 980421 - RNA, 19 nt, Homo sapiens
  misc_RNA (1)...(19): siRNA sense strand
ccauuaaagaggaagaguu

SEQ ID NO: 980422 - RNA, 19 nt, Homo sapiens
  misc_RNA (1)...(19): siRNA sense strand
ggguuuggaagacagaauu

SEQ ID NO: 980423 - RNA, 19 nt, Homo sapiens
  misc_RNA (1)...(19): siRNA sense strand
gcucggaaagcguaagaca

SEQ ID NO: 980424 - RNA, 19 nt, Homo sapiens
  misc_RNA (1)...(19): siRNA sense strand
ucauagcuguugucuuugc

SEQ ID NO: 980425 - RNA, 19 nt, Homo sapiens
  misc_RNA (1)...(19): siRNA sense strand
gacaaauuacgaagggaau

SEQ ID NO: 980426 - RNA, 19 nt, Homo sapiens
  misc_RNA (1)...(19): siRNA sense strand
ucggaaagcguaagacaag

SEQ ID NO: 980427 - RNA, 19 nt, Homo sapiens
  misc_RNA (1)...(19): siRNA sense strand
aaguagaacgcuuugagaa

SEQ ID NO: 980428 - RNA, 19 nt, Homo sapiens
  misc_RNA (1)...(19): siRNA sense strand
ggggauaucuuugaugaag

SEQ ID NO: 980429 - RNA, 19 nt, Homo sapiens
  misc_RNA (1)...(19): siRNA sense strand
cggaaagcguaagacaaga

SEQ ID NO: 980430 - RNA, 19 nt, Homo sapiens
  misc_RNA (1)...(19): siRNA sense strand
acuacacccucuccaagug

SEQ ID NO: 980431 - RNA, 19 nt, Homo sapiens
  misc_RNA (1)...(19): siRNA sense strand
ucuauuacuuagcgaucuu

SEQ ID NO: 980432 - RNA, 19 nt, Homo sapiens
  misc_RNA (1)...(19): siRNA sense strand
uaucggagaagugaugcua

SEQ ID NO: 980433 - RNA, 19 nt, Homo sapiens
  misc_RNA (1)...(19): siRNA sense strand
uauccucuguaucggagaa

SEQ ID NO: 980434 - RNA, 19 nt, Homo sapiens
  misc_RNA (1)...(19): siRNA sense strand
gguuuggaagacagaauuu

SEQ ID NO: 980435 - RNA, 19 nt, Homo sapiens
  misc_RNA (1)...(19): siRNA sense strand
guacagcugaagguaguug

SEQ ID NO: 980436 - RNA, 19 nt, Homo sapiens
  misc_RNA (1)...(19): siRNA sense strand
caaauuacgaagggaaugg

SEQ ID NO: 980437 - RNA, 19 nt, Homo sapiens
  misc_RNA (1)...(19): siRNA sense strand
gaaacucauagcuguuguc

SEQ ID NO: 980438 - RNA, 19 nt, Homo sapiens
  misc_RNA (1)...(19): siRNA sense strand
ccucacacucacucacuuu

SEQ ID NO: 980439 - RNA, 19 nt, Homo sapiens
  misc_RNA (1)...(19): siRNA sense strand
ugaaacucauagcuguugu

SEQ ID NO: 980440 - RNA, 19 nt, Homo sapiens
  misc_RNA (1)...(19): siRNA sense strand
aacagaagcagagcucauu

SEQ ID NO: 980441 - RNA, 19 nt, Homo sapiens
  misc_RNA (1)...(19): siRNA sense strand
gacuacacccucuccaagu

SEQ ID NO: 980442 - RNA, 19 nt, Homo sapiens
  misc_RNA (1)...(19): siRNA sense strand
cagagcucauugaaguuuc

SEQ ID NO: 980443 - RNA, 19 nt, Homo sapiens
  misc_RNA (1)...(19): siRNA sense strand
aaagugaucuggauaguaa

SEQ ID NO: 980444 - RNA, 19 nt, Homo sapiens
  misc_RNA (1)...(19): siRNA sense strand
caccaaagcuuuccuaaug

SEQ ID NO: 980445 - RNA, 19 nt, Homo sapiens
  misc_RNA (1)...(19): siRNA sense strand
ucaagaaguuccacauuug

SEQ ID NO: 980446 - RNA, 19 nt, Homo sapiens
  misc_RNA (1)...(19): siRNA sense strand
ccaaagcuuuccuaaugaa

SEQ ID NO: 980447 - RNA, 19 nt, Homo sapiens
  misc_RNA (1)...(19): siRNA sense strand
caacaugacccgaguauac

SEQ ID NO: 980448 - RNA, 19 nt, Homo sapiens
  misc_RNA (1)...(19): siRNA sense strand
gauaguaaaguucaucuuc

SEQ ID NO: 980449 - RNA, 19 nt, Homo sapiens
  misc_RNA (1)...(19): siRNA sense strand
ggagcgauuuggcaacaug
